United States Patent Application Publication US 2020/0095579 A1 - sequence listing, part 23

SEQ ID NO: 367330 - DNA, 20 bp, Artificial Sequence
  Description of Artificial Sequence: Synthetic oligonucleotide
  Target: LAMA2; (+) strand; PAM type: YTN; PAM sequence: TTT
atttgttcctcttttccccc

SEQ ID NO: 367331 - DNA, 20 bp, Artificial Sequence
  Description of Artificial Sequence: Synthetic oligonucleotide
  Target: LAMA2; (+) strand; PAM type: YTN; PAM sequence: TTA
tttgttcctcttttccccct

SEQ ID NO: 367332 - DNA, 20 bp, Artificial Sequence
  Description of Artificial Sequence: Synthetic oligonucleotide
  Target: LAMA2; (+) strand; PAM type: YTN; PAM sequence: TTT
gttcctcttttcccccttcc

SEQ ID NO: 367333 - DNA, 20 bp, Artificial Sequence
  Description of Artificial Sequence: Synthetic oligonucleotide
  Target: LAMA2; (+) strand; PAM type: YTN; PAM sequence: TTG
ttcctcttttcccccttccc

SEQ ID NO: 367334 - DNA, 20 bp, Artificial Sequence
  Description of Artificial Sequence: Synthetic oligonucleotide
  Target: LAMA2; (+) strand; PAM type: YTN; PAM sequence: TTC
ctcttttcccccttcccacc

SEQ ID NO: 367335 - DNA, 20 bp, Artificial Sequence
  Description of Artificial Sequence: Synthetic oligonucleotide
  Target: LAMA2; (+) strand; PAM type: YTN; PAM sequence: CTC
ttttcccccttcccacctct

SEQ ID NO: 367336 - DNA, 20 bp, Artificial Sequence
  Description of Artificial Sequence: Synthetic oligonucleotide
  Target: LAMA2; (+) strand; PAM type: YTN; PAM sequence: CTT
ttcccccttcccacctctaa

SEQ ID NO: 367337 - DNA, 20 bp, Artificial Sequence
  Description of Artificial Sequence: Synthetic oligonucleotide
  Target: LAMA2; (+) strand; PAM type: YTN; PAM sequence: TTT
tcccccttcccacctctaat

SEQ ID NO: 367338 - DNA, 20 bp, Artificial Sequence
  Description of Artificial Sequence: Synthetic oligonucleotide
  Target: LAMA2; (+) strand; PAM type: YTN; PAM sequence: TTT
cccccttcccacctctaatt

SEQ ID NO: 367339 - DNA, 20 bp, Artificial Sequence
  Description of Artificial Sequence: Synthetic oligonucleotide
  Target: LAMA2; (+) strand; PAM type: YTN; PAM sequence: TTC
ccccttcccacctctaattc

SEQ ID NO: 367340 - DNA, 20 bp, Artificial Sequence
  Description of Artificial Sequence: Synthetic oligonucleotide
  Target: LAMA2; (+) strand; PAM type: YTN; PAM sequence: CTT
cccacctctaattcctctct

SEQ ID NO: 367341 - DNA, 20 bp, Artificial Sequence
  Description of Artificial Sequence: Synthetic oligonucleotide
  Target: LAMA2; (+) strand; PAM type: YTN; PAM sequence: TTC
ccacctctaattcctctctc

SEQ ID NO: 367342 - DNA, 20 bp, Artificial Sequence
  Description of Artificial Sequence: Synthetic oligonucleotide
  Target: LAMA2; (+) strand; PAM type: YTN; PAM sequence: CTC
taattcctctctcatagtat

SEQ ID NO: 367343 - DNA, 20 bp, Artificial Sequence
  Description of Artificial Sequence: Synthetic oligonucleotide
  Target: LAMA2; (+) strand; PAM type: YTN; PAM sequence: CTA
attcctctctcatagtattt

SEQ ID NO: 367344 - DNA, 20 bp, Artificial Sequence
  Description of Artificial Sequence: Synthetic oligonucleotide
  Target: LAMA2; (+) strand; PAM type: YTN; PAM sequence: TTC
ctctctcatagtattttagt

SEQ ID NO: 367345 - DNA, 20 bp, Artificial Sequence
  Description of Artificial Sequence: Synthetic oligonucleotide
  Target: LAMA2; (+) strand; PAM type: YTN; PAM sequence: CTC
tctcatagtattttagttta

SEQ ID NO: 367346 - DNA, 20 bp, Artificial Sequence
  Description of Artificial Sequence: Synthetic oligonucleotide
  Target: LAMA2; (+) strand; PAM type: YTN; PAM sequence: CTC
tcatagtattttagtttatg

SEQ ID NO: 367347 - DNA, 20 bp, Artificial Sequence
  Description of Artificial Sequence: Synthetic oligonucleotide
  Target: LAMA2; (+) strand; PAM type: YTN; PAM sequence: CTC
atagtattttagtttatgtc

SEQ ID NO: 367348 - DNA, 20 bp, Artificial Sequence
  Description of Artificial Sequence: Synthetic oligonucleotide
  Target: LAMA2; (+) strand; PAM type: YTN; PAM sequence: TTT
tagtttatgtcagggatccc

SEQ ID NO: 367349 - DNA, 20 bp, Artificial Sequence
  Description of Artificial Sequence: Synthetic oligonucleotide
  Target: LAMA2; (+) strand; PAM type: YTN; PAM sequence: TTT
agtttatgtcagggatcccc

SEQ ID NO: 367350 - DNA, 20 bp, Artificial Sequence
  Description of Artificial Sequence: Synthetic oligonucleotide
  Target: LAMA2; (+) strand; PAM type: YTN; PAM sequence: TTA
gtttatgtcagggatcccca

SEQ ID NO: 367351 - DNA, 20 bp, Artificial Sequence
  Description of Artificial Sequence: Synthetic oligonucleotide
  Target: LAMA2; (+) strand; PAM type: YTN; PAM sequence: TTT
atgtcagggatccccaactc

SEQ ID NO: 367352 - DNA, 20 bp, Artificial Sequence
  Description of Artificial Sequence: Synthetic oligonucleotide
  Target: LAMA2; (+) strand; PAM type: YTN; PAM sequence: TTA
tgtcagggatccccaactcc

SEQ ID NO: 367353 - DNA, 20 bp, Artificial Sequence
  Description of Artificial Sequence: Synthetic oligonucleotide
  Target: LAMA2; (+) strand; PAM type: YTN; PAM sequence: CTC
ccgggctatacaggtctgtg

SEQ ID NO: 367354 - DNA, 20 bp, Artificial Sequence
  Description of Artificial Sequence: Synthetic oligonucleotide
  Target: LAMA2; (+) strand; PAM type: YTN; PAM sequence: CTA
tacaggtctgtggcctgtta

SEQ ID NO: 367355 - DNA, 20 bp, Artificial Sequence
  Description of Artificial Sequence: Synthetic oligonucleotide
  Target: LAMA2; (+) strand; PAM type: YTN; PAM sequence: CTG
tggcctgttaagaattgggc

SEQ ID NO: 367356 - DNA, 20 bp, Artificial Sequence
  Description of Artificial Sequence: Synthetic oligonucleotide
  Target: LAMA2; (+) strand; PAM type: YTN; PAM sequence: CTG
ttaagaattgggcggcacaa

SEQ ID NO: 367357 - DNA, 20 bp, Artificial Sequence
  Description of Artificial Sequence: Synthetic oligonucleotide
  Target: LAMA2; (+) strand; PAM type: YTN; PAM sequence: TTA
agaattgggcggcacaacag

SEQ ID NO: 367358 - DNA, 20 bp, Artificial Sequence
  Description of Artificial Sequence: Synthetic oligonucleotide
  Target: LAMA2; (+) strand; PAM type: YTN; PAM sequence: TTG
ggcggcacaacaggaggtaa

SEQ ID NO: 367359 - DNA, 20 bp, Artificial Sequence
  Description of Artificial Sequence: Synthetic oligonucleotide
  Target: LAMA2; (+) strand; PAM type: YTN; PAM sequence: CTG
cctgagctctaccgcctgtc

SEQ ID NO: 367360 - DNA, 20 bp, Artificial Sequence
  Description of Artificial Sequence: Synthetic oligonucleotide
  Target: LAMA2; (+) strand; PAM type: YTN; PAM sequence: CTG
agctctaccgcctgtcagat

SEQ ID NO: 367361 - DNA, 20 bp, Artificial Sequence
  Description of Artificial Sequence: Synthetic oligonucleotide
  Target: LAMA2; (+) strand; PAM type: YTN; PAM sequence: CTC
taccgcctgtcagatcagcg

SEQ ID NO: 367362 - DNA, 20 bp, Artificial Sequence
  Description of Artificial Sequence: Synthetic oligonucleotide
  Target: LAMA2; (+) strand; PAM type: YTN; PAM sequence: CTA
ccgcctgtcagatcagcggt

SEQ ID NO: 367363 - DNA, 20 bp, Artificial Sequence
  Description of Artificial Sequence: Synthetic oligonucleotide
  Target: LAMA2; (+) strand; PAM type: YTN; PAM sequence: CTG
tcagatcagcggtggtatta

SEQ ID NO: 367364 - DNA, 20 bp, Artificial Sequence
  Description of Artificial Sequence: Synthetic oligonucleotide
  Target: LAMA2; (+) strand; PAM type: YTN; PAM sequence: TTA
gattctcacaggagcaggaa

SEQ ID NO: 367365 - DNA, 20 bp, Artificial Sequence
  Description of Artificial Sequence: Synthetic oligonucleotide
  Target: LAMA2; (+) strand; PAM type: YTN; PAM sequence: TTC
tcacaggagcaggaacctta

SEQ ID NO: 367366 - DNA, 20 bp, Artificial Sequence
  Description of Artificial Sequence: Synthetic oligonucleotide
  Target: LAMA2; (+) strand; PAM type: YTN; PAM sequence: CTC
acaggagcaggaaccttatt

SEQ ID NO: 367367 - DNA, 20 bp, Artificial Sequence
  Description of Artificial Sequence: Synthetic oligonucleotide
  Target: LAMA2; (+) strand; PAM type: YTN; PAM sequence: CTT
attgtgaactgcgcatgcga

SEQ ID NO: 367368 - DNA, 20 bp, Artificial Sequence
  Description of Artificial Sequence: Synthetic oligonucleotide
  Target: LAMA2; (+) strand; PAM type: YTN; PAM sequence: TTA
ttgtgaactgcgcatgcgag

SEQ ID NO: 367369 - DNA, 20 bp, Artificial Sequence
  Description of Artificial Sequence: Synthetic oligonucleotide
  Target: LAMA2; (+) strand; PAM type: YTN; PAM sequence: TTG
tgaactgcgcatgcgaggga

SEQ ID NO: 367370 - DNA, 20 bp, Artificial Sequence
  Description of Artificial Sequence: Synthetic oligonucleotide
  Target: LAMA2; (+) strand; PAM type: YTN; PAM sequence: CTG
cgcatgcgagggatctaggc

SEQ ID NO: 367371 - DNA, 20 bp, Artificial Sequence
  Description of Artificial Sequence: Synthetic oligonucleotide
  Target: LAMA2; (+) strand; PAM type: YTN; PAM sequence: CTA
ggctgcacgctccttatgag

SEQ ID NO: 367372 - DNA, 20 bp, Artificial Sequence
  Description of Artificial Sequence: Synthetic oligonucleotide
  Target: LAMA2; (+) strand; PAM type: YTN; PAM sequence: CTG
cacgctccttatgagaatct

SEQ ID NO: 367373 - DNA, 20 bp, Artificial Sequence
  Description of Artificial Sequence: Synthetic oligonucleotide
  Target: LAMA2; (+) strand; PAM type: YTN; PAM sequence: CTC
cttatgagaatctaatgccc

SEQ ID NO: 367374 - DNA, 20 bp, Artificial Sequence
  Description of Artificial Sequence: Synthetic oligonucleotide
  Target: LAMA2; (+) strand; PAM type: YTN; PAM sequence: CTT
atgagaatctaatgcccgat

SEQ ID NO: 367375 - DNA, 20 bp, Artificial Sequence
  Description of Artificial Sequence: Synthetic oligonucleotide
  Target: LAMA2; (+) strand; PAM type: YTN; PAM sequence: TTA
tgagaatctaatgcccgatg

SEQ ID NO: 367376 - DNA, 20 bp, Artificial Sequence
  Description of Artificial Sequence: Synthetic oligonucleotide
  Target: LAMA2; (+) strand; PAM type: YTN; PAM sequence: CTA
atgcccgatgatctgatgtg

SEQ ID NO: 367377 - DNA, 20 bp, Artificial Sequence
  Description of Artificial Sequence: Synthetic oligonucleotide
  Target: LAMA2; (+) strand; PAM type: YTN; PAM sequence: CTG
atgtggaacagttttatccc

SEQ ID NO: 367378 - DNA, 20 bp, Artificial Sequence
  Description of Artificial Sequence: Synthetic oligonucleotide
  Target: LAMA2; (+) strand; PAM type: YTN; PAM sequence: TTT
tatcccaaaacccctcctct

SEQ ID NO: 367379 - DNA, 20 bp, Artificial Sequence
  Description of Artificial Sequence: Synthetic oligonucleotide
  Target: LAMA2; (+) strand; PAM type: YTN; PAM sequence: TTT
atcccaaaacccctcctctg

SEQ ID NO: 367380 - DNA, 20 bp, Artificial Sequence
  Description of Artificial Sequence: Synthetic oligonucleotide
  Target: LAMA2; (+) strand; PAM type: YTN; PAM sequence: TTA
tcccaaaacccctcctctgt

SEQ ID NO: 367381 - DNA, 20 bp, Artificial Sequence
  Description of Artificial Sequence: Synthetic oligonucleotide
  Target: LAMA2; (+) strand; PAM type: YTN; PAM sequence: CTC
ctctgtgtccatggaaaaat

SEQ ID NO: 367382 - DNA, 20 bp, Artificial Sequence
  Description of Artificial Sequence: Synthetic oligonucleotide
  Target: LAMA2; (+) strand; PAM type: YTN; PAM sequence: CTC
tgtgtccatggaaaaattgt

SEQ ID NO: 367383 - DNA, 20 bp, Artificial Sequence
  Description of Artificial Sequence: Synthetic oligonucleotide
  Target: LAMA2; (+) strand; PAM type: YTN; PAM sequence: CTG
tgtccatggaaaaattgtct

SEQ ID NO: 367384 - DNA, 20 bp, Artificial Sequence
  Description of Artificial Sequence: Synthetic oligonucleotide
  Target: LAMA2; (+) strand; PAM type: YTN; PAM sequence: TTG
tcttccacgaaacccatgcc

SEQ ID NO: 367385 - DNA, 20 bp, Artificial Sequence
  Description of Artificial Sequence: Synthetic oligonucleotide
  Target: LAMA2; (+) strand; PAM type: YTN; PAM sequence: CTT
ccacgaaacccatgcctgat

SEQ ID NO: 367386 - DNA, 20 bp, Artificial Sequence
  Description of Artificial Sequence: Synthetic oligonucleotide
  Target: LAMA2; (+) strand; PAM type: YTN; PAM sequence: TTC
cacgaaacccatgcctgatg

SEQ ID NO: 367387 - DNA, 20 bp, Artificial Sequence
  Description of Artificial Sequence: Synthetic oligonucleotide
  Target: LAMA2; (+) strand; PAM type: YTN; PAM sequence: CTG
atgccaaaaaggtggggagt

SEQ ID NO: 367388 - DNA, 20 bp, Artificial Sequence
  Description of Artificial Sequence: Synthetic oligonucleotide
  Target: LAMA2; (+) strand; PAM type: YTN; PAM sequence: CTG
caagtttccattatatgtga

SEQ ID NO: 367389 - DNA, 20 bp, Artificial Sequence
  Description of Artificial Sequence: Synthetic oligonucleotide
  Target: LAMA2; (+) strand; PAM type: YTN; PAM sequence: TTT
ccattatatgtgactttatt

SEQ ID NO: 367390 - DNA, 20 bp, Artificial Sequence
  Description of Artificial Sequence: Synthetic oligonucleotide
  Target: LAMA2; (+) strand; PAM type: YTN; PAM sequence: TTC
cattatatgtgactttatta

SEQ ID NO: 367391 - DNA, 20 bp, Artificial Sequence
  Description of Artificial Sequence: Synthetic oligonucleotide
  Target: LAMA2; (+) strand; PAM type: YTN; PAM sequence: TTA
tatgtgactttattataaat

SEQ ID NO: 367392 - DNA, 20 bp, Artificial Sequence
  Description of Artificial Sequence: Synthetic oligonucleotide
  Target: LAMA2; (+) strand; PAM type: YTN; PAM sequence: CTT
tattataaataggtatgaaa

SEQ ID NO: 367393 - DNA, 20 bp, Artificial Sequence
  Description of Artificial Sequence: Synthetic oligonucleotide
  Target: LAMA2; (+) strand; PAM type: YTN; PAM sequence: TTT
attataaataggtatgaaaa

SEQ ID NO: 367394 - DNA, 20 bp, Artificial Sequence
  Description of Artificial Sequence: Synthetic oligonucleotide
  Target: LAMA2; (+) strand; PAM type: YTN; PAM sequence: TTA
ttataaataggtatgaaaaa

SEQ ID NO: 367395 - DNA, 20 bp, Artificial Sequence
  Description of Artificial Sequence: Synthetic oligonucleotide
  Target: LAMA2; (+) strand; PAM type: YTN; PAM sequence: TTA
taaataggtatgaaaaacac

SEQ ID NO: 367396 - DNA, 20 bp, Artificial Sequence
  Description of Artificial Sequence: Synthetic oligonucleotide
  Target: LAMA2; (+) strand; PAM type: YTN; PAM sequence: TTA
gcaaatcaagtatcataggt

SEQ ID NO: 367397 - DNA, 20 bp, Artificial Sequence
  Description of Artificial Sequence: Synthetic oligonucleotide
  Target: LAMA2; (+) strand; PAM type: YTN; PAM sequence: CTT
tttctacttcatctatagtc

SEQ ID NO: 367398 - DNA, 20 bp, Artificial Sequence
  Description of Artificial Sequence: Synthetic oligonucleotide
  Target: LAMA2; (+) strand; PAM type: YTN; PAM sequence: TTT
ttctacttcatctatagtcg

SEQ ID NO: 367399 - DNA, 20 bp, Artificial Sequence
  Description of Artificial Sequence: Synthetic oligonucleotide
  Target: LAMA2; (+) strand; PAM type: YTN; PAM sequence: TTT
tctacttcatctatagtcgt

SEQ ID NO: 367400 - DNA, 20 bp, Artificial Sequence
  Description of Artificial Sequence: Synthetic oligonucleotide
  Target: LAMA2; (+) strand; PAM type: YTN; PAM sequence: TTT
ctacttcatctatagtcgta

SEQ ID NO: 367401 - DNA, 20 bp, Artificial Sequence
  Description of Artificial Sequence: Synthetic oligonucleotide
  Target: LAMA2; (+) strand; PAM type: YTN; PAM sequence: TTC
tacttcatctatagtcgtaa

SEQ ID NO: 367402 - DNA, 20 bp, Artificial Sequence
  Description of Artificial Sequence: Synthetic oligonucleotide
  Target: LAMA2; (+) strand; PAM type: YTN; PAM sequence: CTA
cttcatctatagtcgtaaca

SEQ ID NO: 367403 - DNA, 20 bp, Artificial Sequence
  Description of Artificial Sequence: Synthetic oligonucleotide
  Target: LAMA2; (+) strand; PAM type: YTN; PAM sequence: CTT
catctatagtcgtaacagct

SEQ ID NO: 367404 - DNA, 20 bp, Artificial Sequence
  Description of Artificial Sequence: Synthetic oligonucleotide
  Target: LAMA2; (+) strand; PAM type: YTN; PAM sequence: TTC
atctatagtcgtaacagctt

SEQ ID NO: 367405 - DNA, 20 bp, Artificial Sequence
  Description of Artificial Sequence: Synthetic oligonucleotide
  Target: LAMA2; (+) strand; PAM type: YTN; PAM sequence: CTA
tagtcgtaacagctttgaca

SEQ ID NO: 367406 - DNA, 20 bp, Artificial Sequence
  Description of Artificial Sequence: Synthetic oligonucleotide
  Target: LAMA2; (+) strand; PAM type: YTN; PAM sequence: CTT
tgacattcaaattatacaca

SEQ ID NO: 367407 - DNA, 20 bp, Artificial Sequence
  Description of Artificial Sequence: Synthetic oligonucleotide
  Target: LAMA2; (+) strand; PAM type: YTN; PAM sequence: TTT
gacattcaaattatacacac

SEQ ID NO: 367408 - DNA, 20 bp, Artificial Sequence
  Description of Artificial Sequence: Synthetic oligonucleotide
  Target: LAMA2; (+) strand; PAM type: YTN; PAM sequence: TTG
acattcaaattatacacact

SEQ ID NO: 367409 - DNA, 20 bp, Artificial Sequence
  Description of Artificial Sequence: Synthetic oligonucleotide
  Target: LAMA2; (+) strand; PAM type: YTN; PAM sequence: TTC
aaattatacacactttgact

SEQ ID NO: 367410 - DNA, 20 bp, Artificial Sequence
  Description of Artificial Sequence: Synthetic oligonucleotide
  Target: LAMA2; (+) strand; PAM type: YTN; PAM sequence: TTA
tacacactttgactcttttt

SEQ ID NO: 367411 - DNA, 20 bp, Artificial Sequence
  Description of Artificial Sequence: Synthetic oligonucleotide
  Target: LAMA2; (+) strand; PAM type: YTN; PAM sequence: CTT
tgactctttttattgacaaa

SEQ ID NO: 367412 - DNA, 20 bp, Artificial Sequence
  Description of Artificial Sequence: Synthetic oligonucleotide
  Target: LAMA2; (+) strand; PAM type: YTN; PAM sequence: TTT
gactctttttattgacaaaa

SEQ ID NO: 367413 - DNA, 20 bp, Artificial Sequence
  Description of Artificial Sequence: Synthetic oligonucleotide
  Target: LAMA2; (+) strand; PAM type: YTN; PAM sequence: TTG
actctttttattgacaaaat

SEQ ID NO: 367414 - DNA, 20 bp, Artificial Sequence
  Description of Artificial Sequence: Synthetic oligonucleotide
  Target: LAMA2; (+) strand; PAM type: YTN; PAM sequence: CTC
tttttattgacaaaatggaa

SEQ ID NO: 367415 - DNA, 20 bp, Artificial Sequence
  Description of Artificial Sequence: Synthetic oligonucleotide
  Target: LAMA2; (+) strand; PAM type: YTN; PAM sequence: CTT
tttattgacaaaatggaaaa

SEQ ID NO: 367416 - DNA, 20 bp, Artificial Sequence
  Description of Artificial Sequence: Synthetic oligonucleotide
  Target: LAMA2; (+) strand; PAM type: YTN; PAM sequence: TTT
ttattgacaaaatggaaaat

SEQ ID NO: 367417 - DNA, 20 bp, Artificial Sequence
  Description of Artificial Sequence: Synthetic oligonucleotide
  Target: LAMA2; (+) strand; PAM type: YTN; PAM sequence: TTT
tattgacaaaatggaaaatt

SEQ ID NO: 367418 - DNA, 20 bp, Artificial Sequence
  Description of Artificial Sequence: Synthetic oligonucleotide
  Target: LAMA2; (+) strand; PAM type: YTN; PAM sequence: TTT
attgacaaaatggaaaatta

SEQ ID NO: 367419 - DNA, 20 bp, Artificial Sequence
  Description of Artificial Sequence: Synthetic oligonucleotide
  Target: LAMA2; (+) strand; PAM type: YTN; PAM sequence: TTA
ttgacaaaatggaaaattat

SEQ ID NO: 367420 - DNA, 20 bp, Artificial Sequence
  Description of Artificial Sequence: Synthetic oligonucleotide
  Target: LAMA2; (+) strand; PAM type: YTN; PAM sequence: TTG
acaaaatggaaaattatcct

SEQ ID NO: 367421 - DNA, 20 bp, Artificial Sequence
  Description of Artificial Sequence: Synthetic oligonucleotide
  Target: LAMA2; (+) strand; PAM type: YTN; PAM sequence: TTA
tccttaattcaaaatgtatt

SEQ ID NO: 367422 - DNA, 20 bp, Artificial Sequence
  Description of Artificial Sequence: Synthetic oligonucleotide
  Target: LAMA2; (+) strand; PAM type: YTN; PAM sequence: CTT
aattcaaaatgtattttatt

SEQ ID NO: 367423 - DNA, 20 bp, Artificial Sequence
  Description of Artificial Sequence: Synthetic oligonucleotide
  Target: LAMA2; (+) strand; PAM type: YTN; PAM sequence: TTA
attcaaaatgtattttattt

SEQ ID NO: 367424 - DNA, 20 bp, Artificial Sequence
  Description of Artificial Sequence: Synthetic oligonucleotide
  Target: LAMA2; (+) strand; PAM type: YTN; PAM sequence: TTC
aaaatgtattttatttgagc

SEQ ID NO: 367425 - DNA, 20 bp, Artificial Sequence
  Description of Artificial Sequence: Synthetic oligonucleotide
  Target: LAMA2; (+) strand; PAM type: YTN; PAM sequence: TTT
tatttgagcatatgtggtga

SEQ ID NO: 367426 - DNA, 20 bp, Artificial Sequence
  Description of Artificial Sequence: Synthetic oligonucleotide
  Target: LAMA2; (+) strand; PAM type: YTN; PAM sequence: TTT
atttgagcatatgtggtgat

SEQ ID NO: 367427 - DNA, 20 bp, Artificial Sequence
  Description of Artificial Sequence: Synthetic oligonucleotide
  Target: LAMA2; (+) strand; PAM type: YTN; PAM sequence: TTA
tttgagcatatgtggtgatt

SEQ ID NO: 367428 - DNA, 20 bp, Artificial Sequence
  Description of Artificial Sequence: Synthetic oligonucleotide
  Target: LAMA2; (+) strand; PAM type: YTN; PAM sequence: TTT
gagcatatgtggtgatttca

SEQ ID NO: 367429 - DNA, 20 bp, Artificial Sequence
  Description of Artificial Sequence: Synthetic oligonucleotide
  Target: LAMA2; (+) strand; PAM type: YTN; PAM sequence: TTG
agcatatgtggtgatttcat

SEQ ID NO: 367430 - DNA, 20 bp, Artificial Sequence
  Description of Artificial Sequence: Synthetic oligonucleotide
  Target: LAMA2; (+) strand; PAM type: YTN; PAM sequence: TTT
catatattaagttgatattt

SEQ ID NO: 367431 - DNA, 20 bp, Artificial Sequence
  Description of Artificial Sequence: Synthetic oligonucleotide
  Target: LAMA2; (+) strand; PAM type: YTN; PAM sequence: TTC
atatattaagttgatatttt

SEQ ID NO: 367432 - DNA, 20 bp, Artificial Sequence
  Description of Artificial Sequence: Synthetic oligonucleotide
  Target: LAMA2; (+) strand; PAM type: YTN; PAM sequence: TTA
agttgatatttttctttcct

SEQ ID NO: 367433 - DNA, 20 bp, Artificial Sequence
  Description of Artificial Sequence: Synthetic oligonucleotide
  Target: LAMA2; (+) strand; PAM type: YTN; PAM sequence: TTG
atatttttctttccttttta

SEQ ID NO: 367434 - DNA, 20 bp, Artificial Sequence
  Description of Artificial Sequence: Synthetic oligonucleotide
  Target: LAMA2; (+) strand; PAM type: YTN; PAM sequence: TTT
ttctttcctttttagagaag

SEQ ID NO: 367435 - DNA, 20 bp, Artificial Sequence
  Description of Artificial Sequence: Synthetic oligonucleotide
  Target: LAMA2; (+) strand; PAM type: YTN; PAM sequence: TTT
tctttcctttttagagaagc

SEQ ID NO: 367436 - DNA, 20 bp, Artificial Sequence
  Description of Artificial Sequence: Synthetic oligonucleotide
  Target: LAMA2; (+) strand; PAM type: YTN; PAM sequence: TTT
ctttcctttttagagaagcc

SEQ ID NO: 367437 - DNA, 20 bp, Artificial Sequence
  Description of Artificial Sequence: Synthetic oligonucleotide
  Target: LAMA2; (+) strand; PAM type: YTN; PAM sequence: TTC
tttcctttttagagaagcca

SEQ ID NO: 367438 - DNA, 20 bp, Artificial Sequence
  Description of Artificial Sequence: Synthetic oligonucleotide
  Target: LAMA2; (+) strand; PAM type: YTN; PAM sequence: CTT
tcctttttagagaagccata

SEQ ID NO: 367439 - DNA, 20 bp, Artificial Sequence
  Description of Artificial Sequence: Synthetic oligonucleotide
  Target: LAMA2; (+) strand; PAM type: YTN; PAM sequence: TTT
cctttttagagaagccatat

SEQ ID NO: 367440 - DNA, 20 bp, Artificial Sequence
  Description of Artificial Sequence: Synthetic oligonucleotide
  Target: LAMA2; (+) strand; PAM type: YTN; PAM sequence: TTC
ctttttagagaagccatatt

SEQ ID NO: 367441 - DNA, 20 bp, Artificial Sequence
  Description of Artificial Sequence: Synthetic oligonucleotide
  Target: LAMA2; (+) strand; PAM type: YTN; PAM sequence: CTT
tttagagaagccatattcaa

SEQ ID NO: 367442 - DNA, 20 bp, Artificial Sequence
  Description of Artificial Sequence: Synthetic oligonucleotide
  Target: LAMA2; (+) strand; PAM type: YTN; PAM sequence: TTT
ttagagaagccatattcaag

SEQ ID NO: 367443 - DNA, 20 bp, Artificial Sequence
  Description of Artificial Sequence: Synthetic oligonucleotide
  Target: LAMA2; (+) strand; PAM type: YTN; PAM sequence: TTT
tagagaagccatattcaaga

SEQ ID NO: 367444 - DNA, 20 bp, Artificial Sequence
  Description of Artificial Sequence: Synthetic oligonucleotide
  Target: LAMA2; (+) strand; PAM type: YTN; PAM sequence: TTT
agagaagccatattcaagaa

SEQ ID NO: 367445 - DNA, 20 bp, Artificial Sequence
  Description of Artificial Sequence: Synthetic oligonucleotide
  Target: LAMA2; (+) strand; PAM type: YTN; PAM sequence: TTA
gagaagccatattcaagaaa

SEQ ID NO: 367446 - DNA, 20 bp, Artificial Sequence
  Description of Artificial Sequence: Synthetic oligonucleotide
  Target: LAMA2; (+) strand; PAM type: YTN; PAM sequence: TTC
aagaaaaatagcatgtaatt

SEQ ID NO: 367447 - DNA, 20 bp, Artificial Sequence
  Description of Artificial Sequence: Synthetic oligonucleotide
  Target: LAMA2; (+) strand; PAM type: YTN; PAM sequence: TTC
aaattttaaataatcaaaat

SEQ ID NO: 367448 - DNA, 20 bp, Artificial Sequence
  Description of Artificial Sequence: Synthetic oligonucleotide
  Target: LAMA2; (+) strand; PAM type: YTN; PAM sequence: TTT
taaataatcaaaatagattt

SEQ ID NO: 367449 - DNA, 20 bp, Artificial Sequence
  Description of Artificial Sequence: Synthetic oligonucleotide
  Target: LAMA2; (+) strand; PAM type: YTN; PAM sequence: TTT
aaataatcaaaatagatttg

SEQ ID NO: 367450 - DNA, 20 bp, Artificial Sequence
  Description of Artificial Sequence: Synthetic oligonucleotide
  Target: LAMA2; (+) strand; PAM type: YTN; PAM sequence: TTA
aataatcaaaatagatttga

SEQ ID NO: 367451 - DNA, 20 bp, Artificial Sequence
  Description of Artificial Sequence: Synthetic oligonucleotide
  Target: LAMA2; (+) strand; PAM type: YTN; PAM sequence: TTT
gaaagctcaaaattttggaa

SEQ ID NO: 367452 - DNA, 20 bp, Artificial Sequence
  Description of Artificial Sequence: Synthetic oligonucleotide
  Target: LAMA2; (+) strand; PAM type: YTN; PAM sequence: TTG
aaagctcaaaattttggaac

SEQ ID NO: 367453 - DNA, 20 bp, Artificial Sequence
  Description of Artificial Sequence: Synthetic oligonucleotide
  Target: LAMA2; (+) strand; PAM type: YTN; PAM sequence: CTC
aaaattttggaacattatag

SEQ ID NO: 367454 - DNA, 20 bp, Artificial Sequence
  Description of Artificial Sequence: Synthetic oligonucleotide
  Target: LAMA2; (+) strand; PAM type: YTN; PAM sequence: TTT
tggaacattataggcctatg

SEQ ID NO: 367455 - DNA, 20 bp, Artificial Sequence
  Description of Artificial Sequence: Synthetic oligonucleotide
  Target: LAMA2; (+) strand; PAM type: YTN; PAM sequence: TTT
ggaacattataggcctatgt

SEQ ID NO: 367456 - DNA, 20 bp, Artificial Sequence
  Description of Artificial Sequence: Synthetic oligonucleotide
  Target: LAMA2; (+) strand; PAM type: YTN; PAM sequence: TTG
gaacattataggcctatgtc

SEQ ID NO: 367457 - DNA, 20 bp, Artificial Sequence
  Description of Artificial Sequence: Synthetic oligonucleotide
  Target: LAMA2; (+) strand; PAM type: YTN; PAM sequence: TTA
taggcctatgtcccaatatt

SEQ ID NO: 367458 - DNA, 20 bp, Artificial Sequence
  Description of Artificial Sequence: Synthetic oligonucleotide
  Target: LAMA2; (+) strand; PAM type: YTN; PAM sequence: CTA
tgtcccaatattcttcccaa

SEQ ID NO: 367459 - DNA, 20 bp, Artificial Sequence
  Description of Artificial Sequence: Synthetic oligonucleotide
  Target: LAMA2; (+) strand; PAM type: YTN; PAM sequence: TTC
ttcccaaacctcctttcaaa

SEQ ID NO: 367460 - DNA, 20 bp, Artificial Sequence
  Description of Artificial Sequence: Synthetic oligonucleotide
  Target: LAMA2; (+) strand; PAM type: YTN; PAM sequence: CTT
cccaaacctcctttcaaacg

SEQ ID NO: 367461 - DNA, 20 bp, Artificial Sequence
  Description of Artificial Sequence: Synthetic oligonucleotide
  Target: LAMA2; (+) strand; PAM type: YTN; PAM sequence: TTC
ccaaacctcctttcaaacgt

SEQ ID NO: 367462 - DNA, 20 bp, Artificial Sequence
  Description of Artificial Sequence: Synthetic oligonucleotide
  Target: LAMA2; (+) strand; PAM type: YTN; PAM sequence: CTC
ctttcaaacgtatttattaa

SEQ ID NO: 367463 - DNA, 20 bp, Artificial Sequence
  Description of Artificial Sequence: Synthetic oligonucleotide
  Target: LAMA2; (+) strand; PAM type: YTN; PAM sequence: CTT
tcaaacgtatttattaattt

SEQ ID NO: 367464 - DNA, 20 bp, Artificial Sequence
  Description of Artificial Sequence: Synthetic oligonucleotide
  Target: LAMA2; (+) strand; PAM type: YTN; PAM sequence: TTT
caaacgtatttattaattta

SEQ ID NO: 367465 - DNA, 20 bp, Artificial Sequence
  Description of Artificial Sequence: Synthetic oligonucleotide
  Target: LAMA2; (+) strand; PAM type: YTN; PAM sequence: TTC
aaacgtatttattaatttag

SEQ ID NO: 367466 - DNA, 20 bp, Artificial Sequence
  Description of Artificial Sequence: Synthetic oligonucleotide
  Target: LAMA2; (+) strand; PAM type: YTN; PAM sequence: TTT
attaatttagaaaattctaa

SEQ ID NO: 367467 - DNA, 20 bp, Artificial Sequence
  Description of Artificial Sequence: Synthetic oligonucleotide
  Target: LAMA2; (+) strand; PAM type: YTN; PAM sequence: TTA
ttaatttagaaaattctaaa

SEQ ID NO: 367468 - DNA, 20 bp, Artificial Sequence
  Description of Artificial Sequence: Synthetic oligonucleotide
  Target: LAMA2; (+) strand; PAM type: YTN; PAM sequence: TTA
atttagaaaattctaaatag

SEQ ID NO: 367469 - DNA, 20 bp, Artificial Sequence
  Description of Artificial Sequence: Synthetic oligonucleotide
  Target: LAMA2; (+) strand; PAM type: YTN; PAM sequence: TTT
agaaaattctaaatagttca

SEQ ID NO: 367470 - DNA, 20 bp, Artificial Sequence
  Description of Artificial Sequence: Synthetic oligonucleotide
  Target: LAMA2; (+) strand; PAM type: YTN; PAM sequence: TTA
gaaaattctaaatagttcag

SEQ ID NO: 367471 - DNA, 20 bp, Artificial Sequence
  Description of Artificial Sequence: Synthetic oligonucleotide
  Target: LAMA2; (+) strand; PAM type: YTN; PAM sequence: TTC
taaatagttcagtccttgtt

SEQ ID NO: 367472 - DNA, 20 bp, Artificial Sequence
  Description of Artificial Sequence: Synthetic oligonucleotide
  Target: LAMA2; (+) strand; PAM type: YTN; PAM sequence: CTA
aatagttcagtccttgtttg

SEQ ID NO: 367473 - DNA, 20 bp, Artificial Sequence
  Description of Artificial Sequence: Synthetic oligonucleotide
  Target: LAMA2; (+) strand; PAM type: YTN; PAM sequence: TTC
agtccttgtttgaaatatat

SEQ ID NO: 367474 - DNA, 20 bp, Artificial Sequence
  Description of Artificial Sequence: Synthetic oligonucleotide
  Target: LAMA2; (+) strand; PAM type: YTN; PAM sequence: CTT
gtttgaaatatatacaacat

SEQ ID NO: 367475 - DNA, 20 bp, Artificial Sequence
  Description of Artificial Sequence: Synthetic oligonucleotide
  Target: LAMA2; (+) strand; PAM type: YTN; PAM sequence: TTG
tttgaaatatatacaacata

SEQ ID NO: 367476 - DNA, 20 bp, Artificial Sequence
  Description of Artificial Sequence: Synthetic oligonucleotide
  Target: LAMA2; (+) strand; PAM type: YTN; PAM sequence: TTT
gaaatatatacaacataaaa

SEQ ID NO: 367477 - DNA, 20 bp, Artificial Sequence
  Description of Artificial Sequence: Synthetic oligonucleotide
  Target: LAMA2; (+) strand; PAM type: YTN; PAM sequence: TTG
aaatatatacaacataaaac

SEQ ID NO: 367478 - DNA, 20 bp, Artificial Sequence
  Description of Artificial Sequence: Synthetic oligonucleotide
  Target: LAMA2; (+) strand; PAM type: YTN; PAM sequence: CTT
ttttttctcctgcctttcta

SEQ ID NO: 367479 - DNA, 20 bp, Artificial Sequence
  Description of Artificial Sequence: Synthetic oligonucleotide
  Target: LAMA2; (+) strand; PAM type: YTN; PAM sequence: TTT
tttttctcctgcctttctag

SEQ ID NO: 367480 - DNA, 20 bp, Artificial Sequence
  Description of Artificial Sequence: Synthetic oligonucleotide
  Target: LAMA2; (+) strand; PAM type: YTN; PAM sequence: TTT
ttttctcctgcctttctaga

SEQ ID NO: 367481 - DNA, 20 bp, Artificial Sequence
  Description of Artificial Sequence: Synthetic oligonucleotide
  Target: LAMA2; (+) strand; PAM type: YTN; PAM sequence: TTT
tttctcctgcctttctagaa

SEQ ID NO: 367482 - DNA, 20 bp, Artificial Sequence
  Description of Artificial Sequence: Synthetic oligonucleotide
  Target: LAMA2; (+) strand; PAM type: YTN; PAM sequence: TTT
ttctcctgcctttctagaat

SEQ ID NO: 367483 - DNA, 20 bp, Artificial Sequence
  Description of Artificial Sequence: Synthetic oligonucleotide
  Target: LAMA2; (+) strand; PAM type: YTN; PAM sequence: TTT
tctcctgcctttctagaatc

SEQ ID NO: 367484 - DNA, 20 bp, Artificial Sequence
  Description of Artificial Sequence: Synthetic oligonucleotide
  Target: LAMA2; (+) strand; PAM type: YTN; PAM sequence: TTT
ctcctgcctttctagaatcc

SEQ ID NO: 367485 - DNA, 20 bp, Artificial Sequence
  Description of Artificial Sequence: Synthetic oligonucleotide
  Target: LAMA2; (+) strand; PAM type: YTN; PAM sequence: TTC
tcctgcctttctagaatcct

SEQ ID NO: 367486 - DNA, 20 bp, Artificial Sequence
  Description of Artificial Sequence: Synthetic oligonucleotide
  Target: LAMA2; (+) strand; PAM type: YTN; PAM sequence: CTC
ctgcctttctagaatccttt

SEQ ID NO: 367487 - DNA, 20 bp, Artificial Sequence
  Description of Artificial Sequence: Synthetic oligonucleotide
  Target: LAMA2; (+) strand; PAM type: YTN; PAM sequence: CTG
cctttctagaatccttttat

SEQ ID NO: 367488 - DNA, 20 bp, Artificial Sequence
  Description of Artificial Sequence: Synthetic oligonucleotide
  Target: LAMA2; (+) strand; PAM type: YTN; PAM sequence: CTT
tctagaatccttttattgag

SEQ ID NO: 367489 - DNA, 20 bp, Artificial Sequence
  Description of Artificial Sequence: Synthetic oligonucleotide
  Target: LAMA2; (+) strand; PAM type: YTN; PAM sequence: TTT
ctagaatccttttattgaga

SEQ ID NO: 367490 - DNA, 20 bp, Artificial Sequence
  Description of Artificial Sequence: Synthetic oligonucleotide
  Target: LAMA2; (+) strand; PAM type: YTN; PAM sequence: TTC
tagaatccttttattgagaa

SEQ ID NO: 367491 - DNA, 20 bp, Artificial Sequence
  Description of Artificial Sequence: Synthetic oligonucleotide
  Target: LAMA2; (+) strand; PAM type: YTN; PAM sequence: CTA
gaatccttttattgagaaaa

SEQ ID NO: 367492 - DNA, 20 bp, Artificial Sequence
  Description of Artificial Sequence: Synthetic oligonucleotide
  Target: LAMA2; (+) strand; PAM type: YTN; PAM sequence: CTT
ttattgagaaaatgtgtagc

SEQ ID NO: 367493 - DNA, 20 bp, Artificial Sequence
  Description of Artificial Sequence: Synthetic oligonucleotide
  Target: LAMA2; (+) strand; PAM type: YTN; PAM sequence: TTT
tattgagaaaatgtgtagct

SEQ ID NO: 367494 - DNA, 20 bp, Artificial Sequence
  Description of Artificial Sequence: Synthetic oligonucleotide
  Target: LAMA2; (+) strand; PAM type: YTN; PAM sequence: TTT
attgagaaaatgtgtagctg

SEQ ID NO: 367495 - DNA, 20 bp, Artificial Sequence
  Description of Artificial Sequence: Synthetic oligonucleotide
  Target: LAMA2; (+) strand; PAM type: YTN; PAM sequence: TTA
ttgagaaaatgtgtagctga

SEQ ID NO: 367496 - DNA, 20 bp, Artificial Sequence
  Description of Artificial Sequence: Synthetic oligonucleotide
  Target: LAMA2; (+) strand; PAM type: YTN; PAM sequence: TTG
agaaaatgtgtagctgatct

SEQ ID NO: 367497 - DNA, 20 bp, Artificial Sequence
  Description of Artificial Sequence: Synthetic oligonucleotide
  Target: LAMA2; (+) strand; PAM type: YTN; PAM sequence: CTG
atctgaagaagcatgctgtg

SEQ ID NO: 367498 - DNA, 20 bp, Artificial Sequence
  Description of Artificial Sequence: Synthetic oligonucleotide
  Target: LAMA2; (+) strand; PAM type: YTN; PAM sequence: CTG
aagaagcatgctgtgtgaaa

SEQ ID NO: 367499 - DNA, 20 bp, Artificial Sequence
  Description of Artificial Sequence: Synthetic oligonucleotide
  Target: LAMA2; (+) strand; PAM type: YTN; PAM sequence: CTG
tgtgaaattttgaatgttta

SEQ ID NO: 367500 - DNA, 20 bp, Artificial Sequence
  Description of Artificial Sequence: Synthetic oligonucleotide
  Target: LAMA2; (+) strand; PAM type: YTN; PAM sequence: TTT
tgaatgtttatcttaataga

SEQ ID NO: 367501 - DNA, 20 bp, Artificial Sequence
  Description of Artificial Sequence: Synthetic oligonucleotide
  Target: LAMA2; (+) strand; PAM type: YTN; PAM sequence: TTT
gaatgtttatcttaatagaa

SEQ ID NO: 367502 - DNA, 20 bp, Artificial Sequence
  Description of Artificial Sequence: Synthetic oligonucleotide
  Target: LAMA2; (+) strand; PAM type: YTN; PAM sequence: TTG
aatgtttatcttaatagaac

SEQ ID NO: 367503 - DNA, 20 bp, Artificial Sequence
  Description of Artificial Sequence: Synthetic oligonucleotide
  Target: LAMA2; (+) strand; PAM type: YTN; PAM sequence: TTT
atcttaatagaacctaaaat

SEQ ID NO: 367504 - DNA, 20 bp, Artificial Sequence
  Description of Artificial Sequence: Synthetic oligonucleotide
  Target: LAMA2; (+) strand; PAM type: YTN; PAM sequence: TTA
tcttaatagaacctaaaatc

SEQ ID NO: 367505 - DNA, 20 bp, Artificial Sequence
  Description of Artificial Sequence: Synthetic oligonucleotide
  Target: LAMA2; (+) strand; PAM type: YTN; PAM sequence: CTT
aatagaacctaaaatcttcc

SEQ ID NO: 367506 - DNA, 20 bp, Artificial Sequence
  Description of Artificial Sequence: Synthetic oligonucleotide
  Target: LAMA2; (+) strand; PAM type: YTN; PAM sequence: TTA
atagaacctaaaatcttcca

SEQ ID NO: 367507 - DNA, 20 bp, Artificial Sequence
  Description of Artificial Sequence: Synthetic oligonucleotide
  Target: LAMA2; (+) strand; PAM type: YTN; PAM sequence: CTA
aaatcttccacataggttca

SEQ ID NO: 367508 - DNA, 20 bp, Artificial Sequence
  Description of Artificial Sequence: Synthetic oligonucleotide
  Target: LAMA2; (+) strand; PAM type: YTN; PAM sequence: CTT
ccacataggttcacccctca

SEQ ID NO: 367509 - DNA, 20 bp, Artificial Sequence
  Description of Artificial Sequence: Synthetic oligonucleotide
  Target: LAMA2; (+) strand; PAM type: YTN; PAM sequence: TTC
cacataggttcacccctcat

SEQ ID NO: 367510 - DNA, 20 bp, Artificial Sequence
  Description of Artificial Sequence: Synthetic oligonucleotide
  Target: LAMA2; (+) strand; PAM type: YTN; PAM sequence: TTC
acccctcattactcacaata

SEQ ID NO: 367511 - DNA, 20 bp, Artificial Sequence
  Description of Artificial Sequence: Synthetic oligonucleotide
  Target: LAMA2; (+) strand; PAM type: YTN; PAM sequence: CTC
attactcacaataatgccaa

SEQ ID NO: 367512 - DNA, 20 bp, Artificial Sequence
  Description of Artificial Sequence: Synthetic oligonucleotide
  Target: LAMA2; (+) strand; PAM type: YTN; PAM sequence: TTA
ctcacaataatgccaagtgc

SEQ ID NO: 367513 - DNA, 20 bp, Artificial Sequence
  Description of Artificial Sequence: Synthetic oligonucleotide
  Target: LAMA2; (+) strand; PAM type: YTN; PAM sequence: CTC
acaataatgccaagtgctgt

SEQ ID NO: 367514 - DNA, 20 bp, Artificial Sequence
  Description of Artificial Sequence: Synthetic oligonucleotide
  Target: LAMA2; (+) strand; PAM type: YTN; PAM sequence: CTG
tagtccaggcagatatttat

SEQ ID NO: 367515 - DNA, 20 bp, Artificial Sequence
  Description of Artificial Sequence: Synthetic oligonucleotide
  Target: LAMA2; (+) strand; PAM type: YTN; PAM sequence: TTT
attattttatatgtgaaaag

SEQ ID NO: 367516 - DNA, 20 bp, Artificial Sequence
  Description of Artificial Sequence: Synthetic oligonucleotide
  Target: LAMA2; (+) strand; PAM type: YTN; PAM sequence: TTA
ttattttatatgtgaaaaga

SEQ ID NO: 367517 - DNA, 20 bp, Artificial Sequence
  Description of Artificial Sequence: Synthetic oligonucleotide
  Target: LAMA2; (+) strand; PAM type: YTN; PAM sequence: TTA
ttttatatgtgaaaagacat

SEQ ID NO: 367518 - DNA, 20 bp, Artificial Sequence
  Description of Artificial Sequence: Synthetic oligonucleotide
  Target: LAMA2; (+) strand; PAM type: YTN; PAM sequence: TTT
tatatgtgaaaagacattcg

SEQ ID NO: 367519 - DNA, 20 bp, Artificial Sequence
  Description of Artificial Sequence: Synthetic oligonucleotide
  Target: LAMA2; (+) strand; PAM type: YTN; PAM sequence: TTT
atatgtgaaaagacattcga

SEQ ID NO: 367520 - DNA, 20 bp, Artificial Sequence
  Description of Artificial Sequence: Synthetic oligonucleotide
  Target: LAMA2; (+) strand; PAM type: YTN; PAM sequence: TTA
tatgtgaaaagacattcgaa

SEQ ID NO: 367521 - DNA, 20 bp, Artificial Sequence
  Description of Artificial Sequence: Synthetic oligonucleotide
  Target: LAMA2; (+) strand; PAM type: YTN; PAM sequence: TTC
gaataaggccatttctcagt

SEQ ID NO: 367522 - DNA, 20 bp, Artificial Sequence
  Description of Artificial Sequence: Synthetic oligonucleotide
  Target: LAMA2; (+) strand; PAM type: YTN; PAM sequence: TTT
ctcagtggattaggggaatc

SEQ ID NO: 367523 - DNA, 20 bp, Artificial Sequence
  Description of Artificial Sequence: Synthetic oligonucleotide
  Target: LAMA2; (+) strand; PAM type: YTN; PAM sequence: TTC
tcagtggattaggggaatca

SEQ ID NO: 367524 - DNA, 20 bp, Artificial Sequence
  Description of Artificial Sequence: Synthetic oligonucleotide
  Target: LAMA2; (+) strand; PAM type: YTN; PAM sequence: CTC
agtggattaggggaatcaga

SEQ ID NO: 367525 - DNA, 20 bp, Artificial Sequence
  Description of Artificial Sequence: Synthetic oligonucleotide
  Target: LAMA2; (+) strand; PAM type: YTN; PAM sequence: TTA
ggggaatcagagttttctga

SEQ ID NO: 367526 - DNA, 20 bp, Artificial Sequence
  Description of Artificial Sequence: Synthetic oligonucleotide
  Target: LAMA2; (+) strand; PAM type: YTN; PAM sequence: TTT
tctgaatttaagttccttat

SEQ ID NO: 367527 - DNA, 20 bp, Artificial Sequence
  Description of Artificial Sequence: Synthetic oligonucleotide
  Target: LAMA2; (+) strand; PAM type: YTN; PAM sequence: TTT
ctgaatttaagttccttata

SEQ ID NO: 367528 - DNA, 20 bp, Artificial Sequence
  Description of Artificial Sequence: Synthetic oligonucleotide
  Target: LAMA2; (+) strand; PAM type: YTN; PAM sequence: TTC
tgaatttaagttccttatag

SEQ ID NO: 367529 - DNA, 20 bp, Artificial Sequence
  Description of Artificial Sequence: Synthetic oligonucleotide
  Target: LAMA2; (+) strand; PAM type: YTN; PAM sequence: CTG
aatttaagttccttatagag

SEQ ID NO: 367530 - DNA, 20 bp, Artificial Sequence
  Description of Artificial Sequence: Synthetic oligonucleotide
  Target: LAMA2; (+) strand; PAM type: YTN; PAM sequence: TTT
aagttccttatagagcccca

SEQ ID NO: 367531 - DNA, 20 bp, Artificial Sequence
  Description of Artificial Sequence: Synthetic oligonucleotide
  Target: LAMA2; (+) strand; PAM type: YTN; PAM sequence: TTA
agttccttatagagccccat

SEQ ID NO: 367532 - DNA, 20 bp, Artificial Sequence
  Description of Artificial Sequence: Synthetic oligonucleotide
  Target: LAMA2; (+) strand; PAM type: YTN; PAM sequence: TTC
cttatagagccccatgtaat

SEQ ID NO: 367533 - DNA, 20 bp, Artificial Sequence
  Description of Artificial Sequence: Synthetic oligonucleotide
  Target: LAMA2; (+) strand; PAM type: YTN; PAM sequence: CTT
atagagccccatgtaatgag

SEQ ID NO: 367534 - DNA, 20 bp, Artificial Sequence
  Description of Artificial Sequence: Synthetic oligonucleotide
  Target: LAMA2; (+) strand; PAM type: YTN; PAM sequence: TTA
tagagccccatgtaatgagc

SEQ ID NO: 367535 - DNA, 20 bp, Artificial Sequence
  Description of Artificial Sequence: Synthetic oligonucleotide
  Target: LAMA2; (+) strand; PAM type: YTN; PAM sequence: CTC
ttagaagacattgcagagct

SEQ ID NO: 367536 - DNA, 20 bp, Artificial Sequence
  Description of Artificial Sequence: Synthetic oligonucleotide
  Target: LAMA2; (+) strand; PAM type: YTN; PAM sequence: CTT
agaagacattgcagagctgc

SEQ ID NO: 367537 - DNA, 20 bp, Artificial Sequence
  Description of Artificial Sequence: Synthetic oligonucleotide
  Target: LAMA2; (+) strand; PAM type: YTN; PAM sequence: TTA
gaagacattgcagagctgca

SEQ ID NO: 367538 - DNA, 20 bp, Artificial Sequence
  Description of Artificial Sequence: Synthetic oligonucleotide
  Target: LAMA2; (+) strand; PAM type: YTN; PAM sequence: TTG
cagagctgcaatttaaaatc

SEQ ID NO: 367539 - DNA, 20 bp, Artificial Sequence
  Description of Artificial Sequence: Synthetic oligonucleotide
  Target: LAMA2; (+) strand; PAM type: YTN; PAM sequence: CTG
caatttaaaatcctgtttaa

SEQ ID NO: 367540 - DNA, 20 bp, Artificial Sequence
  Description of Artificial Sequence: Synthetic oligonucleotide
  Target: LAMA2; (+) strand; PAM type: YTN; PAM sequence: TTT
aaaatcctgtttaatcagcc

SEQ ID NO: 367541 - DNA, 20 bp, Artificial Sequence
  Description of Artificial Sequence: Synthetic oligonucleotide
  Target: LAMA2; (+) strand; PAM type: YTN; PAM sequence: TTA
aaatcctgtttaatcagccg

SEQ ID NO: 367542 - DNA, 20 bp, Artificial Sequence
  Description of Artificial Sequence: Synthetic oligonucleotide
  Target: LAMA2; (+) strand; PAM type: YTN; PAM sequence: CTG
tttaatcagccgtagcgagc

SEQ ID NO: 367543 - DNA, 20 bp, Artificial Sequence
  Description of Artificial Sequence: Synthetic oligonucleotide
  Target: LAMA2; (+) strand; PAM type: YTN; PAM sequence: TTT
aatcagccgtagcgagctat

SEQ ID NO: 367544 - DNA, 20 bp, Artificial Sequence
  Description of Artificial Sequence: Synthetic oligonucleotide
  Target: LAMA2; (+) strand; PAM type: YTN; PAM sequence: TTA
atcagccgtagcgagctatg

SEQ ID NO: 367545 - DNA, 20 bp, Artificial Sequence
  Description of Artificial Sequence: Synthetic oligonucleotide
  Target: LAMA2; (+) strand; PAM type: YTN; PAM sequence: CTA
tgtgccattctctgtggaac

SEQ ID NO: 367546 - DNA, 20 bp, Artificial Sequence
  Description of Artificial Sequence: Synthetic oligonucleotide
  Target: LAMA2; (+) strand; PAM type: YTN; PAM sequence: TTC
tctgtggaacactaagagga

SEQ ID NO: 367547 - DNA, 20 bp, Artificial Sequence
  Description of Artificial Sequence: Synthetic oligonucleotide
  Target: LAMA2; (+) strand; PAM type: YTN; PAM sequence: CTC
tgtggaacactaagaggaat

SEQ ID NO: 367548 - DNA, 20 bp, Artificial Sequence
  Description of Artificial Sequence: Synthetic oligonucleotide
  Target: LAMA2; (+) strand; PAM type: YTN; PAM sequence: CTG
tggaacactaagaggaatca

SEQ ID NO: 367549 - DNA, 20 bp, Artificial Sequence
  Description of Artificial Sequence: Synthetic oligonucleotide
  Target: LAMA2; (+) strand; PAM type: YTN; PAM sequence: CTA
agaggaatcagggttcttcc

SEQ ID NO: 367550 - DNA, 20 bp, Artificial Sequence
  Description of Artificial Sequence: Synthetic oligonucleotide
  Target: LAMA2; (+) strand; PAM type: YTN; PAM sequence: TTC
ttcctcctccatccagtaca

SEQ ID NO: 367551 - DNA, 20 bp, Artificial Sequence
  Description of Artificial Sequence: Synthetic oligonucleotide
  Target: LAMA2; (+) strand; PAM type: YTN; PAM sequence: CTT
cctcctccatccagtacatt

SEQ ID NO: 367552 - DNA, 20 bp, Artificial Sequence
  Description of Artificial Sequence: Synthetic oligonucleotide
  Target: LAMA2; (+) strand; PAM type: YTN; PAM sequence: TTC
ctcctccatccagtacattc

SEQ ID NO: 367553 - DNA, 20 bp, Artificial Sequence
  Description of Artificial Sequence: Synthetic oligonucleotide
  Target: LAMA2; (+) strand; PAM type: YTN; PAM sequence: CTC
ctccatccagtacattccca

SEQ ID NO: 367554 - DNA, 20 bp, Artificial Sequence
  Description of Artificial Sequence: Synthetic oligonucleotide
  Target: LAMA2; (+) strand; PAM type: YTN; PAM sequence: CTC
catccagtacattcccaacc

SEQ ID NO: 367555 - DNA, 20 bp, Artificial Sequence
  Description of Artificial Sequence: Synthetic oligonucleotide
  Target: LAMA2; (+) strand; PAM type: YTN; PAM sequence: TTC
ccaaccaggaattgctgtct

SEQ ID NO: 367556 - DNA, 20 bp, Artificial Sequence
  Description of Artificial Sequence: Synthetic oligonucleotide
  Target: LAMA2; (+) strand; PAM type: YTN; PAM sequence: TTG
ctgtctggtcagggttggac

SEQ ID NO: 367557 - DNA, 20 bp, Artificial Sequence
  Description of Artificial Sequence: Synthetic oligonucleotide
  Target: LAMA2; (+) strand; PAM type: YTN; PAM sequence: CTG
tctggtcagggttggacgtg

SEQ ID NO: 367558 - DNA, 20 bp, Artificial Sequence
  Description of Artificial Sequence: Synthetic oligonucleotide
  Target: LAMA2; (+) strand; PAM type: YTN; PAM sequence: CTG
gtcagggttggacgtgaaag

SEQ ID NO: 367559 - DNA, 20 bp, Artificial Sequence
  Description of Artificial Sequence: Synthetic oligonucleotide
  Target: LAMA2; (+) strand; PAM type: YTN; PAM sequence: TTG
gacgtgaaaggccatagaga

SEQ ID NO: 367560 - DNA, 20 bp, Artificial Sequence
  Description of Artificial Sequence: Synthetic oligonucleotide
  Target: LAMA2; (+) strand; PAM type: YTN; PAM sequence: CTG
cgaagccaagtctctgcatg

SEQ ID NO: 367561 - DNA, 20 bp, Artificial Sequence
  Description of Artificial Sequence: Synthetic oligonucleotide
  Target: LAMA2; (+) strand; PAM type: YTN; PAM sequence: CTC
tgcatgtcagcacagagcaa

SEQ ID NO: 367562 - DNA, 20 bp, Artificial Sequence
  Description of Artificial Sequence: Synthetic oligonucleotide
  Target: LAMA2; (+) strand; PAM type: YTN; PAM sequence: CTG
catgtcagcacagagcaagc

SEQ ID NO: 367563 - DNA, 20 bp, Artificial Sequence
  Description of Artificial Sequence: Synthetic oligonucleotide
  Target: LAMA2; (+) strand; PAM type: YTN; PAM sequence: CTT
tgttttatgaatatctctat

SEQ ID NO: 367564 - DNA, 20 bp, Artificial Sequence
  Description of Artificial Sequence: Synthetic oligonucleotide
  Target: LAMA2; (+) strand; PAM type: YTN; PAM sequence: TTT
gttttatgaatatctctatt

SEQ ID NO: 367565 - DNA, 20 bp, Artificial Sequence
  Description of Artificial Sequence: Synthetic oligonucleotide
  Target: LAMA2; (+) strand; PAM type: YTN; PAM sequence: TTG
ttttatgaatatctctattt

SEQ ID NO: 367566 - DNA, 20 bp, Artificial Sequence
  Description of Artificial Sequence: Synthetic oligonucleotide
  Target: LAMA2; (+) strand; PAM type: YTN; PAM sequence: TTT
tatgaatatctctatttaca

SEQ ID NO: 367567 - DNA, 20 bp, Artificial Sequence
  Description of Artificial Sequence: Synthetic oligonucleotide
  Target: LAMA2; (+) strand; PAM type: YTN; PAM sequence: TTT
atgaatatctctatttacag

SEQ ID NO: 367568 - DNA, 20 bp, Artificial Sequence
  Description of Artificial Sequence: Synthetic oligonucleotide
  Target: LAMA2; (+) strand; PAM type: YTN; PAM sequence: TTA
tgaatatctctatttacagt

SEQ ID NO: 367569 - DNA, 20 bp, Artificial Sequence
  Description of Artificial Sequence: Synthetic oligonucleotide
  Target: LAMA2; (+) strand; PAM type: YTN; PAM sequence: CTC
tatttacagtgctggagtgg

SEQ ID NO: 367570 - DNA, 20 bp, Artificial Sequence
  Description of Artificial Sequence: Synthetic oligonucleotide
  Target: LAMA2; (+) strand; PAM type: YTN; PAM sequence: CTA
tttacagtgctggagtggaa

SEQ ID NO: 367571 - DNA, 20 bp, Artificial Sequence
  Description of Artificial Sequence: Synthetic oligonucleotide
  Target: LAMA2; (+) strand; PAM type: YTN; PAM sequence: TTT
acagtgctggagtggaattt

SEQ ID NO: 367572 - DNA, 20 bp, Artificial Sequence
  Description of Artificial Sequence: Synthetic oligonucleotide
  Target: LAMA2; (+) strand; PAM type: YTN; PAM sequence: TTA
cagtgctggagtggaatttt

SEQ ID NO: 367573 - DNA, 20 bp, Artificial Sequence
  Description of Artificial Sequence: Synthetic oligonucleotide
  Target: LAMA2; (+) strand; PAM type: YTN; PAM sequence: CTG
gagtggaattttaaaaaaag

SEQ ID NO: 367574 - DNA, 20 bp, Artificial Sequence
  Description of Artificial Sequence: Synthetic oligonucleotide
  Target: LAMA2; (+) strand; PAM type: YTN; PAM sequence: TTT
taaaaaaaggattgcagcat

SEQ ID NO: 367575 - DNA, 20 bp, Artificial Sequence
  Description of Artificial Sequence: Synthetic oligonucleotide
  Target: LAMA2; (+) strand; PAM type: YTN; PAM sequence: TTT
aaaaaaaggattgcagcatt

SEQ ID NO: 367576 - DNA, 20 bp, Artificial Sequence
  Description of Artificial Sequence: Synthetic oligonucleotide
  Target: LAMA2; (+) strand; PAM type: YTN; PAM sequence: TTA
aaaaaaggattgcagcattt

SEQ ID NO: 367577 - DNA, 20 bp, Artificial Sequence
  Description of Artificial Sequence: Synthetic oligonucleotide
  Target: LAMA2; (+) strand; PAM type: YTN; PAM sequence: TTG
cagcatttgcattgaatctg

SEQ ID NO: 367578 - DNA, 20 bp, Artificial Sequence
  Description of Artificial Sequence: Synthetic oligonucleotide
  Target: LAMA2; (+) strand; PAM type: YTN; PAM sequence: TTT
gcattgaatctgtcactcac

SEQ ID NO: 367579 - DNA, 20 bp, Artificial Sequence
  Description of Artificial Sequence: Synthetic oligonucleotide
  Target: LAMA2; (+) strand; PAM type: YTN; PAM sequence: TTG
cattgaatctgtcactcaca

SEQ ID NO: 367580 - DNA, 20 bp, Artificial Sequence
  Description of Artificial Sequence: Synthetic oligonucleotide
  Target: LAMA2; (+) strand; PAM type: YTN; PAM sequence: TTG
aatctgtcactcacagcttc

SEQ ID NO: 367581 - DNA, 20 bp, Artificial Sequence
  Description of Artificial Sequence: Synthetic oligonucleotide
  Target: LAMA2; (+) strand; PAM type: YTN; PAM sequence: CTG
tcactcacagcttcaatttt

SEQ ID NO: 367582 - DNA, 20 bp, Artificial Sequence
  Description of Artificial Sequence: Synthetic oligonucleotide
  Target: LAMA2; (+) strand; PAM type: YTN; PAM sequence: CTC
acagcttcaattttgattcc

SEQ ID NO: 367583 - DNA, 20 bp, Artificial Sequence
  Description of Artificial Sequence: Synthetic oligonucleotide
  Target: LAMA2; (+) strand; PAM type: YTN; PAM sequence: CTT
caattttgattcctgtccta

SEQ ID NO: 367584 - DNA, 20 bp, Artificial Sequence
  Description of Artificial Sequence: Synthetic oligonucleotide
  Target: LAMA2; (+) strand; PAM type: YTN; PAM sequence: TTC
aattttgattcctgtcctat

SEQ ID NO: 367585 - DNA, 20 bp, Artificial Sequence
  Description of Artificial Sequence: Synthetic oligonucleotide
  Target: LAMA2; (+) strand; PAM type: YTN; PAM sequence: TTT
tgattcctgtcctataaatg

SEQ ID NO: 367586 - DNA, 20 bp, Artificial Sequence
  Description of Artificial Sequence: Synthetic oligonucleotide
  Target: LAMA2; (+) strand; PAM type: YTN; PAM sequence: TTT
gattcctgtcctataaatga

SEQ ID NO: 367587 - DNA, 20 bp, Artificial Sequence
  Description of Artificial Sequence: Synthetic oligonucleotide
  Target: LAMA2; (+) strand; PAM type: YTN; PAM sequence: TTG
attcctgtcctataaatgat

SEQ ID NO: 367588 - DNA, 20 bp, Artificial Sequence
  Description of Artificial Sequence: Synthetic oligonucleotide
  Target: LAMA2; (+) strand; PAM type: YTN; PAM sequence: TTC
ctgtcctataaatgatcttg

SEQ ID NO: 367589 - DNA, 20 bp, Artificial Sequence
  Description of Artificial Sequence: Synthetic oligonucleotide
  Target: LAMA2; (+) strand; PAM type: YTN; PAM sequence: CTG
tcctataaatgatcttgctt

SEQ ID NO: 367590 - DNA, 20 bp, Artificial Sequence
  Description of Artificial Sequence: Synthetic oligonucleotide
  Target: LAMA2; (+) strand; PAM type: YTN; PAM sequence: CTA
taaatgatcttgctttccta

SEQ ID NO: 367591 - DNA, 20 bp, Artificial Sequence
  Description of Artificial Sequence: Synthetic oligonucleotide
  Target: LAMA2; (+) strand; PAM type: YTN; PAM sequence: CTT
gctttcctatttttttctga

SEQ ID NO: 367592 - DNA, 20 bp, Artificial Sequence
  Description of Artificial Sequence: Synthetic oligonucleotide
  Target: LAMA2; (+) strand; PAM type: YTN; PAM sequence: TTG
ctttcctatttttttctgaa

SEQ ID NO: 367593 - DNA, 20 bp, Artificial Sequence
  Description of Artificial Sequence: Synthetic oligonucleotide
  Target: LAMA2; (+) strand; PAM type: YTN; PAM sequence: CTT
tcctatttttttctgaattt

SEQ ID NO: 367594 - DNA, 20 bp, Artificial Sequence
  Description of Artificial Sequence: Synthetic oligonucleotide
  Target: LAMA2; (+) strand; PAM type: YTN; PAM sequence: TTT
cctatttttttctgaatttc

SEQ ID NO: 367595 - DNA, 20 bp, Artificial Sequence
  Description of Artificial Sequence: Synthetic oligonucleotide
  Target: LAMA2; (+) strand; PAM type: YTN; PAM sequence: TTC
ctatttttttctgaatttct

SEQ ID NO: 367596 - DNA, 20 bp, Artificial Sequence
  Description of Artificial Sequence: Synthetic oligonucleotide
  Target: LAMA2; (+) strand; PAM type: YTN; PAM sequence: CTA
tttttttctgaatttctaca

SEQ ID NO: 367597 - DNA, 20 bp, Artificial Sequence
  Description of Artificial Sequence: Synthetic oligonucleotide
  Target: LAMA2; (+) strand; PAM type: YTN; PAM sequence: TTT
ttttctgaatttctacaagg

SEQ ID NO: 367598 - DNA, 20 bp, Artificial Sequence
  Description of Artificial Sequence: Synthetic oligonucleotide
  Target: LAMA2; (+) strand; PAM type: YTN; PAM sequence: TTT
tttctgaatttctacaaggt

SEQ ID NO: 367599 - DNA, 20 bp, Artificial Sequence
  Description of Artificial Sequence: Synthetic oligonucleotide
  Target: LAMA2; (+) strand; PAM type: YTN; PAM sequence: TTT
ttctgaatttctacaaggtg

SEQ ID NO: 367600 - DNA, 20 bp, Artificial Sequence
  Description of Artificial Sequence: Synthetic oligonucleotide
  Target: LAMA2; (+) strand; PAM type: YTN; PAM sequence: TTT
tctgaatttctacaaggtga

SEQ ID NO: 367601 - DNA, 20 bp, Artificial Sequence
  Description of Artificial Sequence: Synthetic oligonucleotide
  Target: LAMA2; (+) strand; PAM type: YTN; PAM sequence: TTT
ctgaatttctacaaggtgac

SEQ ID NO: 367602 - DNA, 20 bp, Artificial Sequence
  Description of Artificial Sequence: Synthetic oligonucleotide
  Target: LAMA2; (+) strand; PAM type: YTN; PAM sequence: TTC
tgaatttctacaaggtgact

SEQ ID NO: 367603 - DNA, 20 bp, Artificial Sequence
  Description of Artificial Sequence: Synthetic oligonucleotide
  Target: LAMA2; (+) strand; PAM type: YTN; PAM sequence: CTG
aatttctacaaggtgactgt

SEQ ID NO: 367604 - DNA, 20 bp, Artificial Sequence
  Description of Artificial Sequence: Synthetic oligonucleotide
  Target: LAMA2; (+) strand; PAM type: YTN; PAM sequence: TTT
ctacaaggtgactgtcaatg

SEQ ID NO: 367605 - DNA, 20 bp, Artificial Sequence
  Description of Artificial Sequence: Synthetic oligonucleotide
  Target: LAMA2; (+) strand; PAM type: YTN; PAM sequence: TTC
tacaaggtgactgtcaatgt

SEQ ID NO: 367606 - DNA, 20 bp, Artificial Sequence
  Description of Artificial Sequence: Synthetic oligonucleotide
  Target: LAMA2; (+) strand; PAM type: YTN; PAM sequence: CTA
caaggtgactgtcaatgtca

SEQ ID NO: 367607 - DNA, 20 bp, Artificial Sequence
  Description of Artificial Sequence: Synthetic oligonucleotide
  Target: LAMA2; (+) strand; PAM type: YTN; PAM sequence: CTG
tcaatgtcagaaaatgtaaa

SEQ ID NO: 367608 - DNA, 20 bp, Artificial Sequence
  Description of Artificial Sequence: Synthetic oligonucleotide
  Target: LAMA2; (+) strand; PAM type: YTN; PAM sequence: CTC
aagtgtacattgcatggggc

SEQ ID NO: 367609 - DNA, 20 bp, Artificial Sequence
  Description of Artificial Sequence: Synthetic oligonucleotide
  Target: LAMA2; (+) strand; PAM type: YTN; PAM sequence: TTG
catggggcttggcatgtata

SEQ ID NO: 367610 - DNA, 20 bp, Artificial Sequence
  Description of Artificial Sequence: Synthetic oligonucleotide
  Target: LAMA2; (+) strand; PAM type: YTN; PAM sequence: CTT
ggcatgtatattagaaagaa

SEQ ID NO: 367611 - DNA, 20 bp, Artificial Sequence
  Description of Artificial Sequence: Synthetic oligonucleotide
  Target: LAMA2; (+) strand; PAM type: YTN; PAM sequence: TTG
gcatgtatattagaaagaaa

SEQ ID NO: 367612 - DNA, 20 bp, Artificial Sequence
  Description of Artificial Sequence: Synthetic oligonucleotide
  Target: LAMA2; (+) strand; PAM type: YTN; PAM sequence: TTA
gaaagaaagaagtttgctta

SEQ ID NO: 367613 - DNA, 20 bp, Artificial Sequence
  Description of Artificial Sequence: Synthetic oligonucleotide
  Target: LAMA2; (+) strand; PAM type: YTN; PAM sequence: TTT
gcttaatgaaaagaggataa

SEQ ID NO: 367614 - DNA, 20 bp, Artificial Sequence
  Description of Artificial Sequence: Synthetic oligonucleotide
  Target: LAMA2; (+) strand; PAM type: YTN; PAM sequence: TTG
cttaatgaaaagaggataat

SEQ ID NO: 367615 - DNA, 20 bp, Artificial Sequence
  Description of Artificial Sequence: Synthetic oligonucleotide
  Target: LAMA2; (+) strand; PAM type: YTN; PAM sequence: CTT
aatgaaaagaggataatatt

SEQ ID NO: 367616 - DNA, 20 bp, Artificial Sequence
  Description of Artificial Sequence: Synthetic oligonucleotide
  Target: LAMA2; (+) strand; PAM type: YTN; PAM sequence: TTA
atgaaaagaggataatattt

SEQ ID NO: 367617 - DNA, 20 bp, Artificial Sequence
  Description of Artificial Sequence: Synthetic oligonucleotide
  Target: LAMA2; (+) strand; PAM type: YTN; PAM sequence: TTT
attcaaactaagcctattta

SEQ ID NO: 367618 - DNA, 20 bp, Artificial Sequence
  Description of Artificial Sequence: Synthetic oligonucleotide
  Target: LAMA2; (+) strand; PAM type: YTN; PAM sequence: TTA
ttcaaactaagcctatttaa

SEQ ID NO: 367619 - DNA, 20 bp, Artificial Sequence
  Description of Artificial Sequence: Synthetic oligonucleotide
  Target: LAMA2; (+) strand; PAM type: YTN; PAM sequence: TTC
aaactaagcctatttaattg

SEQ ID NO: 367620 - DNA, 20 bp, Artificial Sequence
  Description of Artificial Sequence: Synthetic oligonucleotide
  Target: LAMA2; (+) strand; PAM type: YTN; PAM sequence: CTA
agcctatttaattgcacaga

SEQ ID NO: 367621 - DNA, 20 bp, Artificial Sequence
  Description of Artificial Sequence: Synthetic oligonucleotide
  Target: LAMA2; (+) strand; PAM type: YTN; PAM sequence: CTA
tttaattgcacagaggaaag

SEQ ID NO: 367622 - DNA, 20 bp, Artificial Sequence
  Description of Artificial Sequence: Synthetic oligonucleotide
  Target: LAMA2; (+) strand; PAM type: YTN; PAM sequence: TTT
aattgcacagaggaaagtat

SEQ ID NO: 367623 - DNA, 20 bp, Artificial Sequence
  Description of Artificial Sequence: Synthetic oligonucleotide
  Target: LAMA2; (+) strand; PAM type: YTN; PAM sequence: TTA
attgcacagaggaaagtata

SEQ ID NO: 367624 - DNA, 20 bp, Artificial Sequence
  Description of Artificial Sequence: Synthetic oligonucleotide
  Target: LAMA2; (+) strand; PAM type: YTN; PAM sequence: TTG
cacagaggaaagtatacctt

SEQ ID NO: 367625 - DNA, 20 bp, Artificial Sequence
  Description of Artificial Sequence: Synthetic oligonucleotide
  Target: LAMA2; (+) strand; PAM type: YTN; PAM sequence: CTT
ctttgcctgttttgtttgaa

SEQ ID NO: 367626 - DNA, 20 bp, Artificial Sequence
  Description of Artificial Sequence: Synthetic oligonucleotide
  Target: LAMA2; (+) strand; PAM type: YTN; PAM sequence: TTC
tttgcctgttttgtttgaat

SEQ ID NO: 367627 - DNA, 20 bp, Artificial Sequence
  Description of Artificial Sequence: Synthetic oligonucleotide
  Target: LAMA2; (+) strand; PAM type: YTN; PAM sequence: CTT
tgcctgttttgtttgaattt

SEQ ID NO: 367628 - DNA, 20 bp, Artificial Sequence
  Description of Artificial Sequence: Synthetic oligonucleotide
  Target: LAMA2; (+) strand; PAM type: YTN; PAM sequence: TTT
gcctgttttgtttgaatttt

SEQ ID NO: 367629 - DNA, 20 bp, Artificial Sequence
  Description of Artificial Sequence: Synthetic oligonucleotide
  Target: LAMA2; (+) strand; PAM type: YTN; PAM sequence: TTG
cctgttttgtttgaatttta

SEQ ID NO: 367630 - DNA, 20 bp, Artificial Sequence
  Description of Artificial Sequence: Synthetic oligonucleotide
  Target: LAMA2; (+) strand; PAM type: YTN; PAM sequence: CTG
ttttgtttgaattttaatat

SEQ ID NO: 367631 - DNA, 20 bp, Artificial Sequence
  Description of Artificial Sequence: Synthetic oligonucleotide
  Target: LAMA2; (+) strand; PAM type: YTN; PAM sequence: TTT
tgtttgaattttaatataaa

SEQ ID NO: 367632 - DNA, 20 bp, Artificial Sequence
  Description of Artificial Sequence: Synthetic oligonucleotide
  Target: LAMA2; (+) strand; PAM type: YTN; PAM sequence: TTT
gtttgaattttaatataaaa

SEQ ID NO: 367633 - DNA, 20 bp, Artificial Sequence
  Description of Artificial Sequence: Synthetic oligonucleotide
  Target: LAMA2; (+) strand; PAM type: YTN; PAM sequence: TTG
tttgaattttaatataaaat

SEQ ID NO: 367634 - DNA, 20 bp, Artificial Sequence
  Description of Artificial Sequence: Synthetic oligonucleotide
  Target: LAMA2; (+) strand; PAM type: YTN; PAM sequence: TTT
gaattttaatataaaataaa

SEQ ID NO: 367635 - DNA, 20 bp, Artificial Sequence
  Description of Artificial Sequence: Synthetic oligonucleotide
  Target: LAMA2; (+) strand; PAM type: YTN; PAM sequence: TTG
aattttaatataaaataaaa

SEQ ID NO: 367636 - DNA, 20 bp, Artificial Sequence
  Description of Artificial Sequence: Synthetic oligonucleotide
  Target: LAMA2; (+) strand; PAM type: YTN; PAM sequence: TTT
taatataaaataaaatttgc

SEQ ID NO: 367637 - DNA, 20 bp, Artificial Sequence
  Description of Artificial Sequence: Synthetic oligonucleotide
  Target: LAMA2; (+) strand; PAM type: YTN; PAM sequence: TTT
aatataaaataaaatttgct

SEQ ID NO: 367638 - DNA, 20 bp, Artificial Sequence
  Description of Artificial Sequence: Synthetic oligonucleotide
  Target: LAMA2; (+) strand; PAM type: YTN; PAM sequence: TTA
atataaaataaaatttgctg

SEQ ID NO: 367639 - DNA, 20 bp, Artificial Sequence
  Description of Artificial Sequence: Synthetic oligonucleotide
  Target: LAMA2; (+) strand; PAM type: YTN; PAM sequence: TTT
gctgctaaccttttgttttt

SEQ ID NO: 367640 - DNA, 20 bp, Artificial Sequence
  Description of Artificial Sequence: Synthetic oligonucleotide
  Target: LAMA2; (+) strand; PAM type: YTN; PAM sequence: TTG
ctgctaaccttttgtttttc

SEQ ID NO: 367641 - DNA, 20 bp, Artificial Sequence
  Description of Artificial Sequence: Synthetic oligonucleotide
  Target: LAMA2; (+) strand; PAM type: YTN; PAM sequence: CTG
ctaaccttttgtttttcttt

SEQ ID NO: 367642 - DNA, 20 bp, Artificial Sequence
  Description of Artificial Sequence: Synthetic oligonucleotide
  Target: LAMA2; (+) strand; PAM type: YTN; PAM sequence: CTA
accttttgtttttctttgac

SEQ ID NO: 367643 - DNA, 20 bp, Artificial Sequence
  Description of Artificial Sequence: Synthetic oligonucleotide
  Target: LAMA2; (+) strand; PAM type: YTN; PAM sequence: CTT
ttgtttttctttgaccaata

SEQ ID NO: 367644 - DNA, 20 bp, Artificial Sequence
  Description of Artificial Sequence: Synthetic oligonucleotide
  Target: LAMA2; (+) strand; PAM type: YTN; PAM sequence: TTT
tgtttttctttgaccaataa

SEQ ID NO: 367645 - DNA, 20 bp, Artificial Sequence
  Description of Artificial Sequence: Synthetic oligonucleotide
  Target: LAMA2; (+) strand; PAM type: YTN; PAM sequence: TTT
gtttttctttgaccaataac

SEQ ID NO: 367646 - DNA, 20 bp, Artificial Sequence
  Description of Artificial Sequence: Synthetic oligonucleotide
  Target: LAMA2; (+) strand; PAM type: YTN; PAM sequence: TTG
tttttctttgaccaataaca

SEQ ID NO: 367647 - DNA, 20 bp, Artificial Sequence
  Description of Artificial Sequence: Synthetic oligonucleotide
  Target: LAMA2; (+) strand; PAM type: YTN; PAM sequence: TTT
ttctttgaccaataacattt

SEQ ID NO: 367648 - DNA, 20 bp, Artificial Sequence
  Description of Artificial Sequence: Synthetic oligonucleotide
  Target: LAMA2; (+) strand; PAM type: YTN; PAM sequence: TTT
tctttgaccaataacatttc

SEQ ID NO: 367649 - DNA, 20 bp, Artificial Sequence
  Description of Artificial Sequence: Synthetic oligonucleotide
  Target: LAMA2; (+) strand; PAM type: YTN; PAM sequence: TTT
ctttgaccaataacatttct

SEQ ID NO: 367650 - DNA, 20 bp, Artificial Sequence
  Description of Artificial Sequence: Synthetic oligonucleotide
  Target: LAMA2; (+) strand; PAM type: YTN; PAM sequence: TTC
tttgaccaataacatttctc

SEQ ID NO: 367651 - DNA, 20 bp, Artificial Sequence
  Description of Artificial Sequence: Synthetic oligonucleotide
  Target: LAMA2; (+) strand; PAM type: YTN; PAM sequence: CTT
tgaccaataacatttctcag

SEQ ID NO: 367652 - DNA, 20 bp, Artificial Sequence
  Description of Artificial Sequence: Synthetic oligonucleotide
  Target: LAMA2; (+) strand; PAM type: YTN; PAM sequence: TTT
gaccaataacatttctcagc

SEQ ID NO: 367653 - DNA, 20 bp, Artificial Sequence
  Description of Artificial Sequence: Synthetic oligonucleotide
  Target: LAMA2; (+) strand; PAM type: YTN; PAM sequence: TTG
accaataacatttctcagct

SEQ ID NO: 367654 - DNA, 20 bp, Artificial Sequence
  Description of Artificial Sequence: Synthetic oligonucleotide
  Target: LAMA2; (+) strand; PAM type: YTN; PAM sequence: TTT
ctcagcttagtgtatgggct

SEQ ID NO: 367655 - DNA, 20 bp, Artificial Sequence
  Description of Artificial Sequence: Synthetic oligonucleotide
  Target: LAMA2; (+) strand; PAM type: YTN; PAM sequence: TTC
tcagcttagtgtatgggcta

SEQ ID NO: 367656 - DNA, 20 bp, Artificial Sequence
  Description of Artificial Sequence: Synthetic oligonucleotide
  Target: LAMA2; (+) strand; PAM type: YTN; PAM sequence: CTC
agcttagtgtatgggctatg

SEQ ID NO: 367657 - DNA, 20 bp, Artificial Sequence
  Description of Artificial Sequence: Synthetic oligonucleotide
  Target: LAMA2; (+) strand; PAM type: YTN; PAM sequence: CTT
agtgtatgggctatgtaaag

SEQ ID NO: 367658 - DNA, 20 bp, Artificial Sequence
  Description of Artificial Sequence: Synthetic oligonucleotide
  Target: LAMA2; (+) strand; PAM type: YTN; PAM sequence: TTA
gtgtatgggctatgtaaagt

SEQ ID NO: 367659 - DNA, 20 bp, Artificial Sequence
  Description of Artificial Sequence: Synthetic oligonucleotide
  Target: LAMA2; (+) strand; PAM type: YTN; PAM sequence: CTA
tgtaaagtgcctgtcaaatg

SEQ ID NO: 367660 - DNA, 20 bp, Artificial Sequence
  Description of Artificial Sequence: Synthetic oligonucleotide
  Target: LAMA2; (+) strand; PAM type: YTN; PAM sequence: CTG
tcaaatggagggatgtcttt

SEQ ID NO: 367661 - DNA, 20 bp, Artificial Sequence
  Description of Artificial Sequence: Synthetic oligonucleotide
  Target: LAMA2; (+) strand; PAM type: YTN; PAM sequence: CTT
tgttgaaagaatccagactc

SEQ ID NO: 367662 - DNA, 20 bp, Artificial Sequence
  Description of Artificial Sequence: Synthetic oligonucleotide
  Target: LAMA2; (+) strand; PAM type: YTN; PAM sequence: TTT
gttgaaagaatccagactca

SEQ ID NO: 367663 - DNA, 20 bp, Artificial Sequence
  Description of Artificial Sequence: Synthetic oligonucleotide
  Target: LAMA2; (+) strand; PAM type: YTN; PAM sequence: TTG
ttgaaagaatccagactcac

SEQ ID NO: 367664 - DNA, 20 bp, Artificial Sequence
  Description of Artificial Sequence: Synthetic oligonucleotide
  Target: LAMA2; (+) strand; PAM type: YTN; PAM sequence: TTG
aaagaatccagactcacaga

SEQ ID NO: 367665 - DNA, 20 bp, Artificial Sequence
  Description of Artificial Sequence: Synthetic oligonucleotide
  Target: LAMA2; (+) strand; PAM type: YTN; PAM sequence: CTC
acagaaagtgagtgactttc

SEQ ID NO: 367666 - DNA, 20 bp, Artificial Sequence
  Description of Artificial Sequence: Synthetic oligonucleotide
  Target: LAMA2; (+) strand; PAM type: YTN; PAM sequence: CTT
tctggtcagatggttagaac

SEQ ID NO: 367667 - DNA, 20 bp, Artificial Sequence
  Description of Artificial Sequence: Synthetic oligonucleotide
  Target: LAMA2; (+) strand; PAM type: YTN; PAM sequence: TTT
ctggtcagatggttagaact

SEQ ID NO: 367668 - DNA, 20 bp, Artificial Sequence
  Description of Artificial Sequence: Synthetic oligonucleotide
  Target: LAMA2; (+) strand; PAM type: YTN; PAM sequence: TTC
tggtcagatggttagaactc

SEQ ID NO: 367669 - DNA, 20 bp, Artificial Sequence
  Description of Artificial Sequence: Synthetic oligonucleotide
  Target: LAMA2; (+) strand; PAM type: YTN; PAM sequence: CTG
gtcagatggttagaactctc

SEQ ID NO: 367670 - DNA, 20 bp, Artificial Sequence
  Description of Artificial Sequence: Synthetic oligonucleotide
  Target: LAMA2; (+) strand; PAM type: YTN; PAM sequence: TTA
gaactctcccaattttgaca

SEQ ID NO: 367671 - DNA, 20 bp, Artificial Sequence
  Description of Artificial Sequence: Synthetic oligonucleotide
  Target: LAMA2; (+) strand; PAM type: YTN; PAM sequence: CTC
tcccaattttgacaaagatc

SEQ ID NO: 367672 - DNA, 20 bp, Artificial Sequence
  Description of Artificial Sequence: Synthetic oligonucleotide
  Target: LAMA2; (+) strand; PAM type: YTN; PAM sequence: CTC
ccaattttgacaaagatcgt

SEQ ID NO: 367673 - DNA, 20 bp, Artificial Sequence
  Description of Artificial Sequence: Synthetic oligonucleotide
  Target: LAMA2; (+) strand; PAM type: YTN; PAM sequence: TTT
tgacaaagatcgttctctgt

SEQ ID NO: 367674 - DNA, 20 bp, Artificial Sequence
  Description of Artificial Sequence: Synthetic oligonucleotide
  Target: LAMA2; (+) strand; PAM type: YTN; PAM sequence: TTT
gacaaagatcgttctctgtt

SEQ ID NO: 367675 - DNA, 20 bp, Artificial Sequence
  Description of Artificial Sequence: Synthetic oligonucleotide
  Target: LAMA2; (+) strand; PAM type: YTN; PAM sequence: TTG
acaaagatcgttctctgttt

SEQ ID NO: 367676 - DNA, 20 bp, Artificial Sequence
  Description of Artificial Sequence: Synthetic oligonucleotide
  Target: LAMA2; (+) strand; PAM type: YTN; PAM sequence: TTC
tctgtttgggatttgtaaag

SEQ ID NO: 367677 - DNA, 20 bp, Artificial Sequence
  Description of Artificial Sequence: Synthetic oligonucleotide
  Target: LAMA2; (+) strand; PAM type: YTN; PAM sequence: CTC
tgtttgggatttgtaaagct

SEQ ID NO: 367678 - DNA, 20 bp, Artificial Sequence
  Description of Artificial Sequence: Synthetic oligonucleotide
  Target: LAMA2; (+) strand; PAM type: YTN; PAM sequence: CTG
tttgggatttgtaaagctca

SEQ ID NO: 367679 - DNA, 20 bp, Artificial Sequence
  Description of Artificial Sequence: Synthetic oligonucleotide
  Target: LAMA2; (+) strand; PAM type: YTN; PAM sequence: TTT
gggatttgtaaagctcaaac

SEQ ID NO: 367680 - DNA, 20 bp, Artificial Sequence
  Description of Artificial Sequence: Synthetic oligonucleotide
  Target: LAMA2; (+) strand; PAM type: YTN; PAM sequence: TTG
ggatttgtaaagctcaaact

SEQ ID NO: 367681 - DNA, 20 bp, Artificial Sequence
  Description of Artificial Sequence: Synthetic oligonucleotide
  Target: LAMA2; (+) strand; PAM type: YTN; PAM sequence: TTT
gtaaagctcaaactgtagac

SEQ ID NO: 367682 - DNA, 20 bp, Artificial Sequence
  Description of Artificial Sequence: Synthetic oligonucleotide
  Target: LAMA2; (+) strand; PAM type: YTN; PAM sequence: TTG
taaagctcaaactgtagact

SEQ ID NO: 367683 - DNA, 20 bp, Artificial Sequence
  Description of Artificial Sequence: Synthetic oligonucleotide
  Target: LAMA2; (+) strand; PAM type: YTN; PAM sequence: CTC
aaactgtagactaagatgat

SEQ ID NO: 367684 - DNA, 20 bp, Artificial Sequence
  Description of Artificial Sequence: Synthetic oligonucleotide
  Target: LAMA2; (+) strand; PAM type: YTN; PAM sequence: CTG
tagactaagatgatgacagg

SEQ ID NO: 367685 - DNA, 20 bp, Artificial Sequence
  Description of Artificial Sequence: Synthetic oligonucleotide
  Target: LAMA2; (+) strand; PAM type: YTN; PAM sequence: CTA
agatgatgacaggaggatct

SEQ ID NO: 367686 - DNA, 20 bp, Artificial Sequence
  Description of Artificial Sequence: Synthetic oligonucleotide
  Target: LAMA2; (+) strand; PAM type: YTN; PAM sequence: CTG
ctgtttggcttcatggaact

SEQ ID NO: 367687 - DNA, 20 bp, Artificial Sequence
  Description of Artificial Sequence: Synthetic oligonucleotide
  Target: LAMA2; (+) strand; PAM type: YTN; PAM sequence: CTG
tttggcttcatggaacttaa

SEQ ID NO: 367688 - DNA, 20 bp, Artificial Sequence
  Description of Artificial Sequence: Synthetic oligonucleotide
  Target: LAMA2; (+) strand; PAM type: YTN; PAM sequence: TTT
ggcttcatggaacttaacct

SEQ ID NO: 367689 - DNA, 20 bp, Artificial Sequence
  Description of Artificial Sequence: Synthetic oligonucleotide
  Target: LAMA2; (+) strand; PAM type: YTN; PAM sequence: TTG
gcttcatggaacttaaccta

SEQ ID NO: 367690 - DNA, 20 bp, Artificial Sequence
  Description of Artificial Sequence: Synthetic oligonucleotide
  Target: LAMA2; (+) strand; PAM type: YTN; PAM sequence: CTT
catggaacttaacctatttc

SEQ ID NO: 367691 - DNA, 20 bp, Artificial Sequence
  Description of Artificial Sequence: Synthetic oligonucleotide
  Target: LAMA2; (+) strand; PAM type: YTN; PAM sequence: TTC
atggaacttaacctatttca

SEQ ID NO: 367692 - DNA, 20 bp, Artificial Sequence
  Description of Artificial Sequence: Synthetic oligonucleotide
  Target: LAMA2; (+) strand; PAM type: YTN; PAM sequence: CTT
aacctatttcagcaagcctg

SEQ ID NO: 367693 - DNA, 20 bp, Artificial Sequence
  Description of Artificial Sequence: Synthetic oligonucleotide
  Target: LAMA2; (+) strand; PAM type: YTN; PAM sequence: TTA
acctatttcagcaagcctgc

SEQ ID NO: 367694 - DNA, 20 bp, Artificial Sequence
  Description of Artificial Sequence: Synthetic oligonucleotide
  Target: LAMA2; (+) strand; PAM type: YTN; PAM sequence: CTA
tttcagcaagcctgcaatac

SEQ ID NO: 367695 - DNA, 20 bp, Artificial Sequence
  Description of Artificial Sequence: Synthetic oligonucleotide
  Target: LAMA2; (+) strand; PAM type: YTN; PAM sequence: TTT
cagcaagcctgcaatactgg

SEQ ID NO: 367696 - DNA, 20 bp, Artificial Sequence
  Description of Artificial Sequence: Synthetic oligonucleotide
  Target: LAMA2; (+) strand; PAM type: YTN; PAM sequence: TTC
agcaagcctgcaatactggg

SEQ ID NO: 367697 - DNA, 20 bp, Artificial Sequence
  Description of Artificial Sequence: Synthetic oligonucleotide
  Target: LAMA2; (+) strand; PAM type: YTN; PAM sequence: CTG
caatactggggaaaataata

SEQ ID NO: 367698 - DNA, 20 bp, Artificial Sequence
  Description of Artificial Sequence: Synthetic oligonucleotide
  Target: LAMA2; (+) strand; PAM type: YTN; PAM sequence: CTG
gggaaaataatacatatatt

SEQ ID NO: 367699 - DNA, 20 bp, Artificial Sequence
  Description of Artificial Sequence: Synthetic oligonucleotide
  Target: LAMA2; (+) strand; PAM type: YTN; PAM sequence: TTT
atgtttatgtcaggcttgca

SEQ ID NO: 367700 - DNA, 20 bp, Artificial Sequence
  Description of Artificial Sequence: Synthetic oligonucleotide
  Target: LAMA2; (+) strand; PAM type: YTN; PAM sequence: TTA
tgtttatgtcaggcttgcag

SEQ ID NO: 367701 - DNA, 20 bp, Artificial Sequence
  Description of Artificial Sequence: Synthetic oligonucleotide
  Target: LAMA2; (+) strand; PAM type: YTN; PAM sequence: TTT
atgtcaggcttgcagttgat

SEQ ID NO: 367702 - DNA, 20 bp, Artificial Sequence
  Description of Artificial Sequence: Synthetic oligonucleotide
  Target: LAMA2; (+) strand; PAM type: YTN; PAM sequence: TTA
tgtcaggcttgcagttgatg

SEQ ID NO: 367703 - DNA, 20 bp, Artificial Sequence
  Description of Artificial Sequence: Synthetic oligonucleotide
  Target: LAMA2; (+) strand; PAM type: YTN; PAM sequence: CTT
gcagttgatgggtaaggttc

SEQ ID NO: 367704 - DNA, 20 bp, Artificial Sequence
  Description of Artificial Sequence: Synthetic oligonucleotide
  Target: LAMA2; (+) strand; PAM type: YTN; PAM sequence: TTG
cagttgatgggtaaggttca

SEQ ID NO: 367705 - DNA, 20 bp, Artificial Sequence
  Description of Artificial Sequence: Synthetic oligonucleotide
  Target: LAMA2; (+) strand; PAM type: YTN; PAM sequence: TTG
atgggtaaggttcataaaag

SEQ ID NO: 367706 - DNA, 20 bp, Artificial Sequence
  Description of Artificial Sequence: Synthetic oligonucleotide
  Target: LAMA2; (+) strand; PAM type: YTN; PAM sequence: TTC
ataaaaggttactcctaaat

SEQ ID NO: 367707 - DNA, 20 bp, Artificial Sequence
  Description of Artificial Sequence: Synthetic oligonucleotide
  Target: LAMA2; (+) strand; PAM type: YTN; PAM sequence: TTA
ctcctaaataaatgcctatc

SEQ ID NO: 367708 - DNA, 20 bp, Artificial Sequence
  Description of Artificial Sequence: Synthetic oligonucleotide
  Target: LAMA2; (+) strand; PAM type: YTN; PAM sequence: CTC
ctaaataaatgcctatcatt

SEQ ID NO: 367709 - DNA, 20 bp, Artificial Sequence
  Description of Artificial Sequence: Synthetic oligonucleotide
  Target: LAMA2; (+) strand; PAM type: YTN; PAM sequence: CTA
aataaatgcctatcattccc

SEQ ID NO: 367710 - DNA, 20 bp, Artificial Sequence
  Description of Artificial Sequence: Synthetic oligonucleotide
  Target: LAMA2; (+) strand; PAM type: YTN; PAM sequence: CTA
tcattcccactccgtactcc

SEQ ID NO: 367711 - DNA, 20 bp, Artificial Sequence
  Description of Artificial Sequence: Synthetic oligonucleotide
  Target: LAMA2; (+) strand; PAM type: YTN; PAM sequence: TTC
ccactccgtactccagtgat

SEQ ID NO: 367712 - DNA, 20 bp, Artificial Sequence
  Description of Artificial Sequence: Synthetic oligonucleotide
  Target: LAMA2; (+) strand; PAM type: YTN; PAM sequence: CTC
cgtactccagtgatttctgc

SEQ ID NO: 367713 - DNA, 20 bp, Artificial Sequence
  Description of Artificial Sequence: Synthetic oligonucleotide
  Target: LAMA2; (+) strand; PAM type: YTN; PAM sequence: CTC
cagtgatttctgcgtcttgc

SEQ ID NO: 367714 - DNA, 20 bp, Artificial Sequence
  Description of Artificial Sequence: Synthetic oligonucleotide
  Target: LAMA2; (+) strand; PAM type: YTN; PAM sequence: TTT
ctgcgtcttgcaaatactgc

SEQ ID NO: 367715 - DNA, 20 bp, Artificial Sequence
  Description of Artificial Sequence: Synthetic oligonucleotide
  Target: LAMA2; (+) strand; PAM type: YTN; PAM sequence: TTC
tgcgtcttgcaaatactgcc

SEQ ID NO: 367716 - DNA, 20 bp, Artificial Sequence
  Description of Artificial Sequence: Synthetic oligonucleotide
  Target: LAMA2; (+) strand; PAM type: YTN; PAM sequence: CTG
cgtcttgcaaatactgccct

SEQ ID NO: 367717 - DNA, 20 bp, Artificial Sequence
  Description of Artificial Sequence: Synthetic oligonucleotide
  Target: LAMA2; (+) strand; PAM type: YTN; PAM sequence: CTT
gcaaatactgccctatagaa

SEQ ID NO: 367718 - DNA, 20 bp, Artificial Sequence
  Description of Artificial Sequence: Synthetic oligonucleotide
  Target: LAMA2; (+) strand; PAM type: YTN; PAM sequence: TTG
caaatactgccctatagaac

SEQ ID NO: 367719 - DNA, 20 bp, Artificial Sequence
  Description of Artificial Sequence: Synthetic oligonucleotide
  Target: LAMA2; (+) strand; PAM type: YTN; PAM sequence: CTG
ccctatagaacaataaaatt

SEQ ID NO: 367720 - DNA, 20 bp, Artificial Sequence
  Description of Artificial Sequence: Synthetic oligonucleotide
  Target: LAMA2; (+) strand; PAM type: YTN; PAM sequence: CTA
tagaacaataaaattcgtat

SEQ ID NO: 367721 - DNA, 20 bp, Artificial Sequence
  Description of Artificial Sequence: Synthetic oligonucleotide
  Target: LAMA2; (+) strand; PAM type: YTN; PAM sequence: TTC
gtatacaacagtaagtaaaa

SEQ ID NO: 367722 - DNA, 20 bp, Artificial Sequence
  Description of Artificial Sequence: Synthetic oligonucleotide
  Target: LAMA2; (+) strand; PAM type: YTN; PAM sequence: TTT
aatagcccatctcctatccc

SEQ ID NO: 367723 - DNA, 20 bp, Artificial Sequence
  Description of Artificial Sequence: Synthetic oligonucleotide
  Target: LAMA2; (+) strand; PAM type: YTN; PAM sequence: TTA
atagcccatctcctatcccg

SEQ ID NO: 367724 - DNA, 20 bp, Artificial Sequence
  Description of Artificial Sequence: Synthetic oligonucleotide
  Target: LAMA2; (+) strand; PAM type: YTN; PAM sequence: CTC
ctatcccgtaatgattatgc

SEQ ID NO: 367725 - DNA, 20 bp, Artificial Sequence
  Description of Artificial Sequence: Synthetic oligonucleotide
  Target: LAMA2; (+) strand; PAM type: YTN; PAM sequence: CTA
tcccgtaatgattatgcatc

SEQ ID NO: 367726 - DNA, 20 bp, Artificial Sequence
  Description of Artificial Sequence: Synthetic oligonucleotide
  Target: LAMA2; (+) strand; PAM type: YTN; PAM sequence: TTA
tgcatcttctgtcttgtagc

SEQ ID NO: 367727 - DNA, 20 bp, Artificial Sequence
  Description of Artificial Sequence: Synthetic oligonucleotide
  Target: LAMA2; (+) strand; PAM type: YTN; PAM sequence: CTT
ctgtcttgtagctcccagca

SEQ ID NO: 367728 - DNA, 20 bp, Artificial Sequence
  Description of Artificial Sequence: Synthetic oligonucleotide
  Target: LAMA2; (+) strand; PAM type: YTN; PAM sequence: TTC
tgtcttgtagctcccagcag

SEQ ID NO: 367729 - DNA, 20 bp, Artificial Sequence
  Description of Artificial Sequence: Synthetic oligonucleotide
  Target: LAMA2; (+) strand; PAM type: YTN; PAM sequence: CTG
tcttgtagctcccagcagta

SEQ ID NO: 367730 - DNA, 20 bp, Artificial Sequence
  Description of Artificial Sequence: Synthetic oligonucleotide
  Target: LAMA2; (+) strand; PAM type: YTN; PAM sequence: CTT
gtagctcccagcagtaggag

SEQ ID NO: 367731 - DNA, 20 bp, Artificial Sequence
  Description of Artificial Sequence: Synthetic oligonucleotide
  Target: LAMA2; (+) strand; PAM type: YTN; PAM sequence: TTG
tagctcccagcagtaggagg

SEQ ID NO: 367732 - DNA, 20 bp, Artificial Sequence
  Description of Artificial Sequence: Synthetic oligonucleotide
  Target: LAMA2; (+) strand; PAM type: YTN; PAM sequence: CTC
ccagcagtaggaggacagtt

SEQ ID NO: 367733 - DNA, 20 bp, Artificial Sequence
  Description of Artificial Sequence: Synthetic oligonucleotide
  Target: LAMA2; (+) strand; PAM type: YTN; PAM sequence: TTG
acatttaccatatcatatga

SEQ ID NO: 367734 - DNA, 20 bp, Artificial Sequence
  Description of Artificial Sequence: Synthetic oligonucleotide
  Target: LAMA2; (+) strand; PAM type: YTN; PAM sequence: TTT
accatatcatatgaccttga

SEQ ID NO: 367735 - DNA, 20 bp, Artificial Sequence
  Description of Artificial Sequence: Synthetic oligonucleotide
  Target: LAMA2; (+) strand; PAM type: YTN; PAM sequence: TTA
ccatatcatatgaccttgaa

SEQ ID NO: 367736 - DNA, 20 bp, Artificial Sequence
  Description of Artificial Sequence: Synthetic oligonucleotide
  Target: LAMA2; (+) strand; PAM type: YTN; PAM sequence: CTT
gaagaagaggaagaagatac

SEQ ID NO: 367737 - DNA, 20 bp, Artificial Sequence
  Description of Artificial Sequence: Synthetic oligonucleotide
  Target: LAMA2; (+) strand; PAM type: YTN; PAM sequence: TTG
aagaagaggaagaagataca

SEQ ID NO: 367738 - DNA, 20 bp, Artificial Sequence
  Description of Artificial Sequence: Synthetic oligonucleotide
  Target: LAMA2; (+) strand; PAM type: YTN; PAM sequence: TTC
tccagcttatgattatctta

SEQ ID NO: 367739 - DNA, 20 bp, Artificial Sequence
  Description of Artificial Sequence: Synthetic oligonucleotide
  Target: LAMA2; (+) strand; PAM type: YTN; PAM sequence: CTC
cagcttatgattatcttaga

SEQ ID NO: 367740 - DNA, 20 bp, Artificial Sequence
  Description of Artificial Sequence: Synthetic oligonucleotide
  Target: LAMA2; (+) strand; PAM type: YTN; PAM sequence: CTT
atgattatcttagaggtaga

SEQ ID NO: 367741 - DNA, 20 bp, Artificial Sequence
  Description of Artificial Sequence: Synthetic oligonucleotide
  Target: LAMA2; (+) strand; PAM type: YTN; PAM sequence: TTA
tgattatcttagaggtagag

SEQ ID NO: 367742 - DNA, 20 bp, Artificial Sequence
  Description of Artificial Sequence: Synthetic oligonucleotide
  Target: LAMA2; (+) strand; PAM type: YTN; PAM sequence: TTA
tcttagaggtagagtactga

SEQ ID NO: 367743 - DNA, 20 bp, Artificial Sequence
  Description of Artificial Sequence: Synthetic oligonucleotide
  Target: LAMA2; (+) strand; PAM type: YTN; PAM sequence: CTT
agaggtagagtactgagagc

SEQ ID NO: 367744 - DNA, 20 bp, Artificial Sequence
  Description of Artificial Sequence: Synthetic oligonucleotide
  Target: LAMA2; (+) strand; PAM type: YTN; PAM sequence: TTA
gaggtagagtactgagagca

SEQ ID NO: 367745 - DNA, 20 bp, Artificial Sequence
  Description of Artificial Sequence: Synthetic oligonucleotide
  Target: LAMA2; (+) strand; PAM type: YTN; PAM sequence: CTG
agagcatgttcacccgtgtt

SEQ ID NO: 367746 - DNA, 20 bp, Artificial Sequence
  Description of Artificial Sequence: Synthetic oligonucleotide
  Target: LAMA2; (+) strand; PAM type: YTN; PAM sequence: TTC
acccgtgttacttcctgatg

SEQ ID NO: 367747 - DNA, 20 bp, Artificial Sequence
  Description of Artificial Sequence: Synthetic oligonucleotide
  Target: LAMA2; (+) strand; PAM type: YTN; PAM sequence: TTA
cttcctgatgttacttaagg

SEQ ID NO: 367748 - DNA, 20 bp, Artificial Sequence
  Description of Artificial Sequence: Synthetic oligonucleotide
  Target: LAMA2; (+) strand; PAM type: YTN; PAM sequence: CTT
cctgatgttacttaaggtta

SEQ ID NO: 367749 - DNA, 20 bp, Artificial Sequence
  Description of Artificial Sequence: Synthetic oligonucleotide
  Target: LAMA2; (+) strand; PAM type: YTN; PAM sequence: TTC
ctgatgttacttaaggttac

SEQ ID NO: 367750 - DNA, 20 bp, Artificial Sequence
  Description of Artificial Sequence: Synthetic oligonucleotide
  Target: LAMA2; (+) strand; PAM type: YTN; PAM sequence: CTG
atgttacttaaggttaccag

SEQ ID NO: 367751 - DNA, 20 bp, Artificial Sequence
  Description of Artificial Sequence: Synthetic oligonucleotide
  Target: LAMA2; (+) strand; PAM type: YTN; PAM sequence: TTA
cttaaggttaccagtactgt

SEQ ID NO: 367752 - DNA, 20 bp, Artificial Sequence
  Description of Artificial Sequence: Synthetic oligonucleotide
  Target: LAMA2; (+) strand; PAM type: YTN; PAM sequence: CTT
aaggttaccagtactgtatt

SEQ ID NO: 367753 - DNA, 20 bp, Artificial Sequence
  Description of Artificial Sequence: Synthetic oligonucleotide
  Target: LAMA2; (+) strand; PAM type: YTN; PAM sequence: TTA
aggttaccagtactgtattt

SEQ ID NO: 367754 - DNA, 20 bp, Artificial Sequence
  Description of Artificial Sequence: Synthetic oligonucleotide
  Target: LAMA2; (+) strand; PAM type: YTN; PAM sequence: TTA
ccagtactgtattttttacc

SEQ ID NO: 367755 - DNA, 20 bp, Artificial Sequence
  Description of Artificial Sequence: Synthetic oligonucleotide
  Target: LAMA2; (+) strand; PAM type: YTN; PAM sequence: CTG
tattttttacctgcctggtt

SEQ ID NO: 367756 - DNA, 20 bp, Artificial Sequence
  Description of Artificial Sequence: Synthetic oligonucleotide
  Target: LAMA2; (+) strand; PAM type: YTN; PAM sequence: TTT
tttacctgcctggtttgaca

SEQ ID NO: 367757 - DNA, 20 bp, Artificial Sequence
  Description of Artificial Sequence: Synthetic oligonucleotide
  Target: LAMA2; (+) strand; PAM type: YTN; PAM sequence: TTT
ttacctgcctggtttgacac

SEQ ID NO: 367758 - DNA, 20 bp, Artificial Sequence
  Description of Artificial Sequence: Synthetic oligonucleotide
  Target: LAMA2; (+) strand; PAM type: YTN; PAM sequence: TTT
tacctgcctggtttgacact

SEQ ID NO: 367759 - DNA, 20 bp, Artificial Sequence
  Description of Artificial Sequence: Synthetic oligonucleotide
  Target: LAMA2; (+) strand; PAM type: YTN; PAM sequence: TTT
acctgcctggtttgacactg

SEQ ID NO: 367760 - DNA, 20 bp, Artificial Sequence
  Description of Artificial Sequence: Synthetic oligonucleotide
  Target: LAMA2; (+) strand; PAM type: YTN; PAM sequence: TTA
cctgcctggtttgacactga

SEQ ID NO: 367761 - DNA, 20 bp, Artificial Sequence
  Description of Artificial Sequence: Synthetic oligonucleotide
  Target: LAMA2; (+) strand; PAM type: YTN; PAM sequence: CTG
cctggtttgacactgactta

SEQ ID NO: 367762 - DNA, 20 bp, Artificial Sequence
  Description of Artificial Sequence: Synthetic oligonucleotide
  Target: LAMA2; (+) strand; PAM type: YTN; PAM sequence: CTG
gtttgacactgacttacagg

SEQ ID NO: 367763 - DNA, 20 bp, Artificial Sequence
  Description of Artificial Sequence: Synthetic oligonucleotide
  Target: LAMA2; (+) strand; PAM type: YTN; PAM sequence: TTT
gacactgacttacaggacta

SEQ ID NO: 367764 - DNA, 20 bp, Artificial Sequence
  Description of Artificial Sequence: Synthetic oligonucleotide
  Target: LAMA2; (+) strand; PAM type: YTN; PAM sequence: TTG
acactgacttacaggactac

SEQ ID NO: 367765 - DNA, 20 bp, Artificial Sequence
  Description of Artificial Sequence: Synthetic oligonucleotide
  Target: LAMA2; (+) strand; PAM type: YTN; PAM sequence: CTG
acttacaggactactaaaaa

SEQ ID NO: 367766 - DNA, 20 bp, Artificial Sequence
  Description of Artificial Sequence: Synthetic oligonucleotide
  Target: LAMA2; (+) strand; PAM type: YTN; PAM sequence: CTT
acaggactactaaaaaaaaa

SEQ ID NO: 367767 - DNA, 20 bp, Artificial Sequence
  Description of Artificial Sequence: Synthetic oligonucleotide
  Target: LAMA2; (+) strand; PAM type: YTN; PAM sequence: TTA
caggactactaaaaaaaaat

SEQ ID NO: 367768 - DNA, 20 bp, Artificial Sequence
  Description of Artificial Sequence: Synthetic oligonucleotide
  Target: LAMA2; (+) strand; PAM type: YTN; PAM sequence: CTA
ctaaaaaaaaatatacctta

SEQ ID NO: 367769 - DNA, 20 bp, Artificial Sequence
  Description of Artificial Sequence: Synthetic oligonucleotide
  Target: LAMA2; (+) strand; PAM type: YTN; PAM sequence: CTA
aaaaaaaatataccttagga

SEQ ID NO: 367770 - DNA, 20 bp, Artificial Sequence
  Description of Artificial Sequence: Synthetic oligonucleotide
  Target: LAMA2; (+) strand; PAM type: YTN; PAM sequence: CTT
aggagatttttgtgccactc

SEQ ID NO: 367771 - DNA, 20 bp, Artificial Sequence
  Description of Artificial Sequence: Synthetic oligonucleotide
  Target: LAMA2; (+) strand; PAM type: YTN; PAM sequence: TTA
ggagatttttgtgccactct

SEQ ID NO: 367772 - DNA, 20 bp, Artificial Sequence
  Description of Artificial Sequence: Synthetic oligonucleotide
  Target: LAMA2; (+) strand; PAM type: YTN; PAM sequence: TTT
ttgtgccactcttttgtttc

SEQ ID NO: 367773 - DNA, 20 bp, Artificial Sequence
  Description of Artificial Sequence: Synthetic oligonucleotide
  Target: LAMA2; (+) strand; PAM type: YTN; PAM sequence: TTT
tgtgccactcttttgtttca

SEQ ID NO: 367774 - DNA, 20 bp, Artificial Sequence
  Description of Artificial Sequence: Synthetic oligonucleotide
  Target: LAMA2; (+) strand; PAM type: YTN; PAM sequence: TTT
gtgccactcttttgtttcac

SEQ ID NO: 367775 - DNA, 20 bp, Artificial Sequence
  Description of Artificial Sequence: Synthetic oligonucleotide
  Target: LAMA2; (+) strand; PAM type: YTN; PAM sequence: TTG
tgccactcttttgtttcact

SEQ ID NO: 367776 - DNA, 20 bp, Artificial Sequence
  Description of Artificial Sequence: Synthetic oligonucleotide
  Target: LAMA2; (+) strand; PAM type: YTN; PAM sequence: CTC
ttttgtttcactctgagaca

SEQ ID NO: 367777 - DNA, 20 bp, Artificial Sequence
  Description of Artificial Sequence: Synthetic oligonucleotide
  Target: LAMA2; (+) strand; PAM type: YTN; PAM sequence: CTT
ttgtttcactctgagacata

SEQ ID NO: 367778 - DNA, 20 bp, Artificial Sequence
  Description of Artificial Sequence: Synthetic oligonucleotide
  Target: LAMA2; (+) strand; PAM type: YTN; PAM sequence: TTT
tgtttcactctgagacatat

SEQ ID NO: 367779 - DNA, 20 bp, Artificial Sequence
  Description of Artificial Sequence: Synthetic oligonucleotide
  Target: LAMA2; (+) strand; PAM type: YTN; PAM sequence: TTT
gtttcactctgagacatatc

SEQ ID NO: 367780 - DNA, 20 bp, Artificial Sequence
  Description of Artificial Sequence: Synthetic oligonucleotide
  Target: LAMA2; (+) strand; PAM type: YTN; PAM sequence: TTG
tttcactctgagacatatct

SEQ ID NO: 367781 - DNA, 20 bp, Artificial Sequence
  Description of Artificial Sequence: Synthetic oligonucleotide
  Target: LAMA2; (+) strand; PAM type: YTN; PAM sequence: TTT
cactctgagacatatctaga

SEQ ID NO: 367782 - DNA, 20 bp, Artificial Sequence
  Description of Artificial Sequence: Synthetic oligonucleotide
  Target: LAMA2; (+) strand; PAM type: YTN; PAM sequence: TTC
actctgagacatatctagaa

SEQ ID NO: 367783 - DNA, 20 bp, Artificial Sequence
  Description of Artificial Sequence: Synthetic oligonucleotide
  Target: LAMA2; (+) strand; PAM type: YTN; PAM sequence: CTC
tgagacatatctagaagatt

SEQ ID NO: 367784 - DNA, 20 bp, Artificial Sequence
  Description of Artificial Sequence: Synthetic oligonucleotide
  Target: LAMA2; (+) strand; PAM type: YTN; PAM sequence: CTG
agacatatctagaagattga

SEQ ID NO: 367785 - DNA, 20 bp, Artificial Sequence
  Description of Artificial Sequence: Synthetic oligonucleotide
  Target: LAMA2; (+) strand; PAM type: YTN; PAM sequence: CTA
gaagattgagtatatttgtt

SEQ ID NO: 367786 - DNA, 20 bp, Artificial Sequence
  Description of Artificial Sequence: Synthetic oligonucleotide
  Target: LAMA2; (+) strand; PAM type: YTN; PAM sequence: TTG
agtatatttgttgggtttga

SEQ ID NO: 367787 - DNA, 20 bp, Artificial Sequence
  Description of Artificial Sequence: Synthetic oligonucleotide
  Target: LAMA2; (+) strand; PAM type: YTN; PAM sequence: TTT
gttgggtttgaatgataaag

SEQ ID NO: 367788 - DNA, 20 bp, Artificial Sequence
  Description of Artificial Sequence: Synthetic oligonucleotide
  Target: LAMA2; (+) strand; PAM type: YTN; PAM sequence: TTG
ttgggtttgaatgataaagg

SEQ ID NO: 367789 - DNA, 20 bp, Artificial Sequence
  Description of Artificial Sequence: Synthetic oligonucleotide
  Target: LAMA2; (+) strand; PAM type: YTN; PAM sequence: TTG
ggtttgaatgataaaggaga

SEQ ID NO: 367790 - DNA, 20 bp, Artificial Sequence
  Description of Artificial Sequence: Synthetic oligonucleotide
  Target: LAMA2; (+) strand; PAM type: YTN; PAM sequence: TTT
gaatgataaaggagaacttt

SEQ ID NO: 367791 - DNA, 20 bp, Artificial Sequence
  Description of Artificial Sequence: Synthetic oligonucleotide
  Target: LAMA2; (+) strand; PAM type: YTN; PAM sequence: TTG
aatgataaaggagaacttta

SEQ ID NO: 367792 - DNA, 20 bp, Artificial Sequence
  Description of Artificial Sequence: Synthetic oligonucleotide
  Target: LAMA2; (+) strand; PAM type: YTN; PAM sequence: CTT
tagaccagacttgaaattaa

SEQ ID NO: 367793 - DNA, 20 bp, Artificial Sequence
  Description of Artificial Sequence: Synthetic oligonucleotide
  Target: LAMA2; (+) strand; PAM type: YTN; PAM sequence: TTT
agaccagacttgaaattaaa

SEQ ID NO: 367794 - DNA, 20 bp, Artificial Sequence
  Description of Artificial Sequence: Synthetic oligonucleotide
  Target: LAMA2; (+) strand; PAM type: YTN; PAM sequence: TTA
gaccagacttgaaattaaat

SEQ ID NO: 367795 - DNA, 20 bp, Artificial Sequence
  Description of Artificial Sequence: Synthetic oligonucleotide
  Target: LAMA2; (+) strand; PAM type: YTN; PAM sequence: CTT
gaaattaaatttcaaacata

SEQ ID NO: 367796 - DNA, 20 bp, Artificial Sequence
  Description of Artificial Sequence: Synthetic oligonucleotide
  Target: LAMA2; (+) strand; PAM type: YTN; PAM sequence: TTG
aaattaaatttcaaacataa

SEQ ID NO: 367797 - DNA, 20 bp, Artificial Sequence
  Description of Artificial Sequence: Synthetic oligonucleotide
  Target: LAMA2; (+) strand; PAM type: YTN; PAM sequence: TTA
aatttcaaacataaggacca

SEQ ID NO: 367798 - DNA, 20 bp, Artificial Sequence
  Description of Artificial Sequence: Synthetic oligonucleotide
  Target: LAMA2; (+) strand; PAM type: YTN; PAM sequence: TTT
caaacataaggaccatattt

SEQ ID NO: 367799 - DNA, 20 bp, Artificial Sequence
  Description of Artificial Sequence: Synthetic oligonucleotide
  Target: LAMA2; (+) strand; PAM type: YTN; PAM sequence: TTC
aaacataaggaccatatttc

SEQ ID NO: 367800 - DNA, 20 bp, Artificial Sequence
  Description of Artificial Sequence: Synthetic oligonucleotide
  Target: LAMA2; (+) strand; PAM type: YTN; PAM sequence: TTT
ccaaaatttaaatattatga

SEQ ID NO: 367801 - DNA, 20 bp, Artificial Sequence
  Description of Artificial Sequence: Synthetic oligonucleotide
  Target: LAMA2; (+) strand; PAM type: YTN; PAM sequence: TTC
caaaatttaaatattatgaa

SEQ ID NO: 367802 - DNA, 20 bp, Artificial Sequence
  Description of Artificial Sequence: Synthetic oligonucleotide
  Target: LAMA2; (+) strand; PAM type: YTN; PAM sequence: TTT
aaatattatgaaagtgttta

SEQ ID NO: 367803 - DNA, 20 bp, Artificial Sequence
  Description of Artificial Sequence: Synthetic oligonucleotide
  Target: LAMA2; (+) strand; PAM type: YTN; PAM sequence: TTA
aatattatgaaagtgtttag

SEQ ID NO: 367804 - DNA, 20 bp, Artificial Sequence
  Description of Artificial Sequence: Synthetic oligonucleotide
  Target: LAMA2; (+) strand; PAM type: YTN; PAM sequence: TTA
tgaaagtgtttaggtacatg

SEQ ID NO: 367805 - DNA, 20 bp, Artificial Sequence
  Description of Artificial Sequence: Synthetic oligonucleotide
  Target: LAMA2; (+) strand; PAM type: YTN; PAM sequence: TTT
aggtacatgctaatttacat

SEQ ID NO: 367806 - DNA, 20 bp, Artificial Sequence
  Description of Artificial Sequence: Synthetic oligonucleotide
  Target: LAMA2; (+) strand; PAM type: YTN; PAM sequence: TTA
ggtacatgctaatttacatg

SEQ ID NO: 367807 - DNA, 20 bp, Artificial Sequence
  Description of Artificial Sequence: Synthetic oligonucleotide
  Target: LAMA2; (+) strand; PAM type: YTN; PAM sequence: CTA
atttacatggttgtgttttt

SEQ ID NO: 367808 - DNA, 20 bp, Artificial Sequence
  Description of Artificial Sequence: Synthetic oligonucleotide
  Target: LAMA2; (+) strand; PAM type: YTN; PAM sequence: TTT
acatggttgtgtttttcctg

SEQ ID NO: 367809 - DNA, 20 bp, Artificial Sequence
  Description of Artificial Sequence: Synthetic oligonucleotide
  Target: LAMA2; (+) strand; PAM type: YTN; PAM sequence: TTA
catggttgtgtttttcctgt

SEQ ID NO: 367810 - DNA, 20 bp, Artificial Sequence
  Description of Artificial Sequence: Synthetic oligonucleotide
  Target: LAMA2; (+) strand; PAM type: YTN; PAM sequence: TTG
tgtttttcctgttttctctt

SEQ ID NO: 367811 - DNA, 20 bp, Artificial Sequence
  Description of Artificial Sequence: Synthetic oligonucleotide
  Target: LAMA2; (+) strand; PAM type: YTN; PAM sequence: TTT
ttcctgttttctcttgcttc

SEQ ID NO: 367812 - DNA, 20 bp, Artificial Sequence
  Description of Artificial Sequence: Synthetic oligonucleotide
  Target: LAMA2; (+) strand; PAM type: YTN; PAM sequence: TTT
tcctgttttctcttgcttcc

SEQ ID NO: 367813 - DNA, 20 bp, Artificial Sequence
  Description of Artificial Sequence: Synthetic oligonucleotide
  Target: LAMA2; (+) strand; PAM type: YTN; PAM sequence: TTT
cctgttttctcttgcttcca

SEQ ID NO: 367814 - DNA, 20 bp, Artificial Sequence
  Description of Artificial Sequence: Synthetic oligonucleotide
  Target: LAMA2; (+) strand; PAM type: YTN; PAM sequence: TTC
ctgttttctcttgcttccag

SEQ ID NO: 367815 - DNA, 20 bp, Artificial Sequence
  Description of Artificial Sequence: Synthetic oligonucleotide
  Target: LAMA2; (+) strand; PAM type: YTN; PAM sequence: CTG
ttttctcttgcttccagata

SEQ ID NO: 367816 - DNA, 20 bp, Artificial Sequence
  Description of Artificial Sequence: Synthetic oligonucleotide
  Target: LAMA2; (+) strand; PAM type: YTN; PAM sequence: TTT
tctcttgcttccagatagat

SEQ ID NO: 367817 - DNA, 20 bp, Artificial Sequence
  Description of Artificial Sequence: Synthetic oligonucleotide
  Target: LAMA2; (+) strand; PAM type: YTN; PAM sequence: TTT
ctcttgcttccagatagatt

SEQ ID NO: 367818 - DNA, 20 bp, Artificial Sequence
  Description of Artificial Sequence: Synthetic oligonucleotide
  Target: LAMA2; (+) strand; PAM type: YTN; PAM sequence: TTC
tcttgcttccagatagattt

SEQ ID NO: 367819 - DNA, 20 bp, Artificial Sequence
  Description of Artificial Sequence: Synthetic oligonucleotide
  Target: LAMA2; (+) strand; PAM type: YTN; PAM sequence: CTC
ttgcttccagatagatttta

SEQ ID NO: 367820 - DNA, 20 bp, Artificial Sequence
  Description of Artificial Sequence: Synthetic oligonucleotide
  Target: LAMA2; (+) strand; PAM type: YTN; PAM sequence: CTT
gcttccagatagattttatt

SEQ ID NO: 367821 - DNA, 20 bp, Artificial Sequence
  Description of Artificial Sequence: Synthetic oligonucleotide
  Target: LAMA2; (+) strand; PAM type: YTN; PAM sequence: TTG
cttccagatagattttattg

SEQ ID NO: 367822 - DNA, 20 bp, Artificial Sequence
  Description of Artificial Sequence: Synthetic oligonucleotide
  Target: LAMA2; (+) strand; PAM type: YTN; PAM sequence: CTT
ccagatagattttattgtct

SEQ ID NO: 367823 - DNA, 20 bp, Artificial Sequence
  Description of Artificial Sequence: Synthetic oligonucleotide
  Target: LAMA2; (+) strand; PAM type: YTN; PAM sequence: TTC
cagatagattttattgtcta

SEQ ID NO: 367824 - DNA, 20 bp, Artificial Sequence
  Description of Artificial Sequence: Synthetic oligonucleotide
  Target: LAMA2; (+) strand; PAM type: YTN; PAM sequence: TTT
tattgtctactcccttgttt

SEQ ID NO: 367825 - DNA, 20 bp, Artificial Sequence
  Description of Artificial Sequence: Synthetic oligonucleotide
  Target: LAMA2; (+) strand; PAM type: YTN; PAM sequence: TTT
attgtctactcccttgttta

SEQ ID NO: 367826 - DNA, 20 bp, Artificial Sequence
  Description of Artificial Sequence: Synthetic oligonucleotide
  Target: LAMA2; (+) strand; PAM type: YTN; PAM sequence: TTA
ttgtctactcccttgtttat

SEQ ID NO: 367827 - DNA, 20 bp, Artificial Sequence
  Description of Artificial Sequence: Synthetic oligonucleotide
  Target: LAMA2; (+) strand; PAM type: YTN; PAM sequence: TTG
tctactcccttgtttatatt

SEQ ID NO: 367828 - DNA, 20 bp, Artificial Sequence
  Description of Artificial Sequence: Synthetic oligonucleotide
  Target: LAMA2; (+) strand; PAM type: YTN; PAM sequence: CTA
ctcccttgtttatattagat

SEQ ID NO: 367829 - DNA, 20 bp, Artificial Sequence
  Description of Artificial Sequence: Synthetic oligonucleotide
  Target: LAMA2; (+) strand; PAM type: YTN; PAM sequence: CTC
ccttgtttatattagataaa

SEQ ID NO: 367830 - DNA, 20 bp, Artificial Sequence
  Description of Artificial Sequence: Synthetic oligonucleotide
  Target: LAMA2; (+) strand; PAM type: YTN; PAM sequence: CTT
gtttatattagataaaataa

SEQ ID NO: 367831 - DNA, 20 bp, Artificial Sequence
  Description of Artificial Sequence: Synthetic oligonucleotide
  Target: LAMA2; (+) strand; PAM type: YTN; PAM sequence: TTG
tttatattagataaaataaa

SEQ ID NO: 367832 - DNA, 20 bp, Artificial Sequence
  Description of Artificial Sequence: Synthetic oligonucleotide
  Target: LAMA2; (+) strand; PAM type: YTN; PAM sequence: TTT
atattagataaaataaaatg

SEQ ID NO: 367833 - DNA, 20 bp, Artificial Sequence
  Description of Artificial Sequence: Synthetic oligonucleotide
  Target: LAMA2; (+) strand; PAM type: YTN; PAM sequence: TTA
tattagataaaataaaatga

SEQ ID NO: 367834 - DNA, 20 bp, Artificial Sequence
  Description of Artificial Sequence: Synthetic oligonucleotide
  Target: LAMA2; (+) strand; PAM type: YTN; PAM sequence: TTA
gataaaataaaatgaaacag

SEQ ID NO: 367835 - DNA, 20 bp, Artificial Sequence
  Description of Artificial Sequence: Synthetic oligonucleotide
  Target: LAMA2; (+) strand; PAM type: YTN; PAM sequence: CTT
gtttatttagctatagttaa

SEQ ID NO: 367836 - DNA, 20 bp, Artificial Sequence
  Description of Artificial Sequence: Synthetic oligonucleotide
  Target: LAMA2; (+) strand; PAM type: YTN; PAM sequence: TTG
tttatttagctatagttaaa

SEQ ID NO: 367837 - DNA, 20 bp, Artificial Sequence
  Description of Artificial Sequence: Synthetic oligonucleotide
  Target: LAMA2; (+) strand; PAM type: YTN; PAM sequence: TTT
atttagctatagttaaatct

SEQ ID NO: 367838 - DNA, 20 bp, Artificial Sequence
  Description of Artificial Sequence: Synthetic oligonucleotide
  Target: LAMA2; (+) strand; PAM type: YTN; PAM sequence: TTA
tttagctatagttaaatctt

SEQ ID NO: 367839 - DNA, 20 bp, Artificial Sequence
  Description of Artificial Sequence: Synthetic oligonucleotide
  Target: LAMA2; (+) strand; PAM type: YTN; PAM sequence: TTT
agctatagttaaatcttgac

SEQ ID NO: 367840 - DNA, 20 bp, Artificial Sequence
  Description of Artificial Sequence: Synthetic oligonucleotide
  Target: LAMA2; (+) strand; PAM type: YTN; PAM sequence: TTA
gctatagttaaatcttgact

SEQ ID NO: 367841 - DNA, 20 bp, Artificial Sequence
  Description of Artificial Sequence: Synthetic oligonucleotide
  Target: LAMA2; (+) strand; PAM type: YTN; PAM sequence: CTA
tagttaaatcttgacttcag

SEQ ID NO: 367842 - DNA, 20 bp, Artificial Sequence
  Description of Artificial Sequence: Synthetic oligonucleotide
  Target: LAMA2; (+) strand; PAM type: YTN; PAM sequence: TTA
aatcttgacttcagaatcct

SEQ ID NO: 367843 - DNA, 20 bp, Artificial Sequence
  Description of Artificial Sequence: Synthetic oligonucleotide
  Target: LAMA2; (+) strand; PAM type: YTN; PAM sequence: CTT
gacttcagaatcctgtttta

SEQ ID NO: 367844 - DNA, 20 bp, Artificial Sequence
  Description of Artificial Sequence: Synthetic oligonucleotide
  Target: LAMA2; (+) strand; PAM type: YTN; PAM sequence: TTG
acttcagaatcctgttttag

SEQ ID NO: 367845 - DNA, 20 bp, Artificial Sequence
  Description of Artificial Sequence: Synthetic oligonucleotide
  Target: LAMA2; (+) strand; PAM type: YTN; PAM sequence: CTT
cagaatcctgttttaggtaa

SEQ ID NO: 367846 - DNA, 20 bp, Artificial Sequence
  Description of Artificial Sequence: Synthetic oligonucleotide
  Target: LAMA2; (+) strand; PAM type: YTN; PAM sequence: TTC
agaatcctgttttaggtaag

SEQ ID NO: 367847 - DNA, 20 bp, Artificial Sequence
  Description of Artificial Sequence: Synthetic oligonucleotide
  Target: LAMA2; (+) strand; PAM type: YTN; PAM sequence: CTG
ttttaggtaagaaaggtaca

SEQ ID NO: 367848 - DNA, 20 bp, Artificial Sequence
  Description of Artificial Sequence: Synthetic oligonucleotide
  Target: LAMA2; (+) strand; PAM type: YTN; PAM sequence: TTT
taggtaagaaaggtacagga

SEQ ID NO: 367849 - DNA, 20 bp, Artificial Sequence
  Description of Artificial Sequence: Synthetic oligonucleotide
  Target: LAMA2; (+) strand; PAM type: YTN; PAM sequence: TTT
aggtaagaaaggtacaggag

SEQ ID NO: 367850 - DNA, 20 bp, Artificial Sequence
  Description of Artificial Sequence: Synthetic oligonucleotide
  Target: LAMA2; (+) strand; PAM type: YTN; PAM sequence: TTA
ggtaagaaaggtacaggaga

SEQ ID NO: 367851 - DNA, 20 bp, Artificial Sequence
  Description of Artificial Sequence: Synthetic oligonucleotide
  Target: LAMA2; (+) strand; PAM type: YTN; PAM sequence: CTG
ctttcaagatttgaagggcc

SEQ ID NO: 367852 - DNA, 20 bp, Artificial Sequence
  Description of Artificial Sequence: Synthetic oligonucleotide
  Target: LAMA2; (+) strand; PAM type: YTN; PAM sequence: CTT
tcaagatttgaagggccata

SEQ ID NO: 367853 - DNA, 20 bp, Artificial Sequence
  Description of Artificial Sequence: Synthetic oligonucleotide
  Target: LAMA2; (+) strand; PAM type: YTN; PAM sequence: TTT
caagatttgaagggccatag

SEQ ID NO: 367854 - DNA, 20 bp, Artificial Sequence
  Description of Artificial Sequence: Synthetic oligonucleotide
  Target: LAMA2; (+) strand; PAM type: YTN; PAM sequence: TTC
aagatttgaagggccatagg

SEQ ID NO: 367855 - DNA, 20 bp, Artificial Sequence
  Description of Artificial Sequence: Synthetic oligonucleotide
  Target: LAMA2; (+) strand; PAM type: YTN; PAM sequence: TTT
gaagggccataggcaacttc

SEQ ID NO: 367856 - DNA, 20 bp, Artificial Sequence
  Description of Artificial Sequence: Synthetic oligonucleotide
  Target: LAMA2; (+) strand; PAM type: YTN; PAM sequence: TTG
aagggccataggcaacttca

SEQ ID NO: 367857 - DNA, 20 bp, Artificial Sequence
  Description of Artificial Sequence: Synthetic oligonucleotide
  Target: LAMA2; (+) strand; PAM type: YTN; PAM sequence: CTT
caaaatgctcaaagcctgaa

SEQ ID NO: 367858 - DNA, 20 bp, Artificial Sequence
  Description of Artificial Sequence: Synthetic oligonucleotide
  Target: LAMA2; (+) strand; PAM type: YTN; PAM sequence: TTC
aaaatgctcaaagcctgaag

SEQ ID NO: 367859 - DNA, 20 bp, Artificial Sequence
  Description of Artificial Sequence: Synthetic oligonucleotide
  Target: LAMA2; (+) strand; PAM type: YTN; PAM sequence: CTC
aaagcctgaagtttccttag

SEQ ID NO: 367860 - DNA, 20 bp, Artificial Sequence
  Description of Artificial Sequence: Synthetic oligonucleotide
  Target: LAMA2; (+) strand; PAM type: YTN; PAM sequence: CTG
aagtttccttagaggctctc

SEQ ID NO: 367861 - DNA, 20 bp, Artificial Sequence
  Description of Artificial Sequence: Synthetic oligonucleotide
  Target: LAMA2; (+) strand; PAM type: YTN; PAM sequence: TTT
ccttagaggctctctgccac

SEQ ID NO: 367862 - DNA, 20 bp, Artificial Sequence
  Description of Artificial Sequence: Synthetic oligonucleotide
  Target: LAMA2; (+) strand; PAM type: YTN; PAM sequence: TTC
cttagaggctctctgccacc

SEQ ID NO: 367863 - DNA, 20 bp, Artificial Sequence
  Description of Artificial Sequence: Synthetic oligonucleotide
  Target: LAMA2; (+) strand; PAM type: YTN; PAM sequence: CTT
agaggctctctgccaccctt

SEQ ID NO: 367864 - DNA, 20 bp, Artificial Sequence
  Description of Artificial Sequence: Synthetic oligonucleotide
  Target: LAMA2; (+) strand; PAM type: YTN; PAM sequence: TTA
gaggctctctgccacccttt

SEQ ID NO: 367865 - DNA, 20 bp, Artificial Sequence
  Description of Artificial Sequence: Synthetic oligonucleotide
  Target: LAMA2; (+) strand; PAM type: YTN; PAM sequence: CTC
tctgccaccctttcttatca

SEQ ID NO: 367866 - DNA, 20 bp, Artificial Sequence
  Description of Artificial Sequence: Synthetic oligonucleotide
  Target: LAMA2; (+) strand; PAM type: YTN; PAM sequence: CTC
tgccaccctttcttatcata

SEQ ID NO: 367867 - DNA, 20 bp, Artificial Sequence
  Description of Artificial Sequence: Synthetic oligonucleotide
  Target: LAMA2; (+) strand; PAM type: YTN; PAM sequence: CTG
ccaccctttcttatcatatc

SEQ ID NO: 367868 - DNA, 20 bp, Artificial Sequence
  Description of Artificial Sequence: Synthetic oligonucleotide
  Target: LAMA2; (+) strand; PAM type: YTN; PAM sequence: CTT
tcttatcatatccattcttt

SEQ ID NO: 367869 - DNA, 20 bp, Artificial Sequence
  Description of Artificial Sequence: Synthetic oligonucleotide
  Target: LAMA2; (+) strand; PAM type: YTN; PAM sequence: TTT
cttatcatatccattctttc

SEQ ID NO: 367870 - DNA, 20 bp, Artificial Sequence
  Description of Artificial Sequence: Synthetic oligonucleotide
  Target: LAMA2; (+) strand; PAM type: YTN; PAM sequence: TTC
ttatcatatccattctttcc

SEQ ID NO: 367871 - DNA, 20 bp, Artificial Sequence
  Description of Artificial Sequence: Synthetic oligonucleotide
  Target: LAMA2; (+) strand; PAM type: YTN; PAM sequence: CTT
atcatatccattctttccaa

SEQ ID NO: 367872 - DNA, 20 bp, Artificial Sequence
  Description of Artificial Sequence: Synthetic oligonucleotide
  Target: LAMA2; (+) strand; PAM type: YTN; PAM sequence: TTA
tcatatccattctttccaat

SEQ ID NO: 367873 - DNA, 20 bp, Artificial Sequence
  Description of Artificial Sequence: Synthetic oligonucleotide
  Target: LAMA2; (+) strand; PAM type: YTN; PAM sequence: TTC
tttccaataatgtatctcct

SEQ ID NO: 367874 - DNA, 20 bp, Artificial Sequence
  Description of Artificial Sequence: Synthetic oligonucleotide
  Target: LAMA2; (+) strand; PAM type: YTN; PAM sequence: CTT
tccaataatgtatctcctcc

SEQ ID NO: 367875 - DNA, 20 bp, Artificial Sequence
  Description of Artificial Sequence: Synthetic oligonucleotide
  Target: LAMA2; (+) strand; PAM type: YTN; PAM sequence: TTT
ccaataatgtatctcctccc

SEQ ID NO: 367876 - DNA, 20 bp, Artificial Sequence
  Description of Artificial Sequence: Synthetic oligonucleotide
  Target: LAMA2; (+) strand; PAM type: YTN; PAM sequence: TTC
caataatgtatctcctcccc

SEQ ID NO: 367877 - DNA, 20 bp, Artificial Sequence
  Description of Artificial Sequence: Synthetic oligonucleotide
  Target: LAMA2; (+) strand; PAM type: YTN; PAM sequence: CTC
ctccccttgacactgatacg

SEQ ID NO: 367878 - DNA, 20 bp, Artificial Sequence
  Description of Artificial Sequence: Synthetic oligonucleotide
  Target: LAMA2; (+) strand; PAM type: YTN; PAM sequence: CTC
cccttgacactgatacgtat

SEQ ID NO: 367879 - DNA, 20 bp, Artificial Sequence
  Description of Artificial Sequence: Synthetic oligonucleotide
  Target: LAMA2; (+) strand; PAM type: YTN; PAM sequence: CTT
gacactgatacgtattcaga

SEQ ID NO: 367880 - DNA, 20 bp, Artificial Sequence
  Description of Artificial Sequence: Synthetic oligonucleotide
  Target: LAMA2; (+) strand; PAM type: YTN; PAM sequence: TTG
acactgatacgtattcagag

SEQ ID NO: 367881 - DNA, 20 bp, Artificial Sequence
  Description of Artificial Sequence: Synthetic oligonucleotide
  Target: LAMA2; (+) strand; PAM type: YTN; PAM sequence: CTG
atacgtattcagaggcacac

SEQ ID NO: 367882 - DNA, 20 bp, Artificial Sequence
  Description of Artificial Sequence: Synthetic oligonucleotide
  Target: LAMA2; (+) strand; PAM type: YTN; PAM sequence: TTC
agaggcacacacatacatgc

SEQ ID NO: 367883 - DNA, 20 bp, Artificial Sequence
  Description of Artificial Sequence: Synthetic oligonucleotide
  Target: LAMA2; (+) strand; PAM type: YTN; PAM sequence: TTC
attattccaaatgggtagat

SEQ ID NO: 367884 - DNA, 20 bp, Artificial Sequence
  Description of Artificial Sequence: Synthetic oligonucleotide
  Target: LAMA2; (+) strand; PAM type: YTN; PAM sequence: TTA
ttccaaatgggtagatgtta

SEQ ID NO: 367885 - DNA, 20 bp, Artificial Sequence
  Description of Artificial Sequence: Synthetic oligonucleotide
  Target: LAMA2; (+) strand; PAM type: YTN; PAM sequence: TTC
caaatgggtagatgttaatt

SEQ ID NO: 367886 - DNA, 20 bp, Artificial Sequence
  Description of Artificial Sequence: Synthetic oligonucleotide
  Target: LAMA2; (+) strand; PAM type: YTN; PAM sequence: TTA
atttagcaccaggctctgtt

SEQ ID NO: 367887 - DNA, 20 bp, Artificial Sequence
  Description of Artificial Sequence: Synthetic oligonucleotide
  Target: LAMA2; (+) strand; PAM type: YTN; PAM sequence: TTT
agcaccaggctctgttgttt

SEQ ID NO: 367888 - DNA, 20 bp, Artificial Sequence
  Description of Artificial Sequence: Synthetic oligonucleotide
  Target: LAMA2; (+) strand; PAM type: YTN; PAM sequence: TTA
gcaccaggctctgttgtttc

SEQ ID NO: 367889 - DNA, 20 bp, Artificial Sequence
  Description of Artificial Sequence: Synthetic oligonucleotide
  Target: LAMA2; (+) strand; PAM type: YTN; PAM sequence: CTC
tgttgtttcctgtcttgaaa

SEQ ID NO: 367890 - DNA, 20 bp, Artificial Sequence
  Description of Artificial Sequence: Synthetic oligonucleotide
  Target: LAMA2; (+) strand; PAM type: YTN; PAM sequence: CTG
ttgtttcctgtcttgaaact

SEQ ID NO: 367891 - DNA, 20 bp, Artificial Sequence
  Description of Artificial Sequence: Synthetic oligonucleotide
  Target: LAMA2; (+) strand; PAM type: YTN; PAM sequence: TTG
tttcctgtcttgaaactttc

SEQ ID NO: 367892 - DNA, 20 bp, Artificial Sequence
  Description of Artificial Sequence: Synthetic oligonucleotide
  Target: LAMA2; (+) strand; PAM type: YTN; PAM sequence: TTT
cctgtcttgaaactttcatg

SEQ ID NO: 367893 - DNA, 20 bp, Artificial Sequence
  Description of Artificial Sequence: Synthetic oligonucleotide
  Target: LAMA2; (+) strand; PAM type: YTN; PAM sequence: TTC
ctgtcttgaaactttcatgc

SEQ ID NO: 367894 - DNA, 20 bp, Artificial Sequence
  Description of Artificial Sequence: Synthetic oligonucleotide
  Target: LAMA2; (+) strand; PAM type: YTN; PAM sequence: CTG
tcttgaaactttcatgcatg

SEQ ID NO: 367895 - DNA, 20 bp, Artificial Sequence
  Description of Artificial Sequence: Synthetic oligonucleotide
  Target: LAMA2; (+) strand; PAM type: YTN; PAM sequence: CTT
gaaactttcatgcatgtgaa

SEQ ID NO: 367896 - DNA, 20 bp, Artificial Sequence
  Description of Artificial Sequence: Synthetic oligonucleotide
  Target: LAMA2; (+) strand; PAM type: YTN; PAM sequence: TTG
aaactttcatgcatgtgaat

SEQ ID NO: 367897 - DNA, 20 bp, Artificial Sequence
  Description of Artificial Sequence: Synthetic oligonucleotide
  Target: LAMA2; (+) strand; PAM type: YTN; PAM sequence: CTT
tcatgcatgtgaatctatga

SEQ ID NO: 367898 - DNA, 20 bp, Artificial Sequence
  Description of Artificial Sequence: Synthetic oligonucleotide
  Target: LAMA2; (+) strand; PAM type: YTN; PAM sequence: TTT
catgcatgtgaatctatgac

SEQ ID NO: 367899 - DNA, 20 bp, Artificial Sequence
  Description of Artificial Sequence: Synthetic oligonucleotide
  Target: LAMA2; (+) strand; PAM type: YTN; PAM sequence: TTC
atgcatgtgaatctatgaca

SEQ ID NO: 367900 - DNA, 20 bp, Artificial Sequence
  Description of Artificial Sequence: Synthetic oligonucleotide
  Target: LAMA2; (+) strand; PAM type: YTN; PAM sequence: CTA
tgacaaaatgaaaaattctt

SEQ ID NO: 367901 - DNA, 20 bp, Artificial Sequence
  Description of Artificial Sequence: Synthetic oligonucleotide
  Target: LAMA2; (+) strand; PAM type: YTN; PAM sequence: TTC
ttttctcaaaatggacattt

SEQ ID NO: 367902 - DNA, 20 bp, Artificial Sequence
  Description of Artificial Sequence: Synthetic oligonucleotide
  Target: LAMA2; (+) strand; PAM type: YTN; PAM sequence: CTT
ttctcaaaatggacattttc

SEQ ID NO: 367903 - DNA, 20 bp, Artificial Sequence
  Description of Artificial Sequence: Synthetic oligonucleotide
  Target: LAMA2; (+) strand; PAM type: YTN; PAM sequence: TTT
tctcaaaatggacattttcc

SEQ ID NO: 367904 - DNA, 20 bp, Artificial Sequence
  Description of Artificial Sequence: Synthetic oligonucleotide
  Target: LAMA2; (+) strand; PAM type: YTN; PAM sequence: TTT
ctcaaaatggacattttcca

SEQ ID NO: 367905 - DNA, 20 bp, Artificial Sequence
  Description of Artificial Sequence: Synthetic oligonucleotide
  Target: LAMA2; (+) strand; PAM type: YTN; PAM sequence: TTC
tcaaaatggacattttccag

SEQ ID NO: 367906 - DNA, 20 bp, Artificial Sequence
  Description of Artificial Sequence: Synthetic oligonucleotide
  Target: LAMA2; (+) strand; PAM type: YTN; PAM sequence: CTC
aaaatggacattttccagta

SEQ ID NO: 367907 - DNA, 20 bp, Artificial Sequence
  Description of Artificial Sequence: Synthetic oligonucleotide
  Target: LAMA2; (+) strand; PAM type: YTN; PAM sequence: TTT
tccagtattggatgaagtgg

SEQ ID NO: 367908 - DNA, 20 bp, Artificial Sequence
  Description of Artificial Sequence: Synthetic oligonucleotide
  Target: LAMA2; (+) strand; PAM type: YTN; PAM sequence: TTT
ccagtattggatgaagtggt

SEQ ID NO: 367909 - DNA, 20 bp, Artificial Sequence
  Description of Artificial Sequence: Synthetic oligonucleotide
  Target: LAMA2; (+) strand; PAM type: YTN; PAM sequence: TTC
cagtattggatgaagtggtc

SEQ ID NO: 367910 - DNA, 20 bp, Artificial Sequence
  Description of Artificial Sequence: Synthetic oligonucleotide
  Target: LAMA2; (+) strand; PAM type: YTN; PAM sequence: TTG
gatgaagtggtctgctctct

SEQ ID NO: 367911 - DNA, 20 bp, Artificial Sequence
  Description of Artificial Sequence: Synthetic oligonucleotide
  Target: LAMA2; (+) strand; PAM type: YTN; PAM sequence: CTG
ctctctctctttctgtctct

SEQ ID NO: 367912 - DNA, 20 bp, Artificial Sequence
  Description of Artificial Sequence: Synthetic oligonucleotide
  Target: LAMA2; (+) strand; PAM type: YTN; PAM sequence: CTC
tctctctttctgtctctctc

SEQ ID NO: 367913 - DNA, 20 bp, Artificial Sequence
  Description of Artificial Sequence: Synthetic oligonucleotide
  Target: LAMA2; (+) strand; PAM type: YTN; PAM sequence: CTC
tctctttctgtctctctctt

SEQ ID NO: 367914 - DNA, 20 bp, Artificial Sequence
  Description of Artificial Sequence: Synthetic oligonucleotide
  Target: LAMA2; (+) strand; PAM type: YTN; PAM sequence: CTC
tctttctgtctctctctttc

SEQ ID NO: 367915 - DNA, 20 bp, Artificial Sequence
  Description of Artificial Sequence: Synthetic oligonucleotide
  Target: LAMA2; (+) strand; PAM type: YTN; PAM sequence: CTC
tttctgtctctctctttctc

SEQ ID NO: 367916 - DNA, 20 bp, Artificial Sequence
  Description of Artificial Sequence: Synthetic oligonucleotide
  Target: LAMA2; (+) strand; PAM type: YTN; PAM sequence: CTT
tctgtctctctctttctctc

SEQ ID NO: 367917 - DNA, 20 bp, Artificial Sequence
  Description of Artificial Sequence: Synthetic oligonucleotide
  Target: LAMA2; (+) strand; PAM type: YTN; PAM sequence: TTT
ctgtctctctctttctctct

SEQ ID NO: 367918 - DNA, 20 bp, Artificial Sequence
  Description of Artificial Sequence: Synthetic oligonucleotide
  Target: LAMA2; (+) strand; PAM type: YTN; PAM sequence: TTC
tgtctctctctttctctctc

SEQ ID NO: 367919 - DNA, 20 bp, Artificial Sequence
  Description of Artificial Sequence: Synthetic oligonucleotide
  Target: LAMA2; (+) strand; PAM type: YTN; PAM sequence: CTG
tctctctctttctctctctc

SEQ ID NO: 367920 - DNA, 20 bp, Artificial Sequence
  Description of Artificial Sequence: Synthetic oligonucleotide
  Target: LAMA2; (+) strand; PAM type: YTN; PAM sequence: CTC
tctctttctctctctctctg

SEQ ID NO: 367921 - DNA, 20 bp, Artificial Sequence
  Description of Artificial Sequence: Synthetic oligonucleotide
  Target: LAMA2; (+) strand; PAM type: YTN; PAM sequence: CTC
tctttctctctctctctgtc

SEQ ID NO: 367922 - DNA, 20 bp, Artificial Sequence
  Description of Artificial Sequence: Synthetic oligonucleotide
  Target: LAMA2; (+) strand; PAM type: YTN; PAM sequence: CTC
tttctctctctctctgtctc

SEQ ID NO: 367923 - DNA, 20 bp, Artificial Sequence
  Description of Artificial Sequence: Synthetic oligonucleotide
  Target: LAMA2; (+) strand; PAM type: YTN; PAM sequence: CTT
tctctctctctctgtctctc

SEQ ID NO: 367924 - DNA, 20 bp, Artificial Sequence
  Description of Artificial Sequence: Synthetic oligonucleotide
  Target: LAMA2; (+) strand; PAM type: YTN; PAM sequence: TTT
ctctctctctctgtctctct

SEQ ID NO: 367925 - DNA, 20 bp, Artificial Sequence
  Description of Artificial Sequence: Synthetic oligonucleotide
  Target: LAMA2; (+) strand; PAM type: YTN; PAM sequence: TTC
tctctctctctgtctctctc

SEQ ID NO: 367926 - DNA, 20 bp, Artificial Sequence
  Description of Artificial Sequence: Synthetic oligonucleotide
  Target: LAMA2; (+) strand; PAM type: YTN; PAM sequence: CTC
tctctctctgtctctctctt

SEQ ID NO: 367927 - DNA, 20 bp, Artificial Sequence
  Description of Artificial Sequence: Synthetic oligonucleotide
  Target: LAMA2; (+) strand; PAM type: YTN; PAM sequence: CTC
tctctctgtctctctctttc

SEQ ID NO: 367928 - DNA, 20 bp, Artificial Sequence
  Description of Artificial Sequence: Synthetic oligonucleotide
  Target: LAMA2; (+) strand; PAM type: YTN; PAM sequence: CTC
tctctgtctctctctttctc

SEQ ID NO: 367929 - DNA, 20 bp, Artificial Sequence
  Description of Artificial Sequence: Synthetic oligonucleotide
  Target: LAMA2; (+) strand; PAM type: YTN; PAM sequence: CTC
tctgtctctctctttctctc

SEQ ID NO: 367930 - DNA, 20 bp, Artificial Sequence
  Description of Artificial Sequence: Synthetic oligonucleotide
  Target: LAMA2; (+) strand; PAM type: YTN; PAM sequence: CTC
tgtctctctctttctctctc

SEQ ID NO: 367931 - DNA, 20 bp, Artificial Sequence
  Description of Artificial Sequence: Synthetic oligonucleotide
  Target: LAMA2; (+) strand; PAM type: YTN; PAM sequence: CTG
tctctctctttctctctctc

SEQ ID NO: 367932 - DNA, 20 bp, Artificial Sequence
  Description of Artificial Sequence: Synthetic oligonucleotide
  Target: LAMA2; (+) strand; PAM type: YTN; PAM sequence: CTC
tctctttctctctctctctc

SEQ ID NO: 367933 - DNA, 20 bp, Artificial Sequence
  Description of Artificial Sequence: Synthetic oligonucleotide
  Target: LAMA2; (+) strand; PAM type: YTN; PAM sequence: CTC
tctttctctctctctctctc

SEQ ID NO: 367934 - DNA, 20 bp, Artificial Sequence
  Description of Artificial Sequence: Synthetic oligonucleotide
  Target: LAMA2; (+) strand; PAM type: YTN; PAM sequence: CTC
tttctctctctctctctctc

SEQ ID NO: 367935 - DNA, 20 bp, Artificial Sequence
  Description of Artificial Sequence: Synthetic oligonucleotide
  Target: LAMA2; (+) strand; PAM type: YTN; PAM sequence: CTT
tctctctctctctctctctc

SEQ ID NO: 367936 - DNA, 20 bp, Artificial Sequence
  Description of Artificial Sequence: Synthetic oligonucleotide
  Target: LAMA2; (+) strand; PAM type: YTN; PAM sequence: TTT
ctctctctctctctctctct

SEQ ID NO: 367937 - DNA, 20 bp, Artificial Sequence
  Description of Artificial Sequence: Synthetic oligonucleotide
  Target: LAMA2; (+) strand; PAM type: YTN; PAM sequence: TTC
tctctctctctctctctctc

SEQ ID NO: 367938 - DNA, 20 bp, Artificial Sequence
  Description of Artificial Sequence: Synthetic oligonucleotide
  Target: LAMA2; (+) strand; PAM type: YTN; PAM sequence: CTC
tctctctctctctctctctc

SEQ ID NO: 367939 - DNA, 20 bp, Artificial Sequence
  Description of Artificial Sequence: Synthetic oligonucleotide
  Target: LAMA2; (+) strand; PAM type: YTN; PAM sequence: CTC
tctctctctctctctctctc

SEQ ID NO: 367940 - DNA, 20 bp, Artificial Sequence
  Description of Artificial Sequence: Synthetic oligonucleotide
  Target: LAMA2; (+) strand; PAM type: YTN; PAM sequence: CTC
tctctctctctctctctctc

SEQ ID NO: 367941 - DNA, 20 bp, Artificial Sequence
  Description of Artificial Sequence: Synthetic oligonucleotide
  Target: LAMA2; (+) strand; PAM type: YTN; PAM sequence: CTC
tctctctctctctctctctc

SEQ ID NO: 367942 - DNA, 20 bp, Artificial Sequence
  Description of Artificial Sequence: Synthetic oligonucleotide
  Target: LAMA2; (+) strand; PAM type: YTN; PAM sequence: CTC
tctctctctctctctctctc

SEQ ID NO: 367943 - DNA, 20 bp, Artificial Sequence
  Description of Artificial Sequence: Synthetic oligonucleotide
  Target: LAMA2; (+) strand; PAM type: YTN; PAM sequence: CTC
tctctctctctctctctctc

SEQ ID NO: 367944 - DNA, 20 bp, Artificial Sequence
  Description of Artificial Sequence: Synthetic oligonucleotide
  Target: LAMA2; (+) strand; PAM type: YTN; PAM sequence: CTC
tctctctctctctctctctc

SEQ ID NO: 367945 - DNA, 20 bp, Artificial Sequence
  Description of Artificial Sequence: Synthetic oligonucleotide
  Target: LAMA2; (+) strand; PAM type: YTN; PAM sequence: CTC
tctctctctctctctctcta

SEQ ID NO: 367946 - DNA, 20 bp, Artificial Sequence
  Description of Artificial Sequence: Synthetic oligonucleotide
  Target: LAMA2; (+) strand; PAM type: YTN; PAM sequence: CTC
tctctctctctctctctata

SEQ ID NO: 367947 - DNA, 20 bp, Artificial Sequence
  Description of Artificial Sequence: Synthetic oligonucleotide
  Target: LAMA2; (+) strand; PAM type: YTN; PAM sequence: CTC
tctctctctctctctatata

SEQ ID NO: 367948 - DNA, 20 bp, Artificial Sequence
  Description of Artificial Sequence: Synthetic oligonucleotide
  Target: LAMA2; (+) strand; PAM type: YTN; PAM sequence: CTC
tctctctctctctatatata

SEQ ID NO: 367949 - DNA, 20 bp, Artificial Sequence
  Description of Artificial Sequence: Synthetic oligonucleotide
  Target: LAMA2; (+) strand; PAM type: YTN; PAM sequence: CTC
tctctctctctatatatata

SEQ ID NO: 367950 - DNA, 20 bp, Artificial Sequence
  Description of Artificial Sequence: Synthetic oligonucleotide
  Target: LAMA2; (+) strand; PAM type: YTN; PAM sequence: CTC
tctctctctatatatatata

SEQ ID NO: 367951 - DNA, 20 bp, Artificial Sequence
  Description of Artificial Sequence: Synthetic oligonucleotide
  Target: LAMA2; (+) strand; PAM type: YTN; PAM sequence: CTC
tctctctatatatatatata

SEQ ID NO: 367952 - DNA, 20 bp, Artificial Sequence
  Description of Artificial Sequence: Synthetic oligonucleotide
  Target: LAMA2; (+) strand; PAM type: YTN; PAM sequence: CTC
tctctatatatatatatata

SEQ ID NO: 367953 - DNA, 20 bp, Artificial Sequence
  Description of Artificial Sequence: Synthetic oligonucleotide
  Target: LAMA2; (+) strand; PAM type: YTN; PAM sequence: CTC
tctatatatatatatatata

SEQ ID NO: 367954 - DNA, 20 bp, Artificial Sequence
  Description of Artificial Sequence: Synthetic oligonucleotide
  Target: LAMA2; (+) strand; PAM type: YTN; PAM sequence: CTC
tatatatatatatatatata

SEQ ID NO: 367955 - DNA, 20 bp, Artificial Sequence
  Description of Artificial Sequence: Synthetic oligonucleotide
  Target: LAMA2; (+) strand; PAM type: YTN; PAM sequence: CTA
tatatatatatatatatata

SEQ ID NO: 367956 - DNA, 20 bp, Artificial Sequence
  Description of Artificial Sequence: Synthetic oligonucleotide
  Target: LAMA2; (+) strand; PAM type: YTN; PAM sequence: CTA
gatgtatactttggaattcc

SEQ ID NO: 367957 - DNA, 20 bp, Artificial Sequence
  Description of Artificial Sequence: Synthetic oligonucleotide
  Target: LAMA2; (+) strand; PAM type: YTN; PAM sequence: CTT
tggaattcctttaaggtgaa

SEQ ID NO: 367958 - DNA, 20 bp, Artificial Sequence
  Description of Artificial Sequence: Synthetic oligonucleotide
  Target: LAMA2; (+) strand; PAM type: YTN; PAM sequence: TTT
ggaattcctttaaggtgaaa

SEQ ID NO: 367959 - DNA, 20 bp, Artificial Sequence
  Description of Artificial Sequence: Synthetic oligonucleotide
  Target: LAMA2; (+) strand; PAM type: YTN; PAM sequence: TTG
gaattcctttaaggtgaaaa

SEQ ID NO: 367960 - DNA, 20 bp, Artificial Sequence
  Description of Artificial Sequence: Synthetic oligonucleotide
  Target: LAMA2; (+) strand; PAM type: YTN; PAM sequence: TTC
ctttaaggtgaaaagagttc

SEQ ID NO: 367961 - DNA, 20 bp, Artificial Sequence
  Description of Artificial Sequence: Synthetic oligonucleotide
  Target: LAMA2; (+) strand; PAM type: YTN; PAM sequence: CTT
taaggtgaaaagagttctct

SEQ ID NO: 367962 - DNA, 20 bp, Artificial Sequence
  Description of Artificial Sequence: Synthetic oligonucleotide
  Target: LAMA2; (+) strand; PAM type: YTN; PAM sequence: TTT
aaggtgaaaagagttctcta

SEQ ID NO: 367963 - DNA, 20 bp, Artificial Sequence
  Description of Artificial Sequence: Synthetic oligonucleotide
  Target: LAMA2; (+) strand; PAM type: YTN; PAM sequence: TTA
aggtgaaaagagttctctaa

SEQ ID NO: 367964 - DNA, 20 bp, Artificial Sequence
  Description of Artificial Sequence: Synthetic oligonucleotide
  Target: LAMA2; (+) strand; PAM type: YTN; PAM sequence: TTC
tctaaatgtaaagtgttgag

SEQ ID NO: 367965 - DNA, 20 bp, Artificial Sequence
  Description of Artificial Sequence: Synthetic oligonucleotide
  Target: LAMA2; (+) strand; PAM type: YTN; PAM sequence: CTC
taaatgtaaagtgttgagtg

SEQ ID NO: 367966 - DNA, 20 bp, Artificial Sequence
  Description of Artificial Sequence: Synthetic oligonucleotide
  Target: LAMA2; (+) strand; PAM type: YTN; PAM sequence: CTA
aatgtaaagtgttgagtgaa

SEQ ID NO: 367967 - DNA, 20 bp, Artificial Sequence
  Description of Artificial Sequence: Synthetic oligonucleotide
  Target: LAMA2; (+) strand; PAM type: YTN; PAM sequence: TTG
agtgaaattatttagcattc

SEQ ID NO: 367968 - DNA, 20 bp, Artificial Sequence
  Description of Artificial Sequence: Synthetic oligonucleotide
  Target: LAMA2; (+) strand; PAM type: YTN; PAM sequence: TTA
tttagcattcatgtgaatga

SEQ ID NO: 367969 - DNA, 20 bp, Artificial Sequence
  Description of Artificial Sequence: Synthetic oligonucleotide
  Target: LAMA2; (+) strand; PAM type: YTN; PAM sequence: TTT
agcattcatgtgaatgaact

SEQ ID NO: 367970 - DNA, 20 bp, Artificial Sequence
  Description of Artificial Sequence: Synthetic oligonucleotide
  Target: LAMA2; (+) strand; PAM type: YTN; PAM sequence: TTA
gcattcatgtgaatgaacta

SEQ ID NO: 367971 - DNA, 20 bp, Artificial Sequence
  Description of Artificial Sequence: Synthetic oligonucleotide
  Target: LAMA2; (+) strand; PAM type: YTN; PAM sequence: TTC
atgtgaatgaactaagacaa

SEQ ID NO: 367972 - DNA, 20 bp, Artificial Sequence
  Description of Artificial Sequence: Synthetic oligonucleotide
  Target: LAMA2; (+) strand; PAM type: YTN; PAM sequence: CTA
agacaagaaggattacctaa

SEQ ID NO: 367973 - DNA, 20 bp, Artificial Sequence
  Description of Artificial Sequence: Synthetic oligonucleotide
  Target: LAMA2; (+) strand; PAM type: YTN; PAM sequence: TTA
cctaagtgtcataggtcatt

SEQ ID NO: 367974 - DNA, 20 bp, Artificial Sequence
  Description of Artificial Sequence: Synthetic oligonucleotide
  Target: LAMA2; (+) strand; PAM type: YTN; PAM sequence: CTA
agtgtcataggtcattcaat

SEQ ID NO: 367975 - DNA, 20 bp, Artificial Sequence
  Description of Artificial Sequence: Synthetic oligonucleotide
  Target: LAMA2; (+) strand; PAM type: YTN; PAM sequence: TTC
aatatactccttagatgcca

SEQ ID NO: 367976 - DNA, 20 bp, Artificial Sequence
  Description of Artificial Sequence: Synthetic oligonucleotide
  Target: LAMA2; (+) strand; PAM type: YTN; PAM sequence: CTC
cttagatgccattgtcctat

SEQ ID NO: 367977 - DNA, 20 bp, Artificial Sequence
  Description of Artificial Sequence: Synthetic oligonucleotide
  Target: LAMA2; (+) strand; PAM type: YTN; PAM sequence: CTT
agatgccattgtcctatttt

SEQ ID NO: 367978 - DNA, 20 bp, Artificial Sequence
  Description of Artificial Sequence: Synthetic oligonucleotide
  Target: LAMA2; (+) strand; PAM type: YTN; PAM sequence: TTA
gatgccattgtcctattttg

SEQ ID NO: 367979 - DNA, 20 bp, Artificial Sequence
  Description of Artificial Sequence: Synthetic oligonucleotide
  Target: LAMA2; (+) strand; PAM type: YTN; PAM sequence: TTG
tcctattttgagaattagac

SEQ ID NO: 367980 - DNA, 20 bp, Artificial Sequence
  Description of Artificial Sequence: Synthetic oligonucleotide
  Target: LAMA2; (+) strand; PAM type: YTN; PAM sequence: CTA
ttttgagaattagactgcag

SEQ ID NO: 367981 - DNA, 20 bp, Artificial Sequence
  Description of Artificial Sequence: Synthetic oligonucleotide
  Target: LAMA2; (+) strand; PAM type: YTN; PAM sequence: TTT
tgagaattagactgcagtct

SEQ ID NO: 367982 - DNA, 20 bp, Artificial Sequence
  Description of Artificial Sequence: Synthetic oligonucleotide
  Target: LAMA2; (+) strand; PAM type: YTN; PAM sequence: TTT
gagaattagactgcagtctt

SEQ ID NO: 367983 - DNA, 20 bp, Artificial Sequence
  Description of Artificial Sequence: Synthetic oligonucleotide
  Target: LAMA2; (+) strand; PAM type: YTN; PAM sequence: TTG
agaattagactgcagtcttt

SEQ ID NO: 367984 - DNA, 20 bp, Artificial Sequence
  Description of Artificial Sequence: Synthetic oligonucleotide
  Target: LAMA2; (+) strand; PAM type: YTN; PAM sequence: TTA
gactgcagtcttttttgttg

SEQ ID NO: 367985 - DNA, 20 bp, Artificial Sequence
  Description of Artificial Sequence: Synthetic oligonucleotide
  Target: LAMA2; (+) strand; PAM type: YTN; PAM sequence: CTG
cagtcttttttgttgtttgt

SEQ ID NO: 367986 - DNA, 20 bp, Artificial Sequence
  Description of Artificial Sequence: Synthetic oligonucleotide
  Target: LAMA2; (+) strand; PAM type: YTN; PAM sequence: CTT
ttttgttgtttgttttttcc

SEQ ID NO: 367987 - DNA, 20 bp, Artificial Sequence
  Description of Artificial Sequence: Synthetic oligonucleotide
  Target: LAMA2; (+) strand; PAM type: YTN; PAM sequence: TTT
tttgttgtttgttttttccc

SEQ ID NO: 367988 - DNA, 20 bp, Artificial Sequence
  Description of Artificial Sequence: Synthetic oligonucleotide
  Target: LAMA2; (+) strand; PAM type: YTN; PAM sequence: TTT
ttgttgtttgttttttccca

SEQ ID NO: 367989 - DNA, 20 bp, Artificial Sequence
  Description of Artificial Sequence: Synthetic oligonucleotide
  Target: LAMA2; (+) strand; PAM type: YTN; PAM sequence: TTT
tgttgtttgttttttcccat

SEQ ID NO: 367990 - DNA, 20 bp, Artificial Sequence
  Description of Artificial Sequence: Synthetic oligonucleotide
  Target: LAMA2; (+) strand; PAM type: YTN; PAM sequence: TTT
gttgtttgttttttcccatg

SEQ ID NO: 367991 - DNA, 20 bp, Artificial Sequence
  Description of Artificial Sequence: Synthetic oligonucleotide
  Target: LAMA2; (+) strand; PAM type: YTN; PAM sequence: TTG
ttgtttgttttttcccatgt

SEQ ID NO: 367992 - DNA, 20 bp, Artificial Sequence
  Description of Artificial Sequence: Synthetic oligonucleotide
  Target: LAMA2; (+) strand; PAM type: YTN; PAM sequence: TTG
tttgttttttcccatgtagt

SEQ ID NO: 367993 - DNA, 20 bp, Artificial Sequence
  Description of Artificial Sequence: Synthetic oligonucleotide
  Target: LAMA2; (+) strand; PAM type: YTN; PAM sequence: TTT
gttttttcccatgtagtaag

SEQ ID NO: 367994 - DNA, 20 bp, Artificial Sequence
  Description of Artificial Sequence: Synthetic oligonucleotide
  Target: LAMA2; (+) strand; PAM type: YTN; PAM sequence: TTG
ttttttcccatgtagtaagt

SEQ ID NO: 367995 - DNA, 20 bp, Artificial Sequence
  Description of Artificial Sequence: Synthetic oligonucleotide
  Target: LAMA2; (+) strand; PAM type: YTN; PAM sequence: TTT
tttcccatgtagtaagttcc

SEQ ID NO: 367996 - DNA, 20 bp, Artificial Sequence
  Description of Artificial Sequence: Synthetic oligonucleotide
  Target: LAMA2; (+) strand; PAM type: YTN; PAM sequence: TTT
ttcccatgtagtaagttcct

SEQ ID NO: 367997 - DNA, 20 bp, Artificial Sequence
  Description of Artificial Sequence: Synthetic oligonucleotide
  Target: LAMA2; (+) strand; PAM type: YTN; PAM sequence: TTT
tcccatgtagtaagttcctt

SEQ ID NO: 367998 - DNA, 20 bp, Artificial Sequence
  Description of Artificial Sequence: Synthetic oligonucleotide
  Target: LAMA2; (+) strand; PAM type: YTN; PAM sequence: TTT
cccatgtagtaagttccttt

SEQ ID NO: 367999 - DNA, 20 bp, Artificial Sequence
  Description of Artificial Sequence: Synthetic oligonucleotide
  Target: LAMA2; (+) strand; PAM type: YTN; PAM sequence: TTC
ccatgtagtaagttccttta

SEQ ID NO: 368000 - DNA, 20 bp, Artificial Sequence
  Description of Artificial Sequence: Synthetic oligonucleotide
  Target: LAMA2; (+) strand; PAM type: YTN; PAM sequence: TTC
ctttaaaataatagcttaat

SEQ ID NO: 368001 - DNA, 20 bp, Artificial Sequence
  Description of Artificial Sequence: Synthetic oligonucleotide
  Target: LAMA2; (+) strand; PAM type: YTN; PAM sequence: CTT
taaaataatagcttaattca

SEQ ID NO: 368002 - DNA, 20 bp, Artificial Sequence
  Description of Artificial Sequence: Synthetic oligonucleotide
  Target: LAMA2; (+) strand; PAM type: YTN; PAM sequence: TTT
aaaataatagcttaattcag

SEQ ID NO: 368003 - DNA, 20 bp, Artificial Sequence
  Description of Artificial Sequence: Synthetic oligonucleotide
  Target: LAMA2; (+) strand; PAM type: YTN; PAM sequence: TTA
aaataatagcttaattcagt

SEQ ID NO: 368004 - DNA, 20 bp, Artificial Sequence
  Description of Artificial Sequence: Synthetic oligonucleotide
  Target: LAMA2; (+) strand; PAM type: YTN; PAM sequence: CTT
aattcagttttaagtttctt

SEQ ID NO: 368005 - DNA, 20 bp, Artificial Sequence
  Description of Artificial Sequence: Synthetic oligonucleotide
  Target: LAMA2; (+) strand; PAM type: YTN; PAM sequence: TTA
attcagttttaagtttcttt

SEQ ID NO: 368006 - DNA, 20 bp, Artificial Sequence
  Description of Artificial Sequence: Synthetic oligonucleotide
  Target: LAMA2; (+) strand; PAM type: YTN; PAM sequence: TTC
agttttaagtttctttccct

SEQ ID NO: 368007 - DNA, 20 bp, Artificial Sequence
  Description of Artificial Sequence: Synthetic oligonucleotide
  Target: LAMA2; (+) strand; PAM type: YTN; PAM sequence: TTT
taagtttctttccctattgt

SEQ ID NO: 368008 - DNA, 20 bp, Artificial Sequence
  Description of Artificial Sequence: Synthetic oligonucleotide
  Target: LAMA2; (+) strand; PAM type: YTN; PAM sequence: TTT
aagtttctttccctattgtt

SEQ ID NO: 368009 - DNA, 20 bp, Artificial Sequence
  Description of Artificial Sequence: Synthetic oligonucleotide
  Target: LAMA2; (+) strand; PAM type: YTN; PAM sequence: TTA
agtttctttccctattgttc

SEQ ID NO: 368010 - DNA, 20 bp, Artificial Sequence
  Description of Artificial Sequence: Synthetic oligonucleotide
  Target: LAMA2; (+) strand; PAM type: YTN; PAM sequence: TTT
ctttccctattgttctacac

SEQ ID NO: 368011 - DNA, 20 bp, Artificial Sequence
  Description of Artificial Sequence: Synthetic oligonucleotide
  Target: LAMA2; (+) strand; PAM type: YTN; PAM sequence: TTC
tttccctattgttctacaca

SEQ ID NO: 368012 - DNA, 20 bp, Artificial Sequence
  Description of Artificial Sequence: Synthetic oligonucleotide
  Target: LAMA2; (+) strand; PAM type: YTN; PAM sequence: CTT
tccctattgttctacacaac

SEQ ID NO: 368013 - DNA, 20 bp, Artificial Sequence
  Description of Artificial Sequence: Synthetic oligonucleotide
  Target: LAMA2; (+) strand; PAM type: YTN; PAM sequence: TTT
ccctattgttctacacaacc

SEQ ID NO: 368014 - DNA, 20 bp, Artificial Sequence
  Description of Artificial Sequence: Synthetic oligonucleotide
  Target: LAMA2; (+) strand; PAM type: YTN; PAM sequence: TTC
cctattgttctacacaaccc

SEQ ID NO: 368015 - DNA, 20 bp, Artificial Sequence
  Description of Artificial Sequence: Synthetic oligonucleotide
  Target: LAMA2; (+) strand; PAM type: YTN; PAM sequence: CTA
ttgttctacacaacccacat

SEQ ID NO: 368016 - DNA, 20 bp, Artificial Sequence
  Description of Artificial Sequence: Synthetic oligonucleotide
  Target: LAMA2; (+) strand; PAM type: YTN; PAM sequence: TTG
ttctacacaacccacatcca

SEQ ID NO: 368017 - DNA, 20 bp, Artificial Sequence
  Description of Artificial Sequence: Synthetic oligonucleotide
  Target: LAMA2; (+) strand; PAM type: YTN; PAM sequence: TTC
tacacaacccacatccatct

SEQ ID NO: 368018 - DNA, 20 bp, Artificial Sequence
  Description of Artificial Sequence: Synthetic oligonucleotide
  Target: LAMA2; (+) strand; PAM type: YTN; PAM sequence: CTA
cacaacccacatccatctac

SEQ ID NO: 368019 - DNA, 20 bp, Artificial Sequence
  Description of Artificial Sequence: Synthetic oligonucleotide
  Target: LAMA2; (+) strand; PAM type: YTN; PAM sequence: CTA
cagtttgaaatatgtaactt

SEQ ID NO: 368020 - DNA, 20 bp, Artificial Sequence
  Description of Artificial Sequence: Synthetic oligonucleotide
  Target: LAMA2; (+) strand; PAM type: YTN; PAM sequence: TTT
gaaatatgtaactttcgtgc

SEQ ID NO: 368021 - DNA, 20 bp, Artificial Sequence
  Description of Artificial Sequence: Synthetic oligonucleotide
  Target: LAMA2; (+) strand; PAM type: YTN; PAM sequence: TTG
aaatatgtaactttcgtgca

SEQ ID NO: 368022 - DNA, 20 bp, Artificial Sequence
  Description of Artificial Sequence: Synthetic oligonucleotide
  Target: LAMA2; (+) strand; PAM type: YTN; PAM sequence: CTT
tcgtgcacttttttcaattc

SEQ ID NO: 368023 - DNA, 20 bp, Artificial Sequence
  Description of Artificial Sequence: Synthetic oligonucleotide
  Target: LAMA2; (+) strand; PAM type: YTN; PAM sequence: TTT
cgtgcacttttttcaattca

SEQ ID NO: 368024 - DNA, 20 bp, Artificial Sequence
  Description of Artificial Sequence: Synthetic oligonucleotide
  Target: LAMA2; (+) strand; PAM type: YTN; PAM sequence: TTC
gtgcacttttttcaattcaa

SEQ ID NO: 368025 - DNA, 20 bp, Artificial Sequence
  Description of Artificial Sequence: Synthetic oligonucleotide
  Target: LAMA2; (+) strand; PAM type: YTN; PAM sequence: CTT
ttttcaattcaaggtgtttg

SEQ ID NO: 368026 - DNA, 20 bp, Artificial Sequence
  Description of Artificial Sequence: Synthetic oligonucleotide
  Target: LAMA2; (+) strand; PAM type: YTN; PAM sequence: TTT
tttcaattcaaggtgtttgt

SEQ ID NO: 368027 - DNA, 20 bp, Artificial Sequence
  Description of Artificial Sequence: Synthetic oligonucleotide
  Target: LAMA2; (+) strand; PAM type: YTN; PAM sequence: TTT
ttcaattcaaggtgtttgta

SEQ ID NO: 368028 - DNA, 20 bp, Artificial Sequence
  Description of Artificial Sequence: Synthetic oligonucleotide
  Target: LAMA2; (+) strand; PAM type: YTN; PAM sequence: TTT
tcaattcaaggtgtttgtaa

SEQ ID NO: 368029 - DNA, 20 bp, Artificial Sequence
  Description of Artificial Sequence: Synthetic oligonucleotide
  Target: LAMA2; (+) strand; PAM type: YTN; PAM sequence: TTT
caattcaaggtgtttgtaat

SEQ ID NO: 368030 - DNA, 20 bp, Artificial Sequence
  Description of Artificial Sequence: Synthetic oligonucleotide
  Target: LAMA2; (+) strand; PAM type: YTN; PAM sequence: TTC
aattcaaggtgtttgtaatc

SEQ ID NO: 368031 - DNA, 20 bp, Artificial Sequence
  Description of Artificial Sequence: Synthetic oligonucleotide
  Target: LAMA2; (+) strand; PAM type: YTN; PAM sequence: TTC
aaggtgtttgtaatcacata

SEQ ID NO: 368032 - DNA, 20 bp, Artificial Sequence
  Description of Artificial Sequence: Synthetic oligonucleotide
  Target: LAMA2; (+) strand; PAM type: YTN; PAM sequence: TTT
gtaatcacatatatgtttat

SEQ ID NO: 368033 - DNA, 20 bp, Artificial Sequence
  Description of Artificial Sequence: Synthetic oligonucleotide
  Target: LAMA2; (+) strand; PAM type: YTN; PAM sequence: TTG
taatcacatatatgtttatg

SEQ ID NO: 368034 - DNA, 20 bp, Artificial Sequence
  Description of Artificial Sequence: Synthetic oligonucleotide
  Target: LAMA2; (+) strand; PAM type: YTN; PAM sequence: TTT
atgagttgtcaggtagctat

SEQ ID NO: 368035 - DNA, 20 bp, Artificial Sequence
  Description of Artificial Sequence: Synthetic oligonucleotide
  Target: LAMA2; (+) strand; PAM type: YTN; PAM sequence: TTA
tgagttgtcaggtagctatt

SEQ ID NO: 368036 - DNA, 20 bp, Artificial Sequence
  Description of Artificial Sequence: Synthetic oligonucleotide
  Target: LAMA2; (+) strand; PAM type: YTN; PAM sequence: TTG
tcaggtagctattattttag

SEQ ID NO: 368037 - DNA, 20 bp, Artificial Sequence
  Description of Artificial Sequence: Synthetic oligonucleotide
  Target: LAMA2; (+) strand; PAM type: YTN; PAM sequence: CTA
ttattttagttaacagggaa

SEQ ID NO: 368038 - DNA, 20 bp, Artificial Sequence
  Description of Artificial Sequence: Synthetic oligonucleotide
  Target: LAMA2; (+) strand; PAM type: YTN; PAM sequence: TTA
ttttagttaacagggaacta

SEQ ID NO: 368039 - DNA, 20 bp, Artificial Sequence
  Description of Artificial Sequence: Synthetic oligonucleotide
  Target: LAMA2; (+) strand; PAM type: YTN; PAM sequence: TTT
tagttaacagggaactaagg

SEQ ID NO: 368040 - DNA, 20 bp, Artificial Sequence
  Description of Artificial Sequence: Synthetic oligonucleotide
  Target: LAMA2; (+) strand; PAM type: YTN; PAM sequence: TTT
agttaacagggaactaaggt

SEQ ID NO: 368041 - DNA, 20 bp, Artificial Sequence
  Description of Artificial Sequence: Synthetic oligonucleotide
  Target: LAMA2; (+) strand; PAM type: YTN; PAM sequence: TTA
gttaacagggaactaaggtc

SEQ ID NO: 368042 - DNA, 20 bp, Artificial Sequence
  Description of Artificial Sequence: Synthetic oligonucleotide
  Target: LAMA2; (+) strand; PAM type: YTN; PAM sequence: TTA
acagggaactaaggtcatgc

SEQ ID NO: 368043 - DNA, 20 bp, Artificial Sequence
  Description of Artificial Sequence: Synthetic oligonucleotide
  Target: LAMA2; (+) strand; PAM type: YTN; PAM sequence: CTA
aggtcatgccaaaccaagaa

SEQ ID NO: 368044 - DNA, 20 bp, Artificial Sequence
  Description of Artificial Sequence: Synthetic oligonucleotide
  Target: LAMA2; (+) strand; PAM type: YTN; PAM sequence: CTT
cataatgcatttggctaagg

SEQ ID NO: 368045 - DNA, 20 bp, Artificial Sequence
  Description of Artificial Sequence: Synthetic oligonucleotide
  Target: LAMA2; (+) strand; PAM type: YTN; PAM sequence: TTC
ataatgcatttggctaaggc

SEQ ID NO: 368046 - DNA, 20 bp, Artificial Sequence
  Description of Artificial Sequence: Synthetic oligonucleotide
  Target: LAMA2; (+) strand; PAM type: YTN; PAM sequence: TTT
ggctaaggctaatattgaaa

SEQ ID NO: 368047 - DNA, 20 bp, Artificial Sequence
  Description of Artificial Sequence: Synthetic oligonucleotide
  Target: LAMA2; (+) strand; PAM type: YTN; PAM sequence: TTG
gctaaggctaatattgaaat

SEQ ID NO: 368048 - DNA, 20 bp, Artificial Sequence
  Description of Artificial Sequence: Synthetic oligonucleotide
  Target: LAMA2; (+) strand; PAM type: YTN; PAM sequence: CTA
aggctaatattgaaattgca

SEQ ID NO: 368049 - DNA, 20 bp, Artificial Sequence
  Description of Artificial Sequence: Synthetic oligonucleotide
  Target: LAMA2; (+) strand; PAM type: YTN; PAM sequence: CTA
atattgaaattgcattgcct

SEQ ID NO: 368050 - DNA, 20 bp, Artificial Sequence
  Description of Artificial Sequence: Synthetic oligonucleotide
  Target: LAMA2; (+) strand; PAM type: YTN; PAM sequence: TTG
aaattgcattgccttccctt

SEQ ID NO: 368051 - DNA, 20 bp, Artificial Sequence
  Description of Artificial Sequence: Synthetic oligonucleotide
  Target: LAMA2; (+) strand; PAM type: YTN; PAM sequence: TTG
cattgccttcccttcatgta

SEQ ID NO: 368052 - DNA, 20 bp, Artificial Sequence
  Description of Artificial Sequence: Synthetic oligonucleotide
  Target: LAMA2; (+) strand; PAM type: YTN; PAM sequence: TTG
ccttcccttcatgtatacca

SEQ ID NO: 368053 - DNA, 20 bp, Artificial Sequence
  Description of Artificial Sequence: Synthetic oligonucleotide
  Target: LAMA2; (+) strand; PAM type: YTN; PAM sequence: CTT
cccttcatgtataccacaaa

SEQ ID NO: 368054 - DNA, 20 bp, Artificial Sequence
  Description of Artificial Sequence: Synthetic oligonucleotide
  Target: LAMA2; (+) strand; PAM type: YTN; PAM sequence: TTC
ccttcatgtataccacaaat

SEQ ID NO: 368055 - DNA, 20 bp, Artificial Sequence
  Description of Artificial Sequence: Synthetic oligonucleotide
  Target: LAMA2; (+) strand; PAM type: YTN; PAM sequence: CTT
catgtataccacaaatatat

SEQ ID NO: 368056 - DNA, 20 bp, Artificial Sequence
  Description of Artificial Sequence: Synthetic oligonucleotide
  Target: LAMA2; (+) strand; PAM type: YTN; PAM sequence: TTC
atgtataccacaaatatatt

SEQ ID NO: 368057 - DNA, 20 bp, Artificial Sequence
  Description of Artificial Sequence: Synthetic oligonucleotide
  Target: LAMA2; (+) strand; PAM type: YTN; PAM sequence: TTC
cctgaatgacagggaaagcc

SEQ ID NO: 368058 - DNA, 20 bp, Artificial Sequence
  Description of Artificial Sequence: Synthetic oligonucleotide
  Target: LAMA2; (+) strand; PAM type: YTN; PAM sequence: CTG
aatgacagggaaagccaacc

SEQ ID NO: 368059 - DNA, 20 bp, Artificial Sequence
  Description of Artificial Sequence: Synthetic oligonucleotide
  Target: LAMA2; (+) strand; PAM type: YTN; PAM sequence: CTG
aaaataaaagtctactaagg

SEQ ID NO: 368060 - DNA, 20 bp, Artificial Sequence
  Description of Artificial Sequence: Synthetic oligonucleotide
  Target: LAMA2; (+) strand; PAM type: YTN; PAM sequence: CTA
ctaaggccgggtgtggtggc

SEQ ID NO: 368061 - DNA, 20 bp, Artificial Sequence
  Description of Artificial Sequence: Synthetic oligonucleotide
  Target: LAMA2; (+) strand; PAM type: YTN; PAM sequence: CTA
aggccgggtgtggtggctca

SEQ ID NO: 368062 - DNA, 20 bp, Artificial Sequence
  Description of Artificial Sequence: Synthetic oligonucleotide
  Target: LAMA2; (+) strand; PAM type: YTN; PAM sequence: CTC
atgtctgtaatcctagcact

SEQ ID NO: 368063 - DNA, 20 bp, Artificial Sequence
  Description of Artificial Sequence: Synthetic oligonucleotide
  Target: LAMA2; (+) strand; PAM type: YTN; PAM sequence: CTG
taatcctagcactttgggag

SEQ ID NO: 368064 - DNA, 20 bp, Artificial Sequence
  Description of Artificial Sequence: Synthetic oligonucleotide
  Target: LAMA2; (+) strand; PAM type: YTN; PAM sequence: CTA
gcactttgggaggctgaggc

SEQ ID NO: 368065 - DNA, 20 bp, Artificial Sequence
  Description of Artificial Sequence: Synthetic oligonucleotide
  Target: LAMA2; (+) strand; PAM type: YTN; PAM sequence: CTT
tgggaggctgaggcaggtgg

SEQ ID NO: 368066 - DNA, 20 bp, Artificial Sequence
  Description of Artificial Sequence: Synthetic oligonucleotide
  Target: LAMA2; (+) strand; PAM type: YTN; PAM sequence: TTT
gggaggctgaggcaggtgga

SEQ ID NO: 368067 - DNA, 20 bp, Artificial Sequence
  Description of Artificial Sequence: Synthetic oligonucleotide
  Target: LAMA2; (+) strand; PAM type: YTN; PAM sequence: TTG
ggaggctgaggcaggtggat

SEQ ID NO: 368068 - DNA, 20 bp, Artificial Sequence
  Description of Artificial Sequence: Synthetic oligonucleotide
  Target: LAMA2; (+) strand; PAM type: YTN; PAM sequence: CTG
aggcaggtggatcacctgat

SEQ ID NO: 368069 - DNA, 20 bp, Artificial Sequence
  Description of Artificial Sequence: Synthetic oligonucleotide
  Target: LAMA2; (+) strand; PAM type: YTN; PAM sequence: CTG
atgtcaggagtttgagacca

SEQ ID NO: 368070 - DNA, 20 bp, Artificial Sequence
  Description of Artificial Sequence: Synthetic oligonucleotide
  Target: LAMA2; (+) strand; PAM type: YTN; PAM sequence: TTT
gagaccagactggccaacat

SEQ ID NO: 368071 - DNA, 20 bp, Artificial Sequence
  Description of Artificial Sequence: Synthetic oligonucleotide
  Target: LAMA2; (+) strand; PAM type: YTN; PAM sequence: TTG
agaccagactggccaacatg

SEQ ID NO: 368072 - DNA, 20 bp, Artificial Sequence
  Description of Artificial Sequence: Synthetic oligonucleotide
  Target: LAMA2; (+) strand; PAM type: YTN; PAM sequence: CTG
gccaacatggcaaaaccccc

SEQ ID NO: 368073 - DNA, 20 bp, Artificial Sequence
  Description of Artificial Sequence: Synthetic oligonucleotide
  Target: LAMA2; (+) strand; PAM type: YTN; PAM sequence: CTC
ttctacaaatgcaaaaaatt

SEQ ID NO: 368074 - DNA, 20 bp, Artificial Sequence
  Description of Artificial Sequence: Synthetic oligonucleotide
  Target: LAMA2; (+) strand; PAM type: YTN; PAM sequence: CTT
ctacaaatgcaaaaaattag

SEQ ID NO: 368075 - DNA, 20 bp, Artificial Sequence
  Description of Artificial Sequence: Synthetic oligonucleotide
  Target: LAMA2; (+) strand; PAM type: YTN; PAM sequence: TTC
tacaaatgcaaaaaattagc

SEQ ID NO: 368076 - DNA, 20 bp, Artificial Sequence
  Description of Artificial Sequence: Synthetic oligonucleotide
  Target: LAMA2; (+) strand; PAM type: YTN; PAM sequence: CTA
caaatgcaaaaaattagcca

SEQ ID NO: 368077 - DNA, 20 bp, Artificial Sequence
  Description of Artificial Sequence: Synthetic oligonucleotide
  Target: LAMA2; (+) strand; PAM type: YTN; PAM sequence: TTA
gccaggcttggtggcaggcg

SEQ ID NO: 368078 - DNA, 20 bp, Artificial Sequence
  Description of Artificial Sequence: Synthetic oligonucleotide
  Target: LAMA2; (+) strand; PAM type: YTN; PAM sequence: CTT
ggtggcaggcgcctgtaatc

SEQ ID NO: 368079 - DNA, 20 bp, Artificial Sequence
  Description of Artificial Sequence: Synthetic oligonucleotide
  Target: LAMA2; (+) strand; PAM type: YTN; PAM sequence: TTG
gtggcaggcgcctgtaatct

SEQ ID NO: 368080 - DNA, 20 bp, Artificial Sequence
  Description of Artificial Sequence: Synthetic oligonucleotide
  Target: LAMA2; (+) strand; PAM type: YTN; PAM sequence: CTG
taatctcagctattatggag

SEQ ID NO: 368081 - DNA, 20 bp, Artificial Sequence
  Description of Artificial Sequence: Synthetic oligonucleotide
  Target: LAMA2; (+) strand; PAM type: YTN; PAM sequence: CTC
agctattatggaggctgagg

SEQ ID NO: 368082 - DNA, 20 bp, Artificial Sequence
  Description of Artificial Sequence: Synthetic oligonucleotide
  Target: LAMA2; (+) strand; PAM type: YTN; PAM sequence: CTA
ttatggaggctgaggcatga

SEQ ID NO: 368083 - DNA, 20 bp, Artificial Sequence
  Description of Artificial Sequence: Synthetic oligonucleotide
  Target: LAMA2; (+) strand; PAM type: YTN; PAM sequence: TTA
tggaggctgaggcatgagaa

SEQ ID NO: 368084 - DNA, 20 bp, Artificial Sequence
  Description of Artificial Sequence: Synthetic oligonucleotide
  Target: LAMA2; (+) strand; PAM type: YTN; PAM sequence: CTG
aggcatgagaatcgcttgaa

SEQ ID NO: 368085 - DNA, 20 bp, Artificial Sequence
  Description of Artificial Sequence: Synthetic oligonucleotide
  Target: LAMA2; (+) strand; PAM type: YTN; PAM sequence: CTT
gaacctgggaggcacaggtg

SEQ ID NO: 368086 - DNA, 20 bp, Artificial Sequence
  Description of Artificial Sequence: Synthetic oligonucleotide
  Target: LAMA2; (+) strand; PAM type: YTN; PAM sequence: TTG
aacctgggaggcacaggtgg

SEQ ID NO: 368087 - DNA, 20 bp, Artificial Sequence
  Description of Artificial Sequence: Synthetic oligonucleotide
  Target: LAMA2; (+) strand; PAM type: YTN; PAM sequence: CTG
ggaggcacaggtggcagcga

SEQ ID NO: 368088 - DNA, 20 bp, Artificial Sequence
  Description of Artificial Sequence: Synthetic oligonucleotide
  Target: LAMA2; (+) strand; PAM type: YTN; PAM sequence: TTG
cactccagcctgggggatag

SEQ ID NO: 368089 - DNA, 20 bp, Artificial Sequence
  Description of Artificial Sequence: Synthetic oligonucleotide
  Target: LAMA2; (+) strand; PAM type: YTN; PAM sequence: CTC
cagcctgggggatagagcga

SEQ ID NO: 368090 - DNA, 20 bp, Artificial Sequence
  Description of Artificial Sequence: Synthetic oligonucleotide
  Target: LAMA2; (+) strand; PAM type: YTN; PAM sequence: CTG
ggggatagagcgagactctg

SEQ ID NO: 368091 - DNA, 20 bp, Artificial Sequence
  Description of Artificial Sequence: Synthetic oligonucleotide
  Target: LAMA2; (+) strand; PAM type: YTN; PAM sequence: CTC
tgtctccaaaaaaaaataaa

SEQ ID NO: 368092 - DNA, 20 bp, Artificial Sequence
  Description of Artificial Sequence: Synthetic oligonucleotide
  Target: LAMA2; (+) strand; PAM type: YTN; PAM sequence: CTG
tctccaaaaaaaaataaata

SEQ ID NO: 368093 - DNA, 20 bp, Artificial Sequence
  Description of Artificial Sequence: Synthetic oligonucleotide
  Target: LAMA2; (+) strand; PAM type: YTN; PAM sequence: CTC
caaaaaaaaataaataaata

SEQ ID NO: 368094 - DNA, 20 bp, Artificial Sequence
  Description of Artificial Sequence: Synthetic oligonucleotide
  Target: LAMA2; (+) strand; PAM type: YTN; PAM sequence: TTT
ttaaagttaaaagtctattg

SEQ ID NO: 368095 - DNA, 20 bp, Artificial Sequence
  Description of Artificial Sequence: Synthetic oligonucleotide
  Target: LAMA2; (+) strand; PAM type: YTN; PAM sequence: TTT
taaagttaaaagtctattga

SEQ ID NO: 368096 - DNA, 20 bp, Artificial Sequence
  Description of Artificial Sequence: Synthetic oligonucleotide
  Target: LAMA2; (+) strand; PAM type: YTN; PAM sequence: TTT
aaagttaaaagtctattgag

SEQ ID NO: 368097 - DNA, 20 bp, Artificial Sequence
  Description of Artificial Sequence: Synthetic oligonucleotide
  Target: LAMA2; (+) strand; PAM type: YTN; PAM sequence: TTA
aagttaaaagtctattgagg

SEQ ID NO: 368098 - DNA, 20 bp, Artificial Sequence
  Description of Artificial Sequence: Synthetic oligonucleotide
  Target: LAMA2; (+) strand; PAM type: YTN; PAM sequence: TTA
aaagtctattgagggtggag

SEQ ID NO: 368099 - DNA, 20 bp, Artificial Sequence
  Description of Artificial Sequence: Synthetic oligonucleotide
  Target: LAMA2; (+) strand; PAM type: YTN; PAM sequence: CTA
ttgagggtggaggatacaaa

SEQ ID NO: 368100 - DNA, 20 bp, Artificial Sequence
  Description of Artificial Sequence: Synthetic oligonucleotide
  Target: LAMA2; (+) strand; PAM type: YTN; PAM sequence: TTG
agggtggaggatacaaatat

SEQ ID NO: 368101 - DNA, 20 bp, Artificial Sequence
  Description of Artificial Sequence: Synthetic oligonucleotide
  Target: LAMA2; (+) strand; PAM type: YTN; PAM sequence: TTT
gacacttttgtaccctcttt

SEQ ID NO: 368102 - DNA, 20 bp, Artificial Sequence
  Description of Artificial Sequence: Synthetic oligonucleotide
  Target: LAMA2; (+) strand; PAM type: YTN; PAM sequence: TTG
acacttttgtaccctctttt

SEQ ID NO: 368103 - DNA, 20 bp, Artificial Sequence
  Description of Artificial Sequence: Synthetic oligonucleotide
  Target: LAMA2; (+) strand; PAM type: YTN; PAM sequence: CTT
ttgtaccctcttttcagttt

SEQ ID NO: 368104 - DNA, 20 bp, Artificial Sequence
  Description of Artificial Sequence: Synthetic oligonucleotide
  Target: LAMA2; (+) strand; PAM type: YTN; PAM sequence: TTT
tgtaccctcttttcagtttt

SEQ ID NO: 368105 - DNA, 20 bp, Artificial Sequence
  Description of Artificial Sequence: Synthetic oligonucleotide
  Target: LAMA2; (+) strand; PAM type: YTN; PAM sequence: TTT
gtaccctcttttcagtttta

SEQ ID NO: 368106 - DNA, 20 bp, Artificial Sequence
  Description of Artificial Sequence: Synthetic oligonucleotide
  Target: LAMA2; (+) strand; PAM type: YTN; PAM sequence: TTG
taccctcttttcagttttac

SEQ ID NO: 368107 - DNA, 20 bp, Artificial Sequence
  Description of Artificial Sequence: Synthetic oligonucleotide
  Target: LAMA2; (+) strand; PAM type: YTN; PAM sequence: CTC
ttttcagttttactcttttt

SEQ ID NO: 368108 - DNA, 20 bp, Artificial Sequence
  Description of Artificial Sequence: Synthetic oligonucleotide
  Target: LAMA2; (+) strand; PAM type: YTN; PAM sequence: CTT
ttcagttttactctttttta

SEQ ID NO: 368109 - DNA, 20 bp, Artificial Sequence
  Description of Artificial Sequence: Synthetic oligonucleotide
  Target: LAMA2; (+) strand; PAM type: YTN; PAM sequence: TTT
tcagttttactcttttttat

SEQ ID NO: 368110 - DNA, 20 bp, Artificial Sequence
  Description of Artificial Sequence: Synthetic oligonucleotide
  Target: LAMA2; (+) strand; PAM type: YTN; PAM sequence: TTT
cagttttactcttttttatt

SEQ ID NO: 368111 - DNA, 20 bp, Artificial Sequence
  Description of Artificial Sequence: Synthetic oligonucleotide
  Target: LAMA2; (+) strand; PAM type: YTN; PAM sequence: TTC
agttttactcttttttattt

SEQ ID NO: 368112 - DNA, 20 bp, Artificial Sequence
  Description of Artificial Sequence: Synthetic oligonucleotide
  Target: LAMA2; (+) strand; PAM type: YTN; PAM sequence: TTT
tactcttttttatttctttt

SEQ ID NO: 368113 - DNA, 20 bp, Artificial Sequence
  Description of Artificial Sequence: Synthetic oligonucleotide
  Target: LAMA2; (+) strand; PAM type: YTN; PAM sequence: TTT
actcttttttatttcttttt

SEQ ID NO: 368114 - DNA, 20 bp, Artificial Sequence
  Description of Artificial Sequence: Synthetic oligonucleotide
  Target: LAMA2; (+) strand; PAM type: YTN; PAM sequence: TTA
ctcttttttatttctttttt

SEQ ID NO: 368115 - DNA, 20 bp, Artificial Sequence
  Description of Artificial Sequence: Synthetic oligonucleotide
  Target: LAMA2; (+) strand; PAM type: YTN; PAM sequence: CTC
ttttttatttcttttttttc

SEQ ID NO: 368116 - DNA, 20 bp, Artificial Sequence
  Description of Artificial Sequence: Synthetic oligonucleotide
  Target: LAMA2; (+) strand; PAM type: YTN; PAM sequence: CTT
ttttatttcttttttttccc

SEQ ID NO: 368117 - DNA, 20 bp, Artificial Sequence
  Description of Artificial Sequence: Synthetic oligonucleotide
  Target: LAMA2; (+) strand; PAM type: YTN; PAM sequence: TTT
tttatttcttttttttcccc

SEQ ID NO: 368118 - DNA, 20 bp, Artificial Sequence
  Description of Artificial Sequence: Synthetic oligonucleotide
  Target: LAMA2; (+) strand; PAM type: YTN; PAM sequence: TTT
ttatttcttttttttccccc

SEQ ID NO: 368119 - DNA, 20 bp, Artificial Sequence
  Description of Artificial Sequence: Synthetic oligonucleotide
  Target: LAMA2; (+) strand; PAM type: YTN; PAM sequence: TTT
tatttcttttttttccccct

SEQ ID NO: 368120 - DNA, 20 bp, Artificial Sequence
  Description of Artificial Sequence: Synthetic oligonucleotide
  Target: LAMA2; (+) strand; PAM type: YTN; PAM sequence: TTT
atttcttttttttccccctt

SEQ ID NO: 368121 - DNA, 20 bp, Artificial Sequence
  Description of Artificial Sequence: Synthetic oligonucleotide
  Target: LAMA2; (+) strand; PAM type: YTN; PAM sequence: TTA
tttcttttttttcccccttt

SEQ ID NO: 368122 - DNA, 20 bp, Artificial Sequence
  Description of Artificial Sequence: Synthetic oligonucleotide
  Target: LAMA2; (+) strand; PAM type: YTN; PAM sequence: TTT
cttttttttccccctttagg

SEQ ID NO: 368123 - DNA, 20 bp, Artificial Sequence
  Description of Artificial Sequence: Synthetic oligonucleotide
  Target: LAMA2; (+) strand; PAM type: YTN; PAM sequence: TTC
ttttttttccccctttaggg

SEQ ID NO: 368124 - DNA, 20 bp, Artificial Sequence
  Description of Artificial Sequence: Synthetic oligonucleotide
  Target: LAMA2; (+) strand; PAM type: YTN; PAM sequence: CTT
ttttttccccctttagggta

SEQ ID NO: 368125 - DNA, 20 bp, Artificial Sequence
  Description of Artificial Sequence: Synthetic oligonucleotide
  Target: LAMA2; (+) strand; PAM type: YTN; PAM sequence: TTT
tttttccccctttagggtaa

SEQ ID NO: 368126 - DNA, 20 bp, Artificial Sequence
  Description of Artificial Sequence: Synthetic oligonucleotide
  Target: LAMA2; (+) strand; PAM type: YTN; PAM sequence: TTT
ttttccccctttagggtaat

SEQ ID NO: 368127 - DNA, 20 bp, Artificial Sequence
  Description of Artificial Sequence: Synthetic oligonucleotide
  Target: LAMA2; (+) strand; PAM type: YTN; PAM sequence: TTT
tttccccctttagggtaatg

SEQ ID NO: 368128 - DNA, 20 bp, Artificial Sequence
  Description of Artificial Sequence: Synthetic oligonucleotide
  Target: LAMA2; (+) strand; PAM type: YTN; PAM sequence: TTT
ttccccctttagggtaatga

SEQ ID NO: 368129 - DNA, 20 bp, Artificial Sequence
  Description of Artificial Sequence: Synthetic oligonucleotide
  Target: LAMA2; (+) strand; PAM type: YTN; PAM sequence: TTT
tccccctttagggtaatgac

SEQ ID NO: 368130 - DNA, 20 bp, Artificial Sequence
  Description of Artificial Sequence: Synthetic oligonucleotide
  Target: LAMA2; (+) strand; PAM type: YTN; PAM sequence: TTT
ccccctttagggtaatgact

SEQ ID NO: 368131 - DNA, 20 bp, Artificial Sequence
  Description of Artificial Sequence: Synthetic oligonucleotide
  Target: LAMA2; (+) strand; PAM type: YTN; PAM sequence: TTC
cccctttagggtaatgactt

SEQ ID NO: 368132 - DNA, 20 bp, Artificial Sequence
  Description of Artificial Sequence: Synthetic oligonucleotide
  Target: LAMA2; (+) strand; PAM type: YTN; PAM sequence: CTT
tagggtaatgacttgagcat

SEQ ID NO: 368133 - DNA, 20 bp, Artificial Sequence
  Description of Artificial Sequence: Synthetic oligonucleotide
  Target: LAMA2; (+) strand; PAM type: YTN; PAM sequence: TTT
agggtaatgacttgagcatc

SEQ ID NO: 368134 - DNA, 20 bp, Artificial Sequence
  Description of Artificial Sequence: Synthetic oligonucleotide
  Target: LAMA2; (+) strand; PAM type: YTN; PAM sequence: TTA
gggtaatgacttgagcatca

SEQ ID NO: 368135 - DNA, 20 bp, Artificial Sequence
  Description of Artificial Sequence: Synthetic oligonucleotide
  Target: LAMA2; (+) strand; PAM type: YTN; PAM sequence: CTT
gagcatcagcacagcccaag

SEQ ID NO: 368136 - DNA, 20 bp, Artificial Sequence
  Description of Artificial Sequence: Synthetic oligonucleotide
  Target: LAMA2; (+) strand; PAM type: YTN; PAM sequence: TTG
agcatcagcacagcccaaga

SEQ ID NO: 368137 - DNA, 20 bp, Artificial Sequence
  Description of Artificial Sequence: Synthetic oligonucleotide
  Target: LAMA2; (+) strand; PAM type: YTN; PAM sequence: CTG
cacccatctgaagaacatac

SEQ ID NO: 368138 - DNA, 20 bp, Artificial Sequence
  Description of Artificial Sequence: Synthetic oligonucleotide
  Target: LAMA2; (+) strand; PAM type: YTN; PAM sequence: CTG
aagaacatactaatgtattg

SEQ ID NO: 368139 - DNA, 20 bp, Artificial Sequence
  Description of Artificial Sequence: Synthetic oligonucleotide
  Target: LAMA2; (+) strand; PAM type: YTN; PAM sequence: CTA
atgtattgttacttaaagaa

SEQ ID NO: 368140 - DNA, 20 bp, Artificial Sequence
  Description of Artificial Sequence: Synthetic oligonucleotide
  Target: LAMA2; (+) strand; PAM type: YTN; PAM sequence: TTG
ttacttaaagaagaatcatt

SEQ ID NO: 368141 - DNA, 20 bp, Artificial Sequence
  Description of Artificial Sequence: Synthetic oligonucleotide
  Target: LAMA2; (+) strand; PAM type: YTN; PAM sequence: TTA
cttaaagaagaatcatttac

SEQ ID NO: 368142 - DNA, 20 bp, Artificial Sequence
  Description of Artificial Sequence: Synthetic oligonucleotide
  Target: LAMA2; (+) strand; PAM type: YTN; PAM sequence: CTT
aaagaagaatcatttaccat

SEQ ID NO: 368143 - DNA, 20 bp, Artificial Sequence
  Description of Artificial Sequence: Synthetic oligonucleotide
  Target: LAMA2; (+) strand; PAM type: YTN; PAM sequence: TTA
aagaagaatcatttaccata

SEQ ID NO: 368144 - DNA, 20 bp, Artificial Sequence
  Description of Artificial Sequence: Synthetic oligonucleotide
  Target: LAMA2; (+) strand; PAM type: YTN; PAM sequence: TTT
accatacatggcacacattt

SEQ ID NO: 368145 - DNA, 20 bp, Artificial Sequence
  Description of Artificial Sequence: Synthetic oligonucleotide
  Target: LAMA2; (+) strand; PAM type: YTN; PAM sequence: TTA
ccatacatggcacacatttt

SEQ ID NO: 368146 - DNA, 20 bp, Artificial Sequence
  Description of Artificial Sequence: Synthetic oligonucleotide
  Target: LAMA2; (+) strand; PAM type: YTN; PAM sequence: TTT
tccagtccgtagaaaggaat

SEQ ID NO: 368147 - DNA, 20 bp, Artificial Sequence
  Description of Artificial Sequence: Synthetic oligonucleotide
  Target: LAMA2; (+) strand; PAM type: YTN; PAM sequence: TTT
ccagtccgtagaaaggaatt

SEQ ID NO: 368148 - DNA, 20 bp, Artificial Sequence
  Description of Artificial Sequence: Synthetic oligonucleotide
  Target: LAMA2; (+) strand; PAM type: YTN; PAM sequence: TTC
cagtccgtagaaaggaattt

SEQ ID NO: 368149 - DNA, 20 bp, Artificial Sequence
  Description of Artificial Sequence: Synthetic oligonucleotide
  Target: LAMA2; (+) strand; PAM type: YTN; PAM sequence: TTT
atgacagtgcttgcgaattt

SEQ ID NO: 368150 - DNA, 20 bp, Artificial Sequence
  Description of Artificial Sequence: Synthetic oligonucleotide
  Target: LAMA2; (+) strand; PAM type: YTN; PAM sequence: TTA
tgacagtgcttgcgaatttg

SEQ ID NO: 368151 - DNA, 20 bp, Artificial Sequence
  Description of Artificial Sequence: Synthetic oligonucleotide
  Target: LAMA2; (+) strand; PAM type: YTN; PAM sequence: CTT
gcgaatttgaagagagtcct

SEQ ID NO: 368152 - DNA, 20 bp, Artificial Sequence
  Description of Artificial Sequence: Synthetic oligonucleotide
  Target: LAMA2; (+) strand; PAM type: YTN; PAM sequence: TTG
cgaatttgaagagagtcctc

SEQ ID NO: 368153 - DNA, 20 bp, Artificial Sequence
  Description of Artificial Sequence: Synthetic oligonucleotide
  Target: LAMA2; (+) strand; PAM type: YTN; PAM sequence: TTT
gaagagagtcctcctacaaa

SEQ ID NO: 368154 - DNA, 20 bp, Artificial Sequence
  Description of Artificial Sequence: Synthetic oligonucleotide
  Target: LAMA2; (+) strand; PAM type: YTN; PAM sequence: TTG
aagagagtcctcctacaaat

SEQ ID NO: 368155 - DNA, 20 bp, Artificial Sequence
  Description of Artificial Sequence: Synthetic oligonucleotide
  Target: LAMA2; (+) strand; PAM type: YTN; PAM sequence: CTC
ctacaaatcacatacagctt

SEQ ID NO: 368156 - DNA, 20 bp, Artificial Sequence
  Description of Artificial Sequence: Synthetic oligonucleotide
  Target: LAMA2; (+) strand; PAM type: YTN; PAM sequence: CTA
caaatcacatacagctttgg

SEQ ID NO: 368157 - DNA, 20 bp, Artificial Sequence
  Description of Artificial Sequence: Synthetic oligonucleotide
  Target: LAMA2; (+) strand; PAM type: YTN; PAM sequence: CTT
tgggatggatgccatcttca

SEQ ID NO: 368158 - DNA, 20 bp, Artificial Sequence
  Description of Artificial Sequence: Synthetic oligonucleotide
  Target: LAMA2; (+) strand; PAM type: YTN; PAM sequence: TTT
gggatggatgccatcttcag

SEQ ID NO: 368159 - DNA, 20 bp, Artificial Sequence
  Description of Artificial Sequence: Synthetic oligonucleotide
  Target: LAMA2; (+) strand; PAM type: YTN; PAM sequence: TTG
ggatggatgccatcttcagg

SEQ ID NO: 368160 - DNA, 20 bp, Artificial Sequence
  Description of Artificial Sequence: Synthetic oligonucleotide
  Target: LAMA2; (+) strand; PAM type: YTN; PAM sequence: CTT
caggtaaaatcaagaactgc

SEQ ID NO: 368161 - DNA, 20 bp, Artificial Sequence
  Description of Artificial Sequence: Synthetic oligonucleotide
  Target: LAMA2; (+) strand; PAM type: YTN; PAM sequence: TTC
aggtaaaatcaagaactgca

SEQ ID NO: 368162 - DNA, 20 bp, Artificial Sequence
  Description of Artificial Sequence: Synthetic oligonucleotide
  Target: LAMA2; (+) strand; PAM type: YTN; PAM sequence: CTG
cagctccaacgttcacacat

SEQ ID NO: 368163 - DNA, 20 bp, Artificial Sequence
  Description of Artificial Sequence: Synthetic oligonucleotide
  Target: LAMA2; (+) strand; PAM type: YTN; PAM sequence: CTC
caacgttcacacatttactt

SEQ ID NO: 368164 - DNA, 20 bp, Artificial Sequence
  Description of Artificial Sequence: Synthetic oligonucleotide
  Target: LAMA2; (+) strand; PAM type: YTN; PAM sequence: TTC
acacatttactttggggcca

SEQ ID NO: 368165 - DNA, 20 bp, Artificial Sequence
  Description of Artificial Sequence: Synthetic oligonucleotide
  Target: LAMA2; (+) strand; PAM type: YTN; PAM sequence: TTT
actttggggccaaggtgcag

SEQ ID NO: 368166 - DNA, 20 bp, Artificial Sequence
  Description of Artificial Sequence: Synthetic oligonucleotide
  Target: LAMA2; (+) strand; PAM type: YTN; PAM sequence: TTA
ctttggggccaaggtgcagg

SEQ ID NO: 368167 - DNA, 20 bp, Artificial Sequence
  Description of Artificial Sequence: Synthetic oligonucleotide
  Target: LAMA2; (+) strand; PAM type: YTN; PAM sequence: CTT
tggggccaaggtgcaggagc

SEQ ID NO: 368168 - DNA, 20 bp, Artificial Sequence
  Description of Artificial Sequence: Synthetic oligonucleotide
  Target: LAMA2; (+) strand; PAM type: YTN; PAM sequence: TTT
ggggccaaggtgcaggagcc

SEQ ID NO: 368169 - DNA, 20 bp, Artificial Sequence
  Description of Artificial Sequence: Synthetic oligonucleotide
  Target: LAMA2; (+) strand; PAM type: YTN; PAM sequence: TTG
gggccaaggtgcaggagccg

SEQ ID NO: 368170 - DNA, 20 bp, Artificial Sequence
  Description of Artificial Sequence: Synthetic oligonucleotide
  Target: LAMA2; (+) strand; PAM type: YTN; PAM sequence: TTT
tttaaggcacctaggatttg

SEQ ID NO: 368171 - DNA, 20 bp, Artificial Sequence
  Description of Artificial Sequence: Synthetic oligonucleotide
  Target: LAMA2; (+) strand; PAM type: YTN; PAM sequence: TTT
ttaaggcacctaggatttgc

SEQ ID NO: 368172 - DNA, 20 bp, Artificial Sequence
  Description of Artificial Sequence: Synthetic oligonucleotide
  Target: LAMA2; (+) strand; PAM type: YTN; PAM sequence: TTT
taaggcacctaggatttgct

SEQ ID NO: 368173 - DNA, 20 bp, Artificial Sequence
  Description of Artificial Sequence: Synthetic oligonucleotide
  Target: LAMA2; (+) strand; PAM type: YTN; PAM sequence: TTT
aaggcacctaggatttgctg

SEQ ID NO: 368174 - DNA, 20 bp, Artificial Sequence
  Description of Artificial Sequence: Synthetic oligonucleotide
  Target: LAMA2; (+) strand; PAM type: YTN; PAM sequence: TTA
aggcacctaggatttgctgt

SEQ ID NO: 368175 - DNA, 20 bp, Artificial Sequence
  Description of Artificial Sequence: Synthetic oligonucleotide
  Target: LAMA2; (+) strand; PAM type: YTN; PAM sequence: CTA
ggatttgctgtcttcaaaga

SEQ ID NO: 368176 - DNA, 20 bp, Artificial Sequence
  Description of Artificial Sequence: Synthetic oligonucleotide
  Target: LAMA2; (+) strand; PAM type: YTN; PAM sequence: TTT
gctgtcttcaaagagcagat

SEQ ID NO: 368177 - DNA, 20 bp, Artificial Sequence
  Description of Artificial Sequence: Synthetic oligonucleotide
  Target: LAMA2; (+) strand; PAM type: YTN; PAM sequence: TTG
ctgtcttcaaagagcagata

SEQ ID NO: 368178 - DNA, 20 bp, Artificial Sequence
  Description of Artificial Sequence: Synthetic oligonucleotide
  Target: LAMA2; (+) strand; PAM type: YTN; PAM sequence: CTG
tcttcaaagagcagataaga

SEQ ID NO: 368179 - DNA, 20 bp, Artificial Sequence
  Description of Artificial Sequence: Synthetic oligonucleotide
  Target: LAMA2; (+) strand; PAM type: YTN; PAM sequence: CTT
caaagagcagataagaacgg

SEQ ID NO: 368180 - DNA, 20 bp, Artificial Sequence
  Description of Artificial Sequence: Synthetic oligonucleotide
  Target: LAMA2; (+) strand; PAM type: YTN; PAM sequence: TTC
aaagagcagataagaacgga

SEQ ID NO: 368181 - DNA, 20 bp, Artificial Sequence
  Description of Artificial Sequence: Synthetic oligonucleotide
  Target: LAMA2; (+) strand; PAM type: YTN; PAM sequence: CTA
gttttctgaaagatttttct

SEQ ID NO: 368182 - DNA, 20 bp, Artificial Sequence
  Description of Artificial Sequence: Synthetic oligonucleotide
  Target: LAMA2; (+) strand; PAM type: YTN; PAM sequence: TTT
tctgaaagatttttctctta

SEQ ID NO: 368183 - DNA, 20 bp, Artificial Sequence
  Description of Artificial Sequence: Synthetic oligonucleotide
  Target: LAMA2; (+) strand; PAM type: YTN; PAM sequence: TTT
ctgaaagatttttctcttaa

SEQ ID NO: 368184 - DNA, 20 bp, Artificial Sequence
  Description of Artificial Sequence: Synthetic oligonucleotide
  Target: LAMA2; (+) strand; PAM type: YTN; PAM sequence: TTC
tgaaagatttttctcttaaa

SEQ ID NO: 368185 - DNA, 20 bp, Artificial Sequence
  Description of Artificial Sequence: Synthetic oligonucleotide
  Target: LAMA2; (+) strand; PAM type: YTN; PAM sequence: CTG
aaagatttttctcttaaacc

SEQ ID NO: 368186 - DNA, 20 bp, Artificial Sequence
  Description of Artificial Sequence: Synthetic oligonucleotide
  Target: LAMA2; (+) strand; PAM type: YTN; PAM sequence: TTT
ttctcttaaacctttacagt

SEQ ID NO: 368187 - DNA, 20 bp, Artificial Sequence
  Description of Artificial Sequence: Synthetic oligonucleotide
  Target: LAMA2; (+) strand; PAM type: YTN; PAM sequence: TTT
tctcttaaacctttacagtt

SEQ ID NO: 368188 - DNA, 20 bp, Artificial Sequence
  Description of Artificial Sequence: Synthetic oligonucleotide
  Target: LAMA2; (+) strand; PAM type: YTN; PAM sequence: TTT
ctcttaaacctttacagttt

SEQ ID NO: 368189 - DNA, 20 bp, Artificial Sequence
  Description of Artificial Sequence: Synthetic oligonucleotide
  Target: LAMA2; (+) strand; PAM type: YTN; PAM sequence: TTC
tcttaaacctttacagtttt

SEQ ID NO: 368190 - DNA, 20 bp, Artificial Sequence
  Description of Artificial Sequence: Synthetic oligonucleotide
  Target: LAMA2; (+) strand; PAM type: YTN; PAM sequence: CTC
ttaaacctttacagttttaa

SEQ ID NO: 368191 - DNA, 20 bp, Artificial Sequence
  Description of Artificial Sequence: Synthetic oligonucleotide
  Target: LAMA2; (+) strand; PAM type: YTN; PAM sequence: CTT
aaacctttacagttttaaat

SEQ ID NO: 368192 - DNA, 20 bp, Artificial Sequence
  Description of Artificial Sequence: Synthetic oligonucleotide
  Target: LAMA2; (+) strand; PAM type: YTN; PAM sequence: TTA
aacctttacagttttaaata

SEQ ID NO: 368193 - DNA, 20 bp, Artificial Sequence
  Description of Artificial Sequence: Synthetic oligonucleotide
  Target: LAMA2; (+) strand; PAM type: YTN; PAM sequence: CTT
tacagttttaaatatgcaga

SEQ ID NO: 368194 - DNA, 20 bp, Artificial Sequence
  Description of Artificial Sequence: Synthetic oligonucleotide
  Target: LAMA2; (+) strand; PAM type: YTN; PAM sequence: TTT
acagttttaaatatgcagaa

SEQ ID NO: 368195 - DNA, 20 bp, Artificial Sequence
  Description of Artificial Sequence: Synthetic oligonucleotide
  Target: LAMA2; (+) strand; PAM type: YTN; PAM sequence: TTA
cagttttaaatatgcagaat

SEQ ID NO: 368196 - DNA, 20 bp, Artificial Sequence
  Description of Artificial Sequence: Synthetic oligonucleotide
  Target: LAMA2; (+) strand; PAM type: YTN; PAM sequence: TTT
taaatatgcagaataaattt

SEQ ID NO: 368197 - DNA, 20 bp, Artificial Sequence
  Description of Artificial Sequence: Synthetic oligonucleotide
  Target: LAMA2; (+) strand; PAM type: YTN; PAM sequence: TTT
aaatatgcagaataaatttg

SEQ ID NO: 368198 - DNA, 20 bp, Artificial Sequence
  Description of Artificial Sequence: Synthetic oligonucleotide
  Target: LAMA2; (+) strand; PAM type: YTN; PAM sequence: TTA
aatatgcagaataaatttgt

SEQ ID NO: 368199 - DNA, 20 bp, Artificial Sequence
  Description of Artificial Sequence: Synthetic oligonucleotide
  Target: LAMA2; (+) strand; PAM type: YTN; PAM sequence: TTT
gtctcggtttttattattat

SEQ ID NO: 368200 - DNA, 20 bp, Artificial Sequence
  Description of Artificial Sequence: Synthetic oligonucleotide
  Target: LAMA2; (+) strand; PAM type: YTN; PAM sequence: TTG
tctcggtttttattattatt

SEQ ID NO: 368201 - DNA, 20 bp, Artificial Sequence
  Description of Artificial Sequence: Synthetic oligonucleotide
  Target: LAMA2; (+) strand; PAM type: YTN; PAM sequence: CTC
ggtttttattattattgatg

SEQ ID NO: 368202 - DNA, 20 bp, Artificial Sequence
  Description of Artificial Sequence: Synthetic oligonucleotide
  Target: LAMA2; (+) strand; PAM type: YTN; PAM sequence: TTT
ttattattattgatgattct

SEQ ID NO: 368203 - DNA, 20 bp, Artificial Sequence
  Description of Artificial Sequence: Synthetic oligonucleotide
  Target: LAMA2; (+) strand; PAM type: YTN; PAM sequence: TTT
tattattattgatgattctt

SEQ ID NO: 368204 - DNA, 20 bp, Artificial Sequence
  Description of Artificial Sequence: Synthetic oligonucleotide
  Target: LAMA2; (+) strand; PAM type: YTN; PAM sequence: TTT
attattattgatgattcttt

SEQ ID NO: 368205 - DNA, 20 bp, Artificial Sequence
  Description of Artificial Sequence: Synthetic oligonucleotide
  Target: LAMA2; (+) strand; PAM type: YTN; PAM sequence: TTA
ttattattgatgattctttc

SEQ ID NO: 368206 - DNA, 20 bp, Artificial Sequence
  Description of Artificial Sequence: Synthetic oligonucleotide
  Target: LAMA2; (+) strand; PAM type: YTN; PAM sequence: TTA
ttattgatgattctttcaca

SEQ ID NO: 368207 - DNA, 20 bp, Artificial Sequence
  Description of Artificial Sequence: Synthetic oligonucleotide
  Target: LAMA2; (+) strand; PAM type: YTN; PAM sequence: TTA
ttgatgattctttcacaatt

SEQ ID NO: 368208 - DNA, 20 bp, Artificial Sequence
  Description of Artificial Sequence: Synthetic oligonucleotide
  Target: LAMA2; (+) strand; PAM type: YTN; PAM sequence: TTG
atgattctttcacaattgtc

SEQ ID NO: 368209 - DNA, 20 bp, Artificial Sequence
  Description of Artificial Sequence: Synthetic oligonucleotide
  Target: LAMA2; (+) strand; PAM type: YTN; PAM sequence: TTC
tttcacaattgtcagaacat

SEQ ID NO: 368210 - DNA, 20 bp, Artificial Sequence
  Description of Artificial Sequence: Synthetic oligonucleotide
  Target: LAMA2; (+) strand; PAM type: YTN; PAM sequence: CTT
tcacaattgtcagaacatgt

SEQ ID NO: 368211 - DNA, 20 bp, Artificial Sequence
  Description of Artificial Sequence: Synthetic oligonucleotide
  Target: LAMA2; (+) strand; PAM type: YTN; PAM sequence: TTT
cacaattgtcagaacatgtg

SEQ ID NO: 368212 - DNA, 20 bp, Artificial Sequence
  Description of Artificial Sequence: Synthetic oligonucleotide
  Target: LAMA2; (+) strand; PAM type: YTN; PAM sequence: TTC
acaattgtcagaacatgtga

SEQ ID NO: 368213 - DNA, 20 bp, Artificial Sequence
  Description of Artificial Sequence: Synthetic oligonucleotide
  Target: LAMA2; (+) strand; PAM type: YTN; PAM sequence: TTG
tcagaacatgtgatcaataa

SEQ ID NO: 368214 - DNA, 20 bp, Artificial Sequence
  Description of Artificial Sequence: Synthetic oligonucleotide
  Target: LAMA2; (+) strand; PAM type: YTN; PAM sequence: TTC
ctatattgagaaatgttata

SEQ ID NO: 368215 - DNA, 20 bp, Artificial Sequence
  Description of Artificial Sequence: Synthetic oligonucleotide
  Target: LAMA2; (+) strand; PAM type: YTN; PAM sequence: CTA
tattgagaaatgttatattg

SEQ ID NO: 368216 - DNA, 20 bp, Artificial Sequence
  Description of Artificial Sequence: Synthetic oligonucleotide
  Target: LAMA2; (+) strand; PAM type: YTN; PAM sequence: TTG
agaaatgttatattggaaaa

SEQ ID NO: 368217 - DNA, 20 bp, Artificial Sequence
  Description of Artificial Sequence: Synthetic oligonucleotide
  Target: LAMA2; (+) strand; PAM type: YTN; PAM sequence: TTA
tattggaaaataaagtctcc

SEQ ID NO: 368218 - DNA, 20 bp, Artificial Sequence
  Description of Artificial Sequence: Synthetic oligonucleotide
  Target: LAMA2; (+) strand; PAM type: YTN; PAM sequence: TTG
gaaaataaagtctcctttat

SEQ ID NO: 368219 - DNA, 20 bp, Artificial Sequence
  Description of Artificial Sequence: Synthetic oligonucleotide
  Target: LAMA2; (+) strand; PAM type: YTN; PAM sequence: CTC
ctttatgatggctcatagcg

SEQ ID NO: 368220 - DNA, 20 bp, Artificial Sequence
  Description of Artificial Sequence: Synthetic oligonucleotide
  Target: LAMA2; (+) strand; PAM type: YTN; PAM sequence: CTT
tatgatggctcatagcgtgg

SEQ ID NO: 368221 - DNA, 20 bp, Artificial Sequence
  Description of Artificial Sequence: Synthetic oligonucleotide
  Target: LAMA2; (+) strand; PAM type: YTN; PAM sequence: TTT
atgatggctcatagcgtggg

SEQ ID NO: 368222 - DNA, 20 bp, Artificial Sequence
  Description of Artificial Sequence: Synthetic oligonucleotide
  Target: LAMA2; (+) strand; PAM type: YTN; PAM sequence: TTA
tgatggctcatagcgtggga

SEQ ID NO: 368223 - DNA, 20 bp, Artificial Sequence
  Description of Artificial Sequence: Synthetic oligonucleotide
  Target: LAMA2; (+) strand; PAM type: YTN; PAM sequence: CTC
atagcgtgggaagctaaaaa

SEQ ID NO: 368224 - DNA, 20 bp, Artificial Sequence
  Description of Artificial Sequence: Synthetic oligonucleotide
  Target: LAMA2; (+) strand; PAM type: YTN; PAM sequence: CTA
aaaagatataaattccaggg

SEQ ID NO: 368225 - DNA, 20 bp, Artificial Sequence
  Description of Artificial Sequence: Synthetic oligonucleotide
  Target: LAMA2; (+) strand; PAM type: YTN; PAM sequence: TTC
cagggcacccctatttggaa

SEQ ID NO: 368226 - DNA, 20 bp, Artificial Sequence
  Description of Artificial Sequence: Synthetic oligonucleotide
  Target: LAMA2; (+) strand; PAM type: YTN; PAM sequence: CTA
tttggaaagtggtttttaaa

SEQ ID NO: 368227 - DNA, 20 bp, Artificial Sequence
  Description of Artificial Sequence: Synthetic oligonucleotide
  Target: LAMA2; (+) strand; PAM type: YTN; PAM sequence: TTT
ggaaagtggtttttaaaata

SEQ ID NO: 368228 - DNA, 20 bp, Artificial Sequence
  Description of Artificial Sequence: Synthetic oligonucleotide
  Target: LAMA2; (+) strand; PAM type: YTN; PAM sequence: TTG
gaaagtggtttttaaaatat

SEQ ID NO: 368229 - DNA, 20 bp, Artificial Sequence
  Description of Artificial Sequence: Synthetic oligonucleotide
  Target: LAMA2; (+) strand; PAM type: YTN; PAM sequence: TTT
ttaaaatatttccttccagt

SEQ ID NO: 368230 - DNA, 20 bp, Artificial Sequence
  Description of Artificial Sequence: Synthetic oligonucleotide
  Target: LAMA2; (+) strand; PAM type: YTN; PAM sequence: TTT
taaaatatttccttccagta

SEQ ID NO: 368231 - DNA, 20 bp, Artificial Sequence
  Description of Artificial Sequence: Synthetic oligonucleotide
  Target: LAMA2; (+) strand; PAM type: YTN; PAM sequence: TTT
aaaatatttccttccagtag

SEQ ID NO: 368232 - DNA, 20 bp, Artificial Sequence
  Description of Artificial Sequence: Synthetic oligonucleotide
  Target: LAMA2; (+) strand; PAM type: YTN; PAM sequence: TTA
aaatatttccttccagtagt

SEQ ID NO: 368233 - DNA, 20 bp, Artificial Sequence
  Description of Artificial Sequence: Synthetic oligonucleotide
  Target: LAMA2; (+) strand; PAM type: YTN; PAM sequence: TTT
ccttccagtagttgttaact

SEQ ID NO: 368234 - DNA, 20 bp, Artificial Sequence
  Description of Artificial Sequence: Synthetic oligonucleotide
  Target: LAMA2; (+) strand; PAM type: YTN; PAM sequence: TTC
cttccagtagttgttaacta

SEQ ID NO: 368235 - DNA, 20 bp, Artificial Sequence
  Description of Artificial Sequence: Synthetic oligonucleotide
  Target: LAMA2; (+) strand; PAM type: YTN; PAM sequence: CTT
ccagtagttgttaactagtt

SEQ ID NO: 368236 - DNA, 20 bp, Artificial Sequence
  Description of Artificial Sequence: Synthetic oligonucleotide
  Target: LAMA2; (+) strand; PAM type: YTN; PAM sequence: TTC
cagtagttgttaactagttt

SEQ ID NO: 368237 - DNA, 20 bp, Artificial Sequence
  Description of Artificial Sequence: Synthetic oligonucleotide
  Target: LAMA2; (+) strand; PAM type: YTN; PAM sequence: TTG
ttaactagtttctggcttaa

SEQ ID NO: 368238 - DNA, 20 bp, Artificial Sequence
  Description of Artificial Sequence: Synthetic oligonucleotide
  Target: LAMA2; (+) strand; PAM type: YTN; PAM sequence: TTA
actagtttctggcttaatag

SEQ ID NO: 368239 - DNA, 20 bp, Artificial Sequence
  Description of Artificial Sequence: Synthetic oligonucleotide
  Target: LAMA2; (+) strand; PAM type: YTN; PAM sequence: CTA
gtttctggcttaatagtata

SEQ ID NO: 368240 - DNA, 20 bp, Artificial Sequence
  Description of Artificial Sequence: Synthetic oligonucleotide
  Target: LAMA2; (+) strand; PAM type: YTN; PAM sequence: TTT
ctggcttaatagtatataga

SEQ ID NO: 368241 - DNA, 20 bp, Artificial Sequence
  Description of Artificial Sequence: Synthetic oligonucleotide
  Target: LAMA2; (+) strand; PAM type: YTN; PAM sequence: TTC
tggcttaatagtatatagat

SEQ ID NO: 368242 - DNA, 20 bp, Artificial Sequence
  Description of Artificial Sequence: Synthetic oligonucleotide
  Target: LAMA2; (+) strand; PAM type: YTN; PAM sequence: CTG
gcttaatagtatatagattg

SEQ ID NO: 368243 - DNA, 20 bp, Artificial Sequence
  Description of Artificial Sequence: Synthetic oligonucleotide
  Target: LAMA2; (+) strand; PAM type: YTN; PAM sequence: CTT
aatagtatatagattgtaat

SEQ ID NO: 368244 - DNA, 20 bp, Artificial Sequence
  Description of Artificial Sequence: Synthetic oligonucleotide
  Target: LAMA2; (+) strand; PAM type: YTN; PAM sequence: TTA
atagtatatagattgtaata

SEQ ID NO: 368245 - DNA, 20 bp, Artificial Sequence
  Description of Artificial Sequence: Synthetic oligonucleotide
  Target: LAMA2; (+) strand; PAM type: YTN; PAM sequence: TTG
taataagaaaagtaagtctt

SEQ ID NO: 368246 - DNA, 20 bp, Artificial Sequence
  Description of Artificial Sequence: Synthetic oligonucleotide
  Target: LAMA2; (+) strand; PAM type: YTN; PAM sequence: CTT
ttcatttaagtgaccaccca

SEQ ID NO: 368247 - DNA, 20 bp, Artificial Sequence
  Description of Artificial Sequence: Synthetic oligonucleotide
  Target: LAMA2; (+) strand; PAM type: YTN; PAM sequence: TTT
tcatttaagtgaccacccat

SEQ ID NO: 368248 - DNA, 20 bp, Artificial Sequence
  Description of Artificial Sequence: Synthetic oligonucleotide
  Target: LAMA2; (+) strand; PAM type: YTN; PAM sequence: TTT
catttaagtgaccacccatc

SEQ ID NO: 368249 - DNA, 20 bp, Artificial Sequence
  Description of Artificial Sequence: Synthetic oligonucleotide
  Target: LAMA2; (+) strand; PAM type: YTN; PAM sequence: TTC
atttaagtgaccacccatct

SEQ ID NO: 368250 - DNA, 20 bp, Artificial Sequence
  Description of Artificial Sequence: Synthetic oligonucleotide
  Target: LAMA2; (+) strand; PAM type: YTN; PAM sequence: TTT
aagtgaccacccatctcact

SEQ ID NO: 368251 - DNA, 20 bp, Artificial Sequence
  Description of Artificial Sequence: Synthetic oligonucleotide
  Target: LAMA2; (+) strand; PAM type: YTN; PAM sequence: TTA
agtgaccacccatctcacta

SEQ ID NO: 368252 - DNA, 20 bp, Artificial Sequence
  Description of Artificial Sequence: Synthetic oligonucleotide
  Target: LAMA2; (+) strand; PAM type: YTN; PAM sequence: CTC
actataaaacactttaagac

SEQ ID NO: 368253 - DNA, 20 bp, Artificial Sequence
  Description of Artificial Sequence: Synthetic oligonucleotide
  Target: LAMA2; (+) strand; PAM type: YTN; PAM sequence: CTA
taaaacactttaagactata

SEQ ID NO: 368254 - DNA, 20 bp, Artificial Sequence
  Description of Artificial Sequence: Synthetic oligonucleotide
  Target: LAMA2; (+) strand; PAM type: YTN; PAM sequence: CTT
taagactataacagccatat

SEQ ID NO: 368255 - DNA, 20 bp, Artificial Sequence
  Description of Artificial Sequence: Synthetic oligonucleotide
  Target: LAMA2; (+) strand; PAM type: YTN; PAM sequence: TTT
aagactataacagccatatg

SEQ ID NO: 368256 - DNA, 20 bp, Artificial Sequence
  Description of Artificial Sequence: Synthetic oligonucleotide
  Target: LAMA2; (+) strand; PAM type: YTN; PAM sequence: TTA
agactataacagccatatgg

SEQ ID NO: 368257 - DNA, 20 bp, Artificial Sequence
  Description of Artificial Sequence: Synthetic oligonucleotide
  Target: LAMA2; (+) strand; PAM type: YTN; PAM sequence: CTA
taacagccatatggtataaa

SEQ ID NO: 368258 - DNA, 20 bp, Artificial Sequence
  Description of Artificial Sequence: Synthetic oligonucleotide
  Target: LAMA2; (+) strand; PAM type: YTN; PAM sequence: CTT
tggagccaaactgaatagaa

SEQ ID NO: 368259 - DNA, 20 bp, Artificial Sequence
  Description of Artificial Sequence: Synthetic oligonucleotide
  Target: LAMA2; (+) strand; PAM type: YTN; PAM sequence: TTT
ggagccaaactgaatagaaa

SEQ ID NO: 368260 - DNA, 20 bp, Artificial Sequence
  Description of Artificial Sequence: Synthetic oligonucleotide
  Target: LAMA2; (+) strand; PAM type: YTN; PAM sequence: TTG
gagccaaactgaatagaaat

SEQ ID NO: 368261 - DNA, 20 bp, Artificial Sequence
  Description of Artificial Sequence: Synthetic oligonucleotide
  Target: LAMA2; (+) strand; PAM type: YTN; PAM sequence: CTG
aatagaaattcaataagctt

SEQ ID NO: 368262 - DNA, 20 bp, Artificial Sequence
  Description of Artificial Sequence: Synthetic oligonucleotide
  Target: LAMA2; (+) strand; PAM type: YTN; PAM sequence: TTC
aataagctttattgcttatt

SEQ ID NO: 368263 - DNA, 20 bp, Artificial Sequence
  Description of Artificial Sequence: Synthetic oligonucleotide
  Target: LAMA2; (+) strand; PAM type: YTN; PAM sequence: CTT
tattgcttattttatgtgtg

SEQ ID NO: 368264 - DNA, 20 bp, Artificial Sequence
  Description of Artificial Sequence: Synthetic oligonucleotide
  Target: LAMA2; (+) strand; PAM type: YTN; PAM sequence: TTT
attgcttattttatgtgtga

SEQ ID NO: 368265 - DNA, 20 bp, Artificial Sequence
  Description of Artificial Sequence: Synthetic oligonucleotide
  Target: LAMA2; (+) strand; PAM type: YTN; PAM sequence: TTA
ttgcttattttatgtgtgac

SEQ ID NO: 368266 - DNA, 20 bp, Artificial Sequence
  Description of Artificial Sequence: Synthetic oligonucleotide
  Target: LAMA2; (+) strand; PAM type: YTN; PAM sequence: TTG
cttattttatgtgtgacctt

SEQ ID NO: 368267 - DNA, 20 bp, Artificial Sequence
  Description of Artificial Sequence: Synthetic oligonucleotide
  Target: LAMA2; (+) strand; PAM type: YTN; PAM sequence: CTT
attttatgtgtgacctttgg

SEQ ID NO: 368268 - DNA, 20 bp, Artificial Sequence
  Description of Artificial Sequence: Synthetic oligonucleotide
  Target: LAMA2; (+) strand; PAM type: YTN; PAM sequence: TTA
ttttatgtgtgacctttggc

SEQ ID NO: 368269 - DNA, 20 bp, Artificial Sequence
  Description of Artificial Sequence: Synthetic oligonucleotide
  Target: LAMA2; (+) strand; PAM type: YTN; PAM sequence: TTT
tatgtgtgacctttggcaag

SEQ ID NO: 368270 - DNA, 20 bp, Artificial Sequence
  Description of Artificial Sequence: Synthetic oligonucleotide
  Target: LAMA2; (+) strand; PAM type: YTN; PAM sequence: TTT
atgtgtgacctttggcaagt

SEQ ID NO: 368271 - DNA, 20 bp, Artificial Sequence
  Description of Artificial Sequence: Synthetic oligonucleotide
  Target: LAMA2; (+) strand; PAM type: YTN; PAM sequence: TTA
tgtgtgacctttggcaagtg

SEQ ID NO: 368272 - DNA, 20 bp, Artificial Sequence
  Description of Artificial Sequence: Synthetic oligonucleotide
  Target: LAMA2; (+) strand; PAM type: YTN; PAM sequence: CTT
tggcaagtgattaagccttg

SEQ ID NO: 368273 - DNA, 20 bp, Artificial Sequence
  Description of Artificial Sequence: Synthetic oligonucleotide
  Target: LAMA2; (+) strand; PAM type: YTN; PAM sequence: TTT
ggcaagtgattaagccttga

SEQ ID NO: 368274 - DNA, 20 bp, Artificial Sequence
  Description of Artificial Sequence: Synthetic oligonucleotide
  Target: LAMA2; (+) strand; PAM type: YTN; PAM sequence: TTG
gcaagtgattaagccttgag

SEQ ID NO: 368275 - DNA, 20 bp, Artificial Sequence
  Description of Artificial Sequence: Synthetic oligonucleotide
  Target: LAMA2; (+) strand; PAM type: YTN; PAM sequence: TTA
agccttgaggaacgtttctt

SEQ ID NO: 368276 - DNA, 20 bp, Artificial Sequence
  Description of Artificial Sequence: Synthetic oligonucleotide
  Target: LAMA2; (+) strand; PAM type: YTN; PAM sequence: CTT
gaggaacgtttcttttcagt

SEQ ID NO: 368277 - DNA, 20 bp, Artificial Sequence
  Description of Artificial Sequence: Synthetic oligonucleotide
  Target: LAMA2; (+) strand; PAM type: YTN; PAM sequence: TTG
aggaacgtttcttttcagtg

SEQ ID NO: 368278 - DNA, 20 bp, Artificial Sequence
  Description of Artificial Sequence: Synthetic oligonucleotide
  Target: LAMA2; (+) strand; PAM type: YTN; PAM sequence: TTT
cttttcagtgtaaagtggat

SEQ ID NO: 368279 - DNA, 20 bp, Artificial Sequence
  Description of Artificial Sequence: Synthetic oligonucleotide
  Target: LAMA2; (+) strand; PAM type: YTN; PAM sequence: TTC
ttttcagtgtaaagtggata

SEQ ID NO: 368280 - DNA, 20 bp, Artificial Sequence
  Description of Artificial Sequence: Synthetic oligonucleotide
  Target: LAMA2; (+) strand; PAM type: YTN; PAM sequence: CTT
ttcagtgtaaagtggatata

SEQ ID NO: 368281 - DNA, 20 bp, Artificial Sequence
  Description of Artificial Sequence: Synthetic oligonucleotide
  Target: LAMA2; (+) strand; PAM type: YTN; PAM sequence: TTT
tcagtgtaaagtggatatag

SEQ ID NO: 368282 - DNA, 20 bp, Artificial Sequence
  Description of Artificial Sequence: Synthetic oligonucleotide
  Target: LAMA2; (+) strand; PAM type: YTN; PAM sequence: TTT
cagtgtaaagtggatatagt

SEQ ID NO: 368283 - DNA, 20 bp, Artificial Sequence
  Description of Artificial Sequence: Synthetic oligonucleotide
  Target: LAMA2; (+) strand; PAM type: YTN; PAM sequence: TTC
agtgtaaagtggatatagta

SEQ ID NO: 368284 - DNA, 20 bp, Artificial Sequence
  Description of Artificial Sequence: Synthetic oligonucleotide
  Target: LAMA2; (+) strand; PAM type: YTN; PAM sequence: CTA
cttttcagggtctttgttaa

SEQ ID NO: 368285 - DNA, 20 bp, Artificial Sequence
  Description of Artificial Sequence: Synthetic oligonucleotide
  Target: LAMA2; (+) strand; PAM type: YTN; PAM sequence: CTT
ttcagggtctttgttaacat

SEQ ID NO: 368286 - DNA, 20 bp, Artificial Sequence
  Description of Artificial Sequence: Synthetic oligonucleotide
  Target: LAMA2; (+) strand; PAM type: YTN; PAM sequence: TTT
tcagggtctttgttaacatg

SEQ ID NO: 368287 - DNA, 20 bp, Artificial Sequence
  Description of Artificial Sequence: Synthetic oligonucleotide
  Target: LAMA2; (+) strand; PAM type: YTN; PAM sequence: TTT
cagggtctttgttaacatga

SEQ ID NO: 368288 - DNA, 20 bp, Artificial Sequence
  Description of Artificial Sequence: Synthetic oligonucleotide
  Target: LAMA2; (+) strand; PAM type: YTN; PAM sequence: TTC
agggtctttgttaacatgat

SEQ ID NO: 368289 - DNA, 20 bp, Artificial Sequence
  Description of Artificial Sequence: Synthetic oligonucleotide
  Target: LAMA2; (+) strand; PAM type: YTN; PAM sequence: CTT
tgttaacatgatatgtgatc

SEQ ID NO: 368290 - DNA, 20 bp, Artificial Sequence
  Description of Artificial Sequence: Synthetic oligonucleotide
  Target: LAMA2; (+) strand; PAM type: YTN; PAM sequence: TTT
gttaacatgatatgtgatca

SEQ ID NO: 368291 - DNA, 20 bp, Artificial Sequence
  Description of Artificial Sequence: Synthetic oligonucleotide
  Target: LAMA2; (+) strand; PAM type: YTN; PAM sequence: TTG
ttaacatgatatgtgatcat

SEQ ID NO: 368292 - DNA, 20 bp, Artificial Sequence
  Description of Artificial Sequence: Synthetic oligonucleotide
  Target: LAMA2; (+) strand; PAM type: YTN; PAM sequence: TTA
acatgatatgtgatcattag

SEQ ID NO: 368293 - DNA, 20 bp, Artificial Sequence
  Description of Artificial Sequence: Synthetic oligonucleotide
  Target: LAMA2; (+) strand; PAM type: YTN; PAM sequence: TTA
ggaaagtactcatcacctag

SEQ ID NO: 368294 - DNA, 20 bp, Artificial Sequence
  Description of Artificial Sequence: Synthetic oligonucleotide
  Target: LAMA2; (+) strand; PAM type: YTN; PAM sequence: CTC
atcacctagaacactttcag

SEQ ID NO: 368295 - DNA, 20 bp, Artificial Sequence
  Description of Artificial Sequence: Synthetic oligonucleotide
  Target: LAMA2; (+) strand; PAM type: YTN; PAM sequence: CTA
gaacactttcagtttttttc

SEQ ID NO: 368296 - DNA, 20 bp, Artificial Sequence
  Description of Artificial Sequence: Synthetic oligonucleotide
  Target: LAMA2; (+) strand; PAM type: YTN; PAM sequence: CTT
tcagtttttttcttgttctc

SEQ ID NO: 368297 - DNA, 20 bp, Artificial Sequence
  Description of Artificial Sequence: Synthetic oligonucleotide
  Target: LAMA2; (+) strand; PAM type: YTN; PAM sequence: TTT
cagtttttttcttgttctcc

SEQ ID NO: 368298 - DNA, 20 bp, Artificial Sequence
  Description of Artificial Sequence: Synthetic oligonucleotide
  Target: LAMA2; (+) strand; PAM type: YTN; PAM sequence: TTC
agtttttttcttgttctccc

SEQ ID NO: 368299 - DNA, 20 bp, Artificial Sequence
  Description of Artificial Sequence: Synthetic oligonucleotide
  Target: LAMA2; (+) strand; PAM type: YTN; PAM sequence: TTT
ttttcttgttctccccgccc

SEQ ID NO: 368300 - DNA, 20 bp, Artificial Sequence
  Description of Artificial Sequence: Synthetic oligonucleotide
  Target: LAMA2; (+) strand; PAM type: YTN; PAM sequence: TTT
tttcttgttctccccgcccc

SEQ ID NO: 368301 - DNA, 20 bp, Artificial Sequence
  Description of Artificial Sequence: Synthetic oligonucleotide
  Target: LAMA2; (+) strand; PAM type: YTN; PAM sequence: TTT
ttcttgttctccccgccccc

SEQ ID NO: 368302 - DNA, 20 bp, Artificial Sequence
  Description of Artificial Sequence: Synthetic oligonucleotide
  Target: LAMA2; (+) strand; PAM type: YTN; PAM sequence: TTT
tcttgttctccccgccccct

SEQ ID NO: 368303 - DNA, 20 bp, Artificial Sequence
  Description of Artificial Sequence: Synthetic oligonucleotide
  Target: LAMA2; (+) strand; PAM type: YTN; PAM sequence: TTT
cttgttctccccgccccctt

SEQ ID NO: 368304 - DNA, 20 bp, Artificial Sequence
  Description of Artificial Sequence: Synthetic oligonucleotide
  Target: LAMA2; (+) strand; PAM type: YTN; PAM sequence: TTC
ttgttctccccgcccccttt

SEQ ID NO: 368305 - DNA, 20 bp, Artificial Sequence
  Description of Artificial Sequence: Synthetic oligonucleotide
  Target: LAMA2; (+) strand; PAM type: YTN; PAM sequence: CTT
gttctccccgcccccttttt

SEQ ID NO: 368306 - DNA, 20 bp, Artificial Sequence
  Description of Artificial Sequence: Synthetic oligonucleotide
  Target: LAMA2; (+) strand; PAM type: YTN; PAM sequence: TTG
ttctccccgccccctttttt

SEQ ID NO: 368307 - DNA, 20 bp, Artificial Sequence
  Description of Artificial Sequence: Synthetic oligonucleotide
  Target: LAMA2; (+) strand; PAM type: YTN; PAM sequence: TTC
tccccgccccctttttttaa

SEQ ID NO: 368308 - DNA, 20 bp, Artificial Sequence
  Description of Artificial Sequence: Synthetic oligonucleotide
  Target: LAMA2; (+) strand; PAM type: YTN; PAM sequence: CTC
cccgccccctttttttaaaa

SEQ ID NO: 368309 - DNA, 20 bp, Artificial Sequence
  Description of Artificial Sequence: Synthetic oligonucleotide
  Target: LAMA2; (+) strand; PAM type: YTN; PAM sequence: CTT
tttttaaaagagtgaactac

SEQ ID NO: 368310 - DNA, 20 bp, Artificial Sequence
  Description of Artificial Sequence: Synthetic oligonucleotide
  Target: LAMA2; (+) strand; PAM type: YTN; PAM sequence: TTT
ttttaaaagagtgaactacc

SEQ ID NO: 368311 - DNA, 20 bp, Artificial Sequence
  Description of Artificial Sequence: Synthetic oligonucleotide
  Target: LAMA2; (+) strand; PAM type: YTN; PAM sequence: TTT
tttaaaagagtgaactacct

SEQ ID NO: 368312 - DNA, 20 bp, Artificial Sequence
  Description of Artificial Sequence: Synthetic oligonucleotide
  Target: LAMA2; (+) strand; PAM type: YTN; PAM sequence: TTT
ttaaaagagtgaactacctg

SEQ ID NO: 368313 - DNA, 20 bp, Artificial Sequence
  Description of Artificial Sequence: Synthetic oligonucleotide
  Target: LAMA2; (+) strand; PAM type: YTN; PAM sequence: TTT
taaaagagtgaactacctga

SEQ ID NO: 368314 - DNA, 20 bp, Artificial Sequence
  Description of Artificial Sequence: Synthetic oligonucleotide
  Target: LAMA2; (+) strand; PAM type: YTN; PAM sequence: TTT
aaaagagtgaactacctgac

SEQ ID NO: 368315 - DNA, 20 bp, Artificial Sequence
  Description of Artificial Sequence: Synthetic oligonucleotide
  Target: LAMA2; (+) strand; PAM type: YTN; PAM sequence: TTA
aaagagtgaactacctgact

SEQ ID NO: 368316 - DNA, 20 bp, Artificial Sequence
  Description of Artificial Sequence: Synthetic oligonucleotide
  Target: LAMA2; (+) strand; PAM type: YTN; PAM sequence: CTA
cctgacttgaaccaaatatg

SEQ ID NO: 368317 - DNA, 20 bp, Artificial Sequence
  Description of Artificial Sequence: Synthetic oligonucleotide
  Target: LAMA2; (+) strand; PAM type: YTN; PAM sequence: CTG
acttgaaccaaatatgctcg

SEQ ID NO: 368318 - DNA, 20 bp, Artificial Sequence
  Description of Artificial Sequence: Synthetic oligonucleotide
  Target: LAMA2; (+) strand; PAM type: YTN; PAM sequence: CTT
gaaccaaatatgctcgggtc

SEQ ID NO: 368319 - DNA, 20 bp, Artificial Sequence
  Description of Artificial Sequence: Synthetic oligonucleotide
  Target: LAMA2; (+) strand; PAM type: YTN; PAM sequence: TTG
aaccaaatatgctcgggtct

SEQ ID NO: 368320 - DNA, 20 bp, Artificial Sequence
  Description of Artificial Sequence: Synthetic oligonucleotide
  Target: LAMA2; (+) strand; PAM type: YTN; PAM sequence: CTC
gggtctgattaactgctgta

SEQ ID NO: 368321 - DNA, 20 bp, Artificial Sequence
  Description of Artificial Sequence: Synthetic oligonucleotide
  Target: LAMA2; (+) strand; PAM type: YTN; PAM sequence: CTG
attaactgctgtaaggcggc

SEQ ID NO: 368322 - DNA, 20 bp, Artificial Sequence
  Description of Artificial Sequence: Synthetic oligonucleotide
  Target: LAMA2; (+) strand; PAM type: YTN; PAM sequence: TTA
actgctgtaaggcggctttg

SEQ ID NO: 368323 - DNA, 20 bp, Artificial Sequence
  Description of Artificial Sequence: Synthetic oligonucleotide
  Target: LAMA2; (+) strand; PAM type: YTN; PAM sequence: CTG
ctgtaaggcggctttgtttt

SEQ ID NO: 368324 - DNA, 20 bp, Artificial Sequence
  Description of Artificial Sequence: Synthetic oligonucleotide
  Target: LAMA2; (+) strand; PAM type: YTN; PAM sequence: CTG
taaggcggctttgttttttt

SEQ ID NO: 368325 - DNA, 20 bp, Artificial Sequence
  Description of Artificial Sequence: Synthetic oligonucleotide
  Target: LAMA2; (+) strand; PAM type: YTN; PAM sequence: CTT
tgttttttttatttttaaaa

SEQ ID NO: 368326 - DNA, 20 bp, Artificial Sequence
  Description of Artificial Sequence: Synthetic oligonucleotide
  Target: LAMA2; (+) strand; PAM type: YTN; PAM sequence: TTT
gttttttttatttttaaaac

SEQ ID NO: 368327 - DNA, 20 bp, Artificial Sequence
  Description of Artificial Sequence: Synthetic oligonucleotide
  Target: LAMA2; (+) strand; PAM type: YTN; PAM sequence: TTG
ttttttttatttttaaaaca

SEQ ID NO: 368328 - DNA, 20 bp, Artificial Sequence
  Description of Artificial Sequence: Synthetic oligonucleotide
  Target: LAMA2; (+) strand; PAM type: YTN; PAM sequence: TTT
tttttatttttaaaacaatg

SEQ ID NO: 368329 - DNA, 20 bp, Artificial Sequence
  Description of Artificial Sequence: Synthetic oligonucleotide
  Target: LAMA2; (+) strand; PAM type: YTN; PAM sequence: TTT
ttttatttttaaaacaatga

SEQ ID NO: 368330 - DNA, 20 bp, Artificial Sequence
  Description of Artificial Sequence: Synthetic oligonucleotide
  Target: LAMA2; (+) strand; PAM type: YTN; PAM sequence: TTT
tttatttttaaaacaatgac

SEQ ID NO: 368331 - DNA, 20 bp, Artificial Sequence
  Description of Artificial Sequence: Synthetic oligonucleotide
  Target: LAMA2; (+) strand; PAM type: YTN; PAM sequence: TTT
ttatttttaaaacaatgaca

SEQ ID NO: 368332 - DNA, 20 bp, Artificial Sequence
  Description of Artificial Sequence: Synthetic oligonucleotide
  Target: LAMA2; (+) strand; PAM type: YTN; PAM sequence: TTT
tatttttaaaacaatgacat

SEQ ID NO: 368333 - DNA, 20 bp, Artificial Sequence
  Description of Artificial Sequence: Synthetic oligonucleotide
  Target: LAMA2; (+) strand; PAM type: YTN; PAM sequence: TTT
atttttaaaacaatgacatt

SEQ ID NO: 368334 - DNA, 20 bp, Artificial Sequence
  Description of Artificial Sequence: Synthetic oligonucleotide
  Target: LAMA2; (+) strand; PAM type: YTN; PAM sequence: TTA
tttttaaaacaatgacattt

SEQ ID NO: 368335 - DNA, 20 bp, Artificial Sequence
  Description of Artificial Sequence: Synthetic oligonucleotide
  Target: LAMA2; (+) strand; PAM type: YTN; PAM sequence: TTT
ttaaaacaatgacattttta

SEQ ID NO: 368336 - DNA, 20 bp, Artificial Sequence
  Description of Artificial Sequence: Synthetic oligonucleotide
  Target: LAMA2; (+) strand; PAM type: YTN; PAM sequence: TTT
taaaacaatgacatttttat

SEQ ID NO: 368337 - DNA, 20 bp, Artificial Sequence
  Description of Artificial Sequence: Synthetic oligonucleotide
  Target: LAMA2; (+) strand; PAM type: YTN; PAM sequence: TTT
aaaacaatgacatttttatc

SEQ ID NO: 368338 - DNA, 20 bp, Artificial Sequence
  Description of Artificial Sequence: Synthetic oligonucleotide
  Target: LAMA2; (+) strand; PAM type: YTN; PAM sequence: TTA
aaacaatgacatttttatct

SEQ ID NO: 368339 - DNA, 20 bp, Artificial Sequence
  Description of Artificial Sequence: Synthetic oligonucleotide
  Target: LAMA2; (+) strand; PAM type: YTN; PAM sequence: TTT
ttatctgacagaattttaac

SEQ ID NO: 368340 - DNA, 20 bp, Artificial Sequence
  Description of Artificial Sequence: Synthetic oligonucleotide
  Target: LAMA2; (+) strand; PAM type: YTN; PAM sequence: TTT
tatctgacagaattttaact

SEQ ID NO: 368341 - DNA, 20 bp, Artificial Sequence
  Description of Artificial Sequence: Synthetic oligonucleotide
  Target: LAMA2; (+) strand; PAM type: YTN; PAM sequence: TTT
atctgacagaattttaactt

SEQ ID NO: 368342 - DNA, 20 bp, Artificial Sequence
  Description of Artificial Sequence: Synthetic oligonucleotide
  Target: LAMA2; (+) strand; PAM type: YTN; PAM sequence: TTA
tctgacagaattttaacttc

SEQ ID NO: 368343 - DNA, 20 bp, Artificial Sequence
  Description of Artificial Sequence: Synthetic oligonucleotide
  Target: LAMA2; (+) strand; PAM type: YTN; PAM sequence: CTG
acagaattttaacttcaact

SEQ ID NO: 368344 - DNA, 20 bp, Artificial Sequence
  Description of Artificial Sequence: Synthetic oligonucleotide
  Target: LAMA2; (+) strand; PAM type: YTN; PAM sequence: TTT
taacttcaactgtgtctgaa

SEQ ID NO: 368345 - DNA, 20 bp, Artificial Sequence
  Description of Artificial Sequence: Synthetic oligonucleotide
  Target: LAMA2; (+) strand; PAM type: YTN; PAM sequence: TTT
aacttcaactgtgtctgaat

SEQ ID NO: 368346 - DNA, 20 bp, Artificial Sequence
  Description of Artificial Sequence: Synthetic oligonucleotide
  Target: LAMA2; (+) strand; PAM type: YTN; PAM sequence: TTA
acttcaactgtgtctgaatg

SEQ ID NO: 368347 - DNA, 20 bp, Artificial Sequence
  Description of Artificial Sequence: Synthetic oligonucleotide
  Target: LAMA2; (+) strand; PAM type: YTN; PAM sequence: CTT
caactgtgtctgaatgagct

SEQ ID NO: 368348 - DNA, 20 bp, Artificial Sequence
  Description of Artificial Sequence: Synthetic oligonucleotide
  Target: LAMA2; (+) strand; PAM type: YTN; PAM sequence: TTC
aactgtgtctgaatgagctc

SEQ ID NO: 368349 - DNA, 20 bp, Artificial Sequence
  Description of Artificial Sequence: Synthetic oligonucleotide
  Target: LAMA2; (+) strand; PAM type: YTN; PAM sequence: CTG
tgtctgaatgagctctttac

SEQ ID NO: 368350 - DNA, 20 bp, Artificial Sequence
  Description of Artificial Sequence: Synthetic oligonucleotide
  Target: LAMA2; (+) strand; PAM type: YTN; PAM sequence: CTG
aatgagctctttacgcttct

SEQ ID NO: 368351 - DNA, 20 bp, Artificial Sequence
  Description of Artificial Sequence: Synthetic oligonucleotide
  Target: LAMA2; (+) strand; PAM type: YTN; PAM sequence: CTC
tttacgcttctcgttttcta

SEQ ID NO: 368352 - DNA, 20 bp, Artificial Sequence
  Description of Artificial Sequence: Synthetic oligonucleotide
  Target: LAMA2; (+) strand; PAM type: YTN; PAM sequence: CTT
tacgcttctcgttttctact

SEQ ID NO: 368353 - DNA, 20 bp, Artificial Sequence
  Description of Artificial Sequence: Synthetic oligonucleotide
  Target: LAMA2; (+) strand; PAM type: YTN; PAM sequence: TTT
acgcttctcgttttctactc

SEQ ID NO: 368354 - DNA, 20 bp, Artificial Sequence
  Description of Artificial Sequence: Synthetic oligonucleotide
  Target: LAMA2; (+) strand; PAM type: YTN; PAM sequence: TTA
cgcttctcgttttctactct

SEQ ID NO: 368355 - DNA, 20 bp, Artificial Sequence
  Description of Artificial Sequence: Synthetic oligonucleotide
  Target: LAMA2; (+) strand; PAM type: YTN; PAM sequence: CTT
ctcgttttctactctaataa

SEQ ID NO: 368356 - DNA, 20 bp, Artificial Sequence
  Description of Artificial Sequence: Synthetic oligonucleotide
  Target: LAMA2; (+) strand; PAM type: YTN; PAM sequence: TTC
tcgttttctactctaataat

SEQ ID NO: 368357 - DNA, 20 bp, Artificial Sequence
  Description of Artificial Sequence: Synthetic oligonucleotide
  Target: LAMA2; (+) strand; PAM type: YTN; PAM sequence: CTC
gttttctactctaataataa

SEQ ID NO: 368358 - DNA, 20 bp, Artificial Sequence
  Description of Artificial Sequence: Synthetic oligonucleotide
  Target: LAMA2; (+) strand; PAM type: YTN; PAM sequence: TTT
tctactctaataataaataa

SEQ ID NO: 368359 - DNA, 20 bp, Artificial Sequence
  Description of Artificial Sequence: Synthetic oligonucleotide
  Target: LAMA2; (+) strand; PAM type: YTN; PAM sequence: TTT
ctactctaataataaataac

SEQ ID NO: 368360 - DNA, 20 bp, Artificial Sequence
  Description of Artificial Sequence: Synthetic oligonucleotide
  Target: LAMA2; (+) strand; PAM type: YTN; PAM sequence: TTC
tactctaataataaataaca

SEQ ID NO: 368361 - DNA, 20 bp, Artificial Sequence
  Description of Artificial Sequence: Synthetic oligonucleotide
  Target: LAMA2; (+) strand; PAM type: YTN; PAM sequence: CTA
ctctaataataaataacaca

SEQ ID NO: 368362 - DNA, 20 bp, Artificial Sequence
  Description of Artificial Sequence: Synthetic oligonucleotide
  Target: LAMA2; (+) strand; PAM type: YTN; PAM sequence: CTC
taataataaataacacaagg

SEQ ID NO: 368363 - DNA, 20 bp, Artificial Sequence
  Description of Artificial Sequence: Synthetic oligonucleotide
  Target: LAMA2; (+) strand; PAM type: YTN; PAM sequence: CTA
ataataaataacacaaggtg

SEQ ID NO: 368364 - DNA, 20 bp, Artificial Sequence
  Description of Artificial Sequence: Synthetic oligonucleotide
  Target: LAMA2; (+) strand; PAM type: YTN; PAM sequence: CTT
ccttctaaatcaggttaagt

SEQ ID NO: 368365 - DNA, 20 bp, Artificial Sequence
  Description of Artificial Sequence: Synthetic oligonucleotide
  Target: LAMA2; (+) strand; PAM type: YTN; PAM sequence: TTC
cttctaaatcaggttaagtt

SEQ ID NO: 368366 - DNA, 20 bp, Artificial Sequence
  Description of Artificial Sequence: Synthetic oligonucleotide
  Target: LAMA2; (+) strand; PAM type: YTN; PAM sequence: CTT
ctaaatcaggttaagttaga

SEQ ID NO: 368367 - DNA, 20 bp, Artificial Sequence
  Description of Artificial Sequence: Synthetic oligonucleotide
  Target: LAMA2; (+) strand; PAM type: YTN; PAM sequence: TTC
taaatcaggttaagttagac

SEQ ID NO: 368368 - DNA, 20 bp, Artificial Sequence
  Description of Artificial Sequence: Synthetic oligonucleotide
  Target: LAMA2; (+) strand; PAM type: YTN; PAM sequence: CTA
aatcaggttaagttagacat

SEQ ID NO: 368369 - DNA, 20 bp, Artificial Sequence
  Description of Artificial Sequence: Synthetic oligonucleotide
  Target: LAMA2; (+) strand; PAM type: YTN; PAM sequence: TTA
agttagacattcaaatgtga

SEQ ID NO: 368370 - DNA, 20 bp, Artificial Sequence
  Description of Artificial Sequence: Synthetic oligonucleotide
  Target: LAMA2; (+) strand; PAM type: YTN; PAM sequence: TTA
gacattcaaatgtgacccca

SEQ ID NO: 368371 - DNA, 20 bp, Artificial Sequence
  Description of Artificial Sequence: Synthetic oligonucleotide
  Target: LAMA2; (+) strand; PAM type: YTN; PAM sequence: TTC
aaatgtgaccccagcctgac

SEQ ID NO: 368372 - DNA, 20 bp, Artificial Sequence
  Description of Artificial Sequence: Synthetic oligonucleotide
  Target: LAMA2; (+) strand; PAM type: YTN; PAM sequence: CTG
acaacccggtatacctttaa

SEQ ID NO: 368373 - DNA, 20 bp, Artificial Sequence
  Description of Artificial Sequence: Synthetic oligonucleotide
  Target: LAMA2; (+) strand; PAM type: YTN; PAM sequence: CTT
taatgaaagcaatgtctcca

SEQ ID NO: 368374 - DNA, 20 bp, Artificial Sequence
  Description of Artificial Sequence: Synthetic oligonucleotide
  Target: LAMA2; (+) strand; PAM type: YTN; PAM sequence: TTT
aatgaaagcaatgtctccaa

SEQ ID NO: 368375 - DNA, 20 bp, Artificial Sequence
  Description of Artificial Sequence: Synthetic oligonucleotide
  Target: LAMA2; (+) strand; PAM type: YTN; PAM sequence: TTA
atgaaagcaatgtctccaat

SEQ ID NO: 368376 - DNA, 20 bp, Artificial Sequence
  Description of Artificial Sequence: Synthetic oligonucleotide
  Target: LAMA2; (+) strand; PAM type: YTN; PAM sequence: CTC
caatattggagtttttattg

SEQ ID NO: 368377 - DNA, 20 bp, Artificial Sequence
  Description of Artificial Sequence: Synthetic oligonucleotide
  Target: LAMA2; (+) strand; PAM type: YTN; PAM sequence: TTG
gagtttttattgctgacacc

SEQ ID NO: 368378 - DNA, 20 bp, Artificial Sequence
  Description of Artificial Sequence: Synthetic oligonucleotide
  Target: LAMA2; (+) strand; PAM type: YTN; PAM sequence: TTT
ttattgctgacaccaccacc

SEQ ID NO: 368379 - DNA, 20 bp, Artificial Sequence
  Description of Artificial Sequence: Synthetic oligonucleotide
  Target: LAMA2; (+) strand; PAM type: YTN; PAM sequence: TTT
tattgctgacaccaccacct

SEQ ID NO: 368380 - DNA, 20 bp, Artificial Sequence
  Description of Artificial Sequence: Synthetic oligonucleotide
  Target: LAMA2; (+) strand; PAM type: YTN; PAM sequence: TTT
attgctgacaccaccacctc

SEQ ID NO: 368381 - DNA, 20 bp, Artificial Sequence
  Description of Artificial Sequence: Synthetic oligonucleotide
  Target: LAMA2; (+) strand; PAM type: YTN; PAM sequence: TTA
ttgctgacaccaccacctct

SEQ ID NO: 368382 - DNA, 20 bp, Artificial Sequence
  Description of Artificial Sequence: Synthetic oligonucleotide
  Target: LAMA2; (+) strand; PAM type: YTN; PAM sequence: TTG
ctgacaccaccacctctcac

SEQ ID NO: 368383 - DNA, 20 bp, Artificial Sequence
  Description of Artificial Sequence: Synthetic oligonucleotide
  Target: LAMA2; (+) strand; PAM type: YTN; PAM sequence: CTG
acaccaccacctctcacctc

SEQ ID NO: 368384 - DNA, 20 bp, Artificial Sequence
  Description of Artificial Sequence: Synthetic oligonucleotide
  Target: LAMA2; (+) strand; PAM type: YTN; PAM sequence: CTC
tcacctccctgtccctcatc

SEQ ID NO: 368385 - DNA, 20 bp, Artificial Sequence
  Description of Artificial Sequence: Synthetic oligonucleotide
  Target: LAMA2; (+) strand; PAM type: YTN; PAM sequence: CTC
acctccctgtccctcatcat

SEQ ID NO: 368386 - DNA, 20 bp, Artificial Sequence
  Description of Artificial Sequence: Synthetic oligonucleotide
  Target: LAMA2; (+) strand; PAM type: YTN; PAM sequence: CTC
cctgtccctcatcatttccc

SEQ ID NO: 368387 - DNA, 20 bp, Artificial Sequence
  Description of Artificial Sequence: Synthetic oligonucleotide
  Target: LAMA2; (+) strand; PAM type: YTN; PAM sequence: CTG
tccctcatcatttccctgtg

SEQ ID NO: 368388 - DNA, 20 bp, Artificial Sequence
  Description of Artificial Sequence: Synthetic oligonucleotide
  Target: LAMA2; (+) strand; PAM type: YTN; PAM sequence: CTC
atcatttccctgtgctgcct

SEQ ID NO: 368389 - DNA, 20 bp, Artificial Sequence
  Description of Artificial Sequence: Synthetic oligonucleotide
  Target: LAMA2; (+) strand; PAM type: YTN; PAM sequence: TTT
ccctgtgctgcctagtttgc

SEQ ID NO: 368390 - DNA, 20 bp, Artificial Sequence
  Description of Artificial Sequence: Synthetic oligonucleotide
  Target: LAMA2; (+) strand; PAM type: YTN; PAM sequence: TTC
cctgtgctgcctagtttgcc

SEQ ID NO: 368391 - DNA, 20 bp, Artificial Sequence
  Description of Artificial Sequence: Synthetic oligonucleotide
  Target: LAMA2; (+) strand; PAM type: YTN; PAM sequence: CTG
tgctgcctagtttgcctttc

SEQ ID NO: 368392 - DNA, 20 bp, Artificial Sequence
  Description of Artificial Sequence: Synthetic oligonucleotide
  Target: LAMA2; (+) strand; PAM type: YTN; PAM sequence: CTG
cctagtttgcctttcactgg

SEQ ID NO: 368393 - DNA, 20 bp, Artificial Sequence
  Description of Artificial Sequence: Synthetic oligonucleotide
  Target: LAMA2; (+) strand; PAM type: YTN; PAM sequence: CTA
gtttgcctttcactggtaat

SEQ ID NO: 368394 - DNA, 20 bp, Artificial Sequence
  Description of Artificial Sequence: Synthetic oligonucleotide
  Target: LAMA2; (+) strand; PAM type: YTN; PAM sequence: TTT
gcctttcactggtaatattt

SEQ ID NO: 368395 - DNA, 20 bp, Artificial Sequence
  Description of Artificial Sequence: Synthetic oligonucleotide
  Target: LAMA2; (+) strand; PAM type: YTN; PAM sequence: TTG
cctttcactggtaatatttc

SEQ ID NO: 368396 - DNA, 20 bp, Artificial Sequence
  Description of Artificial Sequence: Synthetic oligonucleotide
  Target: LAMA2; (+) strand; PAM type: YTN; PAM sequence: CTT
tcactggtaatatttcaact

SEQ ID NO: 368397 - DNA, 20 bp, Artificial Sequence
  Description of Artificial Sequence: Synthetic oligonucleotide
  Target: LAMA2; (+) strand; PAM type: YTN; PAM sequence: TTT
cactggtaatatttcaactt

SEQ ID NO: 368398 - DNA, 20 bp, Artificial Sequence
  Description of Artificial Sequence: Synthetic oligonucleotide
  Target: LAMA2; (+) strand; PAM type: YTN; PAM sequence: TTC
actggtaatatttcaactta

SEQ ID NO: 368399 - DNA, 20 bp, Artificial Sequence
  Description of Artificial Sequence: Synthetic oligonucleotide
  Target: LAMA2; (+) strand; PAM type: YTN; PAM sequence: CTG
gtaatatttcaacttagtct

SEQ ID NO: 368400 - DNA, 20 bp, Artificial Sequence
  Description of Artificial Sequence: Synthetic oligonucleotide
  Target: LAMA2; (+) strand; PAM type: YTN; PAM sequence: TTT
caacttagtctaatcatcat

SEQ ID NO: 368401 - DNA, 20 bp, Artificial Sequence
  Description of Artificial Sequence: Synthetic oligonucleotide
  Target: LAMA2; (+) strand; PAM type: YTN; PAM sequence: TTC
aacttagtctaatcatcatt

SEQ ID NO: 368402 - DNA, 20 bp, Artificial Sequence
  Description of Artificial Sequence: Synthetic oligonucleotide
  Target: LAMA2; (+) strand; PAM type: YTN; PAM sequence: CTT
agtctaatcatcattaccat

SEQ ID NO: 368403 - DNA, 20 bp, Artificial Sequence
  Description of Artificial Sequence: Synthetic oligonucleotide
  Target: LAMA2; (+) strand; PAM type: YTN; PAM sequence: TTA
gtctaatcatcattaccatt

SEQ ID NO: 368404 - DNA, 20 bp, Artificial Sequence
  Description of Artificial Sequence: Synthetic oligonucleotide
  Target: LAMA2; (+) strand; PAM type: YTN; PAM sequence: CTA
atcatcattaccatttccca

SEQ ID NO: 368405 - DNA, 20 bp, Artificial Sequence
  Description of Artificial Sequence: Synthetic oligonucleotide
  Target: LAMA2; (+) strand; PAM type: YTN; PAM sequence: TTA
ccatttcccaaaggagagaa

SEQ ID NO: 368406 - DNA, 20 bp, Artificial Sequence
  Description of Artificial Sequence: Synthetic oligonucleotide
  Target: LAMA2; (+) strand; PAM type: YTN; PAM sequence: TTT
cccaaaggagagaactgcag

SEQ ID NO: 368407 - DNA, 20 bp, Artificial Sequence
  Description of Artificial Sequence: Synthetic oligonucleotide
  Target: LAMA2; (+) strand; PAM type: YTN; PAM sequence: TTC
ccaaaggagagaactgcaga

SEQ ID NO: 368408 - DNA, 20 bp, Artificial Sequence
  Description of Artificial Sequence: Synthetic oligonucleotide
  Target: LAMA2; (+) strand; PAM type: YTN; PAM sequence: CTG
cagaatcataaacagaacca

SEQ ID NO: 368409 - DNA, 20 bp, Artificial Sequence
  Description of Artificial Sequence: Synthetic oligonucleotide
  Target: LAMA2; (+) strand; PAM type: YTN; PAM sequence: TTG
ccaaacaatgtacctctttt

SEQ ID NO: 368410 - DNA, 20 bp, Artificial Sequence
  Description of Artificial Sequence: Synthetic oligonucleotide
  Target: LAMA2; (+) strand; PAM type: YTN; PAM sequence: CTC
ttttgcataggcaattcttc

SEQ ID NO: 368411 - DNA, 20 bp, Artificial Sequence
  Description of Artificial Sequence: Synthetic oligonucleotide
  Target: LAMA2; (+) strand; PAM type: YTN; PAM sequence: CTT
ttgcataggcaattcttcta

SEQ ID NO: 368412 - DNA, 20 bp, Artificial Sequence
  Description of Artificial Sequence: Synthetic oligonucleotide
  Target: LAMA2; (+) strand; PAM type: YTN; PAM sequence: TTT
tgcataggcaattcttctag

SEQ ID NO: 368413 - DNA, 20 bp, Artificial Sequence
  Description of Artificial Sequence: Synthetic oligonucleotide
  Target: LAMA2; (+) strand; PAM type: YTN; PAM sequence: TTT
gcataggcaattcttctaga

SEQ ID NO: 368414 - DNA, 20 bp, Artificial Sequence
  Description of Artificial Sequence: Synthetic oligonucleotide
  Target: LAMA2; (+) strand; PAM type: YTN; PAM sequence: TTG
cataggcaattcttctagaa

SEQ ID NO: 368415 - DNA, 20 bp, Artificial Sequence
  Description of Artificial Sequence: Synthetic oligonucleotide
  Target: LAMA2; (+) strand; PAM type: YTN; PAM sequence: TTC
ttctagaagctgggttaaaa

SEQ ID NO: 368416 - DNA, 20 bp, Artificial Sequence
  Description of Artificial Sequence: Synthetic oligonucleotide
  Target: LAMA2; (+) strand; PAM type: YTN; PAM sequence: CTT
ctagaagctgggttaaaatg

SEQ ID NO: 368417 - DNA, 20 bp, Artificial Sequence
  Description of Artificial Sequence: Synthetic oligonucleotide
  Target: LAMA2; (+) strand; PAM type: YTN; PAM sequence: TTC
tagaagctgggttaaaatgc

SEQ ID NO: 368418 - DNA, 20 bp, Artificial Sequence
  Description of Artificial Sequence: Synthetic oligonucleotide
  Target: LAMA2; (+) strand; PAM type: YTN; PAM sequence: CTA
gaagctgggttaaaatgcca

SEQ ID NO: 368419 - DNA, 20 bp, Artificial Sequence
  Description of Artificial Sequence: Synthetic oligonucleotide
  Target: LAMA2; (+) strand; PAM type: YTN; PAM sequence: CTG
ggttaaaatgccatggagat

SEQ ID NO: 368420 - DNA, 20 bp, Artificial Sequence
  Description of Artificial Sequence: Synthetic oligonucleotide
  Target: LAMA2; (+) strand; PAM type: YTN; PAM sequence: TTA
aaatgccatggagatgagaa

SEQ ID NO: 368421 - DNA, 20 bp, Artificial Sequence
  Description of Artificial Sequence: Synthetic oligonucleotide
  Target: LAMA2; (+) strand; PAM type: YTN; PAM sequence: CTT
aggaattaattatgtttttc

SEQ ID NO: 368422 - DNA, 20 bp, Artificial Sequence
  Description of Artificial Sequence: Synthetic oligonucleotide
  Target: LAMA2; (+) strand; PAM type: YTN; PAM sequence: TTA
ggaattaattatgtttttca

SEQ ID NO: 368423 - DNA, 20 bp, Artificial Sequence
  Description of Artificial Sequence: Synthetic oligonucleotide
  Target: LAMA2; (+) strand; PAM type: YTN; PAM sequence: TTA
attatgtttttcacatttag

SEQ ID NO: 368424 - DNA, 20 bp, Artificial Sequence
  Description of Artificial Sequence: Synthetic oligonucleotide
  Target: LAMA2; (+) strand; PAM type: YTN; PAM sequence: TTA
tgtttttcacatttagcaaa

SEQ ID NO: 368425 - DNA, 20 bp, Artificial Sequence
  Description of Artificial Sequence: Synthetic oligonucleotide
  Target: LAMA2; (+) strand; PAM type: YTN; PAM sequence: TTT
ttcacatttagcaaatagag

SEQ ID NO: 368426 - DNA, 20 bp, Artificial Sequence
  Description of Artificial Sequence: Synthetic oligonucleotide
  Target: LAMA2; (+) strand; PAM type: YTN; PAM sequence: TTT
tcacatttagcaaatagagg

SEQ ID NO: 368427 - DNA, 20 bp, Artificial Sequence
  Description of Artificial Sequence: Synthetic oligonucleotide
  Target: LAMA2; (+) strand; PAM type: YTN; PAM sequence: TTT
cacatttagcaaatagaggt

SEQ ID NO: 368428 - DNA, 20 bp, Artificial Sequence
  Description of Artificial Sequence: Synthetic oligonucleotide
  Target: LAMA2; (+) strand; PAM type: YTN; PAM sequence: TTC
acatttagcaaatagaggtt

SEQ ID NO: 368429 - DNA, 20 bp, Artificial Sequence
  Description of Artificial Sequence: Synthetic oligonucleotide
  Target: LAMA2; (+) strand; PAM type: YTN; PAM sequence: TTT
agcaaatagaggttgtcatg

SEQ ID NO: 368430 - DNA, 20 bp, Artificial Sequence
  Description of Artificial Sequence: Synthetic oligonucleotide
  Target: LAMA2; (+) strand; PAM type: YTN; PAM sequence: TTA
gcaaatagaggttgtcatga

SEQ ID NO: 368431 - DNA, 20 bp, Artificial Sequence
  Description of Artificial Sequence: Synthetic oligonucleotide
  Target: LAMA2; (+) strand; PAM type: YTN; PAM sequence: TTG
tcatgatgtttaaacagtac

SEQ ID NO: 368432 - DNA, 20 bp, Artificial Sequence
  Description of Artificial Sequence: Synthetic oligonucleotide
  Target: LAMA2; (+) strand; PAM type: YTN; PAM sequence: TTT
aaacagtacaaagaaatgag

SEQ ID NO: 368433 - DNA, 20 bp, Artificial Sequence
  Description of Artificial Sequence: Synthetic oligonucleotide
  Target: LAMA2; (+) strand; PAM type: YTN; PAM sequence: TTA
aacagtacaaagaaatgagt

SEQ ID NO: 368434 - DNA, 20 bp, Artificial Sequence
  Description of Artificial Sequence: Synthetic oligonucleotide
  Target: LAMA2; (+) strand; PAM type: YTN; PAM sequence: CTC
cagctttcaaaatgaatgac

SEQ ID NO: 368435 - DNA, 20 bp, Artificial Sequence
  Description of Artificial Sequence: Synthetic oligonucleotide
  Target: LAMA2; (+) strand; PAM type: YTN; PAM sequence: CTT
tcaaaatgaatgacaaccaa

SEQ ID NO: 368436 - DNA, 20 bp, Artificial Sequence
  Description of Artificial Sequence: Synthetic oligonucleotide
  Target: LAMA2; (+) strand; PAM type: YTN; PAM sequence: TTT
caaaatgaatgacaaccaaa

SEQ ID NO: 368437 - DNA, 20 bp, Artificial Sequence
  Description of Artificial Sequence: Synthetic oligonucleotide
  Target: LAMA2; (+) strand; PAM type: YTN; PAM sequence: TTC
aaaatgaatgacaaccaaat

SEQ ID NO: 368438 - DNA, 20 bp, Artificial Sequence
  Description of Artificial Sequence: Synthetic oligonucleotide
  Target: LAMA2; (+) strand; PAM type: YTN; PAM sequence: TTG
acaaaaaaagtgtctggggg

SEQ ID NO: 368439 - DNA, 20 bp, Artificial Sequence
  Description of Artificial Sequence: Synthetic oligonucleotide
  Target: LAMA2; (+) strand; PAM type: YTN; PAM sequence: CTG
gggggcttatatatttttgt

SEQ ID NO: 368440 - DNA, 20 bp, Artificial Sequence
  Description of Artificial Sequence: Synthetic oligonucleotide
  Target: LAMA2; (+) strand; PAM type: YTN; PAM sequence: CTT
atatatttttgtcagcattg

SEQ ID NO: 368441 - DNA, 20 bp, Artificial Sequence
  Description of Artificial Sequence: Synthetic oligonucleotide
  Target: LAMA2; (+) strand; PAM type: YTN; PAM sequence: TTA
tatatttttgtcagcattgc

SEQ ID NO: 368442 - DNA, 20 bp, Artificial Sequence
  Description of Artificial Sequence: Synthetic oligonucleotide
  Target: LAMA2; (+) strand; PAM type: YTN; PAM sequence: TTT
ttgtcagcattgcttttcag

SEQ ID NO: 368443 - DNA, 20 bp, Artificial Sequence
  Description of Artificial Sequence: Synthetic oligonucleotide
  Target: LAMA2; (+) strand; PAM type: YTN; PAM sequence: TTT
tgtcagcattgcttttcagg

SEQ ID NO: 368444 - DNA, 20 bp, Artificial Sequence
  Description of Artificial Sequence: Synthetic oligonucleotide
  Target: LAMA2; (+) strand; PAM type: YTN; PAM sequence: TTT
gtcagcattgcttttcaggc

SEQ ID NO: 368445 - DNA, 20 bp, Artificial Sequence
  Description of Artificial Sequence: Synthetic oligonucleotide
  Target: LAMA2; (+) strand; PAM type: YTN; PAM sequence: TTG
tcagcattgcttttcaggct

SEQ ID NO: 368446 - DNA, 20 bp, Artificial Sequence
  Description of Artificial Sequence: Synthetic oligonucleotide
  Target: LAMA2; (+) strand; PAM type: YTN; PAM sequence: TTG
cttttcaggctagttaatac

SEQ ID NO: 368447 - DNA, 20 bp, Artificial Sequence
  Description of Artificial Sequence: Synthetic oligonucleotide
  Target: LAMA2; (+) strand; PAM type: YTN; PAM sequence: CTT
ttcaggctagttaatacaaa

SEQ ID NO: 368448 - DNA, 20 bp, Artificial Sequence
  Description of Artificial Sequence: Synthetic oligonucleotide
  Target: LAMA2; (+) strand; PAM type: YTN; PAM sequence: TTT
tcaggctagttaatacaaag

SEQ ID NO: 368449 - DNA, 20 bp, Artificial Sequence
  Description of Artificial Sequence: Synthetic oligonucleotide
  Target: LAMA2; (+) strand; PAM type: YTN; PAM sequence: TTT
caggctagttaatacaaaga

SEQ ID NO: 368450 - DNA, 20 bp, Artificial Sequence
  Description of Artificial Sequence: Synthetic oligonucleotide
  Target: LAMA2; (+) strand; PAM type: YTN; PAM sequence: TTC
aggctagttaatacaaagac

SEQ ID NO: 368451 - DNA, 20 bp, Artificial Sequence
  Description of Artificial Sequence: Synthetic oligonucleotide
  Target: LAMA2; (+) strand; PAM type: YTN; PAM sequence: CTA
gttaatacaaagacatttcc

SEQ ID NO: 368452 - DNA, 20 bp, Artificial Sequence
  Description of Artificial Sequence: Synthetic oligonucleotide
  Target: LAMA2; (+) strand; PAM type: YTN; PAM sequence: TTA
atacaaagacatttccccct

SEQ ID NO: 368453 - DNA, 20 bp, Artificial Sequence
  Description of Artificial Sequence: Synthetic oligonucleotide
  Target: LAMA2; (+) strand; PAM type: YTN; PAM sequence: TTT
ccccctgatttatgttggac

SEQ ID NO: 368454 - DNA, 20 bp, Artificial Sequence
  Description of Artificial Sequence: Synthetic oligonucleotide
  Target: LAMA2; (+) strand; PAM type: YTN; PAM sequence: TTC
cccctgatttatgttggaca

SEQ ID NO: 368455 - DNA, 20 bp, Artificial Sequence
  Description of Artificial Sequence: Synthetic oligonucleotide
  Target: LAMA2; (+) strand; PAM type: YTN; PAM sequence: CTG
atttatgttggacagtttca

SEQ ID NO: 368456 - DNA, 20 bp, Artificial Sequence
  Description of Artificial Sequence: Synthetic oligonucleotide
  Target: LAMA2; (+) strand; PAM type: YTN; PAM sequence: TTT
atgttggacagtttcagtgt

SEQ ID NO: 368457 - DNA, 20 bp, Artificial Sequence
  Description of Artificial Sequence: Synthetic oligonucleotide
  Target: LAMA2; (+) strand; PAM type: YTN; PAM sequence: TTA
tgttggacagtttcagtgtc

SEQ ID NO: 368458 - DNA, 20 bp, Artificial Sequence
  Description of Artificial Sequence: Synthetic oligonucleotide
  Target: LAMA2; (+) strand; PAM type: YTN; PAM sequence: TTG
gacagtttcagtgtctaccc

SEQ ID NO: 368459 - DNA, 20 bp, Artificial Sequence
  Description of Artificial Sequence: Synthetic oligonucleotide
  Target: LAMA2; (+) strand; PAM type: YTN; PAM sequence: TTT
cagtgtctacccgtcttaaa

SEQ ID NO: 368460 - DNA, 20 bp, Artificial Sequence
  Description of Artificial Sequence: Synthetic oligonucleotide
  Target: LAMA2; (+) strand; PAM type: YTN; PAM sequence: TTC
agtgtctacccgtcttaaaa

SEQ ID NO: 368461 - DNA, 20 bp, Artificial Sequence
  Description of Artificial Sequence: Synthetic oligonucleotide
  Target: LAMA2; (+) strand; PAM type: YTN; PAM sequence: CTA
cccgtcttaaaatcactggt

SEQ ID NO: 368462 - DNA, 20 bp, Artificial Sequence
  Description of Artificial Sequence: Synthetic oligonucleotide
  Target: LAMA2; (+) strand; PAM type: YTN; PAM sequence: CTT
aaaatcactggtttcatttg

SEQ ID NO: 368463 - DNA, 20 bp, Artificial Sequence
  Description of Artificial Sequence: Synthetic oligonucleotide
  Target: LAMA2; (+) strand; PAM type: YTN; PAM sequence: TTA
aaatcactggtttcatttgc

SEQ ID NO: 368464 - DNA, 20 bp, Artificial Sequence
  Description of Artificial Sequence: Synthetic oligonucleotide
  Target: LAMA2; (+) strand; PAM type: YTN; PAM sequence: CTG
gtttcatttgcagtcttctg

SEQ ID NO: 368465 - DNA, 20 bp, Artificial Sequence
  Description of Artificial Sequence: Synthetic oligonucleotide
  Target: LAMA2; (+) strand; PAM type: YTN; PAM sequence: TTT
catttgcagtcttctgaggt

SEQ ID NO: 368466 - DNA, 20 bp, Artificial Sequence
  Description of Artificial Sequence: Synthetic oligonucleotide
  Target: LAMA2; (+) strand; PAM type: YTN; PAM sequence: TTC
atttgcagtcttctgaggtt

SEQ ID NO: 368467 - DNA, 20 bp, Artificial Sequence
  Description of Artificial Sequence: Synthetic oligonucleotide
  Target: LAMA2; (+) strand; PAM type: YTN; PAM sequence: TTT
gcagtcttctgaggtttcgc

SEQ ID NO: 368468 - DNA, 20 bp, Artificial Sequence
  Description of Artificial Sequence: Synthetic oligonucleotide
  Target: LAMA2; (+) strand; PAM type: YTN; PAM sequence: TTG
cagtcttctgaggtttcgcc

SEQ ID NO: 368469 - DNA, 20 bp, Artificial Sequence
  Description of Artificial Sequence: Synthetic oligonucleotide
  Target: LAMA2; (+) strand; PAM type: YTN; PAM sequence: CTT
ctgaggtttcgccatacagg

SEQ ID NO: 368470 - DNA, 20 bp, Artificial Sequence
  Description of Artificial Sequence: Synthetic oligonucleotide
  Target: LAMA2; (+) strand; PAM type: YTN; PAM sequence: TTC
tgaggtttcgccatacagga

SEQ ID NO: 368471 - DNA, 20 bp, Artificial Sequence
  Description of Artificial Sequence: Synthetic oligonucleotide
  Target: LAMA2; (+) strand; PAM type: YTN; PAM sequence: CTG
aggtttcgccatacaggagg

SEQ ID NO: 368472 - DNA, 20 bp, Artificial Sequence
  Description of Artificial Sequence: Synthetic oligonucleotide
  Target: LAMA2; (+) strand; PAM type: YTN; PAM sequence: TTT
cgccatacaggaggaatgca

SEQ ID NO: 368473 - DNA, 20 bp, Artificial Sequence
  Description of Artificial Sequence: Synthetic oligonucleotide
  Target: LAMA2; (+) strand; PAM type: YTN; PAM sequence: TTC
gccatacaggaggaatgcat

SEQ ID NO: 368474 - DNA, 20 bp, Artificial Sequence
  Description of Artificial Sequence: Synthetic oligonucleotide
  Target: LAMA2; (+) strand; PAM type: YTN; PAM sequence: TTC
acagcgcggctctgtgaaat

SEQ ID NO: 368475 - DNA, 20 bp, Artificial Sequence
  Description of Artificial Sequence: Synthetic oligonucleotide
  Target: LAMA2; (+) strand; PAM type: YTN; PAM sequence: CTC
tgtgaaatgacacaagagct

SEQ ID NO: 368476 - DNA, 20 bp, Artificial Sequence
  Description of Artificial Sequence: Synthetic oligonucleotide
  Target: LAMA2; (+) strand; PAM type: YTN; PAM sequence: CTG
tgaaatgacacaagagctaa

SEQ ID NO: 368477 - DNA, 20 bp, Artificial Sequence
  Description of Artificial Sequence: Synthetic oligonucleotide
  Target: LAMA2; (+) strand; PAM type: YTN; PAM sequence: CTA
atccaagtaggtggctactt

SEQ ID NO: 368478 - DNA, 20 bp, Artificial Sequence
  Description of Artificial Sequence: Synthetic oligonucleotide
  Target: LAMA2; (+) strand; PAM type: YTN; PAM sequence: CTA
ctttctgtcacctacattac

SEQ ID NO: 368479 - DNA, 20 bp, Artificial Sequence
  Description of Artificial Sequence: Synthetic oligonucleotide
  Target: LAMA2; (+) strand; PAM type: YTN; PAM sequence: CTT
tctgtcacctacattaccta

SEQ ID NO: 368480 - DNA, 20 bp, Artificial Sequence
  Description of Artificial Sequence: Synthetic oligonucleotide
  Target: LAMA2; (+) strand; PAM type: YTN; PAM sequence: TTT
ctgtcacctacattacctaa

SEQ ID NO: 368481 - DNA, 20 bp, Artificial Sequence
  Description of Artificial Sequence: Synthetic oligonucleotide
  Target: LAMA2; (+) strand; PAM type: YTN; PAM sequence: TTC
tgtcacctacattacctaaa

SEQ ID NO: 368482 - DNA, 20 bp, Artificial Sequence
  Description of Artificial Sequence: Synthetic oligonucleotide
  Target: LAMA2; (+) strand; PAM type: YTN; PAM sequence: CTG
tcacctacattacctaaagc

SEQ ID NO: 368483 - DNA, 20 bp, Artificial Sequence
  Description of Artificial Sequence: Synthetic oligonucleotide
  Target: LAMA2; (+) strand; PAM type: YTN; PAM sequence: CTA
cattacctaaagcactgtgg

SEQ ID NO: 368484 - DNA, 20 bp, Artificial Sequence
  Description of Artificial Sequence: Synthetic oligonucleotide
  Target: LAMA2; (+) strand; PAM type: YTN; PAM sequence: TTA
cctaaagcactgtggttcaa

SEQ ID NO: 368485 - DNA, 20 bp, Artificial Sequence
  Description of Artificial Sequence: Synthetic oligonucleotide
  Target: LAMA2; (+) strand; PAM type: YTN; PAM sequence: CTA
aagcactgtggttcaataag

SEQ ID NO: 368486 - DNA, 20 bp, Artificial Sequence
  Description of Artificial Sequence: Synthetic oligonucleotide
  Target: LAMA2; (+) strand; PAM type: YTN; PAM sequence: CTG
tggttcaataagtaaaagcc

SEQ ID NO: 368487 - DNA, 20 bp, Artificial Sequence
  Description of Artificial Sequence: Synthetic oligonucleotide
  Target: LAMA2; (+) strand; PAM type: YTN; PAM sequence: TTC
aataagtaaaagccaatgtc

SEQ ID NO: 368488 - DNA, 20 bp, Artificial Sequence
  Description of Artificial Sequence: Synthetic oligonucleotide
  Target: LAMA2; (+) strand; PAM type: YTN; PAM sequence: TTT
gaaactcctacccactcagg

SEQ ID NO: 368489 - DNA, 20 bp, Artificial Sequence
  Description of Artificial Sequence: Synthetic oligonucleotide
  Target: LAMA2; (+) strand; PAM type: YTN; PAM sequence: TTG
aaactcctacccactcaggt

SEQ ID NO: 368490 - DNA, 20 bp, Artificial Sequence
  Description of Artificial Sequence: Synthetic oligonucleotide
  Target: LAMA2; (+) strand; PAM type: YTN; PAM sequence: CTC
ctacccactcaggtgagctg

SEQ ID NO: 368491 - DNA, 20 bp, Artificial Sequence
  Description of Artificial Sequence: Synthetic oligonucleotide
  Target: LAMA2; (+) strand; PAM type: YTN; PAM sequence: CTA
cccactcaggtgagctgaaa

SEQ ID NO: 368492 - DNA, 20 bp, Artificial Sequence
  Description of Artificial Sequence: Synthetic oligonucleotide
  Target: LAMA2; (+) strand; PAM type: YTN; PAM sequence: CTC
aggtgagctgaaagtcggca

SEQ ID NO: 368493 - DNA, 20 bp, Artificial Sequence
  Description of Artificial Sequence: Synthetic oligonucleotide
  Target: LAMA2; (+) strand; PAM type: YTN; PAM sequence: CTG
aaagtcggcatgaatctgga

SEQ ID NO: 368494 - DNA, 20 bp, Artificial Sequence
  Description of Artificial Sequence: Synthetic oligonucleotide
  Target: LAMA2; (+) strand; PAM type: YTN; PAM sequence: CTG
gagtcagtcagtaagcttgt

SEQ ID NO: 368495 - DNA, 20 bp, Artificial Sequence
  Description of Artificial Sequence: Synthetic oligonucleotide
  Target: LAMA2; (+) strand; PAM type: YTN; PAM sequence: CTT
gttatattttatctttgatc

SEQ ID NO: 368496 - DNA, 20 bp, Artificial Sequence
  Description of Artificial Sequence: Synthetic oligonucleotide
  Target: LAMA2; (+) strand; PAM type: YTN; PAM sequence: TTG
ttatattttatctttgatct

SEQ ID NO: 368497 - DNA, 20 bp, Artificial Sequence
  Description of Artificial Sequence: Synthetic oligonucleotide
  Target: LAMA2; (+) strand; PAM type: YTN; PAM sequence: TTA
tattttatctttgatctact

SEQ ID NO: 368498 - DNA, 20 bp, Artificial Sequence
  Description of Artificial Sequence: Synthetic oligonucleotide
  Target: LAMA2; (+) strand; PAM type: YTN; PAM sequence: TTT
tatctttgatctactagtag

SEQ ID NO: 368499 - DNA, 20 bp, Artificial Sequence
  Description of Artificial Sequence: Synthetic oligonucleotide
  Target: LAMA2; (+) strand; PAM type: YTN; PAM sequence: TTT
atctttgatctactagtaga

SEQ ID NO: 368500 - DNA, 20 bp, Artificial Sequence
  Description of Artificial Sequence: Synthetic oligonucleotide
  Target: LAMA2; (+) strand; PAM type: YTN; PAM sequence: TTA
tctttgatctactagtagat

SEQ ID NO: 368501 - DNA, 20 bp, Artificial Sequence
  Description of Artificial Sequence: Synthetic oligonucleotide
  Target: LAMA2; (+) strand; PAM type: YTN; PAM sequence: CTT
tgatctactagtagattgag

SEQ ID NO: 368502 - DNA, 20 bp, Artificial Sequence
  Description of Artificial Sequence: Synthetic oligonucleotide
  Target: LAMA2; (+) strand; PAM type: YTN; PAM sequence: TTT
gatctactagtagattgagt

SEQ ID NO: 368503 - DNA, 20 bp, Artificial Sequence
  Description of Artificial Sequence: Synthetic oligonucleotide
  Target: LAMA2; (+) strand; PAM type: YTN; PAM sequence: TTG
atctactagtagattgagtc

SEQ ID NO: 368504 - DNA, 20 bp, Artificial Sequence
  Description of Artificial Sequence: Synthetic oligonucleotide
  Target: LAMA2; (+) strand; PAM type: YTN; PAM sequence: CTA
ctagtagattgagtcatatt

SEQ ID NO: 368505 - DNA, 20 bp, Artificial Sequence
  Description of Artificial Sequence: Synthetic oligonucleotide
  Target: LAMA2; (+) strand; PAM type: YTN; PAM sequence: CTA
gtagattgagtcatatttgt

SEQ ID NO: 368506 - DNA, 20 bp, Artificial Sequence
  Description of Artificial Sequence: Synthetic oligonucleotide
  Target: LAMA2; (+) strand; PAM type: YTN; PAM sequence: TTG
agtcatatttgtaaaacatc

SEQ ID NO: 368507 - DNA, 20 bp, Artificial Sequence
  Description of Artificial Sequence: Synthetic oligonucleotide
  Target: LAMA2; (+) strand; PAM type: YTN; PAM sequence: TTT
gtaaaacatcacttgaattg

SEQ ID NO: 368508 - DNA, 20 bp, Artificial Sequence
  Description of Artificial Sequence: Synthetic oligonucleotide
  Target: LAMA2; (+) strand; PAM type: YTN; PAM sequence: TTG
taaaacatcacttgaattga

SEQ ID NO: 368509 - DNA, 20 bp, Artificial Sequence
  Description of Artificial Sequence: Synthetic oligonucleotide
  Target: LAMA2; (+) strand; PAM type: YTN; PAM sequence: CTT
gaattgatttcaacttgtct

SEQ ID NO: 368510 - DNA, 20 bp, Artificial Sequence
  Description of Artificial Sequence: Synthetic oligonucleotide
  Target: LAMA2; (+) strand; PAM type: YTN; PAM sequence: TTG
aattgatttcaacttgtctt

SEQ ID NO: 368511 - DNA, 20 bp, Artificial Sequence
  Description of Artificial Sequence: Synthetic oligonucleotide
  Target: LAMA2; (+) strand; PAM type: YTN; PAM sequence: TTG
atttcaacttgtcttgcaca

SEQ ID NO: 368512 - DNA, 20 bp, Artificial Sequence
  Description of Artificial Sequence: Synthetic oligonucleotide
  Target: LAMA2; (+) strand; PAM type: YTN; PAM sequence: TTT
caacttgtcttgcacagtag

SEQ ID NO: 368513 - DNA, 20 bp, Artificial Sequence
  Description of Artificial Sequence: Synthetic oligonucleotide
  Target: LAMA2; (+) strand; PAM type: YTN; PAM sequence: TTC
aacttgtcttgcacagtagg

SEQ ID NO: 368514 - DNA, 20 bp, Artificial Sequence
  Description of Artificial Sequence: Synthetic oligonucleotide
  Target: LAMA2; (+) strand; PAM type: YTN; PAM sequence: CTT
gtcttgcacagtaggctttc

SEQ ID NO: 368515 - DNA, 20 bp, Artificial Sequence
  Description of Artificial Sequence: Synthetic oligonucleotide
  Target: LAMA2; (+) strand; PAM type: YTN; PAM sequence: TTG
tcttgcacagtaggctttcg

SEQ ID NO: 368516 - DNA, 20 bp, Artificial Sequence
  Description of Artificial Sequence: Synthetic oligonucleotide
  Target: LAMA2; (+) strand; PAM type: YTN; PAM sequence: CTT
gcacagtaggctttcgactt

SEQ ID NO: 368517 - DNA, 20 bp, Artificial Sequence
  Description of Artificial Sequence: Synthetic oligonucleotide
  Target: LAMA2; (+) strand; PAM type: YTN; PAM sequence: TTG
cacagtaggctttcgacttg

SEQ ID NO: 368518 - DNA, 20 bp, Artificial Sequence
  Description of Artificial Sequence: Synthetic oligonucleotide
  Target: LAMA2; (+) strand; PAM type: YTN; PAM sequence: CTT
tcgacttggtatactgtttg

SEQ ID NO: 368519 - DNA, 20 bp, Artificial Sequence
  Description of Artificial Sequence: Synthetic oligonucleotide
  Target: LAMA2; (+) strand; PAM type: YTN; PAM sequence: TTT
cgacttggtatactgtttgt

SEQ ID NO: 368520 - DNA, 20 bp, Artificial Sequence
  Description of Artificial Sequence: Synthetic oligonucleotide
  Target: LAMA2; (+) strand; PAM type: YTN; PAM sequence: TTC
gacttggtatactgtttgtg

SEQ ID NO: 368521 - DNA, 20 bp, Artificial Sequence
  Description of Artificial Sequence: Synthetic oligonucleotide
  Target: LAMA2; (+) strand; PAM type: YTN; PAM sequence: CTT
ggtatactgtttgtgtacaa

SEQ ID NO: 368522 - DNA, 20 bp, Artificial Sequence
  Description of Artificial Sequence: Synthetic oligonucleotide
  Target: LAMA2; (+) strand; PAM type: YTN; PAM sequence: TTG
gtatactgtttgtgtacaag

SEQ ID NO: 368523 - DNA, 20 bp, Artificial Sequence
  Description of Artificial Sequence: Synthetic oligonucleotide
  Target: LAMA2; (+) strand; PAM type: YTN; PAM sequence: CTG
tttgtgtacaagcacaagta

SEQ ID NO: 368524 - DNA, 20 bp, Artificial Sequence
  Description of Artificial Sequence: Synthetic oligonucleotide
  Target: LAMA2; (+) strand; PAM type: YTN; PAM sequence: TTT
gtgtacaagcacaagtaaat

SEQ ID NO: 368525 - DNA, 20 bp, Artificial Sequence
  Description of Artificial Sequence: Synthetic oligonucleotide
  Target: LAMA2; (+) strand; PAM type: YTN; PAM sequence: TTG
tgtacaagcacaagtaaatt

SEQ ID NO: 368526 - DNA, 20 bp, Artificial Sequence
  Description of Artificial Sequence: Synthetic oligonucleotide
  Target: LAMA2; (+) strand; PAM type: YTN; PAM sequence: TTG
aagctcaacaaaaattcata

SEQ ID NO: 368527 - DNA, 20 bp, Artificial Sequence
  Description of Artificial Sequence: Synthetic oligonucleotide
  Target: LAMA2; (+) strand; PAM type: YTN; PAM sequence: CTC
aacaaaaattcatattcaga

SEQ ID NO: 368528 - DNA, 20 bp, Artificial Sequence
  Description of Artificial Sequence: Synthetic oligonucleotide
  Target: LAMA2; (+) strand; PAM type: YTN; PAM sequence: TTC
atattcagacttatttacag

SEQ ID NO: 368529 - DNA, 20 bp, Artificial Sequence
  Description of Artificial Sequence: Synthetic oligonucleotide
  Target: LAMA2; (+) strand; PAM type: YTN; PAM sequence: TTC
agacttatttacagtggatt

SEQ ID NO: 368530 - DNA, 20 bp, Artificial Sequence
  Description of Artificial Sequence: Synthetic oligonucleotide
  Target: LAMA2; (+) strand; PAM type: YTN; PAM sequence: CTT
atttacagtggatttacttc

SEQ ID NO: 368531 - DNA, 20 bp, Artificial Sequence
  Description of Artificial Sequence: Synthetic oligonucleotide
  Target: LAMA2; (+) strand; PAM type: YTN; PAM sequence: TTA
tttacagtggatttacttcc

SEQ ID NO: 368532 - DNA, 20 bp, Artificial Sequence
  Description of Artificial Sequence: Synthetic oligonucleotide
  Target: LAMA2; (+) strand; PAM type: YTN; PAM sequence: TTT
acagtggatttacttccatg

SEQ ID NO: 368533 - DNA, 20 bp, Artificial Sequence
  Description of Artificial Sequence: Synthetic oligonucleotide
  Target: LAMA2; (+) strand; PAM type: YTN; PAM sequence: TTA
cagtggatttacttccatgg

SEQ ID NO: 368534 - DNA, 20 bp, Artificial Sequence
  Description of Artificial Sequence: Synthetic oligonucleotide
  Target: LAMA2; (+) strand; PAM type: YTN; PAM sequence: TTT
acttccatggcagttctttc

SEQ ID NO: 368535 - DNA, 20 bp, Artificial Sequence
  Description of Artificial Sequence: Synthetic oligonucleotide
  Target: LAMA2; (+) strand; PAM type: YTN; PAM sequence: TTA
cttccatggcagttctttca

SEQ ID NO: 368536 - DNA, 20 bp, Artificial Sequence
  Description of Artificial Sequence: Synthetic oligonucleotide
  Target: LAMA2; (+) strand; PAM type: YTN; PAM sequence: CTT
ccatggcagttctttcagca

SEQ ID NO: 368537 - DNA, 20 bp, Artificial Sequence
  Description of Artificial Sequence: Synthetic oligonucleotide
  Target: LAMA2; (+) strand; PAM type: YTN; PAM sequence: TTC
catggcagttctttcagcaa

SEQ ID NO: 368538 - DNA, 20 bp, Artificial Sequence
  Description of Artificial Sequence: Synthetic oligonucleotide
  Target: LAMA2; (+) strand; PAM type: YTN; PAM sequence: TTC
tttcagcaaatgggcttagg

SEQ ID NO: 368539 - DNA, 20 bp, Artificial Sequence
  Description of Artificial Sequence: Synthetic oligonucleotide
  Target: LAMA2; (+) strand; PAM type: YTN; PAM sequence: CTT
tcagcaaatgggcttaggtt

SEQ ID NO: 368540 - DNA, 20 bp, Artificial Sequence
  Description of Artificial Sequence: Synthetic oligonucleotide
  Target: LAMA2; (+) strand; PAM type: YTN; PAM sequence: TTT
cagcaaatgggcttaggttc

SEQ ID NO: 368541 - DNA, 20 bp, Artificial Sequence
  Description of Artificial Sequence: Synthetic oligonucleotide
  Target: LAMA2; (+) strand; PAM type: YTN; PAM sequence: TTC
agcaaatgggcttaggttcc

SEQ ID NO: 368542 - DNA, 20 bp, Artificial Sequence
  Description of Artificial Sequence: Synthetic oligonucleotide
  Target: LAMA2; (+) strand; PAM type: YTN; PAM sequence: CTT
aggttcctccagttagttat

SEQ ID NO: 368543 - DNA, 20 bp, Artificial Sequence
  Description of Artificial Sequence: Synthetic oligonucleotide
  Target: LAMA2; (+) strand; PAM type: YTN; PAM sequence: TTA
ggttcctccagttagttata

SEQ ID NO: 368544 - DNA, 20 bp, Artificial Sequence
  Description of Artificial Sequence: Synthetic oligonucleotide
  Target: LAMA2; (+) strand; PAM type: YTN; PAM sequence: TTC
ctccagttagttatatgatt

SEQ ID NO: 368545 - DNA, 20 bp, Artificial Sequence
  Description of Artificial Sequence: Synthetic oligonucleotide
  Target: LAMA2; (+) strand; PAM type: YTN; PAM sequence: CTC
cagttagttatatgattaga

SEQ ID NO: 368546 - DNA, 20 bp, Artificial Sequence
  Description of Artificial Sequence: Synthetic oligonucleotide
  Target: LAMA2; (+) strand; PAM type: YTN; PAM sequence: TTA
gttatatgattagatggaat

SEQ ID NO: 368547 - DNA, 20 bp, Artificial Sequence
  Description of Artificial Sequence: Synthetic oligonucleotide
  Target: LAMA2; (+) strand; PAM type: YTN; PAM sequence: TTA
tatgattagatggaattgta

SEQ ID NO: 368548 - DNA, 20 bp, Artificial Sequence
  Description of Artificial Sequence: Synthetic oligonucleotide
  Target: LAMA2; (+) strand; PAM type: YTN; PAM sequence: TTA
gatggaattgtataacagaa

SEQ ID NO: 368549 - DNA, 20 bp, Artificial Sequence
  Description of Artificial Sequence: Synthetic oligonucleotide
  Target: LAMA2; (+) strand; PAM type: YTN; PAM sequence: TTG
tataacagaaggagaactgg

SEQ ID NO: 368550 - DNA, 20 bp, Artificial Sequence
  Description of Artificial Sequence: Synthetic oligonucleotide
  Target: LAMA2; (+) strand; PAM type: YTN; PAM sequence: CTG
gactgcgggtcaagaatttt

SEQ ID NO: 368551 - DNA, 20 bp, Artificial Sequence
  Description of Artificial Sequence: Synthetic oligonucleotide
  Target: LAMA2; (+) strand; PAM type: YTN; PAM sequence: CTG
cgggtcaagaattttgactt

SEQ ID NO: 368552 - DNA, 20 bp, Artificial Sequence
  Description of Artificial Sequence: Synthetic oligonucleotide
  Target: LAMA2; (+) strand; PAM type: YTN; PAM sequence: TTT
tgacttttgttttcaactca

SEQ ID NO: 368553 - DNA, 20 bp, Artificial Sequence
  Description of Artificial Sequence: Synthetic oligonucleotide
  Target: LAMA2; (+) strand; PAM type: YTN; PAM sequence: TTT
gacttttgttttcaactcag

SEQ ID NO: 368554 - DNA, 20 bp, Artificial Sequence
  Description of Artificial Sequence: Synthetic oligonucleotide
  Target: LAMA2; (+) strand; PAM type: YTN; PAM sequence: TTG
acttttgttttcaactcagc

SEQ ID NO: 368555 - DNA, 20 bp, Artificial Sequence
  Description of Artificial Sequence: Synthetic oligonucleotide
  Target: LAMA2; (+) strand; PAM type: YTN; PAM sequence: CTT
ttgttttcaactcagctatt

SEQ ID NO: 368556 - DNA, 20 bp, Artificial Sequence
  Description of Artificial Sequence: Synthetic oligonucleotide
  Target: LAMA2; (+) strand; PAM type: YTN; PAM sequence: TTT
tgttttcaactcagctattt

SEQ ID NO: 368557 - DNA, 20 bp, Artificial Sequence
  Description of Artificial Sequence: Synthetic oligonucleotide
  Target: LAMA2; (+) strand; PAM type: YTN; PAM sequence: TTT
gttttcaactcagctattta

SEQ ID NO: 368558 - DNA, 20 bp, Artificial Sequence
  Description of Artificial Sequence: Synthetic oligonucleotide
  Target: LAMA2; (+) strand; PAM type: YTN; PAM sequence: TTG
ttttcaactcagctatttaa

SEQ ID NO: 368559 - DNA, 20 bp, Artificial Sequence
  Description of Artificial Sequence: Synthetic oligonucleotide
  Target: LAMA2; (+) strand; PAM type: YTN; PAM sequence: TTT
tcaactcagctatttaatag

SEQ ID NO: 368560 - DNA, 20 bp, Artificial Sequence
  Description of Artificial Sequence: Synthetic oligonucleotide
  Target: LAMA2; (+) strand; PAM type: YTN; PAM sequence: TTT
caactcagctatttaatagt

SEQ ID NO: 368561 - DNA, 20 bp, Artificial Sequence
  Description of Artificial Sequence: Synthetic oligonucleotide
  Target: LAMA2; (+) strand; PAM type: YTN; PAM sequence: TTC
aactcagctatttaatagtt

SEQ ID NO: 368562 - DNA, 20 bp, Artificial Sequence
  Description of Artificial Sequence: Synthetic oligonucleotide
  Target: LAMA2; (+) strand; PAM type: YTN; PAM sequence: CTC
agctatttaatagttgtaaa

SEQ ID NO: 368563 - DNA, 20 bp, Artificial Sequence
  Description of Artificial Sequence: Synthetic oligonucleotide
  Target: LAMA2; (+) strand; PAM type: YTN; PAM sequence: CTA
tttaatagttgtaaacataa

SEQ ID NO: 368564 - DNA, 20 bp, Artificial Sequence
  Description of Artificial Sequence: Synthetic oligonucleotide
  Target: LAMA2; (+) strand; PAM type: YTN; PAM sequence: TTT
aatagttgtaaacataagta

SEQ ID NO: 368565 - DNA, 20 bp, Artificial Sequence
  Description of Artificial Sequence: Synthetic oligonucleotide
  Target: LAMA2; (+) strand; PAM type: YTN; PAM sequence: TTA
atagttgtaaacataagtat

SEQ ID NO: 368566 - DNA, 20 bp, Artificial Sequence
  Description of Artificial Sequence: Synthetic oligonucleotide
  Target: LAMA2; (+) strand; PAM type: YTN; PAM sequence: TTG
taaacataagtatggctttg

SEQ ID NO: 368567 - DNA, 20 bp, Artificial Sequence
  Description of Artificial Sequence: Synthetic oligonucleotide
  Target: LAMA2; (+) strand; PAM type: YTN; PAM sequence: CTT
tgacctctttggacttcaat

SEQ ID NO: 368568 - DNA, 20 bp, Artificial Sequence
  Description of Artificial Sequence: Synthetic oligonucleotide
  Target: LAMA2; (+) strand; PAM type: YTN; PAM sequence: TTT
gacctctttggacttcaatc

SEQ ID NO: 368569 - DNA, 20 bp, Artificial Sequence
  Description of Artificial Sequence: Synthetic oligonucleotide
  Target: LAMA2; (+) strand; PAM type: YTN; PAM sequence: TTG
acctctttggacttcaatca

SEQ ID NO: 368570 - DNA, 20 bp, Artificial Sequence
  Description of Artificial Sequence: Synthetic oligonucleotide
  Target: LAMA2; (+) strand; PAM type: YTN; PAM sequence: CTC
tttggacttcaatcacttca

SEQ ID NO: 368571 - DNA, 20 bp, Artificial Sequence
  Description of Artificial Sequence: Synthetic oligonucleotide
  Target: LAMA2; (+) strand; PAM type: YTN; PAM sequence: CTT
tggacttcaatcacttcatc

SEQ ID NO: 368572 - DNA, 20 bp, Artificial Sequence
  Description of Artificial Sequence: Synthetic oligonucleotide
  Target: LAMA2; (+) strand; PAM type: YTN; PAM sequence: TTT
ggacttcaatcacttcatct

SEQ ID NO: 368573 - DNA, 20 bp, Artificial Sequence
  Description of Artificial Sequence: Synthetic oligonucleotide
  Target: LAMA2; (+) strand; PAM type: YTN; PAM sequence: TTG
gacttcaatcacttcatctg

SEQ ID NO: 368574 - DNA, 20 bp, Artificial Sequence
  Description of Artificial Sequence: Synthetic oligonucleotide
  Target: LAMA2; (+) strand; PAM type: YTN; PAM sequence: CTT
caatcacttcatctgtaaaa

SEQ ID NO: 368575 - DNA, 20 bp, Artificial Sequence
  Description of Artificial Sequence: Synthetic oligonucleotide
  Target: LAMA2; (+) strand; PAM type: YTN; PAM sequence: TTC
aatcacttcatctgtaaaat

SEQ ID NO: 368576 - DNA, 20 bp, Artificial Sequence
  Description of Artificial Sequence: Synthetic oligonucleotide
  Target: LAMA2; (+) strand; PAM type: YTN; PAM sequence: CTT
catctgtaaaataaggagga

SEQ ID NO: 368577 - DNA, 20 bp, Artificial Sequence
  Description of Artificial Sequence: Synthetic oligonucleotide
  Target: LAMA2; (+) strand; PAM type: YTN; PAM sequence: TTC
atctgtaaaataaggaggag

SEQ ID NO: 368578 - DNA, 20 bp, Artificial Sequence
  Description of Artificial Sequence: Synthetic oligonucleotide
  Target: LAMA2; (+) strand; PAM type: YTN; PAM sequence: CTG
taaaataaggaggaggacaa

SEQ ID NO: 368579 - DNA, 20 bp, Artificial Sequence
  Description of Artificial Sequence: Synthetic oligonucleotide
  Target: LAMA2; (+) strand; PAM type: YTN; PAM sequence: TTG
ctctgccagcttcaaaaagt

SEQ ID NO: 368580 - DNA, 20 bp, Artificial Sequence
  Description of Artificial Sequence: Synthetic oligonucleotide
  Target: LAMA2; (+) strand; PAM type: YTN; PAM sequence: CTC
tgccagcttcaaaaagtcac

SEQ ID NO: 368581 - DNA, 20 bp, Artificial Sequence
  Description of Artificial Sequence: Synthetic oligonucleotide
  Target: LAMA2; (+) strand; PAM type: YTN; PAM sequence: CTG
ccagcttcaaaaagtcaccg

SEQ ID NO: 368582 - DNA, 20 bp, Artificial Sequence
  Description of Artificial Sequence: Synthetic oligonucleotide
  Target: LAMA2; (+) strand; PAM type: YTN; PAM sequence: CTT
caaaaagtcaccgcaagaat

SEQ ID NO: 368583 - DNA, 20 bp, Artificial Sequence
  Description of Artificial Sequence: Synthetic oligonucleotide
  Target: LAMA2; (+) strand; PAM type: YTN; PAM sequence: TTC
aaaaagtcaccgcaagaatt

SEQ ID NO: 368584 - DNA, 20 bp, Artificial Sequence
  Description of Artificial Sequence: Synthetic oligonucleotide
  Target: LAMA2; (+) strand; PAM type: YTN; PAM sequence: TTG
aattagagagctgcaaaagc

SEQ ID NO: 368585 - DNA, 20 bp, Artificial Sequence
  Description of Artificial Sequence: Synthetic oligonucleotide
  Target: LAMA2; (+) strand; PAM type: YTN; PAM sequence: TTA
gagagctgcaaaagcacttg

SEQ ID NO: 368586 - DNA, 20 bp, Artificial Sequence
  Description of Artificial Sequence: Synthetic oligonucleotide
  Target: LAMA2; (+) strand; PAM type: YTN; PAM sequence: CTG
caaaagcacttggctagtgg

SEQ ID NO: 368587 - DNA, 20 bp, Artificial Sequence
  Description of Artificial Sequence: Synthetic oligonucleotide
  Target: LAMA2; (+) strand; PAM type: YTN; PAM sequence: CTT
ggctagtggtaacccagcac

SEQ ID NO: 368588 - DNA, 20 bp, Artificial Sequence
  Description of Artificial Sequence: Synthetic oligonucleotide
  Target: LAMA2; (+) strand; PAM type: YTN; PAM sequence: TTG
gctagtggtaacccagcaca

SEQ ID NO: 368589 - DNA, 20 bp, Artificial Sequence
  Description of Artificial Sequence: Synthetic oligonucleotide
  Target: LAMA2; (+) strand; PAM type: YTN; PAM sequence: CTA
gtggtaacccagcacacaaa

SEQ ID NO: 368590 - DNA, 20 bp, Artificial Sequence
  Description of Artificial Sequence: Synthetic oligonucleotide
  Target: LAMA2; (+) strand; PAM type: YTN; PAM sequence: TTT
ctatcttatctacttcatcc

SEQ ID NO: 368591 - DNA, 20 bp, Artificial Sequence
  Description of Artificial Sequence: Synthetic oligonucleotide
  Target: LAMA2; (+) strand; PAM type: YTN; PAM sequence: TTC
tatcttatctacttcatccc

SEQ ID NO: 368592 - DNA, 20 bp, Artificial Sequence
  Description of Artificial Sequence: Synthetic oligonucleotide
  Target: LAMA2; (+) strand; PAM type: YTN; PAM sequence: CTA
tcttatctacttcatcccaa

SEQ ID NO: 368593 - DNA, 20 bp, Artificial Sequence
  Description of Artificial Sequence: Synthetic oligonucleotide
  Target: LAMA2; (+) strand; PAM type: YTN; PAM sequence: CTT
atctacttcatcccaaagga

SEQ ID NO: 368594 - DNA, 20 bp, Artificial Sequence
  Description of Artificial Sequence: Synthetic oligonucleotide
  Target: LAMA2; (+) strand; PAM type: YTN; PAM sequence: TTA
tctacttcatcccaaaggat

SEQ ID NO: 368595 - DNA, 20 bp, Artificial Sequence
  Description of Artificial Sequence: Synthetic oligonucleotide
  Target: LAMA2; (+) strand; PAM type: YTN; PAM sequence: CTA
cttcatcccaaaggatcaca

SEQ ID NO: 368596 - DNA, 20 bp, Artificial Sequence
  Description of Artificial Sequence: Synthetic oligonucleotide
  Target: LAMA2; (+) strand; PAM type: YTN; PAM sequence: CTT
catcccaaaggatcacattt

SEQ ID NO: 368597 - DNA, 20 bp, Artificial Sequence
  Description of Artificial Sequence: Synthetic oligonucleotide
  Target: LAMA2; (+) strand; PAM type: YTN; PAM sequence: TTC
atcccaaaggatcacatttt

SEQ ID NO: 368598 - DNA, 20 bp, Artificial Sequence
  Description of Artificial Sequence: Synthetic oligonucleotide
  Target: LAMA2; (+) strand; PAM type: YTN; PAM sequence: TTT
tctccaaataccattaagac

SEQ ID NO: 368599 - DNA, 20 bp, Artificial Sequence
  Description of Artificial Sequence: Synthetic oligonucleotide
  Target: LAMA2; (+) strand; PAM type: YTN; PAM sequence: TTT
ctccaaataccattaagact

SEQ ID NO: 368600 - DNA, 20 bp, Artificial Sequence
  Description of Artificial Sequence: Synthetic oligonucleotide
  Target: LAMA2; (+) strand; PAM type: YTN; PAM sequence: TTC
tccaaataccattaagactt

SEQ ID NO: 368601 - DNA, 20 bp, Artificial Sequence
  Description of Artificial Sequence: Synthetic oligonucleotide
  Target: LAMA2; (+) strand; PAM type: YTN; PAM sequence: CTC
caaataccattaagacttag

SEQ ID NO: 368602 - DNA, 20 bp, Artificial Sequence
  Description of Artificial Sequence: Synthetic oligonucleotide
  Target: LAMA2; (+) strand; PAM type: YTN; PAM sequence: TTA
agacttagagacctctaaag

SEQ ID NO: 368603 - DNA, 20 bp, Artificial Sequence
  Description of Artificial Sequence: Synthetic oligonucleotide
  Target: LAMA2; (+) strand; PAM type: YTN; PAM sequence: CTT
agagacctctaaagaaaggc

SEQ ID NO: 368604 - DNA, 20 bp, Artificial Sequence
  Description of Artificial Sequence: Synthetic oligonucleotide
  Target: LAMA2; (+) strand; PAM type: YTN; PAM sequence: TTA
gagacctctaaagaaaggca

SEQ ID NO: 368605 - DNA, 20 bp, Artificial Sequence
  Description of Artificial Sequence: Synthetic oligonucleotide
  Target: LAMA2; (+) strand; PAM type: YTN; PAM sequence: CTC
taaagaaaggcacatactgg

SEQ ID NO: 368606 - DNA, 20 bp, Artificial Sequence
  Description of Artificial Sequence: Synthetic oligonucleotide
  Target: LAMA2; (+) strand; PAM type: YTN; PAM sequence: CTA
aagaaaggcacatactggca

SEQ ID NO: 368607 - DNA, 20 bp, Artificial Sequence
  Description of Artificial Sequence: Synthetic oligonucleotide
  Target: LAMA2; (+) strand; PAM type: YTN; PAM sequence: CTG
gcatttccatacatatgaca

SEQ ID NO: 368608 - DNA, 20 bp, Artificial Sequence
  Description of Artificial Sequence: Synthetic oligonucleotide
  Target: LAMA2; (+) strand; PAM type: YTN; PAM sequence: TTT
ccatacatatgacagttctt

SEQ ID NO: 368609 - DNA, 20 bp, Artificial Sequence
  Description of Artificial Sequence: Synthetic oligonucleotide
  Target: LAMA2; (+) strand; PAM type: YTN; PAM sequence: TTC
catacatatgacagttctta

SEQ ID NO: 368610 - DNA, 20 bp, Artificial Sequence
  Description of Artificial Sequence: Synthetic oligonucleotide
  Target: LAMA2; (+) strand; PAM type: YTN; PAM sequence: TTC
ttactatcatttttatccag

SEQ ID NO: 368611 - DNA, 20 bp, Artificial Sequence
  Description of Artificial Sequence: Synthetic oligonucleotide
  Target: LAMA2; (+) strand; PAM type: YTN; PAM sequence: CTT
actatcatttttatccagaa

SEQ ID NO: 368612 - DNA, 20 bp, Artificial Sequence
  Description of Artificial Sequence: Synthetic oligonucleotide
  Target: LAMA2; (+) strand; PAM type: YTN; PAM sequence: TTA
ctatcatttttatccagaat

SEQ ID NO: 368613 - DNA, 20 bp, Artificial Sequence
  Description of Artificial Sequence: Synthetic oligonucleotide
  Target: LAMA2; (+) strand; PAM type: YTN; PAM sequence: CTA
tcatttttatccagaatgct

SEQ ID NO: 368614 - DNA, 20 bp, Artificial Sequence
  Description of Artificial Sequence: Synthetic oligonucleotide
  Target: LAMA2; (+) strand; PAM type: YTN; PAM sequence: TTT
ttatccagaatgctgagacc

SEQ ID NO: 368615 - DNA, 20 bp, Artificial Sequence
  Description of Artificial Sequence: Synthetic oligonucleotide
  Target: LAMA2; (+) strand; PAM type: YTN; PAM sequence: TTT
tatccagaatgctgagaccc

SEQ ID NO: 368616 - DNA, 20 bp, Artificial Sequence
  Description of Artificial Sequence: Synthetic oligonucleotide
  Target: LAMA2; (+) strand; PAM type: YTN; PAM sequence: TTT
atccagaatgctgagaccca

SEQ ID NO: 368617 - DNA, 20 bp, Artificial Sequence
  Description of Artificial Sequence: Synthetic oligonucleotide
  Target: LAMA2; (+) strand; PAM type: YTN; PAM sequence: TTA
tccagaatgctgagacccat

SEQ ID NO: 368618 - DNA, 20 bp, Artificial Sequence
  Description of Artificial Sequence: Synthetic oligonucleotide
  Target: LAMA2; (+) strand; PAM type: YTN; PAM sequence: CTG
agacccattagataaaatta

SEQ ID NO: 368619 - DNA, 20 bp, Artificial Sequence
  Description of Artificial Sequence: Synthetic oligonucleotide
  Target: LAMA2; (+) strand; PAM type: YTN; PAM sequence: TTA
gataaaattaatttattttc

SEQ ID NO: 368620 - DNA, 20 bp, Artificial Sequence
  Description of Artificial Sequence: Synthetic oligonucleotide
  Target: LAMA2; (+) strand; PAM type: YTN; PAM sequence: TTA
atttattttcttctcgctgt

SEQ ID NO: 368621 - DNA, 20 bp, Artificial Sequence
  Description of Artificial Sequence: Synthetic oligonucleotide
  Target: LAMA2; (+) strand; PAM type: YTN; PAM sequence: TTT
attttcttctcgctgtcttc

SEQ ID NO: 368622 - DNA, 20 bp, Artificial Sequence
  Description of Artificial Sequence: Synthetic oligonucleotide
  Target: LAMA2; (+) strand; PAM type: YTN; PAM sequence: TTA
ttttcttctcgctgtcttca

SEQ ID NO: 368623 - DNA, 20 bp, Artificial Sequence
  Description of Artificial Sequence: Synthetic oligonucleotide
  Target: LAMA2; (+) strand; PAM type: YTN; PAM sequence: TTT
tcttctcgctgtcttcacta

SEQ ID NO: 368624 - DNA, 20 bp, Artificial Sequence
  Description of Artificial Sequence: Synthetic oligonucleotide
  Target: LAMA2; (+) strand; PAM type: YTN; PAM sequence: TTT
cttctcgctgtcttcactag

SEQ ID NO: 368625 - DNA, 20 bp, Artificial Sequence
  Description of Artificial Sequence: Synthetic oligonucleotide
  Target: LAMA2; (+) strand; PAM type: YTN; PAM sequence: TTC
ttctcgctgtcttcactagg

SEQ ID NO: 368626 - DNA, 20 bp, Artificial Sequence
  Description of Artificial Sequence: Synthetic oligonucleotide
  Target: LAMA2; (+) strand; PAM type: YTN; PAM sequence: CTT
ctcgctgtcttcactaggaa

SEQ ID NO: 368627 - DNA, 20 bp, Artificial Sequence
  Description of Artificial Sequence: Synthetic oligonucleotide
  Target: LAMA2; (+) strand; PAM type: YTN; PAM sequence: TTC
tcgctgtcttcactaggaag

SEQ ID NO: 368628 - DNA, 20 bp, Artificial Sequence
  Description of Artificial Sequence: Synthetic oligonucleotide
  Target: LAMA2; (+) strand; PAM type: YTN; PAM sequence: CTC
gctgtcttcactaggaagat

SEQ ID NO: 368629 - DNA, 20 bp, Artificial Sequence
  Description of Artificial Sequence: Synthetic oligonucleotide
  Target: LAMA2; (+) strand; PAM type: YTN; PAM sequence: CTG
tcttcactaggaagatgaag

SEQ ID NO: 368630 - DNA, 20 bp, Artificial Sequence
  Description of Artificial Sequence: Synthetic oligonucleotide
  Target: LAMA2; (+) strand; PAM type: YTN; PAM sequence: CTT
cactaggaagatgaaggcac

SEQ ID NO: 368631 - DNA, 20 bp, Artificial Sequence
  Description of Artificial Sequence: Synthetic oligonucleotide
  Target: LAMA2; (+) strand; PAM type: YTN; PAM sequence: TTC
actaggaagatgaaggcaca

SEQ ID NO: 368632 - DNA, 20 bp, Artificial Sequence
  Description of Artificial Sequence: Synthetic oligonucleotide
  Target: LAMA2; (+) strand; PAM type: YTN; PAM sequence: CTA
ggaagatgaaggcacaagta

SEQ ID NO: 368633 - DNA, 20 bp, Artificial Sequence
  Description of Artificial Sequence: Synthetic oligonucleotide
  Target: LAMA2; (+) strand; PAM type: YTN; PAM sequence: CTC
ttcattcttcttttaagaat

SEQ ID NO: 368634 - DNA, 20 bp, Artificial Sequence
  Description of Artificial Sequence: Synthetic oligonucleotide
  Target: LAMA2; (+) strand; PAM type: YTN; PAM sequence: CTT
cattcttcttttaagaatat

SEQ ID NO: 368635 - DNA, 20 bp, Artificial Sequence
  Description of Artificial Sequence: Synthetic oligonucleotide
  Target: LAMA2; (+) strand; PAM type: YTN; PAM sequence: TTC
attcttcttttaagaatata

SEQ ID NO: 368636 - DNA, 20 bp, Artificial Sequence
  Description of Artificial Sequence: Synthetic oligonucleotide
  Target: LAMA2; (+) strand; PAM type: YTN; PAM sequence: TTC
ttcttttaagaatataagag

SEQ ID NO: 368637 - DNA, 20 bp, Artificial Sequence
  Description of Artificial Sequence: Synthetic oligonucleotide
  Target: LAMA2; (+) strand; PAM type: YTN; PAM sequence: CTT
cttttaagaatataagagaa

SEQ ID NO: 368638 - DNA, 20 bp, Artificial Sequence
  Description of Artificial Sequence: Synthetic oligonucleotide
  Target: LAMA2; (+) strand; PAM type: YTN; PAM sequence: TTC
ttttaagaatataagagaaa

SEQ ID NO: 368639 - DNA, 20 bp, Artificial Sequence
  Description of Artificial Sequence: Synthetic oligonucleotide
  Target: LAMA2; (+) strand; PAM type: YTN; PAM sequence: CTT
ttaagaatataagagaaatc

SEQ ID NO: 368640 - DNA, 20 bp, Artificial Sequence
  Description of Artificial Sequence: Synthetic oligonucleotide
  Target: LAMA2; (+) strand; PAM type: YTN; PAM sequence: TTT
taagaatataagagaaatca

SEQ ID NO: 368641 - DNA, 20 bp, Artificial Sequence
  Description of Artificial Sequence: Synthetic oligonucleotide
  Target: LAMA2; (+) strand; PAM type: YTN; PAM sequence: TTT
aagaatataagagaaatcaa

SEQ ID NO: 368642 - DNA, 20 bp, Artificial Sequence
  Description of Artificial Sequence: Synthetic oligonucleotide
  Target: LAMA2; (+) strand; PAM type: YTN; PAM sequence: TTA
agaatataagagaaatcaac

SEQ ID NO: 368643 - DNA, 20 bp, Artificial Sequence
  Description of Artificial Sequence: Synthetic oligonucleotide
  Target: LAMA2; (+) strand; PAM type: YTN; PAM sequence: CTA
actgaactgtgcatctttca

SEQ ID NO: 368644 - DNA, 20 bp, Artificial Sequence
  Description of Artificial Sequence: Synthetic oligonucleotide
  Target: LAMA2; (+) strand; PAM type: YTN; PAM sequence: CTG
aactgtgcatctttcacctt

SEQ ID NO: 368645 - DNA, 20 bp, Artificial Sequence
  Description of Artificial Sequence: Synthetic oligonucleotide
  Target: LAMA2; (+) strand; PAM type: YTN; PAM sequence: CTG
tgcatctttcacctttaaat

SEQ ID NO: 368646 - DNA, 20 bp, Artificial Sequence
  Description of Artificial Sequence: Synthetic oligonucleotide
  Target: LAMA2; (+) strand; PAM type: YTN; PAM sequence: CTT
tcacctttaaattatccaag

SEQ ID NO: 368647 - DNA, 20 bp, Artificial Sequence
  Description of Artificial Sequence: Synthetic oligonucleotide
  Target: LAMA2; (+) strand; PAM type: YTN; PAM sequence: TTT
cacctttaaattatccaaga

SEQ ID NO: 368648 - DNA, 20 bp, Artificial Sequence
  Description of Artificial Sequence: Synthetic oligonucleotide
  Target: LAMA2; (+) strand; PAM type: YTN; PAM sequence: TTC
acctttaaattatccaagac

SEQ ID NO: 368649 - DNA, 20 bp, Artificial Sequence
  Description of Artificial Sequence: Synthetic oligonucleotide
  Target: LAMA2; (+) strand; PAM type: YTN; PAM sequence: CTT
taaattatccaagacttgga

SEQ ID NO: 368650 - DNA, 20 bp, Artificial Sequence
  Description of Artificial Sequence: Synthetic oligonucleotide
  Target: LAMA2; (+) strand; PAM type: YTN; PAM sequence: TTT
aaattatccaagacttggat

SEQ ID NO: 368651 - DNA, 20 bp, Artificial Sequence
  Description of Artificial Sequence: Synthetic oligonucleotide
  Target: LAMA2; (+) strand; PAM type: YTN; PAM sequence: TTA
aattatccaagacttggatt

SEQ ID NO: 368652 - DNA, 20 bp, Artificial Sequence
  Description of Artificial Sequence: Synthetic oligonucleotide
  Target: LAMA2; (+) strand; PAM type: YTN; PAM sequence: TTA
tccaagacttggatttagta

SEQ ID NO: 368653 - DNA, 20 bp, Artificial Sequence
  Description of Artificial Sequence: Synthetic oligonucleotide
  Target: LAMA2; (+) strand; PAM type: YTN; PAM sequence: CTT
ggatttagtaacatccttgg

SEQ ID NO: 368654 - DNA, 20 bp, Artificial Sequence
  Description of Artificial Sequence: Synthetic oligonucleotide
  Target: LAMA2; (+) strand; PAM type: YTN; PAM sequence: TTG
gatttagtaacatccttggt

SEQ ID NO: 368655 - DNA, 20 bp, Artificial Sequence
  Description of Artificial Sequence: Synthetic oligonucleotide
  Target: LAMA2; (+) strand; PAM type: YTN; PAM sequence: TTT
agtaacatccttggtcttta

SEQ ID NO: 368656 - DNA, 20 bp, Artificial Sequence
  Description of Artificial Sequence: Synthetic oligonucleotide
  Target: LAMA2; (+) strand; PAM type: YTN; PAM sequence: TTA
gtaacatccttggtctttaa

SEQ ID NO: 368657 - DNA, 20 bp, Artificial Sequence
  Description of Artificial Sequence: Synthetic oligonucleotide
  Target: LAMA2; (+) strand; PAM type: YTN; PAM sequence: CTT
ggtctttaaatcaagaaagg

SEQ ID NO: 368658 - DNA, 20 bp, Artificial Sequence
  Description of Artificial Sequence: Synthetic oligonucleotide
  Target: LAMA2; (+) strand; PAM type: YTN; PAM sequence: TTG
gtctttaaatcaagaaaggc

SEQ ID NO: 368659 - DNA, 20 bp, Artificial Sequence
  Description of Artificial Sequence: Synthetic oligonucleotide
  Target: LAMA2; (+) strand; PAM type: YTN; PAM sequence: CTT
taaatcaagaaaggctttta

SEQ ID NO: 368660 - DNA, 20 bp, Artificial Sequence
  Description of Artificial Sequence: Synthetic oligonucleotide
  Target: LAMA2; (+) strand; PAM type: YTN; PAM sequence: TTT
aaatcaagaaaggcttttat

SEQ ID NO: 368661 - DNA, 20 bp, Artificial Sequence
  Description of Artificial Sequence: Synthetic oligonucleotide
  Target: LAMA2; (+) strand; PAM type: YTN; PAM sequence: TTA
aatcaagaaaggcttttatg

SEQ ID NO: 368662 - DNA, 20 bp, Artificial Sequence
  Description of Artificial Sequence: Synthetic oligonucleotide
  Target: LAMA2; (+) strand; PAM type: YTN; PAM sequence: CTT
ttatgaagcacctatattag

SEQ ID NO: 368663 - DNA, 20 bp, Artificial Sequence
  Description of Artificial Sequence: Synthetic oligonucleotide
  Target: LAMA2; (+) strand; PAM type: YTN; PAM sequence: TTT
tatgaagcacctatattaga

SEQ ID NO: 368664 - DNA, 20 bp, Artificial Sequence
  Description of Artificial Sequence: Synthetic oligonucleotide
  Target: LAMA2; (+) strand; PAM type: YTN; PAM sequence: TTT
atgaagcacctatattagat

SEQ ID NO: 368665 - DNA, 20 bp, Artificial Sequence
  Description of Artificial Sequence: Synthetic oligonucleotide
  Target: LAMA2; (+) strand; PAM type: YTN; PAM sequence: TTA
tgaagcacctatattagata

SEQ ID NO: 368666 - DNA, 20 bp, Artificial Sequence
  Description of Artificial Sequence: Synthetic oligonucleotide
  Target: LAMA2; (+) strand; PAM type: YTN; PAM sequence: CTA
tattagatatagaactctgc

SEQ ID NO: 368667 - DNA, 20 bp, Artificial Sequence
  Description of Artificial Sequence: Synthetic oligonucleotide
  Target: LAMA2; (+) strand; PAM type: YTN; PAM sequence: TTA
gatatagaactctgcacaaa

SEQ ID NO: 368668 - DNA, 20 bp, Artificial Sequence
  Description of Artificial Sequence: Synthetic oligonucleotide
  Target: LAMA2; (+) strand; PAM type: YTN; PAM sequence: CTC
tgcacaaagtgtattttcct

SEQ ID NO: 368669 - DNA, 20 bp, Artificial Sequence
  Description of Artificial Sequence: Synthetic oligonucleotide
  Target: LAMA2; (+) strand; PAM type: YTN; PAM sequence: CTG
cacaaagtgtattttcctct

SEQ ID NO: 368670 - DNA, 20 bp, Artificial Sequence
  Description of Artificial Sequence: Synthetic oligonucleotide
  Target: LAMA2; (+) strand; PAM type: YTN; PAM sequence: TTT
tcctctaactttacagtaga

SEQ ID NO: 368671 - DNA, 20 bp, Artificial Sequence
  Description of Artificial Sequence: Synthetic oligonucleotide
  Target: LAMA2; (+) strand; PAM type: YTN; PAM sequence: TTT
cctctaactttacagtagac

SEQ ID NO: 368672 - DNA, 20 bp, Artificial Sequence
  Description of Artificial Sequence: Synthetic oligonucleotide
  Target: LAMA2; (+) strand; PAM type: YTN; PAM sequence: TTC
ctctaactttacagtagaca

SEQ ID NO: 368673 - DNA, 20 bp, Artificial Sequence
  Description of Artificial Sequence: Synthetic oligonucleotide
  Target: LAMA2; (+) strand; PAM type: YTN; PAM sequence: CTC
taactttacagtagacatta

SEQ ID NO: 368674 - DNA, 20 bp, Artificial Sequence
  Description of Artificial Sequence: Synthetic oligonucleotide
  Target: LAMA2; (+) strand; PAM type: YTN; PAM sequence: CTA
actttacagtagacattagt

SEQ ID NO: 368675 - DNA, 20 bp, Artificial Sequence
  Description of Artificial Sequence: Synthetic oligonucleotide
  Target: LAMA2; (+) strand; PAM type: YTN; PAM sequence: CTT
tacagtagacattagtagag

SEQ ID NO: 368676 - DNA, 20 bp, Artificial Sequence
  Description of Artificial Sequence: Synthetic oligonucleotide
  Target: LAMA2; (+) strand; PAM type: YTN; PAM sequence: TTT
acagtagacattagtagagt

SEQ ID NO: 368677 - DNA, 20 bp, Artificial Sequence
  Description of Artificial Sequence: Synthetic oligonucleotide
  Target: LAMA2; (+) strand; PAM type: YTN; PAM sequence: TTA
cagtagacattagtagagtt

SEQ ID NO: 368678 - DNA, 20 bp, Artificial Sequence
  Description of Artificial Sequence: Synthetic oligonucleotide
  Target: LAMA2; (+) strand; PAM type: YTN; PAM sequence: TTA
gtagagttcaccaaatttcc

SEQ ID NO: 368679 - DNA, 20 bp, Artificial Sequence
  Description of Artificial Sequence: Synthetic oligonucleotide
  Target: LAMA2; (+) strand; PAM type: YTN; PAM sequence: TTC
accaaatttccaatctcatc

SEQ ID NO: 368680 - DNA, 20 bp, Artificial Sequence
  Description of Artificial Sequence: Synthetic oligonucleotide
  Target: LAMA2; (+) strand; PAM type: YTN; PAM sequence: TTT
ccaatctcatctatagggga

SEQ ID NO: 368681 - DNA, 20 bp, Artificial Sequence
  Description of Artificial Sequence: Synthetic oligonucleotide
  Target: LAMA2; (+) strand; PAM type: YTN; PAM sequence: TTC
caatctcatctataggggat

SEQ ID NO: 368682 - DNA, 20 bp, Artificial Sequence
  Description of Artificial Sequence: Synthetic oligonucleotide
  Target: LAMA2; (+) strand; PAM type: YTN; PAM sequence: CTC
atctataggggatattgcat

SEQ ID NO: 368683 - DNA, 20 bp, Artificial Sequence
  Description of Artificial Sequence: Synthetic oligonucleotide
  Target: LAMA2; (+) strand; PAM type: YTN; PAM sequence: CTA
taggggatattgcatttctc

SEQ ID NO: 368684 - DNA, 20 bp, Artificial Sequence
  Description of Artificial Sequence: Synthetic oligonucleotide
  Target: LAMA2; (+) strand; PAM type: YTN; PAM sequence: TTG
catttctctaatcctggagg

SEQ ID NO: 368685 - DNA, 20 bp, Artificial Sequence
  Description of Artificial Sequence: Synthetic oligonucleotide
  Target: LAMA2; (+) strand; PAM type: YTN; PAM sequence: TTT
ctctaatcctggagggtaga

SEQ ID NO: 368686 - DNA, 20 bp, Artificial Sequence
  Description of Artificial Sequence: Synthetic oligonucleotide
  Target: LAMA2; (+) strand; PAM type: YTN; PAM sequence: TTC
tctaatcctggagggtagat

SEQ ID NO: 368687 - DNA, 20 bp, Artificial Sequence
  Description of Artificial Sequence: Synthetic oligonucleotide
  Target: LAMA2; (+) strand; PAM type: YTN; PAM sequence: CTC
taatcctggagggtagatgt

SEQ ID NO: 368688 - DNA, 20 bp, Artificial Sequence
  Description of Artificial Sequence: Synthetic oligonucleotide
  Target: LAMA2; (+) strand; PAM type: YTN; PAM sequence: CTA
atcctggagggtagatgtgt

SEQ ID NO: 368689 - DNA, 20 bp, Artificial Sequence
  Description of Artificial Sequence: Synthetic oligonucleotide
  Target: LAMA2; (+) strand; PAM type: YTN; PAM sequence: CTG
gagggtagatgtgtcacatg

SEQ ID NO: 368690 - DNA, 20 bp, Artificial Sequence
  Description of Artificial Sequence: Synthetic oligonucleotide
  Target: LAMA2; (+) strand; PAM type: YTN; PAM sequence: CTT
ggtttagccaatgaaatgtg

SEQ ID NO: 368691 - DNA, 20 bp, Artificial Sequence
  Description of Artificial Sequence: Synthetic oligonucleotide
  Target: LAMA2; (+) strand; PAM type: YTN; PAM sequence: TTG
gtttagccaatgaaatgtgg

SEQ ID NO: 368692 - DNA, 20 bp, Artificial Sequence
  Description of Artificial Sequence: Synthetic oligonucleotide
  Target: LAMA2; (+) strand; PAM type: YTN; PAM sequence: TTT
agccaatgaaatgtggtaga

SEQ ID NO: 368693 - DNA, 20 bp, Artificial Sequence
  Description of Artificial Sequence: Synthetic oligonucleotide
  Target: LAMA2; (+) strand; PAM type: YTN; PAM sequence: TTA
gccaatgaaatgtggtagaa

SEQ ID NO: 368694 - DNA, 20 bp, Artificial Sequence
  Description of Artificial Sequence: Synthetic oligonucleotide
  Target: LAMA2; (+) strand; PAM type: YTN; PAM sequence: TTT
ttttttttcctgaggtaaac

SEQ ID NO: 368695 - DNA, 20 bp, Artificial Sequence
  Description of Artificial Sequence: Synthetic oligonucleotide
  Target: LAMA2; (+) strand; PAM type: YTN; PAM sequence: TTT
tttttttcctgaggtaaaca

SEQ ID NO: 368696 - DNA, 20 bp, Artificial Sequence
  Description of Artificial Sequence: Synthetic oligonucleotide
  Target: LAMA2; (+) strand; PAM type: YTN; PAM sequence: TTT
ttttttcctgaggtaaacat

SEQ ID NO: 368697 - DNA, 20 bp, Artificial Sequence
  Description of Artificial Sequence: Synthetic oligonucleotide
  Target: LAMA2; (+) strand; PAM type: YTN; PAM sequence: TTT
tttttcctgaggtaaacatt

SEQ ID NO: 368698 - DNA, 20 bp, Artificial Sequence
  Description of Artificial Sequence: Synthetic oligonucleotide
  Target: LAMA2; (+) strand; PAM type: YTN; PAM sequence: TTT
ttttcctgaggtaaacattg

SEQ ID NO: 368699 - DNA, 20 bp, Artificial Sequence
  Description of Artificial Sequence: Synthetic oligonucleotide
  Target: LAMA2; (+) strand; PAM type: YTN; PAM sequence: TTT
tttcctgaggtaaacattga

SEQ ID NO: 368700 - DNA, 20 bp, Artificial Sequence
  Description of Artificial Sequence: Synthetic oligonucleotide
  Target: LAMA2; (+) strand; PAM type: YTN; PAM sequence: TTT
ttcctgaggtaaacattgaa

SEQ ID NO: 368701 - DNA, 20 bp, Artificial Sequence
  Description of Artificial Sequence: Synthetic oligonucleotide
  Target: LAMA2; (+) strand; PAM type: YTN; PAM sequence: TTT
tcctgaggtaaacattgaat

SEQ ID NO: 368702 - DNA, 20 bp, Artificial Sequence
  Description of Artificial Sequence: Synthetic oligonucleotide
  Target: LAMA2; (+) strand; PAM type: YTN; PAM sequence: TTT
cctgaggtaaacattgaatt

SEQ ID NO: 368703 - DNA, 20 bp, Artificial Sequence
  Description of Artificial Sequence: Synthetic oligonucleotide
  Target: LAMA2; (+) strand; PAM type: YTN; PAM sequence: TTC
ctgaggtaaacattgaattt

SEQ ID NO: 368704 - DNA, 20 bp, Artificial Sequence
  Description of Artificial Sequence: Synthetic oligonucleotide
  Target: LAMA2; (+) strand; PAM type: YTN; PAM sequence: CTG
aggtaaacattgaatttcca

SEQ ID NO: 368705 - DNA, 20 bp, Artificial Sequence
  Description of Artificial Sequence: Synthetic oligonucleotide
  Target: LAMA2; (+) strand; PAM type: YTN; PAM sequence: TTG
aatttccaatgtgagactct

SEQ ID NO: 368706 - DNA, 20 bp, Artificial Sequence
  Description of Artificial Sequence: Synthetic oligonucleotide
  Target: LAMA2; (+) strand; PAM type: YTN; PAM sequence: TTT
ccaatgtgagactctctgca

SEQ ID NO: 368707 - DNA, 20 bp, Artificial Sequence
  Description of Artificial Sequence: Synthetic oligonucleotide
  Target: LAMA2; (+) strand; PAM type: YTN; PAM sequence: TTC
caatgtgagactctctgcag

SEQ ID NO: 368708 - DNA, 20 bp, Artificial Sequence
  Description of Artificial Sequence: Synthetic oligonucleotide
  Target: LAMA2; (+) strand; PAM type: YTN; PAM sequence: CTC
tctgcagcttactcagcaat

SEQ ID NO: 368709 - DNA, 20 bp, Artificial Sequence
  Description of Artificial Sequence: Synthetic oligonucleotide
  Target: LAMA2; (+) strand; PAM type: YTN; PAM sequence: CTC
tgcagcttactcagcaatca

SEQ ID NO: 368710 - DNA, 20 bp, Artificial Sequence
  Description of Artificial Sequence: Synthetic oligonucleotide
  Target: LAMA2; (+) strand; PAM type: YTN; PAM sequence: CTG
cagcttactcagcaatcaga

SEQ ID NO: 368711 - DNA, 20 bp, Artificial Sequence
  Description of Artificial Sequence: Synthetic oligonucleotide
  Target: LAMA2; (+) strand; PAM type: YTN; PAM sequence: CTT
actcagcaatcagaagatta

SEQ ID NO: 368712 - DNA, 20 bp, Artificial Sequence
  Description of Artificial Sequence: Synthetic oligonucleotide
  Target: LAMA2; (+) strand; PAM type: YTN; PAM sequence: TTA
ctcagcaatcagaagattaa

SEQ ID NO: 368713 - DNA, 20 bp, Artificial Sequence
  Description of Artificial Sequence: Synthetic oligonucleotide
  Target: LAMA2; (+) strand; PAM type: YTN; PAM sequence: CTC
agcaatcagaagattaaaaa

SEQ ID NO: 368714 - DNA, 20 bp, Artificial Sequence
  Description of Artificial Sequence: Synthetic oligonucleotide
  Target: LAMA2; (+) strand; PAM type: YTN; PAM sequence: TTA
aaaaacagcctggggccggg

SEQ ID NO: 368715 - DNA, 20 bp, Artificial Sequence
  Description of Artificial Sequence: Synthetic oligonucleotide
  Target: LAMA2; (+) strand; PAM type: YTN; PAM sequence: CTG
gggccgggcacggtggctca

SEQ ID NO: 368716 - DNA, 20 bp, Artificial Sequence
  Description of Artificial Sequence: Synthetic oligonucleotide
  Target: LAMA2; (+) strand; PAM type: YTN; PAM sequence: CTC
atgcctgtaatcccagcaat

SEQ ID NO: 368717 - DNA, 20 bp, Artificial Sequence
  Description of Artificial Sequence: Synthetic oligonucleotide
  Target: LAMA2; (+) strand; PAM type: YTN; PAM sequence: CTG
taatcccagcaatttgggag

SEQ ID NO: 368718 - DNA, 20 bp, Artificial Sequence
  Description of Artificial Sequence: Synthetic oligonucleotide
  Target: LAMA2; (+) strand; PAM type: YTN; PAM sequence: TTT
gggaggctgaggcaggcaga

SEQ ID NO: 368719 - DNA, 20 bp, Artificial Sequence
  Description of Artificial Sequence: Synthetic oligonucleotide
  Target: LAMA2; (+) strand; PAM type: YTN; PAM sequence: TTG
ggaggctgaggcaggcagat

SEQ ID NO: 368720 - DNA, 20 bp, Artificial Sequence
  Description of Artificial Sequence: Synthetic oligonucleotide
  Target: LAMA2; (+) strand; PAM type: YTN; PAM sequence: CTG
aggcaggcagatcacgaggt

SEQ ID NO: 368721 - DNA, 20 bp, Artificial Sequence
  Description of Artificial Sequence: Synthetic oligonucleotide
  Target: LAMA2; (+) strand; PAM type: YTN; PAM sequence: TTG
ttcgagaccagcctgaccaa

SEQ ID NO: 368722 - DNA, 20 bp, Artificial Sequence
  Description of Artificial Sequence: Synthetic oligonucleotide
  Target: LAMA2; (+) strand; PAM type: YTN; PAM sequence: TTC
gagaccagcctgaccaacat

SEQ ID NO: 368723 - DNA, 20 bp, Artificial Sequence
  Description of Artificial Sequence: Synthetic oligonucleotide
  Target: LAMA2; (+) strand; PAM type: YTN; PAM sequence: CTG
accaacatggtgaaacccca

SEQ ID NO: 368724 - DNA, 20 bp, Artificial Sequence
  Description of Artificial Sequence: Synthetic oligonucleotide
  Target: LAMA2; (+) strand; PAM type: YTN; PAM sequence: CTC
tactaaaaataccaaaatta

SEQ ID NO: 368725 - DNA, 20 bp, Artificial Sequence
  Description of Artificial Sequence: Synthetic oligonucleotide
  Target: LAMA2; (+) strand; PAM type: YTN; PAM sequence: CTA
ctaaaaataccaaaattagc

SEQ ID NO: 368726 - DNA, 20 bp, Artificial Sequence
  Description of Artificial Sequence: Synthetic oligonucleotide
  Target: LAMA2; (+) strand; PAM type: YTN; PAM sequence: CTA
aaaataccaaaattagccag

SEQ ID NO: 368727 - DNA, 20 bp, Artificial Sequence
  Description of Artificial Sequence: Synthetic oligonucleotide
  Target: LAMA2; (+) strand; PAM type: YTN; PAM sequence: TTA
gccagacatggtggcacgtg

SEQ ID NO: 368728 - DNA, 20 bp, Artificial Sequence
  Description of Artificial Sequence: Synthetic oligonucleotide
  Target: LAMA2; (+) strand; PAM type: YTN; PAM sequence: CTA
ctcaggaggctgaggcagta

SEQ ID NO: 368729 - DNA, 20 bp, Artificial Sequence
  Description of Artificial Sequence: Synthetic oligonucleotide
  Target: LAMA2; (+) strand; PAM type: YTN; PAM sequence: CTC
aggaggctgaggcagtagaa

SEQ ID NO: 368730 - DNA, 20 bp, Artificial Sequence
  Description of Artificial Sequence: Synthetic oligonucleotide
  Target: LAMA2; (+) strand; PAM type: YTN; PAM sequence: CTG
aggcagtagaatcacttgaa

SEQ ID NO: 368731 - DNA, 20 bp, Artificial Sequence
  Description of Artificial Sequence: Synthetic oligonucleotide
  Target: LAMA2; (+) strand; PAM type: YTN; PAM sequence: CTT
gaacccgggatgtggaggtt

SEQ ID NO: 368732 - DNA, 20 bp, Artificial Sequence
  Description of Artificial Sequence: Synthetic oligonucleotide
  Target: LAMA2; (+) strand; PAM type: YTN; PAM sequence: TTG
aacccgggatgtggaggttg

SEQ ID NO: 368733 - DNA, 20 bp, Artificial Sequence
  Description of Artificial Sequence: Synthetic oligonucleotide
  Target: LAMA2; (+) strand; PAM type: YTN; PAM sequence: TTG
cagtgagccgagatcgcgcc

SEQ ID NO: 368734 - DNA, 20 bp, Artificial Sequence
  Description of Artificial Sequence: Synthetic oligonucleotide
  Target: LAMA2; (+) strand; PAM type: YTN; PAM sequence: TTG
cactccagcctgggtgacag

SEQ ID NO: 368735 - DNA, 20 bp, Artificial Sequence
  Description of Artificial Sequence: Synthetic oligonucleotide
  Target: LAMA2; (+) strand; PAM type: YTN; PAM sequence: CTC
cagcctgggtgacagaggga

SEQ ID NO: 368736 - DNA, 20 bp, Artificial Sequence
  Description of Artificial Sequence: Synthetic oligonucleotide
  Target: LAMA2; (+) strand; PAM type: YTN; PAM sequence: CTG
ggtgacagagggagactctg

SEQ ID NO: 368737 - DNA, 20 bp, Artificial Sequence
  Description of Artificial Sequence: Synthetic oligonucleotide
  Target: LAMA2; (+) strand; PAM type: YTN; PAM sequence: CTC
tgtctcaaaaaaaaaaaaaa

SEQ ID NO: 368738 - DNA, 20 bp, Artificial Sequence
  Description of Artificial Sequence: Synthetic oligonucleotide
  Target: LAMA2; (+) strand; PAM type: YTN; PAM sequence: CTG
tctcaaaaaaaaaaaaaaaa

SEQ ID NO: 368739 - DNA, 20 bp, Artificial Sequence
  Description of Artificial Sequence: Synthetic oligonucleotide
  Target: LAMA2; (+) strand; PAM type: YTN; PAM sequence: CTC
aaaaaaaaaaaaaaaaaaaa

SEQ ID NO: 368740 - DNA, 20 bp, Artificial Sequence
  Description of Artificial Sequence: Synthetic oligonucleotide
  Target: LAMA2; (+) strand; PAM type: YTN; PAM sequence: CTG
gaatactgatttagcacaca

SEQ ID NO: 368741 - DNA, 20 bp, Artificial Sequence
  Description of Artificial Sequence: Synthetic oligonucleotide
  Target: LAMA2; (+) strand; PAM type: YTN; PAM sequence: CTG
atttagcacacagaggtcag

SEQ ID NO: 368742 - DNA, 20 bp, Artificial Sequence
  Description of Artificial Sequence: Synthetic oligonucleotide
  Target: LAMA2; (+) strand; PAM type: YTN; PAM sequence: TTT
agcacacagaggtcagctgc

SEQ ID NO: 368743 - DNA, 20 bp, Artificial Sequence
  Description of Artificial Sequence: Synthetic oligonucleotide
  Target: LAMA2; (+) strand; PAM type: YTN; PAM sequence: TTA
gcacacagaggtcagctgcc

SEQ ID NO: 368744 - DNA, 20 bp, Artificial Sequence
  Description of Artificial Sequence: Synthetic oligonucleotide
  Target: LAMA2; (+) strand; PAM type: YTN; PAM sequence: CTG
ccctaacagtcacccaggcc

SEQ ID NO: 368745 - DNA, 20 bp, Artificial Sequence
  Description of Artificial Sequence: Synthetic oligonucleotide
  Target: LAMA2; (+) strand; PAM type: YTN; PAM sequence: CTA
acagtcacccaggcctgtag

SEQ ID NO: 368746 - DNA, 20 bp, Artificial Sequence
  Description of Artificial Sequence: Synthetic oligonucleotide
  Target: LAMA2; (+) strand; PAM type: YTN; PAM sequence: CTG
tagaggattttacatgagta

SEQ ID NO: 368747 - DNA, 20 bp, Artificial Sequence
  Description of Artificial Sequence: Synthetic oligonucleotide
  Target: LAMA2; (+) strand; PAM type: YTN; PAM sequence: TTT
tacatgagtaagcctttgtt

SEQ ID NO: 368748 - DNA, 20 bp, Artificial Sequence
  Description of Artificial Sequence: Synthetic oligonucleotide
  Target: LAMA2; (+) strand; PAM type: YTN; PAM sequence: TTT
acatgagtaagcctttgttt

SEQ ID NO: 368749 - DNA, 20 bp, Artificial Sequence
  Description of Artificial Sequence: Synthetic oligonucleotide
  Target: LAMA2; (+) strand; PAM type: YTN; PAM sequence: TTA
catgagtaagcctttgtttt

SEQ ID NO: 368750 - DNA, 20 bp, Artificial Sequence
  Description of Artificial Sequence: Synthetic oligonucleotide
  Target: LAMA2; (+) strand; PAM type: YTN; PAM sequence: CTT
tgttttctgttaagccattg

SEQ ID NO: 368751 - DNA, 20 bp, Artificial Sequence
  Description of Artificial Sequence: Synthetic oligonucleotide
  Target: LAMA2; (+) strand; PAM type: YTN; PAM sequence: TTT
gttttctgttaagccattga

SEQ ID NO: 368752 - DNA, 20 bp, Artificial Sequence
  Description of Artificial Sequence: Synthetic oligonucleotide
  Target: LAMA2; (+) strand; PAM type: YTN; PAM sequence: TTG
ttttctgttaagccattgag

SEQ ID NO: 368753 - DNA, 20 bp, Artificial Sequence
  Description of Artificial Sequence: Synthetic oligonucleotide
  Target: LAMA2; (+) strand; PAM type: YTN; PAM sequence: TTT
tctgttaagccattgagatt

SEQ ID NO: 368754 - DNA, 20 bp, Artificial Sequence
  Description of Artificial Sequence: Synthetic oligonucleotide
  Target: LAMA2; (+) strand; PAM type: YTN; PAM sequence: TTT
ctgttaagccattgagattt

SEQ ID NO: 368755 - DNA, 20 bp, Artificial Sequence
  Description of Artificial Sequence: Synthetic oligonucleotide
  Target: LAMA2; (+) strand; PAM type: YTN; PAM sequence: TTC
tgttaagccattgagatttt

SEQ ID NO: 368756 - DNA, 20 bp, Artificial Sequence
  Description of Artificial Sequence: Synthetic oligonucleotide
  Target: LAMA2; (+) strand; PAM type: YTN; PAM sequence: CTG
ttaagccattgagattttgg

SEQ ID NO: 368757 - DNA, 20 bp, Artificial Sequence
  Description of Artificial Sequence: Synthetic oligonucleotide
  Target: LAMA2; (+) strand; PAM type: YTN; PAM sequence: TTA
agccattgagattttggagt

SEQ ID NO: 368758 - DNA, 20 bp, Artificial Sequence
  Description of Artificial Sequence: Synthetic oligonucleotide
  Target: LAMA2; (+) strand; PAM type: YTN; PAM sequence: TTG
agattttggagttgttacca

SEQ ID NO: 368759 - DNA, 20 bp, Artificial Sequence
  Description of Artificial Sequence: Synthetic oligonucleotide
  Target: LAMA2; (+) strand; PAM type: YTN; PAM sequence: TTT
tggagttgttaccacagcat

SEQ ID NO: 368760 - DNA, 20 bp, Artificial Sequence
  Description of Artificial Sequence: Synthetic oligonucleotide
  Target: LAMA2; (+) strand; PAM type: YTN; PAM sequence: TTT
ggagttgttaccacagcata

SEQ ID NO: 368761 - DNA, 20 bp, Artificial Sequence
  Description of Artificial Sequence: Synthetic oligonucleotide
  Target: LAMA2; (+) strand; PAM type: YTN; PAM sequence: TTG
gagttgttaccacagcataa

SEQ ID NO: 368762 - DNA, 20 bp, Artificial Sequence
  Description of Artificial Sequence: Synthetic oligonucleotide
  Target: LAMA2; (+) strand; PAM type: YTN; PAM sequence: TTG
ttaccacagcataaccgagt

SEQ ID NO: 368763 - DNA, 20 bp, Artificial Sequence
  Description of Artificial Sequence: Synthetic oligonucleotide
  Target: LAMA2; (+) strand; PAM type: YTN; PAM sequence: TTA
ccacagcataaccgagtcca

SEQ ID NO: 368764 - DNA, 20 bp, Artificial Sequence
  Description of Artificial Sequence: Synthetic oligonucleotide
  Target: LAMA2; (+) strand; PAM type: YTN; PAM sequence: CTT
catcacgatataactcatga

SEQ ID NO: 368765 - DNA, 20 bp, Artificial Sequence
  Description of Artificial Sequence: Synthetic oligonucleotide
  Target: LAMA2; (+) strand; PAM type: YTN; PAM sequence: TTC
atcacgatataactcatgag

SEQ ID NO: 368766 - DNA, 20 bp, Artificial Sequence
  Description of Artificial Sequence: Synthetic oligonucleotide
  Target: LAMA2; (+) strand; PAM type: YTN; PAM sequence: CTC
atgagtattgcttgaaaata

SEQ ID NO: 368767 - DNA, 20 bp, Artificial Sequence
  Description of Artificial Sequence: Synthetic oligonucleotide
  Target: LAMA2; (+) strand; PAM type: YTN; PAM sequence: TTG
cttgaaaataaatacagaat

SEQ ID NO: 368768 - DNA, 20 bp, Artificial Sequence
  Description of Artificial Sequence: Synthetic oligonucleotide
  Target: LAMA2; (+) strand; PAM type: YTN; PAM sequence: CTT
gaaaataaatacagaatctt

SEQ ID NO: 368769 - DNA, 20 bp, Artificial Sequence
  Description of Artificial Sequence: Synthetic oligonucleotide
  Target: LAMA2; (+) strand; PAM type: YTN; PAM sequence: TTG
aaaataaatacagaatcttt

SEQ ID NO: 368770 - DNA, 20 bp, Artificial Sequence
  Description of Artificial Sequence: Synthetic oligonucleotide
  Target: LAMA2; (+) strand; PAM type: YTN; PAM sequence: CTT
ttcaaggcaagatattttta

SEQ ID NO: 368771 - DNA, 20 bp, Artificial Sequence
  Description of Artificial Sequence: Synthetic oligonucleotide
  Target: LAMA2; (+) strand; PAM type: YTN; PAM sequence: TTT
tcaaggcaagatatttttac

SEQ ID NO: 368772 - DNA, 20 bp, Artificial Sequence
  Description of Artificial Sequence: Synthetic oligonucleotide
  Target: LAMA2; (+) strand; PAM type: YTN; PAM sequence: TTT
caaggcaagatatttttaca

SEQ ID NO: 368773 - DNA, 20 bp, Artificial Sequence
  Description of Artificial Sequence: Synthetic oligonucleotide
  Target: LAMA2; (+) strand; PAM type: YTN; PAM sequence: TTC
aaggcaagatatttttacac

SEQ ID NO: 368774 - DNA, 20 bp, Artificial Sequence
  Description of Artificial Sequence: Synthetic oligonucleotide
  Target: LAMA2; (+) strand; PAM type: YTN; PAM sequence: TTT
ttacacaacttttagtgtaa

SEQ ID NO: 368775 - DNA, 20 bp, Artificial Sequence
  Description of Artificial Sequence: Synthetic oligonucleotide
  Target: LAMA2; (+) strand; PAM type: YTN; PAM sequence: TTT
tacacaacttttagtgtaaa

SEQ ID NO: 368776 - DNA, 20 bp, Artificial Sequence
  Description of Artificial Sequence: Synthetic oligonucleotide
  Target: LAMA2; (+) strand; PAM type: YTN; PAM sequence: TTT
acacaacttttagtgtaaat

SEQ ID NO: 368777 - DNA, 20 bp, Artificial Sequence
  Description of Artificial Sequence: Synthetic oligonucleotide
  Target: LAMA2; (+) strand; PAM type: YTN; PAM sequence: TTA
cacaacttttagtgtaaatt

SEQ ID NO: 368778 - DNA, 20 bp, Artificial Sequence
  Description of Artificial Sequence: Synthetic oligonucleotide
  Target: LAMA2; (+) strand; PAM type: YTN; PAM sequence: CTT
ttagtgtaaattttgcggtt

SEQ ID NO: 368779 - DNA, 20 bp, Artificial Sequence
  Description of Artificial Sequence: Synthetic oligonucleotide
  Target: LAMA2; (+) strand; PAM type: YTN; PAM sequence: TTT
tagtgtaaattttgcggttt

SEQ ID NO: 368780 - DNA, 20 bp, Artificial Sequence
  Description of Artificial Sequence: Synthetic oligonucleotide
  Target: LAMA2; (+) strand; PAM type: YTN; PAM sequence: TTT
agtgtaaattttgcggtttg

SEQ ID NO: 368781 - DNA, 20 bp, Artificial Sequence
  Description of Artificial Sequence: Synthetic oligonucleotide
  Target: LAMA2; (+) strand; PAM type: YTN; PAM sequence: TTA
gtgtaaattttgcggtttgg

SEQ ID NO: 368782 - DNA, 20 bp, Artificial Sequence
  Description of Artificial Sequence: Synthetic oligonucleotide
  Target: LAMA2; (+) strand; PAM type: YTN; PAM sequence: TTT
tgcggtttgggatcaaaaaa

SEQ ID NO: 368783 - DNA, 20 bp, Artificial Sequence
  Description of Artificial Sequence: Synthetic oligonucleotide
  Target: LAMA2; (+) strand; PAM type: YTN; PAM sequence: TTT
gcggtttgggatcaaaaaag

SEQ ID NO: 368784 - DNA, 20 bp, Artificial Sequence
  Description of Artificial Sequence: Synthetic oligonucleotide
  Target: LAMA2; (+) strand; PAM type: YTN; PAM sequence: TTG
cggtttgggatcaaaaaaga

SEQ ID NO: 368785 - DNA, 20 bp, Artificial Sequence
  Description of Artificial Sequence: Synthetic oligonucleotide
  Target: LAMA2; (+) strand; PAM type: YTN; PAM sequence: TTT
gggatcaaaaaagattatac

SEQ ID NO: 368786 - DNA, 20 bp, Artificial Sequence
  Description of Artificial Sequence: Synthetic oligonucleotide
  Target: LAMA2; (+) strand; PAM type: YTN; PAM sequence: TTG
ggatcaaaaaagattataca

SEQ ID NO: 368787 - DNA, 20 bp, Artificial Sequence
  Description of Artificial Sequence: Synthetic oligonucleotide
  Target: LAMA2; (+) strand; PAM type: YTN; PAM sequence: TTA
tacagaatttatataataaa

SEQ ID NO: 368788 - DNA, 20 bp, Artificial Sequence
  Description of Artificial Sequence: Synthetic oligonucleotide
  Target: LAMA2; (+) strand; PAM type: YTN; PAM sequence: TTT
atataataaataatctagaa

SEQ ID NO: 368789 - DNA, 20 bp, Artificial Sequence
  Description of Artificial Sequence: Synthetic oligonucleotide
  Target: LAMA2; (+) strand; PAM type: YTN; PAM sequence: TTA
tataataaataatctagaaa

SEQ ID NO: 368790 - DNA, 20 bp, Artificial Sequence
  Description of Artificial Sequence: Synthetic oligonucleotide
  Target: LAMA2; (+) strand; PAM type: YTN; PAM sequence: CTA
gaaaaattcctttgtaaaca

SEQ ID NO: 368791 - DNA, 20 bp, Artificial Sequence
  Description of Artificial Sequence: Synthetic oligonucleotide
  Target: LAMA2; (+) strand; PAM type: YTN; PAM sequence: TTC
ctttgtaaacaaaggagtct

SEQ ID NO: 368792 - DNA, 20 bp, Artificial Sequence
  Description of Artificial Sequence: Synthetic oligonucleotide
  Target: LAMA2; (+) strand; PAM type: YTN; PAM sequence: CTT
tgtaaacaaaggagtctttg

SEQ ID NO: 368793 - DNA, 20 bp, Artificial Sequence
  Description of Artificial Sequence: Synthetic oligonucleotide
  Target: LAMA2; (+) strand; PAM type: YTN; PAM sequence: TTT
gtaaacaaaggagtctttga

SEQ ID NO: 368794 - DNA, 20 bp, Artificial Sequence
  Description of Artificial Sequence: Synthetic oligonucleotide
  Target: LAMA2; (+) strand; PAM type: YTN; PAM sequence: TTG
taaacaaaggagtctttgat

SEQ ID NO: 368795 - DNA, 20 bp, Artificial Sequence
  Description of Artificial Sequence: Synthetic oligonucleotide
  Target: LAMA2; (+) strand; PAM type: YTN; PAM sequence: CTT
tgataatcatagaaatagta

SEQ ID NO: 368796 - DNA, 20 bp, Artificial Sequence
  Description of Artificial Sequence: Synthetic oligonucleotide
  Target: LAMA2; (+) strand; PAM type: YTN; PAM sequence: TTT
gataatcatagaaatagtat

SEQ ID NO: 368797 - DNA, 20 bp, Artificial Sequence
  Description of Artificial Sequence: Synthetic oligonucleotide
  Target: LAMA2; (+) strand; PAM type: YTN; PAM sequence: TTG
ataatcatagaaatagtatt

SEQ ID NO: 368798 - DNA, 20 bp, Artificial Sequence
  Description of Artificial Sequence: Synthetic oligonucleotide
  Target: LAMA2; (+) strand; PAM type: YTN; PAM sequence: TTG
ataggtacacagtatacctc

SEQ ID NO: 368799 - DNA, 20 bp, Artificial Sequence
  Description of Artificial Sequence: Synthetic oligonucleotide
  Target: LAMA2; (+) strand; PAM type: YTN; PAM sequence: CTC
tgccttctgaagttaatgat

SEQ ID NO: 368800 - DNA, 20 bp, Artificial Sequence
  Description of Artificial Sequence: Synthetic oligonucleotide
  Target: LAMA2; (+) strand; PAM type: YTN; PAM sequence: CTG
ccttctgaagttaatgattt

SEQ ID NO: 368801 - DNA, 20 bp, Artificial Sequence
  Description of Artificial Sequence: Synthetic oligonucleotide
  Target: LAMA2; (+) strand; PAM type: YTN; PAM sequence: CTT
ctgaagttaatgatttgggt

SEQ ID NO: 368802 - DNA, 20 bp, Artificial Sequence
  Description of Artificial Sequence: Synthetic oligonucleotide
  Target: LAMA2; (+) strand; PAM type: YTN; PAM sequence: TTC
tgaagttaatgatttgggta

SEQ ID NO: 368803 - DNA, 20 bp, Artificial Sequence
  Description of Artificial Sequence: Synthetic oligonucleotide
  Target: LAMA2; (+) strand; PAM type: YTN; PAM sequence: CTG
aagttaatgatttgggtaac

SEQ ID NO: 368804 - DNA, 20 bp, Artificial Sequence
  Description of Artificial Sequence: Synthetic oligonucleotide
  Target: LAMA2; (+) strand; PAM type: YTN; PAM sequence: TTA
atgatttgggtaactacatt

SEQ ID NO: 368805 - DNA, 20 bp, Artificial Sequence
  Description of Artificial Sequence: Synthetic oligonucleotide
  Target: LAMA2; (+) strand; PAM type: YTN; PAM sequence: TTT
gggtaactacattttgaaga

SEQ ID NO: 368806 - DNA, 20 bp, Artificial Sequence
  Description of Artificial Sequence: Synthetic oligonucleotide
  Target: LAMA2; (+) strand; PAM type: YTN; PAM sequence: TTG
ggtaactacattttgaagac

SEQ ID NO: 368807 - DNA, 20 bp, Artificial Sequence
  Description of Artificial Sequence: Synthetic oligonucleotide
  Target: LAMA2; (+) strand; PAM type: YTN; PAM sequence: CTA
cattttgaagacattttact

SEQ ID NO: 368808 - DNA, 20 bp, Artificial Sequence
  Description of Artificial Sequence: Synthetic oligonucleotide
  Target: LAMA2; (+) strand; PAM type: YTN; PAM sequence: TTT
tgaagacattttactgataa

SEQ ID NO: 368809 - DNA, 20 bp, Artificial Sequence
  Description of Artificial Sequence: Synthetic oligonucleotide
  Target: LAMA2; (+) strand; PAM type: YTN; PAM sequence: TTT
gaagacattttactgataac

SEQ ID NO: 368810 - DNA, 20 bp, Artificial Sequence
  Description of Artificial Sequence: Synthetic oligonucleotide
  Target: LAMA2; (+) strand; PAM type: YTN; PAM sequence: TTG
aagacattttactgataaca

SEQ ID NO: 368811 - DNA, 20 bp, Artificial Sequence
  Description of Artificial Sequence: Synthetic oligonucleotide
  Target: LAMA2; (+) strand; PAM type: YTN; PAM sequence: TTT
tactgataacactaggactt

SEQ ID NO: 368812 - DNA, 20 bp, Artificial Sequence
  Description of Artificial Sequence: Synthetic oligonucleotide
  Target: LAMA2; (+) strand; PAM type: YTN; PAM sequence: TTT
actgataacactaggactta

SEQ ID NO: 368813 - DNA, 20 bp, Artificial Sequence
  Description of Artificial Sequence: Synthetic oligonucleotide
  Target: LAMA2; (+) strand; PAM type: YTN; PAM sequence: TTA
ctgataacactaggacttaa

SEQ ID NO: 368814 - DNA, 20 bp, Artificial Sequence
  Description of Artificial Sequence: Synthetic oligonucleotide
  Target: LAMA2; (+) strand; PAM type: YTN; PAM sequence: CTG
ataacactaggacttaaaaa

SEQ ID NO: 368815 - DNA, 20 bp, Artificial Sequence
  Description of Artificial Sequence: Synthetic oligonucleotide
  Target: LAMA2; (+) strand; PAM type: YTN; PAM sequence: CTA
ggacttaaaaagatttttgc

SEQ ID NO: 368816 - DNA, 20 bp, Artificial Sequence
  Description of Artificial Sequence: Synthetic oligonucleotide
  Target: LAMA2; (+) strand; PAM type: YTN; PAM sequence: CTT
aaaaagatttttgcagctca

SEQ ID NO: 368817 - DNA, 20 bp, Artificial Sequence
  Description of Artificial Sequence: Synthetic oligonucleotide
  Target: LAMA2; (+) strand; PAM type: YTN; PAM sequence: TTA
aaaagatttttgcagctcac

SEQ ID NO: 368818 - DNA, 20 bp, Artificial Sequence
  Description of Artificial Sequence: Synthetic oligonucleotide
  Target: LAMA2; (+) strand; PAM type: YTN; PAM sequence: TTT
ttgcagctcacttggcatcc

SEQ ID NO: 368819 - DNA, 20 bp, Artificial Sequence
  Description of Artificial Sequence: Synthetic oligonucleotide
  Target: LAMA2; (+) strand; PAM type: YTN; PAM sequence: TTT
tgcagctcacttggcatccg

SEQ ID NO: 368820 - DNA, 20 bp, Artificial Sequence
  Description of Artificial Sequence: Synthetic oligonucleotide
  Target: LAMA2; (+) strand; PAM type: YTN; PAM sequence: TTT
gcagctcacttggcatccgg

SEQ ID NO: 368821 - DNA, 20 bp, Artificial Sequence
  Description of Artificial Sequence: Synthetic oligonucleotide
  Target: LAMA2; (+) strand; PAM type: YTN; PAM sequence: TTG
cagctcacttggcatccggc

SEQ ID NO: 368822 - DNA, 20 bp, Artificial Sequence
  Description of Artificial Sequence: Synthetic oligonucleotide
  Target: LAMA2; (+) strand; PAM type: YTN; PAM sequence: CTC
acttggcatccggccattgg

SEQ ID NO: 368823 - DNA, 20 bp, Artificial Sequence
  Description of Artificial Sequence: Synthetic oligonucleotide
  Target: LAMA2; (+) strand; PAM type: YTN; PAM sequence: CTT
ggcatccggccattggtaag

SEQ ID NO: 368824 - DNA, 20 bp, Artificial Sequence
  Description of Artificial Sequence: Synthetic oligonucleotide
  Target: LAMA2; (+) strand; PAM type: YTN; PAM sequence: TTG
gcatccggccattggtaaga

SEQ ID NO: 368825 - DNA, 20 bp, Artificial Sequence
  Description of Artificial Sequence: Synthetic oligonucleotide
  Target: LAMA2; (+) strand; PAM type: YTN; PAM sequence: TTG
gtaagaggtgcagccaacat

SEQ ID NO: 368826 - DNA, 20 bp, Artificial Sequence
  Description of Artificial Sequence: Synthetic oligonucleotide
  Target: LAMA2; (+) strand; PAM type: YTN; PAM sequence: TTT
taccctacgtttccttccca

SEQ ID NO: 368827 - DNA, 20 bp, Artificial Sequence
  Description of Artificial Sequence: Synthetic oligonucleotide
  Target: LAMA2; (+) strand; PAM type: YTN; PAM sequence: TTT
accctacgtttccttcccat

SEQ ID NO: 368828 - DNA, 20 bp, Artificial Sequence
  Description of Artificial Sequence: Synthetic oligonucleotide
  Target: LAMA2; (+) strand; PAM type: YTN; PAM sequence: TTA
ccctacgtttccttcccatt

SEQ ID NO: 368829 - DNA, 20 bp, Artificial Sequence
  Description of Artificial Sequence: Synthetic oligonucleotide
  Target: LAMA2; (+) strand; PAM type: YTN; PAM sequence: CTA
cgtttccttcccattatctt

SEQ ID NO: 368830 - DNA, 20 bp, Artificial Sequence
  Description of Artificial Sequence: Synthetic oligonucleotide
  Target: LAMA2; (+) strand; PAM type: YTN; PAM sequence: TTT
ccttcccattatctttgact

SEQ ID NO: 368831 - DNA, 20 bp, Artificial Sequence
  Description of Artificial Sequence: Synthetic oligonucleotide
  Target: LAMA2; (+) strand; PAM type: YTN; PAM sequence: TTC
cttcccattatctttgacta

SEQ ID NO: 368832 - DNA, 20 bp, Artificial Sequence
  Description of Artificial Sequence: Synthetic oligonucleotide
  Target: LAMA2; (+) strand; PAM type: YTN; PAM sequence: CTT
cccattatctttgactacct

SEQ ID NO: 368833 - DNA, 20 bp, Artificial Sequence
  Description of Artificial Sequence: Synthetic oligonucleotide
  Target: LAMA2; (+) strand; PAM type: YTN; PAM sequence: TTC
ccattatctttgactacctc

SEQ ID NO: 368834 - DNA, 20 bp, Artificial Sequence
  Description of Artificial Sequence: Synthetic oligonucleotide
  Target: LAMA2; (+) strand; PAM type: YTN; PAM sequence: TTA
tctttgactacctcccaatg

SEQ ID NO: 368835 - DNA, 20 bp, Artificial Sequence
  Description of Artificial Sequence: Synthetic oligonucleotide
  Target: LAMA2; (+) strand; PAM type: YTN; PAM sequence: CTT
tgactacctcccaatgctat

SEQ ID NO: 368836 - DNA, 20 bp, Artificial Sequence
  Description of Artificial Sequence: Synthetic oligonucleotide
  Target: LAMA2; (+) strand; PAM type: YTN; PAM sequence: TTT
gactacctcccaatgctatt

SEQ ID NO: 368837 - DNA, 20 bp, Artificial Sequence
  Description of Artificial Sequence: Synthetic oligonucleotide
  Target: LAMA2; (+) strand; PAM type: YTN; PAM sequence: TTG
actacctcccaatgctattc

SEQ ID NO: 368838 - DNA, 20 bp, Artificial Sequence
  Description of Artificial Sequence: Synthetic oligonucleotide
  Target: LAMA2; (+) strand; PAM type: YTN; PAM sequence: CTA
cctcccaatgctattccata

SEQ ID NO: 368839 - DNA, 20 bp, Artificial Sequence
  Description of Artificial Sequence: Synthetic oligonucleotide
  Target: LAMA2; (+) strand; PAM type: YTN; PAM sequence: CTC
ccaatgctattccataagtg

SEQ ID NO: 368840 - DNA, 20 bp, Artificial Sequence
  Description of Artificial Sequence: Synthetic oligonucleotide
  Target: LAMA2; (+) strand; PAM type: YTN; PAM sequence: CTA
ttccataagtgttggattcg

SEQ ID NO: 368841 - DNA, 20 bp, Artificial Sequence
  Description of Artificial Sequence: Synthetic oligonucleotide
  Target: LAMA2; (+) strand; PAM type: YTN; PAM sequence: TTC
cataagtgttggattcgttc

SEQ ID NO: 368842 - DNA, 20 bp, Artificial Sequence
  Description of Artificial Sequence: Synthetic oligonucleotide
  Target: LAMA2; (+) strand; PAM type: YTN; PAM sequence: TTG
gattcgttcagtctgcaaat

SEQ ID NO: 368843 - DNA, 20 bp, Artificial Sequence
  Description of Artificial Sequence: Synthetic oligonucleotide
  Target: LAMA2; (+) strand; PAM type: YTN; PAM sequence: TTC
gttcagtctgcaaatattta

SEQ ID NO: 368844 - DNA, 20 bp, Artificial Sequence
  Description of Artificial Sequence: Synthetic oligonucleotide
  Target: LAMA2; (+) strand; PAM type: YTN; PAM sequence: TTC
agtctgcaaatatttactga

SEQ ID NO: 368845 - DNA, 20 bp, Artificial Sequence
  Description of Artificial Sequence: Synthetic oligonucleotide
  Target: LAMA2; (+) strand; PAM type: YTN; PAM sequence: CTG
caaatatttactgagcacct

SEQ ID NO: 368846 - DNA, 20 bp, Artificial Sequence
  Description of Artificial Sequence: Synthetic oligonucleotide
  Target: LAMA2; (+) strand; PAM type: YTN; PAM sequence: TTT
actgagcaccttccatgatt

SEQ ID NO: 368847 - DNA, 20 bp, Artificial Sequence
  Description of Artificial Sequence: Synthetic oligonucleotide
  Target: LAMA2; (+) strand; PAM type: YTN; PAM sequence: TTA
ctgagcaccttccatgatta

SEQ ID NO: 368848 - DNA, 20 bp, Artificial Sequence
  Description of Artificial Sequence: Synthetic oligonucleotide
  Target: LAMA2; (+) strand; PAM type: YTN; PAM sequence: CTG
agcaccttccatgattatct

SEQ ID NO: 368849 - DNA, 20 bp, Artificial Sequence
  Description of Artificial Sequence: Synthetic oligonucleotide
  Target: LAMA2; (+) strand; PAM type: YTN; PAM sequence: CTT
ccatgattatctctgtaaat

SEQ ID NO: 368850 - DNA, 20 bp, Artificial Sequence
  Description of Artificial Sequence: Synthetic oligonucleotide
  Target: LAMA2; (+) strand; PAM type: YTN; PAM sequence: TTC
catgattatctctgtaaatc

SEQ ID NO: 368851 - DNA, 20 bp, Artificial Sequence
  Description of Artificial Sequence: Synthetic oligonucleotide
  Target: LAMA2; (+) strand; PAM type: YTN; PAM sequence: TTA
tctctgtaaatctcagttcc

SEQ ID NO: 368852 - DNA, 20 bp, Artificial Sequence
  Description of Artificial Sequence: Synthetic oligonucleotide
  Target: LAMA2; (+) strand; PAM type: YTN; PAM sequence: CTC
tgtaaatctcagttcctctt

SEQ ID NO: 368853 - DNA, 20 bp, Artificial Sequence
  Description of Artificial Sequence: Synthetic oligonucleotide
  Target: LAMA2; (+) strand; PAM type: YTN; PAM sequence: CTG
taaatctcagttcctcttgt

SEQ ID NO: 368854 - DNA, 20 bp, Artificial Sequence
  Description of Artificial Sequence: Synthetic oligonucleotide
  Target: LAMA2; (+) strand; PAM type: YTN; PAM sequence: CTC
agttcctcttgtatacaatg

SEQ ID NO: 368855 - DNA, 20 bp, Artificial Sequence
  Description of Artificial Sequence: Synthetic oligonucleotide
  Target: LAMA2; (+) strand; PAM type: YTN; PAM sequence: TTC
ctcttgtatacaatggcaga

SEQ ID NO: 368856 - DNA, 20 bp, Artificial Sequence
  Description of Artificial Sequence: Synthetic oligonucleotide
  Target: LAMA2; (+) strand; PAM type: YTN; PAM sequence: CTC
ttgtatacaatggcagaaac

SEQ ID NO: 368857 - DNA, 20 bp, Artificial Sequence
  Description of Artificial Sequence: Synthetic oligonucleotide
  Target: LAMA2; (+) strand; PAM type: YTN; PAM sequence: CTT
gtatacaatggcagaaacaa

SEQ ID NO: 368858 - DNA, 20 bp, Artificial Sequence
  Description of Artificial Sequence: Synthetic oligonucleotide
  Target: LAMA2; (+) strand; PAM type: YTN; PAM sequence: TTG
tatacaatggcagaaacaat

SEQ ID NO: 368859 - DNA, 20 bp, Artificial Sequence
  Description of Artificial Sequence: Synthetic oligonucleotide
  Target: LAMA2; (+) strand; PAM type: YTN; PAM sequence: CTA
aatttcaattggcaattaag

SEQ ID NO: 368860 - DNA, 20 bp, Artificial Sequence
  Description of Artificial Sequence: Synthetic oligonucleotide
  Target: LAMA2; (+) strand; PAM type: YTN; PAM sequence: TTT
caattggcaattaagtgaaa

SEQ ID NO: 368861 - DNA, 20 bp, Artificial Sequence
  Description of Artificial Sequence: Synthetic oligonucleotide
  Target: LAMA2; (+) strand; PAM type: YTN; PAM sequence: TTC
aattggcaattaagtgaaaa

SEQ ID NO: 368862 - DNA, 20 bp, Artificial Sequence
  Description of Artificial Sequence: Synthetic oligonucleotide
  Target: LAMA2; (+) strand; PAM type: YTN; PAM sequence: TTG
gcaattaagtgaaaacataa

SEQ ID NO: 368863 - DNA, 20 bp, Artificial Sequence
  Description of Artificial Sequence: Synthetic oligonucleotide
  Target: LAMA2; (+) strand; PAM type: YTN; PAM sequence: TTA
agtgaaaacataatgtatgt

SEQ ID NO: 368864 - DNA, 20 bp, Artificial Sequence
  Description of Artificial Sequence: Synthetic oligonucleotide
  Target: LAMA2; (+) strand; PAM type: YTN; PAM sequence: TTA
agcacctgaaatagtatcta

SEQ ID NO: 368865 - DNA, 20 bp, Artificial Sequence
  Description of Artificial Sequence: Synthetic oligonucleotide
  Target: LAMA2; (+) strand; PAM type: YTN; PAM sequence: CTG
aaatagtatctaacatatgt

SEQ ID NO: 368866 - DNA, 20 bp, Artificial Sequence
  Description of Artificial Sequence: Synthetic oligonucleotide
  Target: LAMA2; (+) strand; PAM type: YTN; PAM sequence: CTA
acatatgttgggaggcaatg

SEQ ID NO: 368867 - DNA, 20 bp, Artificial Sequence
  Description of Artificial Sequence: Synthetic oligonucleotide
  Target: LAMA2; (+) strand; PAM type: YTN; PAM sequence: TTG
ggaggcaatgcagggtaaca

SEQ ID NO: 368868 - DNA, 20 bp, Artificial Sequence
  Description of Artificial Sequence: Synthetic oligonucleotide
  Target: LAMA2; (+) strand; PAM type: YTN; PAM sequence: CTT
tggttttggagtcatgcttg

SEQ ID NO: 368869 - DNA, 20 bp, Artificial Sequence
  Description of Artificial Sequence: Synthetic oligonucleotide
  Target: LAMA2; (+) strand; PAM type: YTN; PAM sequence: TTT
ggttttggagtcatgcttgg

SEQ ID NO: 368870 - DNA, 20 bp, Artificial Sequence
  Description of Artificial Sequence: Synthetic oligonucleotide
  Target: LAMA2; (+) strand; PAM type: YTN; PAM sequence: TTG
gttttggagtcatgcttggg

SEQ ID NO: 368871 - DNA, 20 bp, Artificial Sequence
  Description of Artificial Sequence: Synthetic oligonucleotide
  Target: LAMA2; (+) strand; PAM type: YTN; PAM sequence: TTT
tggagtcatgcttgggtttg

SEQ ID NO: 368872 - DNA, 20 bp, Artificial Sequence
  Description of Artificial Sequence: Synthetic oligonucleotide
  Target: LAMA2; (+) strand; PAM type: YTN; PAM sequence: TTT
ggagtcatgcttgggtttga

SEQ ID NO: 368873 - DNA, 20 bp, Artificial Sequence
  Description of Artificial Sequence: Synthetic oligonucleotide
  Target: LAMA2; (+) strand; PAM type: YTN; PAM sequence: TTG
gagtcatgcttgggtttgaa

SEQ ID NO: 368874 - DNA, 20 bp, Artificial Sequence
  Description of Artificial Sequence: Synthetic oligonucleotide
  Target: LAMA2; (+) strand; PAM type: YTN; PAM sequence: CTT
gggtttgaatctatgctgca

SEQ ID NO: 368875 - DNA, 20 bp, Artificial Sequence
  Description of Artificial Sequence: Synthetic oligonucleotide
  Target: LAMA2; (+) strand; PAM type: YTN; PAM sequence: TTG
ggtttgaatctatgctgcac

SEQ ID NO: 368876 - DNA, 20 bp, Artificial Sequence
  Description of Artificial Sequence: Synthetic oligonucleotide
  Target: LAMA2; (+) strand; PAM type: YTN; PAM sequence: TTT
gaatctatgctgcacccttt

SEQ ID NO: 368877 - DNA, 20 bp, Artificial Sequence
  Description of Artificial Sequence: Synthetic oligonucleotide
  Target: LAMA2; (+) strand; PAM type: YTN; PAM sequence: TTG
aatctatgctgcaccctttg

SEQ ID NO: 368878 - DNA, 20 bp, Artificial Sequence
  Description of Artificial Sequence: Synthetic oligonucleotide
  Target: LAMA2; (+) strand; PAM type: YTN; PAM sequence: CTA
tgctgcaccctttgctaatg

SEQ ID NO: 368879 - DNA, 20 bp, Artificial Sequence
  Description of Artificial Sequence: Synthetic oligonucleotide
  Target: LAMA2; (+) strand; PAM type: YTN; PAM sequence: CTG
caccctttgctaatggtatt

SEQ ID NO: 368880 - DNA, 20 bp, Artificial Sequence
  Description of Artificial Sequence: Synthetic oligonucleotide
  Target: LAMA2; (+) strand; PAM type: YTN; PAM sequence: CTT
tgctaatggtattatgttgg

SEQ ID NO: 368881 - DNA, 20 bp, Artificial Sequence
  Description of Artificial Sequence: Synthetic oligonucleotide
  Target: LAMA2; (+) strand; PAM type: YTN; PAM sequence: TTT
gctaatggtattatgttgga

SEQ ID NO: 368882 - DNA, 20 bp, Artificial Sequence
  Description of Artificial Sequence: Synthetic oligonucleotide
  Target: LAMA2; (+) strand; PAM type: YTN; PAM sequence: TTG
ctaatggtattatgttggac

SEQ ID NO: 368883 - DNA, 20 bp, Artificial Sequence
  Description of Artificial Sequence: Synthetic oligonucleotide
  Target: LAMA2; (+) strand; PAM type: YTN; PAM sequence: CTA
atggtattatgttggacaag

SEQ ID NO: 368884 - DNA, 20 bp, Artificial Sequence
  Description of Artificial Sequence: Synthetic oligonucleotide
  Target: LAMA2; (+) strand; PAM type: YTN; PAM sequence: TTA
tgttggacaaggctctttac

SEQ ID NO: 368885 - DNA, 20 bp, Artificial Sequence
  Description of Artificial Sequence: Synthetic oligonucleotide
  Target: LAMA2; (+) strand; PAM type: YTN; PAM sequence: TTG
gacaaggctctttactcctc

SEQ ID NO: 368886 - DNA, 20 bp, Artificial Sequence
  Description of Artificial Sequence: Synthetic oligonucleotide
  Target: LAMA2; (+) strand; PAM type: YTN; PAM sequence: CTC
tttactcctctgagcctcag

SEQ ID NO: 368887 - DNA, 20 bp, Artificial Sequence
  Description of Artificial Sequence: Synthetic oligonucleotide
  Target: LAMA2; (+) strand; PAM type: YTN; PAM sequence: CTT
tactcctctgagcctcagat

SEQ ID NO: 368888 - DNA, 20 bp, Artificial Sequence
  Description of Artificial Sequence: Synthetic oligonucleotide
  Target: LAMA2; (+) strand; PAM type: YTN; PAM sequence: TTT
actcctctgagcctcagatt

SEQ ID NO: 368889 - DNA, 20 bp, Artificial Sequence
  Description of Artificial Sequence: Synthetic oligonucleotide
  Target: LAMA2; (+) strand; PAM type: YTN; PAM sequence: TTA
ctcctctgagcctcagattc

SEQ ID NO: 368890 - DNA, 20 bp, Artificial Sequence
  Description of Artificial Sequence: Synthetic oligonucleotide
  Target: LAMA2; (+) strand; PAM type: YTN; PAM sequence: CTC
ctctgagcctcagattcttc

SEQ ID NO: 368891 - DNA, 20 bp, Artificial Sequence
  Description of Artificial Sequence: Synthetic oligonucleotide
  Target: LAMA2; (+) strand; PAM type: YTN; PAM sequence: CTC
tgagcctcagattcttcatt

SEQ ID NO: 368892 - DNA, 20 bp, Artificial Sequence
  Description of Artificial Sequence: Synthetic oligonucleotide
  Target: LAMA2; (+) strand; PAM type: YTN; PAM sequence: CTG
agcctcagattcttcatttg

SEQ ID NO: 368893 - DNA, 20 bp, Artificial Sequence
  Description of Artificial Sequence: Synthetic oligonucleotide
  Target: LAMA2; (+) strand; PAM type: YTN; PAM sequence: CTC
agattcttcatttgtaaatg

SEQ ID NO: 368894 - DNA, 20 bp, Artificial Sequence
  Description of Artificial Sequence: Synthetic oligonucleotide
  Target: LAMA2; (+) strand; PAM type: YTN; PAM sequence: TTC
ttcatttgtaaatgtgaata

SEQ ID NO: 368895 - DNA, 20 bp, Artificial Sequence
  Description of Artificial Sequence: Synthetic oligonucleotide
  Target: LAMA2; (+) strand; PAM type: YTN; PAM sequence: CTT
catttgtaaatgtgaataga

SEQ ID NO: 368896 - DNA, 20 bp, Artificial Sequence
  Description of Artificial Sequence: Synthetic oligonucleotide
  Target: LAMA2; (+) strand; PAM type: YTN; PAM sequence: TTC
atttgtaaatgtgaatagac

SEQ ID NO: 368897 - DNA, 20 bp, Artificial Sequence
  Description of Artificial Sequence: Synthetic oligonucleotide
  Target: LAMA2; (+) strand; PAM type: YTN; PAM sequence: TTT
gtaaatgtgaatagacatgg

SEQ ID NO: 368898 - DNA, 20 bp, Artificial Sequence
  Description of Artificial Sequence: Synthetic oligonucleotide
  Target: LAMA2; (+) strand; PAM type: YTN; PAM sequence: TTG
taaatgtgaatagacatggg

SEQ ID NO: 368899 - DNA, 20 bp, Artificial Sequence
  Description of Artificial Sequence: Synthetic oligonucleotide
  Target: LAMA2; (+) strand; PAM type: YTN; PAM sequence: TTG
ttacattgtttattgatact

SEQ ID NO: 368900 - DNA, 20 bp, Artificial Sequence
  Description of Artificial Sequence: Synthetic oligonucleotide
  Target: LAMA2; (+) strand; PAM type: YTN; PAM sequence: TTA
cattgtttattgatacttaa

SEQ ID NO: 368901 - DNA, 20 bp, Artificial Sequence
  Description of Artificial Sequence: Synthetic oligonucleotide
  Target: LAMA2; (+) strand; PAM type: YTN; PAM sequence: TTG
tttattgatacttaaatgaa

SEQ ID NO: 368902 - DNA, 20 bp, Artificial Sequence
  Description of Artificial Sequence: Synthetic oligonucleotide
  Target: LAMA2; (+) strand; PAM type: YTN; PAM sequence: TTT
attgatacttaaatgaaatg

SEQ ID NO: 368903 - DNA, 20 bp, Artificial Sequence
  Description of Artificial Sequence: Synthetic oligonucleotide
  Target: LAMA2; (+) strand; PAM type: YTN; PAM sequence: TTA
ttgatacttaaatgaaatgt

SEQ ID NO: 368904 - DNA, 20 bp, Artificial Sequence
  Description of Artificial Sequence: Synthetic oligonucleotide
  Target: LAMA2; (+) strand; PAM type: YTN; PAM sequence: TTG
atacttaaatgaaatgtctt

SEQ ID NO: 368905 - DNA, 20 bp, Artificial Sequence
  Description of Artificial Sequence: Synthetic oligonucleotide
  Target: LAMA2; (+) strand; PAM type: YTN; PAM sequence: CTT
aaatgaaatgtctttccagc

SEQ ID NO: 368906 - DNA, 20 bp, Artificial Sequence
  Description of Artificial Sequence: Synthetic oligonucleotide
  Target: LAMA2; (+) strand; PAM type: YTN; PAM sequence: TTA
aatgaaatgtctttccagcc

SEQ ID NO: 368907 - DNA, 20 bp, Artificial Sequence
  Description of Artificial Sequence: Synthetic oligonucleotide
  Target: LAMA2; (+) strand; PAM type: YTN; PAM sequence: CTT
tccagcctgtatcatagtac

SEQ ID NO: 368908 - DNA, 20 bp, Artificial Sequence
  Description of Artificial Sequence: Synthetic oligonucleotide
  Target: LAMA2; (+) strand; PAM type: YTN; PAM sequence: TTT
ccagcctgtatcatagtaca

SEQ ID NO: 368909 - DNA, 20 bp, Artificial Sequence
  Description of Artificial Sequence: Synthetic oligonucleotide
  Target: LAMA2; (+) strand; PAM type: YTN; PAM sequence: TTC
cagcctgtatcatagtacac

SEQ ID NO: 368910 - DNA, 20 bp, Artificial Sequence
  Description of Artificial Sequence: Synthetic oligonucleotide
  Target: LAMA2; (+) strand; PAM type: YTN; PAM sequence: CTG
tatcatagtacacagaaaat

SEQ ID NO: 368911 - DNA, 20 bp, Artificial Sequence
  Description of Artificial Sequence: Synthetic oligonucleotide
  Target: LAMA2; (+) strand; PAM type: YTN; PAM sequence: CTA
ttaaaaagcagtcattctag

SEQ ID NO: 368912 - DNA, 20 bp, Artificial Sequence
  Description of Artificial Sequence: Synthetic oligonucleotide
  Target: LAMA2; (+) strand; PAM type: YTN; PAM sequence: TTA
aaaagcagtcattctaggct

SEQ ID NO: 368913 - DNA, 20 bp, Artificial Sequence
  Description of Artificial Sequence: Synthetic oligonucleotide
  Target: LAMA2; (+) strand; PAM type: YTN; PAM sequence: TTC
taggctaggctataaggata

SEQ ID NO: 368914 - DNA, 20 bp, Artificial Sequence
  Description of Artificial Sequence: Synthetic oligonucleotide
  Target: LAMA2; (+) strand; PAM type: YTN; PAM sequence: CTA
ggctaggctataaggataca

SEQ ID NO: 368915 - DNA, 20 bp, Artificial Sequence
  Description of Artificial Sequence: Synthetic oligonucleotide
  Target: LAMA2; (+) strand; PAM type: YTN; PAM sequence: CTA
ggctataaggatacaaaggt

SEQ ID NO: 368916 - DNA, 20 bp, Artificial Sequence
  Description of Artificial Sequence: Synthetic oligonucleotide
  Target: LAMA2; (+) strand; PAM type: YTN; PAM sequence: CTA
taaggatacaaaggtggaca

SEQ ID NO: 368917 - DNA, 20 bp, Artificial Sequence
  Description of Artificial Sequence: Synthetic oligonucleotide
  Target: LAMA2; (+) strand; PAM type: YTN; PAM sequence: TTC
agttcaaagaaggcattgta

SEQ ID NO: 368918 - DNA, 20 bp, Artificial Sequence
  Description of Artificial Sequence: Synthetic oligonucleotide
  Target: LAMA2; (+) strand; PAM type: YTN; PAM sequence: TTC
aaagaaggcattgtacagta

SEQ ID NO: 368919 - DNA, 20 bp, Artificial Sequence
  Description of Artificial Sequence: Synthetic oligonucleotide
  Target: LAMA2; (+) strand; PAM type: YTN; PAM sequence: TTG
tacagtagagaagacagata

SEQ ID NO: 368920 - DNA, 20 bp, Artificial Sequence
  Description of Artificial Sequence: Synthetic oligonucleotide
  Target: LAMA2; (+) strand; PAM type: YTN; PAM sequence: CTG
tacatttatgataatataaa

SEQ ID NO: 368921 - DNA, 20 bp, Artificial Sequence
  Description of Artificial Sequence: Synthetic oligonucleotide
  Target: LAMA2; (+) strand; PAM type: YTN; PAM sequence: TTT
atgataatataaatagtgca

SEQ ID NO: 368922 - DNA, 20 bp, Artificial Sequence
  Description of Artificial Sequence: Synthetic oligonucleotide
  Target: LAMA2; (+) strand; PAM type: YTN; PAM sequence: TTA
tgataatataaatagtgcag

SEQ ID NO: 368923 - DNA, 20 bp, Artificial Sequence
  Description of Artificial Sequence: Synthetic oligonucleotide
  Target: LAMA2; (+) strand; PAM type: YTN; PAM sequence: CTG
gtagaactaagaaggaagca

SEQ ID NO: 368924 - DNA, 20 bp, Artificial Sequence
  Description of Artificial Sequence: Synthetic oligonucleotide
  Target: LAMA2; (+) strand; PAM type: YTN; PAM sequence: CTA
agaaggaagcaatgaattct

SEQ ID NO: 368925 - DNA, 20 bp, Artificial Sequence
  Description of Artificial Sequence: Synthetic oligonucleotide
  Target: LAMA2; (+) strand; PAM type: YTN; PAM sequence: TTC
ttgtgttagcatttaataca

SEQ ID NO: 368926 - DNA, 20 bp, Artificial Sequence
  Description of Artificial Sequence: Synthetic oligonucleotide
  Target: LAMA2; (+) strand; PAM type: YTN; PAM sequence: CTT
gtgttagcatttaatacact

SEQ ID NO: 368927 - DNA, 20 bp, Artificial Sequence
  Description of Artificial Sequence: Synthetic oligonucleotide
  Target: LAMA2; (+) strand; PAM type: YTN; PAM sequence: TTG
tgttagcatttaatacactt

SEQ ID NO: 368928 - DNA, 20 bp, Artificial Sequence
  Description of Artificial Sequence: Synthetic oligonucleotide
  Target: LAMA2; (+) strand; PAM type: YTN; PAM sequence: TTA
gcatttaatacacttttaat

SEQ ID NO: 368929 - DNA, 20 bp, Artificial Sequence
  Description of Artificial Sequence: Synthetic oligonucleotide
  Target: LAMA2; (+) strand; PAM type: YTN; PAM sequence: TTT
aatacacttttaataaatag

SEQ ID NO: 368930 - DNA, 20 bp, Artificial Sequence
  Description of Artificial Sequence: Synthetic oligonucleotide
  Target: LAMA2; (+) strand; PAM type: YTN; PAM sequence: TTA
atacacttttaataaatagc

SEQ ID NO: 368931 - DNA, 20 bp, Artificial Sequence
  Description of Artificial Sequence: Synthetic oligonucleotide
  Target: LAMA2; (+) strand; PAM type: YTN; PAM sequence: CTT
ttaataaatagctgcaaaag

SEQ ID NO: 368932 - DNA, 20 bp, Artificial Sequence
  Description of Artificial Sequence: Synthetic oligonucleotide
  Target: LAMA2; (+) strand; PAM type: YTN; PAM sequence: TTT
taataaatagctgcaaaagt

SEQ ID NO: 368933 - DNA, 20 bp, Artificial Sequence
  Description of Artificial Sequence: Synthetic oligonucleotide
  Target: LAMA2; (+) strand; PAM type: YTN; PAM sequence: TTT
aataaatagctgcaaaagta

SEQ ID NO: 368934 - DNA, 20 bp, Artificial Sequence
  Description of Artificial Sequence: Synthetic oligonucleotide
  Target: LAMA2; (+) strand; PAM type: YTN; PAM sequence: TTA
ataaatagctgcaaaagtat

SEQ ID NO: 368935 - DNA, 20 bp, Artificial Sequence
  Description of Artificial Sequence: Synthetic oligonucleotide
  Target: LAMA2; (+) strand; PAM type: YTN; PAM sequence: CTG
caaaagtatcagtttctgtc

SEQ ID NO: 368936 - DNA, 20 bp, Artificial Sequence
  Description of Artificial Sequence: Synthetic oligonucleotide
  Target: LAMA2; (+) strand; PAM type: YTN; PAM sequence: TTT
ctgtcagttactgctcttac

SEQ ID NO: 368937 - DNA, 20 bp, Artificial Sequence
  Description of Artificial Sequence: Synthetic oligonucleotide
  Target: LAMA2; (+) strand; PAM type: YTN; PAM sequence: TTC
tgtcagttactgctcttact

SEQ ID NO: 368938 - DNA, 20 bp, Artificial Sequence
  Description of Artificial Sequence: Synthetic oligonucleotide
  Target: LAMA2; (+) strand; PAM type: YTN; PAM sequence: CTG
tcagttactgctcttactcg

SEQ ID NO: 368939 - DNA, 20 bp, Artificial Sequence
  Description of Artificial Sequence: Synthetic oligonucleotide
  Target: LAMA2; (+) strand; PAM type: YTN; PAM sequence: TTA
ctgctcttactcgatgtggg

SEQ ID NO: 368940 - DNA, 20 bp, Artificial Sequence
  Description of Artificial Sequence: Synthetic oligonucleotide
  Target: LAMA2; (+) strand; PAM type: YTN; PAM sequence: CTG
ctcttactcgatgtgggatt

SEQ ID NO: 368941 - DNA, 20 bp, Artificial Sequence
  Description of Artificial Sequence: Synthetic oligonucleotide
  Target: LAMA2; (+) strand; PAM type: YTN; PAM sequence: CTC
ttactcgatgtgggattgaa

SEQ ID NO: 368942 - DNA, 20 bp, Artificial Sequence
  Description of Artificial Sequence: Synthetic oligonucleotide
  Target: LAMA2; (+) strand; PAM type: YTN; PAM sequence: CTT
actcgatgtgggattgaaaa

SEQ ID NO: 368943 - DNA, 20 bp, Artificial Sequence
  Description of Artificial Sequence: Synthetic oligonucleotide
  Target: LAMA2; (+) strand; PAM type: YTN; PAM sequence: TTA
ctcgatgtgggattgaaaat

SEQ ID NO: 368944 - DNA, 20 bp, Artificial Sequence
  Description of Artificial Sequence: Synthetic oligonucleotide
  Target: LAMA2; (+) strand; PAM type: YTN; PAM sequence: CTC
gatgtgggattgaaaatgtt

SEQ ID NO: 368945 - DNA, 20 bp, Artificial Sequence
  Description of Artificial Sequence: Synthetic oligonucleotide
  Target: LAMA2; (+) strand; PAM type: YTN; PAM sequence: TTG
aaaatgtttaaagaaaatat

SEQ ID NO: 368946 - DNA, 20 bp, Artificial Sequence
  Description of Artificial Sequence: Synthetic oligonucleotide
  Target: LAMA2; (+) strand; PAM type: YTN; PAM sequence: TTT
aaagaaaatatcttgctata

SEQ ID NO: 368947 - DNA, 20 bp, Artificial Sequence
  Description of Artificial Sequence: Synthetic oligonucleotide
  Target: LAMA2; (+) strand; PAM type: YTN; PAM sequence: TTA
aagaaaatatcttgctatat

SEQ ID NO: 368948 - DNA, 20 bp, Artificial Sequence
  Description of Artificial Sequence: Synthetic oligonucleotide
  Target: LAMA2; (+) strand; PAM type: YTN; PAM sequence: CTT
gctatatatatataaaaaac

SEQ ID NO: 368949 - DNA, 20 bp, Artificial Sequence
  Description of Artificial Sequence: Synthetic oligonucleotide
  Target: LAMA2; (+) strand; PAM type: YTN; PAM sequence: TTG
ctatatatatataaaaaaca

SEQ ID NO: 368950 - DNA, 20 bp, Artificial Sequence
  Description of Artificial Sequence: Synthetic oligonucleotide
  Target: LAMA2; (+) strand; PAM type: YTN; PAM sequence: CTA
tatatatataaaaaacaaat

SEQ ID NO: 368951 - DNA, 20 bp, Artificial Sequence
  Description of Artificial Sequence: Synthetic oligonucleotide
  Target: LAMA2; (+) strand; PAM type: YTN; PAM sequence: TTA
tatagcatatatatatatat

SEQ ID NO: 368952 - DNA, 20 bp, Artificial Sequence
  Description of Artificial Sequence: Synthetic oligonucleotide
  Target: LAMA2; (+) strand; PAM type: YTN; PAM sequence: TTG
taacatcaagggtatttttg

SEQ ID NO: 368953 - DNA, 20 bp, Artificial Sequence
  Description of Artificial Sequence: Synthetic oligonucleotide
  Target: LAMA2; (+) strand; PAM type: YTN; PAM sequence: TTT
ttgttgttttaaagtgtcat

SEQ ID NO: 368954 - DNA, 20 bp, Artificial Sequence
  Description of Artificial Sequence: Synthetic oligonucleotide
  Target: LAMA2; (+) strand; PAM type: YTN; PAM sequence: TTT
tgttgttttaaagtgtcatg

SEQ ID NO: 368955 - DNA, 20 bp, Artificial Sequence
  Description of Artificial Sequence: Synthetic oligonucleotide
  Target: LAMA2; (+) strand; PAM type: YTN; PAM sequence: TTT
gttgttttaaagtgtcatgt

SEQ ID NO: 368956 - DNA, 20 bp, Artificial Sequence
  Description of Artificial Sequence: Synthetic oligonucleotide
  Target: LAMA2; (+) strand; PAM type: YTN; PAM sequence: TTG
ttgttttaaagtgtcatgtt

SEQ ID NO: 368957 - DNA, 20 bp, Artificial Sequence
  Description of Artificial Sequence: Synthetic oligonucleotide
  Target: LAMA2; (+) strand; PAM type: YTN; PAM sequence: TTG
ttttaaagtgtcatgttttg

SEQ ID NO: 368958 - DNA, 20 bp, Artificial Sequence
  Description of Artificial Sequence: Synthetic oligonucleotide
  Target: LAMA2; (+) strand; PAM type: YTN; PAM sequence: TTT
taaagtgtcatgttttgtgc

SEQ ID NO: 368959 - DNA, 20 bp, Artificial Sequence
  Description of Artificial Sequence: Synthetic oligonucleotide
  Target: LAMA2; (+) strand; PAM type: YTN; PAM sequence: TTT
aaagtgtcatgttttgtgct

SEQ ID NO: 368960 - DNA, 20 bp, Artificial Sequence
  Description of Artificial Sequence: Synthetic oligonucleotide
  Target: LAMA2; (+) strand; PAM type: YTN; PAM sequence: TTA
aagtgtcatgttttgtgctg

SEQ ID NO: 368961 - DNA, 20 bp, Artificial Sequence
  Description of Artificial Sequence: Synthetic oligonucleotide
  Target: LAMA2; (+) strand; PAM type: YTN; PAM sequence: TTT
tgtgctggttgttttagtgt

SEQ ID NO: 368962 - DNA, 20 bp, Artificial Sequence
  Description of Artificial Sequence: Synthetic oligonucleotide
  Target: LAMA2; (+) strand; PAM type: YTN; PAM sequence: TTT
gtgctggttgttttagtgta

SEQ ID NO: 368963 - DNA, 20 bp, Artificial Sequence
  Description of Artificial Sequence: Synthetic oligonucleotide
  Target: LAMA2; (+) strand; PAM type: YTN; PAM sequence: TTG
tgctggttgttttagtgtaa

SEQ ID NO: 368964 - DNA, 20 bp, Artificial Sequence
  Description of Artificial Sequence: Synthetic oligonucleotide
  Target: LAMA2; (+) strand; PAM type: YTN; PAM sequence: CTG
gttgttttagtgtaatatag

SEQ ID NO: 368965 - DNA, 20 bp, Artificial Sequence
  Description of Artificial Sequence: Synthetic oligonucleotide
  Target: LAMA2; (+) strand; PAM type: YTN; PAM sequence: TTG
ttttagtgtaatatagcata

SEQ ID NO: 368966 - DNA, 20 bp, Artificial Sequence
  Description of Artificial Sequence: Synthetic oligonucleotide
  Target: LAMA2; (+) strand; PAM type: YTN; PAM sequence: TTT
tagtgtaatatagcatatct

SEQ ID NO: 368967 - DNA, 20 bp, Artificial Sequence
  Description of Artificial Sequence: Synthetic oligonucleotide
  Target: LAMA2; (+) strand; PAM type: YTN; PAM sequence: TTT
agtgtaatatagcatatctt

SEQ ID NO: 368968 - DNA, 20 bp, Artificial Sequence
  Description of Artificial Sequence: Synthetic oligonucleotide
  Target: LAMA2; (+) strand; PAM type: YTN; PAM sequence: TTA
gtgtaatatagcatatctta

SEQ ID NO: 368969 - DNA, 20 bp, Artificial Sequence
  Description of Artificial Sequence: Synthetic oligonucleotide
  Target: LAMA2; (+) strand; PAM type: YTN; PAM sequence: CTT
actctggtgggaaatgtagt

SEQ ID NO: 368970 - DNA, 20 bp, Artificial Sequence
  Description of Artificial Sequence: Synthetic oligonucleotide
  Target: LAMA2; (+) strand; PAM type: YTN; PAM sequence: TTA
ctctggtgggaaatgtagta

SEQ ID NO: 368971 - DNA, 20 bp, Artificial Sequence
  Description of Artificial Sequence: Synthetic oligonucleotide
  Target: LAMA2; (+) strand; PAM type: YTN; PAM sequence: CTC
tggtgggaaatgtagtaaaa

SEQ ID NO: 368972 - DNA, 20 bp, Artificial Sequence
  Description of Artificial Sequence: Synthetic oligonucleotide
  Target: LAMA2; (+) strand; PAM type: YTN; PAM sequence: CTG
gtgggaaatgtagtaaaaca

SEQ ID NO: 368973 - DNA, 20 bp, Artificial Sequence
  Description of Artificial Sequence: Synthetic oligonucleotide
  Target: LAMA2; (+) strand; PAM type: YTN; PAM sequence: TTG
agaacaatctttaaggcagc

SEQ ID NO: 368974 - DNA, 20 bp, Artificial Sequence
  Description of Artificial Sequence: Synthetic oligonucleotide
  Target: LAMA2; (+) strand; PAM type: YTN; PAM sequence: CTT
taaggcagcaccaagacaac

SEQ ID NO: 368975 - DNA, 20 bp, Artificial Sequence
  Description of Artificial Sequence: Synthetic oligonucleotide
  Target: LAMA2; (+) strand; PAM type: YTN; PAM sequence: TTT
aaggcagcaccaagacaacg

SEQ ID NO: 368976 - DNA, 20 bp, Artificial Sequence
  Description of Artificial Sequence: Synthetic oligonucleotide
  Target: LAMA2; (+) strand; PAM type: YTN; PAM sequence: TTA
aggcagcaccaagacaacgt

SEQ ID NO: 368977 - DNA, 20 bp, Artificial Sequence
  Description of Artificial Sequence: Synthetic oligonucleotide
  Target: LAMA2; (+) strand; PAM type: YTN; PAM sequence: TTT
ctgaaatagttccaatatta

SEQ ID NO: 368978 - DNA, 20 bp, Artificial Sequence
  Description of Artificial Sequence: Synthetic oligonucleotide
  Target: LAMA2; (+) strand; PAM type: YTN; PAM sequence: TTC
tgaaatagttccaatattat

SEQ ID NO: 368979 - DNA, 20 bp, Artificial Sequence
  Description of Artificial Sequence: Synthetic oligonucleotide
  Target: LAMA2; (+) strand; PAM type: YTN; PAM sequence: CTG
aaatagttccaatattattc

SEQ ID NO: 368980 - DNA, 20 bp, Artificial Sequence
  Description of Artificial Sequence: Synthetic oligonucleotide
  Target: LAMA2; (+) strand; PAM type: YTN; PAM sequence: TTC
caatattattcatagtggct

SEQ ID NO: 368981 - DNA, 20 bp, Artificial Sequence
  Description of Artificial Sequence: Synthetic oligonucleotide
  Target: LAMA2; (+) strand; PAM type: YTN; PAM sequence: TTA
ttcatagtggcttgtataat

SEQ ID NO: 368982 - DNA, 20 bp, Artificial Sequence
  Description of Artificial Sequence: Synthetic oligonucleotide
  Target: LAMA2; (+) strand; PAM type: YTN; PAM sequence: TTC
atagtggcttgtataattat

SEQ ID NO: 368983 - DNA, 20 bp, Artificial Sequence
  Description of Artificial Sequence: Synthetic oligonucleotide
  Target: LAMA2; (+) strand; PAM type: YTN; PAM sequence: CTT
gtataattatgtcctctctc

SEQ ID NO: 368984 - DNA, 20 bp, Artificial Sequence
  Description of Artificial Sequence: Synthetic oligonucleotide
  Target: LAMA2; (+) strand; PAM type: YTN; PAM sequence: TTG
tataattatgtcctctctct

SEQ ID NO: 368985 - DNA, 20 bp, Artificial Sequence
  Description of Artificial Sequence: Synthetic oligonucleotide
  Target: LAMA2; (+) strand; PAM type: YTN; PAM sequence: TTA
tgtcctctctcttcatccat

SEQ ID NO: 368986 - DNA, 20 bp, Artificial Sequence
  Description of Artificial Sequence: Synthetic oligonucleotide
  Target: LAMA2; (+) strand; PAM type: YTN; PAM sequence: CTC
tctcttcatccatcatcttt

SEQ ID NO: 368987 - DNA, 20 bp, Artificial Sequence
  Description of Artificial Sequence: Synthetic oligonucleotide
  Target: LAMA2; (+) strand; PAM type: YTN; PAM sequence: CTC
tcttcatccatcatcttttc

SEQ ID NO: 368988 - DNA, 20 bp, Artificial Sequence
  Description of Artificial Sequence: Synthetic oligonucleotide
  Target: LAMA2; (+) strand; PAM type: YTN; PAM sequence: CTC
ttcatccatcatcttttctg

SEQ ID NO: 368989 - DNA, 20 bp, Artificial Sequence
  Description of Artificial Sequence: Synthetic oligonucleotide
  Target: LAMA2; (+) strand; PAM type: YTN; PAM sequence: CTT
catccatcatcttttctgta

SEQ ID NO: 368990 - DNA, 20 bp, Artificial Sequence
  Description of Artificial Sequence: Synthetic oligonucleotide
  Target: LAMA2; (+) strand; PAM type: YTN; PAM sequence: TTC
atccatcatcttttctgtat

SEQ ID NO: 368991 - DNA, 20 bp, Artificial Sequence
  Description of Artificial Sequence: Synthetic oligonucleotide
  Target: LAMA2; (+) strand; PAM type: YTN; PAM sequence: CTT
ttctgtattttcaaggcata

SEQ ID NO: 368992 - DNA, 20 bp, Artificial Sequence
  Description of Artificial Sequence: Synthetic oligonucleotide
  Target: LAMA2; (+) strand; PAM type: YTN; PAM sequence: TTT
tctgtattttcaaggcataa

SEQ ID NO: 368993 - DNA, 20 bp, Artificial Sequence
  Description of Artificial Sequence: Synthetic oligonucleotide
  Target: LAMA2; (+) strand; PAM type: YTN; PAM sequence: TTT
ctgtattttcaaggcataaa

SEQ ID NO: 368994 - DNA, 20 bp, Artificial Sequence
  Description of Artificial Sequence: Synthetic oligonucleotide
  Target: LAMA2; (+) strand; PAM type: YTN; PAM sequence: TTC
tgtattttcaaggcataaaa

SEQ ID NO: 368995 - DNA, 20 bp, Artificial Sequence
  Description of Artificial Sequence: Synthetic oligonucleotide
  Target: LAMA2; (+) strand; PAM type: YTN; PAM sequence: CTG
tattttcaaggcataaaaat

SEQ ID NO: 368996 - DNA, 20 bp, Artificial Sequence
  Description of Artificial Sequence: Synthetic oligonucleotide
  Target: LAMA2; (+) strand; PAM type: YTN; PAM sequence: TTT
tcaaggcataaaaataagag

SEQ ID NO: 368997 - DNA, 20 bp, Artificial Sequence
  Description of Artificial Sequence: Synthetic oligonucleotide
  Target: LAMA2; (+) strand; PAM type: YTN; PAM sequence: TTT
caaggcataaaaataagagg

SEQ ID NO: 368998 - DNA, 20 bp, Artificial Sequence
  Description of Artificial Sequence: Synthetic oligonucleotide
  Target: LAMA2; (+) strand; PAM type: YTN; PAM sequence: TTC
aaggcataaaaataagaggg

SEQ ID NO: 368999 - DNA, 20 bp, Artificial Sequence
  Description of Artificial Sequence: Synthetic oligonucleotide
  Target: LAMA2; (+) strand; PAM type: YTN; PAM sequence: CTA
aagcatttgacttagttgac

SEQ ID NO: 369000 - DNA, 20 bp, Artificial Sequence
  Description of Artificial Sequence: Synthetic oligonucleotide
  Target: LAMA2; (+) strand; PAM type: YTN; PAM sequence: TTT
gacttagttgacaattcttt

SEQ ID NO: 369001 - DNA, 20 bp, Artificial Sequence
  Description of Artificial Sequence: Synthetic oligonucleotide
  Target: LAMA2; (+) strand; PAM type: YTN; PAM sequence: TTG
acttagttgacaattctttg

SEQ ID NO: 369002 - DNA, 20 bp, Artificial Sequence
  Description of Artificial Sequence: Synthetic oligonucleotide
  Target: LAMA2; (+) strand; PAM type: YTN; PAM sequence: CTT
agttgacaattctttgatag

SEQ ID NO: 369003 - DNA, 20 bp, Artificial Sequence
  Description of Artificial Sequence: Synthetic oligonucleotide
  Target: LAMA2; (+) strand; PAM type: YTN; PAM sequence: TTA
gttgacaattctttgatagc

SEQ ID NO: 369004 - DNA, 20 bp, Artificial Sequence
  Description of Artificial Sequence: Synthetic oligonucleotide
  Target: LAMA2; (+) strand; PAM type: YTN; PAM sequence: TTG
acaattctttgatagctcat

SEQ ID NO: 369005 - DNA, 20 bp, Artificial Sequence
  Description of Artificial Sequence: Synthetic oligonucleotide
  Target: LAMA2; (+) strand; PAM type: YTN; PAM sequence: TTC
tttgatagctcatgcatctc

SEQ ID NO: 369006 - DNA, 20 bp, Artificial Sequence
  Description of Artificial Sequence: Synthetic oligonucleotide
  Target: LAMA2; (+) strand; PAM type: YTN; PAM sequence: CTT
tgatagctcatgcatctcta

SEQ ID NO: 369007 - DNA, 20 bp, Artificial Sequence
  Description of Artificial Sequence: Synthetic oligonucleotide
  Target: LAMA2; (+) strand; PAM type: YTN; PAM sequence: TTT
gatagctcatgcatctctaa

SEQ ID NO: 369008 - DNA, 20 bp, Artificial Sequence
  Description of Artificial Sequence: Synthetic oligonucleotide
  Target: LAMA2; (+) strand; PAM type: YTN; PAM sequence: TTG
atagctcatgcatctctaaa

SEQ ID NO: 369009 - DNA, 20 bp, Artificial Sequence
  Description of Artificial Sequence: Synthetic oligonucleotide
  Target: LAMA2; (+) strand; PAM type: YTN; PAM sequence: CTC
atgcatctctaaaatttagt

SEQ ID NO: 369010 - DNA, 20 bp, Artificial Sequence
  Description of Artificial Sequence: Synthetic oligonucleotide
  Target: LAMA2; (+) strand; PAM type: YTN; PAM sequence: CTC
taaaatttagtactatatta

SEQ ID NO: 369011 - DNA, 20 bp, Artificial Sequence
  Description of Artificial Sequence: Synthetic oligonucleotide
  Target: LAMA2; (+) strand; PAM type: YTN; PAM sequence: CTA
aaatttagtactatattatt

SEQ ID NO: 369012 - DNA, 20 bp, Artificial Sequence
  Description of Artificial Sequence: Synthetic oligonucleotide
  Target: LAMA2; (+) strand; PAM type: YTN; PAM sequence: TTT
agtactatattattgccaac

SEQ ID NO: 369013 - DNA, 20 bp, Artificial Sequence
  Description of Artificial Sequence: Synthetic oligonucleotide
  Target: LAMA2; (+) strand; PAM type: YTN; PAM sequence: TTA
gtactatattattgccaaca

SEQ ID NO: 369014 - DNA, 20 bp, Artificial Sequence
  Description of Artificial Sequence: Synthetic oligonucleotide
  Target: LAMA2; (+) strand; PAM type: YTN; PAM sequence: CTA
tattattgccaacattatgt

SEQ ID NO: 369015 - DNA, 20 bp, Artificial Sequence
  Description of Artificial Sequence: Synthetic oligonucleotide
  Target: LAMA2; (+) strand; PAM type: YTN; PAM sequence: TTA
ttgccaacattatgtattta

SEQ ID NO: 369016 - DNA, 20 bp, Artificial Sequence
  Description of Artificial Sequence: Synthetic oligonucleotide
  Target: LAMA2; (+) strand; PAM type: YTN; PAM sequence: TTG
ccaacattatgtatttaaat

SEQ ID NO: 369017 - DNA, 20 bp, Artificial Sequence
  Description of Artificial Sequence: Synthetic oligonucleotide
  Target: LAMA2; (+) strand; PAM type: YTN; PAM sequence: TTA
tgtatttaaatgaatgcagc

SEQ ID NO: 369018 - DNA, 20 bp, Artificial Sequence
  Description of Artificial Sequence: Synthetic oligonucleotide
  Target: LAMA2; (+) strand; PAM type: YTN; PAM sequence: TTT
aaatgaatgcagcttgatat

SEQ ID NO: 369019 - DNA, 20 bp, Artificial Sequence
  Description of Artificial Sequence: Synthetic oligonucleotide
  Target: LAMA2; (+) strand; PAM type: YTN; PAM sequence: TTA
aatgaatgcagcttgatatc

SEQ ID NO: 369020 - DNA, 20 bp, Artificial Sequence
  Description of Artificial Sequence: Synthetic oligonucleotide
  Target: LAMA2; (+) strand; PAM type: YTN; PAM sequence: CTT
gatatcaagagaatgaccat

SEQ ID NO: 369021 - DNA, 20 bp, Artificial Sequence
  Description of Artificial Sequence: Synthetic oligonucleotide
  Target: LAMA2; (+) strand; PAM type: YTN; PAM sequence: TTG
atatcaagagaatgaccata

SEQ ID NO: 369022 - DNA, 20 bp, Artificial Sequence
  Description of Artificial Sequence: Synthetic oligonucleotide
  Target: LAMA2; (+) strand; PAM type: YTN; PAM sequence: CTG
aaggggaaaaaaaaataaac

SEQ ID NO: 369023 - DNA, 20 bp, Artificial Sequence
  Description of Artificial Sequence: Synthetic oligonucleotide
  Target: LAMA2; (+) strand; PAM type: YTN; PAM sequence: CTG
cagccttcttcatgagtaac

SEQ ID NO: 369024 - DNA, 20 bp, Artificial Sequence
  Description of Artificial Sequence: Synthetic oligonucleotide
  Target: LAMA2; (+) strand; PAM type: YTN; PAM sequence: CTT
cttcatgagtaacacttgaa

SEQ ID NO: 369025 - DNA, 20 bp, Artificial Sequence
  Description of Artificial Sequence: Synthetic oligonucleotide
  Target: LAMA2; (+) strand; PAM type: YTN; PAM sequence: TTC
ttcatgagtaacacttgaaa

SEQ ID NO: 369026 - DNA, 20 bp, Artificial Sequence
  Description of Artificial Sequence: Synthetic oligonucleotide
  Target: LAMA2; (+) strand; PAM type: YTN; PAM sequence: CTT
catgagtaacacttgaaact

SEQ ID NO: 369027 - DNA, 20 bp, Artificial Sequence
  Description of Artificial Sequence: Synthetic oligonucleotide
  Target: LAMA2; (+) strand; PAM type: YTN; PAM sequence: TTC
atgagtaacacttgaaactg

SEQ ID NO: 369028 - DNA, 20 bp, Artificial Sequence
  Description of Artificial Sequence: Synthetic oligonucleotide
  Target: LAMA2; (+) strand; PAM type: YTN; PAM sequence: CTT
gaaactgttaaacacattaa

SEQ ID NO: 369029 - DNA, 20 bp, Artificial Sequence
  Description of Artificial Sequence: Synthetic oligonucleotide
  Target: LAMA2; (+) strand; PAM type: YTN; PAM sequence: TTG
aaactgttaaacacattaaa

SEQ ID NO: 369030 - DNA, 20 bp, Artificial Sequence
  Description of Artificial Sequence: Synthetic oligonucleotide
  Target: LAMA2; (+) strand; PAM type: YTN; PAM sequence: CTG
ttaaacacattaaaatccca

SEQ ID NO: 369031 - DNA, 20 bp, Artificial Sequence
  Description of Artificial Sequence: Synthetic oligonucleotide
  Target: LAMA2; (+) strand; PAM type: YTN; PAM sequence: TTA
aacacattaaaatcccattt

SEQ ID NO: 369032 - DNA, 20 bp, Artificial Sequence
  Description of Artificial Sequence: Synthetic oligonucleotide
  Target: LAMA2; (+) strand; PAM type: YTN; PAM sequence: TTA
aaatcccatttaacaaatag

SEQ ID NO: 369033 - DNA, 20 bp, Artificial Sequence
  Description of Artificial Sequence: Synthetic oligonucleotide
  Target: LAMA2; (+) strand; PAM type: YTN; PAM sequence: TTT
aacaaatagcagaacctaat

SEQ ID NO: 369034 - DNA, 20 bp, Artificial Sequence
  Description of Artificial Sequence: Synthetic oligonucleotide
  Target: LAMA2; (+) strand; PAM type: YTN; PAM sequence: TTA
acaaatagcagaacctaatg

SEQ ID NO: 369035 - DNA, 20 bp, Artificial Sequence
  Description of Artificial Sequence: Synthetic oligonucleotide
  Target: LAMA2; (+) strand; PAM type: YTN; PAM sequence: CTA
atgaacattgggattgctca

SEQ ID NO: 369036 - DNA, 20 bp, Artificial Sequence
  Description of Artificial Sequence: Synthetic oligonucleotide
  Target: LAMA2; (+) strand; PAM type: YTN; PAM sequence: TTG
ggattgctcagtgagtacta

SEQ ID NO: 369037 - DNA, 20 bp, Artificial Sequence
  Description of Artificial Sequence: Synthetic oligonucleotide
  Target: LAMA2; (+) strand; PAM type: YTN; PAM sequence: TTG
ctcagtgagtactaatgtgg

SEQ ID NO: 369038 - DNA, 20 bp, Artificial Sequence
  Description of Artificial Sequence: Synthetic oligonucleotide
  Target: LAMA2; (+) strand; PAM type: YTN; PAM sequence: CTC
agtgagtactaatgtggaat

SEQ ID NO: 369039 - DNA, 20 bp, Artificial Sequence
  Description of Artificial Sequence: Synthetic oligonucleotide
  Target: LAMA2; (+) strand; PAM type: YTN; PAM sequence: CTA
atgtggaatattactgggaa

SEQ ID NO: 369040 - DNA, 20 bp, Artificial Sequence
  Description of Artificial Sequence: Synthetic oligonucleotide
  Target: LAMA2; (+) strand; PAM type: YTN; PAM sequence: TTA
ctgggaaagatgtttgagtg

SEQ ID NO: 369041 - DNA, 20 bp, Artificial Sequence
  Description of Artificial Sequence: Synthetic oligonucleotide
  Target: LAMA2; (+) strand; PAM type: YTN; PAM sequence: CTG
ggaaagatgtttgagtgttg

SEQ ID NO: 369042 - DNA, 20 bp, Artificial Sequence
  Description of Artificial Sequence: Synthetic oligonucleotide
  Target: LAMA2; (+) strand; PAM type: YTN; PAM sequence: TTT
gagtgttgaagtttctcata

SEQ ID NO: 369043 - DNA, 20 bp, Artificial Sequence
  Description of Artificial Sequence: Synthetic oligonucleotide
  Target: LAMA2; (+) strand; PAM type: YTN; PAM sequence: TTG
agtgttgaagtttctcatag

SEQ ID NO: 369044 - DNA, 20 bp, Artificial Sequence
  Description of Artificial Sequence: Synthetic oligonucleotide
  Target: LAMA2; (+) strand; PAM type: YTN; PAM sequence: TTG
aagtttctcatagctcagaa

SEQ ID NO: 369045 - DNA, 20 bp, Artificial Sequence
  Description of Artificial Sequence: Synthetic oligonucleotide
  Target: LAMA2; (+) strand; PAM type: YTN; PAM sequence: TTT
ctcatagctcagaatggtta

SEQ ID NO: 369046 - DNA, 20 bp, Artificial Sequence
  Description of Artificial Sequence: Synthetic oligonucleotide
  Target: LAMA2; (+) strand; PAM type: YTN; PAM sequence: TTC
tcatagctcagaatggttac

SEQ ID NO: 369047 - DNA, 20 bp, Artificial Sequence
  Description of Artificial Sequence: Synthetic oligonucleotide
  Target: LAMA2; (+) strand; PAM type: YTN; PAM sequence: CTC
atagctcagaatggttacac

SEQ ID NO: 369048 - DNA, 20 bp, Artificial Sequence
  Description of Artificial Sequence: Synthetic oligonucleotide
  Target: LAMA2; (+) strand; PAM type: YTN; PAM sequence: CTC
agaatggttacacagattaa

SEQ ID NO: 369049 - DNA, 20 bp, Artificial Sequence
  Description of Artificial Sequence: Synthetic oligonucleotide
  Target: LAMA2; (+) strand; PAM type: YTN; PAM sequence: TTA
cacagattaaggagaggaat

SEQ ID NO: 369050 - DNA, 20 bp, Artificial Sequence
  Description of Artificial Sequence: Synthetic oligonucleotide
  Target: LAMA2; (+) strand; PAM type: YTN; PAM sequence: TTA
aggagaggaatgtctgttgt

SEQ ID NO: 369051 - DNA, 20 bp, Artificial Sequence
  Description of Artificial Sequence: Synthetic oligonucleotide
  Target: LAMA2; (+) strand; PAM type: YTN; PAM sequence: CTG
ttgttcaaaagacaaatgaa

SEQ ID NO: 369052 - DNA, 20 bp, Artificial Sequence
  Description of Artificial Sequence: Synthetic oligonucleotide
  Target: LAMA2; (+) strand; PAM type: YTN; PAM sequence: TTG
ttcaaaagacaaatgaaatt

SEQ ID NO: 369053 - DNA, 20 bp, Artificial Sequence
  Description of Artificial Sequence: Synthetic oligonucleotide
  Target: LAMA2; (+) strand; PAM type: YTN; PAM sequence: TTC
aaaagacaaatgaaatttgt

SEQ ID NO: 369054 - DNA, 20 bp, Artificial Sequence
  Description of Artificial Sequence: Synthetic oligonucleotide
  Target: LAMA2; (+) strand; PAM type: YTN; PAM sequence: TTT
gtcagttcactgaaaatatt

SEQ ID NO: 369055 - DNA, 20 bp, Artificial Sequence
  Description of Artificial Sequence: Synthetic oligonucleotide
  Target: LAMA2; (+) strand; PAM type: YTN; PAM sequence: TTG
tcagttcactgaaaatattt

SEQ ID NO: 369056 - DNA, 20 bp, Artificial Sequence
  Description of Artificial Sequence: Synthetic oligonucleotide
  Target: LAMA2; (+) strand; PAM type: YTN; PAM sequence: TTC
actgaaaatatttttgtttt

SEQ ID NO: 369057 - DNA, 20 bp, Artificial Sequence
  Description of Artificial Sequence: Synthetic oligonucleotide
  Target: LAMA2; (+) strand; PAM type: YTN; PAM sequence: CTG
aaaatatttttgtttttgta

SEQ ID NO: 369058 - DNA, 20 bp, Artificial Sequence
  Description of Artificial Sequence: Synthetic oligonucleotide
  Target: LAMA2; (+) strand; PAM type: YTN; PAM sequence: TTT
ttgtttttgtatctttttta

SEQ ID NO: 369059 - DNA, 20 bp, Artificial Sequence
  Description of Artificial Sequence: Synthetic oligonucleotide
  Target: LAMA2; (+) strand; PAM type: YTN; PAM sequence: TTT
tgtttttgtatcttttttaa

SEQ ID NO: 369060 - DNA, 20 bp, Artificial Sequence
  Description of Artificial Sequence: Synthetic oligonucleotide
  Target: LAMA2; (+) strand; PAM type: YTN; PAM sequence: TTT
gtttttgtatcttttttaaa

SEQ ID NO: 369061 - DNA, 20 bp, Artificial Sequence
  Description of Artificial Sequence: Synthetic oligonucleotide
  Target: LAMA2; (+) strand; PAM type: YTN; PAM sequence: TTG
tttttgtatcttttttaaaa

SEQ ID NO: 369062 - DNA, 20 bp, Artificial Sequence
  Description of Artificial Sequence: Synthetic oligonucleotide
  Target: LAMA2; (+) strand; PAM type: YTN; PAM sequence: TTT
ttgtatcttttttaaaactg

SEQ ID NO: 369063 - DNA, 20 bp, Artificial Sequence
  Description of Artificial Sequence: Synthetic oligonucleotide
  Target: LAMA2; (+) strand; PAM type: YTN; PAM sequence: TTT
tgtatcttttttaaaactgt

SEQ ID NO: 369064 - DNA, 20 bp, Artificial Sequence
  Description of Artificial Sequence: Synthetic oligonucleotide
  Target: LAMA2; (+) strand; PAM type: YTN; PAM sequence: TTT
gtatcttttttaaaactgtt

SEQ ID NO: 369065 - DNA, 20 bp, Artificial Sequence
  Description of Artificial Sequence: Synthetic oligonucleotide
  Target: LAMA2; (+) strand; PAM type: YTN; PAM sequence: TTG
tatcttttttaaaactgttt

SEQ ID NO: 369066 - DNA, 20 bp, Artificial Sequence
  Description of Artificial Sequence: Synthetic oligonucleotide
  Target: LAMA2; (+) strand; PAM type: YTN; PAM sequence: CTT
ttttaaaactgtttcttaaa

SEQ ID NO: 369067 - DNA, 20 bp, Artificial Sequence
  Description of Artificial Sequence: Synthetic oligonucleotide
  Target: LAMA2; (+) strand; PAM type: YTN; PAM sequence: TTT
tttaaaactgtttcttaaag

SEQ ID NO: 369068 - DNA, 20 bp, Artificial Sequence
  Description of Artificial Sequence: Synthetic oligonucleotide
  Target: LAMA2; (+) strand; PAM type: YTN; PAM sequence: TTT
ttaaaactgtttcttaaagt

SEQ ID NO: 369069 - DNA, 20 bp, Artificial Sequence
  Description of Artificial Sequence: Synthetic oligonucleotide
  Target: LAMA2; (+) strand; PAM type: YTN; PAM sequence: TTT
taaaactgtttcttaaagta

SEQ ID NO: 369070 - DNA, 20 bp, Artificial Sequence
  Description of Artificial Sequence: Synthetic oligonucleotide
  Target: LAMA2; (+) strand; PAM type: YTN; PAM sequence: TTT
aaaactgtttcttaaagtag

SEQ ID NO: 369071 - DNA, 20 bp, Artificial Sequence
  Description of Artificial Sequence: Synthetic oligonucleotide
  Target: LAMA2; (+) strand; PAM type: YTN; PAM sequence: TTA
aaactgtttcttaaagtagt

SEQ ID NO: 369072 - DNA, 20 bp, Artificial Sequence
  Description of Artificial Sequence: Synthetic oligonucleotide
  Target: LAMA2; (+) strand; PAM type: YTN; PAM sequence: CTG
tttcttaaagtagtcaactg

SEQ ID NO: 369073 - DNA, 20 bp, Artificial Sequence
  Description of Artificial Sequence: Synthetic oligonucleotide
  Target: LAMA2; (+) strand; PAM type: YTN; PAM sequence: TTT
cttaaagtagtcaactgctc

SEQ ID NO: 369074 - DNA, 20 bp, Artificial Sequence
  Description of Artificial Sequence: Synthetic oligonucleotide
  Target: LAMA2; (+) strand; PAM type: YTN; PAM sequence: TTC
ttaaagtagtcaactgctca

SEQ ID NO: 369075 - DNA, 20 bp, Artificial Sequence
  Description of Artificial Sequence: Synthetic oligonucleotide
  Target: LAMA2; (+) strand; PAM type: YTN; PAM sequence: CTT
aaagtagtcaactgctcatt

SEQ ID NO: 369076 - DNA, 20 bp, Artificial Sequence
  Description of Artificial Sequence: Synthetic oligonucleotide
  Target: LAMA2; (+) strand; PAM type: YTN; PAM sequence: TTA
aagtagtcaactgctcattc

SEQ ID NO: 369077 - DNA, 20 bp, Artificial Sequence
  Description of Artificial Sequence: Synthetic oligonucleotide
  Target: LAMA2; (+) strand; PAM type: YTN; PAM sequence: CTG
ctcattcttctattttgaaa

SEQ ID NO: 369078 - DNA, 20 bp, Artificial Sequence
  Description of Artificial Sequence: Synthetic oligonucleotide
  Target: LAMA2; (+) strand; PAM type: YTN; PAM sequence: CTC
attcttctattttgaaattt

SEQ ID NO: 369079 - DNA, 20 bp, Artificial Sequence
  Description of Artificial Sequence: Synthetic oligonucleotide
  Target: LAMA2; (+) strand; PAM type: YTN; PAM sequence: TTC
ttctattttgaaatttccag

SEQ ID NO: 369080 - DNA, 20 bp, Artificial Sequence
  Description of Artificial Sequence: Synthetic oligonucleotide
  Target: LAMA2; (+) strand; PAM type: YTN; PAM sequence: CTT
ctattttgaaatttccagaa

SEQ ID NO: 369081 - DNA, 20 bp, Artificial Sequence
  Description of Artificial Sequence: Synthetic oligonucleotide
  Target: LAMA2; (+) strand; PAM type: YTN; PAM sequence: TTC
tattttgaaatttccagaac

SEQ ID NO: 369082 - DNA, 20 bp, Artificial Sequence
  Description of Artificial Sequence: Synthetic oligonucleotide
  Target: LAMA2; (+) strand; PAM type: YTN; PAM sequence: CTA
ttttgaaatttccagaactc

SEQ ID NO: 369083 - DNA, 20 bp, Artificial Sequence
  Description of Artificial Sequence: Synthetic oligonucleotide
  Target: LAMA2; (+) strand; PAM type: YTN; PAM sequence: TTT
tgaaatttccagaactcttt

SEQ ID NO: 369084 - DNA, 20 bp, Artificial Sequence
  Description of Artificial Sequence: Synthetic oligonucleotide
  Target: LAMA2; (+) strand; PAM type: YTN; PAM sequence: TTT
gaaatttccagaactctttg

SEQ ID NO: 369085 - DNA, 20 bp, Artificial Sequence
  Description of Artificial Sequence: Synthetic oligonucleotide
  Target: LAMA2; (+) strand; PAM type: YTN; PAM sequence: TTG
aaatttccagaactctttgt

SEQ ID NO: 369086 - DNA, 20 bp, Artificial Sequence
  Description of Artificial Sequence: Synthetic oligonucleotide
  Target: LAMA2; (+) strand; PAM type: YTN; PAM sequence: TTT
ccagaactctttgtttaagt

SEQ ID NO: 369087 - DNA, 20 bp, Artificial Sequence
  Description of Artificial Sequence: Synthetic oligonucleotide
  Target: LAMA2; (+) strand; PAM type: YTN; PAM sequence: TTC
cagaactctttgtttaagtt

SEQ ID NO: 369088 - DNA, 20 bp, Artificial Sequence
  Description of Artificial Sequence: Synthetic oligonucleotide
  Target: LAMA2; (+) strand; PAM type: YTN; PAM sequence: CTC
tttgtttaagttttgcatgt

SEQ ID NO: 369089 - DNA, 20 bp, Artificial Sequence
  Description of Artificial Sequence: Synthetic oligonucleotide
  Target: LAMA2; (+) strand; PAM type: YTN; PAM sequence: CTT
tgtttaagttttgcatgtca

SEQ ID NO: 369090 - DNA, 20 bp, Artificial Sequence
  Description of Artificial Sequence: Synthetic oligonucleotide
  Target: LAMA2; (+) strand; PAM type: YTN; PAM sequence: TTT
gtttaagttttgcatgtcaa

SEQ ID NO: 369091 - DNA, 20 bp, Artificial Sequence
  Description of Artificial Sequence: Synthetic oligonucleotide
  Target: LAMA2; (+) strand; PAM type: YTN; PAM sequence: TTG
tttaagttttgcatgtcaat

SEQ ID NO: 369092 - DNA, 20 bp, Artificial Sequence
  Description of Artificial Sequence: Synthetic oligonucleotide
  Target: LAMA2; (+) strand; PAM type: YTN; PAM sequence: TTT
aagttttgcatgtcaatttt

SEQ ID NO: 369093 - DNA, 20 bp, Artificial Sequence
  Description of Artificial Sequence: Synthetic oligonucleotide
  Target: LAMA2; (+) strand; PAM type: YTN; PAM sequence: TTA
agttttgcatgtcaatttta

SEQ ID NO: 369094 - DNA, 20 bp, Artificial Sequence
  Description of Artificial Sequence: Synthetic oligonucleotide
  Target: LAMA2; (+) strand; PAM type: YTN; PAM sequence: TTT
tgcatgtcaattttatatga

SEQ ID NO: 369095 - DNA, 20 bp, Artificial Sequence
  Description of Artificial Sequence: Synthetic oligonucleotide
  Target: LAMA2; (+) strand; PAM type: YTN; PAM sequence: TTT
gcatgtcaattttatatgag

SEQ ID NO: 369096 - DNA, 20 bp, Artificial Sequence
  Description of Artificial Sequence: Synthetic oligonucleotide
  Target: LAMA2; (+) strand; PAM type: YTN; PAM sequence: TTG
catgtcaattttatatgaga

SEQ ID NO: 369097 - DNA, 20 bp, Artificial Sequence
  Description of Artificial Sequence: Synthetic oligonucleotide
  Target: LAMA2; (+) strand; PAM type: YTN; PAM sequence: TTT
tatatgagaaattcttggac

SEQ ID NO: 369098 - DNA, 20 bp, Artificial Sequence
  Description of Artificial Sequence: Synthetic oligonucleotide
  Target: LAMA2; (+) strand; PAM type: YTN; PAM sequence: TTT
atatgagaaattcttggact

SEQ ID NO: 369099 - DNA, 20 bp, Artificial Sequence
  Description of Artificial Sequence: Synthetic oligonucleotide
  Target: LAMA2; (+) strand; PAM type: YTN; PAM sequence: TTA
tatgagaaattcttggactg

SEQ ID NO: 369100 - DNA, 20 bp, Artificial Sequence
  Description of Artificial Sequence: Synthetic oligonucleotide
  Target: LAMA2; (+) strand; PAM type: YTN; PAM sequence: TTC
ttggactgtatctagataca

SEQ ID NO: 369101 - DNA, 20 bp, Artificial Sequence
  Description of Artificial Sequence: Synthetic oligonucleotide
  Target: LAMA2; (+) strand; PAM type: YTN; PAM sequence: CTT
ggactgtatctagatacagt

SEQ ID NO: 369102 - DNA, 20 bp, Artificial Sequence
  Description of Artificial Sequence: Synthetic oligonucleotide
  Target: LAMA2; (+) strand; PAM type: YTN; PAM sequence: TTG
gactgtatctagatacagtt

SEQ ID NO: 369103 - DNA, 20 bp, Artificial Sequence
  Description of Artificial Sequence: Synthetic oligonucleotide
  Target: LAMA2; (+) strand; PAM type: YTN; PAM sequence: CTG
tatctagatacagttaatca

SEQ ID NO: 369104 - DNA, 20 bp, Artificial Sequence
  Description of Artificial Sequence: Synthetic oligonucleotide
  Target: LAMA2; (+) strand; PAM type: YTN; PAM sequence: CTA
gatacagttaatcaatctgc

SEQ ID NO: 369105 - DNA, 20 bp, Artificial Sequence
  Description of Artificial Sequence: Synthetic oligonucleotide
  Target: LAMA2; (+) strand; PAM type: YTN; PAM sequence: TTA
atcaatctgctgtttagtaa

SEQ ID NO: 369106 - DNA, 20 bp, Artificial Sequence
  Description of Artificial Sequence: Synthetic oligonucleotide
  Target: LAMA2; (+) strand; PAM type: YTN; PAM sequence: CTG
ctgtttagtaaattgtggtg

SEQ ID NO: 369107 - DNA, 20 bp, Artificial Sequence
  Description of Artificial Sequence: Synthetic oligonucleotide
  Target: LAMA2; (+) strand; PAM type: YTN; PAM sequence: CTG
tttagtaaattgtggtgatc

SEQ ID NO: 369108 - DNA, 20 bp, Artificial Sequence
  Description of Artificial Sequence: Synthetic oligonucleotide
  Target: LAMA2; (+) strand; PAM type: YTN; PAM sequence: TTT
agtaaattgtggtgatctat

SEQ ID NO: 369109 - DNA, 20 bp, Artificial Sequence
  Description of Artificial Sequence: Synthetic oligonucleotide
  Target: LAMA2; (+) strand; PAM type: YTN; PAM sequence: TTA
gtaaattgtggtgatctatt

SEQ ID NO: 369110 - DNA, 20 bp, Artificial Sequence
  Description of Artificial Sequence: Synthetic oligonucleotide
  Target: LAMA2; (+) strand; PAM type: YTN; PAM sequence: TTG
tggtgatctattgtatgata

SEQ ID NO: 369111 - DNA, 20 bp, Artificial Sequence
  Description of Artificial Sequence: Synthetic oligonucleotide
  Target: LAMA2; (+) strand; PAM type: YTN; PAM sequence: CTA
ttgtatgataatcaactagt

SEQ ID NO: 369112 - DNA, 20 bp, Artificial Sequence
  Description of Artificial Sequence: Synthetic oligonucleotide
  Target: LAMA2; (+) strand; PAM type: YTN; PAM sequence: TTG
tatgataatcaactagtgta

SEQ ID NO: 369113 - DNA, 20 bp, Artificial Sequence
  Description of Artificial Sequence: Synthetic oligonucleotide
  Target: LAMA2; (+) strand; PAM type: YTN; PAM sequence: CTA
gtgtatcaaccatgaaatca

SEQ ID NO: 369114 - DNA, 20 bp, Artificial Sequence
  Description of Artificial Sequence: Synthetic oligonucleotide
  Target: LAMA2; (+) strand; PAM type: YTN; PAM sequence: CTA
attctgaaattaaaaggatc

SEQ ID NO: 369115 - DNA, 20 bp, Artificial Sequence
  Description of Artificial Sequence: Synthetic oligonucleotide
  Target: LAMA2; (+) strand; PAM type: YTN; PAM sequence: TTC
tgaaattaaaaggatcagaa

SEQ ID NO: 369116 - DNA, 20 bp, Artificial Sequence
  Description of Artificial Sequence: Synthetic oligonucleotide
  Target: LAMA2; (+) strand; PAM type: YTN; PAM sequence: CTG
aaattaaaaggatcagaatt

SEQ ID NO: 369117 - DNA, 20 bp, Artificial Sequence
  Description of Artificial Sequence: Synthetic oligonucleotide
  Target: LAMA2; (+) strand; PAM type: YTN; PAM sequence: TTA
aaaggatcagaattataggt

SEQ ID NO: 369118 - DNA, 20 bp, Artificial Sequence
  Description of Artificial Sequence: Synthetic oligonucleotide
  Target: LAMA2; (+) strand; PAM type: YTN; PAM sequence: TTA
taggtttatcaagtgacagt

SEQ ID NO: 369119 - DNA, 20 bp, Artificial Sequence
  Description of Artificial Sequence: Synthetic oligonucleotide
  Target: LAMA2; (+) strand; PAM type: YTN; PAM sequence: TTT
atcaagtgacagtccattaa

SEQ ID NO: 369120 - DNA, 20 bp, Artificial Sequence
  Description of Artificial Sequence: Synthetic oligonucleotide
  Target: LAMA2; (+) strand; PAM type: YTN; PAM sequence: TTA
tcaagtgacagtccattaat

SEQ ID NO: 369121 - DNA, 20 bp, Artificial Sequence
  Description of Artificial Sequence: Synthetic oligonucleotide
  Target: LAMA2; (+) strand; PAM type: YTN; PAM sequence: TTA
attccaggcagttagatttc

SEQ ID NO: 369122 - DNA, 20 bp, Artificial Sequence
  Description of Artificial Sequence: Synthetic oligonucleotide
  Target: LAMA2; (+) strand; PAM type: YTN; PAM sequence: TTC
caggcagttagatttcacaa

SEQ ID NO: 369123 - DNA, 20 bp, Artificial Sequence
  Description of Artificial Sequence: Synthetic oligonucleotide
  Target: LAMA2; (+) strand; PAM type: YTN; PAM sequence: TTA
gatttcacaatacattcagg

SEQ ID NO: 369124 - DNA, 20 bp, Artificial Sequence
  Description of Artificial Sequence: Synthetic oligonucleotide
  Target: LAMA2; (+) strand; PAM type: YTN; PAM sequence: TTT
cacaatacattcaggcgagt

SEQ ID NO: 369125 - DNA, 20 bp, Artificial Sequence
  Description of Artificial Sequence: Synthetic oligonucleotide
  Target: LAMA2; (+) strand; PAM type: YTN; PAM sequence: TTC
acaatacattcaggcgagtt

SEQ ID NO: 369126 - DNA, 20 bp, Artificial Sequence
  Description of Artificial Sequence: Synthetic oligonucleotide
  Target: LAMA2; (+) strand; PAM type: YTN; PAM sequence: TTC
aggcgagttctggtctctgg

SEQ ID NO: 369127 - DNA, 20 bp, Artificial Sequence
  Description of Artificial Sequence: Synthetic oligonucleotide
  Target: LAMA2; (+) strand; PAM type: YTN; PAM sequence: TTC
tggtctctggcctcaagttc

SEQ ID NO: 369128 - DNA, 20 bp, Artificial Sequence
  Description of Artificial Sequence: Synthetic oligonucleotide
  Target: LAMA2; (+) strand; PAM type: YTN; PAM sequence: CTG
gtctctggcctcaagttcta

SEQ ID NO: 369129 - DNA, 20 bp, Artificial Sequence
  Description of Artificial Sequence: Synthetic oligonucleotide
  Target: LAMA2; (+) strand; PAM type: YTN; PAM sequence: CTC
tggcctcaagttctaatgat

SEQ ID NO: 369130 - DNA, 20 bp, Artificial Sequence
  Description of Artificial Sequence: Synthetic oligonucleotide
  Target: LAMA2; (+) strand; PAM type: YTN; PAM sequence: CTG
gcctcaagttctaatgataa

SEQ ID NO: 369131 - DNA, 20 bp, Artificial Sequence
  Description of Artificial Sequence: Synthetic oligonucleotide
  Target: LAMA2; (+) strand; PAM type: YTN; PAM sequence: CTC
aagttctaatgataacagtt

SEQ ID NO: 369132 - DNA, 20 bp, Artificial Sequence
  Description of Artificial Sequence: Synthetic oligonucleotide
  Target: LAMA2; (+) strand; PAM type: YTN; PAM sequence: TTC
taatgataacagtttccatt

SEQ ID NO: 369133 - DNA, 20 bp, Artificial Sequence
  Description of Artificial Sequence: Synthetic oligonucleotide
  Target: LAMA2; (+) strand; PAM type: YTN; PAM sequence: CTA
atgataacagtttccattta

SEQ ID NO: 369134 - DNA, 20 bp, Artificial Sequence
  Description of Artificial Sequence: Synthetic oligonucleotide
  Target: LAMA2; (+) strand; PAM type: YTN; PAM sequence: TTT
ccatttatcttctatgtcaa

SEQ ID NO: 369135 - DNA, 20 bp, Artificial Sequence
  Description of Artificial Sequence: Synthetic oligonucleotide
  Target: LAMA2; (+) strand; PAM type: YTN; PAM sequence: TTC
catttatcttctatgtcaaa

SEQ ID NO: 369136 - DNA, 20 bp, Artificial Sequence
  Description of Artificial Sequence: Synthetic oligonucleotide
  Target: LAMA2; (+) strand; PAM type: YTN; PAM sequence: TTT
atcttctatgtcaaatcaaa

SEQ ID NO: 369137 - DNA, 20 bp, Artificial Sequence
  Description of Artificial Sequence: Synthetic oligonucleotide
  Target: LAMA2; (+) strand; PAM type: YTN; PAM sequence: TTA
tcttctatgtcaaatcaaac

SEQ ID NO: 369138 - DNA, 20 bp, Artificial Sequence
  Description of Artificial Sequence: Synthetic oligonucleotide
  Target: LAMA2; (+) strand; PAM type: YTN; PAM sequence: CTT
ctatgtcaaatcaaacaagt

SEQ ID NO: 369139 - DNA, 20 bp, Artificial Sequence
  Description of Artificial Sequence: Synthetic oligonucleotide
  Target: LAMA2; (+) strand; PAM type: YTN; PAM sequence: TTC
tatgtcaaatcaaacaagta

SEQ ID NO: 369140 - DNA, 20 bp, Artificial Sequence
  Description of Artificial Sequence: Synthetic oligonucleotide
  Target: LAMA2; (+) strand; PAM type: YTN; PAM sequence: CTA
tgtcaaatcaaacaagtaat

SEQ ID NO: 369141 - DNA, 20 bp, Artificial Sequence
  Description of Artificial Sequence: Synthetic oligonucleotide
  Target: LAMA2; (+) strand; PAM type: YTN; PAM sequence: TTT
gtcttttacttttctgattt

SEQ ID NO: 369142 - DNA, 20 bp, Artificial Sequence
  Description of Artificial Sequence: Synthetic oligonucleotide
  Target: LAMA2; (+) strand; PAM type: YTN; PAM sequence: TTG
tcttttacttttctgatttt

SEQ ID NO: 369143 - DNA, 20 bp, Artificial Sequence
  Description of Artificial Sequence: Synthetic oligonucleotide
  Target: LAMA2; (+) strand; PAM type: YTN; PAM sequence: CTT
ttacttttctgattttattc

SEQ ID NO: 369144 - DNA, 20 bp, Artificial Sequence
  Description of Artificial Sequence: Synthetic oligonucleotide
  Target: LAMA2; (+) strand; PAM type: YTN; PAM sequence: TTT
tacttttctgattttattca

SEQ ID NO: 369145 - DNA, 20 bp, Artificial Sequence
  Description of Artificial Sequence: Synthetic oligonucleotide
  Target: LAMA2; (+) strand; PAM type: YTN; PAM sequence: TTT
acttttctgattttattcat

SEQ ID NO: 369146 - DNA, 20 bp, Artificial Sequence
  Description of Artificial Sequence: Synthetic oligonucleotide
  Target: LAMA2; (+) strand; PAM type: YTN; PAM sequence: TTA
cttttctgattttattcatc

SEQ ID NO: 369147 - DNA, 20 bp, Artificial Sequence
  Description of Artificial Sequence: Synthetic oligonucleotide
  Target: LAMA2; (+) strand; PAM type: YTN; PAM sequence: CTT
ttctgattttattcatctga

SEQ ID NO: 369148 - DNA, 20 bp, Artificial Sequence
  Description of Artificial Sequence: Synthetic oligonucleotide
  Target: LAMA2; (+) strand; PAM type: YTN; PAM sequence: TTT
tctgattttattcatctgaa

SEQ ID NO: 369149 - DNA, 20 bp, Artificial Sequence
  Description of Artificial Sequence: Synthetic oligonucleotide
  Target: LAMA2; (+) strand; PAM type: YTN; PAM sequence: TTT
ctgattttattcatctgaaa

SEQ ID NO: 369150 - DNA, 20 bp, Artificial Sequence
  Description of Artificial Sequence: Synthetic oligonucleotide
  Target: LAMA2; (+) strand; PAM type: YTN; PAM sequence: TTC
tgattttattcatctgaaat

SEQ ID NO: 369151 - DNA, 20 bp, Artificial Sequence
  Description of Artificial Sequence: Synthetic oligonucleotide
  Target: LAMA2; (+) strand; PAM type: YTN; PAM sequence: CTG
attttattcatctgaaatgt

SEQ ID NO: 369152 - DNA, 20 bp, Artificial Sequence
  Description of Artificial Sequence: Synthetic oligonucleotide
  Target: LAMA2; (+) strand; PAM type: YTN; PAM sequence: TTT
tattcatctgaaatgtggct

SEQ ID NO: 369153 - DNA, 20 bp, Artificial Sequence
  Description of Artificial Sequence: Synthetic oligonucleotide
  Target: LAMA2; (+) strand; PAM type: YTN; PAM sequence: TTT
attcatctgaaatgtggcta

SEQ ID NO: 369154 - DNA, 20 bp, Artificial Sequence
  Description of Artificial Sequence: Synthetic oligonucleotide
  Target: LAMA2; (+) strand; PAM type: YTN; PAM sequence: TTA
ttcatctgaaatgtggctag

SEQ ID NO: 369155 - DNA, 20 bp, Artificial Sequence
  Description of Artificial Sequence: Synthetic oligonucleotide
  Target: LAMA2; (+) strand; PAM type: YTN; PAM sequence: TTC
atctgaaatgtggctagtag

SEQ ID NO: 369156 - DNA, 20 bp, Artificial Sequence
  Description of Artificial Sequence: Synthetic oligonucleotide
  Target: LAMA2; (+) strand; PAM type: YTN; PAM sequence: CTG
aaatgtggctagtagtcttt

SEQ ID NO: 369157 - DNA, 20 bp, Artificial Sequence
  Description of Artificial Sequence: Synthetic oligonucleotide
  Target: LAMA2; (+) strand; PAM type: YTN; PAM sequence: CTA
gtagtctttattgtatcctt

SEQ ID NO: 369158 - DNA, 20 bp, Artificial Sequence
  Description of Artificial Sequence: Synthetic oligonucleotide
  Target: LAMA2; (+) strand; PAM type: YTN; PAM sequence: CTT
tattgtatcctttgccatgg

SEQ ID NO: 369159 - DNA, 20 bp, Artificial Sequence
  Description of Artificial Sequence: Synthetic oligonucleotide
  Target: LAMA2; (+) strand; PAM type: YTN; PAM sequence: TTT
attgtatcctttgccatgga

SEQ ID NO: 369160 - DNA, 20 bp, Artificial Sequence
  Description of Artificial Sequence: Synthetic oligonucleotide
  Target: LAMA2; (+) strand; PAM type: YTN; PAM sequence: TTA
ttgtatcctttgccatggag

SEQ ID NO: 369161 - DNA, 20 bp, Artificial Sequence
  Description of Artificial Sequence: Synthetic oligonucleotide
  Target: LAMA2; (+) strand; PAM type: YTN; PAM sequence: TTG
tatcctttgccatggagttt

SEQ ID NO: 369162 - DNA, 20 bp, Artificial Sequence
  Description of Artificial Sequence: Synthetic oligonucleotide
  Target: LAMA2; (+) strand; PAM type: YTN; PAM sequence: CTT
tgccatggagtttgttagtc

SEQ ID NO: 369163 - DNA, 20 bp, Artificial Sequence
  Description of Artificial Sequence: Synthetic oligonucleotide
  Target: LAMA2; (+) strand; PAM type: YTN; PAM sequence: TTT
gccatggagtttgttagtca

SEQ ID NO: 369164 - DNA, 20 bp, Artificial Sequence
  Description of Artificial Sequence: Synthetic oligonucleotide
  Target: LAMA2; (+) strand; PAM type: YTN; PAM sequence: TTG
ccatggagtttgttagtcat

SEQ ID NO: 369165 - DNA, 20 bp, Artificial Sequence
  Description of Artificial Sequence: Synthetic oligonucleotide
  Target: LAMA2; (+) strand; PAM type: YTN; PAM sequence: TTT
gttagtcattgtttgtaata

SEQ ID NO: 369166 - DNA, 20 bp, Artificial Sequence
  Description of Artificial Sequence: Synthetic oligonucleotide
  Target: LAMA2; (+) strand; PAM type: YTN; PAM sequence: TTG
ttagtcattgtttgtaatag

SEQ ID NO: 369167 - DNA, 20 bp, Artificial Sequence
  Description of Artificial Sequence: Synthetic oligonucleotide
  Target: LAMA2; (+) strand; PAM type: YTN; PAM sequence: TTA
gtcattgtttgtaatagaac

SEQ ID NO: 369168 - DNA, 20 bp, Artificial Sequence
  Description of Artificial Sequence: Synthetic oligonucleotide
  Target: LAMA2; (+) strand; PAM type: YTN; PAM sequence: TTG
tttgtaatagaactgttttc

SEQ ID NO: 369169 - DNA, 20 bp, Artificial Sequence
  Description of Artificial Sequence: Synthetic oligonucleotide
  Target: LAMA2; (+) strand; PAM type: YTN; PAM sequence: TTT
gtaatagaactgttttccat

SEQ ID NO: 369170 - DNA, 20 bp, Artificial Sequence
  Description of Artificial Sequence: Synthetic oligonucleotide
  Target: LAMA2; (+) strand; PAM type: YTN; PAM sequence: TTG
taatagaactgttttccatt

SEQ ID NO: 369171 - DNA, 20 bp, Artificial Sequence
  Description of Artificial Sequence: Synthetic oligonucleotide
  Target: LAMA2; (+) strand; PAM type: YTN; PAM sequence: CTG
ttttccattcatctattcat

SEQ ID NO: 369172 - DNA, 20 bp, Artificial Sequence
  Description of Artificial Sequence: Synthetic oligonucleotide
  Target: LAMA2; (+) strand; PAM type: YTN; PAM sequence: TTT
tccattcatctattcattta

SEQ ID NO: 369173 - DNA, 20 bp, Artificial Sequence
  Description of Artificial Sequence: Synthetic oligonucleotide
  Target: LAMA2; (+) strand; PAM type: YTN; PAM sequence: TTT
ccattcatctattcatttat

SEQ ID NO: 369174 - DNA, 20 bp, Artificial Sequence
  Description of Artificial Sequence: Synthetic oligonucleotide
  Target: LAMA2; (+) strand; PAM type: YTN; PAM sequence: TTC
cattcatctattcatttatt

SEQ ID NO: 369175 - DNA, 20 bp, Artificial Sequence
  Description of Artificial Sequence: Synthetic oligonucleotide
  Target: LAMA2; (+) strand; PAM type: YTN; PAM sequence: TTC
atctattcatttattattta

SEQ ID NO: 369176 - DNA, 20 bp, Artificial Sequence
  Description of Artificial Sequence: Synthetic oligonucleotide
  Target: LAMA2; (+) strand; PAM type: YTN; PAM sequence: CTA
ttcatttattatttaagtat

SEQ ID NO: 369177 - DNA, 20 bp, Artificial Sequence
  Description of Artificial Sequence: Synthetic oligonucleotide
  Target: LAMA2; (+) strand; PAM type: YTN; PAM sequence: TTC
atttattatttaagtattta

SEQ ID NO: 369178 - DNA, 20 bp, Artificial Sequence
  Description of Artificial Sequence: Synthetic oligonucleotide
  Target: LAMA2; (+) strand; PAM type: YTN; PAM sequence: TTT
attatttaagtatttagtca

SEQ ID NO: 369179 - DNA, 20 bp, Artificial Sequence
  Description of Artificial Sequence: Synthetic oligonucleotide
  Target: LAMA2; (+) strand; PAM type: YTN; PAM sequence: TTA
ttatttaagtatttagtcag

SEQ ID NO: 369180 - DNA, 20 bp, Artificial Sequence
  Description of Artificial Sequence: Synthetic oligonucleotide
  Target: LAMA2; (+) strand; PAM type: YTN; PAM sequence: TTA
tttaagtatttagtcagtta

SEQ ID NO: 369181 - DNA, 20 bp, Artificial Sequence
  Description of Artificial Sequence: Synthetic oligonucleotide
  Target: LAMA2; (+) strand; PAM type: YTN; PAM sequence: TTT
aagtatttagtcagttactt

SEQ ID NO: 369182 - DNA, 20 bp, Artificial Sequence
  Description of Artificial Sequence: Synthetic oligonucleotide
  Target: LAMA2; (+) strand; PAM type: YTN; PAM sequence: TTA
agtatttagtcagttacttt

SEQ ID NO: 369183 - DNA, 20 bp, Artificial Sequence
  Description of Artificial Sequence: Synthetic oligonucleotide
  Target: LAMA2; (+) strand; PAM type: YTN; PAM sequence: TTT
agtcagttacttttgtatac

SEQ ID NO: 369184 - DNA, 20 bp, Artificial Sequence
  Description of Artificial Sequence: Synthetic oligonucleotide
  Target: LAMA2; (+) strand; PAM type: YTN; PAM sequence: TTA
gtcagttacttttgtataca

SEQ ID NO: 369185 - DNA, 20 bp, Artificial Sequence
  Description of Artificial Sequence: Synthetic oligonucleotide
  Target: LAMA2; (+) strand; PAM type: YTN; PAM sequence: TTA
cttttgtatacatttatctg

SEQ ID NO: 369186 - DNA, 20 bp, Artificial Sequence
  Description of Artificial Sequence: Synthetic oligonucleotide
  Target: LAMA2; (+) strand; PAM type: YTN; PAM sequence: CTT
ttgtatacatttatctgtct

SEQ ID NO: 369187 - DNA, 20 bp, Artificial Sequence
  Description of Artificial Sequence: Synthetic oligonucleotide
  Target: LAMA2; (+) strand; PAM type: YTN; PAM sequence: TTT
tgtatacatttatctgtcta

SEQ ID NO: 369188 - DNA, 20 bp, Artificial Sequence
  Description of Artificial Sequence: Synthetic oligonucleotide
  Target: LAMA2; (+) strand; PAM type: YTN; PAM sequence: TTT
gtatacatttatctgtctat

SEQ ID NO: 369189 - DNA, 20 bp, Artificial Sequence
  Description of Artificial Sequence: Synthetic oligonucleotide
  Target: LAMA2; (+) strand; PAM type: YTN; PAM sequence: TTG
tatacatttatctgtctatc

SEQ ID NO: 369190 - DNA, 20 bp, Artificial Sequence
  Description of Artificial Sequence: Synthetic oligonucleotide
  Target: LAMA2; (+) strand; PAM type: YTN; PAM sequence: TTT
atctgtctatctacccatcc

SEQ ID NO: 369191 - DNA, 20 bp, Artificial Sequence
  Description of Artificial Sequence: Synthetic oligonucleotide
  Target: LAMA2; (+) strand; PAM type: YTN; PAM sequence: TTA
tctgtctatctacccatccg

SEQ ID NO: 369192 - DNA, 20 bp, Artificial Sequence
  Description of Artificial Sequence: Synthetic oligonucleotide
  Target: LAMA2; (+) strand; PAM type: YTN; PAM sequence: CTG
tctatctacccatccgtcca

SEQ ID NO: 369193 - DNA, 20 bp, Artificial Sequence
  Description of Artificial Sequence: Synthetic oligonucleotide
  Target: LAMA2; (+) strand; PAM type: YTN; PAM sequence: CTA
tctacccatccgtccaccca

SEQ ID NO: 369194 - DNA, 20 bp, Artificial Sequence
  Description of Artificial Sequence: Synthetic oligonucleotide
  Target: LAMA2; (+) strand; PAM type: YTN; PAM sequence: CTA
cccatccgtccacccatcca

SEQ ID NO: 369195 - DNA, 20 bp, Artificial Sequence
  Description of Artificial Sequence: Synthetic oligonucleotide
  Target: LAMA2; (+) strand; PAM type: YTN; PAM sequence: TTC
atcaattcacccattcgaca

SEQ ID NO: 369196 - DNA, 20 bp, Artificial Sequence
  Description of Artificial Sequence: Synthetic oligonucleotide
  Target: LAMA2; (+) strand; PAM type: YTN; PAM sequence: TTC
acccattcgacaaaagtcta

SEQ ID NO: 369197 - DNA, 20 bp, Artificial Sequence
  Description of Artificial Sequence: Synthetic oligonucleotide
  Target: LAMA2; (+) strand; PAM type: YTN; PAM sequence: TTC
gacaaaagtctactgaacat

SEQ ID NO: 369198 - DNA, 20 bp, Artificial Sequence
  Description of Artificial Sequence: Synthetic oligonucleotide
  Target: LAMA2; (+) strand; PAM type: YTN; PAM sequence: CTA
ctgaacatgaacatgtatgg

SEQ ID NO: 369199 - DNA, 20 bp, Artificial Sequence
  Description of Artificial Sequence: Synthetic oligonucleotide
  Target: LAMA2; (+) strand; PAM type: YTN; PAM sequence: CTG
aacatgaacatgtatggaga

SEQ ID NO: 369200 - DNA, 20 bp, Artificial Sequence
  Description of Artificial Sequence: Synthetic oligonucleotide
  Target: LAMA2; (+) strand; PAM type: YTN; PAM sequence: CTG
catatatagatggcaagata

SEQ ID NO: 369201 - DNA, 20 bp, Artificial Sequence
  Description of Artificial Sequence: Synthetic oligonucleotide
  Target: LAMA2; (+) strand; PAM type: YTN; PAM sequence: TTT
ctgttctcaaggagtagccc

SEQ ID NO: 369202 - DNA, 20 bp, Artificial Sequence
  Description of Artificial Sequence: Synthetic oligonucleotide
  Target: LAMA2; (+) strand; PAM type: YTN; PAM sequence: TTC
tgttctcaaggagtagccca

SEQ ID NO: 369203 - DNA, 20 bp, Artificial Sequence
  Description of Artificial Sequence: Synthetic oligonucleotide
  Target: LAMA2; (+) strand; PAM type: YTN; PAM sequence: CTG
ttctcaaggagtagcccata

SEQ ID NO: 369204 - DNA, 20 bp, Artificial Sequence
  Description of Artificial Sequence: Synthetic oligonucleotide
  Target: LAMA2; (+) strand; PAM type: YTN; PAM sequence: TTC
tcaaggagtagcccataagc

SEQ ID NO: 369205 - DNA, 20 bp, Artificial Sequence
  Description of Artificial Sequence: Synthetic oligonucleotide
  Target: LAMA2; (+) strand; PAM type: YTN; PAM sequence: CTC
aaggagtagcccataagctc

SEQ ID NO: 369206 - DNA, 20 bp, Artificial Sequence
  Description of Artificial Sequence: Synthetic oligonucleotide
  Target: LAMA2; (+) strand; PAM type: YTN; PAM sequence: CTC
atgccaacataagtactggc

SEQ ID NO: 369207 - DNA, 20 bp, Artificial Sequence
  Description of Artificial Sequence: Synthetic oligonucleotide
  Target: LAMA2; (+) strand; PAM type: YTN; PAM sequence: CTG
gctttagtaactcttcaaaa

SEQ ID NO: 369208 - DNA, 20 bp, Artificial Sequence
  Description of Artificial Sequence: Synthetic oligonucleotide
  Target: LAMA2; (+) strand; PAM type: YTN; PAM sequence: CTT
tagtaactcttcaaaacccc

SEQ ID NO: 369209 - DNA, 20 bp, Artificial Sequence
  Description of Artificial Sequence: Synthetic oligonucleotide
  Target: LAMA2; (+) strand; PAM type: YTN; PAM sequence: TTT
agtaactcttcaaaaccccg

SEQ ID NO: 369210 - DNA, 20 bp, Artificial Sequence
  Description of Artificial Sequence: Synthetic oligonucleotide
  Target: LAMA2; (+) strand; PAM type: YTN; PAM sequence: TTA
gtaactcttcaaaaccccgt

SEQ ID NO: 369211 - DNA, 20 bp, Artificial Sequence
  Description of Artificial Sequence: Synthetic oligonucleotide
  Target: LAMA2; (+) strand; PAM type: YTN; PAM sequence: CTC
ttcaaaaccccgttgtgtta

SEQ ID NO: 369212 - DNA, 20 bp, Artificial Sequence
  Description of Artificial Sequence: Synthetic oligonucleotide
  Target: LAMA2; (+) strand; PAM type: YTN; PAM sequence: CTT
caaaaccccgttgtgttaag

SEQ ID NO: 369213 - DNA, 20 bp, Artificial Sequence
  Description of Artificial Sequence: Synthetic oligonucleotide
  Target: LAMA2; (+) strand; PAM type: YTN; PAM sequence: TTC
aaaaccccgttgtgttaagg

SEQ ID NO: 369214 - DNA, 20 bp, Artificial Sequence
  Description of Artificial Sequence: Synthetic oligonucleotide
  Target: LAMA2; (+) strand; PAM type: YTN; PAM sequence: TTG
tgttaaggagacttatcagg

SEQ ID NO: 369215 - DNA, 20 bp, Artificial Sequence
  Description of Artificial Sequence: Synthetic oligonucleotide
  Target: LAMA2; (+) strand; PAM type: YTN; PAM sequence: TTA
aggagacttatcaggcccag

SEQ ID NO: 369216 - DNA, 20 bp, Artificial Sequence
  Description of Artificial Sequence: Synthetic oligonucleotide
  Target: LAMA2; (+) strand; PAM type: YTN; PAM sequence: CTT
atcaggcccagaaattctgt

SEQ ID NO: 369217 - DNA, 20 bp, Artificial Sequence
  Description of Artificial Sequence: Synthetic oligonucleotide
  Target: LAMA2; (+) strand; PAM type: YTN; PAM sequence: TTA
tcaggcccagaaattctgtt

SEQ ID NO: 369218 - DNA, 20 bp, Artificial Sequence
  Description of Artificial Sequence: Synthetic oligonucleotide
  Target: LAMA2; (+) strand; PAM type: YTN; PAM sequence: TTC
tgtttctagatatatatcca

SEQ ID NO: 369219 - DNA, 20 bp, Artificial Sequence
  Description of Artificial Sequence: Synthetic oligonucleotide
  Target: LAMA2; (+) strand; PAM type: YTN; PAM sequence: CTG
tttctagatatatatccaaa

SEQ ID NO: 369220 - DNA, 20 bp, Artificial Sequence
  Description of Artificial Sequence: Synthetic oligonucleotide
  Target: LAMA2; (+) strand; PAM type: YTN; PAM sequence: TTT
ctagatatatatccaaaaga

SEQ ID NO: 369221 - DNA, 20 bp, Artificial Sequence
  Description of Artificial Sequence: Synthetic oligonucleotide
  Target: LAMA2; (+) strand; PAM type: YTN; PAM sequence: TTC
tagatatatatccaaaagaa

SEQ ID NO: 369222 - DNA, 20 bp, Artificial Sequence
  Description of Artificial Sequence: Synthetic oligonucleotide
  Target: LAMA2; (+) strand; PAM type: YTN; PAM sequence: CTA
gatatatatccaaaagaact

SEQ ID NO: 369223 - DNA, 20 bp, Artificial Sequence
  Description of Artificial Sequence: Synthetic oligonucleotide
  Target: LAMA2; (+) strand; PAM type: YTN; PAM sequence: CTG
aaaataggtattatgtgttc

SEQ ID NO: 369224 - DNA, 20 bp, Artificial Sequence
  Description of Artificial Sequence: Synthetic oligonucleotide
  Target: LAMA2; (+) strand; PAM type: YTN; PAM sequence: TTA
tgtgttcatgaatatgaata

SEQ ID NO: 369225 - DNA, 20 bp, Artificial Sequence
  Description of Artificial Sequence: Synthetic oligonucleotide
  Target: LAMA2; (+) strand; PAM type: YTN; PAM sequence: TTC
atgaatatgaatagcaatat

SEQ ID NO: 369226 - DNA, 20 bp, Artificial Sequence
  Description of Artificial Sequence: Synthetic oligonucleotide
  Target: LAMA2; (+) strand; PAM type: YTN; PAM sequence: TTA
tttatgatagctcgaaggta

SEQ ID NO: 369227 - DNA, 20 bp, Artificial Sequence
  Description of Artificial Sequence: Synthetic oligonucleotide
  Target: LAMA2; (+) strand; PAM type: YTN; PAM sequence: TTT
atgatagctcgaaggtagaa

SEQ ID NO: 369228 - DNA, 20 bp, Artificial Sequence
  Description of Artificial Sequence: Synthetic oligonucleotide
  Target: LAMA2; (+) strand; PAM type: YTN; PAM sequence: TTA
tgatagctcgaaggtagaaa

SEQ ID NO: 369229 - DNA, 20 bp, Artificial Sequence
  Description of Artificial Sequence: Synthetic oligonucleotide
  Target: LAMA2; (+) strand; PAM type: YTN; PAM sequence: CTC
gaaggtagaaacaatccaaa

SEQ ID NO: 369230 - DNA, 20 bp, Artificial Sequence
  Description of Artificial Sequence: Synthetic oligonucleotide
  Target: LAMA2; (+) strand; PAM type: YTN; PAM sequence: TTC
atcaactgatgaatgaataa

SEQ ID NO: 369231 - DNA, 20 bp, Artificial Sequence
  Description of Artificial Sequence: Synthetic oligonucleotide
  Target: LAMA2; (+) strand; PAM type: YTN; PAM sequence: CTG
atgaatgaataaacaaaatg

SEQ ID NO: 369232 - DNA, 20 bp, Artificial Sequence
  Description of Artificial Sequence: Synthetic oligonucleotide
  Target: LAMA2; (+) strand; PAM type: YTN; PAM sequence: TTA
gtcattaaaaggaatgaaat

SEQ ID NO: 369233 - DNA, 20 bp, Artificial Sequence
  Description of Artificial Sequence: Synthetic oligonucleotide
  Target: LAMA2; (+) strand; PAM type: YTN; PAM sequence: TTA
aaaggaatgaaatactgata

SEQ ID NO: 369234 - DNA, 20 bp, Artificial Sequence
  Description of Artificial Sequence: Synthetic oligonucleotide
  Target: LAMA2; (+) strand; PAM type: YTN; PAM sequence: CTG
atacatgctgcaatgaagtt

SEQ ID NO: 369235 - DNA, 20 bp, Artificial Sequence
  Description of Artificial Sequence: Synthetic oligonucleotide
  Target: LAMA2; (+) strand; PAM type: YTN; PAM sequence: CTG
caatgaagttatctagaata

SEQ ID NO: 369236 - DNA, 20 bp, Artificial Sequence
  Description of Artificial Sequence: Synthetic oligonucleotide
  Target: LAMA2; (+) strand; PAM type: YTN; PAM sequence: TTA
tctagaataggtaacttcat

SEQ ID NO: 369237 - DNA, 20 bp, Artificial Sequence
  Description of Artificial Sequence: Synthetic oligonucleotide
  Target: LAMA2; (+) strand; PAM type: YTN; PAM sequence: CTA
gaataggtaacttcatagca

SEQ ID NO: 369238 - DNA, 20 bp, Artificial Sequence
  Description of Artificial Sequence: Synthetic oligonucleotide
  Target: LAMA2; (+) strand; PAM type: YTN; PAM sequence: CTT
catagcaacaaaagcagatt

SEQ ID NO: 369239 - DNA, 20 bp, Artificial Sequence
  Description of Artificial Sequence: Synthetic oligonucleotide
  Target: LAMA2; (+) strand; PAM type: YTN; PAM sequence: TTC
atagcaacaaaagcagattg

SEQ ID NO: 369240 - DNA, 20 bp, Artificial Sequence
  Description of Artificial Sequence: Synthetic oligonucleotide
  Target: LAMA2; (+) strand; PAM type: YTN; PAM sequence: TTG
ttagtttacaggggttagag

SEQ ID NO: 369241 - DNA, 20 bp, Artificial Sequence
  Description of Artificial Sequence: Synthetic oligonucleotide
  Target: LAMA2; (+) strand; PAM type: YTN; PAM sequence: TTA
gtttacaggggttagaggaa

SEQ ID NO: 369242 - DNA, 20 bp, Artificial Sequence
  Description of Artificial Sequence: Synthetic oligonucleotide
  Target: LAMA2; (+) strand; PAM type: YTN; PAM sequence: TTT
acaggggttagaggaagagg

SEQ ID NO: 369243 - DNA, 20 bp, Artificial Sequence
  Description of Artificial Sequence: Synthetic oligonucleotide
  Target: LAMA2; (+) strand; PAM type: YTN; PAM sequence: TTA
caggggttagaggaagaggg

SEQ ID NO: 369244 - DNA, 20 bp, Artificial Sequence
  Description of Artificial Sequence: Synthetic oligonucleotide
  Target: LAMA2; (+) strand; PAM type: YTN; PAM sequence: TTA
gaggaagaggggaaaagaga

SEQ ID NO: 369245 - DNA, 20 bp, Artificial Sequence
  Description of Artificial Sequence: Synthetic oligonucleotide
  Target: LAMA2; (+) strand; PAM type: YTN; PAM sequence: CTG
cctaatggattctgggtttt

SEQ ID NO: 369246 - DNA, 20 bp, Artificial Sequence
  Description of Artificial Sequence: Synthetic oligonucleotide
  Target: LAMA2; (+) strand; PAM type: YTN; PAM sequence: CTA
atggattctgggttttcttt

SEQ ID NO: 369247 - DNA, 20 bp, Artificial Sequence
  Description of Artificial Sequence: Synthetic oligonucleotide
  Target: LAMA2; (+) strand; PAM type: YTN; PAM sequence: TTC
tgggttttcttttgggctga

SEQ ID NO: 369248 - DNA, 20 bp, Artificial Sequence
  Description of Artificial Sequence: Synthetic oligonucleotide
  Target: LAMA2; (+) strand; PAM type: YTN; PAM sequence: CTG
ggttttcttttgggctgata

SEQ ID NO: 369249 - DNA, 20 bp, Artificial Sequence
  Description of Artificial Sequence: Synthetic oligonucleotide
  Target: LAMA2; (+) strand; PAM type: YTN; PAM sequence: TTT
tcttttgggctgataaaatg

SEQ ID NO: 369250 - DNA, 20 bp, Artificial Sequence
  Description of Artificial Sequence: Synthetic oligonucleotide
  Target: LAMA2; (+) strand; PAM type: YTN; PAM sequence: TTT
cttttgggctgataaaatgt

SEQ ID NO: 369251 - DNA, 20 bp, Artificial Sequence
  Description of Artificial Sequence: Synthetic oligonucleotide
  Target: LAMA2; (+) strand; PAM type: YTN; PAM sequence: TTC
ttttgggctgataaaatgtc

SEQ ID NO: 369252 - DNA, 20 bp, Artificial Sequence
  Description of Artificial Sequence: Synthetic oligonucleotide
  Target: LAMA2; (+) strand; PAM type: YTN; PAM sequence: CTT
ttgggctgataaaatgtctt

SEQ ID NO: 369253 - DNA, 20 bp, Artificial Sequence
  Description of Artificial Sequence: Synthetic oligonucleotide
  Target: LAMA2; (+) strand; PAM type: YTN; PAM sequence: TTT
tgggctgataaaatgtctta

SEQ ID NO: 369254 - DNA, 20 bp, Artificial Sequence
  Description of Artificial Sequence: Synthetic oligonucleotide
  Target: LAMA2; (+) strand; PAM type: YTN; PAM sequence: TTT
gggctgataaaatgtcttag

SEQ ID NO: 369255 - DNA, 20 bp, Artificial Sequence
  Description of Artificial Sequence: Synthetic oligonucleotide
  Target: LAMA2; (+) strand; PAM type: YTN; PAM sequence: TTG
ggctgataaaatgtcttaga

SEQ ID NO: 369256 - DNA, 20 bp, Artificial Sequence
  Description of Artificial Sequence: Synthetic oligonucleotide
  Target: LAMA2; (+) strand; PAM type: YTN; PAM sequence: CTG
ataaaatgtcttagaattag

SEQ ID NO: 369257 - DNA, 20 bp, Artificial Sequence
  Description of Artificial Sequence: Synthetic oligonucleotide
  Target: LAMA2; (+) strand; PAM type: YTN; PAM sequence: CTT
agaattagatatatgtcgta

SEQ ID NO: 369258 - DNA, 20 bp, Artificial Sequence
  Description of Artificial Sequence: Synthetic oligonucleotide
  Target: LAMA2; (+) strand; PAM type: YTN; PAM sequence: TTA
gaattagatatatgtcgtag

SEQ ID NO: 369259 - DNA, 20 bp, Artificial Sequence
  Description of Artificial Sequence: Synthetic oligonucleotide
  Target: LAMA2; (+) strand; PAM type: YTN; PAM sequence: TTA
gatatatgtcgtagttgcac

SEQ ID NO: 369260 - DNA, 20 bp, Artificial Sequence
  Description of Artificial Sequence: Synthetic oligonucleotide
  Target: LAMA2; (+) strand; PAM type: YTN; PAM sequence: TTG
cacaacattgtaaatgtact

SEQ ID NO: 369261 - DNA, 20 bp, Artificial Sequence
  Description of Artificial Sequence: Synthetic oligonucleotide
  Target: LAMA2; (+) strand; PAM type: YTN; PAM sequence: TTG
taaatgtactaaatcacaga

SEQ ID NO: 369262 - DNA, 20 bp, Artificial Sequence
  Description of Artificial Sequence: Synthetic oligonucleotide
  Target: LAMA2; (+) strand; PAM type: YTN; PAM sequence: CTA
aatcacagaattgtacaatt

SEQ ID NO: 369263 - DNA, 20 bp, Artificial Sequence
  Description of Artificial Sequence: Synthetic oligonucleotide
  Target: LAMA2; (+) strand; PAM type: YTN; PAM sequence: TTG
tacaatttattttttaaatt

SEQ ID NO: 369264 - DNA, 20 bp, Artificial Sequence
  Description of Artificial Sequence: Synthetic oligonucleotide
  Target: LAMA2; (+) strand; PAM type: YTN; PAM sequence: TTT
attttttaaattttaaatag

SEQ ID NO: 369265 - DNA, 20 bp, Artificial Sequence
  Description of Artificial Sequence: Synthetic oligonucleotide
  Target: LAMA2; (+) strand; PAM type: YTN; PAM sequence: TTA
ttttttaaattttaaatagg

SEQ ID NO: 369266 - DNA, 20 bp, Artificial Sequence
  Description of Artificial Sequence: Synthetic oligonucleotide
  Target: LAMA2; (+) strand; PAM type: YTN; PAM sequence: TTT
tttaaattttaaataggttt

SEQ ID NO: 369267 - DNA, 20 bp, Artificial Sequence
  Description of Artificial Sequence: Synthetic oligonucleotide
  Target: LAMA2; (+) strand; PAM type: YTN; PAM sequence: TTT
ttaaattttaaataggtttg

SEQ ID NO: 369268 - DNA, 20 bp, Artificial Sequence
  Description of Artificial Sequence: Synthetic oligonucleotide
  Target: LAMA2; (+) strand; PAM type: YTN; PAM sequence: TTT
taaattttaaataggtttga

SEQ ID NO: 369269 - DNA, 20 bp, Artificial Sequence
  Description of Artificial Sequence: Synthetic oligonucleotide
  Target: LAMA2; (+) strand; PAM type: YTN; PAM sequence: TTT
aaattttaaataggtttgaa

SEQ ID NO: 369270 - DNA, 20 bp, Artificial Sequence
  Description of Artificial Sequence: Synthetic oligonucleotide
  Target: LAMA2; (+) strand; PAM type: YTN; PAM sequence: TTA
aattttaaataggtttgaaa

SEQ ID NO: 369271 - DNA, 20 bp, Artificial Sequence
  Description of Artificial Sequence: Synthetic oligonucleotide
  Target: LAMA2; (+) strand; PAM type: YTN; PAM sequence: TTT
taaataggtttgaaaatttt

SEQ ID NO: 369272 - DNA, 20 bp, Artificial Sequence
  Description of Artificial Sequence: Synthetic oligonucleotide
  Target: LAMA2; (+) strand; PAM type: YTN; PAM sequence: TTT
aaataggtttgaaaattttc

SEQ ID NO: 369273 - DNA, 20 bp, Artificial Sequence
  Description of Artificial Sequence: Synthetic oligonucleotide
  Target: LAMA2; (+) strand; PAM type: YTN; PAM sequence: TTA
aataggtttgaaaattttca

SEQ ID NO: 369274 - DNA, 20 bp, Artificial Sequence
  Description of Artificial Sequence: Synthetic oligonucleotide
  Target: LAMA2; (+) strand; PAM type: YTN; PAM sequence: TTT
gaaaattttcatcctacccc

SEQ ID NO: 369275 - DNA, 20 bp, Artificial Sequence
  Description of Artificial Sequence: Synthetic oligonucleotide
  Target: LAMA2; (+) strand; PAM type: YTN; PAM sequence: TTG
aaaattttcatcctacccca

SEQ ID NO: 369276 - DNA, 20 bp, Artificial Sequence
  Description of Artificial Sequence: Synthetic oligonucleotide
  Target: LAMA2; (+) strand; PAM type: YTN; PAM sequence: TTT
tcatcctaccccaaatgtca

SEQ ID NO: 369277 - DNA, 20 bp, Artificial Sequence
  Description of Artificial Sequence: Synthetic oligonucleotide
  Target: LAMA2; (+) strand; PAM type: YTN; PAM sequence: TTT
catcctaccccaaatgtcaa

SEQ ID NO: 369278 - DNA, 20 bp, Artificial Sequence
  Description of Artificial Sequence: Synthetic oligonucleotide
  Target: LAMA2; (+) strand; PAM type: YTN; PAM sequence: TTC
atcctaccccaaatgtcaaa

SEQ ID NO: 369279 - DNA, 20 bp, Artificial Sequence
  Description of Artificial Sequence: Synthetic oligonucleotide
  Target: LAMA2; (+) strand; PAM type: YTN; PAM sequence: CTA
ccccaaatgtcaaagttcct

SEQ ID NO: 369280 - DNA, 20 bp, Artificial Sequence
  Description of Artificial Sequence: Synthetic oligonucleotide
  Target: LAMA2; (+) strand; PAM type: YTN; PAM sequence: TTC
ctctctatgtacaacttgaa

SEQ ID NO: 369281 - DNA, 20 bp, Artificial Sequence
  Description of Artificial Sequence: Synthetic oligonucleotide
  Target: LAMA2; (+) strand; PAM type: YTN; PAM sequence: CTC
tctatgtacaacttgaaatg

SEQ ID NO: 369282 - DNA, 20 bp, Artificial Sequence
  Description of Artificial Sequence: Synthetic oligonucleotide
  Target: LAMA2; (+) strand; PAM type: YTN; PAM sequence: CTC
tatgtacaacttgaaatgct

SEQ ID NO: 369283 - DNA, 20 bp, Artificial Sequence
  Description of Artificial Sequence: Synthetic oligonucleotide
  Target: LAMA2; (+) strand; PAM type: YTN; PAM sequence: CTA
tgtacaacttgaaatgctta

SEQ ID NO: 369284 - DNA, 20 bp, Artificial Sequence
  Description of Artificial Sequence: Synthetic oligonucleotide
  Target: LAMA2; (+) strand; PAM type: YTN; PAM sequence: CTT
gaaatgcttaattttatatg

SEQ ID NO: 369285 - DNA, 20 bp, Artificial Sequence
  Description of Artificial Sequence: Synthetic oligonucleotide
  Target: LAMA2; (+) strand; PAM type: YTN; PAM sequence: TTG
aaatgcttaattttatatga

SEQ ID NO: 369286 - DNA, 20 bp, Artificial Sequence
  Description of Artificial Sequence: Synthetic oligonucleotide
  Target: LAMA2; (+) strand; PAM type: YTN; PAM sequence: CTT
aattttatatgatgtgaatt

SEQ ID NO: 369287 - DNA, 20 bp, Artificial Sequence
  Description of Artificial Sequence: Synthetic oligonucleotide
  Target: LAMA2; (+) strand; PAM type: YTN; PAM sequence: TTA
attttatatgatgtgaattt

SEQ ID NO: 369288 - DNA, 20 bp, Artificial Sequence
  Description of Artificial Sequence: Synthetic oligonucleotide
  Target: LAMA2; (+) strand; PAM type: YTN; PAM sequence: TTT
tatatgatgtgaatttcatc

SEQ ID NO: 369289 - DNA, 20 bp, Artificial Sequence
  Description of Artificial Sequence: Synthetic oligonucleotide
  Target: LAMA2; (+) strand; PAM type: YTN; PAM sequence: TTT
atatgatgtgaatttcatct

SEQ ID NO: 369290 - DNA, 20 bp, Artificial Sequence
  Description of Artificial Sequence: Synthetic oligonucleotide
  Target: LAMA2; (+) strand; PAM type: YTN; PAM sequence: TTA
tatgatgtgaatttcatcta

SEQ ID NO: 369291 - DNA, 20 bp, Artificial Sequence
  Description of Artificial Sequence: Synthetic oligonucleotide
  Target: LAMA2; (+) strand; PAM type: YTN; PAM sequence: TTT
catctaaactaatgacaaga

SEQ ID NO: 369292 - DNA, 20 bp, Artificial Sequence
  Description of Artificial Sequence: Synthetic oligonucleotide
  Target: LAMA2; (+) strand; PAM type: YTN; PAM sequence: TTC
atctaaactaatgacaagaa

SEQ ID NO: 369293 - DNA, 20 bp, Artificial Sequence
  Description of Artificial Sequence: Synthetic oligonucleotide
  Target: LAMA2; (+) strand; PAM type: YTN; PAM sequence: CTA
aactaatgacaagaaaagta

SEQ ID NO: 369294 - DNA, 20 bp, Artificial Sequence
  Description of Artificial Sequence: Synthetic oligonucleotide
  Target: LAMA2; (+) strand; PAM type: YTN; PAM sequence: CTA
atgacaagaaaagtaaatgc

SEQ ID NO: 369295 - DNA, 20 bp, Artificial Sequence
  Description of Artificial Sequence: Synthetic oligonucleotide
  Target: LAMA2; (+) strand; PAM type: YTN; PAM sequence: CTG
tgacactgcatttttcattg

SEQ ID NO: 369296 - DNA, 20 bp, Artificial Sequence
  Description of Artificial Sequence: Synthetic oligonucleotide
  Target: LAMA2; (+) strand; PAM type: YTN; PAM sequence: CTG
catttttcattgacagggtt

SEQ ID NO: 369297 - DNA, 20 bp, Artificial Sequence
  Description of Artificial Sequence: Synthetic oligonucleotide
  Target: LAMA2; (+) strand; PAM type: YTN; PAM sequence: TTT
ttcattgacagggttcctca

SEQ ID NO: 369298 - DNA, 20 bp, Artificial Sequence
  Description of Artificial Sequence: Synthetic oligonucleotide
  Target: LAMA2; (+) strand; PAM type: YTN; PAM sequence: TTT
tcattgacagggttcctcag

SEQ ID NO: 369299 - DNA, 20 bp, Artificial Sequence
  Description of Artificial Sequence: Synthetic oligonucleotide
  Target: LAMA2; (+) strand; PAM type: YTN; PAM sequence: TTT
cattgacagggttcctcagt

SEQ ID NO: 369300 - DNA, 20 bp, Artificial Sequence
  Description of Artificial Sequence: Synthetic oligonucleotide
  Target: LAMA2; (+) strand; PAM type: YTN; PAM sequence: TTC
attgacagggttcctcagtg

SEQ ID NO: 369301 - DNA, 20 bp, Artificial Sequence
  Description of Artificial Sequence: Synthetic oligonucleotide
  Target: LAMA2; (+) strand; PAM type: YTN; PAM sequence: TTG
acagggttcctcagtgaggg

SEQ ID NO: 369302 - DNA, 20 bp, Artificial Sequence
  Description of Artificial Sequence: Synthetic oligonucleotide
  Target: LAMA2; (+) strand; PAM type: YTN; PAM sequence: TTC
ctcagtgaggggggaaaaaa

SEQ ID NO: 369303 - DNA, 20 bp, Artificial Sequence
  Description of Artificial Sequence: Synthetic oligonucleotide
  Target: LAMA2; (+) strand; PAM type: YTN; PAM sequence: CTC
agtgaggggggaaaaaagca

SEQ ID NO: 369304 - DNA, 20 bp, Artificial Sequence
  Description of Artificial Sequence: Synthetic oligonucleotide
  Target: LAMA2; (+) strand; PAM type: YTN; PAM sequence: TTT
aatgattttcaaatgacaca

SEQ ID NO: 369305 - DNA, 20 bp, Artificial Sequence
  Description of Artificial Sequence: Synthetic oligonucleotide
  Target: LAMA2; (+) strand; PAM type: YTN; PAM sequence: TTA
atgattttcaaatgacacat

SEQ ID NO: 369306 - DNA, 20 bp, Artificial Sequence
  Description of Artificial Sequence: Synthetic oligonucleotide
  Target: LAMA2; (+) strand; PAM type: YTN; PAM sequence: TTT
tcaaatgacacatgtaacct

SEQ ID NO: 369307 - DNA, 20 bp, Artificial Sequence
  Description of Artificial Sequence: Synthetic oligonucleotide
  Target: LAMA2; (+) strand; PAM type: YTN; PAM sequence: TTT
caaatgacacatgtaaccta

SEQ ID NO: 369308 - DNA, 20 bp, Artificial Sequence
  Description of Artificial Sequence: Synthetic oligonucleotide
  Target: LAMA2; (+) strand; PAM type: YTN; PAM sequence: TTC
aaatgacacatgtaacctaa

SEQ ID NO: 369309 - DNA, 20 bp, Artificial Sequence
  Description of Artificial Sequence: Synthetic oligonucleotide
  Target: LAMA2; (+) strand; PAM type: YTN; PAM sequence: CTA
aacactataggacagtgata

SEQ ID NO: 369310 - DNA, 20 bp, Artificial Sequence
  Description of Artificial Sequence: Synthetic oligonucleotide
  Target: LAMA2; (+) strand; PAM type: YTN; PAM sequence: CTA
taggacagtgatatttgcct

SEQ ID NO: 369311 - DNA, 20 bp, Artificial Sequence
  Description of Artificial Sequence: Synthetic oligonucleotide
  Target: LAMA2; (+) strand; PAM type: YTN; PAM sequence: TTT
gcctaatctagaaccttcta

SEQ ID NO: 369312 - DNA, 20 bp, Artificial Sequence
  Description of Artificial Sequence: Synthetic oligonucleotide
  Target: LAMA2; (+) strand; PAM type: YTN; PAM sequence: TTG
cctaatctagaaccttctac

SEQ ID NO: 369313 - DNA, 20 bp, Artificial Sequence
  Description of Artificial Sequence: Synthetic oligonucleotide
  Target: LAMA2; (+) strand; PAM type: YTN; PAM sequence: CTA
atctagaaccttctaccagg

SEQ ID NO: 369314 - DNA, 20 bp, Artificial Sequence
  Description of Artificial Sequence: Synthetic oligonucleotide
  Target: LAMA2; (+) strand; PAM type: YTN; PAM sequence: CTA
gaaccttctaccaggttgtc

SEQ ID NO: 369315 - DNA, 20 bp, Artificial Sequence
  Description of Artificial Sequence: Synthetic oligonucleotide
  Target: LAMA2; (+) strand; PAM type: YTN; PAM sequence: CTT
ctaccaggttgtccaagatg

SEQ ID NO: 369316 - DNA, 20 bp, Artificial Sequence
  Description of Artificial Sequence: Synthetic oligonucleotide
  Target: LAMA2; (+) strand; PAM type: YTN; PAM sequence: TTC
taccaggttgtccaagatgt

SEQ ID NO: 369317 - DNA, 20 bp, Artificial Sequence
  Description of Artificial Sequence: Synthetic oligonucleotide
  Target: LAMA2; (+) strand; PAM type: YTN; PAM sequence: CTA
ccaggttgtccaagatgtgc

SEQ ID NO: 369318 - DNA, 20 bp, Artificial Sequence
  Description of Artificial Sequence: Synthetic oligonucleotide
  Target: LAMA2; (+) strand; PAM type: YTN; PAM sequence: TTG
tccaagatgtgcccctagag

SEQ ID NO: 369319 - DNA, 20 bp, Artificial Sequence
  Description of Artificial Sequence: Synthetic oligonucleotide
  Target: LAMA2; (+) strand; PAM type: YTN; PAM sequence: CTA
gagaatatagcactcaatta

SEQ ID NO: 369320 - DNA, 20 bp, Artificial Sequence
  Description of Artificial Sequence: Synthetic oligonucleotide
  Target: LAMA2; (+) strand; PAM type: YTN; PAM sequence: CTC
aattaatagtgttggatgag

SEQ ID NO: 369321 - DNA, 20 bp, Artificial Sequence
  Description of Artificial Sequence: Synthetic oligonucleotide
  Target: LAMA2; (+) strand; PAM type: YTN; PAM sequence: TTA
atagtgttggatgagtttat

SEQ ID NO: 369322 - DNA, 20 bp, Artificial Sequence
  Description of Artificial Sequence: Synthetic oligonucleotide
  Target: LAMA2; (+) strand; PAM type: YTN; PAM sequence: TTG
gatgagtttatttacaggta

SEQ ID NO: 369323 - DNA, 20 bp, Artificial Sequence
  Description of Artificial Sequence: Synthetic oligonucleotide
  Target: LAMA2; (+) strand; PAM type: YTN; PAM sequence: TTT
atttacaggtaaagataatt

SEQ ID NO: 369324 - DNA, 20 bp, Artificial Sequence
  Description of Artificial Sequence: Synthetic oligonucleotide
  Target: LAMA2; (+) strand; PAM type: YTN; PAM sequence: TTA
tttacaggtaaagataattg

SEQ ID NO: 369325 - DNA, 20 bp, Artificial Sequence
  Description of Artificial Sequence: Synthetic oligonucleotide
  Target: LAMA2; (+) strand; PAM type: YTN; PAM sequence: TTT
acaggtaaagataattgcct

SEQ ID NO: 369326 - DNA, 20 bp, Artificial Sequence
  Description of Artificial Sequence: Synthetic oligonucleotide
  Target: LAMA2; (+) strand; PAM type: YTN; PAM sequence: TTA
caggtaaagataattgcctt

SEQ ID NO: 369327 - DNA, 20 bp, Artificial Sequence
  Description of Artificial Sequence: Synthetic oligonucleotide
  Target: LAMA2; (+) strand; PAM type: YTN; PAM sequence: TTG
ccttgtgtttagagggtgcc

SEQ ID NO: 369328 - DNA, 20 bp, Artificial Sequence
  Description of Artificial Sequence: Synthetic oligonucleotide
  Target: LAMA2; (+) strand; PAM type: YTN; PAM sequence: CTT
gtgtttagagggtgccatct

SEQ ID NO: 369329 - DNA, 20 bp, Artificial Sequence
  Description of Artificial Sequence: Synthetic oligonucleotide
  Target: LAMA2; (+) strand; PAM type: YTN; PAM sequence: TTG
tgtttagagggtgccatctg

SEQ ID NO: 369330 - DNA, 20 bp, Artificial Sequence
  Description of Artificial Sequence: Synthetic oligonucleotide
  Target: LAMA2; (+) strand; PAM type: YTN; PAM sequence: TTT
agagggtgccatctggcact

SEQ ID NO: 369331 - DNA, 20 bp, Artificial Sequence
  Description of Artificial Sequence: Synthetic oligonucleotide
  Target: LAMA2; (+) strand; PAM type: YTN; PAM sequence: TTA
gagggtgccatctggcactc

SEQ ID NO: 369332 - DNA, 20 bp, Artificial Sequence
  Description of Artificial Sequence: Synthetic oligonucleotide
  Target: LAMA2; (+) strand; PAM type: YTN; PAM sequence: CTG
gcactcagcagccaggatga

SEQ ID NO: 369333 - DNA, 20 bp, Artificial Sequence
  Description of Artificial Sequence: Synthetic oligonucleotide
  Target: LAMA2; (+) strand; PAM type: YTN; PAM sequence: CTC
agcagccaggatgattccat

SEQ ID NO: 369334 - DNA, 20 bp, Artificial Sequence
  Description of Artificial Sequence: Synthetic oligonucleotide
  Target: LAMA2; (+) strand; PAM type: YTN; PAM sequence: TTC
catccaactgcctatatctg

SEQ ID NO: 369335 - DNA, 20 bp, Artificial Sequence
  Description of Artificial Sequence: Synthetic oligonucleotide
  Target: LAMA2; (+) strand; PAM type: YTN; PAM sequence: CTG
cctatatctggtgatttcag

SEQ ID NO: 369336 - DNA, 20 bp, Artificial Sequence
  Description of Artificial Sequence: Synthetic oligonucleotide
  Target: LAMA2; (+) strand; PAM type: YTN; PAM sequence: CTA
tatctggtgatttcagggtt

SEQ ID NO: 369337 - DNA, 20 bp, Artificial Sequence
  Description of Artificial Sequence: Synthetic oligonucleotide
  Target: LAMA2; (+) strand; PAM type: YTN; PAM sequence: CTG
gtgatttcagggttaatttc

SEQ ID NO: 369338 - DNA, 20 bp, Artificial Sequence
  Description of Artificial Sequence: Synthetic oligonucleotide
  Target: LAMA2; (+) strand; PAM type: YTN; PAM sequence: TTT
cagggttaatttccttttct

SEQ ID NO: 369339 - DNA, 20 bp, Artificial Sequence
  Description of Artificial Sequence: Synthetic oligonucleotide
  Target: LAMA2; (+) strand; PAM type: YTN; PAM sequence: TTC
agggttaatttccttttctg

SEQ ID NO: 369340 - DNA, 20 bp, Artificial Sequence
  Description of Artificial Sequence: Synthetic oligonucleotide
  Target: LAMA2; (+) strand; PAM type: YTN; PAM sequence: TTA
atttccttttctgcttcctg

SEQ ID NO: 369341 - DNA, 20 bp, Artificial Sequence
  Description of Artificial Sequence: Synthetic oligonucleotide
  Target: LAMA2; (+) strand; PAM type: YTN; PAM sequence: TTT
ccttttctgcttcctgatca

SEQ ID NO: 369342 - DNA, 20 bp, Artificial Sequence
  Description of Artificial Sequence: Synthetic oligonucleotide
  Target: LAMA2; (+) strand; PAM type: YTN; PAM sequence: TTC
cttttctgcttcctgatcat

SEQ ID NO: 369343 - DNA, 20 bp, Artificial Sequence
  Description of Artificial Sequence: Synthetic oligonucleotide
  Target: LAMA2; (+) strand; PAM type: YTN; PAM sequence: CTT
ttctgcttcctgatcatata

SEQ ID NO: 369344 - DNA, 20 bp, Artificial Sequence
  Description of Artificial Sequence: Synthetic oligonucleotide
  Target: LAMA2; (+) strand; PAM type: YTN; PAM sequence: TTT
tctgcttcctgatcatatat

SEQ ID NO: 369345 - DNA, 20 bp, Artificial Sequence
  Description of Artificial Sequence: Synthetic oligonucleotide
  Target: LAMA2; (+) strand; PAM type: YTN; PAM sequence: TTT
ctgcttcctgatcatatatg

SEQ ID NO: 369346 - DNA, 20 bp, Artificial Sequence
  Description of Artificial Sequence: Synthetic oligonucleotide
  Target: LAMA2; (+) strand; PAM type: YTN; PAM sequence: TTC
tgcttcctgatcatatatga

SEQ ID NO: 369347 - DNA, 20 bp, Artificial Sequence
  Description of Artificial Sequence: Synthetic oligonucleotide
  Target: LAMA2; (+) strand; PAM type: YTN; PAM sequence: CTG
cttcctgatcatatatgagc

SEQ ID NO: 369348 - DNA, 20 bp, Artificial Sequence
  Description of Artificial Sequence: Synthetic oligonucleotide
  Target: LAMA2; (+) strand; PAM type: YTN; PAM sequence: CTT
cctgatcatatatgagctca

SEQ ID NO: 369349 - DNA, 20 bp, Artificial Sequence
  Description of Artificial Sequence: Synthetic oligonucleotide
  Target: LAMA2; (+) strand; PAM type: YTN; PAM sequence: TTC
ctgatcatatatgagctcat

SEQ ID NO: 369350 - DNA, 20 bp, Artificial Sequence
  Description of Artificial Sequence: Synthetic oligonucleotide
  Target: LAMA2; (+) strand; PAM type: YTN; PAM sequence: CTG
atcatatatgagctcataca

SEQ ID NO: 369351 - DNA, 20 bp, Artificial Sequence
  Description of Artificial Sequence: Synthetic oligonucleotide
  Target: LAMA2; (+) strand; PAM type: YTN; PAM sequence: CTC
atacatattcaaaagtactg

SEQ ID NO: 369352 - DNA, 20 bp, Artificial Sequence
  Description of Artificial Sequence: Synthetic oligonucleotide
  Target: LAMA2; (+) strand; PAM type: YTN; PAM sequence: TTC
aaaagtactgtcaagtgtct

SEQ ID NO: 369353 - DNA, 20 bp, Artificial Sequence
  Description of Artificial Sequence: Synthetic oligonucleotide
  Target: LAMA2; (+) strand; PAM type: YTN; PAM sequence: CTG
tcaagtgtctaggattagca

SEQ ID NO: 369354 - DNA, 20 bp, Artificial Sequence
  Description of Artificial Sequence: Synthetic oligonucleotide
  Target: LAMA2; (+) strand; PAM type: YTN; PAM sequence: CTA
ggattagcaaagtgggggta

SEQ ID NO: 369355 - DNA, 20 bp, Artificial Sequence
  Description of Artificial Sequence: Synthetic oligonucleotide
  Target: LAMA2; (+) strand; PAM type: YTN; PAM sequence: TTA
gcaaagtgggggtaaaagca

SEQ ID NO: 369356 - DNA, 20 bp, Artificial Sequence
  Description of Artificial Sequence: Synthetic oligonucleotide
  Target: LAMA2; (+) strand; PAM type: YTN; PAM sequence: TTT
tagaaatctattgctgaaaa

SEQ ID NO: 369357 - DNA, 20 bp, Artificial Sequence
  Description of Artificial Sequence: Synthetic oligonucleotide
  Target: LAMA2; (+) strand; PAM type: YTN; PAM sequence: TTT
agaaatctattgctgaaaag

SEQ ID NO: 369358 - DNA, 20 bp, Artificial Sequence
  Description of Artificial Sequence: Synthetic oligonucleotide
  Target: LAMA2; (+) strand; PAM type: YTN; PAM sequence: TTA
gaaatctattgctgaaaagc

SEQ ID NO: 369359 - DNA, 20 bp, Artificial Sequence
  Description of Artificial Sequence: Synthetic oligonucleotide
  Target: LAMA2; (+) strand; PAM type: YTN; PAM sequence: CTA
ttgctgaaaagcttacaatt

SEQ ID NO: 369360 - DNA, 20 bp, Artificial Sequence
  Description of Artificial Sequence: Synthetic oligonucleotide
  Target: LAMA2; (+) strand; PAM type: YTN; PAM sequence: TTG
ctgaaaagcttacaatttgg

SEQ ID NO: 369361 - DNA, 20 bp, Artificial Sequence
  Description of Artificial Sequence: Synthetic oligonucleotide
  Target: LAMA2; (+) strand; PAM type: YTN; PAM sequence: CTG
aaaagcttacaatttggata

SEQ ID NO: 369362 - DNA, 20 bp, Artificial Sequence
  Description of Artificial Sequence: Synthetic oligonucleotide
  Target: LAMA2; (+) strand; PAM type: YTN; PAM sequence: CTT
acaatttggataaagatcat

SEQ ID NO: 369363 - DNA, 20 bp, Artificial Sequence
  Description of Artificial Sequence: Synthetic oligonucleotide
  Target: LAMA2; (+) strand; PAM type: YTN; PAM sequence: TTA
caatttggataaagatcatc

SEQ ID NO: 369364 - DNA, 20 bp, Artificial Sequence
  Description of Artificial Sequence: Synthetic oligonucleotide
  Target: LAMA2; (+) strand; PAM type: YTN; PAM sequence: TTT
ggataaagatcatcactttt

SEQ ID NO: 369365 - DNA, 20 bp, Artificial Sequence
  Description of Artificial Sequence: Synthetic oligonucleotide
  Target: LAMA2; (+) strand; PAM type: YTN; PAM sequence: TTG
gataaagatcatcacttttg

SEQ ID NO: 369366 - DNA, 20 bp, Artificial Sequence
  Description of Artificial Sequence: Synthetic oligonucleotide
  Target: LAMA2; (+) strand; PAM type: YTN; PAM sequence: CTT
ttgaagatatgtttacacct

SEQ ID NO: 369367 - DNA, 20 bp, Artificial Sequence
  Description of Artificial Sequence: Synthetic oligonucleotide
  Target: LAMA2; (+) strand; PAM type: YTN; PAM sequence: TTT
tgaagatatgtttacacctt

SEQ ID NO: 369368 - DNA, 20 bp, Artificial Sequence
  Description of Artificial Sequence: Synthetic oligonucleotide
  Target: LAMA2; (+) strand; PAM type: YTN; PAM sequence: TTT
gaagatatgtttacaccttg

SEQ ID NO: 369369 - DNA, 20 bp, Artificial Sequence
  Description of Artificial Sequence: Synthetic oligonucleotide
  Target: LAMA2; (+) strand; PAM type: YTN; PAM sequence: TTG
aagatatgtttacaccttgt

SEQ ID NO: 369370 - DNA, 20 bp, Artificial Sequence
  Description of Artificial Sequence: Synthetic oligonucleotide
  Target: LAMA2; (+) strand; PAM type: YTN; PAM sequence: TTT
acaccttgtaatgagccttt

SEQ ID NO: 369371 - DNA, 20 bp, Artificial Sequence
  Description of Artificial Sequence: Synthetic oligonucleotide
  Target: LAMA2; (+) strand; PAM type: YTN; PAM sequence: TTA
caccttgtaatgagcctttt

SEQ ID NO: 369372 - DNA, 20 bp, Artificial Sequence
  Description of Artificial Sequence: Synthetic oligonucleotide
  Target: LAMA2; (+) strand; PAM type: YTN; PAM sequence: CTT
gtaatgagccttttagcttt

SEQ ID NO: 369373 - DNA, 20 bp, Artificial Sequence
  Description of Artificial Sequence: Synthetic oligonucleotide
  Target: LAMA2; (+) strand; PAM type: YTN; PAM sequence: TTG
taatgagccttttagctttg

SEQ ID NO: 369374 - DNA, 20 bp, Artificial Sequence
  Description of Artificial Sequence: Synthetic oligonucleotide
  Target: LAMA2; (+) strand; PAM type: YTN; PAM sequence: CTT
ttagctttgctctctggctt

SEQ ID NO: 369375 - DNA, 20 bp, Artificial Sequence
  Description of Artificial Sequence: Synthetic oligonucleotide
  Target: LAMA2; (+) strand; PAM type: YTN; PAM sequence: TTT
tagctttgctctctggcttg

SEQ ID NO: 369376 - DNA, 20 bp, Artificial Sequence
  Description of Artificial Sequence: Synthetic oligonucleotide
  Target: LAMA2; (+) strand; PAM type: YTN; PAM sequence: TTT
agctttgctctctggcttga

SEQ ID NO: 369377 - DNA, 20 bp, Artificial Sequence
  Description of Artificial Sequence: Synthetic oligonucleotide
  Target: LAMA2; (+) strand; PAM type: YTN; PAM sequence: TTA
gctttgctctctggcttgat

SEQ ID NO: 369378 - DNA, 20 bp, Artificial Sequence
  Description of Artificial Sequence: Synthetic oligonucleotide
  Target: LAMA2; (+) strand; PAM type: YTN; PAM sequence: CTT
tgctctctggcttgattccc

SEQ ID NO: 369379 - DNA, 20 bp, Artificial Sequence
  Description of Artificial Sequence: Synthetic oligonucleotide
  Target: LAMA2; (+) strand; PAM type: YTN; PAM sequence: TTT
gctctctggcttgattccca

SEQ ID NO: 369380 - DNA, 20 bp, Artificial Sequence
  Description of Artificial Sequence: Synthetic oligonucleotide
  Target: LAMA2; (+) strand; PAM type: YTN; PAM sequence: TTG
ctctctggcttgattcccaa

SEQ ID NO: 369381 - DNA, 20 bp, Artificial Sequence
  Description of Artificial Sequence: Synthetic oligonucleotide
  Target: LAMA2; (+) strand; PAM type: YTN; PAM sequence: CTC
tctggcttgattcccaaatt

SEQ ID NO: 369382 - DNA, 20 bp, Artificial Sequence
  Description of Artificial Sequence: Synthetic oligonucleotide
  Target: LAMA2; (+) strand; PAM type: YTN; PAM sequence: CTC
tggcttgattcccaaattcc

SEQ ID NO: 369383 - DNA, 20 bp, Artificial Sequence
  Description of Artificial Sequence: Synthetic oligonucleotide
  Target: LAMA2; (+) strand; PAM type: YTN; PAM sequence: CTG
gcttgattcccaaattccca

SEQ ID NO: 369384 - DNA, 20 bp, Artificial Sequence
  Description of Artificial Sequence: Synthetic oligonucleotide
  Target: LAMA2; (+) strand; PAM type: YTN; PAM sequence: CTT
gattcccaaattcccagcat

SEQ ID NO: 369385 - DNA, 20 bp, Artificial Sequence
  Description of Artificial Sequence: Synthetic oligonucleotide
  Target: LAMA2; (+) strand; PAM type: YTN; PAM sequence: TTG
attcccaaattcccagcatt

SEQ ID NO: 369386 - DNA, 20 bp, Artificial Sequence
  Description of Artificial Sequence: Synthetic oligonucleotide
  Target: LAMA2; (+) strand; PAM type: YTN; PAM sequence: TTC
ccaaattcccagcattgatt

SEQ ID NO: 369387 - DNA, 20 bp, Artificial Sequence
  Description of Artificial Sequence: Synthetic oligonucleotide
  Target: LAMA2; (+) strand; PAM type: YTN; PAM sequence: TTC
ccagcattgattcccaaatc

SEQ ID NO: 369388 - DNA, 20 bp, Artificial Sequence
  Description of Artificial Sequence: Synthetic oligonucleotide
  Target: LAMA2; (+) strand; PAM type: YTN; PAM sequence: TTG
attcccaaatctaacaagtt

SEQ ID NO: 369389 - DNA, 20 bp, Artificial Sequence
  Description of Artificial Sequence: Synthetic oligonucleotide
  Target: LAMA2; (+) strand; PAM type: YTN; PAM sequence: TTC
ccaaatctaacaagttattt

SEQ ID NO: 369390 - DNA, 20 bp, Artificial Sequence
  Description of Artificial Sequence: Synthetic oligonucleotide
  Target: LAMA2; (+) strand; PAM type: YTN; PAM sequence: CTA
acaagttatttggtaattgt

SEQ ID NO: 369391 - DNA, 20 bp, Artificial Sequence
  Description of Artificial Sequence: Synthetic oligonucleotide
  Target: LAMA2; (+) strand; PAM type: YTN; PAM sequence: TTA
tttggtaattgtgaatcact

SEQ ID NO: 369392 - DNA, 20 bp, Artificial Sequence
  Description of Artificial Sequence: Synthetic oligonucleotide
  Target: LAMA2; (+) strand; PAM type: YTN; PAM sequence: TTT
ggtaattgtgaatcactgat

SEQ ID NO: 369393 - DNA, 20 bp, Artificial Sequence
  Description of Artificial Sequence: Synthetic oligonucleotide
  Target: LAMA2; (+) strand; PAM type: YTN; PAM sequence: TTG
gtaattgtgaatcactgatc

SEQ ID NO: 369394 - DNA, 20 bp, Artificial Sequence
  Description of Artificial Sequence: Synthetic oligonucleotide
  Target: LAMA2; (+) strand; PAM type: YTN; PAM sequence: TTG
tgaatcactgatcaacaaaa

SEQ ID NO: 369395 - DNA, 20 bp, Artificial Sequence
  Description of Artificial Sequence: Synthetic oligonucleotide
  Target: LAMA2; (+) strand; PAM type: YTN; PAM sequence: CTG
atcaacaaaaatctaccatc

SEQ ID NO: 369396 - DNA, 20 bp, Artificial Sequence
  Description of Artificial Sequence: Synthetic oligonucleotide
  Target: LAMA2; (+) strand; PAM type: YTN; PAM sequence: CTA
ccatcactcctgagaaagga

SEQ ID NO: 369397 - DNA, 20 bp, Artificial Sequence
  Description of Artificial Sequence: Synthetic oligonucleotide
  Target: LAMA2; (+) strand; PAM type: YTN; PAM sequence: CTC
ctgagaaaggaactgaaaaa

SEQ ID NO: 369398 - DNA, 20 bp, Artificial Sequence
  Description of Artificial Sequence: Synthetic oligonucleotide
  Target: LAMA2; (+) strand; PAM type: YTN; PAM sequence: CTG
agaaaggaactgaaaaatgc

SEQ ID NO: 369399 - DNA, 20 bp, Artificial Sequence
  Description of Artificial Sequence: Synthetic oligonucleotide
  Target: LAMA2; (+) strand; PAM type: YTN; PAM sequence: CTG
aaaaatgcaggccatagcga

SEQ ID NO: 369400 - DNA, 20 bp, Artificial Sequence
  Description of Artificial Sequence: Synthetic oligonucleotide
  Target: LAMA2; (+) strand; PAM type: YTN; PAM sequence: TTG
cttctttcttatggttacaa

SEQ ID NO: 369401 - DNA, 20 bp, Artificial Sequence
  Description of Artificial Sequence: Synthetic oligonucleotide
  Target: LAMA2; (+) strand; PAM type: YTN; PAM sequence: CTT
ctttcttatggttacaagat

SEQ ID NO: 369402 - DNA, 20 bp, Artificial Sequence
  Description of Artificial Sequence: Synthetic oligonucleotide
  Target: LAMA2; (+) strand; PAM type: YTN; PAM sequence: TTC
tttcttatggttacaagatg

SEQ ID NO: 369403 - DNA, 20 bp, Artificial Sequence
  Description of Artificial Sequence: Synthetic oligonucleotide
  Target: LAMA2; (+) strand; PAM type: YTN; PAM sequence: CTT
tcttatggttacaagatgcc

SEQ ID NO: 369404 - DNA, 20 bp, Artificial Sequence
  Description of Artificial Sequence: Synthetic oligonucleotide
  Target: LAMA2; (+) strand; PAM type: YTN; PAM sequence: TTT
cttatggttacaagatgcca

SEQ ID NO: 369405 - DNA, 20 bp, Artificial Sequence
  Description of Artificial Sequence: Synthetic oligonucleotide
  Target: LAMA2; (+) strand; PAM type: YTN; PAM sequence: TTC
ttatggttacaagatgccat

SEQ ID NO: 369406 - DNA, 20 bp, Artificial Sequence
  Description of Artificial Sequence: Synthetic oligonucleotide
  Target: LAMA2; (+) strand; PAM type: YTN; PAM sequence: CTT
atggttacaagatgccatat

SEQ ID NO: 369407 - DNA, 20 bp, Artificial Sequence
  Description of Artificial Sequence: Synthetic oligonucleotide
  Target: LAMA2; (+) strand; PAM type: YTN; PAM sequence: TTA
tggttacaagatgccatatc

SEQ ID NO: 369408 - DNA, 20 bp, Artificial Sequence
  Description of Artificial Sequence: Synthetic oligonucleotide
  Target: LAMA2; (+) strand; PAM type: YTN; PAM sequence: TTA
caagatgccatatcatatgc

SEQ ID NO: 369409 - DNA, 20 bp, Artificial Sequence
  Description of Artificial Sequence: Synthetic oligonucleotide
  Target: LAMA2; (+) strand; PAM type: YTN; PAM sequence: CTA
taaaatgtctatcggtaatt

SEQ ID NO: 369410 - DNA, 20 bp, Artificial Sequence
  Description of Artificial Sequence: Synthetic oligonucleotide
  Target: LAMA2; (+) strand; PAM type: YTN; PAM sequence: CTA
tcggtaatttttaaaactgt

SEQ ID NO: 369411 - DNA, 20 bp, Artificial Sequence
  Description of Artificial Sequence: Synthetic oligonucleotide
  Target: LAMA2; (+) strand; PAM type: YTN; PAM sequence: TTT
ttaaaactgtgattattatg

SEQ ID NO: 369412 - DNA, 20 bp, Artificial Sequence
  Description of Artificial Sequence: Synthetic oligonucleotide
  Target: LAMA2; (+) strand; PAM type: YTN; PAM sequence: TTT
taaaactgtgattattatga

SEQ ID NO: 369413 - DNA, 20 bp, Artificial Sequence
  Description of Artificial Sequence: Synthetic oligonucleotide
  Target: LAMA2; (+) strand; PAM type: YTN; PAM sequence: TTT
aaaactgtgattattatgag

SEQ ID NO: 369414 - DNA, 20 bp, Artificial Sequence
  Description of Artificial Sequence: Synthetic oligonucleotide
  Target: LAMA2; (+) strand; PAM type: YTN; PAM sequence: TTA
aaactgtgattattatgagt

SEQ ID NO: 369415 - DNA, 20 bp, Artificial Sequence
  Description of Artificial Sequence: Synthetic oligonucleotide
  Target: LAMA2; (+) strand; PAM type: YTN; PAM sequence: CTG
tgattattatgagtcaatag

SEQ ID NO: 369416 - DNA, 20 bp, Artificial Sequence
  Description of Artificial Sequence: Synthetic oligonucleotide
  Target: LAMA2; (+) strand; PAM type: YTN; PAM sequence: TTA
ttatgagtcaatagtagtca

SEQ ID NO: 369417 - DNA, 20 bp, Artificial Sequence
  Description of Artificial Sequence: Synthetic oligonucleotide
  Target: LAMA2; (+) strand; PAM type: YTN; PAM sequence: TTA
tgagtcaatagtagtcattt

SEQ ID NO: 369418 - DNA, 20 bp, Artificial Sequence
  Description of Artificial Sequence: Synthetic oligonucleotide
  Target: LAMA2; (+) strand; PAM type: YTN; PAM sequence: TTT
aattatgtgctcttagagtt

SEQ ID NO: 369419 - DNA, 20 bp, Artificial Sequence
  Description of Artificial Sequence: Synthetic oligonucleotide
  Target: LAMA2; (+) strand; PAM type: YTN; PAM sequence: TTA
attatgtgctcttagagttt

SEQ ID NO: 369420 - DNA, 20 bp, Artificial Sequence
  Description of Artificial Sequence: Synthetic oligonucleotide
  Target: LAMA2; (+) strand; PAM type: YTN; PAM sequence: TTA
tgtgctcttagagtttattt

SEQ ID NO: 369421 - DNA, 20 bp, Artificial Sequence
  Description of Artificial Sequence: Synthetic oligonucleotide
  Target: LAMA2; (+) strand; PAM type: YTN; PAM sequence: CTC
ttagagtttatttaaaattt

SEQ ID NO: 369422 - DNA, 20 bp, Artificial Sequence
  Description of Artificial Sequence: Synthetic oligonucleotide
  Target: LAMA2; (+) strand; PAM type: YTN; PAM sequence: CTT
agagtttatttaaaatttat

SEQ ID NO: 369423 - DNA, 20 bp, Artificial Sequence
  Description of Artificial Sequence: Synthetic oligonucleotide
  Target: LAMA2; (+) strand; PAM type: YTN; PAM sequence: TTA
gagtttatttaaaatttatt

SEQ ID NO: 369424 - DNA, 20 bp, Artificial Sequence
  Description of Artificial Sequence: Synthetic oligonucleotide
  Target: LAMA2; (+) strand; PAM type: YTN; PAM sequence: TTT
atttaaaatttattttcatg

SEQ ID NO: 369425 - DNA, 20 bp, Artificial Sequence
  Description of Artificial Sequence: Synthetic oligonucleotide
  Target: LAMA2; (+) strand; PAM type: YTN; PAM sequence: TTA
tttaaaatttattttcatgc

SEQ ID NO: 369426 - DNA, 20 bp, Artificial Sequence
  Description of Artificial Sequence: Synthetic oligonucleotide
  Target: LAMA2; (+) strand; PAM type: YTN; PAM sequence: TTT
aaaatttattttcatgcact

SEQ ID NO: 369427 - DNA, 20 bp, Artificial Sequence
  Description of Artificial Sequence: Synthetic oligonucleotide
  Target: LAMA2; (+) strand; PAM type: YTN; PAM sequence: TTA
aaatttattttcatgcacta

SEQ ID NO: 369428 - DNA, 20 bp, Artificial Sequence
  Description of Artificial Sequence: Synthetic oligonucleotide
  Target: LAMA2; (+) strand; PAM type: YTN; PAM sequence: TTT
attttcatgcactaaaatga

SEQ ID NO: 369429 - DNA, 20 bp, Artificial Sequence
  Description of Artificial Sequence: Synthetic oligonucleotide
  Target: LAMA2; (+) strand; PAM type: YTN; PAM sequence: TTA
ttttcatgcactaaaatgat

SEQ ID NO: 369430 - DNA, 20 bp, Artificial Sequence
  Description of Artificial Sequence: Synthetic oligonucleotide
  Target: LAMA2; (+) strand; PAM type: YTN; PAM sequence: TTT
tcatgcactaaaatgatttg

SEQ ID NO: 369431 - DNA, 20 bp, Artificial Sequence
  Description of Artificial Sequence: Synthetic oligonucleotide
  Target: LAMA2; (+) strand; PAM type: YTN; PAM sequence: TTT
catgcactaaaatgatttgg

SEQ ID NO: 369432 - DNA, 20 bp, Artificial Sequence
  Description of Artificial Sequence: Synthetic oligonucleotide
  Target: LAMA2; (+) strand; PAM type: YTN; PAM sequence: TTC
atgcactaaaatgatttgga

SEQ ID NO: 369433 - DNA, 20 bp, Artificial Sequence
  Description of Artificial Sequence: Synthetic oligonucleotide
  Target: LAMA2; (+) strand; PAM type: YTN; PAM sequence: CTA
aaatgatttggagatacaaa

SEQ ID NO: 369434 - DNA, 20 bp, Artificial Sequence
  Description of Artificial Sequence: Synthetic oligonucleotide
  Target: LAMA2; (+) strand; PAM type: YTN; PAM sequence: TTT
ggagatacaaatagtgaaaa

SEQ ID NO: 369435 - DNA, 20 bp, Artificial Sequence
  Description of Artificial Sequence: Synthetic oligonucleotide
  Target: LAMA2; (+) strand; PAM type: YTN; PAM sequence: TTG
gagatacaaatagtgaaaag

SEQ ID NO: 369436 - DNA, 20 bp, Artificial Sequence
  Description of Artificial Sequence: Synthetic oligonucleotide
  Target: LAMA2; (+) strand; PAM type: YTN; PAM sequence: TTT
cttgtaatgttttgtagtaa

SEQ ID NO: 369437 - DNA, 20 bp, Artificial Sequence
  Description of Artificial Sequence: Synthetic oligonucleotide
  Target: LAMA2; (+) strand; PAM type: YTN; PAM sequence: TTC
ttgtaatgttttgtagtaat

SEQ ID NO: 369438 - DNA, 20 bp, Artificial Sequence
  Description of Artificial Sequence: Synthetic oligonucleotide
  Target: LAMA2; (+) strand; PAM type: YTN; PAM sequence: CTT
gtaatgttttgtagtaattt

SEQ ID NO: 369439 - DNA, 20 bp, Artificial Sequence
  Description of Artificial Sequence: Synthetic oligonucleotide
  Target: LAMA2; (+) strand; PAM type: YTN; PAM sequence: TTG
taatgttttgtagtaatttt

SEQ ID NO: 369440 - DNA, 20 bp, Artificial Sequence
  Description of Artificial Sequence: Synthetic oligonucleotide
  Target: LAMA2; (+) strand; PAM type: YTN; PAM sequence: TTT
tgtagtaatttttatttggt

SEQ ID NO: 369441 - DNA, 20 bp, Artificial Sequence
  Description of Artificial Sequence: Synthetic oligonucleotide
  Target: LAMA2; (+) strand; PAM type: YTN; PAM sequence: TTT
gtagtaatttttatttggtt

SEQ ID NO: 369442 - DNA, 20 bp, Artificial Sequence
  Description of Artificial Sequence: Synthetic oligonucleotide
  Target: LAMA2; (+) strand; PAM type: YTN; PAM sequence: TTG
tagtaatttttatttggttt

SEQ ID NO: 369443 - DNA, 20 bp, Artificial Sequence
  Description of Artificial Sequence: Synthetic oligonucleotide
  Target: LAMA2; (+) strand; PAM type: YTN; PAM sequence: TTT
ttatttggtttcaacagtca

SEQ ID NO: 369444 - DNA, 20 bp, Artificial Sequence
  Description of Artificial Sequence: Synthetic oligonucleotide
  Target: LAMA2; (+) strand; PAM type: YTN; PAM sequence: TTT
tatttggtttcaacagtcaa

SEQ ID NO: 369445 - DNA, 20 bp, Artificial Sequence
  Description of Artificial Sequence: Synthetic oligonucleotide
  Target: LAMA2; (+) strand; PAM type: YTN; PAM sequence: TTT
atttggtttcaacagtcaat

SEQ ID NO: 369446 - DNA, 20 bp, Artificial Sequence
  Description of Artificial Sequence: Synthetic oligonucleotide
  Target: LAMA2; (+) strand; PAM type: YTN; PAM sequence: TTA
tttggtttcaacagtcaatg

SEQ ID NO: 369447 - DNA, 20 bp, Artificial Sequence
  Description of Artificial Sequence: Synthetic oligonucleotide
  Target: LAMA2; (+) strand; PAM type: YTN; PAM sequence: TTT
ggtttcaacagtcaatgaaa

SEQ ID NO: 369448 - DNA, 20 bp, Artificial Sequence
  Description of Artificial Sequence: Synthetic oligonucleotide
  Target: LAMA2; (+) strand; PAM type: YTN; PAM sequence: TTG
gtttcaacagtcaatgaaaa

SEQ ID NO: 369449 - DNA, 20 bp, Artificial Sequence
  Description of Artificial Sequence: Synthetic oligonucleotide
  Target: LAMA2; (+) strand; PAM type: YTN; PAM sequence: TTT
caacagtcaatgaaaatagg

SEQ ID NO: 369450 - DNA, 20 bp, Artificial Sequence
  Description of Artificial Sequence: Synthetic oligonucleotide
  Target: LAMA2; (+) strand; PAM type: YTN; PAM sequence: TTC
aacagtcaatgaaaataggt

SEQ ID NO: 369451 - DNA, 20 bp, Artificial Sequence
  Description of Artificial Sequence: Synthetic oligonucleotide
  Target: LAMA2; (+) strand; PAM type: YTN; PAM sequence: TTA
ataaaatgtctagtatttca

SEQ ID NO: 369452 - DNA, 20 bp, Artificial Sequence
  Description of Artificial Sequence: Synthetic oligonucleotide
  Target: LAMA2; (+) strand; PAM type: YTN; PAM sequence: CTA
gtatttcataataacctact

SEQ ID NO: 369453 - DNA, 20 bp, Artificial Sequence
  Description of Artificial Sequence: Synthetic oligonucleotide
  Target: LAMA2; (+) strand; PAM type: YTN; PAM sequence: TTT
cataataacctactgtgtgt

SEQ ID NO: 369454 - DNA, 20 bp, Artificial Sequence
  Description of Artificial Sequence: Synthetic oligonucleotide
  Target: LAMA2; (+) strand; PAM type: YTN; PAM sequence: TTC
ataataacctactgtgtgtt

SEQ ID NO: 369455 - DNA, 20 bp, Artificial Sequence
  Description of Artificial Sequence: Synthetic oligonucleotide
  Target: LAMA2; (+) strand; PAM type: YTN; PAM sequence: CTA
ctgtgtgttacatattatac

SEQ ID NO: 369456 - DNA, 20 bp, Artificial Sequence
  Description of Artificial Sequence: Synthetic oligonucleotide
  Target: LAMA2; (+) strand; PAM type: YTN; PAM sequence: CTG
tgtgttacatattataccaa

SEQ ID NO: 369457 - DNA, 20 bp, Artificial Sequence
  Description of Artificial Sequence: Synthetic oligonucleotide
  Target: LAMA2; (+) strand; PAM type: YTN; PAM sequence: TTA
catattataccaagaagttt

SEQ ID NO: 369458 - DNA, 20 bp, Artificial Sequence
  Description of Artificial Sequence: Synthetic oligonucleotide
  Target: LAMA2; (+) strand; PAM type: YTN; PAM sequence: TTA
taccaagaagtttatattca

SEQ ID NO: 369459 - DNA, 20 bp, Artificial Sequence
  Description of Artificial Sequence: Synthetic oligonucleotide
  Target: LAMA2; (+) strand; PAM type: YTN; PAM sequence: TTT
atattcatttccttttaaat

SEQ ID NO: 369460 - DNA, 20 bp, Artificial Sequence
  Description of Artificial Sequence: Synthetic oligonucleotide
  Target: LAMA2; (+) strand; PAM type: YTN; PAM sequence: TTA
tattcatttccttttaaatc

SEQ ID NO: 369461 - DNA, 20 bp, Artificial Sequence
  Description of Artificial Sequence: Synthetic oligonucleotide
  Target: LAMA2; (+) strand; PAM type: YTN; PAM sequence: TTC
atttccttttaaatcaagct

SEQ ID NO: 369462 - DNA, 20 bp, Artificial Sequence
  Description of Artificial Sequence: Synthetic oligonucleotide
  Target: LAMA2; (+) strand; PAM type: YTN; PAM sequence: TTT
ccttttaaatcaagctcatg

SEQ ID NO: 369463 - DNA, 20 bp, Artificial Sequence
  Description of Artificial Sequence: Synthetic oligonucleotide
  Target: LAMA2; (+) strand; PAM type: YTN; PAM sequence: TTC
cttttaaatcaagctcatgg

SEQ ID NO: 369464 - DNA, 20 bp, Artificial Sequence
  Description of Artificial Sequence: Synthetic oligonucleotide
  Target: LAMA2; (+) strand; PAM type: YTN; PAM sequence: CTT
ttaaatcaagctcatggtgt

SEQ ID NO: 369465 - DNA, 20 bp, Artificial Sequence
  Description of Artificial Sequence: Synthetic oligonucleotide
  Target: LAMA2; (+) strand; PAM type: YTN; PAM sequence: TTT
taaatcaagctcatggtgta

SEQ ID NO: 369466 - DNA, 20 bp, Artificial Sequence
  Description of Artificial Sequence: Synthetic oligonucleotide
  Target: LAMA2; (+) strand; PAM type: YTN; PAM sequence: TTT
aaatcaagctcatggtgtat

SEQ ID NO: 369467 - DNA, 20 bp, Artificial Sequence
  Description of Artificial Sequence: Synthetic oligonucleotide
  Target: LAMA2; (+) strand; PAM type: YTN; PAM sequence: TTA
aatcaagctcatggtgtatg

SEQ ID NO: 369468 - DNA, 20 bp, Artificial Sequence
  Description of Artificial Sequence: Synthetic oligonucleotide
  Target: LAMA2; (+) strand; PAM type: YTN; PAM sequence: CTC
atggtgtatggactattata

SEQ ID NO: 369469 - DNA, 20 bp, Artificial Sequence
  Description of Artificial Sequence: Synthetic oligonucleotide
  Target: LAMA2; (+) strand; PAM type: YTN; PAM sequence: CTA
ttatattatctccattgtat

SEQ ID NO: 369470 - DNA, 20 bp, Artificial Sequence
  Description of Artificial Sequence: Synthetic oligonucleotide
  Target: LAMA2; (+) strand; PAM type: YTN; PAM sequence: TTA
tattatctccattgtataga

SEQ ID NO: 369471 - DNA, 20 bp, Artificial Sequence
  Description of Artificial Sequence: Synthetic oligonucleotide
  Target: LAMA2; (+) strand; PAM type: YTN; PAM sequence: TTA
tctccattgtatagaagaaa

SEQ ID NO: 369472 - DNA, 20 bp, Artificial Sequence
  Description of Artificial Sequence: Synthetic oligonucleotide
  Target: LAMA2; (+) strand; PAM type: YTN; PAM sequence: CTC
cattgtatagaagaaaaaat

SEQ ID NO: 369473 - DNA, 20 bp, Artificial Sequence
  Description of Artificial Sequence: Synthetic oligonucleotide
  Target: LAMA2; (+) strand; PAM type: YTN; PAM sequence: TTG
tatagaagaaaaaattgagg

SEQ ID NO: 369474 - DNA, 20 bp, Artificial Sequence
  Description of Artificial Sequence: Synthetic oligonucleotide
  Target: LAMA2; (+) strand; PAM type: YTN; PAM sequence: TTG
aggcctagaaagaataagtt

SEQ ID NO: 369475 - DNA, 20 bp, Artificial Sequence
  Description of Artificial Sequence: Synthetic oligonucleotide
  Target: LAMA2; (+) strand; PAM type: YTN; PAM sequence: CTA
gaaagaataagttattttct

SEQ ID NO: 369476 - DNA, 20 bp, Artificial Sequence
  Description of Artificial Sequence: Synthetic oligonucleotide
  Target: LAMA2; (+) strand; PAM type: YTN; PAM sequence: TTA
ttttcttctaggccacaagg

SEQ ID NO: 369477 - DNA, 20 bp, Artificial Sequence
  Description of Artificial Sequence: Synthetic oligonucleotide
  Target: LAMA2; (+) strand; PAM type: YTN; PAM sequence: TTT
tcttctaggccacaaggctg

SEQ ID NO: 369478 - DNA, 20 bp, Artificial Sequence
  Description of Artificial Sequence: Synthetic oligonucleotide
  Target: LAMA2; (+) strand; PAM type: YTN; PAM sequence: TTT
cttctaggccacaaggctgg

SEQ ID NO: 369479 - DNA, 20 bp, Artificial Sequence
  Description of Artificial Sequence: Synthetic oligonucleotide
  Target: LAMA2; (+) strand; PAM type: YTN; PAM sequence: TTC
ttctaggccacaaggctggt

SEQ ID NO: 369480 - DNA, 20 bp, Artificial Sequence
  Description of Artificial Sequence: Synthetic oligonucleotide
  Target: LAMA2; (+) strand; PAM type: YTN; PAM sequence: CTT
ctaggccacaaggctggtaa

SEQ ID NO: 369481 - DNA, 20 bp, Artificial Sequence
  Description of Artificial Sequence: Synthetic oligonucleotide
  Target: LAMA2; (+) strand; PAM type: YTN; PAM sequence: TTC
taggccacaaggctggtaaa

SEQ ID NO: 369482 - DNA, 20 bp, Artificial Sequence
  Description of Artificial Sequence: Synthetic oligonucleotide
  Target: LAMA2; (+) strand; PAM type: YTN; PAM sequence: CTA
ggccacaaggctggtaaata

SEQ ID NO: 369483 - DNA, 20 bp, Artificial Sequence
  Description of Artificial Sequence: Synthetic oligonucleotide
  Target: LAMA2; (+) strand; PAM type: YTN; PAM sequence: CTG
gtaaatatcagagacaggat

SEQ ID NO: 369484 - DNA, 20 bp, Artificial Sequence
  Description of Artificial Sequence: Synthetic oligonucleotide
  Target: LAMA2; (+) strand; PAM type: YTN; PAM sequence: CTT
ggtctatttgactcacaaaa

SEQ ID NO: 369485 - DNA, 20 bp, Artificial Sequence
  Description of Artificial Sequence: Synthetic oligonucleotide
  Target: LAMA2; (+) strand; PAM type: YTN; PAM sequence: TTG
gtctatttgactcacaaaac

SEQ ID NO: 369486 - DNA, 20 bp, Artificial Sequence
  Description of Artificial Sequence: Synthetic oligonucleotide
  Target: LAMA2; (+) strand; PAM type: YTN; PAM sequence: CTA
tttgactcacaaaactgtat

SEQ ID NO: 369487 - DNA, 20 bp, Artificial Sequence
  Description of Artificial Sequence: Synthetic oligonucleotide
  Target: LAMA2; (+) strand; PAM type: YTN; PAM sequence: TTT
gactcacaaaactgtattct

SEQ ID NO: 369488 - DNA, 20 bp, Artificial Sequence
  Description of Artificial Sequence: Synthetic oligonucleotide
  Target: LAMA2; (+) strand; PAM type: YTN; PAM sequence: TTG
actcacaaaactgtattctt

SEQ ID NO: 369489 - DNA, 20 bp, Artificial Sequence
  Description of Artificial Sequence: Synthetic oligonucleotide
  Target: LAMA2; (+) strand; PAM type: YTN; PAM sequence: CTC
acaaaactgtattcttaata

SEQ ID NO: 369490 - DNA, 20 bp, Artificial Sequence
  Description of Artificial Sequence: Synthetic oligonucleotide
  Target: LAMA2; (+) strand; PAM type: YTN; PAM sequence: CTG
tattcttaataattaagctt

SEQ ID NO: 369491 - DNA, 20 bp, Artificial Sequence
  Description of Artificial Sequence: Synthetic oligonucleotide
  Target: LAMA2; (+) strand; PAM type: YTN; PAM sequence: TTC
ttaataattaagcttttaag

SEQ ID NO: 369492 - DNA, 20 bp, Artificial Sequence
  Description of Artificial Sequence: Synthetic oligonucleotide
  Target: LAMA2; (+) strand; PAM type: YTN; PAM sequence: CTT
aataattaagcttttaagat

SEQ ID NO: 369493 - DNA, 20 bp, Artificial Sequence
  Description of Artificial Sequence: Synthetic oligonucleotide
  Target: LAMA2; (+) strand; PAM type: YTN; PAM sequence: TTA
ataattaagcttttaagatg

SEQ ID NO: 369494 - DNA, 20 bp, Artificial Sequence
  Description of Artificial Sequence: Synthetic oligonucleotide
  Target: LAMA2; (+) strand; PAM type: YTN; PAM sequence: TTA
agcttttaagatgtcctttt

SEQ ID NO: 369495 - DNA, 20 bp, Artificial Sequence
  Description of Artificial Sequence: Synthetic oligonucleotide
  Target: LAMA2; (+) strand; PAM type: YTN; PAM sequence: CTT
ttaagatgtccttttacaca

SEQ ID NO: 369496 - DNA, 20 bp, Artificial Sequence
  Description of Artificial Sequence: Synthetic oligonucleotide
  Target: LAMA2; (+) strand; PAM type: YTN; PAM sequence: TTT
taagatgtccttttacacaa

SEQ ID NO: 369497 - DNA, 20 bp, Artificial Sequence
  Description of Artificial Sequence: Synthetic oligonucleotide
  Target: LAMA2; (+) strand; PAM type: YTN; PAM sequence: TTT
aagatgtccttttacacaaa

SEQ ID NO: 369498 - DNA, 20 bp, Artificial Sequence
  Description of Artificial Sequence: Synthetic oligonucleotide
  Target: LAMA2; (+) strand; PAM type: YTN; PAM sequence: TTA
agatgtccttttacacaaaa

SEQ ID NO: 369499 - DNA, 20 bp, Artificial Sequence
  Description of Artificial Sequence: Synthetic oligonucleotide
  Target: LAMA2; (+) strand; PAM type: YTN; PAM sequence: CTT
ttacacaaaaataggaaaag

SEQ ID NO: 369500 - DNA, 20 bp, Artificial Sequence
  Description of Artificial Sequence: Synthetic oligonucleotide
  Target: LAMA2; (+) strand; PAM type: YTN; PAM sequence: TTT
tacacaaaaataggaaaagc

SEQ ID NO: 369501 - DNA, 20 bp, Artificial Sequence
  Description of Artificial Sequence: Synthetic oligonucleotide
  Target: LAMA2; (+) strand; PAM type: YTN; PAM sequence: TTT
acacaaaaataggaaaagca

SEQ ID NO: 369502 - DNA, 20 bp, Artificial Sequence
  Description of Artificial Sequence: Synthetic oligonucleotide
  Target: LAMA2; (+) strand; PAM type: YTN; PAM sequence: TTA
cacaaaaataggaaaagcaa

SEQ ID NO: 369503 - DNA, 20 bp, Artificial Sequence
  Description of Artificial Sequence: Synthetic oligonucleotide
  Target: LAMA2; (+) strand; PAM type: YTN; PAM sequence: TTT
atttaaaatgtgaatgcata

SEQ ID NO: 369504 - DNA, 20 bp, Artificial Sequence
  Description of Artificial Sequence: Synthetic oligonucleotide
  Target: LAMA2; (+) strand; PAM type: YTN; PAM sequence: TTA
tttaaaatgtgaatgcatag

SEQ ID NO: 369505 - DNA, 20 bp, Artificial Sequence
  Description of Artificial Sequence: Synthetic oligonucleotide
  Target: LAMA2; (+) strand; PAM type: YTN; PAM sequence: TTT
aaaatgtgaatgcatagtaa

SEQ ID NO: 369506 - DNA, 20 bp, Artificial Sequence
  Description of Artificial Sequence: Synthetic oligonucleotide
  Target: LAMA2; (+) strand; PAM type: YTN; PAM sequence: TTA
aaatgtgaatgcatagtaag

SEQ ID NO: 369507 - DNA, 20 bp, Artificial Sequence
  Description of Artificial Sequence: Synthetic oligonucleotide
  Target: LAMA2; (+) strand; PAM type: YTN; PAM sequence: TTT
ttttccaattttccatttgg

SEQ ID NO: 369508 - DNA, 20 bp, Artificial Sequence
  Description of Artificial Sequence: Synthetic oligonucleotide
  Target: LAMA2; (+) strand; PAM type: YTN; PAM sequence: TTT
tttccaattttccatttggc

SEQ ID NO: 369509 - DNA, 20 bp, Artificial Sequence
  Description of Artificial Sequence: Synthetic oligonucleotide
  Target: LAMA2; (+) strand; PAM type: YTN; PAM sequence: TTT
ttccaattttccatttggcc

SEQ ID NO: 369510 - DNA, 20 bp, Artificial Sequence
  Description of Artificial Sequence: Synthetic oligonucleotide
  Target: LAMA2; (+) strand; PAM type: YTN; PAM sequence: TTT
tccaattttccatttggcca

SEQ ID NO: 369511 - DNA, 20 bp, Artificial Sequence
  Description of Artificial Sequence: Synthetic oligonucleotide
  Target: LAMA2; (+) strand; PAM type: YTN; PAM sequence: TTT
ccaattttccatttggccaa

SEQ ID NO: 369512 - DNA, 20 bp, Artificial Sequence
  Description of Artificial Sequence: Synthetic oligonucleotide
  Target: LAMA2; (+) strand; PAM type: YTN; PAM sequence: TTC
caattttccatttggccaaa

SEQ ID NO: 369513 - DNA, 20 bp, Artificial Sequence
  Description of Artificial Sequence: Synthetic oligonucleotide
  Target: LAMA2; (+) strand; PAM type: YTN; PAM sequence: TTT
tccatttggccaaaccagct

SEQ ID NO: 369514 - DNA, 20 bp, Artificial Sequence
  Description of Artificial Sequence: Synthetic oligonucleotide
  Target: LAMA2; (+) strand; PAM type: YTN; PAM sequence: TTT
ccatttggccaaaccagctt

SEQ ID NO: 369515 - DNA, 20 bp, Artificial Sequence
  Description of Artificial Sequence: Synthetic oligonucleotide
  Target: LAMA2; (+) strand; PAM type: YTN; PAM sequence: TTC
catttggccaaaccagcttt

SEQ ID NO: 369516 - DNA, 20 bp, Artificial Sequence
  Description of Artificial Sequence: Synthetic oligonucleotide
  Target: LAMA2; (+) strand; PAM type: YTN; PAM sequence: TTT
ggccaaaccagcttttctct

SEQ ID NO: 369517 - DNA, 20 bp, Artificial Sequence
  Description of Artificial Sequence: Synthetic oligonucleotide
  Target: LAMA2; (+) strand; PAM type: YTN; PAM sequence: TTG
gccaaaccagcttttctcta

SEQ ID NO: 369518 - DNA, 20 bp, Artificial Sequence
  Description of Artificial Sequence: Synthetic oligonucleotide
  Target: LAMA2; (+) strand; PAM type: YTN; PAM sequence: CTT
ttctctaaaataatgagtta

SEQ ID NO: 369519 - DNA, 20 bp, Artificial Sequence
  Description of Artificial Sequence: Synthetic oligonucleotide
  Target: LAMA2; (+) strand; PAM type: YTN; PAM sequence: TTT
tctctaaaataatgagttat

SEQ ID NO: 369520 - DNA, 20 bp, Artificial Sequence
  Description of Artificial Sequence: Synthetic oligonucleotide
  Target: LAMA2; (+) strand; PAM type: YTN; PAM sequence: TTT
ctctaaaataatgagttatg

SEQ ID NO: 369521 - DNA, 20 bp, Artificial Sequence
  Description of Artificial Sequence: Synthetic oligonucleotide
  Target: LAMA2; (+) strand; PAM type: YTN; PAM sequence: TTC
tctaaaataatgagttatgc

SEQ ID NO: 369522 - DNA, 20 bp, Artificial Sequence
  Description of Artificial Sequence: Synthetic oligonucleotide
  Target: LAMA2; (+) strand; PAM type: YTN; PAM sequence: CTC
taaaataatgagttatgcca

SEQ ID NO: 369523 - DNA, 20 bp, Artificial Sequence
  Description of Artificial Sequence: Synthetic oligonucleotide
  Target: LAMA2; (+) strand; PAM type: YTN; PAM sequence: CTA
aaataatgagttatgccaaa

SEQ ID NO: 369524 - DNA, 20 bp, Artificial Sequence
  Description of Artificial Sequence: Synthetic oligonucleotide
  Target: LAMA2; (+) strand; PAM type: YTN; PAM sequence: TTA
tgccaaatcactctgctaaa

SEQ ID NO: 369525 - DNA, 20 bp, Artificial Sequence
  Description of Artificial Sequence: Synthetic oligonucleotide
  Target: LAMA2; (+) strand; PAM type: YTN; PAM sequence: CTC
tgctaaaatcaccagattgt

SEQ ID NO: 369526 - DNA, 20 bp, Artificial Sequence
  Description of Artificial Sequence: Synthetic oligonucleotide
  Target: LAMA2; (+) strand; PAM type: YTN; PAM sequence: CTG
ctaaaatcaccagattgtac

SEQ ID NO: 369527 - DNA, 20 bp, Artificial Sequence
  Description of Artificial Sequence: Synthetic oligonucleotide
  Target: LAMA2; (+) strand; PAM type: YTN; PAM sequence: CTA
aaatcaccagattgtacaaa

SEQ ID NO: 369528 - DNA, 20 bp, Artificial Sequence
  Description of Artificial Sequence: Synthetic oligonucleotide
  Target: LAMA2; (+) strand; PAM type: YTN; PAM sequence: TTG
tacaaaagtaccaataaaat

SEQ ID NO: 369529 - DNA, 20 bp, Artificial Sequence
  Description of Artificial Sequence: Synthetic oligonucleotide
  Target: LAMA2; (+) strand; PAM type: YTN; PAM sequence: TTT
aatttaggccaaaaacaaat

SEQ ID NO: 369530 - DNA, 20 bp, Artificial Sequence
  Description of Artificial Sequence: Synthetic oligonucleotide
  Target: LAMA2; (+) strand; PAM type: YTN; PAM sequence: TTA
atttaggccaaaaacaaatt

SEQ ID NO: 369531 - DNA, 20 bp, Artificial Sequence
  Description of Artificial Sequence: Synthetic oligonucleotide
  Target: LAMA2; (+) strand; PAM type: YTN; PAM sequence: TTT
aggccaaaaacaaattccag

SEQ ID NO: 369532 - DNA, 20 bp, Artificial Sequence
  Description of Artificial Sequence: Synthetic oligonucleotide
  Target: LAMA2; (+) strand; PAM type: YTN; PAM sequence: TTA
ggccaaaaacaaattccaga

SEQ ID NO: 369533 - DNA, 20 bp, Artificial Sequence
  Description of Artificial Sequence: Synthetic oligonucleotide
  Target: LAMA2; (+) strand; PAM type: YTN; PAM sequence: TTC
cagagatcattctaagtcag

SEQ ID NO: 369534 - DNA, 20 bp, Artificial Sequence
  Description of Artificial Sequence: Synthetic oligonucleotide
  Target: LAMA2; (+) strand; PAM type: YTN; PAM sequence: TTC
taagtcagtcaactgagcac

SEQ ID NO: 369535 - DNA, 20 bp, Artificial Sequence
  Description of Artificial Sequence: Synthetic oligonucleotide
  Target: LAMA2; (+) strand; PAM type: YTN; PAM sequence: CTA
agtcagtcaactgagcactt

SEQ ID NO: 369536 - DNA, 20 bp, Artificial Sequence
  Description of Artificial Sequence: Synthetic oligonucleotide
  Target: LAMA2; (+) strand; PAM type: YTN; PAM sequence: CTG
agcactttgagaaagtttag

SEQ ID NO: 369537 - DNA, 20 bp, Artificial Sequence
  Description of Artificial Sequence: Synthetic oligonucleotide
  Target: LAMA2; (+) strand; PAM type: YTN; PAM sequence: CTT
tgagaaagtttagcttatac

SEQ ID NO: 369538 - DNA, 20 bp, Artificial Sequence
  Description of Artificial Sequence: Synthetic oligonucleotide
  Target: LAMA2; (+) strand; PAM type: YTN; PAM sequence: TTT
gagaaagtttagcttatacc

SEQ ID NO: 369539 - DNA, 20 bp, Artificial Sequence
  Description of Artificial Sequence: Synthetic oligonucleotide
  Target: LAMA2; (+) strand; PAM type: YTN; PAM sequence: TTG
agaaagtttagcttatacca

SEQ ID NO: 369540 - DNA, 20 bp, Artificial Sequence
  Description of Artificial Sequence: Synthetic oligonucleotide
  Target: LAMA2; (+) strand; PAM type: YTN; PAM sequence: TTT
agcttataccaactacaaac

SEQ ID NO: 369541 - DNA, 20 bp, Artificial Sequence
  Description of Artificial Sequence: Synthetic oligonucleotide
  Target: LAMA2; (+) strand; PAM type: YTN; PAM sequence: TTA
gcttataccaactacaaaca

SEQ ID NO: 369542 - DNA, 20 bp, Artificial Sequence
  Description of Artificial Sequence: Synthetic oligonucleotide
  Target: LAMA2; (+) strand; PAM type: YTN; PAM sequence: CTT
ataccaactacaaacaagca

SEQ ID NO: 369543 - DNA, 20 bp, Artificial Sequence
  Description of Artificial Sequence: Synthetic oligonucleotide
  Target: LAMA2; (+) strand; PAM type: YTN; PAM sequence: TTA
taccaactacaaacaagcag

SEQ ID NO: 369544 - DNA, 20 bp, Artificial Sequence
  Description of Artificial Sequence: Synthetic oligonucleotide
  Target: LAMA2; (+) strand; PAM type: YTN; PAM sequence: CTA
caaacaagcagatttatctc

SEQ ID NO: 369545 - DNA, 20 bp, Artificial Sequence
  Description of Artificial Sequence: Synthetic oligonucleotide
  Target: LAMA2; (+) strand; PAM type: YTN; PAM sequence: TTT
atctctaagaaaaagaaaac

SEQ ID NO: 369546 - DNA, 20 bp, Artificial Sequence
  Description of Artificial Sequence: Synthetic oligonucleotide
  Target: LAMA2; (+) strand; PAM type: YTN; PAM sequence: TTA
tctctaagaaaaagaaaaca

SEQ ID NO: 369547 - DNA, 20 bp, Artificial Sequence
  Description of Artificial Sequence: Synthetic oligonucleotide
  Target: LAMA2; (+) strand; PAM type: YTN; PAM sequence: CTC
taagaaaaagaaaacaaaat

SEQ ID NO: 369548 - DNA, 20 bp, Artificial Sequence
  Description of Artificial Sequence: Synthetic oligonucleotide
  Target: LAMA2; (+) strand; PAM type: YTN; PAM sequence: CTA
agaaaaagaaaacaaaattg

SEQ ID NO: 369549 - DNA, 20 bp, Artificial Sequence
  Description of Artificial Sequence: Synthetic oligonucleotide
  Target: LAMA2; (+) strand; PAM type: YTN; PAM sequence: TTG
tttccatcttttatttcaat

SEQ ID NO: 369550 - DNA, 20 bp, Artificial Sequence
  Description of Artificial Sequence: Synthetic oligonucleotide
  Target: LAMA2; (+) strand; PAM type: YTN; PAM sequence: TTT
ccatcttttatttcaattta

SEQ ID NO: 369551 - DNA, 20 bp, Artificial Sequence
  Description of Artificial Sequence: Synthetic oligonucleotide
  Target: LAMA2; (+) strand; PAM type: YTN; PAM sequence: TTC
catcttttatttcaatttaa

SEQ ID NO: 369552 - DNA, 20 bp, Artificial Sequence
  Description of Artificial Sequence: Synthetic oligonucleotide
  Target: LAMA2; (+) strand; PAM type: YTN; PAM sequence: CTT
ttatttcaatttaaaagcta

SEQ ID NO: 369553 - DNA, 20 bp, Artificial Sequence
  Description of Artificial Sequence: Synthetic oligonucleotide
  Target: LAMA2; (+) strand; PAM type: YTN; PAM sequence: TTT
tatttcaatttaaaagctaa

SEQ ID NO: 369554 - DNA, 20 bp, Artificial Sequence
  Description of Artificial Sequence: Synthetic oligonucleotide
  Target: LAMA2; (+) strand; PAM type: YTN; PAM sequence: TTT
atttcaatttaaaagctaag

SEQ ID NO: 369555 - DNA, 20 bp, Artificial Sequence
  Description of Artificial Sequence: Synthetic oligonucleotide
  Target: LAMA2; (+) strand; PAM type: YTN; PAM sequence: TTA
tttcaatttaaaagctaaga

SEQ ID NO: 369556 - DNA, 20 bp, Artificial Sequence
  Description of Artificial Sequence: Synthetic oligonucleotide
  Target: LAMA2; (+) strand; PAM type: YTN; PAM sequence: TTT
caatttaaaagctaagatgg

SEQ ID NO: 369557 - DNA, 20 bp, Artificial Sequence
  Description of Artificial Sequence: Synthetic oligonucleotide
  Target: LAMA2; (+) strand; PAM type: YTN; PAM sequence: TTC
aatttaaaagctaagatgga

SEQ ID NO: 369558 - DNA, 20 bp, Artificial Sequence
  Description of Artificial Sequence: Synthetic oligonucleotide
  Target: LAMA2; (+) strand; PAM type: YTN; PAM sequence: TTT
aaaagctaagatggaatatt

SEQ ID NO: 369559 - DNA, 20 bp, Artificial Sequence
  Description of Artificial Sequence: Synthetic oligonucleotide
  Target: LAMA2; (+) strand; PAM type: YTN; PAM sequence: TTA
aaagctaagatggaatatta

SEQ ID NO: 369560 - DNA, 20 bp, Artificial Sequence
  Description of Artificial Sequence: Synthetic oligonucleotide
  Target: LAMA2; (+) strand; PAM type: YTN; PAM sequence: CTA
agatggaatattaatattgc

SEQ ID NO: 369561 - DNA, 20 bp, Artificial Sequence
  Description of Artificial Sequence: Synthetic oligonucleotide
  Target: LAMA2; (+) strand; PAM type: YTN; PAM sequence: TTA
atattgcctacttctgcttt

SEQ ID NO: 369562 - DNA, 20 bp, Artificial Sequence
  Description of Artificial Sequence: Synthetic oligonucleotide
  Target: LAMA2; (+) strand; PAM type: YTN; PAM sequence: TTG
cctacttctgctttccttgt

SEQ ID NO: 369563 - DNA, 20 bp, Artificial Sequence
  Description of Artificial Sequence: Synthetic oligonucleotide
  Target: LAMA2; (+) strand; PAM type: YTN; PAM sequence: CTA
cttctgctttccttgtttaa

SEQ ID NO: 369564 - DNA, 20 bp, Artificial Sequence
  Description of Artificial Sequence: Synthetic oligonucleotide
  Target: LAMA2; (+) strand; PAM type: YTN; PAM sequence: CTT
ctgctttccttgtttaagca

SEQ ID NO: 369565 - DNA, 20 bp, Artificial Sequence
  Description of Artificial Sequence: Synthetic oligonucleotide
  Target: LAMA2; (+) strand; PAM type: YTN; PAM sequence: TTC
tgctttccttgtttaagcac

SEQ ID NO: 369566 - DNA, 20 bp, Artificial Sequence
  Description of Artificial Sequence: Synthetic oligonucleotide
  Target: LAMA2; (+) strand; PAM type: YTN; PAM sequence: CTG
ctttccttgtttaagcacta

SEQ ID NO: 369567 - DNA, 20 bp, Artificial Sequence
  Description of Artificial Sequence: Synthetic oligonucleotide
  Target: LAMA2; (+) strand; PAM type: YTN; PAM sequence: CTT
tccttgtttaagcactaaaa

SEQ ID NO: 369568 - DNA, 20 bp, Artificial Sequence
  Description of Artificial Sequence: Synthetic oligonucleotide
  Target: LAMA2; (+) strand; PAM type: YTN; PAM sequence: TTT
ccttgtttaagcactaaaag

SEQ ID NO: 369569 - DNA, 20 bp, Artificial Sequence
  Description of Artificial Sequence: Synthetic oligonucleotide
  Target: LAMA2; (+) strand; PAM type: YTN; PAM sequence: TTC
cttgtttaagcactaaaaga

SEQ ID NO: 369570 - DNA, 20 bp, Artificial Sequence
  Description of Artificial Sequence: Synthetic oligonucleotide
  Target: LAMA2; (+) strand; PAM type: YTN; PAM sequence: CTT
gtttaagcactaaaagaaat

SEQ ID NO: 369571 - DNA, 20 bp, Artificial Sequence
  Description of Artificial Sequence: Synthetic oligonucleotide
  Target: LAMA2; (+) strand; PAM type: YTN; PAM sequence: TTG
tttaagcactaaaagaaatc

SEQ ID NO: 369572 - DNA, 20 bp, Artificial Sequence
  Description of Artificial Sequence: Synthetic oligonucleotide
  Target: LAMA2; (+) strand; PAM type: YTN; PAM sequence: TTT
aagcactaaaagaaatcaag

SEQ ID NO: 369573 - DNA, 20 bp, Artificial Sequence
  Description of Artificial Sequence: Synthetic oligonucleotide
  Target: LAMA2; (+) strand; PAM type: YTN; PAM sequence: TTA
agcactaaaagaaatcaagc

SEQ ID NO: 369574 - DNA, 20 bp, Artificial Sequence
  Description of Artificial Sequence: Synthetic oligonucleotide
  Target: LAMA2; (+) strand; PAM type: YTN; PAM sequence: CTA
aaagaaatcaagcagtcatt

SEQ ID NO: 369575 - DNA, 20 bp, Artificial Sequence
  Description of Artificial Sequence: Synthetic oligonucleotide
  Target: LAMA2; (+) strand; PAM type: YTN; PAM sequence: TTG
gaatgttttcttttttaaaa

SEQ ID NO: 369576 - DNA, 20 bp, Artificial Sequence
  Description of Artificial Sequence: Synthetic oligonucleotide
  Target: LAMA2; (+) strand; PAM type: YTN; PAM sequence: TTT
tcttttttaaaagacccttt

SEQ ID NO: 369577 - DNA, 20 bp, Artificial Sequence
  Description of Artificial Sequence: Synthetic oligonucleotide
  Target: LAMA2; (+) strand; PAM type: YTN; PAM sequence: TTT
cttttttaaaagacccttta

SEQ ID NO: 369578 - DNA, 20 bp, Artificial Sequence
  Description of Artificial Sequence: Synthetic oligonucleotide
  Target: LAMA2; (+) strand; PAM type: YTN; PAM sequence: TTC
ttttttaaaagaccctttaa

SEQ ID NO: 369579 - DNA, 20 bp, Artificial Sequence
  Description of Artificial Sequence: Synthetic oligonucleotide
  Target: LAMA2; (+) strand; PAM type: YTN; PAM sequence: CTT
ttttaaaagaccctttaact

SEQ ID NO: 369580 - DNA, 20 bp, Artificial Sequence
  Description of Artificial Sequence: Synthetic oligonucleotide
  Target: LAMA2; (+) strand; PAM type: YTN; PAM sequence: TTT
tttaaaagaccctttaacta

SEQ ID NO: 369581 - DNA, 20 bp, Artificial Sequence
  Description of Artificial Sequence: Synthetic oligonucleotide
  Target: LAMA2; (+) strand; PAM type: YTN; PAM sequence: TTT
ttaaaagaccctttaactat

SEQ ID NO: 369582 - DNA, 20 bp, Artificial Sequence
  Description of Artificial Sequence: Synthetic oligonucleotide
  Target: LAMA2; (+) strand; PAM type: YTN; PAM sequence: TTT
taaaagaccctttaactata

SEQ ID NO: 369583 - DNA, 20 bp, Artificial Sequence
  Description of Artificial Sequence: Synthetic oligonucleotide
  Target: LAMA2; (+) strand; PAM type: YTN; PAM sequence: TTT
aaaagaccctttaactatat

SEQ ID NO: 369584 - DNA, 20 bp, Artificial Sequence
  Description of Artificial Sequence: Synthetic oligonucleotide
  Target: LAMA2; (+) strand; PAM type: YTN; PAM sequence: TTA
aaagaccctttaactatatg

SEQ ID NO: 369585 - DNA, 20 bp, Artificial Sequence
  Description of Artificial Sequence: Synthetic oligonucleotide
  Target: LAMA2; (+) strand; PAM type: YTN; PAM sequence: CTT
taactatatgattttaaaaa

SEQ ID NO: 369586 - DNA, 20 bp, Artificial Sequence
  Description of Artificial Sequence: Synthetic oligonucleotide
  Target: LAMA2; (+) strand; PAM type: YTN; PAM sequence: TTT
aactatatgattttaaaaat

SEQ ID NO: 369587 - DNA, 20 bp, Artificial Sequence
  Description of Artificial Sequence: Synthetic oligonucleotide
  Target: LAMA2; (+) strand; PAM type: YTN; PAM sequence: TTA
actatatgattttaaaaatg

SEQ ID NO: 369588 - DNA, 20 bp, Artificial Sequence
  Description of Artificial Sequence: Synthetic oligonucleotide
  Target: LAMA2; (+) strand; PAM type: YTN; PAM sequence: CTA
tatgattttaaaaatgtctg

SEQ ID NO: 369589 - DNA, 20 bp, Artificial Sequence
  Description of Artificial Sequence: Synthetic oligonucleotide
  Target: LAMA2; (+) strand; PAM type: YTN; PAM sequence: TTT
taaaaatgtctgtctccaaa

SEQ ID NO: 369590 - DNA, 20 bp, Artificial Sequence
  Description of Artificial Sequence: Synthetic oligonucleotide
  Target: LAMA2; (+) strand; PAM type: YTN; PAM sequence: TTT
aaaaatgtctgtctccaaaa

SEQ ID NO: 369591 - DNA, 20 bp, Artificial Sequence
  Description of Artificial Sequence: Synthetic oligonucleotide
  Target: LAMA2; (+) strand; PAM type: YTN; PAM sequence: TTA
aaaatgtctgtctccaaaaa

SEQ ID NO: 369592 - DNA, 20 bp, Artificial Sequence
  Description of Artificial Sequence: Synthetic oligonucleotide
  Target: LAMA2; (+) strand; PAM type: YTN; PAM sequence: CTG
tctccaaaaaatgaaaatca

SEQ ID NO: 369593 - DNA, 20 bp, Artificial Sequence
  Description of Artificial Sequence: Synthetic oligonucleotide
  Target: LAMA2; (+) strand; PAM type: YTN; PAM sequence: CTC
caaaaaatgaaaatcaaaac

SEQ ID NO: 369594 - DNA, 20 bp, Artificial Sequence
  Description of Artificial Sequence: Synthetic oligonucleotide
  Target: LAMA2; (+) strand; PAM type: YTN; PAM sequence: TTC
tcatatcttttcagcatttg

SEQ ID NO: 369595 - DNA, 20 bp, Artificial Sequence
  Description of Artificial Sequence: Synthetic oligonucleotide
  Target: LAMA2; (+) strand; PAM type: YTN; PAM sequence: CTC
atatcttttcagcatttgga

SEQ ID NO: 369596 - DNA, 20 bp, Artificial Sequence
  Description of Artificial Sequence: Synthetic oligonucleotide
  Target: LAMA2; (+) strand; PAM type: YTN; PAM sequence: CTT
ttcagcatttggaggtggtg

SEQ ID NO: 369597 - DNA, 20 bp, Artificial Sequence
  Description of Artificial Sequence: Synthetic oligonucleotide
  Target: LAMA2; (+) strand; PAM type: YTN; PAM sequence: TTT
tcagcatttggaggtggtgg

SEQ ID NO: 369598 - DNA, 20 bp, Artificial Sequence
  Description of Artificial Sequence: Synthetic oligonucleotide
  Target: LAMA2; (+) strand; PAM type: YTN; PAM sequence: TTT
cagcatttggaggtggtggt

SEQ ID NO: 369599 - DNA, 20 bp, Artificial Sequence
  Description of Artificial Sequence: Synthetic oligonucleotide
  Target: LAMA2; (+) strand; PAM type: YTN; PAM sequence: TTC
agcatttggaggtggtggtg

SEQ ID NO: 369600 - DNA, 20 bp, Artificial Sequence
  Description of Artificial Sequence: Synthetic oligonucleotide
  Target: LAMA2; (+) strand; PAM type: YTN; PAM sequence: TTT
ggaggtggtggtgattgtga

SEQ ID NO: 369601 - DNA, 20 bp, Artificial Sequence
  Description of Artificial Sequence: Synthetic oligonucleotide
  Target: LAMA2; (+) strand; PAM type: YTN; PAM sequence: TTG
gaggtggtggtgattgtgag

SEQ ID NO: 369602 - DNA, 20 bp, Artificial Sequence
  Description of Artificial Sequence: Synthetic oligonucleotide
  Target: LAMA2; (+) strand; PAM type: YTN; PAM sequence: TTG
tgagcactttagactgagcc

SEQ ID NO: 369603 - DNA, 20 bp, Artificial Sequence
  Description of Artificial Sequence: Synthetic oligonucleotide
  Target: LAMA2; (+) strand; PAM type: YTN; PAM sequence: CTT
tagactgagccaacttgacc

SEQ ID NO: 369604 - DNA, 20 bp, Artificial Sequence
  Description of Artificial Sequence: Synthetic oligonucleotide
  Target: LAMA2; (+) strand; PAM type: YTN; PAM sequence: TTT
agactgagccaacttgacct

SEQ ID NO: 369605 - DNA, 20 bp, Artificial Sequence
  Description of Artificial Sequence: Synthetic oligonucleotide
  Target: LAMA2; (+) strand; PAM type: YTN; PAM sequence: TTA
gactgagccaacttgaccta

SEQ ID NO: 369606 - DNA, 20 bp, Artificial Sequence
  Description of Artificial Sequence: Synthetic oligonucleotide
  Target: LAMA2; (+) strand; PAM type: YTN; PAM sequence: CTG
agccaacttgacctaatatg

SEQ ID NO: 369607 - DNA, 20 bp, Artificial Sequence
  Description of Artificial Sequence: Synthetic oligonucleotide
  Target: LAMA2; (+) strand; PAM type: YTN; PAM sequence: CTT
gacctaatatgacaaaggac

SEQ ID NO: 369608 - DNA, 20 bp, Artificial Sequence
  Description of Artificial Sequence: Synthetic oligonucleotide
  Target: LAMA2; (+) strand; PAM type: YTN; PAM sequence: TTG
acctaatatgacaaaggacc

SEQ ID NO: 369609 - DNA, 20 bp, Artificial Sequence
  Description of Artificial Sequence: Synthetic oligonucleotide
  Target: LAMA2; (+) strand; PAM type: YTN; PAM sequence: CTA
atatgacaaaggaccagagc

SEQ ID NO: 369610 - DNA, 20 bp, Artificial Sequence
  Description of Artificial Sequence: Synthetic oligonucleotide
  Target: LAMA2; (+) strand; PAM type: YTN; PAM sequence: CTT
ttggttatggtattcatcag

SEQ ID NO: 369611 - DNA, 20 bp, Artificial Sequence
  Description of Artificial Sequence: Synthetic oligonucleotide
  Target: LAMA2; (+) strand; PAM type: YTN; PAM sequence: TTT
tggttatggtattcatcagc

SEQ ID NO: 369612 - DNA, 20 bp, Artificial Sequence
  Description of Artificial Sequence: Synthetic oligonucleotide
  Target: LAMA2; (+) strand; PAM type: YTN; PAM sequence: TTT
ggttatggtattcatcagct

SEQ ID NO: 369613 - DNA, 20 bp, Artificial Sequence
  Description of Artificial Sequence: Synthetic oligonucleotide
  Target: LAMA2; (+) strand; PAM type: YTN; PAM sequence: TTG
gttatggtattcatcagctt

SEQ ID NO: 369614 - DNA, 20 bp, Artificial Sequence
  Description of Artificial Sequence: Synthetic oligonucleotide
  Target: LAMA2; (+) strand; PAM type: YTN; PAM sequence: TTA
tggtattcatcagcttcctt

SEQ ID NO: 369615 - DNA, 20 bp, Artificial Sequence
  Description of Artificial Sequence: Synthetic oligonucleotide
  Target: LAMA2; (+) strand; PAM type: YTN; PAM sequence: TTC
atcagcttcctttctcagca

SEQ ID NO: 369616 - DNA, 20 bp, Artificial Sequence
  Description of Artificial Sequence: Synthetic oligonucleotide
  Target: LAMA2; (+) strand; PAM type: YTN; PAM sequence: CTT
cctttctcagcatgcataat

SEQ ID NO: 369617 - DNA, 20 bp, Artificial Sequence
  Description of Artificial Sequence: Synthetic oligonucleotide
  Target: LAMA2; (+) strand; PAM type: YTN; PAM sequence: TTC
ctttctcagcatgcataatt

SEQ ID NO: 369618 - DNA, 20 bp, Artificial Sequence
  Description of Artificial Sequence: Synthetic oligonucleotide
  Target: LAMA2; (+) strand; PAM type: YTN; PAM sequence: CTT
tctcagcatgcataattggc

SEQ ID NO: 369619 - DNA, 20 bp, Artificial Sequence
  Description of Artificial Sequence: Synthetic oligonucleotide
  Target: LAMA2; (+) strand; PAM type: YTN; PAM sequence: TTT
ctcagcatgcataattggct

SEQ ID NO: 369620 - DNA, 20 bp, Artificial Sequence
  Description of Artificial Sequence: Synthetic oligonucleotide
  Target: LAMA2; (+) strand; PAM type: YTN; PAM sequence: TTC
tcagcatgcataattggctt

SEQ ID NO: 369621 - DNA, 20 bp, Artificial Sequence
  Description of Artificial Sequence: Synthetic oligonucleotide
  Target: LAMA2; (+) strand; PAM type: YTN; PAM sequence: CTC
agcatgcataattggcttat

SEQ ID NO: 369622 - DNA, 20 bp, Artificial Sequence
  Description of Artificial Sequence: Synthetic oligonucleotide
  Target: LAMA2; (+) strand; PAM type: YTN; PAM sequence: TTG
gcttatatttatgtcattgt

SEQ ID NO: 369623 - DNA, 20 bp, Artificial Sequence
  Description of Artificial Sequence: Synthetic oligonucleotide
  Target: LAMA2; (+) strand; PAM type: YTN; PAM sequence: CTT
atatttatgtcattgttgct

SEQ ID NO: 369624 - DNA, 20 bp, Artificial Sequence
  Description of Artificial Sequence: Synthetic oligonucleotide
  Target: LAMA2; (+) strand; PAM type: YTN; PAM sequence: TTA
tatttatgtcattgttgctg

SEQ ID NO: 369625 - DNA, 20 bp, Artificial Sequence
  Description of Artificial Sequence: Synthetic oligonucleotide
  Target: LAMA2; (+) strand; PAM type: YTN; PAM sequence: TTT
atgtcattgttgctgtacga

SEQ ID NO: 369626 - DNA, 20 bp, Artificial Sequence
  Description of Artificial Sequence: Synthetic oligonucleotide
  Target: LAMA2; (+) strand; PAM type: YTN; PAM sequence: TTA
tgtcattgttgctgtacgat

SEQ ID NO: 369627 - DNA, 20 bp, Artificial Sequence
  Description of Artificial Sequence: Synthetic oligonucleotide
  Target: LAMA2; (+) strand; PAM type: YTN; PAM sequence: TTG
ttgctgtacgattcctacag

SEQ ID NO: 369628 - DNA, 20 bp, Artificial Sequence
  Description of Artificial Sequence: Synthetic oligonucleotide
  Target: LAMA2; (+) strand; PAM type: YTN; PAM sequence: TTG
ctgtacgattcctacagctg

SEQ ID NO: 369629 - DNA, 20 bp, Artificial Sequence
  Description of Artificial Sequence: Synthetic oligonucleotide
  Target: LAMA2; (+) strand; PAM type: YTN; PAM sequence: CTG
tacgattcctacagctgtat

SEQ ID NO: 369630 - DNA, 20 bp, Artificial Sequence
  Description of Artificial Sequence: Synthetic oligonucleotide
  Target: LAMA2; (+) strand; PAM type: YTN; PAM sequence: TTC
ctacagctgtataataccta

SEQ ID NO: 369631 - DNA, 20 bp, Artificial Sequence
  Description of Artificial Sequence: Synthetic oligonucleotide
  Target: LAMA2; (+) strand; PAM type: YTN; PAM sequence: CTA
cagctgtataatacctaaga

SEQ ID NO: 369632 - DNA, 20 bp, Artificial Sequence
  Description of Artificial Sequence: Synthetic oligonucleotide
  Target: LAMA2; (+) strand; PAM type: YTN; PAM sequence: CTG
tataatacctaagaacttta

SEQ ID NO: 369633 - DNA, 20 bp, Artificial Sequence
  Description of Artificial Sequence: Synthetic oligonucleotide
  Target: LAMA2; (+) strand; PAM type: YTN; PAM sequence: CTA
agaactttacttattcacca

SEQ ID NO: 369634 - DNA, 20 bp, Artificial Sequence
  Description of Artificial Sequence: Synthetic oligonucleotide
  Target: LAMA2; (+) strand; PAM type: YTN; PAM sequence: CTT
tacttattcaccatctcttt

SEQ ID NO: 369635 - DNA, 20 bp, Artificial Sequence
  Description of Artificial Sequence: Synthetic oligonucleotide
  Target: LAMA2; (+) strand; PAM type: YTN; PAM sequence: TTT
acttattcaccatctctttt

SEQ ID NO: 369636 - DNA, 20 bp, Artificial Sequence
  Description of Artificial Sequence: Synthetic oligonucleotide
  Target: LAMA2; (+) strand; PAM type: YTN; PAM sequence: TTA
cttattcaccatctcttttt

SEQ ID NO: 369637 - DNA, 20 bp, Artificial Sequence
  Description of Artificial Sequence: Synthetic oligonucleotide
  Target: LAMA2; (+) strand; PAM type: YTN; PAM sequence: CTT
attcaccatctcttttttcc

SEQ ID NO: 369638 - DNA, 20 bp, Artificial Sequence
  Description of Artificial Sequence: Synthetic oligonucleotide
  Target: LAMA2; (+) strand; PAM type: YTN; PAM sequence: TTA
ttcaccatctcttttttcct

SEQ ID NO: 369639 - DNA, 20 bp, Artificial Sequence
  Description of Artificial Sequence: Synthetic oligonucleotide
  Target: LAMA2; (+) strand; PAM type: YTN; PAM sequence: TTC
accatctcttttttcctctg

SEQ ID NO: 369640 - DNA, 20 bp, Artificial Sequence
  Description of Artificial Sequence: Synthetic oligonucleotide
  Target: LAMA2; (+) strand; PAM type: YTN; PAM sequence: CTC
ttttttcctctgccataggt

SEQ ID NO: 369641 - DNA, 20 bp, Artificial Sequence
  Description of Artificial Sequence: Synthetic oligonucleotide
  Target: LAMA2; (+) strand; PAM type: YTN; PAM sequence: CTT
ttttcctctgccataggttg

SEQ ID NO: 369642 - DNA, 20 bp, Artificial Sequence
  Description of Artificial Sequence: Synthetic oligonucleotide
  Target: LAMA2; (+) strand; PAM type: YTN; PAM sequence: TTT
tttcctctgccataggttga

SEQ ID NO: 369643 - DNA, 20 bp, Artificial Sequence
  Description of Artificial Sequence: Synthetic oligonucleotide
  Target: LAMA2; (+) strand; PAM type: YTN; PAM sequence: TTT
ttcctctgccataggttgag

SEQ ID NO: 369644 - DNA, 20 bp, Artificial Sequence
  Description of Artificial Sequence: Synthetic oligonucleotide
  Target: LAMA2; (+) strand; PAM type: YTN; PAM sequence: TTT
tcctctgccataggttgagc

SEQ ID NO: 369645 - DNA, 20 bp, Artificial Sequence
  Description of Artificial Sequence: Synthetic oligonucleotide
  Target: LAMA2; (+) strand; PAM type: YTN; PAM sequence: TTT
cctctgccataggttgagct

SEQ ID NO: 369646 - DNA, 20 bp, Artificial Sequence
  Description of Artificial Sequence: Synthetic oligonucleotide
  Target: LAMA2; (+) strand; PAM type: YTN; PAM sequence: TTC
ctctgccataggttgagctc

SEQ ID NO: 369647 - DNA, 20 bp, Artificial Sequence
  Description of Artificial Sequence: Synthetic oligonucleotide
  Target: LAMA2; (+) strand; PAM type: YTN; PAM sequence: CTC
tgccataggttgagctctgt

SEQ ID NO: 369648 - DNA, 20 bp, Artificial Sequence
  Description of Artificial Sequence: Synthetic oligonucleotide
  Target: LAMA2; (+) strand; PAM type: YTN; PAM sequence: CTG
ccataggttgagctctgtta

SEQ ID NO: 369649 - DNA, 20 bp, Artificial Sequence
  Description of Artificial Sequence: Synthetic oligonucleotide
  Target: LAMA2; (+) strand; PAM type: YTN; PAM sequence: TTG
agctctgttaaccttgaatc

SEQ ID NO: 369650 - DNA, 20 bp, Artificial Sequence
  Description of Artificial Sequence: Synthetic oligonucleotide
  Target: LAMA2; (+) strand; PAM type: YTN; PAM sequence: CTC
tgttaaccttgaatccgctg

SEQ ID NO: 369651 - DNA, 20 bp, Artificial Sequence
  Description of Artificial Sequence: Synthetic oligonucleotide
  Target: LAMA2; (+) strand; PAM type: YTN; PAM sequence: CTG
ttaaccttgaatccgctgtc

SEQ ID NO: 369652 - DNA, 20 bp, Artificial Sequence
  Description of Artificial Sequence: Synthetic oligonucleotide
  Target: LAMA2; (+) strand; PAM type: YTN; PAM sequence: TTA
accttgaatccgctgtctcc

SEQ ID NO: 369653 - DNA, 20 bp, Artificial Sequence
  Description of Artificial Sequence: Synthetic oligonucleotide
  Target: LAMA2; (+) strand; PAM type: YTN; PAM sequence: CTT
gaatccgctgtctcctatcc

SEQ ID NO: 369654 - DNA, 20 bp, Artificial Sequence
  Description of Artificial Sequence: Synthetic oligonucleotide
  Target: LAMA2; (+) strand; PAM type: YTN; PAM sequence: TTG
aatccgctgtctcctatcct

SEQ ID NO: 369655 - DNA, 20 bp, Artificial Sequence
  Description of Artificial Sequence: Synthetic oligonucleotide
  Target: LAMA2; (+) strand; PAM type: YTN; PAM sequence: CTG
tctcctatcctactgatgga

SEQ ID NO: 369656 - DNA, 20 bp, Artificial Sequence
  Description of Artificial Sequence: Synthetic oligonucleotide
  Target: LAMA2; (+) strand; PAM type: YTN; PAM sequence: CTC
ctatcctactgatggaagca

SEQ ID NO: 369657 - DNA, 20 bp, Artificial Sequence
  Description of Artificial Sequence: Synthetic oligonucleotide
  Target: LAMA2; (+) strand; PAM type: YTN; PAM sequence: CTA
tcctactgatggaagcattg

SEQ ID NO: 369658 - DNA, 20 bp, Artificial Sequence
  Description of Artificial Sequence: Synthetic oligonucleotide
  Target: LAMA2; (+) strand; PAM type: YTN; PAM sequence: CTA
ctgatggaagcattgcagca

SEQ ID NO: 369659 - DNA, 20 bp, Artificial Sequence
  Description of Artificial Sequence: Synthetic oligonucleotide
  Target: LAMA2; (+) strand; PAM type: YTN; PAM sequence: CTG
atggaagcattgcagcagct

SEQ ID NO: 369660 - DNA, 20 bp, Artificial Sequence
  Description of Artificial Sequence: Synthetic oligonucleotide
  Target: LAMA2; (+) strand; PAM type: YTN; PAM sequence: TTG
cagcagctgtagaagtgtgt

SEQ ID NO: 369661 - DNA, 20 bp, Artificial Sequence
  Description of Artificial Sequence: Synthetic oligonucleotide
  Target: LAMA2; (+) strand; PAM type: YTN; PAM sequence: CTG
tagaagtgtgtcagtgccca

SEQ ID NO: 369662 - DNA, 20 bp, Artificial Sequence
  Description of Artificial Sequence: Synthetic oligonucleotide
  Target: LAMA2; (+) strand; PAM type: YTN; PAM sequence: CTG
gctcctcttgtgaagtaagc

SEQ ID NO: 369663 - DNA, 20 bp, Artificial Sequence
  Description of Artificial Sequence: Synthetic oligonucleotide
  Target: LAMA2; (+) strand; PAM type: YTN; PAM sequence: CTC
ctcttgtgaagtaagcttgc

SEQ ID NO: 369664 - DNA, 20 bp, Artificial Sequence
  Description of Artificial Sequence: Synthetic oligonucleotide
  Target: LAMA2; (+) strand; PAM type: YTN; PAM sequence: CTC
ttgtgaagtaagcttgcaag

SEQ ID NO: 369665 - DNA, 20 bp, Artificial Sequence
  Description of Artificial Sequence: Synthetic oligonucleotide
  Target: LAMA2; (+) strand; PAM type: YTN; PAM sequence: CTT
gtgaagtaagcttgcaagaa

SEQ ID NO: 369666 - DNA, 20 bp, Artificial Sequence
  Description of Artificial Sequence: Synthetic oligonucleotide
  Target: LAMA2; (+) strand; PAM type: YTN; PAM sequence: TTG
tgaagtaagcttgcaagaat

SEQ ID NO: 369667 - DNA, 20 bp, Artificial Sequence
  Description of Artificial Sequence: Synthetic oligonucleotide
  Target: LAMA2; (+) strand; PAM type: YTN; PAM sequence: CTT
gcaagaatgtatccttagtg

SEQ ID NO: 369668 - DNA, 20 bp, Artificial Sequence
  Description of Artificial Sequence: Synthetic oligonucleotide
  Target: LAMA2; (+) strand; PAM type: YTN; PAM sequence: TTG
caagaatgtatccttagtgc

SEQ ID NO: 369669 - DNA, 20 bp, Artificial Sequence
  Description of Artificial Sequence: Synthetic oligonucleotide
  Target: LAMA2; (+) strand; PAM type: YTN; PAM sequence: CTT
agtgctttcaaagttccctc

SEQ ID NO: 369670 - DNA, 20 bp, Artificial Sequence
  Description of Artificial Sequence: Synthetic oligonucleotide
  Target: LAMA2; (+) strand; PAM type: YTN; PAM sequence: TTA
gtgctttcaaagttccctca

SEQ ID NO: 369671 - DNA, 20 bp, Artificial Sequence
  Description of Artificial Sequence: Synthetic oligonucleotide
  Target: LAMA2; (+) strand; PAM type: YTN; PAM sequence: CTT
tcaaagttccctcaacattg

SEQ ID NO: 369672 - DNA, 20 bp, Artificial Sequence
  Description of Artificial Sequence: Synthetic oligonucleotide
  Target: LAMA2; (+) strand; PAM type: YTN; PAM sequence: TTT
caaagttccctcaacattgc

SEQ ID NO: 369673 - DNA, 20 bp, Artificial Sequence
  Description of Artificial Sequence: Synthetic oligonucleotide
  Target: LAMA2; (+) strand; PAM type: YTN; PAM sequence: TTC
aaagttccctcaacattgct

SEQ ID NO: 369674 - DNA, 20 bp, Artificial Sequence
  Description of Artificial Sequence: Synthetic oligonucleotide
  Target: LAMA2; (+) strand; PAM type: YTN; PAM sequence: TTC
cctcaacattgctttcaata

SEQ ID NO: 369675 - DNA, 20 bp, Artificial Sequence
  Description of Artificial Sequence: Synthetic oligonucleotide
  Target: LAMA2; (+) strand; PAM type: YTN; PAM sequence: CTC
aacattgctttcaataacct

SEQ ID NO: 369676 - DNA, 20 bp, Artificial Sequence
  Description of Artificial Sequence: Synthetic oligonucleotide
  Target: LAMA2; (+) strand; PAM type: YTN; PAM sequence: TTG
ctttcaataacctattctaa

SEQ ID NO: 369677 - DNA, 20 bp, Artificial Sequence
  Description of Artificial Sequence: Synthetic oligonucleotide
  Target: LAMA2; (+) strand; PAM type: YTN; PAM sequence: CTT
tcaataacctattctaataa

SEQ ID NO: 369678 - DNA, 20 bp, Artificial Sequence
  Description of Artificial Sequence: Synthetic oligonucleotide
  Target: LAMA2; (+) strand; PAM type: YTN; PAM sequence: TTT
caataacctattctaataag

SEQ ID NO: 369679 - DNA, 20 bp, Artificial Sequence
  Description of Artificial Sequence: Synthetic oligonucleotide
  Target: LAMA2; (+) strand; PAM type: YTN; PAM sequence: TTC
aataacctattctaataaga

SEQ ID NO: 369680 - DNA, 20 bp, Artificial Sequence
  Description of Artificial Sequence: Synthetic oligonucleotide
  Target: LAMA2; (+) strand; PAM type: YTN; PAM sequence: CTA
ttctaataagagctgttttt

SEQ ID NO: 369681 - DNA, 20 bp, Artificial Sequence
  Description of Artificial Sequence: Synthetic oligonucleotide
  Target: LAMA2; (+) strand; PAM type: YTN; PAM sequence: TTC
taataagagctgtttttttt

SEQ ID NO: 369682 - DNA, 20 bp, Artificial Sequence
  Description of Artificial Sequence: Synthetic oligonucleotide
  Target: LAMA2; (+) strand; PAM type: YTN; PAM sequence: CTA
ataagagctgttttttttct

SEQ ID NO: 369683 - DNA, 20 bp, Artificial Sequence
  Description of Artificial Sequence: Synthetic oligonucleotide
  Target: LAMA2; (+) strand; PAM type: YTN; PAM sequence: CTG
ttttttttctatcaataatt

SEQ ID NO: 369684 - DNA, 20 bp, Artificial Sequence
  Description of Artificial Sequence: Synthetic oligonucleotide
  Target: LAMA2; (+) strand; PAM type: YTN; PAM sequence: TTT
tttttctatcaataattaca

SEQ ID NO: 369685 - DNA, 20 bp, Artificial Sequence
  Description of Artificial Sequence: Synthetic oligonucleotide
  Target: LAMA2; (+) strand; PAM type: YTN; PAM sequence: TTT
ttttctatcaataattacac

SEQ ID NO: 369686 - DNA, 20 bp, Artificial Sequence
  Description of Artificial Sequence: Synthetic oligonucleotide
  Target: LAMA2; (+) strand; PAM type: YTN; PAM sequence: TTT
tttctatcaataattacaca

SEQ ID NO: 369687 - DNA, 20 bp, Artificial Sequence
  Description of Artificial Sequence: Synthetic oligonucleotide
  Target: LAMA2; (+) strand; PAM type: YTN; PAM sequence: TTT
ttctatcaataattacacaa

SEQ ID NO: 369688 - DNA, 20 bp, Artificial Sequence
  Description of Artificial Sequence: Synthetic oligonucleotide
  Target: LAMA2; (+) strand; PAM type: YTN; PAM sequence: TTT
tctatcaataattacacaaa

SEQ ID NO: 369689 - DNA, 20 bp, Artificial Sequence
  Description of Artificial Sequence: Synthetic oligonucleotide
  Target: LAMA2; (+) strand; PAM type: YTN; PAM sequence: TTT
ctatcaataattacacaaat

SEQ ID NO: 369690 - DNA, 20 bp, Artificial Sequence
  Description of Artificial Sequence: Synthetic oligonucleotide
  Target: LAMA2; (+) strand; PAM type: YTN; PAM sequence: TTC
tatcaataattacacaaata

SEQ ID NO: 369691 - DNA, 20 bp, Artificial Sequence
  Description of Artificial Sequence: Synthetic oligonucleotide
  Target: LAMA2; (+) strand; PAM type: YTN; PAM sequence: CTA
tcaataattacacaaataat

SEQ ID NO: 369692 - DNA, 20 bp, Artificial Sequence
  Description of Artificial Sequence: Synthetic oligonucleotide
  Target: LAMA2; (+) strand; PAM type: YTN; PAM sequence: TTA
cacaaataatgtgtatcact

SEQ ID NO: 369693 - DNA, 20 bp, Artificial Sequence
  Description of Artificial Sequence: Synthetic oligonucleotide
  Target: LAMA2; (+) strand; PAM type: YTN; PAM sequence: CTT
aaaaacaaaacttgaatatc

SEQ ID NO: 369694 - DNA, 20 bp, Artificial Sequence
  Description of Artificial Sequence: Synthetic oligonucleotide
  Target: LAMA2; (+) strand; PAM type: YTN; PAM sequence: TTA
aaaacaaaacttgaatatct

SEQ ID NO: 369695 - DNA, 20 bp, Artificial Sequence
  Description of Artificial Sequence: Synthetic oligonucleotide
  Target: LAMA2; (+) strand; PAM type: YTN; PAM sequence: CTT
gaatatctaccaaaagctgt

SEQ ID NO: 369696 - DNA, 20 bp, Artificial Sequence
  Description of Artificial Sequence: Synthetic oligonucleotide
  Target: LAMA2; (+) strand; PAM type: YTN; PAM sequence: TTG
aatatctaccaaaagctgtg

SEQ ID NO: 369697 - DNA, 20 bp, Artificial Sequence
  Description of Artificial Sequence: Synthetic oligonucleotide
  Target: LAMA2; (+) strand; PAM type: YTN; PAM sequence: CTA
ccaaaagctgtggctttcaa

SEQ ID NO: 369698 - DNA, 20 bp, Artificial Sequence
  Description of Artificial Sequence: Synthetic oligonucleotide
  Target: LAMA2; (+) strand; PAM type: YTN; PAM sequence: CTG
tggctttcaattagagtatt

SEQ ID NO: 369699 - DNA, 20 bp, Artificial Sequence
  Description of Artificial Sequence: Synthetic oligonucleotide
  Target: LAMA2; (+) strand; PAM type: YTN; PAM sequence: CTT
tcaattagagtattaaccac

SEQ ID NO: 369700 - DNA, 20 bp, Artificial Sequence
  Description of Artificial Sequence: Synthetic oligonucleotide
  Target: LAMA2; (+) strand; PAM type: YTN; PAM sequence: TTT
caattagagtattaaccaca

SEQ ID NO: 369701 - DNA, 20 bp, Artificial Sequence
  Description of Artificial Sequence: Synthetic oligonucleotide
  Target: LAMA2; (+) strand; PAM type: YTN; PAM sequence: TTC
aattagagtattaaccacat

SEQ ID NO: 369702 - DNA, 20 bp, Artificial Sequence
  Description of Artificial Sequence: Synthetic oligonucleotide
  Target: LAMA2; (+) strand; PAM type: YTN; PAM sequence: TTA
gagtattaaccacataattt

SEQ ID NO: 369703 - DNA, 20 bp, Artificial Sequence
  Description of Artificial Sequence: Synthetic oligonucleotide
  Target: LAMA2; (+) strand; PAM type: YTN; PAM sequence: TTA
accacataatttcattttgt

SEQ ID NO: 369704 - DNA, 20 bp, Artificial Sequence
  Description of Artificial Sequence: Synthetic oligonucleotide
  Target: LAMA2; (+) strand; PAM type: YTN; PAM sequence: TTT
cattttgtaactctttctct

SEQ ID NO: 369705 - DNA, 20 bp, Artificial Sequence
  Description of Artificial Sequence: Synthetic oligonucleotide
  Target: LAMA2; (+) strand; PAM type: YTN; PAM sequence: TTC
attttgtaactctttctctc

SEQ ID NO: 369706 - DNA, 20 bp, Artificial Sequence
  Description of Artificial Sequence: Synthetic oligonucleotide
  Target: LAMA2; (+) strand; PAM type: YTN; PAM sequence: TTT
tgtaactctttctctctgag

SEQ ID NO: 369707 - DNA, 20 bp, Artificial Sequence
  Description of Artificial Sequence: Synthetic oligonucleotide
  Target: LAMA2; (+) strand; PAM type: YTN; PAM sequence: TTT
gtaactctttctctctgaga

SEQ ID NO: 369708 - DNA, 20 bp, Artificial Sequence
  Description of Artificial Sequence: Synthetic oligonucleotide
  Target: LAMA2; (+) strand; PAM type: YTN; PAM sequence: TTG
taactctttctctctgagat

SEQ ID NO: 369709 - DNA, 20 bp, Artificial Sequence
  Description of Artificial Sequence: Synthetic oligonucleotide
  Target: LAMA2; (+) strand; PAM type: YTN; PAM sequence: CTC
tttctctctgagatattttg

SEQ ID NO: 369710 - DNA, 20 bp, Artificial Sequence
  Description of Artificial Sequence: Synthetic oligonucleotide
  Target: LAMA2; (+) strand; PAM type: YTN; PAM sequence: CTT
tctctctgagatattttgcc

SEQ ID NO: 369711 - DNA, 20 bp, Artificial Sequence
  Description of Artificial Sequence: Synthetic oligonucleotide
  Target: LAMA2; (+) strand; PAM type: YTN; PAM sequence: TTT
ctctctgagatattttgcct

SEQ ID NO: 369712 - DNA, 20 bp, Artificial Sequence
  Description of Artificial Sequence: Synthetic oligonucleotide
  Target: LAMA2; (+) strand; PAM type: YTN; PAM sequence: TTC
tctctgagatattttgccta

SEQ ID NO: 369713 - DNA, 20 bp, Artificial Sequence
  Description of Artificial Sequence: Synthetic oligonucleotide
  Target: LAMA2; (+) strand; PAM type: YTN; PAM sequence: CTC
tctgagatattttgcctata

SEQ ID NO: 369714 - DNA, 20 bp, Artificial Sequence
  Description of Artificial Sequence: Synthetic oligonucleotide
  Target: LAMA2; (+) strand; PAM type: YTN; PAM sequence: CTC
tgagatattttgcctataac

SEQ ID NO: 369715 - DNA, 20 bp, Artificial Sequence
  Description of Artificial Sequence: Synthetic oligonucleotide
  Target: LAMA2; (+) strand; PAM type: YTN; PAM sequence: CTG
agatattttgcctataactg

SEQ ID NO: 369716 - DNA, 20 bp, Artificial Sequence
  Description of Artificial Sequence: Synthetic oligonucleotide
  Target: LAMA2; (+) strand; PAM type: YTN; PAM sequence: TTT
tgcctataactgaaaatctg

SEQ ID NO: 369717 - DNA, 20 bp, Artificial Sequence
  Description of Artificial Sequence: Synthetic oligonucleotide
  Target: LAMA2; (+) strand; PAM type: YTN; PAM sequence: TTT
gcctataactgaaaatctga

SEQ ID NO: 369718 - DNA, 20 bp, Artificial Sequence
  Description of Artificial Sequence: Synthetic oligonucleotide
  Target: LAMA2; (+) strand; PAM type: YTN; PAM sequence: TTG
cctataactgaaaatctgat

SEQ ID NO: 369719 - DNA, 20 bp, Artificial Sequence
  Description of Artificial Sequence: Synthetic oligonucleotide
  Target: LAMA2; (+) strand; PAM type: YTN; PAM sequence: CTA
taactgaaaatctgatgttt

SEQ ID NO: 369720 - DNA, 20 bp, Artificial Sequence
  Description of Artificial Sequence: Synthetic oligonucleotide
  Target: LAMA2; (+) strand; PAM type: YTN; PAM sequence: CTG
aaaatctgatgtttctgtct

SEQ ID NO: 369721 - DNA, 20 bp, Artificial Sequence
  Description of Artificial Sequence: Synthetic oligonucleotide
  Target: LAMA2; (+) strand; PAM type: YTN; PAM sequence: CTG
atgtttctgtctttgctaca

SEQ ID NO: 369722 - DNA, 20 bp, Artificial Sequence
  Description of Artificial Sequence: Synthetic oligonucleotide
  Target: LAMA2; (+) strand; PAM type: YTN; PAM sequence: TTT
ctgtctttgctacatatttg

SEQ ID NO: 369723 - DNA, 20 bp, Artificial Sequence
  Description of Artificial Sequence: Synthetic oligonucleotide
  Target: LAMA2; (+) strand; PAM type: YTN; PAM sequence: TTC
tgtctttgctacatatttga

SEQ ID NO: 369724 - DNA, 20 bp, Artificial Sequence
  Description of Artificial Sequence: Synthetic oligonucleotide
  Target: LAMA2; (+) strand; PAM type: YTN; PAM sequence: CTG
tctttgctacatatttgatc

SEQ ID NO: 369725 - DNA, 20 bp, Artificial Sequence
  Description of Artificial Sequence: Synthetic oligonucleotide
  Target: LAMA2; (+) strand; PAM type: YTN; PAM sequence: CTT
tgctacatatttgatctatt

SEQ ID NO: 369726 - DNA, 20 bp, Artificial Sequence
  Description of Artificial Sequence: Synthetic oligonucleotide
  Target: LAMA2; (+) strand; PAM type: YTN; PAM sequence: TTT
gctacatatttgatctattg

SEQ ID NO: 369727 - DNA, 20 bp, Artificial Sequence
  Description of Artificial Sequence: Synthetic oligonucleotide
  Target: LAMA2; (+) strand; PAM type: YTN; PAM sequence: TTG
ctacatatttgatctattgt

SEQ ID NO: 369728 - DNA, 20 bp, Artificial Sequence
  Description of Artificial Sequence: Synthetic oligonucleotide
  Target: LAMA2; (+) strand; PAM type: YTN; PAM sequence: CTA
catatttgatctattgtatg

SEQ ID NO: 369729 - DNA, 20 bp, Artificial Sequence
  Description of Artificial Sequence: Synthetic oligonucleotide
  Target: LAMA2; (+) strand; PAM type: YTN; PAM sequence: TTT
gatctattgtatgctggatg

SEQ ID NO: 369730 - DNA, 20 bp, Artificial Sequence
  Description of Artificial Sequence: Synthetic oligonucleotide
  Target: LAMA2; (+) strand; PAM type: YTN; PAM sequence: TTG
atctattgtatgctggatgg

SEQ ID NO: 369731 - DNA, 20 bp, Artificial Sequence
  Description of Artificial Sequence: Synthetic oligonucleotide
  Target: LAMA2; (+) strand; PAM type: YTN; PAM sequence: CTA
ttgtatgctggatggtagca

SEQ ID NO: 369732 - DNA, 20 bp, Artificial Sequence
  Description of Artificial Sequence: Synthetic oligonucleotide
  Target: LAMA2; (+) strand; PAM type: YTN; PAM sequence: TTG
tatgctggatggtagcagaa

SEQ ID NO: 369733 - DNA, 20 bp, Artificial Sequence
  Description of Artificial Sequence: Synthetic oligonucleotide
  Target: LAMA2; (+) strand; PAM type: YTN; PAM sequence: CTG
gatggtagcagaatagcact

SEQ ID NO: 369734 - DNA, 20 bp, Artificial Sequence
  Description of Artificial Sequence: Synthetic oligonucleotide
  Target: LAMA2; (+) strand; PAM type: YTN; PAM sequence: CTT
caaaatattttctcttcatt

SEQ ID NO: 369735 - DNA, 20 bp, Artificial Sequence
  Description of Artificial Sequence: Synthetic oligonucleotide
  Target: LAMA2; (+) strand; PAM type: YTN; PAM sequence: TTC
aaaatattttctcttcattt

SEQ ID NO: 369736 - DNA, 20 bp, Artificial Sequence
  Description of Artificial Sequence: Synthetic oligonucleotide
  Target: LAMA2; (+) strand; PAM type: YTN; PAM sequence: TTT
tctcttcattttcatcataa

SEQ ID NO: 369737 - DNA, 20 bp, Artificial Sequence
  Description of Artificial Sequence: Synthetic oligonucleotide
  Target: LAMA2; (+) strand; PAM type: YTN; PAM sequence: TTT
ctcttcattttcatcataat

SEQ ID NO: 369738 - DNA, 20 bp, Artificial Sequence
  Description of Artificial Sequence: Synthetic oligonucleotide
  Target: LAMA2; (+) strand; PAM type: YTN; PAM sequence: TTC
tcttcattttcatcataatg

SEQ ID NO: 369739 - DNA, 20 bp, Artificial Sequence
  Description of Artificial Sequence: Synthetic oligonucleotide
  Target: LAMA2; (+) strand; PAM type: YTN; PAM sequence: CTC
ttcattttcatcataatgtt

SEQ ID NO: 369740 - DNA, 20 bp, Artificial Sequence
  Description of Artificial Sequence: Synthetic oligonucleotide
  Target: LAMA2; (+) strand; PAM type: YTN; PAM sequence: CTT
cattttcatcataatgttat

SEQ ID NO: 369741 - DNA, 20 bp, Artificial Sequence
  Description of Artificial Sequence: Synthetic oligonucleotide
  Target: LAMA2; (+) strand; PAM type: YTN; PAM sequence: TTC
attttcatcataatgttatc

SEQ ID NO: 369742 - DNA, 20 bp, Artificial Sequence
  Description of Artificial Sequence: Synthetic oligonucleotide
  Target: LAMA2; (+) strand; PAM type: YTN; PAM sequence: TTT
tcatcataatgttatccaaa

SEQ ID NO: 369743 - DNA, 20 bp, Artificial Sequence
  Description of Artificial Sequence: Synthetic oligonucleotide
  Target: LAMA2; (+) strand; PAM type: YTN; PAM sequence: TTT
catcataatgttatccaaaa

SEQ ID NO: 369744 - DNA, 20 bp, Artificial Sequence
  Description of Artificial Sequence: Synthetic oligonucleotide
  Target: LAMA2; (+) strand; PAM type: YTN; PAM sequence: TTC
atcataatgttatccaaaat

SEQ ID NO: 369745 - DNA, 20 bp, Artificial Sequence
  Description of Artificial Sequence: Synthetic oligonucleotide
  Target: LAMA2; (+) strand; PAM type: YTN; PAM sequence: TTA
tccaaaatttagcactctat

SEQ ID NO: 369746 - DNA, 20 bp, Artificial Sequence
  Description of Artificial Sequence: Synthetic oligonucleotide
  Target: LAMA2; (+) strand; PAM type: YTN; PAM sequence: TTT
agcactctatttttttttta

SEQ ID NO: 369747 - DNA, 20 bp, Artificial Sequence
  Description of Artificial Sequence: Synthetic oligonucleotide
  Target: LAMA2; (+) strand; PAM type: YTN; PAM sequence: TTA
gcactctattttttttttac

SEQ ID NO: 369748 - DNA, 20 bp, Artificial Sequence
  Description of Artificial Sequence: Synthetic oligonucleotide
  Target: LAMA2; (+) strand; PAM type: YTN; PAM sequence: CTC
tattttttttttacttttct

SEQ ID NO: 369749 - DNA, 20 bp, Artificial Sequence
  Description of Artificial Sequence: Synthetic oligonucleotide
  Target: LAMA2; (+) strand; PAM type: YTN; PAM sequence: CTA
ttttttttttacttttctct

SEQ ID NO: 369750 - DNA, 20 bp, Artificial Sequence
  Description of Artificial Sequence: Synthetic oligonucleotide
  Target: LAMA2; (+) strand; PAM type: YTN; PAM sequence: TTT
tttttttacttttctctcat

SEQ ID NO: 369751 - DNA, 20 bp, Artificial Sequence
  Description of Artificial Sequence: Synthetic oligonucleotide
  Target: LAMA2; (+) strand; PAM type: YTN; PAM sequence: TTT
ttttttacttttctctcatt

SEQ ID NO: 369752 - DNA, 20 bp, Artificial Sequence
  Description of Artificial Sequence: Synthetic oligonucleotide
  Target: LAMA2; (+) strand; PAM type: YTN; PAM sequence: TTT
tttttacttttctctcattt

SEQ ID NO: 369753 - DNA, 20 bp, Artificial Sequence
  Description of Artificial Sequence: Synthetic oligonucleotide
  Target: LAMA2; (+) strand; PAM type: YTN; PAM sequence: TTT
ttttacttttctctcatttt

SEQ ID NO: 369754 - DNA, 20 bp, Artificial Sequence
  Description of Artificial Sequence: Synthetic oligonucleotide
  Target: LAMA2; (+) strand; PAM type: YTN; PAM sequence: TTT
tttacttttctctcattttt

SEQ ID NO: 369755 - DNA, 20 bp, Artificial Sequence
  Description of Artificial Sequence: Synthetic oligonucleotide
  Target: LAMA2; (+) strand; PAM type: YTN; PAM sequence: TTT
ttacttttctctcatttttt

SEQ ID NO: 369756 - DNA, 20 bp, Artificial Sequence
  Description of Artificial Sequence: Synthetic oligonucleotide
  Target: LAMA2; (+) strand; PAM type: YTN; PAM sequence: TTT
tacttttctctcatttttta

SEQ ID NO: 369757 - DNA, 20 bp, Artificial Sequence
  Description of Artificial Sequence: Synthetic oligonucleotide
  Target: LAMA2; (+) strand; PAM type: YTN; PAM sequence: TTT
acttttctctcattttttaa

SEQ ID NO: 369758 - DNA, 20 bp, Artificial Sequence
  Description of Artificial Sequence: Synthetic oligonucleotide
  Target: LAMA2; (+) strand; PAM type: YTN; PAM sequence: TTA
cttttctctcattttttaat

SEQ ID NO: 369759 - DNA, 20 bp, Artificial Sequence
  Description of Artificial Sequence: Synthetic oligonucleotide
  Target: LAMA2; (+) strand; PAM type: YTN; PAM sequence: CTT
ttctctcattttttaattct

SEQ ID NO: 369760 - DNA, 20 bp, Artificial Sequence
  Description of Artificial Sequence: Synthetic oligonucleotide
  Target: LAMA2; (+) strand; PAM type: YTN; PAM sequence: TTT
tctctcattttttaattctg

SEQ ID NO: 369761 - DNA, 20 bp, Artificial Sequence
  Description of Artificial Sequence: Synthetic oligonucleotide
  Target: LAMA2; (+) strand; PAM type: YTN; PAM sequence: TTT
ctctcattttttaattctgt

SEQ ID NO: 369762 - DNA, 20 bp, Artificial Sequence
  Description of Artificial Sequence: Synthetic oligonucleotide
  Target: LAMA2; (+) strand; PAM type: YTN; PAM sequence: TTC
tctcattttttaattctgta

SEQ ID NO: 369763 - DNA, 20 bp, Artificial Sequence
  Description of Artificial Sequence: Synthetic oligonucleotide
  Target: LAMA2; (+) strand; PAM type: YTN; PAM sequence: CTC
tcattttttaattctgtatc

SEQ ID NO: 369764 - DNA, 20 bp, Artificial Sequence
  Description of Artificial Sequence: Synthetic oligonucleotide
  Target: LAMA2; (+) strand; PAM type: YTN; PAM sequence: CTC
attttttaattctgtatcac

SEQ ID NO: 369765 - DNA, 20 bp, Artificial Sequence
  Description of Artificial Sequence: Synthetic oligonucleotide
  Target: LAMA2; (+) strand; PAM type: YTN; PAM sequence: TTT
tttaattctgtatcacactt

SEQ ID NO: 369766 - DNA, 20 bp, Artificial Sequence
  Description of Artificial Sequence: Synthetic oligonucleotide
  Target: LAMA2; (+) strand; PAM type: YTN; PAM sequence: TTT
ttaattctgtatcacacttt

SEQ ID NO: 369767 - DNA, 20 bp, Artificial Sequence
  Description of Artificial Sequence: Synthetic oligonucleotide
  Target: LAMA2; (+) strand; PAM type: YTN; PAM sequence: TTT
taattctgtatcacactttt

SEQ ID NO: 369768 - DNA, 20 bp, Artificial Sequence
  Description of Artificial Sequence: Synthetic oligonucleotide
  Target: LAMA2; (+) strand; PAM type: YTN; PAM sequence: TTT
aattctgtatcacacttttc

SEQ ID NO: 369769 - DNA, 20 bp, Artificial Sequence
  Description of Artificial Sequence: Synthetic oligonucleotide
  Target: LAMA2; (+) strand; PAM type: YTN; PAM sequence: TTA
attctgtatcacacttttcc

SEQ ID NO: 369770 - DNA, 20 bp, Artificial Sequence
  Description of Artificial Sequence: Synthetic oligonucleotide
  Target: LAMA2; (+) strand; PAM type: YTN; PAM sequence: TTC
tgtatcacacttttcctcta

SEQ ID NO: 369771 - DNA, 20 bp, Artificial Sequence
  Description of Artificial Sequence: Synthetic oligonucleotide
  Target: LAMA2; (+) strand; PAM type: YTN; PAM sequence: CTG
tatcacacttttcctctact

SEQ ID NO: 369772 - DNA, 20 bp, Artificial Sequence
  Description of Artificial Sequence: Synthetic oligonucleotide
  Target: LAMA2; (+) strand; PAM type: YTN; PAM sequence: CTT
ttcctctacttcatttctaa

SEQ ID NO: 369773 - DNA, 20 bp, Artificial Sequence
  Description of Artificial Sequence: Synthetic oligonucleotide
  Target: LAMA2; (+) strand; PAM type: YTN; PAM sequence: TTT
tcctctacttcatttctaag

SEQ ID NO: 369774 - DNA, 20 bp, Artificial Sequence
  Description of Artificial Sequence: Synthetic oligonucleotide
  Target: LAMA2; (+) strand; PAM type: YTN; PAM sequence: TTT
cctctacttcatttctaaga

SEQ ID NO: 369775 - DNA, 20 bp, Artificial Sequence
  Description of Artificial Sequence: Synthetic oligonucleotide
  Target: LAMA2; (+) strand; PAM type: YTN; PAM sequence: TTC
ctctacttcatttctaagaa

SEQ ID NO: 369776 - DNA, 20 bp, Artificial Sequence
  Description of Artificial Sequence: Synthetic oligonucleotide
  Target: LAMA2; (+) strand; PAM type: YTN; PAM sequence: CTC
tacttcatttctaagaatac

SEQ ID NO: 369777 - DNA, 20 bp, Artificial Sequence
  Description of Artificial Sequence: Synthetic oligonucleotide
  Target: LAMA2; (+) strand; PAM type: YTN; PAM sequence: CTA
cttcatttctaagaatacaa

SEQ ID NO: 369778 - DNA, 20 bp, Artificial Sequence
  Description of Artificial Sequence: Synthetic oligonucleotide
  Target: LAMA2; (+) strand; PAM type: YTN; PAM sequence: CTT
catttctaagaatacaacca

SEQ ID NO: 369779 - DNA, 20 bp, Artificial Sequence
  Description of Artificial Sequence: Synthetic oligonucleotide
  Target: LAMA2; (+) strand; PAM type: YTN; PAM sequence: TTC
atttctaagaatacaaccaa

SEQ ID NO: 369780 - DNA, 20 bp, Artificial Sequence
  Description of Artificial Sequence: Synthetic oligonucleotide
  Target: LAMA2; (+) strand; PAM type: YTN; PAM sequence: TTT
ctaagaatacaaccaaatca

SEQ ID NO: 369781 - DNA, 20 bp, Artificial Sequence
  Description of Artificial Sequence: Synthetic oligonucleotide
  Target: LAMA2; (+) strand; PAM type: YTN; PAM sequence: TTC
taagaatacaaccaaatcac

SEQ ID NO: 369782 - DNA, 20 bp, Artificial Sequence
  Description of Artificial Sequence: Synthetic oligonucleotide
  Target: LAMA2; (+) strand; PAM type: YTN; PAM sequence: CTA
agaatacaaccaaatcacaa

SEQ ID NO: 369783 - DNA, 20 bp, Artificial Sequence
  Description of Artificial Sequence: Synthetic oligonucleotide
  Target: LAMA2; (+) strand; PAM type: YTN; PAM sequence: CTG
aagcatataatcttcagaat

SEQ ID NO: 369784 - DNA, 20 bp, Artificial Sequence
  Description of Artificial Sequence: Synthetic oligonucleotide
  Target: LAMA2; (+) strand; PAM type: YTN; PAM sequence: CTT
cagaatgtcaagaatataat

SEQ ID NO: 369785 - DNA, 20 bp, Artificial Sequence
  Description of Artificial Sequence: Synthetic oligonucleotide
  Target: LAMA2; (+) strand; PAM type: YTN; PAM sequence: TTC
agaatgtcaagaatataata

SEQ ID NO: 369786 - DNA, 20 bp, Artificial Sequence
  Description of Artificial Sequence: Synthetic oligonucleotide
  Target: LAMA2; (+) strand; PAM type: YTN; PAM sequence: CTT
gatatagaaaactgcctaca

SEQ ID NO: 369787 - DNA, 20 bp, Artificial Sequence
  Description of Artificial Sequence: Synthetic oligonucleotide
  Target: LAMA2; (+) strand; PAM type: YTN; PAM sequence: TTG
atatagaaaactgcctacag

SEQ ID NO: 369788 - DNA, 20 bp, Artificial Sequence
  Description of Artificial Sequence: Synthetic oligonucleotide
  Target: LAMA2; (+) strand; PAM type: YTN; PAM sequence: CTG
cctacaggtctttgatttgt

SEQ ID NO: 369789 - DNA, 20 bp, Artificial Sequence
  Description of Artificial Sequence: Synthetic oligonucleotide
  Target: LAMA2; (+) strand; PAM type: YTN; PAM sequence: CTA
caggtctttgatttgtttag

SEQ ID NO: 369790 - DNA, 20 bp, Artificial Sequence
  Description of Artificial Sequence: Synthetic oligonucleotide
  Target: LAMA2; (+) strand; PAM type: YTN; PAM sequence: CTT
tgatttgtttagcacctaat

SEQ ID NO: 369791 - DNA, 20 bp, Artificial Sequence
  Description of Artificial Sequence: Synthetic oligonucleotide
  Target: LAMA2; (+) strand; PAM type: YTN; PAM sequence: TTT
gatttgtttagcacctaatg

SEQ ID NO: 369792 - DNA, 20 bp, Artificial Sequence
  Description of Artificial Sequence: Synthetic oligonucleotide
  Target: LAMA2; (+) strand; PAM type: YTN; PAM sequence: TTG
atttgtttagcacctaatgt

SEQ ID NO: 369793 - DNA, 20 bp, Artificial Sequence
  Description of Artificial Sequence: Synthetic oligonucleotide
  Target: LAMA2; (+) strand; PAM type: YTN; PAM sequence: TTT
gtttagcacctaatgtttga

SEQ ID NO: 369794 - DNA, 20 bp, Artificial Sequence
  Description of Artificial Sequence: Synthetic oligonucleotide
  Target: LAMA2; (+) strand; PAM type: YTN; PAM sequence: TTG
tttagcacctaatgtttgag

SEQ ID NO: 369795 - DNA, 20 bp, Artificial Sequence
  Description of Artificial Sequence: Synthetic oligonucleotide
  Target: LAMA2; (+) strand; PAM type: YTN; PAM sequence: TTT
agcacctaatgtttgagata

SEQ ID NO: 369796 - DNA, 20 bp, Artificial Sequence
  Description of Artificial Sequence: Synthetic oligonucleotide
  Target: LAMA2; (+) strand; PAM type: YTN; PAM sequence: TTA
gcacctaatgtttgagatat

SEQ ID NO: 369797 - DNA, 20 bp, Artificial Sequence
  Description of Artificial Sequence: Synthetic oligonucleotide
  Target: LAMA2; (+) strand; PAM type: YTN; PAM sequence: CTA
atgtttgagatatttattgt

SEQ ID NO: 369798 - DNA, 20 bp, Artificial Sequence
  Description of Artificial Sequence: Synthetic oligonucleotide
  Target: LAMA2; (+) strand; PAM type: YTN; PAM sequence: TTT
gagatatttattgttgtctc

SEQ ID NO: 369799 - DNA, 20 bp, Artificial Sequence
  Description of Artificial Sequence: Synthetic oligonucleotide
  Target: LAMA2; (+) strand; PAM type: YTN; PAM sequence: TTG
agatatttattgttgtctca

SEQ ID NO: 369800 - DNA, 20 bp, Artificial Sequence
  Description of Artificial Sequence: Synthetic oligonucleotide
  Target: LAMA2; (+) strand; PAM type: YTN; PAM sequence: TTT
attgttgtctcaatatccta

SEQ ID NO: 369801 - DNA, 20 bp, Artificial Sequence
  Description of Artificial Sequence: Synthetic oligonucleotide
  Target: LAMA2; (+) strand; PAM type: YTN; PAM sequence: TTA
ttgttgtctcaatatcctag

SEQ ID NO: 369802 - DNA, 20 bp, Artificial Sequence
  Description of Artificial Sequence: Synthetic oligonucleotide
  Target: LAMA2; (+) strand; PAM type: YTN; PAM sequence: TTG
ttgtctcaatatcctagatt

SEQ ID NO: 369803 - DNA, 20 bp, Artificial Sequence
  Description of Artificial Sequence: Synthetic oligonucleotide
  Target: LAMA2; (+) strand; PAM type: YTN; PAM sequence: TTG
tctcaatatcctagatttat

SEQ ID NO: 369804 - DNA, 20 bp, Artificial Sequence
  Description of Artificial Sequence: Synthetic oligonucleotide
  Target: LAMA2; (+) strand; PAM type: YTN; PAM sequence: CTC
aatatcctagatttataata

SEQ ID NO: 369805 - DNA, 20 bp, Artificial Sequence
  Description of Artificial Sequence: Synthetic oligonucleotide
  Target: LAMA2; (+) strand; PAM type: YTN; PAM sequence: CTA
gatttataataagattaatg

SEQ ID NO: 369806 - DNA, 20 bp, Artificial Sequence
  Description of Artificial Sequence: Synthetic oligonucleotide
  Target: LAMA2; (+) strand; PAM type: YTN; PAM sequence: TTT
ataataagattaatggttct

SEQ ID NO: 369807 - DNA, 20 bp, Artificial Sequence
  Description of Artificial Sequence: Synthetic oligonucleotide
  Target: LAMA2; (+) strand; PAM type: YTN; PAM sequence: TTA
taataagattaatggttctt

SEQ ID NO: 369808 - DNA, 20 bp, Artificial Sequence
  Description of Artificial Sequence: Synthetic oligonucleotide
  Target: LAMA2; (+) strand; PAM type: YTN; PAM sequence: TTA
atggttcttacttaataccg

SEQ ID NO: 369809 - DNA, 20 bp, Artificial Sequence
  Description of Artificial Sequence: Synthetic oligonucleotide
  Target: LAMA2; (+) strand; PAM type: YTN; PAM sequence: TTC
ttacttaataccgcagtgtg

SEQ ID NO: 369810 - DNA, 20 bp, Artificial Sequence
  Description of Artificial Sequence: Synthetic oligonucleotide
  Target: LAMA2; (+) strand; PAM type: YTN; PAM sequence: CTT
acttaataccgcagtgtgtc

SEQ ID NO: 369811 - DNA, 20 bp, Artificial Sequence
  Description of Artificial Sequence: Synthetic oligonucleotide
  Target: LAMA2; (+) strand; PAM type: YTN; PAM sequence: TTA
cttaataccgcagtgtgtca

SEQ ID NO: 369812 - DNA, 20 bp, Artificial Sequence
  Description of Artificial Sequence: Synthetic oligonucleotide
  Target: LAMA2; (+) strand; PAM type: YTN; PAM sequence: CTT
aataccgcagtgtgtcatcc

SEQ ID NO: 369813 - DNA, 20 bp, Artificial Sequence
  Description of Artificial Sequence: Synthetic oligonucleotide
  Target: LAMA2; (+) strand; PAM type: YTN; PAM sequence: TTA
ataccgcagtgtgtcatcct

SEQ ID NO: 369814 - DNA, 20 bp, Artificial Sequence
  Description of Artificial Sequence: Synthetic oligonucleotide
  Target: LAMA2; (+) strand; PAM type: YTN; PAM sequence: CTA
aggtaacaatttttatttgc

SEQ ID NO: 369815 - DNA, 20 bp, Artificial Sequence
  Description of Artificial Sequence: Synthetic oligonucleotide
  Target: LAMA2; (+) strand; PAM type: YTN; PAM sequence: TTT
ttatttgcttctgtgtattt

SEQ ID NO: 369816 - DNA, 20 bp, Artificial Sequence
  Description of Artificial Sequence: Synthetic oligonucleotide
  Target: LAMA2; (+) strand; PAM type: YTN; PAM sequence: TTT
tatttgcttctgtgtatttt

SEQ ID NO: 369817 - DNA, 20 bp, Artificial Sequence
  Description of Artificial Sequence: Synthetic oligonucleotide
  Target: LAMA2; (+) strand; PAM type: YTN; PAM sequence: TTT
atttgcttctgtgtattttc

SEQ ID NO: 369818 - DNA, 20 bp, Artificial Sequence
  Description of Artificial Sequence: Synthetic oligonucleotide
  Target: LAMA2; (+) strand; PAM type: YTN; PAM sequence: TTA
tttgcttctgtgtattttct

SEQ ID NO: 369819 - DNA, 20 bp, Artificial Sequence
  Description of Artificial Sequence: Synthetic oligonucleotide
  Target: LAMA2; (+) strand; PAM type: YTN; PAM sequence: TTT
gcttctgtgtattttctttt

SEQ ID NO: 369820 - DNA, 20 bp, Artificial Sequence
  Description of Artificial Sequence: Synthetic oligonucleotide
  Target: LAMA2; (+) strand; PAM type: YTN; PAM sequence: TTG
cttctgtgtattttctttta

SEQ ID NO: 369821 - DNA, 20 bp, Artificial Sequence
  Description of Artificial Sequence: Synthetic oligonucleotide
  Target: LAMA2; (+) strand; PAM type: YTN; PAM sequence: CTT
ctgtgtattttcttttacac

SEQ ID NO: 369822 - DNA, 20 bp, Artificial Sequence
  Description of Artificial Sequence: Synthetic oligonucleotide
  Target: LAMA2; (+) strand; PAM type: YTN; PAM sequence: TTC
tgtgtattttcttttacaca

SEQ ID NO: 369823 - DNA, 20 bp, Artificial Sequence
  Description of Artificial Sequence: Synthetic oligonucleotide
  Target: LAMA2; (+) strand; PAM type: YTN; PAM sequence: CTG
tgtattttcttttacacaga

SEQ ID NO: 369824 - DNA, 20 bp, Artificial Sequence
  Description of Artificial Sequence: Synthetic oligonucleotide
  Target: LAMA2; (+) strand; PAM type: YTN; PAM sequence: TTT
tcttttacacagaaaactgg

SEQ ID NO: 369825 - DNA, 20 bp, Artificial Sequence
  Description of Artificial Sequence: Synthetic oligonucleotide
  Target: LAMA2; (+) strand; PAM type: YTN; PAM sequence: TTT
cttttacacagaaaactggt

SEQ ID NO: 369826 - DNA, 20 bp, Artificial Sequence
  Description of Artificial Sequence: Synthetic oligonucleotide
  Target: LAMA2; (+) strand; PAM type: YTN; PAM sequence: TTC
ttttacacagaaaactggtg

SEQ ID NO: 369827 - DNA, 20 bp, Artificial Sequence
  Description of Artificial Sequence: Synthetic oligonucleotide
  Target: LAMA2; (+) strand; PAM type: YTN; PAM sequence: CTT
ttacacagaaaactggtgtg

SEQ ID NO: 369828 - DNA, 20 bp, Artificial Sequence
  Description of Artificial Sequence: Synthetic oligonucleotide
  Target: LAMA2; (+) strand; PAM type: YTN; PAM sequence: TTT
tacacagaaaactggtgtga

SEQ ID NO: 369829 - DNA, 20 bp, Artificial Sequence
  Description of Artificial Sequence: Synthetic oligonucleotide
  Target: LAMA2; (+) strand; PAM type: YTN; PAM sequence: TTT
acacagaaaactggtgtgaa

SEQ ID NO: 369830 - DNA, 20 bp, Artificial Sequence
  Description of Artificial Sequence: Synthetic oligonucleotide
  Target: LAMA2; (+) strand; PAM type: YTN; PAM sequence: TTA
cacagaaaactggtgtgaaa

SEQ ID NO: 369831 - DNA, 20 bp, Artificial Sequence
  Description of Artificial Sequence: Synthetic oligonucleotide
  Target: LAMA2; (+) strand; PAM type: YTN; PAM sequence: CTG
gtgtgaaactggttttactt

SEQ ID NO: 369832 - DNA, 20 bp, Artificial Sequence
  Description of Artificial Sequence: Synthetic oligonucleotide
  Target: LAMA2; (+) strand; PAM type: YTN; PAM sequence: CTG
gttttacttgaaacctggtc

SEQ ID NO: 369833 - DNA, 20 bp, Artificial Sequence
  Description of Artificial Sequence: Synthetic oligonucleotide
  Target: LAMA2; (+) strand; PAM type: YTN; PAM sequence: TTT
tacttgaaacctggtcaaaa

SEQ ID NO: 369834 - DNA, 20 bp, Artificial Sequence
  Description of Artificial Sequence: Synthetic oligonucleotide
  Target: LAMA2; (+) strand; PAM type: YTN; PAM sequence: TTT
acttgaaacctggtcaaaaa

SEQ ID NO: 369835 - DNA, 20 bp, Artificial Sequence
  Description of Artificial Sequence: Synthetic oligonucleotide
  Target: LAMA2; (+) strand; PAM type: YTN; PAM sequence: TTA
cttgaaacctggtcaaaaaa

SEQ ID NO: 369836 - DNA, 20 bp, Artificial Sequence
  Description of Artificial Sequence: Synthetic oligonucleotide
  Target: LAMA2; (+) strand; PAM type: YTN; PAM sequence: CTT
gaaacctggtcaaaaaatgt

SEQ ID NO: 369837 - DNA, 20 bp, Artificial Sequence
  Description of Artificial Sequence: Synthetic oligonucleotide
  Target: LAMA2; (+) strand; PAM type: YTN; PAM sequence: TTG
aaacctggtcaaaaaatgtg

SEQ ID NO: 369838 - DNA, 20 bp, Artificial Sequence
  Description of Artificial Sequence: Synthetic oligonucleotide
  Target: LAMA2; (+) strand; PAM type: YTN; PAM sequence: CTG
gtcaaaaaatgtgaacacta

SEQ ID NO: 369839 - DNA, 20 bp, Artificial Sequence
  Description of Artificial Sequence: Synthetic oligonucleotide
  Target: LAMA2; (+) strand; PAM type: YTN; PAM sequence: CTA
tttccttgacagagcgcatg

SEQ ID NO: 369840 - DNA, 20 bp, Artificial Sequence
  Description of Artificial Sequence: Synthetic oligonucleotide
  Target: LAMA2; (+) strand; PAM type: YTN; PAM sequence: TTT
ccttgacagagcgcatggct

SEQ ID NO: 369841 - DNA, 20 bp, Artificial Sequence
  Description of Artificial Sequence: Synthetic oligonucleotide
  Target: LAMA2; (+) strand; PAM type: YTN; PAM sequence: TTC
cttgacagagcgcatggcta

SEQ ID NO: 369842 - DNA, 20 bp, Artificial Sequence
  Description of Artificial Sequence: Synthetic oligonucleotide
  Target: LAMA2; (+) strand; PAM type: YTN; PAM sequence: CTT
gacagagcgcatggctagca

SEQ ID NO: 369843 - DNA, 20 bp, Artificial Sequence
  Description of Artificial Sequence: Synthetic oligonucleotide
  Target: LAMA2; (+) strand; PAM type: YTN; PAM sequence: TTG
acagagcgcatggctagcag

SEQ ID NO: 369844 - DNA, 20 bp, Artificial Sequence
  Description of Artificial Sequence: Synthetic oligonucleotide
  Target: LAMA2; (+) strand; PAM type: YTN; PAM sequence: CTA
gcagataaataggagcttag

SEQ ID NO: 369845 - DNA, 20 bp, Artificial Sequence
  Description of Artificial Sequence: Synthetic oligonucleotide
  Target: LAMA2; (+) strand; PAM type: YTN; PAM sequence: CTT
agtttctttaaaatggtgcc

SEQ ID NO: 369846 - DNA, 20 bp, Artificial Sequence
  Description of Artificial Sequence: Synthetic oligonucleotide
  Target: LAMA2; (+) strand; PAM type: YTN; PAM sequence: TTA
gtttctttaaaatggtgcct

SEQ ID NO: 369847 - DNA, 20 bp, Artificial Sequence
  Description of Artificial Sequence: Synthetic oligonucleotide
  Target: LAMA2; (+) strand; PAM type: YTN; PAM sequence: TTT
ctttaaaatggtgcctttaa

SEQ ID NO: 369848 - DNA, 20 bp, Artificial Sequence
  Description of Artificial Sequence: Synthetic oligonucleotide
  Target: LAMA2; (+) strand; PAM type: YTN; PAM sequence: TTC
tttaaaatggtgcctttaag

SEQ ID NO: 369849 - DNA, 20 bp, Artificial Sequence
  Description of Artificial Sequence: Synthetic oligonucleotide
  Target: LAMA2; (+) strand; PAM type: YTN; PAM sequence: CTT
taaaatggtgcctttaagga

SEQ ID NO: 369850 - DNA, 20 bp, Artificial Sequence
  Description of Artificial Sequence: Synthetic oligonucleotide
  Target: LAMA2; (+) strand; PAM type: YTN; PAM sequence: TTT
aaaatggtgcctttaaggaa

SEQ ID NO: 369851 - DNA, 20 bp, Artificial Sequence
  Description of Artificial Sequence: Synthetic oligonucleotide
  Target: LAMA2; (+) strand; PAM type: YTN; PAM sequence: TTA
aaatggtgcctttaaggaat

SEQ ID NO: 369852 - DNA, 20 bp, Artificial Sequence
  Description of Artificial Sequence: Synthetic oligonucleotide
  Target: LAMA2; (+) strand; PAM type: YTN; PAM sequence: CTT
taaggaatcatttgagtgta

SEQ ID NO: 369853 - DNA, 20 bp, Artificial Sequence
  Description of Artificial Sequence: Synthetic oligonucleotide
  Target: LAMA2; (+) strand; PAM type: YTN; PAM sequence: TTT
aaggaatcatttgagtgtac

SEQ ID NO: 369854 - DNA, 20 bp, Artificial Sequence
  Description of Artificial Sequence: Synthetic oligonucleotide
  Target: LAMA2; (+) strand; PAM type: YTN; PAM sequence: TTA
aggaatcatttgagtgtact

SEQ ID NO: 369855 - DNA, 20 bp, Artificial Sequence
  Description of Artificial Sequence: Synthetic oligonucleotide
  Target: LAMA2; (+) strand; PAM type: YTN; PAM sequence: TTT
gagtgtactgagatgttcca

SEQ ID NO: 369856 - DNA, 20 bp, Artificial Sequence
  Description of Artificial Sequence: Synthetic oligonucleotide
  Target: LAMA2; (+) strand; PAM type: YTN; PAM sequence: TTG
agtgtactgagatgttccac

SEQ ID NO: 369857 - DNA, 20 bp, Artificial Sequence
  Description of Artificial Sequence: Synthetic oligonucleotide
  Target: LAMA2; (+) strand; PAM type: YTN; PAM sequence: CTG
agatgttccacttcagaaca

SEQ ID NO: 369858 - DNA, 20 bp, Artificial Sequence
  Description of Artificial Sequence: Synthetic oligonucleotide
  Target: LAMA2; (+) strand; PAM type: YTN; PAM sequence: TTC
cacttcagaacactacctca

SEQ ID NO: 369859 - DNA, 20 bp, Artificial Sequence
  Description of Artificial Sequence: Synthetic oligonucleotide
  Target: LAMA2; (+) strand; PAM type: YTN; PAM sequence: CTT
cagaacactacctcattatg

SEQ ID NO: 369860 - DNA, 20 bp, Artificial Sequence
  Description of Artificial Sequence: Synthetic oligonucleotide
  Target: LAMA2; (+) strand; PAM type: YTN; PAM sequence: TTC
agaacactacctcattatgc

SEQ ID NO: 369861 - DNA, 20 bp, Artificial Sequence
  Description of Artificial Sequence: Synthetic oligonucleotide
  Target: LAMA2; (+) strand; PAM type: YTN; PAM sequence: CTA
cctcattatgccatttatag

SEQ ID NO: 369862 - DNA, 20 bp, Artificial Sequence
  Description of Artificial Sequence: Synthetic oligonucleotide
  Target: LAMA2; (+) strand; PAM type: YTN; PAM sequence: CTC
attatgccatttatagaaat

SEQ ID NO: 369863 - DNA, 20 bp, Artificial Sequence
  Description of Artificial Sequence: Synthetic oligonucleotide
  Target: LAMA2; (+) strand; PAM type: YTN; PAM sequence: TTA
tgccatttatagaaatactc

SEQ ID NO: 369864 - DNA, 20 bp, Artificial Sequence
  Description of Artificial Sequence: Synthetic oligonucleotide
  Target: LAMA2; (+) strand; PAM type: YTN; PAM sequence: TTT
atagaaatactctaggcatt

SEQ ID NO: 369865 - DNA, 20 bp, Artificial Sequence
  Description of Artificial Sequence: Synthetic oligonucleotide
  Target: LAMA2; (+) strand; PAM type: YTN; PAM sequence: TTA
tagaaatactctaggcattg

SEQ ID NO: 369866 - DNA, 20 bp, Artificial Sequence
  Description of Artificial Sequence: Synthetic oligonucleotide
  Target: LAMA2; (+) strand; PAM type: YTN; PAM sequence: CTC
taggcattgctttgtcagtt

SEQ ID NO: 369867 - DNA, 20 bp, Artificial Sequence
  Description of Artificial Sequence: Synthetic oligonucleotide
  Target: LAMA2; (+) strand; PAM type: YTN; PAM sequence: CTA
ggcattgctttgtcagttct

SEQ ID NO: 369868 - DNA, 20 bp, Artificial Sequence
  Description of Artificial Sequence: Synthetic oligonucleotide
  Target: LAMA2; (+) strand; PAM type: YTN; PAM sequence: TTG
ctttgtcagttctctcgtac

SEQ ID NO: 369869 - DNA, 20 bp, Artificial Sequence
  Description of Artificial Sequence: Synthetic oligonucleotide
  Target: LAMA2; (+) strand; PAM type: YTN; PAM sequence: CTT
tgtcagttctctcgtacttt

SEQ ID NO: 369870 - DNA, 20 bp, Artificial Sequence
  Description of Artificial Sequence: Synthetic oligonucleotide
  Target: LAMA2; (+) strand; PAM type: YTN; PAM sequence: TTT
gtcagttctctcgtactttt

SEQ ID NO: 369871 - DNA, 20 bp, Artificial Sequence
  Description of Artificial Sequence: Synthetic oligonucleotide
  Target: LAMA2; (+) strand; PAM type: YTN; PAM sequence: TTG
tcagttctctcgtactttta

SEQ ID NO: 369872 - DNA, 20 bp, Artificial Sequence
  Description of Artificial Sequence: Synthetic oligonucleotide
  Target: LAMA2; (+) strand; PAM type: YTN; PAM sequence: TTC
tctcgtacttttaaaataat

SEQ ID NO: 369873 - DNA, 20 bp, Artificial Sequence
  Description of Artificial Sequence: Synthetic oligonucleotide
  Target: LAMA2; (+) strand; PAM type: YTN; PAM sequence: CTC
tcgtacttttaaaataatgc

SEQ ID NO: 369874 - DNA, 20 bp, Artificial Sequence
  Description of Artificial Sequence: Synthetic oligonucleotide
  Target: LAMA2; (+) strand; PAM type: YTN; PAM sequence: CTC
gtacttttaaaataatgcat

SEQ ID NO: 369875 - DNA, 20 bp, Artificial Sequence
  Description of Artificial Sequence: Synthetic oligonucleotide
  Target: LAMA2; (+) strand; PAM type: YTN; PAM sequence: CTT
ttaaaataatgcatacatct

SEQ ID NO: 369876 - DNA, 20 bp, Artificial Sequence
  Description of Artificial Sequence: Synthetic oligonucleotide
  Target: LAMA2; (+) strand; PAM type: YTN; PAM sequence: TTT
taaaataatgcatacatcta

SEQ ID NO: 369877 - DNA, 20 bp, Artificial Sequence
  Description of Artificial Sequence: Synthetic oligonucleotide
  Target: LAMA2; (+) strand; PAM type: YTN; PAM sequence: TTT
aaaataatgcatacatctag

SEQ ID NO: 369878 - DNA, 20 bp, Artificial Sequence
  Description of Artificial Sequence: Synthetic oligonucleotide
  Target: LAMA2; (+) strand; PAM type: YTN; PAM sequence: TTA
aaataatgcatacatctaga

SEQ ID NO: 369879 - DNA, 20 bp, Artificial Sequence
  Description of Artificial Sequence: Synthetic oligonucleotide
  Target: LAMA2; (+) strand; PAM type: YTN; PAM sequence: CTA
gagatacgcattatagtcat

SEQ ID NO: 369880 - DNA, 20 bp, Artificial Sequence
  Description of Artificial Sequence: Synthetic oligonucleotide
  Target: LAMA2; (+) strand; PAM type: YTN; PAM sequence: TTA
tagtcatattcatgacagct

SEQ ID NO: 369881 - DNA, 20 bp, Artificial Sequence
  Description of Artificial Sequence: Synthetic oligonucleotide
  Target: LAMA2; (+) strand; PAM type: YTN; PAM sequence: TTC
atgacagctgtgtttccttt

SEQ ID NO: 369882 - DNA, 20 bp, Artificial Sequence
  Description of Artificial Sequence: Synthetic oligonucleotide
  Target: LAMA2; (+) strand; PAM type: YTN; PAM sequence: CTG
tgtttcctttaactgagctc

SEQ ID NO: 369883 - DNA, 20 bp, Artificial Sequence
  Description of Artificial Sequence: Synthetic oligonucleotide
  Target: LAMA2; (+) strand; PAM type: YTN; PAM sequence: TTT
cctttaactgagctcagatt

SEQ ID NO: 369884 - DNA, 20 bp, Artificial Sequence
  Description of Artificial Sequence: Synthetic oligonucleotide
  Target: LAMA2; (+) strand; PAM type: YTN; PAM sequence: TTC
ctttaactgagctcagattc

SEQ ID NO: 369885 - DNA, 20 bp, Artificial Sequence
  Description of Artificial Sequence: Synthetic oligonucleotide
  Target: LAMA2; (+) strand; PAM type: YTN; PAM sequence: CTT
taactgagctcagattcacc

SEQ ID NO: 369886 - DNA, 20 bp, Artificial Sequence
  Description of Artificial Sequence: Synthetic oligonucleotide
  Target: LAMA2; (+) strand; PAM type: YTN; PAM sequence: TTT
aactgagctcagattcacct

SEQ ID NO: 369887 - DNA, 20 bp, Artificial Sequence
  Description of Artificial Sequence: Synthetic oligonucleotide
  Target: LAMA2; (+) strand; PAM type: YTN; PAM sequence: TTA
actgagctcagattcacctt

SEQ ID NO: 369888 - DNA, 20 bp, Artificial Sequence
  Description of Artificial Sequence: Synthetic oligonucleotide
  Target: LAMA2; (+) strand; PAM type: YTN; PAM sequence: CTG
agctcagattcacctttcta

SEQ ID NO: 369889 - DNA, 20 bp, Artificial Sequence
  Description of Artificial Sequence: Synthetic oligonucleotide
  Target: LAMA2; (+) strand; PAM type: YTN; PAM sequence: CTC
agattcacctttctagaaat

SEQ ID NO: 369890 - DNA, 20 bp, Artificial Sequence
  Description of Artificial Sequence: Synthetic oligonucleotide
  Target: LAMA2; (+) strand; PAM type: YTN; PAM sequence: TTC
acctttctagaaataaaact

SEQ ID NO: 369891 - DNA, 20 bp, Artificial Sequence
  Description of Artificial Sequence: Synthetic oligonucleotide
  Target: LAMA2; (+) strand; PAM type: YTN; PAM sequence: CTT
tctagaaataaaactagata

SEQ ID NO: 369892 - DNA, 20 bp, Artificial Sequence
  Description of Artificial Sequence: Synthetic oligonucleotide
  Target: LAMA2; (+) strand; PAM type: YTN; PAM sequence: TTT
ctagaaataaaactagatat

SEQ ID NO: 369893 - DNA, 20 bp, Artificial Sequence
  Description of Artificial Sequence: Synthetic oligonucleotide
  Target: LAMA2; (+) strand; PAM type: YTN; PAM sequence: TTC
tagaaataaaactagatata

SEQ ID NO: 369894 - DNA, 20 bp, Artificial Sequence
  Description of Artificial Sequence: Synthetic oligonucleotide
  Target: LAMA2; (+) strand; PAM type: YTN; PAM sequence: CTA
gaaataaaactagatataac

SEQ ID NO: 369895 - DNA, 20 bp, Artificial Sequence
  Description of Artificial Sequence: Synthetic oligonucleotide
  Target: LAMA2; (+) strand; PAM type: YTN; PAM sequence: CTA
gatataacttatagaagtac

SEQ ID NO: 369896 - DNA, 20 bp, Artificial Sequence
  Description of Artificial Sequence: Synthetic oligonucleotide
  Target: LAMA2; (+) strand; PAM type: YTN; PAM sequence: CTT
atagaagtacttgcttttcc

SEQ ID NO: 369897 - DNA, 20 bp, Artificial Sequence
  Description of Artificial Sequence: Synthetic oligonucleotide
  Target: LAMA2; (+) strand; PAM type: YTN; PAM sequence: TTA
tagaagtacttgcttttcca

SEQ ID NO: 369898 - DNA, 20 bp, Artificial Sequence
  Description of Artificial Sequence: Synthetic oligonucleotide
  Target: LAMA2; (+) strand; PAM type: YTN; PAM sequence: CTT
gcttttccaaaattcatgta

SEQ ID NO: 369899 - DNA, 20 bp, Artificial Sequence
  Description of Artificial Sequence: Synthetic oligonucleotide
  Target: LAMA2; (+) strand; PAM type: YTN; PAM sequence: TTG
cttttccaaaattcatgtag

SEQ ID NO: 369900 - DNA, 20 bp, Artificial Sequence
  Description of Artificial Sequence: Synthetic oligonucleotide
  Target: LAMA2; (+) strand; PAM type: YTN; PAM sequence: CTT
ttccaaaattcatgtagatg

SEQ ID NO: 369901 - DNA, 20 bp, Artificial Sequence
  Description of Artificial Sequence: Synthetic oligonucleotide
  Target: LAMA2; (+) strand; PAM type: YTN; PAM sequence: TTT
tccaaaattcatgtagatga

SEQ ID NO: 369902 - DNA, 20 bp, Artificial Sequence
  Description of Artificial Sequence: Synthetic oligonucleotide
  Target: LAMA2; (+) strand; PAM type: YTN; PAM sequence: TTT
ccaaaattcatgtagatgag

SEQ ID NO: 369903 - DNA, 20 bp, Artificial Sequence
  Description of Artificial Sequence: Synthetic oligonucleotide
  Target: LAMA2; (+) strand; PAM type: YTN; PAM sequence: TTC
caaaattcatgtagatgaga

SEQ ID NO: 369904 - DNA, 20 bp, Artificial Sequence
  Description of Artificial Sequence: Synthetic oligonucleotide
  Target: LAMA2; (+) strand; PAM type: YTN; PAM sequence: TTC
atgtagatgagagaaaaata

SEQ ID NO: 369905 - DNA, 20 bp, Artificial Sequence
  Description of Artificial Sequence: Synthetic oligonucleotide
  Target: LAMA2; (+) strand; PAM type: YTN; PAM sequence: TTA
tggatatcaattagctatgt

SEQ ID NO: 369906 - DNA, 20 bp, Artificial Sequence
  Description of Artificial Sequence: Synthetic oligonucleotide
  Target: LAMA2; (+) strand; PAM type: YTN; PAM sequence: TTA
gctatgtcaacccaaatttg

SEQ ID NO: 369907 - DNA, 20 bp, Artificial Sequence
  Description of Artificial Sequence: Synthetic oligonucleotide
  Target: LAMA2; (+) strand; PAM type: YTN; PAM sequence: CTA
tgtcaacccaaatttgattt

SEQ ID NO: 369908 - DNA, 20 bp, Artificial Sequence
  Description of Artificial Sequence: Synthetic oligonucleotide
  Target: LAMA2; (+) strand; PAM type: YTN; PAM sequence: TTT
gattttacatataaaataca

SEQ ID NO: 369909 - DNA, 20 bp, Artificial Sequence
  Description of Artificial Sequence: Synthetic oligonucleotide
  Target: LAMA2; (+) strand; PAM type: YTN; PAM sequence: TTG
attttacatataaaatacac

SEQ ID NO: 369910 - DNA, 20 bp, Artificial Sequence
  Description of Artificial Sequence: Synthetic oligonucleotide
  Target: LAMA2; (+) strand; PAM type: YTN; PAM sequence: TTT
tacatataaaatacacaatg

SEQ ID NO: 369911 - DNA, 20 bp, Artificial Sequence
  Description of Artificial Sequence: Synthetic oligonucleotide
  Target: LAMA2; (+) strand; PAM type: YTN; PAM sequence: TTT
acatataaaatacacaatgt

SEQ ID NO: 369912 - DNA, 20 bp, Artificial Sequence
  Description of Artificial Sequence: Synthetic oligonucleotide
  Target: LAMA2; (+) strand; PAM type: YTN; PAM sequence: TTA
catataaaatacacaatgta

SEQ ID NO: 369913 - DNA, 20 bp, Artificial Sequence
  Description of Artificial Sequence: Synthetic oligonucleotide
  Target: LAMA2; (+) strand; PAM type: YTN; PAM sequence: TTT
gatgaaacaagagccttttg

SEQ ID NO: 369914 - DNA, 20 bp, Artificial Sequence
  Description of Artificial Sequence: Synthetic oligonucleotide
  Target: LAMA2; (+) strand; PAM type: YTN; PAM sequence: TTG
atgaaacaagagccttttgc

SEQ ID NO: 369915 - DNA, 20 bp, Artificial Sequence
  Description of Artificial Sequence: Synthetic oligonucleotide
  Target: LAMA2; (+) strand; PAM type: YTN; PAM sequence: CTT
ttgctcttgattccaaacta

SEQ ID NO: 369916 - DNA, 20 bp, Artificial Sequence
  Description of Artificial Sequence: Synthetic oligonucleotide
  Target: LAMA2; (+) strand; PAM type: YTN; PAM sequence: TTT
tgctcttgattccaaactat

SEQ ID NO: 369917 - DNA, 20 bp, Artificial Sequence
  Description of Artificial Sequence: Synthetic oligonucleotide
  Target: LAMA2; (+) strand; PAM type: YTN; PAM sequence: TTT
gctcttgattccaaactatt

SEQ ID NO: 369918 - DNA, 20 bp, Artificial Sequence
  Description of Artificial Sequence: Synthetic oligonucleotide
  Target: LAMA2; (+) strand; PAM type: YTN; PAM sequence: TTG
ctcttgattccaaactattt

SEQ ID NO: 369919 - DNA, 20 bp, Artificial Sequence
  Description of Artificial Sequence: Synthetic oligonucleotide
  Target: LAMA2; (+) strand; PAM type: YTN; PAM sequence: CTC
ttgattccaaactatttgaa

SEQ ID NO: 369920 - DNA, 20 bp, Artificial Sequence
  Description of Artificial Sequence: Synthetic oligonucleotide
  Target: LAMA2; (+) strand; PAM type: YTN; PAM sequence: CTT
gattccaaactatttgaact

SEQ ID NO: 369921 - DNA, 20 bp, Artificial Sequence
  Description of Artificial Sequence: Synthetic oligonucleotide
  Target: LAMA2; (+) strand; PAM type: YTN; PAM sequence: TTG
attccaaactatttgaactt

SEQ ID NO: 369922 - DNA, 20 bp, Artificial Sequence
  Description of Artificial Sequence: Synthetic oligonucleotide
  Target: LAMA2; (+) strand; PAM type: YTN; PAM sequence: TTC
caaactatttgaacttttaa

SEQ ID NO: 369923 - DNA, 20 bp, Artificial Sequence
  Description of Artificial Sequence: Synthetic oligonucleotide
  Target: LAMA2; (+) strand; PAM type: YTN; PAM sequence: CTA
tttgaacttttaagatcctc

SEQ ID NO: 369924 - DNA, 20 bp, Artificial Sequence
  Description of Artificial Sequence: Synthetic oligonucleotide
  Target: LAMA2; (+) strand; PAM type: YTN; PAM sequence: TTT
gaacttttaagatcctctct

SEQ ID NO: 369925 - DNA, 20 bp, Artificial Sequence
  Description of Artificial Sequence: Synthetic oligonucleotide
  Target: LAMA2; (+) strand; PAM type: YTN; PAM sequence: TTG
aacttttaagatcctctctc

SEQ ID NO: 369926 - DNA, 20 bp, Artificial Sequence
  Description of Artificial Sequence: Synthetic oligonucleotide
  Target: LAMA2; (+) strand; PAM type: YTN; PAM sequence: CTT
ttaagatcctctctcaattg

SEQ ID NO: 369927 - DNA, 20 bp, Artificial Sequence
  Description of Artificial Sequence: Synthetic oligonucleotide
  Target: LAMA2; (+) strand; PAM type: YTN; PAM sequence: TTT
taagatcctctctcaattgg

SEQ ID NO: 369928 - DNA, 20 bp, Artificial Sequence
  Description of Artificial Sequence: Synthetic oligonucleotide
  Target: LAMA2; (+) strand; PAM type: YTN; PAM sequence: TTT
aagatcctctctcaattggc

SEQ ID NO: 369929 - DNA, 20 bp, Artificial Sequence
  Description of Artificial Sequence: Synthetic oligonucleotide
  Target: LAMA2; (+) strand; PAM type: YTN; PAM sequence: TTA
agatcctctctcaattggca

SEQ ID NO: 369930 - DNA, 20 bp, Artificial Sequence
  Description of Artificial Sequence: Synthetic oligonucleotide
  Target: LAMA2; (+) strand; PAM type: YTN; PAM sequence: CTC
tctcaattggcataataaat

SEQ ID NO: 369931 - DNA, 20 bp, Artificial Sequence
  Description of Artificial Sequence: Synthetic oligonucleotide
  Target: LAMA2; (+) strand; PAM type: YTN; PAM sequence: CTC
tcaattggcataataaataa

SEQ ID NO: 369932 - DNA, 20 bp, Artificial Sequence
  Description of Artificial Sequence: Synthetic oligonucleotide
  Target: LAMA2; (+) strand; PAM type: YTN; PAM sequence: CTC
aattggcataataaataact

SEQ ID NO: 369933 - DNA, 20 bp, Artificial Sequence
  Description of Artificial Sequence: Synthetic oligonucleotide
  Target: LAMA2; (+) strand; PAM type: YTN; PAM sequence: TTG
gcataataaataacttaatt

SEQ ID NO: 369934 - DNA, 20 bp, Artificial Sequence
  Description of Artificial Sequence: Synthetic oligonucleotide
  Target: LAMA2; (+) strand; PAM type: YTN; PAM sequence: CTT
aattctactcttgttttaag

SEQ ID NO: 369935 - DNA, 20 bp, Artificial Sequence
  Description of Artificial Sequence: Synthetic oligonucleotide
  Target: LAMA2; (+) strand; PAM type: YTN; PAM sequence: TTA
attctactcttgttttaagg

SEQ ID NO: 369936 - DNA, 20 bp, Artificial Sequence
  Description of Artificial Sequence: Synthetic oligonucleotide
  Target: LAMA2; (+) strand; PAM type: YTN; PAM sequence: TTC
tactcttgttttaaggcttg

SEQ ID NO: 369937 - DNA, 20 bp, Artificial Sequence
  Description of Artificial Sequence: Synthetic oligonucleotide
  Target: LAMA2; (+) strand; PAM type: YTN; PAM sequence: CTA
ctcttgttttaaggcttgtt

SEQ ID NO: 369938 - DNA, 20 bp, Artificial Sequence
  Description of Artificial Sequence: Synthetic oligonucleotide
  Target: LAMA2; (+) strand; PAM type: YTN; PAM sequence: CTC
ttgttttaaggcttgtttcc

SEQ ID NO: 369939 - DNA, 20 bp, Artificial Sequence
  Description of Artificial Sequence: Synthetic oligonucleotide
  Target: LAMA2; (+) strand; PAM type: YTN; PAM sequence: CTT
gttttaaggcttgtttccac

SEQ ID NO: 369940 - DNA, 20 bp, Artificial Sequence
  Description of Artificial Sequence: Synthetic oligonucleotide
  Target: LAMA2; (+) strand; PAM type: YTN; PAM sequence: TTG
ttttaaggcttgtttccaca

SEQ ID NO: 369941 - DNA, 20 bp, Artificial Sequence
  Description of Artificial Sequence: Synthetic oligonucleotide
  Target: LAMA2; (+) strand; PAM type: YTN; PAM sequence: TTT
taaggcttgtttccacatac

SEQ ID NO: 369942 - DNA, 20 bp, Artificial Sequence
  Description of Artificial Sequence: Synthetic oligonucleotide
  Target: LAMA2; (+) strand; PAM type: YTN; PAM sequence: TTT
aaggcttgtttccacatact

SEQ ID NO: 369943 - DNA, 20 bp, Artificial Sequence
  Description of Artificial Sequence: Synthetic oligonucleotide
  Target: LAMA2; (+) strand; PAM type: YTN; PAM sequence: TTA
aggcttgtttccacatactt

SEQ ID NO: 369944 - DNA, 20 bp, Artificial Sequence
  Description of Artificial Sequence: Synthetic oligonucleotide
  Target: LAMA2; (+) strand; PAM type: YTN; PAM sequence: CTT
gtttccacatactttgttct

SEQ ID NO: 369945 - DNA, 20 bp, Artificial Sequence
  Description of Artificial Sequence: Synthetic oligonucleotide
  Target: LAMA2; (+) strand; PAM type: YTN; PAM sequence: TTG
tttccacatactttgttctc

SEQ ID NO: 369946 - DNA, 20 bp, Artificial Sequence
  Description of Artificial Sequence: Synthetic oligonucleotide
  Target: LAMA2; (+) strand; PAM type: YTN; PAM sequence: TTT
ccacatactttgttctcatc

SEQ ID NO: 369947 - DNA, 20 bp, Artificial Sequence
  Description of Artificial Sequence: Synthetic oligonucleotide
  Target: LAMA2; (+) strand; PAM type: YTN; PAM sequence: TTC
cacatactttgttctcatcc

SEQ ID NO: 369948 - DNA, 20 bp, Artificial Sequence
  Description of Artificial Sequence: Synthetic oligonucleotide
  Target: LAMA2; (+) strand; PAM type: YTN; PAM sequence: CTT
tgttctcatcctttgcatta

SEQ ID NO: 369949 - DNA, 20 bp, Artificial Sequence
  Description of Artificial Sequence: Synthetic oligonucleotide
  Target: LAMA2; (+) strand; PAM type: YTN; PAM sequence: TTT
gttctcatcctttgcattat

SEQ ID NO: 369950 - DNA, 20 bp, Artificial Sequence
  Description of Artificial Sequence: Synthetic oligonucleotide
  Target: LAMA2; (+) strand; PAM type: YTN; PAM sequence: TTG
ttctcatcctttgcattatc

SEQ ID NO: 369951 - DNA, 20 bp, Artificial Sequence
  Description of Artificial Sequence: Synthetic oligonucleotide
  Target: LAMA2; (+) strand; PAM type: YTN; PAM sequence: TTC
tcatcctttgcattatcttt

SEQ ID NO: 369952 - DNA, 20 bp, Artificial Sequence
  Description of Artificial Sequence: Synthetic oligonucleotide
  Target: LAMA2; (+) strand; PAM type: YTN; PAM sequence: CTC
atcctttgcattatctttta

SEQ ID NO: 369953 - DNA, 20 bp, Artificial Sequence
  Description of Artificial Sequence: Synthetic oligonucleotide
  Target: LAMA2; (+) strand; PAM type: YTN; PAM sequence: CTT
tgcattatcttttatacaaa

SEQ ID NO: 369954 - DNA, 20 bp, Artificial Sequence
  Description of Artificial Sequence: Synthetic oligonucleotide
  Target: LAMA2; (+) strand; PAM type: YTN; PAM sequence: TTT
gcattatcttttatacaaat

SEQ ID NO: 369955 - DNA, 20 bp, Artificial Sequence
  Description of Artificial Sequence: Synthetic oligonucleotide
  Target: LAMA2; (+) strand; PAM type: YTN; PAM sequence: TTG
cattatcttttatacaaatt

SEQ ID NO: 369956 - DNA, 20 bp, Artificial Sequence
  Description of Artificial Sequence: Synthetic oligonucleotide
  Target: LAMA2; (+) strand; PAM type: YTN; PAM sequence: TTA
tcttttatacaaattctaag

SEQ ID NO: 369957 - DNA, 20 bp, Artificial Sequence
  Description of Artificial Sequence: Synthetic oligonucleotide
  Target: LAMA2; (+) strand; PAM type: YTN; PAM sequence: CTT
ttatacaaattctaagtgcc

SEQ ID NO: 369958 - DNA, 20 bp, Artificial Sequence
  Description of Artificial Sequence: Synthetic oligonucleotide
  Target: LAMA2; (+) strand; PAM type: YTN; PAM sequence: TTT
tatacaaattctaagtgccc

SEQ ID NO: 369959 - DNA, 20 bp, Artificial Sequence
  Description of Artificial Sequence: Synthetic oligonucleotide
  Target: LAMA2; (+) strand; PAM type: YTN; PAM sequence: TTT
atacaaattctaagtgccca

SEQ ID NO: 369960 - DNA, 20 bp, Artificial Sequence
  Description of Artificial Sequence: Synthetic oligonucleotide
  Target: LAMA2; (+) strand; PAM type: YTN; PAM sequence: TTA
tacaaattctaagtgcccac

SEQ ID NO: 369961 - DNA, 20 bp, Artificial Sequence
  Description of Artificial Sequence: Synthetic oligonucleotide
  Target: LAMA2; (+) strand; PAM type: YTN; PAM sequence: TTC
taagtgcccactgaatataa

SEQ ID NO: 369962 - DNA, 20 bp, Artificial Sequence
  Description of Artificial Sequence: Synthetic oligonucleotide
  Target: LAMA2; (+) strand; PAM type: YTN; PAM sequence: CTA
agtgcccactgaatataaaa

SEQ ID NO: 369963 - DNA, 20 bp, Artificial Sequence
  Description of Artificial Sequence: Synthetic oligonucleotide
  Target: LAMA2; (+) strand; PAM type: YTN; PAM sequence: CTG
aatataaaattacttgaata

SEQ ID NO: 369964 - DNA, 20 bp, Artificial Sequence
  Description of Artificial Sequence: Synthetic oligonucleotide
  Target: LAMA2; (+) strand; PAM type: YTN; PAM sequence: TTA
cttgaatattacaattgctt

SEQ ID NO: 369965 - DNA, 20 bp, Artificial Sequence
  Description of Artificial Sequence: Synthetic oligonucleotide
  Target: LAMA2; (+) strand; PAM type: YTN; PAM sequence: CTT
gaatattacaattgcttaat

SEQ ID NO: 369966 - DNA, 20 bp, Artificial Sequence
  Description of Artificial Sequence: Synthetic oligonucleotide
  Target: LAMA2; (+) strand; PAM type: YTN; PAM sequence: TTG
aatattacaattgcttaatt

SEQ ID NO: 369967 - DNA, 20 bp, Artificial Sequence
  Description of Artificial Sequence: Synthetic oligonucleotide
  Target: LAMA2; (+) strand; PAM type: YTN; PAM sequence: TTA
caattgcttaattggctatg

SEQ ID NO: 369968 - DNA, 20 bp, Artificial Sequence
  Description of Artificial Sequence: Synthetic oligonucleotide
  Target: LAMA2; (+) strand; PAM type: YTN; PAM sequence: TTG
cttaattggctatgctttta

SEQ ID NO: 369969 - DNA, 20 bp, Artificial Sequence
  Description of Artificial Sequence: Synthetic oligonucleotide
  Target: LAMA2; (+) strand; PAM type: YTN; PAM sequence: CTT
aattggctatgcttttagtc

SEQ ID NO: 369970 - DNA, 20 bp, Artificial Sequence
  Description of Artificial Sequence: Synthetic oligonucleotide
  Target: LAMA2; (+) strand; PAM type: YTN; PAM sequence: TTA
attggctatgcttttagtct

SEQ ID NO: 369971 - DNA, 20 bp, Artificial Sequence
  Description of Artificial Sequence: Synthetic oligonucleotide
  Target: LAMA2; (+) strand; PAM type: YTN; PAM sequence: TTG
gctatgcttttagtctcttc

SEQ ID NO: 369972 - DNA, 20 bp, Artificial Sequence
  Description of Artificial Sequence: Synthetic oligonucleotide
  Target: LAMA2; (+) strand; PAM type: YTN; PAM sequence: CTA
tgcttttagtctcttccttc

SEQ ID NO: 369973 - DNA, 20 bp, Artificial Sequence
  Description of Artificial Sequence: Synthetic oligonucleotide
  Target: LAMA2; (+) strand; PAM type: YTN; PAM sequence: CTT
ttagtctcttccttctctcc

SEQ ID NO: 369974 - DNA, 20 bp, Artificial Sequence
  Description of Artificial Sequence: Synthetic oligonucleotide
  Target: LAMA2; (+) strand; PAM type: YTN; PAM sequence: TTT
tagtctcttccttctctcct

SEQ ID NO: 369975 - DNA, 20 bp, Artificial Sequence
  Description of Artificial Sequence: Synthetic oligonucleotide
  Target: LAMA2; (+) strand; PAM type: YTN; PAM sequence: TTT
agtctcttccttctctcctt

SEQ ID NO: 369976 - DNA, 20 bp, Artificial Sequence
  Description of Artificial Sequence: Synthetic oligonucleotide
  Target: LAMA2; (+) strand; PAM type: YTN; PAM sequence: TTA
gtctcttccttctctccttc

SEQ ID NO: 369977 - DNA, 20 bp, Artificial Sequence
  Description of Artificial Sequence: Synthetic oligonucleotide
  Target: LAMA2; (+) strand; PAM type: YTN; PAM sequence: CTC
ttccttctctccttcaaaaa

SEQ ID NO: 369978 - DNA, 20 bp, Artificial Sequence
  Description of Artificial Sequence: Synthetic oligonucleotide
  Target: LAMA2; (+) strand; PAM type: YTN; PAM sequence: CTT
ccttctctccttcaaaaata

SEQ ID NO: 369979 - DNA, 20 bp, Artificial Sequence
  Description of Artificial Sequence: Synthetic oligonucleotide
  Target: LAMA2; (+) strand; PAM type: YTN; PAM sequence: TTC
cttctctccttcaaaaatat

SEQ ID NO: 369980 - DNA, 20 bp, Artificial Sequence
  Description of Artificial Sequence: Synthetic oligonucleotide
  Target: LAMA2; (+) strand; PAM type: YTN; PAM sequence: CTT
ctctccttcaaaaatatttt

SEQ ID NO: 369981 - DNA, 20 bp, Artificial Sequence
  Description of Artificial Sequence: Synthetic oligonucleotide
  Target: LAMA2; (+) strand; PAM type: YTN; PAM sequence: TTC
tctccttcaaaaatattttc

SEQ ID NO: 369982 - DNA, 20 bp, Artificial Sequence
  Description of Artificial Sequence: Synthetic oligonucleotide
  Target: LAMA2; (+) strand; PAM type: YTN; PAM sequence: CTC
tccttcaaaaatattttcaa

SEQ ID NO: 369983 - DNA, 20 bp, Artificial Sequence
  Description of Artificial Sequence: Synthetic oligonucleotide
  Target: LAMA2; (+) strand; PAM type: YTN; PAM sequence: CTC
cttcaaaaatattttcaata

SEQ ID NO: 369984 - DNA, 20 bp, Artificial Sequence
  Description of Artificial Sequence: Synthetic oligonucleotide
  Target: LAMA2; (+) strand; PAM type: YTN; PAM sequence: CTT
caaaaatattttcaatacat

SEQ ID NO: 369985 - DNA, 20 bp, Artificial Sequence
  Description of Artificial Sequence: Synthetic oligonucleotide
  Target: LAMA2; (+) strand; PAM type: YTN; PAM sequence: TTC
aaaaatattttcaatacatt

SEQ ID NO: 369986 - DNA, 20 bp, Artificial Sequence
  Description of Artificial Sequence: Synthetic oligonucleotide
  Target: LAMA2; (+) strand; PAM type: YTN; PAM sequence: TTT
tcaatacattctagatatgt

SEQ ID NO: 369987 - DNA, 20 bp, Artificial Sequence
  Description of Artificial Sequence: Synthetic oligonucleotide
  Target: LAMA2; (+) strand; PAM type: YTN; PAM sequence: TTT
caatacattctagatatgtt

SEQ ID NO: 369988 - DNA, 20 bp, Artificial Sequence
  Description of Artificial Sequence: Synthetic oligonucleotide
  Target: LAMA2; (+) strand; PAM type: YTN; PAM sequence: TTC
aatacattctagatatgttt

SEQ ID NO: 369989 - DNA, 20 bp, Artificial Sequence
  Description of Artificial Sequence: Synthetic oligonucleotide
  Target: LAMA2; (+) strand; PAM type: YTN; PAM sequence: TTC
tagatatgtttgataaattc

SEQ ID NO: 369990 - DNA, 20 bp, Artificial Sequence
  Description of Artificial Sequence: Synthetic oligonucleotide
  Target: LAMA2; (+) strand; PAM type: YTN; PAM sequence: CTA
gatatgtttgataaattctg

SEQ ID NO: 369991 - DNA, 20 bp, Artificial Sequence
  Description of Artificial Sequence: Synthetic oligonucleotide
  Target: LAMA2; (+) strand; PAM type: YTN; PAM sequence: TTT
gataaattctgtaaatttac

SEQ ID NO: 369992 - DNA, 20 bp, Artificial Sequence
  Description of Artificial Sequence: Synthetic oligonucleotide
  Target: LAMA2; (+) strand; PAM type: YTN; PAM sequence: TTG
ataaattctgtaaatttacc

SEQ ID NO: 369993 - DNA, 20 bp, Artificial Sequence
  Description of Artificial Sequence: Synthetic oligonucleotide
  Target: LAMA2; (+) strand; PAM type: YTN; PAM sequence: TTC
tgtaaatttacctgtataaa

SEQ ID NO: 369994 - DNA, 20 bp, Artificial Sequence
  Description of Artificial Sequence: Synthetic oligonucleotide
  Target: LAMA2; (+) strand; PAM type: YTN; PAM sequence: CTG
taaatttacctgtataaatt

SEQ ID NO: 369995 - DNA, 20 bp, Artificial Sequence
  Description of Artificial Sequence: Synthetic oligonucleotide
  Target: LAMA2; (+) strand; PAM type: YTN; PAM sequence: TTT
acctgtataaattattaata

SEQ ID NO: 369996 - DNA, 20 bp, Artificial Sequence
  Description of Artificial Sequence: Synthetic oligonucleotide
  Target: LAMA2; (+) strand; PAM type: YTN; PAM sequence: TTA
cctgtataaattattaataa

SEQ ID NO: 369997 - DNA, 20 bp, Artificial Sequence
  Description of Artificial Sequence: Synthetic oligonucleotide
  Target: LAMA2; (+) strand; PAM type: YTN; PAM sequence: CTG
tataaattattaataagtac

SEQ ID NO: 369998 - DNA, 20 bp, Artificial Sequence
  Description of Artificial Sequence: Synthetic oligonucleotide
  Target: LAMA2; (+) strand; PAM type: YTN; PAM sequence: TTA
ttaataagtacatacaacat

SEQ ID NO: 369999 - DNA, 20 bp, Artificial Sequence
  Description of Artificial Sequence: Synthetic oligonucleotide
  Target: LAMA2; (+) strand; PAM type: YTN; PAM sequence: TTA
ataagtacatacaacataat

SEQ ID NO: 370000 - DNA, 20 bp, Artificial Sequence
  Description of Artificial Sequence: Synthetic oligonucleotide
  Target: LAMA2; (+) strand; PAM type: YTN; PAM sequence: CTG
tcctatctgtttagggagac

SEQ ID NO: 370001 - DNA, 20 bp, Artificial Sequence
  Description of Artificial Sequence: Synthetic oligonucleotide
  Target: LAMA2; (+) strand; PAM type: YTN; PAM sequence: CTA
tctgtttagggagacaataa

SEQ ID NO: 370002 - DNA, 20 bp, Artificial Sequence
  Description of Artificial Sequence: Synthetic oligonucleotide
  Target: LAMA2; (+) strand; PAM type: YTN; PAM sequence: CTG
tttagggagacaataaatat

SEQ ID NO: 370003 - DNA, 20 bp, Artificial Sequence
  Description of Artificial Sequence: Synthetic oligonucleotide
  Target: LAMA2; (+) strand; PAM type: YTN; PAM sequence: TTT
agggagacaataaatatcta

SEQ ID NO: 370004 - DNA, 20 bp, Artificial Sequence
  Description of Artificial Sequence: Synthetic oligonucleotide
  Target: LAMA2; (+) strand; PAM type: YTN; PAM sequence: TTA
gggagacaataaatatctat

SEQ ID NO: 370005 - DNA, 20 bp, Artificial Sequence
  Description of Artificial Sequence: Synthetic oligonucleotide
  Target: LAMA2; (+) strand; PAM type: YTN; PAM sequence: CTA
tgaaaaatgggatctcagca

SEQ ID NO: 370006 - DNA, 20 bp, Artificial Sequence
  Description of Artificial Sequence: Synthetic oligonucleotide
  Target: LAMA2; (+) strand; PAM type: YTN; PAM sequence: CTC
agcactgtataattaaggga

SEQ ID NO: 370007 - DNA, 20 bp, Artificial Sequence
  Description of Artificial Sequence: Synthetic oligonucleotide
  Target: LAMA2; (+) strand; PAM type: YTN; PAM sequence: CTG
tataattaagggagaggtat

SEQ ID NO: 370008 - DNA, 20 bp, Artificial Sequence
  Description of Artificial Sequence: Synthetic oligonucleotide
  Target: LAMA2; (+) strand; PAM type: YTN; PAM sequence: TTA
agggagaggtatgtgctaca

SEQ ID NO: 370009 - DNA, 20 bp, Artificial Sequence
  Description of Artificial Sequence: Synthetic oligonucleotide
  Target: LAMA2; (+) strand; PAM type: YTN; PAM sequence: CTA
cagaacatacatgcaataat

SEQ ID NO: 370010 - DNA, 20 bp, Artificial Sequence
  Description of Artificial Sequence: Synthetic oligonucleotide
  Target: LAMA2; (+) strand; PAM type: YTN; PAM sequence: TTC
aaagggatgagctactgcag

SEQ ID NO: 370011 - DNA, 20 bp, Artificial Sequence
  Description of Artificial Sequence: Synthetic oligonucleotide
  Target: LAMA2; (+) strand; PAM type: YTN; PAM sequence: CTA
ctgcagtggagagagatgca

SEQ ID NO: 370012 - DNA, 20 bp, Artificial Sequence
  Description of Artificial Sequence: Synthetic oligonucleotide
  Target: LAMA2; (+) strand; PAM type: YTN; PAM sequence: CTG
cagtggagagagatgcaaag

SEQ ID NO: 370013 - DNA, 20 bp, Artificial Sequence
  Description of Artificial Sequence: Synthetic oligonucleotide
  Target: LAMA2; (+) strand; PAM type: YTN; PAM sequence: CTG
gagtggagaaatcttaaatt

SEQ ID NO: 370014 - DNA, 20 bp, Artificial Sequence
  Description of Artificial Sequence: Synthetic oligonucleotide
  Target: LAMA2; (+) strand; PAM type: YTN; PAM sequence: CTT
aaattggatgctaaataatg

SEQ ID NO: 370015 - DNA, 20 bp, Artificial Sequence
  Description of Artificial Sequence: Synthetic oligonucleotide
  Target: LAMA2; (+) strand; PAM type: YTN; PAM sequence: TTA
aattggatgctaaataatgg

SEQ ID NO: 370016 - DNA, 20 bp, Artificial Sequence
  Description of Artificial Sequence: Synthetic oligonucleotide
  Target: LAMA2; (+) strand; PAM type: YTN; PAM sequence: TTG
gatgctaaataatggtaaca

SEQ ID NO: 370017 - DNA, 20 bp, Artificial Sequence
  Description of Artificial Sequence: Synthetic oligonucleotide
  Target: LAMA2; (+) strand; PAM type: YTN; PAM sequence: CTA
aataatggtaacagatagat

SEQ ID NO: 370018 - DNA, 20 bp, Artificial Sequence
  Description of Artificial Sequence: Synthetic oligonucleotide
  Target: LAMA2; (+) strand; PAM type: YTN; PAM sequence: TTT
gagtgtgaaaaaaaaaggag

SEQ ID NO: 370019 - DNA, 20 bp, Artificial Sequence
  Description of Artificial Sequence: Synthetic oligonucleotide
  Target: LAMA2; (+) strand; PAM type: YTN; PAM sequence: TTG
agtgtgaaaaaaaaaggaga

SEQ ID NO: 370020 - DNA, 20 bp, Artificial Sequence
  Description of Artificial Sequence: Synthetic oligonucleotide
  Target: LAMA2; (+) strand; PAM type: YTN; PAM sequence: CTT
cctgtatctgtcacacaata

SEQ ID NO: 370021 - DNA, 20 bp, Artificial Sequence
  Description of Artificial Sequence: Synthetic oligonucleotide
  Target: LAMA2; (+) strand; PAM type: YTN; PAM sequence: TTC
ctgtatctgtcacacaataa

SEQ ID NO: 370022 - DNA, 20 bp, Artificial Sequence
  Description of Artificial Sequence: Synthetic oligonucleotide
  Target: LAMA2; (+) strand; PAM type: YTN; PAM sequence: CTG
tatctgtcacacaataattg

SEQ ID NO: 370023 - DNA, 20 bp, Artificial Sequence
  Description of Artificial Sequence: Synthetic oligonucleotide
  Target: LAMA2; (+) strand; PAM type: YTN; PAM sequence: CTG
tcacacaataattgtttgat

SEQ ID NO: 370024 - DNA, 20 bp, Artificial Sequence
  Description of Artificial Sequence: Synthetic oligonucleotide
  Target: LAMA2; (+) strand; PAM type: YTN; PAM sequence: TTG
tttgataaataaaattactt

SEQ ID NO: 370025 - DNA, 20 bp, Artificial Sequence
  Description of Artificial Sequence: Synthetic oligonucleotide
  Target: LAMA2; (+) strand; PAM type: YTN; PAM sequence: TTT
gataaataaaattactttgt

SEQ ID NO: 370026 - DNA, 20 bp, Artificial Sequence
  Description of Artificial Sequence: Synthetic oligonucleotide
  Target: LAMA2; (+) strand; PAM type: YTN; PAM sequence: TTG
ataaataaaattactttgta

SEQ ID NO: 370027 - DNA, 20 bp, Artificial Sequence
  Description of Artificial Sequence: Synthetic oligonucleotide
  Target: LAMA2; (+) strand; PAM type: YTN; PAM sequence: TTA
ctttgtaatccataaaagaa

SEQ ID NO: 370028 - DNA, 20 bp, Artificial Sequence
  Description of Artificial Sequence: Synthetic oligonucleotide
  Target: LAMA2; (+) strand; PAM type: YTN; PAM sequence: CTT
tgtaatccataaaagaactt

SEQ ID NO: 370029 - DNA, 20 bp, Artificial Sequence
  Description of Artificial Sequence: Synthetic oligonucleotide
  Target: LAMA2; (+) strand; PAM type: YTN; PAM sequence: TTT
gtaatccataaaagaactta

SEQ ID NO: 370030 - DNA, 20 bp, Artificial Sequence
  Description of Artificial Sequence: Synthetic oligonucleotide
  Target: LAMA2; (+) strand; PAM type: YTN; PAM sequence: TTG
taatccataaaagaacttaa

SEQ ID NO: 370031 - DNA, 20 bp, Artificial Sequence
  Description of Artificial Sequence: Synthetic oligonucleotide
  Target: LAMA2; (+) strand; PAM type: YTN; PAM sequence: CTT
aattgaatcaagagacaatg

SEQ ID NO: 370032 - DNA, 20 bp, Artificial Sequence
  Description of Artificial Sequence: Synthetic oligonucleotide
  Target: LAMA2; (+) strand; PAM type: YTN; PAM sequence: TTA
attgaatcaagagacaatga

SEQ ID NO: 370033 - DNA, 20 bp, Artificial Sequence
  Description of Artificial Sequence: Synthetic oligonucleotide
  Target: LAMA2; (+) strand; PAM type: YTN; PAM sequence: TTG
aatcaagagacaatgaattt

SEQ ID NO: 370034 - DNA, 20 bp, Artificial Sequence
  Description of Artificial Sequence: Synthetic oligonucleotide
  Target: LAMA2; (+) strand; PAM type: YTN; PAM sequence: TTT
tggaactttggattttctct

SEQ ID NO: 370035 - DNA, 20 bp, Artificial Sequence
  Description of Artificial Sequence: Synthetic oligonucleotide
  Target: LAMA2; (+) strand; PAM type: YTN; PAM sequence: TTT
ggaactttggattttctctc

SEQ ID NO: 370036 - DNA, 20 bp, Artificial Sequence
  Description of Artificial Sequence: Synthetic oligonucleotide
  Target: LAMA2; (+) strand; PAM type: YTN; PAM sequence: TTG
gaactttggattttctctct

SEQ ID NO: 370037 - DNA, 20 bp, Artificial Sequence
  Description of Artificial Sequence: Synthetic oligonucleotide
  Target: LAMA2; (+) strand; PAM type: YTN; PAM sequence: CTT
tggattttctctctgacttc

SEQ ID NO: 370038 - DNA, 20 bp, Artificial Sequence
  Description of Artificial Sequence: Synthetic oligonucleotide
  Target: LAMA2; (+) strand; PAM type: YTN; PAM sequence: TTT
ggattttctctctgacttct

SEQ ID NO: 370039 - DNA, 20 bp, Artificial Sequence
  Description of Artificial Sequence: Synthetic oligonucleotide
  Target: LAMA2; (+) strand; PAM type: YTN; PAM sequence: TTG
gattttctctctgacttctt

SEQ ID NO: 370040 - DNA, 20 bp, Artificial Sequence
  Description of Artificial Sequence: Synthetic oligonucleotide
  Target: LAMA2; (+) strand; PAM type: YTN; PAM sequence: TTT
tctctctgacttcttcattt

SEQ ID NO: 370041 - DNA, 20 bp, Artificial Sequence
  Description of Artificial Sequence: Synthetic oligonucleotide
  Target: LAMA2; (+) strand; PAM type: YTN; PAM sequence: TTT
ctctctgacttcttcatttc

SEQ ID NO: 370042 - DNA, 20 bp, Artificial Sequence
  Description of Artificial Sequence: Synthetic oligonucleotide
  Target: LAMA2; (+) strand; PAM type: YTN; PAM sequence: TTC
tctctgacttcttcatttct

SEQ ID NO: 370043 - DNA, 20 bp, Artificial Sequence
  Description of Artificial Sequence: Synthetic oligonucleotide
  Target: LAMA2; (+) strand; PAM type: YTN; PAM sequence: CTC
tctgacttcttcatttcttc

SEQ ID NO: 370044 - DNA, 20 bp, Artificial Sequence
  Description of Artificial Sequence: Synthetic oligonucleotide
  Target: LAMA2; (+) strand; PAM type: YTN; PAM sequence: CTC
tgacttcttcatttcttcta

SEQ ID NO: 370045 - DNA, 20 bp, Artificial Sequence
  Description of Artificial Sequence: Synthetic oligonucleotide
  Target: LAMA2; (+) strand; PAM type: YTN; PAM sequence: CTG
acttcttcatttcttctact

SEQ ID NO: 370046 - DNA, 20 bp, Artificial Sequence
  Description of Artificial Sequence: Synthetic oligonucleotide
  Target: LAMA2; (+) strand; PAM type: YTN; PAM sequence: CTT
cttcatttcttctactctct

SEQ ID NO: 370047 - DNA, 20 bp, Artificial Sequence
  Description of Artificial Sequence: Synthetic oligonucleotide
  Target: LAMA2; (+) strand; PAM type: YTN; PAM sequence: TTC
ttcatttcttctactctcta

SEQ ID NO: 370048 - DNA, 20 bp, Artificial Sequence
  Description of Artificial Sequence: Synthetic oligonucleotide
  Target: LAMA2; (+) strand; PAM type: YTN; PAM sequence: CTT
catttcttctactctctaaa

SEQ ID NO: 370049 - DNA, 20 bp, Artificial Sequence
  Description of Artificial Sequence: Synthetic oligonucleotide
  Target: LAMA2; (+) strand; PAM type: YTN; PAM sequence: TTC
atttcttctactctctaaaa

SEQ ID NO: 370050 - DNA, 20 bp, Artificial Sequence
  Description of Artificial Sequence: Synthetic oligonucleotide
  Target: LAMA2; (+) strand; PAM type: YTN; PAM sequence: TTT
cttctactctctaaaattca

SEQ ID NO: 370051 - DNA, 20 bp, Artificial Sequence
  Description of Artificial Sequence: Synthetic oligonucleotide
  Target: LAMA2; (+) strand; PAM type: YTN; PAM sequence: TTC
ttctactctctaaaattcat

SEQ ID NO: 370052 - DNA, 20 bp, Artificial Sequence
  Description of Artificial Sequence: Synthetic oligonucleotide
  Target: LAMA2; (+) strand; PAM type: YTN; PAM sequence: CTT
ctactctctaaaattcattt

SEQ ID NO: 370053 - DNA, 20 bp, Artificial Sequence
  Description of Artificial Sequence: Synthetic oligonucleotide
  Target: LAMA2; (+) strand; PAM type: YTN; PAM sequence: TTC
tactctctaaaattcatttt

SEQ ID NO: 370054 - DNA, 20 bp, Artificial Sequence
  Description of Artificial Sequence: Synthetic oligonucleotide
  Target: LAMA2; (+) strand; PAM type: YTN; PAM sequence: CTA
ctctctaaaattcatttttt

SEQ ID NO: 370055 - DNA, 20 bp, Artificial Sequence
  Description of Artificial Sequence: Synthetic oligonucleotide
  Target: LAMA2; (+) strand; PAM type: YTN; PAM sequence: CTC
tctaaaattcattttttcct

SEQ ID NO: 370056 - DNA, 20 bp, Artificial Sequence
  Description of Artificial Sequence: Synthetic oligonucleotide
  Target: LAMA2; (+) strand; PAM type: YTN; PAM sequence: CTC
taaaattcattttttcctta

SEQ ID NO: 370057 - DNA, 20 bp, Artificial Sequence
  Description of Artificial Sequence: Synthetic oligonucleotide
  Target: LAMA2; (+) strand; PAM type: YTN; PAM sequence: CTA
aaattcattttttccttatc

SEQ ID NO: 370058 - DNA, 20 bp, Artificial Sequence
  Description of Artificial Sequence: Synthetic oligonucleotide
  Target: LAMA2; (+) strand; PAM type: YTN; PAM sequence: TTC
attttttccttatcaaaact

SEQ ID NO: 370059 - DNA, 20 bp, Artificial Sequence
  Description of Artificial Sequence: Synthetic oligonucleotide
  Target: LAMA2; (+) strand; PAM type: YTN; PAM sequence: TTT
tttccttatcaaaactttct

SEQ ID NO: 370060 - DNA, 20 bp, Artificial Sequence
  Description of Artificial Sequence: Synthetic oligonucleotide
  Target: LAMA2; (+) strand; PAM type: YTN; PAM sequence: TTT
ttccttatcaaaactttctg

SEQ ID NO: 370061 - DNA, 20 bp, Artificial Sequence
  Description of Artificial Sequence: Synthetic oligonucleotide
  Target: LAMA2; (+) strand; PAM type: YTN; PAM sequence: TTT
tccttatcaaaactttctgt

SEQ ID NO: 370062 - DNA, 20 bp, Artificial Sequence
  Description of Artificial Sequence: Synthetic oligonucleotide
  Target: LAMA2; (+) strand; PAM type: YTN; PAM sequence: TTT
ccttatcaaaactttctgtc

SEQ ID NO: 370063 - DNA, 20 bp, Artificial Sequence
  Description of Artificial Sequence: Synthetic oligonucleotide
  Target: LAMA2; (+) strand; PAM type: YTN; PAM sequence: TTC
cttatcaaaactttctgtcc

SEQ ID NO: 370064 - DNA, 20 bp, Artificial Sequence
  Description of Artificial Sequence: Synthetic oligonucleotide
  Target: LAMA2; (+) strand; PAM type: YTN; PAM sequence: CTT
atcaaaactttctgtcccta

SEQ ID NO: 370065 - DNA, 20 bp, Artificial Sequence
  Description of Artificial Sequence: Synthetic oligonucleotide
  Target: LAMA2; (+) strand; PAM type: YTN; PAM sequence: TTA
tcaaaactttctgtccctaa

SEQ ID NO: 370066 - DNA, 20 bp, Artificial Sequence
  Description of Artificial Sequence: Synthetic oligonucleotide
  Target: LAMA2; (+) strand; PAM type: YTN; PAM sequence: CTT
tctgtccctaaattcactat

SEQ ID NO: 370067 - DNA, 20 bp, Artificial Sequence
  Description of Artificial Sequence: Synthetic oligonucleotide
  Target: LAMA2; (+) strand; PAM type: YTN; PAM sequence: TTT
ctgtccctaaattcactatt

SEQ ID NO: 370068 - DNA, 20 bp, Artificial Sequence
  Description of Artificial Sequence: Synthetic oligonucleotide
  Target: LAMA2; (+) strand; PAM type: YTN; PAM sequence: TTC
tgtccctaaattcactatta

SEQ ID NO: 370069 - DNA, 20 bp, Artificial Sequence
  Description of Artificial Sequence: Synthetic oligonucleotide
  Target: LAMA2; (+) strand; PAM type: YTN; PAM sequence: CTG
tccctaaattcactattatt

SEQ ID NO: 370070 - DNA, 20 bp, Artificial Sequence
  Description of Artificial Sequence: Synthetic oligonucleotide
  Target: LAMA2; (+) strand; PAM type: YTN; PAM sequence: CTA
aattcactattattcagtcc

SEQ ID NO: 370071 - DNA, 20 bp, Artificial Sequence
  Description of Artificial Sequence: Synthetic oligonucleotide
  Target: LAMA2; (+) strand; PAM type: YTN; PAM sequence: TTC
actattattcagtcctatcc

SEQ ID NO: 370072 - DNA, 20 bp, Artificial Sequence
  Description of Artificial Sequence: Synthetic oligonucleotide
  Target: LAMA2; (+) strand; PAM type: YTN; PAM sequence: CTA
ttattcagtcctatcctttc

SEQ ID NO: 370073 - DNA, 20 bp, Artificial Sequence
  Description of Artificial Sequence: Synthetic oligonucleotide
  Target: LAMA2; (+) strand; PAM type: YTN; PAM sequence: TTA
ttcagtcctatcctttcatt

SEQ ID NO: 370074 - DNA, 20 bp, Artificial Sequence
  Description of Artificial Sequence: Synthetic oligonucleotide
  Target: LAMA2; (+) strand; PAM type: YTN; PAM sequence: TTC
agtcctatcctttcattatt

SEQ ID NO: 370075 - DNA, 20 bp, Artificial Sequence
  Description of Artificial Sequence: Synthetic oligonucleotide
  Target: LAMA2; (+) strand; PAM type: YTN; PAM sequence: CTA
tcctttcattatttcatttg

SEQ ID NO: 370076 - DNA, 20 bp, Artificial Sequence
  Description of Artificial Sequence: Synthetic oligonucleotide
  Target: LAMA2; (+) strand; PAM type: YTN; PAM sequence: CTT
tcattatttcatttgctttt

SEQ ID NO: 370077 - DNA, 20 bp, Artificial Sequence
  Description of Artificial Sequence: Synthetic oligonucleotide
  Target: LAMA2; (+) strand; PAM type: YTN; PAM sequence: TTT
cattatttcatttgcttttc

SEQ ID NO: 370078 - DNA, 20 bp, Artificial Sequence
  Description of Artificial Sequence: Synthetic oligonucleotide
  Target: LAMA2; (+) strand; PAM type: YTN; PAM sequence: TTC
attatttcatttgcttttca

SEQ ID NO: 370079 - DNA, 20 bp, Artificial Sequence
  Description of Artificial Sequence: Synthetic oligonucleotide
  Target: LAMA2; (+) strand; PAM type: YTN; PAM sequence: TTA
tttcatttgcttttcaatta

SEQ ID NO: 370080 - DNA, 20 bp, Artificial Sequence
  Description of Artificial Sequence: Synthetic oligonucleotide
  Target: LAMA2; (+) strand; PAM type: YTN; PAM sequence: TTT
catttgcttttcaattaagt

SEQ ID NO: 370081 - DNA, 20 bp, Artificial Sequence
  Description of Artificial Sequence: Synthetic oligonucleotide
  Target: LAMA2; (+) strand; PAM type: YTN; PAM sequence: TTC
atttgcttttcaattaagtg

SEQ ID NO: 370082 - DNA, 20 bp, Artificial Sequence
  Description of Artificial Sequence: Synthetic oligonucleotide
  Target: LAMA2; (+) strand; PAM type: YTN; PAM sequence: TTT
gcttttcaattaagtgtagt

SEQ ID NO: 370083 - DNA, 20 bp, Artificial Sequence
  Description of Artificial Sequence: Synthetic oligonucleotide
  Target: LAMA2; (+) strand; PAM type: YTN; PAM sequence: TTG
cttttcaattaagtgtagtt

SEQ ID NO: 370084 - DNA, 20 bp, Artificial Sequence
  Description of Artificial Sequence: Synthetic oligonucleotide
  Target: LAMA2; (+) strand; PAM type: YTN; PAM sequence: CTT
ttcaattaagtgtagtttgt

SEQ ID NO: 370085 - DNA, 20 bp, Artificial Sequence
  Description of Artificial Sequence: Synthetic oligonucleotide
  Target: LAMA2; (+) strand; PAM type: YTN; PAM sequence: TTT
tcaattaagtgtagtttgta

SEQ ID NO: 370086 - DNA, 20 bp, Artificial Sequence
  Description of Artificial Sequence: Synthetic oligonucleotide
  Target: LAMA2; (+) strand; PAM type: YTN; PAM sequence: TTT
caattaagtgtagtttgtaa

SEQ ID NO: 370087 - DNA, 20 bp, Artificial Sequence
  Description of Artificial Sequence: Synthetic oligonucleotide
  Target: LAMA2; (+) strand; PAM type: YTN; PAM sequence: TTC
aattaagtgtagtttgtaag

SEQ ID NO: 370088 - DNA, 20 bp, Artificial Sequence
  Description of Artificial Sequence: Synthetic oligonucleotide
  Target: LAMA2; (+) strand; PAM type: YTN; PAM sequence: TTA
agtgtagtttgtaaggccag

SEQ ID NO: 370089 - DNA, 20 bp, Artificial Sequence
  Description of Artificial Sequence: Synthetic oligonucleotide
  Target: LAMA2; (+) strand; PAM type: YTN; PAM sequence: TTT
gtaaggccagtcattctagc

SEQ ID NO: 370090 - DNA, 20 bp, Artificial Sequence
  Description of Artificial Sequence: Synthetic oligonucleotide
  Target: LAMA2; (+) strand; PAM type: YTN; PAM sequence: TTG
taaggccagtcattctagcc

SEQ ID NO: 370091 - DNA, 20 bp, Artificial Sequence
  Description of Artificial Sequence: Synthetic oligonucleotide
  Target: LAMA2; (+) strand; PAM type: YTN; PAM sequence: TTC
tagccttgttatcactaata

SEQ ID NO: 370092 - DNA, 20 bp, Artificial Sequence
  Description of Artificial Sequence: Synthetic oligonucleotide
  Target: LAMA2; (+) strand; PAM type: YTN; PAM sequence: CTA
gccttgttatcactaatatc

SEQ ID NO: 370093 - DNA, 20 bp, Artificial Sequence
  Description of Artificial Sequence: Synthetic oligonucleotide
  Target: LAMA2; (+) strand; PAM type: YTN; PAM sequence: CTT
gttatcactaatatcctggg

SEQ ID NO: 370094 - DNA, 20 bp, Artificial Sequence
  Description of Artificial Sequence: Synthetic oligonucleotide
  Target: LAMA2; (+) strand; PAM type: YTN; PAM sequence: TTG
ttatcactaatatcctggga

SEQ ID NO: 370095 - DNA, 20 bp, Artificial Sequence
  Description of Artificial Sequence: Synthetic oligonucleotide
  Target: LAMA2; (+) strand; PAM type: YTN; PAM sequence: TTA
tcactaatatcctgggatcc

SEQ ID NO: 370096 - DNA, 20 bp, Artificial Sequence
  Description of Artificial Sequence: Synthetic oligonucleotide
  Target: LAMA2; (+) strand; PAM type: YTN; PAM sequence: CTA
atatcctgggatcccttaaa

SEQ ID NO: 370097 - DNA, 20 bp, Artificial Sequence
  Description of Artificial Sequence: Synthetic oligonucleotide
  Target: LAMA2; (+) strand; PAM type: YTN; PAM sequence: CTG
ggatcccttaaaagctgagt

SEQ ID NO: 370098 - DNA, 20 bp, Artificial Sequence
  Description of Artificial Sequence: Synthetic oligonucleotide
  Target: LAMA2; (+) strand; PAM type: YTN; PAM sequence: CTT
aaaagctgagtaaacgccaa

SEQ ID NO: 370099 - DNA, 20 bp, Artificial Sequence
  Description of Artificial Sequence: Synthetic oligonucleotide
  Target: LAMA2; (+) strand; PAM type: YTN; PAM sequence: TTA
aaagctgagtaaacgccaaa

SEQ ID NO: 370100 - DNA, 20 bp, Artificial Sequence
  Description of Artificial Sequence: Synthetic oligonucleotide
  Target: LAMA2; (+) strand; PAM type: YTN; PAM sequence: CTG
agtaaacgccaaagaccatt

SEQ ID NO: 370101 - DNA, 20 bp, Artificial Sequence
  Description of Artificial Sequence: Synthetic oligonucleotide
  Target: LAMA2; (+) strand; PAM type: YTN; PAM sequence: TTA
atgtcttaattccagcttgc

SEQ ID NO: 370102 - DNA, 20 bp, Artificial Sequence
  Description of Artificial Sequence: Synthetic oligonucleotide
  Target: LAMA2; (+) strand; PAM type: YTN; PAM sequence: CTT
aattccagcttgctgagaac

SEQ ID NO: 370103 - DNA, 20 bp, Artificial Sequence
  Description of Artificial Sequence: Synthetic oligonucleotide
  Target: LAMA2; (+) strand; PAM type: YTN; PAM sequence: TTA
attccagcttgctgagaacc

SEQ ID NO: 370104 - DNA, 20 bp, Artificial Sequence
  Description of Artificial Sequence: Synthetic oligonucleotide
  Target: LAMA2; (+) strand; PAM type: YTN; PAM sequence: TTC
cagcttgctgagaacctctg

SEQ ID NO: 370105 - DNA, 20 bp, Artificial Sequence
  Description of Artificial Sequence: Synthetic oligonucleotide
  Target: LAMA2; (+) strand; PAM type: YTN; PAM sequence: CTT
gctgagaacctctggccaaa

SEQ ID NO: 370106 - DNA, 20 bp, Artificial Sequence
  Description of Artificial Sequence: Synthetic oligonucleotide
  Target: LAMA2; (+) strand; PAM type: YTN; PAM sequence: TTG
ctgagaacctctggccaaaa

SEQ ID NO: 370107 - DNA, 20 bp, Artificial Sequence
  Description of Artificial Sequence: Synthetic oligonucleotide
  Target: LAMA2; (+) strand; PAM type: YTN; PAM sequence: CTG
agaacctctggccaaaaaag

SEQ ID NO: 370108 - DNA, 20 bp, Artificial Sequence
  Description of Artificial Sequence: Synthetic oligonucleotide
  Target: LAMA2; (+) strand; PAM type: YTN; PAM sequence: CTC
tggccaaaaaaggatcaaat

SEQ ID NO: 370109 - DNA, 20 bp, Artificial Sequence
  Description of Artificial Sequence: Synthetic oligonucleotide
  Target: LAMA2; (+) strand; PAM type: YTN; PAM sequence: CTG
gccaaaaaaggatcaaatga

SEQ ID NO: 370110 - DNA, 20 bp, Artificial Sequence
  Description of Artificial Sequence: Synthetic oligonucleotide
  Target: LAMA2; (+) strand; PAM type: YTN; PAM sequence: CTC
cattgtagacattctctttt

SEQ ID NO: 370111 - DNA, 20 bp, Artificial Sequence
  Description of Artificial Sequence: Synthetic oligonucleotide
  Target: LAMA2; (+) strand; PAM type: YTN; PAM sequence: TTG
tagacattctcttttacttc

SEQ ID NO: 370112 - DNA, 20 bp, Artificial Sequence
  Description of Artificial Sequence: Synthetic oligonucleotide
  Target: LAMA2; (+) strand; PAM type: YTN; PAM sequence: TTC
tcttttacttcatttggggc

SEQ ID NO: 370113 - DNA, 20 bp, Artificial Sequence
  Description of Artificial Sequence: Synthetic oligonucleotide
  Target: LAMA2; (+) strand; PAM type: YTN; PAM sequence: CTC
ttttacttcatttggggcca

SEQ ID NO: 370114 - DNA, 20 bp, Artificial Sequence
  Description of Artificial Sequence: Synthetic oligonucleotide
  Target: LAMA2; (+) strand; PAM type: YTN; PAM sequence: CTT
ttacttcatttggggccata

SEQ ID NO: 370115 - DNA, 20 bp, Artificial Sequence
  Description of Artificial Sequence: Synthetic oligonucleotide
  Target: LAMA2; (+) strand; PAM type: YTN; PAM sequence: TTT
tacttcatttggggccatag

SEQ ID NO: 370116 - DNA, 20 bp, Artificial Sequence
  Description of Artificial Sequence: Synthetic oligonucleotide
  Target: LAMA2; (+) strand; PAM type: YTN; PAM sequence: TTT
acttcatttggggccatagt

SEQ ID NO: 370117 - DNA, 20 bp, Artificial Sequence
  Description of Artificial Sequence: Synthetic oligonucleotide
  Target: LAMA2; (+) strand; PAM type: YTN; PAM sequence: TTA
cttcatttggggccatagtg

SEQ ID NO: 370118 - DNA, 20 bp, Artificial Sequence
  Description of Artificial Sequence: Synthetic oligonucleotide
  Target: LAMA2; (+) strand; PAM type: YTN; PAM sequence: CTT
catttggggccatagtgttg

SEQ ID NO: 370119 - DNA, 20 bp, Artificial Sequence
  Description of Artificial Sequence: Synthetic oligonucleotide
  Target: LAMA2; (+) strand; PAM type: YTN; PAM sequence: TTC
atttggggccatagtgttga

SEQ ID NO: 370120 - DNA, 20 bp, Artificial Sequence
  Description of Artificial Sequence: Synthetic oligonucleotide
  Target: LAMA2; (+) strand; PAM type: YTN; PAM sequence: TTT
ggggccatagtgttgattca

SEQ ID NO: 370121 - DNA, 20 bp, Artificial Sequence
  Description of Artificial Sequence: Synthetic oligonucleotide
  Target: LAMA2; (+) strand; PAM type: YTN; PAM sequence: TTG
gggccatagtgttgattcag

SEQ ID NO: 370122 - DNA, 20 bp, Artificial Sequence
  Description of Artificial Sequence: Synthetic oligonucleotide
  Target: LAMA2; (+) strand; PAM type: YTN; PAM sequence: TTG
attcaggatcttttttctca

SEQ ID NO: 370123 - DNA, 20 bp, Artificial Sequence
  Description of Artificial Sequence: Synthetic oligonucleotide
  Target: LAMA2; (+) strand; PAM type: YTN; PAM sequence: TTC
aggatcttttttctcatttc

SEQ ID NO: 370124 - DNA, 20 bp, Artificial Sequence
  Description of Artificial Sequence: Synthetic oligonucleotide
  Target: LAMA2; (+) strand; PAM type: YTN; PAM sequence: CTT
ttttctcatttctacttgac

SEQ ID NO: 370125 - DNA, 20 bp, Artificial Sequence
  Description of Artificial Sequence: Synthetic oligonucleotide
  Target: LAMA2; (+) strand; PAM type: YTN; PAM sequence: TTT
tttctcatttctacttgact

SEQ ID NO: 370126 - DNA, 20 bp, Artificial Sequence
  Description of Artificial Sequence: Synthetic oligonucleotide
  Target: LAMA2; (+) strand; PAM type: YTN; PAM sequence: TTT
ttctcatttctacttgactt

SEQ ID NO: 370127 - DNA, 20 bp, Artificial Sequence
  Description of Artificial Sequence: Synthetic oligonucleotide
  Target: LAMA2; (+) strand; PAM type: YTN; PAM sequence: TTT
tctcatttctacttgacttc

SEQ ID NO: 370128 - DNA, 20 bp, Artificial Sequence
  Description of Artificial Sequence: Synthetic oligonucleotide
  Target: LAMA2; (+) strand; PAM type: YTN; PAM sequence: TTT
ctcatttctacttgacttct

SEQ ID NO: 370129 - DNA, 20 bp, Artificial Sequence
  Description of Artificial Sequence: Synthetic oligonucleotide
  Target: LAMA2; (+) strand; PAM type: YTN; PAM sequence: TTC
tcatttctacttgacttctt

SEQ ID NO: 370130 - DNA, 20 bp, Artificial Sequence
  Description of Artificial Sequence: Synthetic oligonucleotide
  Target: LAMA2; (+) strand; PAM type: YTN; PAM sequence: CTC
atttctacttgacttcttgt

SEQ ID NO: 370131 - DNA, 20 bp, Artificial Sequence
  Description of Artificial Sequence: Synthetic oligonucleotide
  Target: LAMA2; (+) strand; PAM type: YTN; PAM sequence: TTT
ctacttgacttcttgtgaag

SEQ ID NO: 370132 - DNA, 20 bp, Artificial Sequence
  Description of Artificial Sequence: Synthetic oligonucleotide
  Target: LAMA2; (+) strand; PAM type: YTN; PAM sequence: TTC
tacttgacttcttgtgaagt

SEQ ID NO: 370133 - DNA, 20 bp, Artificial Sequence
  Description of Artificial Sequence: Synthetic oligonucleotide
  Target: LAMA2; (+) strand; PAM type: YTN; PAM sequence: CTA
cttgacttcttgtgaagtgt

SEQ ID NO: 370134 - DNA, 20 bp, Artificial Sequence
  Description of Artificial Sequence: Synthetic oligonucleotide
  Target: LAMA2; (+) strand; PAM type: YTN; PAM sequence: CTT
gacttcttgtgaagtgttct

SEQ ID NO: 370135 - DNA, 20 bp, Artificial Sequence
  Description of Artificial Sequence: Synthetic oligonucleotide
  Target: LAMA2; (+) strand; PAM type: YTN; PAM sequence: TTG
acttcttgtgaagtgttctg

SEQ ID NO: 370136 - DNA, 20 bp, Artificial Sequence
  Description of Artificial Sequence: Synthetic oligonucleotide
  Target: LAMA2; (+) strand; PAM type: YTN; PAM sequence: CTT
cttgtgaagtgttctgcagt

SEQ ID NO: 370137 - DNA, 20 bp, Artificial Sequence
  Description of Artificial Sequence: Synthetic oligonucleotide
  Target: LAMA2; (+) strand; PAM type: YTN; PAM sequence: TTC
ttgtgaagtgttctgcagtt

SEQ ID NO: 370138 - DNA, 20 bp, Artificial Sequence
  Description of Artificial Sequence: Synthetic oligonucleotide
  Target: LAMA2; (+) strand; PAM type: YTN; PAM sequence: CTT
gtgaagtgttctgcagttaa

SEQ ID NO: 370139 - DNA, 20 bp, Artificial Sequence
  Description of Artificial Sequence: Synthetic oligonucleotide
  Target: LAMA2; (+) strand; PAM type: YTN; PAM sequence: TTG
tgaagtgttctgcagttaaa

SEQ ID NO: 370140 - DNA, 20 bp, Artificial Sequence
  Description of Artificial Sequence: Synthetic oligonucleotide
  Target: LAMA2; (+) strand; PAM type: YTN; PAM sequence: TTC
tgcagttaaatctttcaaaa

SEQ ID NO: 370141 - DNA, 20 bp, Artificial Sequence
  Description of Artificial Sequence: Synthetic oligonucleotide
  Target: LAMA2; (+) strand; PAM type: YTN; PAM sequence: CTG
cagttaaatctttcaaaaat

SEQ ID NO: 370142 - DNA, 20 bp, Artificial Sequence
  Description of Artificial Sequence: Synthetic oligonucleotide
  Target: LAMA2; (+) strand; PAM type: YTN; PAM sequence: TTA
aatctttcaaaaattttctt

SEQ ID NO: 370143 - DNA, 20 bp, Artificial Sequence
  Description of Artificial Sequence: Synthetic oligonucleotide
  Target: LAMA2; (+) strand; PAM type: YTN; PAM sequence: CTT
tcaaaaattttcttactttc

SEQ ID NO: 370144 - DNA, 20 bp, Artificial Sequence
  Description of Artificial Sequence: Synthetic oligonucleotide
  Target: LAMA2; (+) strand; PAM type: YTN; PAM sequence: TTT
caaaaattttcttactttca

SEQ ID NO: 370145 - DNA, 20 bp, Artificial Sequence
  Description of Artificial Sequence: Synthetic oligonucleotide
  Target: LAMA2; (+) strand; PAM type: YTN; PAM sequence: TTC
aaaaattttcttactttcat

SEQ ID NO: 370146 - DNA, 20 bp, Artificial Sequence
  Description of Artificial Sequence: Synthetic oligonucleotide
  Target: LAMA2; (+) strand; PAM type: YTN; PAM sequence: TTT
tcttactttcatagtgctgt

SEQ ID NO: 370147 - DNA, 20 bp, Artificial Sequence
  Description of Artificial Sequence: Synthetic oligonucleotide
  Target: LAMA2; (+) strand; PAM type: YTN; PAM sequence: TTT
cttactttcatagtgctgtc

SEQ ID NO: 370148 - DNA, 20 bp, Artificial Sequence
  Description of Artificial Sequence: Synthetic oligonucleotide
  Target: LAMA2; (+) strand; PAM type: YTN; PAM sequence: TTC
ttactttcatagtgctgtca

SEQ ID NO: 370149 - DNA, 20 bp, Artificial Sequence
  Description of Artificial Sequence: Synthetic oligonucleotide
  Target: LAMA2; (+) strand; PAM type: YTN; PAM sequence: CTT
actttcatagtgctgtcatc

SEQ ID NO: 370150 - DNA, 20 bp, Artificial Sequence
  Description of Artificial Sequence: Synthetic oligonucleotide
  Target: LAMA2; (+) strand; PAM type: YTN; PAM sequence: TTA
ctttcatagtgctgtcatca

SEQ ID NO: 370151 - DNA, 20 bp, Artificial Sequence
  Description of Artificial Sequence: Synthetic oligonucleotide
  Target: LAMA2; (+) strand; PAM type: YTN; PAM sequence: CTT
tcatagtgctgtcatcatag

SEQ ID NO: 370152 - DNA, 20 bp, Artificial Sequence
  Description of Artificial Sequence: Synthetic oligonucleotide
  Target: LAMA2; (+) strand; PAM type: YTN; PAM sequence: TTT
catagtgctgtcatcataga

SEQ ID NO: 370153 - DNA, 20 bp, Artificial Sequence
  Description of Artificial Sequence: Synthetic oligonucleotide
  Target: LAMA2; (+) strand; PAM type: YTN; PAM sequence: TTC
atagtgctgtcatcatagat

SEQ ID NO: 370154 - DNA, 20 bp, Artificial Sequence
  Description of Artificial Sequence: Synthetic oligonucleotide
  Target: LAMA2; (+) strand; PAM type: YTN; PAM sequence: CTG
tcatcatagatttcacttga

SEQ ID NO: 370155 - DNA, 20 bp, Artificial Sequence
  Description of Artificial Sequence: Synthetic oligonucleotide
  Target: LAMA2; (+) strand; PAM type: YTN; PAM sequence: TTT
cacttgacagatgagacagg

SEQ ID NO: 370156 - DNA, 20 bp, Artificial Sequence
  Description of Artificial Sequence: Synthetic oligonucleotide
  Target: LAMA2; (+) strand; PAM type: YTN; PAM sequence: TTC
acttgacagatgagacaggg

SEQ ID NO: 370157 - DNA, 20 bp, Artificial Sequence
  Description of Artificial Sequence: Synthetic oligonucleotide
  Target: LAMA2; (+) strand; PAM type: YTN; PAM sequence: CTT
gacagatgagacaggggata

SEQ ID NO: 370158 - DNA, 20 bp, Artificial Sequence
  Description of Artificial Sequence: Synthetic oligonucleotide
  Target: LAMA2; (+) strand; PAM type: YTN; PAM sequence: TTG
acagatgagacaggggatat

SEQ ID NO: 370159 - DNA, 20 bp, Artificial Sequence
  Description of Artificial Sequence: Synthetic oligonucleotide
  Target: LAMA2; (+) strand; PAM type: YTN; PAM sequence: CTA
ttaaaaagagtgttatgcaa

SEQ ID NO: 370160 - DNA, 20 bp, Artificial Sequence
  Description of Artificial Sequence: Synthetic oligonucleotide
  Target: LAMA2; (+) strand; PAM type: YTN; PAM sequence: TTA
aaaagagtgttatgcaatct

SEQ ID NO: 370161 - DNA, 20 bp, Artificial Sequence
  Description of Artificial Sequence: Synthetic oligonucleotide
  Target: LAMA2; (+) strand; PAM type: YTN; PAM sequence: TTA
tgcaatctcagtttcttctt

SEQ ID NO: 370162 - DNA, 20 bp, Artificial Sequence
  Description of Artificial Sequence: Synthetic oligonucleotide
  Target: LAMA2; (+) strand; PAM type: YTN; PAM sequence: CTC
agtttcttcttccatgaaat

SEQ ID NO: 370163 - DNA, 20 bp, Artificial Sequence
  Description of Artificial Sequence: Synthetic oligonucleotide
  Target: LAMA2; (+) strand; PAM type: YTN; PAM sequence: TTT
cttcttccatgaaatgaaaa

SEQ ID NO: 370164 - DNA, 20 bp, Artificial Sequence
  Description of Artificial Sequence: Synthetic oligonucleotide
  Target: LAMA2; (+) strand; PAM type: YTN; PAM sequence: TTC
ttcttccatgaaatgaaaat

SEQ ID NO: 370165 - DNA, 20 bp, Artificial Sequence
  Description of Artificial Sequence: Synthetic oligonucleotide
  Target: LAMA2; (+) strand; PAM type: YTN; PAM sequence: CTT
cttccatgaaatgaaaataa

SEQ ID NO: 370166 - DNA, 20 bp, Artificial Sequence
  Description of Artificial Sequence: Synthetic oligonucleotide
  Target: LAMA2; (+) strand; PAM type: YTN; PAM sequence: TTC
ttccatgaaatgaaaataat

SEQ ID NO: 370167 - DNA, 20 bp, Artificial Sequence
  Description of Artificial Sequence: Synthetic oligonucleotide
  Target: LAMA2; (+) strand; PAM type: YTN; PAM sequence: CTT
ccatgaaatgaaaataatat

SEQ ID NO: 370168 - DNA, 20 bp, Artificial Sequence
  Description of Artificial Sequence: Synthetic oligonucleotide
  Target: LAMA2; (+) strand; PAM type: YTN; PAM sequence: TTC
catgaaatgaaaataatatt

SEQ ID NO: 370169 - DNA, 20 bp, Artificial Sequence
  Description of Artificial Sequence: Synthetic oligonucleotide
  Target: LAMA2; (+) strand; PAM type: YTN; PAM sequence: TTA
accacctcatagaattgttt

SEQ ID NO: 370170 - DNA, 20 bp, Artificial Sequence
  Description of Artificial Sequence: Synthetic oligonucleotide
  Target: LAMA2; (+) strand; PAM type: YTN; PAM sequence: CTC
atagaattgtttgtttgttc

SEQ ID NO: 370171 - DNA, 20 bp, Artificial Sequence
  Description of Artificial Sequence: Synthetic oligonucleotide
  Target: LAMA2; (+) strand; PAM type: YTN; PAM sequence: TTG
tttgtttgttcgtactttca

SEQ ID NO: 370172 - DNA, 20 bp, Artificial Sequence
  Description of Artificial Sequence: Synthetic oligonucleotide
  Target: LAMA2; (+) strand; PAM type: YTN; PAM sequence: TTT
gtttgttcgtactttcattt

SEQ ID NO: 370173 - DNA, 20 bp, Artificial Sequence
  Description of Artificial Sequence: Synthetic oligonucleotide
  Target: LAMA2; (+) strand; PAM type: YTN; PAM sequence: TTG
tttgttcgtactttcattta

SEQ ID NO: 370174 - DNA, 20 bp, Artificial Sequence
  Description of Artificial Sequence: Synthetic oligonucleotide
  Target: LAMA2; (+) strand; PAM type: YTN; PAM sequence: TTT
gttcgtactttcatttagct

SEQ ID NO: 370175 - DNA, 20 bp, Artificial Sequence
  Description of Artificial Sequence: Synthetic oligonucleotide
  Target: LAMA2; (+) strand; PAM type: YTN; PAM sequence: TTG
ttcgtactttcatttagctg

SEQ ID NO: 370176 - DNA, 20 bp, Artificial Sequence
  Description of Artificial Sequence: Synthetic oligonucleotide
  Target: LAMA2; (+) strand; PAM type: YTN; PAM sequence: TTC
gtactttcatttagctgact

SEQ ID NO: 370177 - DNA, 20 bp, Artificial Sequence
  Description of Artificial Sequence: Synthetic oligonucleotide
  Target: LAMA2; (+) strand; PAM type: YTN; PAM sequence: CTT
tcatttagctgactagtatt

SEQ ID NO: 370178 - DNA, 20 bp, Artificial Sequence
  Description of Artificial Sequence: Synthetic oligonucleotide
  Target: LAMA2; (+) strand; PAM type: YTN; PAM sequence: TTT
catttagctgactagtattt

SEQ ID NO: 370179 - DNA, 20 bp, Artificial Sequence
  Description of Artificial Sequence: Synthetic oligonucleotide
  Target: LAMA2; (+) strand; PAM type: YTN; PAM sequence: TTC
atttagctgactagtatttg

SEQ ID NO: 370180 - DNA, 20 bp, Artificial Sequence
  Description of Artificial Sequence: Synthetic oligonucleotide
  Target: LAMA2; (+) strand; PAM type: YTN; PAM sequence: TTT
agctgactagtatttgatga

SEQ ID NO: 370181 - DNA, 20 bp, Artificial Sequence
  Description of Artificial Sequence: Synthetic oligonucleotide
  Target: LAMA2; (+) strand; PAM type: YTN; PAM sequence: TTA
gctgactagtatttgatgag

SEQ ID NO: 370182 - DNA, 20 bp, Artificial Sequence
  Description of Artificial Sequence: Synthetic oligonucleotide
  Target: LAMA2; (+) strand; PAM type: YTN; PAM sequence: CTG
actagtatttgatgagcgtg

SEQ ID NO: 370183 - DNA, 20 bp, Artificial Sequence
  Description of Artificial Sequence: Synthetic oligonucleotide
  Target: LAMA2; (+) strand; PAM type: YTN; PAM sequence: CTA
gtatttgatgagcgtgtatt

SEQ ID NO: 370184 - DNA, 20 bp, Artificial Sequence
  Description of Artificial Sequence: Synthetic oligonucleotide
  Target: LAMA2; (+) strand; PAM type: YTN; PAM sequence: TTT
gatgagcgtgtattttgaga

SEQ ID NO: 370185 - DNA, 20 bp, Artificial Sequence
  Description of Artificial Sequence: Synthetic oligonucleotide
  Target: LAMA2; (+) strand; PAM type: YTN; PAM sequence: TTG
atgagcgtgtattttgagac

SEQ ID NO: 370186 - DNA, 20 bp, Artificial Sequence
  Description of Artificial Sequence: Synthetic oligonucleotide
  Target: LAMA2; (+) strand; PAM type: YTN; PAM sequence: TTT
tgagacaaacaagaccctac

SEQ ID NO: 370187 - DNA, 20 bp, Artificial Sequence
  Description of Artificial Sequence: Synthetic oligonucleotide
  Target: LAMA2; (+) strand; PAM type: YTN; PAM sequence: TTT
gagacaaacaagaccctaca

SEQ ID NO: 370188 - DNA, 20 bp, Artificial Sequence
  Description of Artificial Sequence: Synthetic oligonucleotide
  Target: LAMA2; (+) strand; PAM type: YTN; PAM sequence: TTG
agacaaacaagaccctacac

SEQ ID NO: 370189 - DNA, 20 bp, Artificial Sequence
  Description of Artificial Sequence: Synthetic oligonucleotide
  Target: LAMA2; (+) strand; PAM type: YTN; PAM sequence: CTA
cacagggaaaatagtgccat

SEQ ID NO: 370190 - DNA, 20 bp, Artificial Sequence
  Description of Artificial Sequence: Synthetic oligonucleotide
  Target: LAMA2; (+) strand; PAM type: YTN; PAM sequence: TTA
acaatacagatattgtccct

SEQ ID NO: 370191 - DNA, 20 bp, Artificial Sequence
  Description of Artificial Sequence: Synthetic oligonucleotide
  Target: LAMA2; (+) strand; PAM type: YTN; PAM sequence: TTG
tccctgtccccaaggacgtt

SEQ ID NO: 370192 - DNA, 20 bp, Artificial Sequence
  Description of Artificial Sequence: Synthetic oligonucleotide
  Target: LAMA2; (+) strand; PAM type: YTN; PAM sequence: CTG
tccccaaggacgttgcactg

SEQ ID NO: 370193 - DNA, 20 bp, Artificial Sequence
  Description of Artificial Sequence: Synthetic oligonucleotide
  Target: LAMA2; (+) strand; PAM type: YTN; PAM sequence: TTG
cactgagtggtggcattaac

SEQ ID NO: 370194 - DNA, 20 bp, Artificial Sequence
  Description of Artificial Sequence: Synthetic oligonucleotide
  Target: LAMA2; (+) strand; PAM type: YTN; PAM sequence: CTG
agtggtggcattaacgatat

SEQ ID NO: 370195 - DNA, 20 bp, Artificial Sequence
  Description of Artificial Sequence: Synthetic oligonucleotide
  Target: LAMA2; (+) strand; PAM type: YTN; PAM sequence: TTA
acgatatgccagaaagcaaa

SEQ ID NO: 370196 - DNA, 20 bp, Artificial Sequence
  Description of Artificial Sequence: Synthetic oligonucleotide
  Target: LAMA2; (+) strand; PAM type: YTN; PAM sequence: TTC
tatgaaggaaataaacaggg

SEQ ID NO: 370197 - DNA, 20 bp, Artificial Sequence
  Description of Artificial Sequence: Synthetic oligonucleotide
  Target: LAMA2; (+) strand; PAM type: YTN; PAM sequence: CTA
tgaaggaaataaacagggtg

SEQ ID NO: 370198 - DNA, 20 bp, Artificial Sequence
  Description of Artificial Sequence: Synthetic oligonucleotide
  Target: LAMA2; (+) strand; PAM type: YTN; PAM sequence: TTC
tatgataaagttactgcaag

SEQ ID NO: 370199 - DNA, 20 bp, Artificial Sequence
  Description of Artificial Sequence: Synthetic oligonucleotide
  Target: LAMA2; (+) strand; PAM type: YTN; PAM sequence: CTA
tgataaagttactgcaagtg

SEQ ID NO: 370200 - DNA, 20 bp, Artificial Sequence
  Description of Artificial Sequence: Synthetic oligonucleotide
  Target: LAMA2; (+) strand; PAM type: YTN; PAM sequence: TTA
ctgcaagtggttgtatgaag

SEQ ID NO: 370201 - DNA, 20 bp, Artificial Sequence
  Description of Artificial Sequence: Synthetic oligonucleotide
  Target: LAMA2; (+) strand; PAM type: YTN; PAM sequence: CTG
caagtggttgtatgaaggtt

SEQ ID NO: 370202 - DNA, 20 bp, Artificial Sequence
  Description of Artificial Sequence: Synthetic oligonucleotide
  Target: LAMA2; (+) strand; PAM type: YTN; PAM sequence: TTG
tatgaaggttagaaagtcta

SEQ ID NO: 370203 - DNA, 20 bp, Artificial Sequence
  Description of Artificial Sequence: Synthetic oligonucleotide
  Target: LAMA2; (+) strand; PAM type: YTN; PAM sequence: TTA
gaaagtctactttgtaaaag

SEQ ID NO: 370204 - DNA, 20 bp, Artificial Sequence
  Description of Artificial Sequence: Synthetic oligonucleotide
  Target: LAMA2; (+) strand; PAM type: YTN; PAM sequence: CTA
ctttgtaaaagtttgtcagg

SEQ ID NO: 370205 - DNA, 20 bp, Artificial Sequence
  Description of Artificial Sequence: Synthetic oligonucleotide
  Target: LAMA2; (+) strand; PAM type: YTN; PAM sequence: CTT
tgtaaaagtttgtcaggaaa

SEQ ID NO: 370206 - DNA, 20 bp, Artificial Sequence
  Description of Artificial Sequence: Synthetic oligonucleotide
  Target: LAMA2; (+) strand; PAM type: YTN; PAM sequence: TTT
gtaaaagtttgtcaggaaag

SEQ ID NO: 370207 - DNA, 20 bp, Artificial Sequence
  Description of Artificial Sequence: Synthetic oligonucleotide
  Target: LAMA2; (+) strand; PAM type: YTN; PAM sequence: TTG
taaaagtttgtcaggaaagg

SEQ ID NO: 370208 - DNA, 20 bp, Artificial Sequence
  Description of Artificial Sequence: Synthetic oligonucleotide
  Target: LAMA2; (+) strand; PAM type: YTN; PAM sequence: TTT
gtcaggaaaggcttcctgag

SEQ ID NO: 370209 - DNA, 20 bp, Artificial Sequence
  Description of Artificial Sequence: Synthetic oligonucleotide
  Target: LAMA2; (+) strand; PAM type: YTN; PAM sequence: TTG
tcaggaaaggcttcctgagg

SEQ ID NO: 370210 - DNA, 20 bp, Artificial Sequence
  Description of Artificial Sequence: Synthetic oligonucleotide
  Target: LAMA2; (+) strand; PAM type: YTN; PAM sequence: CTT
cctgaggtggtgacagctaa

SEQ ID NO: 370211 - DNA, 20 bp, Artificial Sequence
  Description of Artificial Sequence: Synthetic oligonucleotide
  Target: LAMA2; (+) strand; PAM type: YTN; PAM sequence: TTC
ctgaggtggtgacagctaaa

SEQ ID NO: 370212 - DNA, 20 bp, Artificial Sequence
  Description of Artificial Sequence: Synthetic oligonucleotide
  Target: LAMA2; (+) strand; PAM type: YTN; PAM sequence: CTG
aggtggtgacagctaaatcg

SEQ ID NO: 370213 - DNA, 20 bp, Artificial Sequence
  Description of Artificial Sequence: Synthetic oligonucleotide
  Target: LAMA2; (+) strand; PAM type: YTN; PAM sequence: CTA
aatcgagtgttgaagaatga

SEQ ID NO: 370214 - DNA, 20 bp, Artificial Sequence
  Description of Artificial Sequence: Synthetic oligonucleotide
  Target: LAMA2; (+) strand; PAM type: YTN; PAM sequence: TTG
aagaatgagagggacaacga

SEQ ID NO: 370215 - DNA, 20 bp, Artificial Sequence
  Description of Artificial Sequence: Synthetic oligonucleotide
  Target: LAMA2; (+) strand; PAM type: YTN; PAM sequence: CTG
ctaaggaagcagcatagatc

SEQ ID NO: 370216 - DNA, 20 bp, Artificial Sequence
  Description of Artificial Sequence: Synthetic oligonucleotide
  Target: LAMA2; (+) strand; PAM type: YTN; PAM sequence: CTA
aggaagcagcatagatcgtg

SEQ ID NO: 370217 - DNA, 20 bp, Artificial Sequence
  Description of Artificial Sequence: Synthetic oligonucleotide
  Target: LAMA2; (+) strand; PAM type: YTN; PAM sequence: CTG
taaggactggaaagaaggag

SEQ ID NO: 370218 - DNA, 20 bp, Artificial Sequence
  Description of Artificial Sequence: Synthetic oligonucleotide
  Target: LAMA2; (+) strand; PAM type: YTN; PAM sequence: CTG
gaaagaaggagcgtggctgg

SEQ ID NO: 370219 - DNA, 20 bp, Artificial Sequence
  Description of Artificial Sequence: Synthetic oligonucleotide
  Target: LAMA2; (+) strand; PAM type: YTN; PAM sequence: CTG
gagccttgtaagcaagggga

SEQ ID NO: 370220 - DNA, 20 bp, Artificial Sequence
  Description of Artificial Sequence: Synthetic oligonucleotide
  Target: LAMA2; (+) strand; PAM type: YTN; PAM sequence: CTT
gtaagcaaggggaaaagtgg

SEQ ID NO: 370221 - DNA, 20 bp, Artificial Sequence
  Description of Artificial Sequence: Synthetic oligonucleotide
  Target: LAMA2; (+) strand; PAM type: YTN; PAM sequence: TTG
taagcaaggggaaaagtggg

SEQ ID NO: 370222 - DNA, 20 bp, Artificial Sequence
  Description of Artificial Sequence: Synthetic oligonucleotide
  Target: LAMA2; (+) strand; PAM type: YTN; PAM sequence: TTG
gaaaagcaaggccatgagga

SEQ ID NO: 370223 - DNA, 20 bp, Artificial Sequence
  Description of Artificial Sequence: Synthetic oligonucleotide
  Target: LAMA2; (+) strand; PAM type: YTN; PAM sequence: TTT
gcacatatgataagaaatga

SEQ ID NO: 370224 - DNA, 20 bp, Artificial Sequence
  Description of Artificial Sequence: Synthetic oligonucleotide
  Target: LAMA2; (+) strand; PAM type: YTN; PAM sequence: TTG
cacatatgataagaaatgag

SEQ ID NO: 370225 - DNA, 20 bp, Artificial Sequence
  Description of Artificial Sequence: Synthetic oligonucleotide
  Target: LAMA2; (+) strand; PAM type: YTN; PAM sequence: TTT
tattctcatggcatggaaca

SEQ ID NO: 370226 - DNA, 20 bp, Artificial Sequence
  Description of Artificial Sequence: Synthetic oligonucleotide
  Target: LAMA2; (+) strand; PAM type: YTN; PAM sequence: TTT
attctcatggcatggaacat

SEQ ID NO: 370227 - DNA, 20 bp, Artificial Sequence
  Description of Artificial Sequence: Synthetic oligonucleotide
  Target: LAMA2; (+) strand; PAM type: YTN; PAM sequence: TTA
ttctcatggcatggaacatc

SEQ ID NO: 370228 - DNA, 20 bp, Artificial Sequence
  Description of Artificial Sequence: Synthetic oligonucleotide
  Target: LAMA2; (+) strand; PAM type: YTN; PAM sequence: TTC
tcatggcatggaacatcatt

SEQ ID NO: 370229 - DNA, 20 bp, Artificial Sequence
  Description of Artificial Sequence: Synthetic oligonucleotide
  Target: LAMA2; (+) strand; PAM type: YTN; PAM sequence: CTC
atggcatggaacatcattac

SEQ ID NO: 370230 - DNA, 20 bp, Artificial Sequence
  Description of Artificial Sequence: Synthetic oligonucleotide
  Target: LAMA2; (+) strand; PAM type: YTN; PAM sequence: TTA
caagcctttcagcagagtag

SEQ ID NO: 370231 - DNA, 20 bp, Artificial Sequence
  Description of Artificial Sequence: Synthetic oligonucleotide
  Target: LAMA2; (+) strand; PAM type: YTN; PAM sequence: CTT
tcagcagagtagtggagtag

SEQ ID NO: 370232 - DNA, 20 bp, Artificial Sequence
  Description of Artificial Sequence: Synthetic oligonucleotide
  Target: LAMA2; (+) strand; PAM type: YTN; PAM sequence: TTT
cagcagagtagtggagtagt

SEQ ID NO: 370233 - DNA, 20 bp, Artificial Sequence
  Description of Artificial Sequence: Synthetic oligonucleotide
  Target: LAMA2; (+) strand; PAM type: YTN; PAM sequence: TTC
agcagagtagtggagtagtg

SEQ ID NO: 370234 - DNA, 20 bp, Artificial Sequence
  Description of Artificial Sequence: Synthetic oligonucleotide
  Target: LAMA2; (+) strand; PAM type: YTN; PAM sequence: CTG
atttacatttttgggttttg

SEQ ID NO: 370235 - DNA, 20 bp, Artificial Sequence
  Description of Artificial Sequence: Synthetic oligonucleotide
  Target: LAMA2; (+) strand; PAM type: YTN; PAM sequence: TTT
acatttttgggttttggggt

SEQ ID NO: 370236 - DNA, 20 bp, Artificial Sequence
  Description of Artificial Sequence: Synthetic oligonucleotide
  Target: LAMA2; (+) strand; PAM type: YTN; PAM sequence: TTA
catttttgggttttggggtg

SEQ ID NO: 370237 - DNA, 20 bp, Artificial Sequence
  Description of Artificial Sequence: Synthetic oligonucleotide
  Target: LAMA2; (+) strand; PAM type: YTN; PAM sequence: TTT
ttgggttttggggtgttttt

SEQ ID NO: 370238 - DNA, 20 bp, Artificial Sequence
  Description of Artificial Sequence: Synthetic oligonucleotide
  Target: LAMA2; (+) strand; PAM type: YTN; PAM sequence: TTT
tgggttttggggtgtttttt

SEQ ID NO: 370239 - DNA, 20 bp, Artificial Sequence
  Description of Artificial Sequence: Synthetic oligonucleotide
  Target: LAMA2; (+) strand; PAM type: YTN; PAM sequence: TTT
gggttttggggtgttttttg

SEQ ID NO: 370240 - DNA, 20 bp, Artificial Sequence
  Description of Artificial Sequence: Synthetic oligonucleotide
  Target: LAMA2; (+) strand; PAM type: YTN; PAM sequence: TTG
ggttttggggtgttttttgt

SEQ ID NO: 370241 - DNA, 20 bp, Artificial Sequence
  Description of Artificial Sequence: Synthetic oligonucleotide
  Target: LAMA2; (+) strand; PAM type: YTN; PAM sequence: TTT
tggggtgttttttgttgttt

SEQ ID NO: 370242 - DNA, 20 bp, Artificial Sequence
  Description of Artificial Sequence: Synthetic oligonucleotide
  Target: LAMA2; (+) strand; PAM type: YTN; PAM sequence: TTT
ggggtgttttttgttgtttg

SEQ ID NO: 370243 - DNA, 20 bp, Artificial Sequence
  Description of Artificial Sequence: Synthetic oligonucleotide
  Target: LAMA2; (+) strand; PAM type: YTN; PAM sequence: TTG
gggtgttttttgttgtttga

SEQ ID NO: 370244 - DNA, 20 bp, Artificial Sequence
  Description of Artificial Sequence: Synthetic oligonucleotide
  Target: LAMA2; (+) strand; PAM type: YTN; PAM sequence: TTT
tttgttgtttgagacagggt

SEQ ID NO: 370245 - DNA, 20 bp, Artificial Sequence
  Description of Artificial Sequence: Synthetic oligonucleotide
  Target: LAMA2; (+) strand; PAM type: YTN; PAM sequence: TTT
ttgttgtttgagacagggtc

SEQ ID NO: 370246 - DNA, 20 bp, Artificial Sequence
  Description of Artificial Sequence: Synthetic oligonucleotide
  Target: LAMA2; (+) strand; PAM type: YTN; PAM sequence: TTT
tgttgtttgagacagggtct

SEQ ID NO: 370247 - DNA, 20 bp, Artificial Sequence
  Description of Artificial Sequence: Synthetic oligonucleotide
  Target: LAMA2; (+) strand; PAM type: YTN; PAM sequence: TTT
gttgtttgagacagggtctt

SEQ ID NO: 370248 - DNA, 20 bp, Artificial Sequence
  Description of Artificial Sequence: Synthetic oligonucleotide
  Target: LAMA2; (+) strand; PAM type: YTN; PAM sequence: TTG
ttgtttgagacagggtcttg

SEQ ID NO: 370249 - DNA, 20 bp, Artificial Sequence
  Description of Artificial Sequence: Synthetic oligonucleotide
  Target: LAMA2; (+) strand; PAM type: YTN; PAM sequence: TTG
tttgagacagggtcttgctc

SEQ ID NO: 370250 - DNA, 20 bp, Artificial Sequence
  Description of Artificial Sequence: Synthetic oligonucleotide
  Target: LAMA2; (+) strand; PAM type: YTN; PAM sequence: TTT
gagacagggtcttgctctgt

SEQ ID NO: 370251 - DNA, 20 bp, Artificial Sequence
  Description of Artificial Sequence: Synthetic oligonucleotide
  Target: LAMA2; (+) strand; PAM type: YTN; PAM sequence: TTG
agacagggtcttgctctgtc

SEQ ID NO: 370252 - DNA, 20 bp, Artificial Sequence
  Description of Artificial Sequence: Synthetic oligonucleotide
  Target: LAMA2; (+) strand; PAM type: YTN; PAM sequence: CTT
gctctgtcacctaggctgga

SEQ ID NO: 370253 - DNA, 20 bp, Artificial Sequence
  Description of Artificial Sequence: Synthetic oligonucleotide
  Target: LAMA2; (+) strand; PAM type: YTN; PAM sequence: TTG
ctctgtcacctaggctggag

SEQ ID NO: 370254 - DNA, 20 bp, Artificial Sequence
  Description of Artificial Sequence: Synthetic oligonucleotide
  Target: LAMA2; (+) strand; PAM type: YTN; PAM sequence: CTC
tgtcacctaggctggagtgc

SEQ ID NO: 370255 - DNA, 20 bp, Artificial Sequence
  Description of Artificial Sequence: Synthetic oligonucleotide
  Target: LAMA2; (+) strand; PAM type: YTN; PAM sequence: CTG
tcacctaggctggagtgcag

SEQ ID NO: 370256 - DNA, 20 bp, Artificial Sequence
  Description of Artificial Sequence: Synthetic oligonucleotide
  Target: LAMA2; (+) strand; PAM type: YTN; PAM sequence: CTA
ggctggagtgcagtgatgct

SEQ ID NO: 370257 - DNA, 20 bp, Artificial Sequence
  Description of Artificial Sequence: Synthetic oligonucleotide
  Target: LAMA2; (+) strand; PAM type: YTN; PAM sequence: CTG
gagtgcagtgatgctgtcat

SEQ ID NO: 370258 - DNA, 20 bp, Artificial Sequence
  Description of Artificial Sequence: Synthetic oligonucleotide
  Target: LAMA2; (+) strand; PAM type: YTN; PAM sequence: CTG
tcatagcttgctgcagcctc

SEQ ID NO: 370259 - DNA, 20 bp, Artificial Sequence
  Description of Artificial Sequence: Synthetic oligonucleotide
  Target: LAMA2; (+) strand; PAM type: YTN; PAM sequence: CTT
gctgcagcctcaaactcctg

SEQ ID NO: 370260 - DNA, 20 bp, Artificial Sequence
  Description of Artificial Sequence: Synthetic oligonucleotide
  Target: LAMA2; (+) strand; PAM type: YTN; PAM sequence: TTG
ctgcagcctcaaactcctga

SEQ ID NO: 370261 - DNA, 20 bp, Artificial Sequence
  Description of Artificial Sequence: Synthetic oligonucleotide
  Target: LAMA2; (+) strand; PAM type: YTN; PAM sequence: CTG
cagcctcaaactcctgagct

SEQ ID NO: 370262 - DNA, 20 bp, Artificial Sequence
  Description of Artificial Sequence: Synthetic oligonucleotide
  Target: LAMA2; (+) strand; PAM type: YTN; PAM sequence: CTC
aaactcctgagctcaagtga

SEQ ID NO: 370263 - DNA, 20 bp, Artificial Sequence
  Description of Artificial Sequence: Synthetic oligonucleotide
  Target: LAMA2; (+) strand; PAM type: YTN; PAM sequence: CTC
ctgagctcaagtgatcctcc

SEQ ID NO: 370264 - DNA, 20 bp, Artificial Sequence
  Description of Artificial Sequence: Synthetic oligonucleotide
  Target: LAMA2; (+) strand; PAM type: YTN; PAM sequence: CTG
agctcaagtgatcctcctgc

SEQ ID NO: 370265 - DNA, 20 bp, Artificial Sequence
  Description of Artificial Sequence: Synthetic oligonucleotide
  Target: LAMA2; (+) strand; PAM type: YTN; PAM sequence: CTC
aagtgatcctcctgcctcag

SEQ ID NO: 370266 - DNA, 20 bp, Artificial Sequence
  Description of Artificial Sequence: Synthetic oligonucleotide
  Target: LAMA2; (+) strand; PAM type: YTN; PAM sequence: CTC
ctgcctcagcctcctgagta

SEQ ID NO: 370267 - DNA, 20 bp, Artificial Sequence
  Description of Artificial Sequence: Synthetic oligonucleotide
  Target: LAMA2; (+) strand; PAM type: YTN; PAM sequence: CTG
cctcagcctcctgagtagct

SEQ ID NO: 370268 - DNA, 20 bp, Artificial Sequence
  Description of Artificial Sequence: Synthetic oligonucleotide
  Target: LAMA2; (+) strand; PAM type: YTN; PAM sequence: CTC
agcctcctgagtagctggga

SEQ ID NO: 370269 - DNA, 20 bp, Artificial Sequence
  Description of Artificial Sequence: Synthetic oligonucleotide
  Target: LAMA2; (+) strand; PAM type: YTN; PAM sequence: CTC
ctgagtagctgggactacag

SEQ ID NO: 370270 - DNA, 20 bp, Artificial Sequence
  Description of Artificial Sequence: Synthetic oligonucleotide
  Target: LAMA2; (+) strand; PAM type: YTN; PAM sequence: CTG
agtagctgggactacaggtg

SEQ ID NO: 370271 - DNA, 20 bp, Artificial Sequence
  Description of Artificial Sequence: Synthetic oligonucleotide
  Target: LAMA2; (+) strand; PAM type: YTN; PAM sequence: CTG
ggactacaggtgtataccac

SEQ ID NO: 370272 - DNA, 20 bp, Artificial Sequence
  Description of Artificial Sequence: Synthetic oligonucleotide
  Target: LAMA2; (+) strand; PAM type: YTN; PAM sequence: CTA
caggtgtataccaccatgcc

SEQ ID NO: 370273 - DNA, 20 bp, Artificial Sequence
  Description of Artificial Sequence: Synthetic oligonucleotide
  Target: LAMA2; (+) strand; PAM type: YTN; PAM sequence: CTA
tttttttttgtttgttttaa

SEQ ID NO: 370274 - DNA, 20 bp, Artificial Sequence
  Description of Artificial Sequence: Synthetic oligonucleotide
  Target: LAMA2; (+) strand; PAM type: YTN; PAM sequence: TTT
ttttttgtttgttttaatag

SEQ ID NO: 370275 - DNA, 20 bp, Artificial Sequence
  Description of Artificial Sequence: Synthetic oligonucleotide
  Target: LAMA2; (+) strand; PAM type: YTN; PAM sequence: TTT
tttttgtttgttttaataga

SEQ ID NO: 370276 - DNA, 20 bp, Artificial Sequence
  Description of Artificial Sequence: Synthetic oligonucleotide
  Target: LAMA2; (+) strand; PAM type: YTN; PAM sequence: TTT
ttttgtttgttttaatagag

SEQ ID NO: 370277 - DNA, 20 bp, Artificial Sequence
  Description of Artificial Sequence: Synthetic oligonucleotide
  Target: LAMA2; (+) strand; PAM type: YTN; PAM sequence: TTT
tttgtttgttttaatagaga

SEQ ID NO: 370278 - DNA, 20 bp, Artificial Sequence
  Description of Artificial Sequence: Synthetic oligonucleotide
  Target: LAMA2; (+) strand; PAM type: YTN; PAM sequence: TTT
ttgtttgttttaatagagac

SEQ ID NO: 370279 - DNA, 20 bp, Artificial Sequence
  Description of Artificial Sequence: Synthetic oligonucleotide
  Target: LAMA2; (+) strand; PAM type: YTN; PAM sequence: TTT
tgtttgttttaatagagaca

SEQ ID NO: 370280 - DNA, 20 bp, Artificial Sequence
  Description of Artificial Sequence: Synthetic oligonucleotide
  Target: LAMA2; (+) strand; PAM type: YTN; PAM sequence: TTT
gtttgttttaatagagacaa

SEQ ID NO: 370281 - DNA, 20 bp, Artificial Sequence
  Description of Artificial Sequence: Synthetic oligonucleotide
  Target: LAMA2; (+) strand; PAM type: YTN; PAM sequence: TTG
tttgttttaatagagacaag

SEQ ID NO: 370282 - DNA, 20 bp, Artificial Sequence
  Description of Artificial Sequence: Synthetic oligonucleotide
  Target: LAMA2; (+) strand; PAM type: YTN; PAM sequence: TTT
gttttaatagagacaagatc

SEQ ID NO: 370283 - DNA, 20 bp, Artificial Sequence
  Description of Artificial Sequence: Synthetic oligonucleotide
  Target: LAMA2; (+) strand; PAM type: YTN; PAM sequence: TTG
ttttaatagagacaagatct

SEQ ID NO: 370284 - DNA, 20 bp, Artificial Sequence
  Description of Artificial Sequence: Synthetic oligonucleotide
  Target: LAMA2; (+) strand; PAM type: YTN; PAM sequence: TTT
taatagagacaagatctcaa

SEQ ID NO: 370285 - DNA, 20 bp, Artificial Sequence
  Description of Artificial Sequence: Synthetic oligonucleotide
  Target: LAMA2; (+) strand; PAM type: YTN; PAM sequence: TTT
aatagagacaagatctcaat

SEQ ID NO: 370286 - DNA, 20 bp, Artificial Sequence
  Description of Artificial Sequence: Synthetic oligonucleotide
  Target: LAMA2; (+) strand; PAM type: YTN; PAM sequence: TTA
atagagacaagatctcaata

SEQ ID NO: 370287 - DNA, 20 bp, Artificial Sequence
  Description of Artificial Sequence: Synthetic oligonucleotide
  Target: LAMA2; (+) strand; PAM type: YTN; PAM sequence: CTC
aatatgttgcacaggctgat

SEQ ID NO: 370288 - DNA, 20 bp, Artificial Sequence
  Description of Artificial Sequence: Synthetic oligonucleotide
  Target: LAMA2; (+) strand; PAM type: YTN; PAM sequence: TTG
cacaggctgatctcgaactc

SEQ ID NO: 370289 - DNA, 20 bp, Artificial Sequence
  Description of Artificial Sequence: Synthetic oligonucleotide
  Target: LAMA2; (+) strand; PAM type: YTN; PAM sequence: CTG
atctcgaactcctgagctca

SEQ ID NO: 370290 - DNA, 20 bp, Artificial Sequence
  Description of Artificial Sequence: Synthetic oligonucleotide
  Target: LAMA2; (+) strand; PAM type: YTN; PAM sequence: CTC
gaactcctgagctcaagcaa

SEQ ID NO: 370291 - DNA, 20 bp, Artificial Sequence
  Description of Artificial Sequence: Synthetic oligonucleotide
  Target: LAMA2; (+) strand; PAM type: YTN; PAM sequence: CTC
ctgagctcaagcaatcctcc

SEQ ID NO: 370292 - DNA, 20 bp, Artificial Sequence
  Description of Artificial Sequence: Synthetic oligonucleotide
  Target: LAMA2; (+) strand; PAM type: YTN; PAM sequence: CTG
agctcaagcaatcctcccac

SEQ ID NO: 370293 - DNA, 20 bp, Artificial Sequence
  Description of Artificial Sequence: Synthetic oligonucleotide
  Target: LAMA2; (+) strand; PAM type: YTN; PAM sequence: CTC
aagcaatcctcccacctcag

SEQ ID NO: 370294 - DNA, 20 bp, Artificial Sequence
  Description of Artificial Sequence: Synthetic oligonucleotide
  Target: LAMA2; (+) strand; PAM type: YTN; PAM sequence: CTC
ccacctcagcctcccaaagt

SEQ ID NO: 370295 - DNA, 20 bp, Artificial Sequence
  Description of Artificial Sequence: Synthetic oligonucleotide
  Target: LAMA2; (+) strand; PAM type: YTN; PAM sequence: CTC
agcctcccaaagttctgggg

SEQ ID NO: 370296 - DNA, 20 bp, Artificial Sequence
  Description of Artificial Sequence: Synthetic oligonucleotide
  Target: LAMA2; (+) strand; PAM type: YTN; PAM sequence: CTC
ccaaagttctggggttacag

SEQ ID NO: 370297 - DNA, 20 bp, Artificial Sequence
  Description of Artificial Sequence: Synthetic oligonucleotide
  Target: LAMA2; (+) strand; PAM type: YTN; PAM sequence: TTC
tggggttacaggcatgggcc

SEQ ID NO: 370298 - DNA, 20 bp, Artificial Sequence
  Description of Artificial Sequence: Synthetic oligonucleotide
  Target: LAMA2; (+) strand; PAM type: YTN; PAM sequence: CTG
gggttacaggcatgggccaa

SEQ ID NO: 370299 - DNA, 20 bp, Artificial Sequence
  Description of Artificial Sequence: Synthetic oligonucleotide
  Target: LAMA2; (+) strand; PAM type: YTN; PAM sequence: TTA
caggcatgggccaacgcacc

SEQ ID NO: 370300 - DNA, 20 bp, Artificial Sequence
  Description of Artificial Sequence: Synthetic oligonucleotide
  Target: LAMA2; (+) strand; PAM type: YTN; PAM sequence: CTG
agttacatttttttgaagaa

SEQ ID NO: 370301 - DNA, 20 bp, Artificial Sequence
  Description of Artificial Sequence: Synthetic oligonucleotide
  Target: LAMA2; (+) strand; PAM type: YTN; PAM sequence: TTA
catttttttgaagaaggcat

SEQ ID NO: 370302 - DNA, 20 bp, Artificial Sequence
  Description of Artificial Sequence: Synthetic oligonucleotide
  Target: LAMA2; (+) strand; PAM type: YTN; PAM sequence: TTT
ttttgaagaaggcattatgg

SEQ ID NO: 370303 - DNA, 20 bp, Artificial Sequence
  Description of Artificial Sequence: Synthetic oligonucleotide
  Target: LAMA2; (+) strand; PAM type: YTN; PAM sequence: TTT
tttgaagaaggcattatggc

SEQ ID NO: 370304 - DNA, 20 bp, Artificial Sequence
  Description of Artificial Sequence: Synthetic oligonucleotide
  Target: LAMA2; (+) strand; PAM type: YTN; PAM sequence: TTT
ttgaagaaggcattatggct

SEQ ID NO: 370305 - DNA, 20 bp, Artificial Sequence
  Description of Artificial Sequence: Synthetic oligonucleotide
  Target: LAMA2; (+) strand; PAM type: YTN; PAM sequence: TTT
tgaagaaggcattatggcta

SEQ ID NO: 370306 - DNA, 20 bp, Artificial Sequence
  Description of Artificial Sequence: Synthetic oligonucleotide
  Target: LAMA2; (+) strand; PAM type: YTN; PAM sequence: TTT
gaagaaggcattatggctac

SEQ ID NO: 370307 - DNA, 20 bp, Artificial Sequence
  Description of Artificial Sequence: Synthetic oligonucleotide
  Target: LAMA2; (+) strand; PAM type: YTN; PAM sequence: TTG
aagaaggcattatggctaca

SEQ ID NO: 370308 - DNA, 20 bp, Artificial Sequence
  Description of Artificial Sequence: Synthetic oligonucleotide
  Target: LAMA2; (+) strand; PAM type: YTN; PAM sequence: TTA
tggctacagtaggaagaatg

SEQ ID NO: 370309 - DNA, 20 bp, Artificial Sequence
  Description of Artificial Sequence: Synthetic oligonucleotide
  Target: LAMA2; (+) strand; PAM type: YTN; PAM sequence: CTA
cagtaggaagaatgtgtctt

SEQ ID NO: 370310 - DNA, 20 bp, Artificial Sequence
  Description of Artificial Sequence: Synthetic oligonucleotide
  Target: LAMA2; (+) strand; PAM type: YTN; PAM sequence: CTT
aggagggcatgaataatagg

SEQ ID NO: 370311 - DNA, 20 bp, Artificial Sequence
  Description of Artificial Sequence: Synthetic oligonucleotide
  Target: LAMA2; (+) strand; PAM type: YTN; PAM sequence: TTA
ggagggcatgaataatagga

SEQ ID NO: 370312 - DNA, 20 bp, Artificial Sequence
  Description of Artificial Sequence: Synthetic oligonucleotide
  Target: LAMA2; (+) strand; PAM type: YTN; PAM sequence: TTA
atatgtagttgcagtggaac

SEQ ID NO: 370313 - DNA, 20 bp, Artificial Sequence
  Description of Artificial Sequence: Synthetic oligonucleotide
  Target: LAMA2; (+) strand; PAM type: YTN; PAM sequence: TTG
cagtggaacacagcaatgac

SEQ ID NO: 370314 - DNA, 20 bp, Artificial Sequence
  Description of Artificial Sequence: Synthetic oligonucleotide
  Target: LAMA2; (+) strand; PAM type: YTN; PAM sequence: TTG
ctgttaggatcatggcaggg

SEQ ID NO: 370315 - DNA, 20 bp, Artificial Sequence
  Description of Artificial Sequence: Synthetic oligonucleotide
  Target: LAMA2; (+) strand; PAM type: YTN; PAM sequence: CTG
ttaggatcatggcagggaat

SEQ ID NO: 370316 - DNA, 20 bp, Artificial Sequence
  Description of Artificial Sequence: Synthetic oligonucleotide
  Target: LAMA2; (+) strand; PAM type: YTN; PAM sequence: TTA
ggatcatggcagggaatata

SEQ ID NO: 370317 - DNA, 20 bp, Artificial Sequence
  Description of Artificial Sequence: Synthetic oligonucleotide
  Target: LAMA2; (+) strand; PAM type: YTN; PAM sequence: TTA
gcatattctatatatatttt

SEQ ID NO: 370318 - DNA, 20 bp, Artificial Sequence
  Description of Artificial Sequence: Synthetic oligonucleotide
  Target: LAMA2; (+) strand; PAM type: YTN; PAM sequence: TTC
tatatatattttgatagtag

SEQ ID NO: 370319 - DNA, 20 bp, Artificial Sequence
  Description of Artificial Sequence: Synthetic oligonucleotide
  Target: LAMA2; (+) strand; PAM type: YTN; PAM sequence: CTA
tatatattttgatagtagaa

SEQ ID NO: 370320 - DNA, 20 bp, Artificial Sequence
  Description of Artificial Sequence: Synthetic oligonucleotide
  Target: LAMA2; (+) strand; PAM type: YTN; PAM sequence: TTT
tgatagtagaacaaatagga

SEQ ID NO: 370321 - DNA, 20 bp, Artificial Sequence
  Description of Artificial Sequence: Synthetic oligonucleotide
  Target: LAMA2; (+) strand; PAM type: YTN; PAM sequence: TTT
gatagtagaacaaataggac

SEQ ID NO: 370322 - DNA, 20 bp, Artificial Sequence
  Description of Artificial Sequence: Synthetic oligonucleotide
  Target: LAMA2; (+) strand; PAM type: YTN; PAM sequence: TTG
atagtagaacaaataggact

SEQ ID NO: 370323 - DNA, 20 bp, Artificial Sequence
  Description of Artificial Sequence: Synthetic oligonucleotide
  Target: LAMA2; (+) strand; PAM type: YTN; PAM sequence: CTT
actgattcgagactgtatgt

SEQ ID NO: 370324 - DNA, 20 bp, Artificial Sequence
  Description of Artificial Sequence: Synthetic oligonucleotide
  Target: LAMA2; (+) strand; PAM type: YTN; PAM sequence: TTA
ctgattcgagactgtatgtc

SEQ ID NO: 370325 - DNA, 20 bp, Artificial Sequence
  Description of Artificial Sequence: Synthetic oligonucleotide
  Target: LAMA2; (+) strand; PAM type: YTN; PAM sequence: CTG
attcgagactgtatgtcagg

SEQ ID NO: 370326 - DNA, 20 bp, Artificial Sequence
  Description of Artificial Sequence: Synthetic oligonucleotide
  Target: LAMA2; (+) strand; PAM type: YTN; PAM sequence: TTC
gagactgtatgtcaggggag

SEQ ID NO: 370327 - DNA, 20 bp, Artificial Sequence
  Description of Artificial Sequence: Synthetic oligonucleotide
  Target: LAMA2; (+) strand; PAM type: YTN; PAM sequence: CTG
tatgtcaggggagagattaa

SEQ ID NO: 370328 - DNA, 20 bp, Artificial Sequence
  Description of Artificial Sequence: Synthetic oligonucleotide
  Target: LAMA2; (+) strand; PAM type: YTN; PAM sequence: TTA
aagaaataaagagtttaaga

SEQ ID NO: 370329 - DNA, 20 bp, Artificial Sequence
  Description of Artificial Sequence: Synthetic oligonucleotide
  Target: LAMA2; (+) strand; PAM type: YTN; PAM sequence: TTT
aagaatgagtcatagatgac

SEQ ID NO: 370330 - DNA, 20 bp, Artificial Sequence
  Description of Artificial Sequence: Synthetic oligonucleotide
  Target: LAMA2; (+) strand; PAM type: YTN; PAM sequence: TTA
agaatgagtcatagatgacc

SEQ ID NO: 370331 - DNA, 20 bp, Artificial Sequence
  Description of Artificial Sequence: Synthetic oligonucleotide
  Target: LAMA2; (+) strand; PAM type: YTN; PAM sequence: TTT
gaatgattgatcagttggtt

SEQ ID NO: 370332 - DNA, 20 bp, Artificial Sequence
  Description of Artificial Sequence: Synthetic oligonucleotide
  Target: LAMA2; (+) strand; PAM type: YTN; PAM sequence: TTG
aatgattgatcagttggttg

SEQ ID NO: 370333 - DNA, 20 bp, Artificial Sequence
  Description of Artificial Sequence: Synthetic oligonucleotide
  Target: LAMA2; (+) strand; PAM type: YTN; PAM sequence: TTG
atcagttggttgtggtgtca

SEQ ID NO: 370334 - DNA, 20 bp, Artificial Sequence
  Description of Artificial Sequence: Synthetic oligonucleotide
  Target: LAMA2; (+) strand; PAM type: YTN; PAM sequence: TTG
gttgtggtgtcatttactga

SEQ ID NO: 370335 - DNA, 20 bp, Artificial Sequence
  Description of Artificial Sequence: Synthetic oligonucleotide
  Target: LAMA2; (+) strand; PAM type: YTN; PAM sequence: TTG
tggtgtcatttactgagctg

SEQ ID NO: 370336 - DNA, 20 bp, Artificial Sequence
  Description of Artificial Sequence: Synthetic oligonucleotide
  Target: LAMA2; (+) strand; PAM type: YTN; PAM sequence: TTT
actgagctgaggaatagttg

SEQ ID NO: 370337 - DNA, 20 bp, Artificial Sequence
  Description of Artificial Sequence: Synthetic oligonucleotide
  Target: LAMA2; (+) strand; PAM type: YTN; PAM sequence: TTA
ctgagctgaggaatagttgg

SEQ ID NO: 370338 - DNA, 20 bp, Artificial Sequence
  Description of Artificial Sequence: Synthetic oligonucleotide
  Target: LAMA2; (+) strand; PAM type: YTN; PAM sequence: CTG
agctgaggaatagttggtgt

SEQ ID NO: 370339 - DNA, 20 bp, Artificial Sequence
  Description of Artificial Sequence: Synthetic oligonucleotide
  Target: LAMA2; (+) strand; PAM type: YTN; PAM sequence: CTG
aggaatagttggtgtgtgtg

SEQ ID NO: 370340 - DNA, 20 bp, Artificial Sequence
  Description of Artificial Sequence: Synthetic oligonucleotide
  Target: LAMA2; (+) strand; PAM type: YTN; PAM sequence: TTG
gtgtgtgtgggggggtgggg

SEQ ID NO: 370341 - DNA, 20 bp, Artificial Sequence
  Description of Artificial Sequence: Synthetic oligonucleotide
  Target: LAMA2; (+) strand; PAM type: YTN; PAM sequence: TTT
agaaattttcgatttgaaaa

SEQ ID NO: 370342 - DNA, 20 bp, Artificial Sequence
  Description of Artificial Sequence: Synthetic oligonucleotide
  Target: LAMA2; (+) strand; PAM type: YTN; PAM sequence: TTA
gaaattttcgatttgaaaac

SEQ ID NO: 370343 - DNA, 20 bp, Artificial Sequence
  Description of Artificial Sequence: Synthetic oligonucleotide
  Target: LAMA2; (+) strand; PAM type: YTN; PAM sequence: TTT
tcgatttgaaaacgctgtga

SEQ ID NO: 370344 - DNA, 20 bp, Artificial Sequence
  Description of Artificial Sequence: Synthetic oligonucleotide
  Target: LAMA2; (+) strand; PAM type: YTN; PAM sequence: TTT
cgatttgaaaacgctgtgaa

SEQ ID NO: 370345 - DNA, 20 bp, Artificial Sequence
  Description of Artificial Sequence: Synthetic oligonucleotide
  Target: LAMA2; (+) strand; PAM type: YTN; PAM sequence: TTC
gatttgaaaacgctgtgaag

SEQ ID NO: 370346 - DNA, 20 bp, Artificial Sequence
  Description of Artificial Sequence: Synthetic oligonucleotide
  Target: LAMA2; (+) strand; PAM type: YTN; PAM sequence: TTT
gaaaacgctgtgaagtgtaa

SEQ ID NO: 370347 - DNA, 20 bp, Artificial Sequence
  Description of Artificial Sequence: Synthetic oligonucleotide
  Target: LAMA2; (+) strand; PAM type: YTN; PAM sequence: TTG
aaaacgctgtgaagtgtaaa

SEQ ID NO: 370348 - DNA, 20 bp, Artificial Sequence
  Description of Artificial Sequence: Synthetic oligonucleotide
  Target: LAMA2; (+) strand; PAM type: YTN; PAM sequence: CTG
tgaagtgtaaatgtcaatgt

SEQ ID NO: 370349 - DNA, 20 bp, Artificial Sequence
  Description of Artificial Sequence: Synthetic oligonucleotide
  Target: LAMA2; (+) strand; PAM type: YTN; PAM sequence: TTT
ataatattcaggtcttaaat

SEQ ID NO: 370350 - DNA, 20 bp, Artificial Sequence
  Description of Artificial Sequence: Synthetic oligonucleotide
  Target: LAMA2; (+) strand; PAM type: YTN; PAM sequence: TTA
taatattcaggtcttaaatt

SEQ ID NO: 370351 - DNA, 20 bp, Artificial Sequence
  Description of Artificial Sequence: Synthetic oligonucleotide
  Target: LAMA2; (+) strand; PAM type: YTN; PAM sequence: TTC
aggtcttaaattcagcatgt

SEQ ID NO: 370352 - DNA, 20 bp, Artificial Sequence
  Description of Artificial Sequence: Synthetic oligonucleotide
  Target: LAMA2; (+) strand; PAM type: YTN; PAM sequence: CTT
aaattcagcatgtctgtctg

SEQ ID NO: 370353 - DNA, 20 bp, Artificial Sequence
  Description of Artificial Sequence: Synthetic oligonucleotide
  Target: LAMA2; (+) strand; PAM type: YTN; PAM sequence: TTA
aattcagcatgtctgtctgg

SEQ ID NO: 370354 - DNA, 20 bp, Artificial Sequence
  Description of Artificial Sequence: Synthetic oligonucleotide
  Target: LAMA2; (+) strand; PAM type: YTN; PAM sequence: TTC
agcatgtctgtctggtctag

SEQ ID NO: 370355 - DNA, 20 bp, Artificial Sequence
  Description of Artificial Sequence: Synthetic oligonucleotide
  Target: LAMA2; (+) strand; PAM type: YTN; PAM sequence: CTG
tctggtctagagatatgttt

SEQ ID NO: 370356 - DNA, 20 bp, Artificial Sequence
  Description of Artificial Sequence: Synthetic oligonucleotide
  Target: LAMA2; (+) strand; PAM type: YTN; PAM sequence: CTG
gtctagagatatgtttttgg

SEQ ID NO: 370357 - DNA, 20 bp, Artificial Sequence
  Description of Artificial Sequence: Synthetic oligonucleotide
  Target: LAMA2; (+) strand; PAM type: YTN; PAM sequence: CTA
gagatatgtttttggaaggc

SEQ ID NO: 370358 - DNA, 20 bp, Artificial Sequence
  Description of Artificial Sequence: Synthetic oligonucleotide
  Target: LAMA2; (+) strand; PAM type: YTN; PAM sequence: TTT
ttggaaggcgtcataaacta

SEQ ID NO: 370359 - DNA, 20 bp, Artificial Sequence
  Description of Artificial Sequence: Synthetic oligonucleotide
  Target: LAMA2; (+) strand; PAM type: YTN; PAM sequence: TTT
tggaaggcgtcataaactat

SEQ ID NO: 370360 - DNA, 20 bp, Artificial Sequence
  Description of Artificial Sequence: Synthetic oligonucleotide
  Target: LAMA2; (+) strand; PAM type: YTN; PAM sequence: TTT
ggaaggcgtcataaactatg

SEQ ID NO: 370361 - DNA, 20 bp, Artificial Sequence
  Description of Artificial Sequence: Synthetic oligonucleotide
  Target: LAMA2; (+) strand; PAM type: YTN; PAM sequence: TTG
gaaggcgtcataaactatgg

SEQ ID NO: 370362 - DNA, 20 bp, Artificial Sequence
  Description of Artificial Sequence: Synthetic oligonucleotide
  Target: LAMA2; (+) strand; PAM type: YTN; PAM sequence: CTA
tggaactgaataaaattacc

SEQ ID NO: 370363 - DNA, 20 bp, Artificial Sequence
  Description of Artificial Sequence: Synthetic oligonucleotide
  Target: LAMA2; (+) strand; PAM type: YTN; PAM sequence: CTG
aataaaattacccaggagaa

SEQ ID NO: 370364 - DNA, 20 bp, Artificial Sequence
  Description of Artificial Sequence: Synthetic oligonucleotide
  Target: LAMA2; (+) strand; PAM type: YTN; PAM sequence: TTA
cccaggagaaagtgcaattg

SEQ ID NO: 370365 - DNA, 20 bp, Artificial Sequence
  Description of Artificial Sequence: Synthetic oligonucleotide
  Target: LAMA2; (+) strand; PAM type: YTN; PAM sequence: TTG
atttaaaaaagagagaaaaa

SEQ ID NO: 370366 - DNA, 20 bp, Artificial Sequence
  Description of Artificial Sequence: Synthetic oligonucleotide
  Target: LAMA2; (+) strand; PAM type: YTN; PAM sequence: TTT
aaaaaagagagaaaaatagc

SEQ ID NO: 370367 - DNA, 20 bp, Artificial Sequence
  Description of Artificial Sequence: Synthetic oligonucleotide
  Target: LAMA2; (+) strand; PAM type: YTN; PAM sequence: TTA
aaaaagagagaaaaatagcc

SEQ ID NO: 370368 - DNA, 20 bp, Artificial Sequence
  Description of Artificial Sequence: Synthetic oligonucleotide
  Target: LAMA2; (+) strand; PAM type: YTN; PAM sequence: CTG
aggagctcctgacgttaaga

SEQ ID NO: 370369 - DNA, 20 bp, Artificial Sequence
  Description of Artificial Sequence: Synthetic oligonucleotide
  Target: LAMA2; (+) strand; PAM type: YTN; PAM sequence: CTC
ctgacgttaagaagcagggt

SEQ ID NO: 370370 - DNA, 20 bp, Artificial Sequence
  Description of Artificial Sequence: Synthetic oligonucleotide
  Target: LAMA2; (+) strand; PAM type: YTN; PAM sequence: CTG
acgttaagaagcagggtcaa

SEQ ID NO: 370371 - DNA, 20 bp, Artificial Sequence
  Description of Artificial Sequence: Synthetic oligonucleotide
  Target: LAMA2; (+) strand; PAM type: YTN; PAM sequence: TTA
agaagcagggtcaaagcaga

SEQ ID NO: 370372 - DNA, 20 bp, Artificial Sequence
  Description of Artificial Sequence: Synthetic oligonucleotide
  Target: LAMA2; (+) strand; PAM type: YTN; PAM sequence: CTA
gaaatttgggaagtgtgatg

SEQ ID NO: 370373 - DNA, 20 bp, Artificial Sequence
  Description of Artificial Sequence: Synthetic oligonucleotide
  Target: LAMA2; (+) strand; PAM type: YTN; PAM sequence: TTT
gggaagtgtgatgtcatgaa

SEQ ID NO: 370374 - DNA, 20 bp, Artificial Sequence
  Description of Artificial Sequence: Synthetic oligonucleotide
  Target: LAMA2; (+) strand; PAM type: YTN; PAM sequence: TTG
ggaagtgtgatgtcatgaag

SEQ ID NO: 370375 - DNA, 20 bp, Artificial Sequence
  Description of Artificial Sequence: Synthetic oligonucleotide
  Target: LAMA2; (+) strand; PAM type: YTN; PAM sequence: TTG
agaaaagaaattgtgggagg

SEQ ID NO: 370376 - DNA, 20 bp, Artificial Sequence
  Description of Artificial Sequence: Synthetic oligonucleotide
  Target: LAMA2; (+) strand; PAM type: YTN; PAM sequence: TTG
tgggaggaaaaggagtcagc

SEQ ID NO: 370377 - DNA, 20 bp, Artificial Sequence
  Description of Artificial Sequence: Synthetic oligonucleotide
  Target: LAMA2; (+) strand; PAM type: YTN; PAM sequence: CTA
ggcccaaggctgatgaaagg

SEQ ID NO: 370378 - DNA, 20 bp, Artificial Sequence
  Description of Artificial Sequence: Synthetic oligonucleotide
  Target: LAMA2; (+) strand; PAM type: YTN; PAM sequence: CTG
atgaaaggttggataaaatg

SEQ ID NO: 370379 - DNA, 20 bp, Artificial Sequence
  Description of Artificial Sequence: Synthetic oligonucleotide
  Target: LAMA2; (+) strand; PAM type: YTN; PAM sequence: TTG
gataaaatgcaattgcagaa

SEQ ID NO: 370380 - DNA, 20 bp, Artificial Sequence
  Description of Artificial Sequence: Synthetic oligonucleotide
  Target: LAMA2; (+) strand; PAM type: YTN; PAM sequence: TTG
cagaattgtccatcgaattt

SEQ ID NO: 370381 - DNA, 20 bp, Artificial Sequence
  Description of Artificial Sequence: Synthetic oligonucleotide
  Target: LAMA2; (+) strand; PAM type: YTN; PAM sequence: TTG
tccatcgaatttggctgcat

SEQ ID NO: 370382 - DNA, 20 bp, Artificial Sequence
  Description of Artificial Sequence: Synthetic oligonucleotide
  Target: LAMA2; (+) strand; PAM type: YTN; PAM sequence: TTT
ggctgcatggaatttggtga

SEQ ID NO: 370383 - DNA, 20 bp, Artificial Sequence
  Description of Artificial Sequence: Synthetic oligonucleotide
  Target: LAMA2; (+) strand; PAM type: YTN; PAM sequence: TTG
gctgcatggaatttggtgac

SEQ ID NO: 370384 - DNA, 20 bp, Artificial Sequence
  Description of Artificial Sequence: Synthetic oligonucleotide
  Target: LAMA2; (+) strand; PAM type: YTN; PAM sequence: CTG
catggaatttggtgacaagg

SEQ ID NO: 370385 - DNA, 20 bp, Artificial Sequence
  Description of Artificial Sequence: Synthetic oligonucleotide
  Target: LAMA2; (+) strand; PAM type: YTN; PAM sequence: TTT
ggtgacaaggacaagagcag

SEQ ID NO: 370386 - DNA, 20 bp, Artificial Sequence
  Description of Artificial Sequence: Synthetic oligonucleotide
  Target: LAMA2; (+) strand; PAM type: YTN; PAM sequence: TTG
gtgacaaggacaagagcagt

SEQ ID NO: 370387 - DNA, 20 bp, Artificial Sequence
  Description of Artificial Sequence: Synthetic oligonucleotide
  Target: LAMA2; (+) strand; PAM type: YTN; PAM sequence: TTT
taattgagaggtggtgacac

SEQ ID NO: 370388 - DNA, 20 bp, Artificial Sequence
  Description of Artificial Sequence: Synthetic oligonucleotide
  Target: LAMA2; (+) strand; PAM type: YTN; PAM sequence: TTT
aattgagaggtggtgacaca

SEQ ID NO: 370389 - DNA, 20 bp, Artificial Sequence
  Description of Artificial Sequence: Synthetic oligonucleotide
  Target: LAMA2; (+) strand; PAM type: YTN; PAM sequence: TTA
attgagaggtggtgacacaa

SEQ ID NO: 370390 - DNA, 20 bp, Artificial Sequence
  Description of Artificial Sequence: Synthetic oligonucleotide
  Target: LAMA2; (+) strand; PAM type: YTN; PAM sequence: TTG
agaggtggtgacacaaaaca

SEQ ID NO: 370391 - DNA, 20 bp, Artificial Sequence
  Description of Artificial Sequence: Synthetic oligonucleotide
  Target: LAMA2; (+) strand; PAM type: YTN; PAM sequence: TTA
gaatggaatgaagtgtgaaa

SEQ ID NO: 370392 - DNA, 20 bp, Artificial Sequence
  Description of Artificial Sequence: Synthetic oligonucleotide
  Target: LAMA2; (+) strand; PAM type: YTN; PAM sequence: CTT
gttaagagtagtgttactga

SEQ ID NO: 370393 - DNA, 20 bp, Artificial Sequence
  Description of Artificial Sequence: Synthetic oligonucleotide
  Target: LAMA2; (+) strand; PAM type: YTN; PAM sequence: TTG
ttaagagtagtgttactgaa

SEQ ID NO: 370394 - DNA, 20 bp, Artificial Sequence
  Description of Artificial Sequence: Synthetic oligonucleotide
  Target: LAMA2; (+) strand; PAM type: YTN; PAM sequence: TTA
agagtagtgttactgaaaag

SEQ ID NO: 370395 - DNA, 20 bp, Artificial Sequence
  Description of Artificial Sequence: Synthetic oligonucleotide
  Target: LAMA2; (+) strand; PAM type: YTN; PAM sequence: TTA
ctgaaaagaaaaacatagat

SEQ ID NO: 370396 - DNA, 20 bp, Artificial Sequence
  Description of Artificial Sequence: Synthetic oligonucleotide
  Target: LAMA2; (+) strand; PAM type: YTN; PAM sequence: CTG
aaaagaaaaacatagatgac

SEQ ID NO: 370397 - DNA, 20 bp, Artificial Sequence
  Description of Artificial Sequence: Synthetic oligonucleotide
  Target: LAMA2; (+) strand; PAM type: YTN; PAM sequence: CTA
gaaaagttatatgaggctaa

SEQ ID NO: 370398 - DNA, 20 bp, Artificial Sequence
  Description of Artificial Sequence: Synthetic oligonucleotide
  Target: LAMA2; (+) strand; PAM type: YTN; PAM sequence: TTA
tatgaggctaagaggacagt

SEQ ID NO: 370399 - DNA, 20 bp, Artificial Sequence
  Description of Artificial Sequence: Synthetic oligonucleotide
  Target: LAMA2; (+) strand; PAM type: YTN; PAM sequence: CTA
agaggacagttttgtcattt

SEQ ID NO: 370400 - DNA, 20 bp, Artificial Sequence
  Description of Artificial Sequence: Synthetic oligonucleotide
  Target: LAMA2; (+) strand; PAM type: YTN; PAM sequence: TTT
tgtcatttgtgttttgttta

SEQ ID NO: 370401 - DNA, 20 bp, Artificial Sequence
  Description of Artificial Sequence: Synthetic oligonucleotide
  Target: LAMA2; (+) strand; PAM type: YTN; PAM sequence: TTT
gtcatttgtgttttgtttat

SEQ ID NO: 370402 - DNA, 20 bp, Artificial Sequence
  Description of Artificial Sequence: Synthetic oligonucleotide
  Target: LAMA2; (+) strand; PAM type: YTN; PAM sequence: TTG
tcatttgtgttttgtttatt

SEQ ID NO: 370403 - DNA, 20 bp, Artificial Sequence
  Description of Artificial Sequence: Synthetic oligonucleotide
  Target: LAMA2; (+) strand; PAM type: YTN; PAM sequence: TTT
gtgttttgtttatttttgat

SEQ ID NO: 370404 - DNA, 20 bp, Artificial Sequence
  Description of Artificial Sequence: Synthetic oligonucleotide
  Target: LAMA2; (+) strand; PAM type: YTN; PAM sequence: TTG
tgttttgtttatttttgatg

SEQ ID NO: 370405 - DNA, 20 bp, Artificial Sequence
  Description of Artificial Sequence: Synthetic oligonucleotide
  Target: LAMA2; (+) strand; PAM type: YTN; PAM sequence: TTT
tgtttatttttgatggagac

SEQ ID NO: 370406 - DNA, 20 bp, Artificial Sequence
  Description of Artificial Sequence: Synthetic oligonucleotide
  Target: LAMA2; (+) strand; PAM type: YTN; PAM sequence: TTT
gtttatttttgatggagaca

SEQ ID NO: 370407 - DNA, 20 bp, Artificial Sequence
  Description of Artificial Sequence: Synthetic oligonucleotide
  Target: LAMA2; (+) strand; PAM type: YTN; PAM sequence: TTG
tttatttttgatggagacac

SEQ ID NO: 370408 - DNA, 20 bp, Artificial Sequence
  Description of Artificial Sequence: Synthetic oligonucleotide
  Target: LAMA2; (+) strand; PAM type: YTN; PAM sequence: TTT
atttttgatggagacactag

SEQ ID NO: 370409 - DNA, 20 bp, Artificial Sequence
  Description of Artificial Sequence: Synthetic oligonucleotide
  Target: LAMA2; (+) strand; PAM type: YTN; PAM sequence: TTA
tttttgatggagacactaga

SEQ ID NO: 370410 - DNA, 20 bp, Artificial Sequence
  Description of Artificial Sequence: Synthetic oligonucleotide
  Target: LAMA2; (+) strand; PAM type: YTN; PAM sequence: TTT
ttgatggagacactagatca

SEQ ID NO: 370411 - DNA, 20 bp, Artificial Sequence
  Description of Artificial Sequence: Synthetic oligonucleotide
  Target: LAMA2; (+) strand; PAM type: YTN; PAM sequence: TTT
tgatggagacactagatcat

SEQ ID NO: 370412 - DNA, 20 bp, Artificial Sequence
  Description of Artificial Sequence: Synthetic oligonucleotide
  Target: LAMA2; (+) strand; PAM type: YTN; PAM sequence: TTT
gatggagacactagatcata

SEQ ID NO: 370413 - DNA, 20 bp, Artificial Sequence
  Description of Artificial Sequence: Synthetic oligonucleotide
  Target: LAMA2; (+) strand; PAM type: YTN; PAM sequence: TTG
atggagacactagatcatat

SEQ ID NO: 370414 - DNA, 20 bp, Artificial Sequence
  Description of Artificial Sequence: Synthetic oligonucleotide
  Target: LAMA2; (+) strand; PAM type: YTN; PAM sequence: CTA
gatcatatttttttgtgctg

SEQ ID NO: 370415 - DNA, 20 bp, Artificial Sequence
  Description of Artificial Sequence: Synthetic oligonucleotide
  Target: LAMA2; (+) strand; PAM type: YTN; PAM sequence: TTT
ttttgtgctgatagtaatga

SEQ ID NO: 370416 - DNA, 20 bp, Artificial Sequence
  Description of Artificial Sequence: Synthetic oligonucleotide
  Target: LAMA2; (+) strand; PAM type: YTN; PAM sequence: TTT
tttgtgctgatagtaatgac

SEQ ID NO: 370417 - DNA, 20 bp, Artificial Sequence
  Description of Artificial Sequence: Synthetic oligonucleotide
  Target: LAMA2; (+) strand; PAM type: YTN; PAM sequence: TTT
ttgtgctgatagtaatgacc

SEQ ID NO: 370418 - DNA, 20 bp, Artificial Sequence
  Description of Artificial Sequence: Synthetic oligonucleotide
  Target: LAMA2; (+) strand; PAM type: YTN; PAM sequence: TTT
tgtgctgatagtaatgaccc

SEQ ID NO: 370419 - DNA, 20 bp, Artificial Sequence
  Description of Artificial Sequence: Synthetic oligonucleotide
  Target: LAMA2; (+) strand; PAM type: YTN; PAM sequence: TTT
gtgctgatagtaatgaccca

SEQ ID NO: 370420 - DNA, 20 bp, Artificial Sequence
  Description of Artificial Sequence: Synthetic oligonucleotide
  Target: LAMA2; (+) strand; PAM type: YTN; PAM sequence: TTG
tgctgatagtaatgacccag

SEQ ID NO: 370421 - DNA, 20 bp, Artificial Sequence
  Description of Artificial Sequence: Synthetic oligonucleotide
  Target: LAMA2; (+) strand; PAM type: YTN; PAM sequence: CTG
atagtaatgacccagtagaa

SEQ ID NO: 370422 - DNA, 20 bp, Artificial Sequence
  Description of Artificial Sequence: Synthetic oligonucleotide
  Target: LAMA2; (+) strand; PAM type: YTN; PAM sequence: TTA
ttactaatccatcagagaga

SEQ ID NO: 370423 - DNA, 20 bp, Artificial Sequence
  Description of Artificial Sequence: Synthetic oligonucleotide
  Target: LAMA2; (+) strand; PAM type: YTN; PAM sequence: TTA
ctaatccatcagagagagtg

SEQ ID NO: 370424 - DNA, 20 bp, Artificial Sequence
  Description of Artificial Sequence: Synthetic oligonucleotide
  Target: LAMA2; (+) strand; PAM type: YTN; PAM sequence: CTA
atccatcagagagagtgaat

SEQ ID NO: 370425 - DNA, 20 bp, Artificial Sequence
  Description of Artificial Sequence: Synthetic oligonucleotide
  Target: LAMA2; (+) strand; PAM type: YTN; PAM sequence: TTG
agaagataacagatgctgga

SEQ ID NO: 370426 - DNA, 20 bp, Artificial Sequence
  Description of Artificial Sequence: Synthetic oligonucleotide
  Target: LAMA2; (+) strand; PAM type: YTN; PAM sequence: CTG
gaatcagatgacaagtggag

SEQ ID NO: 370427 - DNA, 20 bp, Artificial Sequence
  Description of Artificial Sequence: Synthetic oligonucleotide
  Target: LAMA2; (+) strand; PAM type: YTN; PAM sequence: TTT
ctttaggaggaaggacccca

SEQ ID NO: 370428 - DNA, 20 bp, Artificial Sequence
  Description of Artificial Sequence: Synthetic oligonucleotide
  Target: LAMA2; (+) strand; PAM type: YTN; PAM sequence: TTC
tttaggaggaaggaccccac

SEQ ID NO: 370429 - DNA, 20 bp, Artificial Sequence
  Description of Artificial Sequence: Synthetic oligonucleotide
  Target: LAMA2; (+) strand; PAM type: YTN; PAM sequence: CTT
taggaggaaggaccccacat

SEQ ID NO: 370430 - DNA, 20 bp, Artificial Sequence
  Description of Artificial Sequence: Synthetic oligonucleotide
  Target: LAMA2; (+) strand; PAM type: YTN; PAM sequence: TTT
aggaggaaggaccccacatt

SEQ ID NO: 370431 - DNA, 20 bp, Artificial Sequence
  Description of Artificial Sequence: Synthetic oligonucleotide
  Target: LAMA2; (+) strand; PAM type: YTN; PAM sequence: TTA
ggaggaaggaccccacattc

SEQ ID NO: 370432 - DNA, 20 bp, Artificial Sequence
  Description of Artificial Sequence: Synthetic oligonucleotide
  Target: LAMA2; (+) strand; PAM type: YTN; PAM sequence: TTC
cccacatcacttgtttggaa

SEQ ID NO: 370433 - DNA, 20 bp, Artificial Sequence
  Description of Artificial Sequence: Synthetic oligonucleotide
  Target: LAMA2; (+) strand; PAM type: YTN; PAM sequence: CTT
gtttggaatgggaatatggc

SEQ ID NO: 370434 - DNA, 20 bp, Artificial Sequence
  Description of Artificial Sequence: Synthetic oligonucleotide
  Target: LAMA2; (+) strand; PAM type: YTN; PAM sequence: TTG
tttggaatgggaatatggca

SEQ ID NO: 370435 - DNA, 20 bp, Artificial Sequence
  Description of Artificial Sequence: Synthetic oligonucleotide
  Target: LAMA2; (+) strand; PAM type: YTN; PAM sequence: TTT
ggaatgggaatatggcaaca

SEQ ID NO: 370436 - DNA, 20 bp, Artificial Sequence
  Description of Artificial Sequence: Synthetic oligonucleotide
  Target: LAMA2; (+) strand; PAM type: YTN; PAM sequence: TTG
gaatgggaatatggcaacaa

SEQ ID NO: 370437 - DNA, 20 bp, Artificial Sequence
  Description of Artificial Sequence: Synthetic oligonucleotide
  Target: LAMA2; (+) strand; PAM type: YTN; PAM sequence: TTT
ggagatatatgcttagatct

SEQ ID NO: 370438 - DNA, 20 bp, Artificial Sequence
  Description of Artificial Sequence: Synthetic oligonucleotide
  Target: LAMA2; (+) strand; PAM type: YTN; PAM sequence: TTG
gagatatatgcttagatctc

SEQ ID NO: 370439 - DNA, 20 bp, Artificial Sequence
  Description of Artificial Sequence: Synthetic oligonucleotide
  Target: LAMA2; (+) strand; PAM type: YTN; PAM sequence: CTT
agatctctggacttgttagt

SEQ ID NO: 370440 - DNA, 20 bp, Artificial Sequence
  Description of Artificial Sequence: Synthetic oligonucleotide
  Target: LAMA2; (+) strand; PAM type: YTN; PAM sequence: TTA
gatctctggacttgttagtg

SEQ ID NO: 370441 - DNA, 20 bp, Artificial Sequence
  Description of Artificial Sequence: Synthetic oligonucleotide
  Target: LAMA2; (+) strand; PAM type: YTN; PAM sequence: CTC
tggacttgttagtgcaaagg

SEQ ID NO: 370442 - DNA, 20 bp, Artificial Sequence
  Description of Artificial Sequence: Synthetic oligonucleotide
  Target: LAMA2; (+) strand; PAM type: YTN; PAM sequence: CTG
gacttgttagtgcaaaggca

SEQ ID NO: 370443 - DNA, 20 bp, Artificial Sequence
  Description of Artificial Sequence: Synthetic oligonucleotide
  Target: LAMA2; (+) strand; PAM type: YTN; PAM sequence: CTT
gttagtgcaaaggcagcttt

SEQ ID NO: 370444 - DNA, 20 bp, Artificial Sequence
  Description of Artificial Sequence: Synthetic oligonucleotide
  Target: LAMA2; (+) strand; PAM type: YTN; PAM sequence: TTG
ttagtgcaaaggcagcttta

SEQ ID NO: 370445 - DNA, 20 bp, Artificial Sequence
  Description of Artificial Sequence: Synthetic oligonucleotide
  Target: LAMA2; (+) strand; PAM type: YTN; PAM sequence: TTA
gtgcaaaggcagctttaatt

SEQ ID NO: 370446 - DNA, 20 bp, Artificial Sequence
  Description of Artificial Sequence: Synthetic oligonucleotide
  Target: LAMA2; (+) strand; PAM type: YTN; PAM sequence: CTT
taatttttttctgtgagtaa

SEQ ID NO: 370447 - DNA, 20 bp, Artificial Sequence
  Description of Artificial Sequence: Synthetic oligonucleotide
  Target: LAMA2; (+) strand; PAM type: YTN; PAM sequence: TTT
aatttttttctgtgagtaat

SEQ ID NO: 370448 - DNA, 20 bp, Artificial Sequence
  Description of Artificial Sequence: Synthetic oligonucleotide
  Target: LAMA2; (+) strand; PAM type: YTN; PAM sequence: TTA
atttttttctgtgagtaata

SEQ ID NO: 370449 - DNA, 20 bp, Artificial Sequence
  Description of Artificial Sequence: Synthetic oligonucleotide
  Target: LAMA2; (+) strand; PAM type: YTN; PAM sequence: TTT
ttttctgtgagtaataagtt

SEQ ID NO: 370450 - DNA, 20 bp, Artificial Sequence
  Description of Artificial Sequence: Synthetic oligonucleotide
  Target: LAMA2; (+) strand; PAM type: YTN; PAM sequence: TTT
tttctgtgagtaataagtta

SEQ ID NO: 370451 - DNA, 20 bp, Artificial Sequence
  Description of Artificial Sequence: Synthetic oligonucleotide
  Target: LAMA2; (+) strand; PAM type: YTN; PAM sequence: TTT
ttctgtgagtaataagttaa

SEQ ID NO: 370452 - DNA, 20 bp, Artificial Sequence
  Description of Artificial Sequence: Synthetic oligonucleotide
  Target: LAMA2; (+) strand; PAM type: YTN; PAM sequence: TTT
tctgtgagtaataagttaaa

SEQ ID NO: 370453 - DNA, 20 bp, Artificial Sequence
  Description of Artificial Sequence: Synthetic oligonucleotide
  Target: LAMA2; (+) strand; PAM type: YTN; PAM sequence: TTT
ctgtgagtaataagttaaaa

SEQ ID NO: 370454 - DNA, 20 bp, Artificial Sequence
  Description of Artificial Sequence: Synthetic oligonucleotide
  Target: LAMA2; (+) strand; PAM type: YTN; PAM sequence: TTC
tgtgagtaataagttaaaat

SEQ ID NO: 370455 - DNA, 20 bp, Artificial Sequence
  Description of Artificial Sequence: Synthetic oligonucleotide
  Target: LAMA2; (+) strand; PAM type: YTN; PAM sequence: CTG
tgagtaataagttaaaatca

SEQ ID NO: 370456 - DNA, 20 bp, Artificial Sequence
  Description of Artificial Sequence: Synthetic oligonucleotide
  Target: LAMA2; (+) strand; PAM type: YTN; PAM sequence: TTA
aaatcactggctaaaagaga

SEQ ID NO: 370457 - DNA, 20 bp, Artificial Sequence
  Description of Artificial Sequence: Synthetic oligonucleotide
  Target: LAMA2; (+) strand; PAM type: YTN; PAM sequence: CTG
gctaaaagagaggtgtaagg

SEQ ID NO: 370458 - DNA, 20 bp, Artificial Sequence
  Description of Artificial Sequence: Synthetic oligonucleotide
  Target: LAMA2; (+) strand; PAM type: YTN; PAM sequence: CTA
aaagagaggtgtaaggagtt

SEQ ID NO: 370459 - DNA, 20 bp, Artificial Sequence
  Description of Artificial Sequence: Synthetic oligonucleotide
  Target: LAMA2; (+) strand; PAM type: YTN; PAM sequence: TTG
ggaagtttgaagaaagaaga

SEQ ID NO: 370460 - DNA, 20 bp, Artificial Sequence
  Description of Artificial Sequence: Synthetic oligonucleotide
  Target: LAMA2; (+) strand; PAM type: YTN; PAM sequence: TTT
gaagaaagaagacgtggtat

SEQ ID NO: 370461 - DNA, 20 bp, Artificial Sequence
  Description of Artificial Sequence: Synthetic oligonucleotide
  Target: LAMA2; (+) strand; PAM type: YTN; PAM sequence: TTG
aagaaagaagacgtggtatg

SEQ ID NO: 370462 - DNA, 20 bp, Artificial Sequence
  Description of Artificial Sequence: Synthetic oligonucleotide
  Target: LAMA2; (+) strand; PAM type: YTN; PAM sequence: CTG
catttgcagagtattaaaac

SEQ ID NO: 370463 - DNA, 20 bp, Artificial Sequence
  Description of Artificial Sequence: Synthetic oligonucleotide
  Target: LAMA2; (+) strand; PAM type: YTN; PAM sequence: TTT
gcagagtattaaaacaaaac

SEQ ID NO: 370464 - DNA, 20 bp, Artificial Sequence
  Description of Artificial Sequence: Synthetic oligonucleotide
  Target: LAMA2; (+) strand; PAM type: YTN; PAM sequence: TTG
cagagtattaaaacaaaaca

SEQ ID NO: 370465 - DNA, 20 bp, Artificial Sequence
  Description of Artificial Sequence: Synthetic oligonucleotide
  Target: LAMA2; (+) strand; PAM type: YTN; PAM sequence: TTA
aaacaaaacaaaaaaactta

SEQ ID NO: 370466 - DNA, 20 bp, Artificial Sequence
  Description of Artificial Sequence: Synthetic oligonucleotide
  Target: LAMA2; (+) strand; PAM type: YTN; PAM sequence: CTT
attaaggaaaacttcatgaa

SEQ ID NO: 370467 - DNA, 20 bp, Artificial Sequence
  Description of Artificial Sequence: Synthetic oligonucleotide
  Target: LAMA2; (+) strand; PAM type: YTN; PAM sequence: TTA
ttaaggaaaacttcatgaat

SEQ ID NO: 370468 - DNA, 20 bp, Artificial Sequence
  Description of Artificial Sequence: Synthetic oligonucleotide
  Target: LAMA2; (+) strand; PAM type: YTN; PAM sequence: TTA
aggaaaacttcatgaatatc

SEQ ID NO: 370469 - DNA, 20 bp, Artificial Sequence
  Description of Artificial Sequence: Synthetic oligonucleotide
  Target: LAMA2; (+) strand; PAM type: YTN; PAM sequence: CTT
catgaatatctgtctgaaaa

SEQ ID NO: 370470 - DNA, 20 bp, Artificial Sequence
  Description of Artificial Sequence: Synthetic oligonucleotide
  Target: LAMA2; (+) strand; PAM type: YTN; PAM sequence: TTC
atgaatatctgtctgaaaac

SEQ ID NO: 370471 - DNA, 20 bp, Artificial Sequence
  Description of Artificial Sequence: Synthetic oligonucleotide
  Target: LAMA2; (+) strand; PAM type: YTN; PAM sequence: CTG
tctgaaaacagtagattagt

SEQ ID NO: 370472 - DNA, 20 bp, Artificial Sequence
  Description of Artificial Sequence: Synthetic oligonucleotide
  Target: LAMA2; (+) strand; PAM type: YTN; PAM sequence: CTG
aaaacagtagattagttctc

SEQ ID NO: 370473 - DNA, 20 bp, Artificial Sequence
  Description of Artificial Sequence: Synthetic oligonucleotide
  Target: LAMA2; (+) strand; PAM type: YTN; PAM sequence: TTA
gttctctcccttttctcaac

SEQ ID NO: 370474 - DNA, 20 bp, Artificial Sequence
  Description of Artificial Sequence: Synthetic oligonucleotide
  Target: LAMA2; (+) strand; PAM type: YTN; PAM sequence: TTC
tctcccttttctcaacatcc

SEQ ID NO: 370475 - DNA, 20 bp, Artificial Sequence
  Description of Artificial Sequence: Synthetic oligonucleotide
  Target: LAMA2; (+) strand; PAM type: YTN; PAM sequence: CTC
tcccttttctcaacatcctt

SEQ ID NO: 370476 - DNA, 20 bp, Artificial Sequence
  Description of Artificial Sequence: Synthetic oligonucleotide
  Target: LAMA2; (+) strand; PAM type: YTN; PAM sequence: CTC
ccttttctcaacatccttaa

SEQ ID NO: 370477 - DNA, 20 bp, Artificial Sequence
  Description of Artificial Sequence: Synthetic oligonucleotide
  Target: LAMA2; (+) strand; PAM type: YTN; PAM sequence: CTT
ttctcaacatccttaatttc

SEQ ID NO: 370478 - DNA, 20 bp, Artificial Sequence
  Description of Artificial Sequence: Synthetic oligonucleotide
  Target: LAMA2; (+) strand; PAM type: YTN; PAM sequence: TTT
tctcaacatccttaatttct

SEQ ID NO: 370479 - DNA, 20 bp, Artificial Sequence
  Description of Artificial Sequence: Synthetic oligonucleotide
  Target: LAMA2; (+) strand; PAM type: YTN; PAM sequence: TTT
ctcaacatccttaatttcta

SEQ ID NO: 370480 - DNA, 20 bp, Artificial Sequence
  Description of Artificial Sequence: Synthetic oligonucleotide
  Target: LAMA2; (+) strand; PAM type: YTN; PAM sequence: TTC
tcaacatccttaatttctac

SEQ ID NO: 370481 - DNA, 20 bp, Artificial Sequence
  Description of Artificial Sequence: Synthetic oligonucleotide
  Target: LAMA2; (+) strand; PAM type: YTN; PAM sequence: CTC
aacatccttaatttctaccc

SEQ ID NO: 370482 - DNA, 20 bp, Artificial Sequence
  Description of Artificial Sequence: Synthetic oligonucleotide
  Target: LAMA2; (+) strand; PAM type: YTN; PAM sequence: CTT
aatttctacccccttatgaa

SEQ ID NO: 370483 - DNA, 20 bp, Artificial Sequence
  Description of Artificial Sequence: Synthetic oligonucleotide
  Target: LAMA2; (+) strand; PAM type: YTN; PAM sequence: TTA
atttctacccccttatgaat

SEQ ID NO: 370484 - DNA, 20 bp, Artificial Sequence
  Description of Artificial Sequence: Synthetic oligonucleotide
  Target: LAMA2; (+) strand; PAM type: YTN; PAM sequence: TTT
ctacccccttatgaatatgt

SEQ ID NO: 370485 - DNA, 20 bp, Artificial Sequence
  Description of Artificial Sequence: Synthetic oligonucleotide
  Target: LAMA2; (+) strand; PAM type: YTN; PAM sequence: TTC
tacccccttatgaatatgta

SEQ ID NO: 370486 - DNA, 20 bp, Artificial Sequence
  Description of Artificial Sequence: Synthetic oligonucleotide
  Target: LAMA2; (+) strand; PAM type: YTN; PAM sequence: CTA
cccccttatgaatatgtagc

SEQ ID NO: 370487 - DNA, 20 bp, Artificial Sequence
  Description of Artificial Sequence: Synthetic oligonucleotide
  Target: LAMA2; (+) strand; PAM type: YTN; PAM sequence: CTT
atgaatatgtagcttcacca

SEQ ID NO: 370488 - DNA, 20 bp, Artificial Sequence
  Description of Artificial Sequence: Synthetic oligonucleotide
  Target: LAMA2; (+) strand; PAM type: YTN; PAM sequence: TTA
tgaatatgtagcttcaccag

SEQ ID NO: 370489 - DNA, 20 bp, Artificial Sequence
  Description of Artificial Sequence: Synthetic oligonucleotide
  Target: LAMA2; (+) strand; PAM type: YTN; PAM sequence: CTT
caccagcttttaaaaatgta

SEQ ID NO: 370490 - DNA, 20 bp, Artificial Sequence
  Description of Artificial Sequence: Synthetic oligonucleotide
  Target: LAMA2; (+) strand; PAM type: YTN; PAM sequence: TTC
accagcttttaaaaatgtat

SEQ ID NO: 370491 - DNA, 20 bp, Artificial Sequence
  Description of Artificial Sequence: Synthetic oligonucleotide
  Target: LAMA2; (+) strand; PAM type: YTN; PAM sequence: CTT
ttaaaaatgtatattacaga

SEQ ID NO: 370492 - DNA, 20 bp, Artificial Sequence
  Description of Artificial Sequence: Synthetic oligonucleotide
  Target: LAMA2; (+) strand; PAM type: YTN; PAM sequence: TTT
taaaaatgtatattacagaa

SEQ ID NO: 370493 - DNA, 20 bp, Artificial Sequence
  Description of Artificial Sequence: Synthetic oligonucleotide
  Target: LAMA2; (+) strand; PAM type: YTN; PAM sequence: TTT
aaaaatgtatattacagaag

SEQ ID NO: 370494 - DNA, 20 bp, Artificial Sequence
  Description of Artificial Sequence: Synthetic oligonucleotide
  Target: LAMA2; (+) strand; PAM type: YTN; PAM sequence: TTA
aaaatgtatattacagaagg

SEQ ID NO: 370495 - DNA, 20 bp, Artificial Sequence
  Description of Artificial Sequence: Synthetic oligonucleotide
  Target: LAMA2; (+) strand; PAM type: YTN; PAM sequence: TTA
cagaaggaaatcacttctat

SEQ ID NO: 370496 - DNA, 20 bp, Artificial Sequence
  Description of Artificial Sequence: Synthetic oligonucleotide
  Target: LAMA2; (+) strand; PAM type: YTN; PAM sequence: CTT
ctataatgaatctagggagg

SEQ ID NO: 370497 - DNA, 20 bp, Artificial Sequence
  Description of Artificial Sequence: Synthetic oligonucleotide
  Target: LAMA2; (+) strand; PAM type: YTN; PAM sequence: TTC
tataatgaatctagggaggc

SEQ ID NO: 370498 - DNA, 20 bp, Artificial Sequence
  Description of Artificial Sequence: Synthetic oligonucleotide
  Target: LAMA2; (+) strand; PAM type: YTN; PAM sequence: CTA
taatgaatctagggaggcaa

SEQ ID NO: 370499 - DNA, 20 bp, Artificial Sequence
  Description of Artificial Sequence: Synthetic oligonucleotide
  Target: LAMA2; (+) strand; PAM type: YTN; PAM sequence: CTA
gggaggcaaaaaatgtaatg

SEQ ID NO: 370500 - DNA, 20 bp, Artificial Sequence
  Description of Artificial Sequence: Synthetic oligonucleotide
  Target: LAMA2; (+) strand; PAM type: YTN; PAM sequence: TTT
aattgggagaaatggaaacg

SEQ ID NO: 370501 - DNA, 20 bp, Artificial Sequence
  Description of Artificial Sequence: Synthetic oligonucleotide
  Target: LAMA2; (+) strand; PAM type: YTN; PAM sequence: TTA
attgggagaaatggaaacgg

SEQ ID NO: 370502 - DNA, 20 bp, Artificial Sequence
  Description of Artificial Sequence: Synthetic oligonucleotide
  Target: LAMA2; (+) strand; PAM type: YTN; PAM sequence: TTG
ggagaaatggaaacggaaca

SEQ ID NO: 370503 - DNA, 20 bp, Artificial Sequence
  Description of Artificial Sequence: Synthetic oligonucleotide
  Target: LAMA2; (+) strand; PAM type: YTN; PAM sequence: TTT
gacaattttgggttggttgt

SEQ ID NO: 370504 - DNA, 20 bp, Artificial Sequence
  Description of Artificial Sequence: Synthetic oligonucleotide
  Target: LAMA2; (+) strand; PAM type: YTN; PAM sequence: TTG
acaattttgggttggttgtg

SEQ ID NO: 370505 - DNA, 20 bp, Artificial Sequence
  Description of Artificial Sequence: Synthetic oligonucleotide
  Target: LAMA2; (+) strand; PAM type: YTN; PAM sequence: TTT
tgggttggttgtgggggttg

SEQ ID NO: 370506 - DNA, 20 bp, Artificial Sequence
  Description of Artificial Sequence: Synthetic oligonucleotide
  Target: LAMA2; (+) strand; PAM type: YTN; PAM sequence: TTT
gggttggttgtgggggttga

SEQ ID NO: 370507 - DNA, 20 bp, Artificial Sequence
  Description of Artificial Sequence: Synthetic oligonucleotide
  Target: LAMA2; (+) strand; PAM type: YTN; PAM sequence: TTG
ggttggttgtgggggttgaa

SEQ ID NO: 370508 - DNA, 20 bp, Artificial Sequence
  Description of Artificial Sequence: Synthetic oligonucleotide
  Target: LAMA2; (+) strand; PAM type: YTN; PAM sequence: TTG
gttgtgggggttgaaaaatg

SEQ ID NO: 370509 - DNA, 20 bp, Artificial Sequence
  Description of Artificial Sequence: Synthetic oligonucleotide
  Target: LAMA2; (+) strand; PAM type: YTN; PAM sequence: TTG
tgggggttgaaaaatgagaa

SEQ ID NO: 370510 - DNA, 20 bp, Artificial Sequence
  Description of Artificial Sequence: Synthetic oligonucleotide
  Target: LAMA2; (+) strand; PAM type: YTN; PAM sequence: TTG
aaaaatgagaacacatggac

SEQ ID NO: 370511 - DNA, 20 bp, Artificial Sequence
  Description of Artificial Sequence: Synthetic oligonucleotide
  Target: LAMA2; (+) strand; PAM type: YTN; PAM sequence: TTA
tacactggggcctgtcggag

SEQ ID NO: 370512 - DNA, 20 bp, Artificial Sequence
  Description of Artificial Sequence: Synthetic oligonucleotide
  Target: LAMA2; (+) strand; PAM type: YTN; PAM sequence: CTG
gggcctgtcggagggtgggg

SEQ ID NO: 370513 - DNA, 20 bp, Artificial Sequence
  Description of Artificial Sequence: Synthetic oligonucleotide
  Target: LAMA2; (+) strand; PAM type: YTN; PAM sequence: CTG
tcggagggtggggggctagg

SEQ ID NO: 370514 - DNA, 20 bp, Artificial Sequence
  Description of Artificial Sequence: Synthetic oligonucleotide
  Target: LAMA2; (+) strand; PAM type: YTN; PAM sequence: CTA
ggggaaggatagcattagga

SEQ ID NO: 370515 - DNA, 20 bp, Artificial Sequence
  Description of Artificial Sequence: Synthetic oligonucleotide
  Target: LAMA2; (+) strand; PAM type: YTN; PAM sequence: TTA
ggagaaatatctaatgtaga

SEQ ID NO: 370516 - DNA, 20 bp, Artificial Sequence
  Description of Artificial Sequence: Synthetic oligonucleotide
  Target: LAMA2; (+) strand; PAM type: YTN; PAM sequence: CTA
atgtagatgatgggttgatg

SEQ ID NO: 370517 - DNA, 20 bp, Artificial Sequence
  Description of Artificial Sequence: Synthetic oligonucleotide
  Target: LAMA2; (+) strand; PAM type: YTN; PAM sequence: TTG
atgggttcaggaaaccacca

SEQ ID NO: 370518 - DNA, 20 bp, Artificial Sequence
  Description of Artificial Sequence: Synthetic oligonucleotide
  Target: LAMA2; (+) strand; PAM type: YTN; PAM sequence: TTC
aggaaaccaccatggcacgt

SEQ ID NO: 370519 - DNA, 20 bp, Artificial Sequence
  Description of Artificial Sequence: Synthetic oligonucleotide
  Target: LAMA2; (+) strand; PAM type: YTN; PAM sequence: CTA
tgtaacaaacctgcacgttc

SEQ ID NO: 370520 - DNA, 20 bp, Artificial Sequence
  Description of Artificial Sequence: Synthetic oligonucleotide
  Target: LAMA2; (+) strand; PAM type: YTN; PAM sequence: CTG
cacgttctgcacatgtatcc

SEQ ID NO: 370521 - DNA, 20 bp, Artificial Sequence
  Description of Artificial Sequence: Synthetic oligonucleotide
  Target: LAMA2; (+) strand; PAM type: YTN; PAM sequence: TTC
tgcacatgtatcccagaact

SEQ ID NO: 370522 - DNA, 20 bp, Artificial Sequence
  Description of Artificial Sequence: Synthetic oligonucleotide
  Target: LAMA2; (+) strand; PAM type: YTN; PAM sequence: CTG
cacatgtatcccagaactta

SEQ ID NO: 370523 - DNA, 20 bp, Artificial Sequence
  Description of Artificial Sequence: Synthetic oligonucleotide
  Target: LAMA2; (+) strand; PAM type: YTN; PAM sequence: CTT
aaagtataataataattttg

SEQ ID NO: 370524 - DNA, 20 bp, Artificial Sequence
  Description of Artificial Sequence: Synthetic oligonucleotide
  Target: LAMA2; (+) strand; PAM type: YTN; PAM sequence: TTA
aagtataataataattttga

SEQ ID NO: 370525 - DNA, 20 bp, Artificial Sequence
  Description of Artificial Sequence: Synthetic oligonucleotide
  Target: LAMA2; (+) strand; PAM type: YTN; PAM sequence: TTT
tgaaaacaaatttgacactt

SEQ ID NO: 370526 - DNA, 20 bp, Artificial Sequence
  Description of Artificial Sequence: Synthetic oligonucleotide
  Target: LAMA2; (+) strand; PAM type: YTN; PAM sequence: TTT
gaaaacaaatttgacacttt

SEQ ID NO: 370527 - DNA, 20 bp, Artificial Sequence
  Description of Artificial Sequence: Synthetic oligonucleotide
  Target: LAMA2; (+) strand; PAM type: YTN; PAM sequence: TTG
aaaacaaatttgacactttt

SEQ ID NO: 370528 - DNA, 20 bp, Artificial Sequence
  Description of Artificial Sequence: Synthetic oligonucleotide
  Target: LAMA2; (+) strand; PAM type: YTN; PAM sequence: TTT
gacactttttttggtactgt

SEQ ID NO: 370529 - DNA, 20 bp, Artificial Sequence
  Description of Artificial Sequence: Synthetic oligonucleotide
  Target: LAMA2; (+) strand; PAM type: YTN; PAM sequence: TTG
acactttttttggtactgtt

SEQ ID NO: 370530 - DNA, 20 bp, Artificial Sequence
  Description of Artificial Sequence: Synthetic oligonucleotide
  Target: LAMA2; (+) strand; PAM type: YTN; PAM sequence: CTT
tttttggtactgttcaaatt

SEQ ID NO: 370531 - DNA, 20 bp, Artificial Sequence
  Description of Artificial Sequence: Synthetic oligonucleotide
  Target: LAMA2; (+) strand; PAM type: YTN; PAM sequence: TTT
ttttggtactgttcaaatta

SEQ ID NO: 370532 - DNA, 20 bp, Artificial Sequence
  Description of Artificial Sequence: Synthetic oligonucleotide
  Target: LAMA2; (+) strand; PAM type: YTN; PAM sequence: TTT
tttggtactgttcaaattaa

SEQ ID NO: 370533 - DNA, 20 bp, Artificial Sequence
  Description of Artificial Sequence: Synthetic oligonucleotide
  Target: LAMA2; (+) strand; PAM type: YTN; PAM sequence: TTT
ttggtactgttcaaattaag

SEQ ID NO: 370534 - DNA, 20 bp, Artificial Sequence
  Description of Artificial Sequence: Synthetic oligonucleotide
  Target: LAMA2; (+) strand; PAM type: YTN; PAM sequence: TTT
tggtactgttcaaattaagg

SEQ ID NO: 370535 - DNA, 20 bp, Artificial Sequence
  Description of Artificial Sequence: Synthetic oligonucleotide
  Target: LAMA2; (+) strand; PAM type: YTN; PAM sequence: TTT
ggtactgttcaaattaaggg

SEQ ID NO: 370536 - DNA, 20 bp, Artificial Sequence
  Description of Artificial Sequence: Synthetic oligonucleotide
  Target: LAMA2; (+) strand; PAM type: YTN; PAM sequence: TTG
gtactgttcaaattaagggg

SEQ ID NO: 370537 - DNA, 20 bp, Artificial Sequence
  Description of Artificial Sequence: Synthetic oligonucleotide
  Target: LAMA2; (+) strand; PAM type: YTN; PAM sequence: CTG
ttcaaattaaggggaaagtt

SEQ ID NO: 370538 - DNA, 20 bp, Artificial Sequence
  Description of Artificial Sequence: Synthetic oligonucleotide
  Target: LAMA2; (+) strand; PAM type: YTN; PAM sequence: TTC
aaattaaggggaaagttcat

SEQ ID NO: 370539 - DNA, 20 bp, Artificial Sequence
  Description of Artificial Sequence: Synthetic oligonucleotide
  Target: LAMA2; (+) strand; PAM type: YTN; PAM sequence: TTA
aggggaaagttcattttatt

SEQ ID NO: 370540 - DNA, 20 bp, Artificial Sequence
  Description of Artificial Sequence: Synthetic oligonucleotide
  Target: LAMA2; (+) strand; PAM type: YTN; PAM sequence: TTC
attttattttattttcagat

SEQ ID NO: 370541 - DNA, 20 bp, Artificial Sequence
  Description of Artificial Sequence: Synthetic oligonucleotide
  Target: LAMA2; (+) strand; PAM type: YTN; PAM sequence: TTT
tattttattttcagatataa

SEQ ID NO: 370542 - DNA, 20 bp, Artificial Sequence
  Description of Artificial Sequence: Synthetic oligonucleotide
  Target: LAMA2; (+) strand; PAM type: YTN; PAM sequence: TTT
attttattttcagatataaa

SEQ ID NO: 370543 - DNA, 20 bp, Artificial Sequence
  Description of Artificial Sequence: Synthetic oligonucleotide
  Target: LAMA2; (+) strand; PAM type: YTN; PAM sequence: TTA
ttttattttcagatataaag

SEQ ID NO: 370544 - DNA, 20 bp, Artificial Sequence
  Description of Artificial Sequence: Synthetic oligonucleotide
  Target: LAMA2; (+) strand; PAM type: YTN; PAM sequence: TTT
tattttcagatataaagtat

SEQ ID NO: 370545 - DNA, 20 bp, Artificial Sequence
  Description of Artificial Sequence: Synthetic oligonucleotide
  Target: LAMA2; (+) strand; PAM type: YTN; PAM sequence: TTT
attttcagatataaagtatc

SEQ ID NO: 370546 - DNA, 20 bp, Artificial Sequence
  Description of Artificial Sequence: Synthetic oligonucleotide
  Target: LAMA2; (+) strand; PAM type: YTN; PAM sequence: TTA
ttttcagatataaagtatca

SEQ ID NO: 370547 - DNA, 20 bp, Artificial Sequence
  Description of Artificial Sequence: Synthetic oligonucleotide
  Target: LAMA2; (+) strand; PAM type: YTN; PAM sequence: TTT
tcagatataaagtatcagta

SEQ ID NO: 370548 - DNA, 20 bp, Artificial Sequence
  Description of Artificial Sequence: Synthetic oligonucleotide
  Target: LAMA2; (+) strand; PAM type: YTN; PAM sequence: TTT
cagatataaagtatcagtac

SEQ ID NO: 370549 - DNA, 20 bp, Artificial Sequence
  Description of Artificial Sequence: Synthetic oligonucleotide
  Target: LAMA2; (+) strand; PAM type: YTN; PAM sequence: TTC
agatataaagtatcagtaca

SEQ ID NO: 370550 - DNA, 20 bp, Artificial Sequence
  Description of Artificial Sequence: Synthetic oligonucleotide
  Target: LAMA2; (+) strand; PAM type: YTN; PAM sequence: TTT
ttttatgtgttcattattga

SEQ ID NO: 370551 - DNA, 20 bp, Artificial Sequence
  Description of Artificial Sequence: Synthetic oligonucleotide
  Target: LAMA2; (+) strand; PAM type: YTN; PAM sequence: TTT
tttatgtgttcattattgat

SEQ ID NO: 370552 - DNA, 20 bp, Artificial Sequence
  Description of Artificial Sequence: Synthetic oligonucleotide
  Target: LAMA2; (+) strand; PAM type: YTN; PAM sequence: TTT
ttatgtgttcattattgatg

SEQ ID NO: 370553 - DNA, 20 bp, Artificial Sequence
  Description of Artificial Sequence: Synthetic oligonucleotide
  Target: LAMA2; (+) strand; PAM type: YTN; PAM sequence: TTT
tatgtgttcattattgatgt

SEQ ID NO: 370554 - DNA, 20 bp, Artificial Sequence
  Description of Artificial Sequence: Synthetic oligonucleotide
  Target: LAMA2; (+) strand; PAM type: YTN; PAM sequence: TTT
atgtgttcattattgatgtt

SEQ ID NO: 370555 - DNA, 20 bp, Artificial Sequence
  Description of Artificial Sequence: Synthetic oligonucleotide
  Target: LAMA2; (+) strand; PAM type: YTN; PAM sequence: TTA
tgtgttcattattgatgttc

SEQ ID NO: 370556 - DNA, 20 bp, Artificial Sequence
  Description of Artificial Sequence: Synthetic oligonucleotide
  Target: LAMA2; (+) strand; PAM type: YTN; PAM sequence: TTC
attattgatgttcaaatttg

SEQ ID NO: 370557 - DNA, 20 bp, Artificial Sequence
  Description of Artificial Sequence: Synthetic oligonucleotide
  Target: LAMA2; (+) strand; PAM type: YTN; PAM sequence: TTA
ttgatgttcaaatttgagag

SEQ ID NO: 370558 - DNA, 20 bp, Artificial Sequence
  Description of Artificial Sequence: Synthetic oligonucleotide
  Target: LAMA2; (+) strand; PAM type: YTN; PAM sequence: TTG
atgttcaaatttgagagtcc

SEQ ID NO: 370559 - DNA, 20 bp, Artificial Sequence
  Description of Artificial Sequence: Synthetic oligonucleotide
  Target: LAMA2; (+) strand; PAM type: YTN; PAM sequence: TTC
aaatttgagagtcctcatat

SEQ ID NO: 370560 - DNA, 20 bp, Artificial Sequence
  Description of Artificial Sequence: Synthetic oligonucleotide
  Target: LAMA2; (+) strand; PAM type: YTN; PAM sequence: TTT
gagagtcctcatatcctgag

SEQ ID NO: 370561 - DNA, 20 bp, Artificial Sequence
  Description of Artificial Sequence: Synthetic oligonucleotide
  Target: LAMA2; (+) strand; PAM type: YTN; PAM sequence: TTG
agagtcctcatatcctgagg

SEQ ID NO: 370562 - DNA, 20 bp, Artificial Sequence
  Description of Artificial Sequence: Synthetic oligonucleotide
  Target: LAMA2; (+) strand; PAM type: YTN; PAM sequence: CTC
atatcctgaggcagaaggaa

SEQ ID NO: 370563 - DNA, 20 bp, Artificial Sequence
  Description of Artificial Sequence: Synthetic oligonucleotide
  Target: LAMA2; (+) strand; PAM type: YTN; PAM sequence: CTG
aggcagaaggaacatttcca

SEQ ID NO: 370564 - DNA, 20 bp, Artificial Sequence
  Description of Artificial Sequence: Synthetic oligonucleotide
  Target: LAMA2; (+) strand; PAM type: YTN; PAM sequence: TTT
ccacggagcataacacaatt

SEQ ID NO: 370565 - DNA, 20 bp, Artificial Sequence
  Description of Artificial Sequence: Synthetic oligonucleotide
  Target: LAMA2; (+) strand; PAM type: YTN; PAM sequence: TTC
cacggagcataacacaattc

SEQ ID NO: 370566 - DNA, 20 bp, Artificial Sequence
  Description of Artificial Sequence: Synthetic oligonucleotide
  Target: LAMA2; (+) strand; PAM type: YTN; PAM sequence: TTC
tatatcctttattacttcag

SEQ ID NO: 370567 - DNA, 20 bp, Artificial Sequence
  Description of Artificial Sequence: Synthetic oligonucleotide
  Target: LAMA2; (+) strand; PAM type: YTN; PAM sequence: CTA
tatcctttattacttcagtg

SEQ ID NO: 370568 - DNA, 20 bp, Artificial Sequence
  Description of Artificial Sequence: Synthetic oligonucleotide
  Target: LAMA2; (+) strand; PAM type: YTN; PAM sequence: CTT
tattacttcagtggtttctc

SEQ ID NO: 370569 - DNA, 20 bp, Artificial Sequence
  Description of Artificial Sequence: Synthetic oligonucleotide
  Target: LAMA2; (+) strand; PAM type: YTN; PAM sequence: TTT
attacttcagtggtttctct

SEQ ID NO: 370570 - DNA, 20 bp, Artificial Sequence
  Description of Artificial Sequence: Synthetic oligonucleotide
  Target: LAMA2; (+) strand; PAM type: YTN; PAM sequence: TTA
ttacttcagtggtttctctt

SEQ ID NO: 370571 - DNA, 20 bp, Artificial Sequence
  Description of Artificial Sequence: Synthetic oligonucleotide
  Target: LAMA2; (+) strand; PAM type: YTN; PAM sequence: TTA
cttcagtggtttctcttctg

SEQ ID NO: 370572 - DNA, 20 bp, Artificial Sequence
  Description of Artificial Sequence: Synthetic oligonucleotide
  Target: LAMA2; (+) strand; PAM type: YTN; PAM sequence: CTT
cagtggtttctcttctgttt

SEQ ID NO: 370573 - DNA, 20 bp, Artificial Sequence
  Description of Artificial Sequence: Synthetic oligonucleotide
  Target: LAMA2; (+) strand; PAM type: YTN; PAM sequence: TTC
agtggtttctcttctgtttt

SEQ ID NO: 370574 - DNA, 20 bp, Artificial Sequence
  Description of Artificial Sequence: Synthetic oligonucleotide
  Target: LAMA2; (+) strand; PAM type: YTN; PAM sequence: TTT
ctcttctgttttctttttca

SEQ ID NO: 370575 - DNA, 20 bp, Artificial Sequence
  Description of Artificial Sequence: Synthetic oligonucleotide
  Target: LAMA2; (+) strand; PAM type: YTN; PAM sequence: TTC
tcttctgttttctttttcaa

SEQ ID NO: 370576 - DNA, 20 bp, Artificial Sequence
  Description of Artificial Sequence: Synthetic oligonucleotide
  Target: LAMA2; (+) strand; PAM type: YTN; PAM sequence: CTC
ttctgttttctttttcaact

SEQ ID NO: 370577 - DNA, 20 bp, Artificial Sequence
  Description of Artificial Sequence: Synthetic oligonucleotide
  Target: LAMA2; (+) strand; PAM type: YTN; PAM sequence: CTT
ctgttttctttttcaactgg

SEQ ID NO: 370578 - DNA, 20 bp, Artificial Sequence
  Description of Artificial Sequence: Synthetic oligonucleotide
  Target: LAMA2; (+) strand; PAM type: YTN; PAM sequence: TTC
tgttttctttttcaactgga

SEQ ID NO: 370579 - DNA, 20 bp, Artificial Sequence
  Description of Artificial Sequence: Synthetic oligonucleotide
  Target: LAMA2; (+) strand; PAM type: YTN; PAM sequence: CTG
ttttctttttcaactggaaa

SEQ ID NO: 370580 - DNA, 20 bp, Artificial Sequence
  Description of Artificial Sequence: Synthetic oligonucleotide
  Target: LAMA2; (+) strand; PAM type: YTN; PAM sequence: TTT
tctttttcaactggaaaaga

SEQ ID NO: 370581 - DNA, 20 bp, Artificial Sequence
  Description of Artificial Sequence: Synthetic oligonucleotide
  Target: LAMA2; (+) strand; PAM type: YTN; PAM sequence: TTT
ctttttcaactggaaaagaa

SEQ ID NO: 370582 - DNA, 20 bp, Artificial Sequence
  Description of Artificial Sequence: Synthetic oligonucleotide
  Target: LAMA2; (+) strand; PAM type: YTN; PAM sequence: TTC
tttttcaactggaaaagaag

SEQ ID NO: 370583 - DNA, 20 bp, Artificial Sequence
  Description of Artificial Sequence: Synthetic oligonucleotide
  Target: LAMA2; (+) strand; PAM type: YTN; PAM sequence: CTT
tttcaactggaaaagaaggg

SEQ ID NO: 370584 - DNA, 20 bp, Artificial Sequence
  Description of Artificial Sequence: Synthetic oligonucleotide
  Target: LAMA2; (+) strand; PAM type: YTN; PAM sequence: TTT
ttcaactggaaaagaagggc

SEQ ID NO: 370585 - DNA, 20 bp, Artificial Sequence
  Description of Artificial Sequence: Synthetic oligonucleotide
  Target: LAMA2; (+) strand; PAM type: YTN; PAM sequence: TTT
tcaactggaaaagaagggct

SEQ ID NO: 370586 - DNA, 20 bp, Artificial Sequence
  Description of Artificial Sequence: Synthetic oligonucleotide
  Target: LAMA2; (+) strand; PAM type: YTN; PAM sequence: TTT
caactggaaaagaagggctt

SEQ ID NO: 370587 - DNA, 20 bp, Artificial Sequence
  Description of Artificial Sequence: Synthetic oligonucleotide
  Target: LAMA2; (+) strand; PAM type: YTN; PAM sequence: TTC
aactggaaaagaagggcttt

SEQ ID NO: 370588 - DNA, 20 bp, Artificial Sequence
  Description of Artificial Sequence: Synthetic oligonucleotide
  Target: LAMA2; (+) strand; PAM type: YTN; PAM sequence: CTG
gaaaagaagggcttttcatg

SEQ ID NO: 370589 - DNA, 20 bp, Artificial Sequence
  Description of Artificial Sequence: Synthetic oligonucleotide
  Target: LAMA2; (+) strand; PAM type: YTN; PAM sequence: CTT
ttcatgatatatgatgttgt

SEQ ID NO: 370590 - DNA, 20 bp, Artificial Sequence
  Description of Artificial Sequence: Synthetic oligonucleotide
  Target: LAMA2; (+) strand; PAM type: YTN; PAM sequence: TTT
tcatgatatatgatgttgta

SEQ ID NO: 370591 - DNA, 20 bp, Artificial Sequence
  Description of Artificial Sequence: Synthetic oligonucleotide
  Target: LAMA2; (+) strand; PAM type: YTN; PAM sequence: TTT
catgatatatgatgttgtac

SEQ ID NO: 370592 - DNA, 20 bp, Artificial Sequence
  Description of Artificial Sequence: Synthetic oligonucleotide
  Target: LAMA2; (+) strand; PAM type: YTN; PAM sequence: TTC
atgatatatgatgttgtact

SEQ ID NO: 370593 - DNA, 20 bp, Artificial Sequence
  Description of Artificial Sequence: Synthetic oligonucleotide
  Target: LAMA2; (+) strand; PAM type: YTN; PAM sequence: TTG
tactcgaccatccagaaata

SEQ ID NO: 370594 - DNA, 20 bp, Artificial Sequence
  Description of Artificial Sequence: Synthetic oligonucleotide
  Target: LAMA2; (+) strand; PAM type: YTN; PAM sequence: CTC
gaccatccagaaatatagta

SEQ ID NO: 370595 - DNA, 20 bp, Artificial Sequence
  Description of Artificial Sequence: Synthetic oligonucleotide
  Target: LAMA2; (+) strand; PAM type: YTN; PAM sequence: TTT
cactggagggtgatcataag

SEQ ID NO: 370596 - DNA, 20 bp, Artificial Sequence
  Description of Artificial Sequence: Synthetic oligonucleotide
  Target: LAMA2; (+) strand; PAM type: YTN; PAM sequence: TTC
actggagggtgatcataagc

SEQ ID NO: 370597 - DNA, 20 bp, Artificial Sequence
  Description of Artificial Sequence: Synthetic oligonucleotide
  Target: LAMA2; (+) strand; PAM type: YTN; PAM sequence: CTG
gagggtgatcataagctctt

SEQ ID NO: 370598 - DNA, 20 bp, Artificial Sequence
  Description of Artificial Sequence: Synthetic oligonucleotide
  Target: LAMA2; (+) strand; PAM type: YTN; PAM sequence: CTC
ttagagggcagcagtatttg

SEQ ID NO: 370599 - DNA, 20 bp, Artificial Sequence
  Description of Artificial Sequence: Synthetic oligonucleotide
  Target: LAMA2; (+) strand; PAM type: YTN; PAM sequence: CTT
agagggcagcagtatttgcc

SEQ ID NO: 370600 - DNA, 20 bp, Artificial Sequence
  Description of Artificial Sequence: Synthetic oligonucleotide
  Target: LAMA2; (+) strand; PAM type: YTN; PAM sequence: TTA
gagggcagcagtatttgcct

SEQ ID NO: 370601 - DNA, 20 bp, Artificial Sequence
  Description of Artificial Sequence: Synthetic oligonucleotide
  Target: LAMA2; (+) strand; PAM type: YTN; PAM sequence: TTT
gcctcatgcttattttgcat

SEQ ID NO: 370602 - DNA, 20 bp, Artificial Sequence
  Description of Artificial Sequence: Synthetic oligonucleotide
  Target: LAMA2; (+) strand; PAM type: YTN; PAM sequence: TTG
cctcatgcttattttgcatc

SEQ ID NO: 370603 - DNA, 20 bp, Artificial Sequence
  Description of Artificial Sequence: Synthetic oligonucleotide
  Target: LAMA2; (+) strand; PAM type: YTN; PAM sequence: CTC
atgcttattttgcatctcat

SEQ ID NO: 370604 - DNA, 20 bp, Artificial Sequence
  Description of Artificial Sequence: Synthetic oligonucleotide
  Target: LAMA2; (+) strand; PAM type: YTN; PAM sequence: CTT
attttgcatctcatccattt

SEQ ID NO: 370605 - DNA, 20 bp, Artificial Sequence
  Description of Artificial Sequence: Synthetic oligonucleotide
  Target: LAMA2; (+) strand; PAM type: YTN; PAM sequence: TTA
ttttgcatctcatccatttt

SEQ ID NO: 370606 - DNA, 20 bp, Artificial Sequence
  Description of Artificial Sequence: Synthetic oligonucleotide
  Target: LAMA2; (+) strand; PAM type: YTN; PAM sequence: TTT
tgcatctcatccattttgta

SEQ ID NO: 370607 - DNA, 20 bp, Artificial Sequence
  Description of Artificial Sequence: Synthetic oligonucleotide
  Target: LAMA2; (+) strand; PAM type: YTN; PAM sequence: TTT
gcatctcatccattttgtag

SEQ ID NO: 370608 - DNA, 20 bp, Artificial Sequence
  Description of Artificial Sequence: Synthetic oligonucleotide
  Target: LAMA2; (+) strand; PAM type: YTN; PAM sequence: TTG
catctcatccattttgtagt

SEQ ID NO: 370609 - DNA, 20 bp, Artificial Sequence
  Description of Artificial Sequence: Synthetic oligonucleotide
  Target: LAMA2; (+) strand; PAM type: YTN; PAM sequence: CTC
atccattttgtagtaatccc

SEQ ID NO: 370610 - DNA, 20 bp, Artificial Sequence
  Description of Artificial Sequence: Synthetic oligonucleotide
  Target: LAMA2; (+) strand; PAM type: YTN; PAM sequence: TTT
tgtagtaatccccacagatg

SEQ ID NO: 370611 - DNA, 20 bp, Artificial Sequence
  Description of Artificial Sequence: Synthetic oligonucleotide
  Target: LAMA2; (+) strand; PAM type: YTN; PAM sequence: TTT
gtagtaatccccacagatgg

SEQ ID NO: 370612 - DNA, 20 bp, Artificial Sequence
  Description of Artificial Sequence: Synthetic oligonucleotide
  Target: LAMA2; (+) strand; PAM type: YTN; PAM sequence: TTG
tagtaatccccacagatgga

SEQ ID NO: 370613 - DNA, 20 bp, Artificial Sequence
  Description of Artificial Sequence: Synthetic oligonucleotide
  Target: LAMA2; (+) strand; PAM type: YTN; PAM sequence: CTT
aattaaggatgatggggaac

SEQ ID NO: 370614 - DNA, 20 bp, Artificial Sequence
  Description of Artificial Sequence: Synthetic oligonucleotide
  Target: LAMA2; (+) strand; PAM type: YTN; PAM sequence: TTA
attaaggatgatggggaact

SEQ ID NO: 370615 - DNA, 20 bp, Artificial Sequence
  Description of Artificial Sequence: Synthetic oligonucleotide
  Target: LAMA2; (+) strand; PAM type: YTN; PAM sequence: TTA
aggatgatggggaacttaga

SEQ ID NO: 370616 - DNA, 20 bp, Artificial Sequence
  Description of Artificial Sequence: Synthetic oligonucleotide
  Target: LAMA2; (+) strand; PAM type: YTN; PAM sequence: CTT
agagcaggcactgacacagg

SEQ ID NO: 370617 - DNA, 20 bp, Artificial Sequence
  Description of Artificial Sequence: Synthetic oligonucleotide
  Target: LAMA2; (+) strand; PAM type: YTN; PAM sequence: TTA
gagcaggcactgacacaggg

SEQ ID NO: 370618 - DNA, 20 bp, Artificial Sequence
  Description of Artificial Sequence: Synthetic oligonucleotide
  Target: LAMA2; (+) strand; PAM type: YTN; PAM sequence: CTG
acacagggaatctaagacta

SEQ ID NO: 370619 - DNA, 20 bp, Artificial Sequence
  Description of Artificial Sequence: Synthetic oligonucleotide
  Target: LAMA2; (+) strand; PAM type: YTN; PAM sequence: CTA
agactaaaataccctgtttt

SEQ ID NO: 370620 - DNA, 20 bp, Artificial Sequence
  Description of Artificial Sequence: Synthetic oligonucleotide
  Target: LAMA2; (+) strand; PAM type: YTN; PAM sequence: CTA
aaataccctgttttaatcag

SEQ ID NO: 370621 - DNA, 20 bp, Artificial Sequence
  Description of Artificial Sequence: Synthetic oligonucleotide
  Target: LAMA2; (+) strand; PAM type: YTN; PAM sequence: CTG
ttttaatcagaattcagttt

SEQ ID NO: 370622 - DNA, 20 bp, Artificial Sequence
  Description of Artificial Sequence: Synthetic oligonucleotide
  Target: LAMA2; (+) strand; PAM type: YTN; PAM sequence: TTT
taatcagaattcagttttta

SEQ ID NO: 370623 - DNA, 20 bp, Artificial Sequence
  Description of Artificial Sequence: Synthetic oligonucleotide
  Target: LAMA2; (+) strand; PAM type: YTN; PAM sequence: TTT
aatcagaattcagtttttat

SEQ ID NO: 370624 - DNA, 20 bp, Artificial Sequence
  Description of Artificial Sequence: Synthetic oligonucleotide
  Target: LAMA2; (+) strand; PAM type: YTN; PAM sequence: TTA
atcagaattcagtttttata

SEQ ID NO: 370625 - DNA, 20 bp, Artificial Sequence
  Description of Artificial Sequence: Synthetic oligonucleotide
  Target: LAMA2; (+) strand; PAM type: YTN; PAM sequence: TTC
agtttttatataataaagtg

SEQ ID NO: 370626 - DNA, 20 bp, Artificial Sequence
  Description of Artificial Sequence: Synthetic oligonucleotide
  Target: LAMA2; (+) strand; PAM type: YTN; PAM sequence: TTT
ttatataataaagtgtttca

SEQ ID NO: 370627 - DNA, 20 bp, Artificial Sequence
  Description of Artificial Sequence: Synthetic oligonucleotide
  Target: LAMA2; (+) strand; PAM type: YTN; PAM sequence: TTT
tatataataaagtgtttcac

SEQ ID NO: 370628 - DNA, 20 bp, Artificial Sequence
  Description of Artificial Sequence: Synthetic oligonucleotide
  Target: LAMA2; (+) strand; PAM type: YTN; PAM sequence: TTT
atataataaagtgtttcaca

SEQ ID NO: 370629 - DNA, 20 bp, Artificial Sequence
  Description of Artificial Sequence: Synthetic oligonucleotide
  Target: LAMA2; (+) strand; PAM type: YTN; PAM sequence: TTA
tataataaagtgtttcacat

SEQ ID NO: 370630 - DNA, 20 bp, Artificial Sequence
  Description of Artificial Sequence: Synthetic oligonucleotide
  Target: LAMA2; (+) strand; PAM type: YTN; PAM sequence: TTT
cacattttaaacaaggaatg

SEQ ID NO: 370631 - DNA, 20 bp, Artificial Sequence
  Description of Artificial Sequence: Synthetic oligonucleotide
  Target: LAMA2; (+) strand; PAM type: YTN; PAM sequence: TTC
acattttaaacaaggaatga

SEQ ID NO: 370632 - DNA, 20 bp, Artificial Sequence
  Description of Artificial Sequence: Synthetic oligonucleotide
  Target: LAMA2; (+) strand; PAM type: YTN; PAM sequence: TTT
taaacaaggaatgaaaaata

SEQ ID NO: 370633 - DNA, 20 bp, Artificial Sequence
  Description of Artificial Sequence: Synthetic oligonucleotide
  Target: LAMA2; (+) strand; PAM type: YTN; PAM sequence: TTT
aaacaaggaatgaaaaatac

SEQ ID NO: 370634 - DNA, 20 bp, Artificial Sequence
  Description of Artificial Sequence: Synthetic oligonucleotide
  Target: LAMA2; (+) strand; PAM type: YTN; PAM sequence: TTA
aacaaggaatgaaaaataca

SEQ ID NO: 370635 - DNA, 20 bp, Artificial Sequence
  Description of Artificial Sequence: Synthetic oligonucleotide
  Target: LAMA2; (+) strand; PAM type: YTN; PAM sequence: TTA
cagaagaatgccataaaata

SEQ ID NO: 370636 - DNA, 20 bp, Artificial Sequence
  Description of Artificial Sequence: Synthetic oligonucleotide
  Target: LAMA2; (+) strand; PAM type: YTN; PAM sequence: CTA
tcaagaatgtgagaaataaa

SEQ ID NO: 370637 - DNA, 20 bp, Artificial Sequence
  Description of Artificial Sequence: Synthetic oligonucleotide
  Target: LAMA2; (+) strand; PAM type: YTN; PAM sequence: CTT
tttgtgtaaatttgagaaag

SEQ ID NO: 370638 - DNA, 20 bp, Artificial Sequence
  Description of Artificial Sequence: Synthetic oligonucleotide
  Target: LAMA2; (+) strand; PAM type: YTN; PAM sequence: TTT
ttgtgtaaatttgagaaagc

SEQ ID NO: 370639 - DNA, 20 bp, Artificial Sequence
  Description of Artificial Sequence: Synthetic oligonucleotide
  Target: LAMA2; (+) strand; PAM type: YTN; PAM sequence: TTT
tgtgtaaatttgagaaagca

SEQ ID NO: 370640 - DNA, 20 bp, Artificial Sequence
  Description of Artificial Sequence: Synthetic oligonucleotide
  Target: LAMA2; (+) strand; PAM type: YTN; PAM sequence: TTT
gtgtaaatttgagaaagcat

SEQ ID NO: 370641 - DNA, 20 bp, Artificial Sequence
  Description of Artificial Sequence: Synthetic oligonucleotide
  Target: LAMA2; (+) strand; PAM type: YTN; PAM sequence: TTG
tgtaaatttgagaaagcata

SEQ ID NO: 370642 - DNA, 20 bp, Artificial Sequence
  Description of Artificial Sequence: Synthetic oligonucleotide
  Target: LAMA2; (+) strand; PAM type: YTN; PAM sequence: TTT
gagaaagcataataggatgg

SEQ ID NO: 370643 - DNA, 20 bp, Artificial Sequence
  Description of Artificial Sequence: Synthetic oligonucleotide
  Target: LAMA2; (+) strand; PAM type: YTN; PAM sequence: TTG
agaaagcataataggatgga

SEQ ID NO: 370644 - DNA, 20 bp, Artificial Sequence
  Description of Artificial Sequence: Synthetic oligonucleotide
  Target: LAMA2; (+) strand; PAM type: YTN; PAM sequence: TTT
agcatgaaatacatgaatta

SEQ ID NO: 370645 - DNA, 20 bp, Artificial Sequence
  Description of Artificial Sequence: Synthetic oligonucleotide
  Target: LAMA2; (+) strand; PAM type: YTN; PAM sequence: TTA
gcatgaaatacatgaattat

SEQ ID NO: 370646 - DNA, 20 bp, Artificial Sequence
  Description of Artificial Sequence: Synthetic oligonucleotide
  Target: LAMA2; (+) strand; PAM type: YTN; PAM sequence: TTA
tatatgtgtagaaattagct

SEQ ID NO: 370647 - DNA, 20 bp, Artificial Sequence
  Description of Artificial Sequence: Synthetic oligonucleotide
  Target: LAMA2; (+) strand; PAM type: YTN; PAM sequence: TTA
gctgtgtatgtggtcaaata

SEQ ID NO: 370648 - DNA, 20 bp, Artificial Sequence
  Description of Artificial Sequence: Synthetic oligonucleotide
  Target: LAMA2; (+) strand; PAM type: YTN; PAM sequence: CTG
tgtatgtggtcaaatataag

SEQ ID NO: 370649 - DNA, 20 bp, Artificial Sequence
  Description of Artificial Sequence: Synthetic oligonucleotide
  Target: LAMA2; (+) strand; PAM type: YTN; PAM sequence: CTG
cctttcttccaaatcatgtc

SEQ ID NO: 370650 - DNA, 20 bp, Artificial Sequence
  Description of Artificial Sequence: Synthetic oligonucleotide
  Target: LAMA2; (+) strand; PAM type: YTN; PAM sequence: CTT
tcttccaaatcatgtcaaag

SEQ ID NO: 370651 - DNA, 20 bp, Artificial Sequence
  Description of Artificial Sequence: Synthetic oligonucleotide
  Target: LAMA2; (+) strand; PAM type: YTN; PAM sequence: TTT
cttccaaatcatgtcaaaga

SEQ ID NO: 370652 - DNA, 20 bp, Artificial Sequence
  Description of Artificial Sequence: Synthetic oligonucleotide
  Target: LAMA2; (+) strand; PAM type: YTN; PAM sequence: TTC
ttccaaatcatgtcaaagat

SEQ ID NO: 370653 - DNA, 20 bp, Artificial Sequence
  Description of Artificial Sequence: Synthetic oligonucleotide
  Target: LAMA2; (+) strand; PAM type: YTN; PAM sequence: CTT
ccaaatcatgtcaaagattt

SEQ ID NO: 370654 - DNA, 20 bp, Artificial Sequence
  Description of Artificial Sequence: Synthetic oligonucleotide
  Target: LAMA2; (+) strand; PAM type: YTN; PAM sequence: TTC
caaatcatgtcaaagatttt

SEQ ID NO: 370655 - DNA, 20 bp, Artificial Sequence
  Description of Artificial Sequence: Synthetic oligonucleotide
  Target: LAMA2; (+) strand; PAM type: YTN; PAM sequence: TTT
tctggaaatgatgacgttaa

SEQ ID NO: 370656 - DNA, 20 bp, Artificial Sequence
  Description of Artificial Sequence: Synthetic oligonucleotide
  Target: LAMA2; (+) strand; PAM type: YTN; PAM sequence: TTT
ctggaaatgatgacgttaag

SEQ ID NO: 370657 - DNA, 20 bp, Artificial Sequence
  Description of Artificial Sequence: Synthetic oligonucleotide
  Target: LAMA2; (+) strand; PAM type: YTN; PAM sequence: TTC
tggaaatgatgacgttaagg

SEQ ID NO: 370658 - DNA, 20 bp, Artificial Sequence
  Description of Artificial Sequence: Synthetic oligonucleotide
  Target: LAMA2; (+) strand; PAM type: YTN; PAM sequence: CTG
gaaatgatgacgttaagggc

SEQ ID NO: 370659 - DNA, 20 bp, Artificial Sequence
  Description of Artificial Sequence: Synthetic oligonucleotide
  Target: LAMA2; (+) strand; PAM type: YTN; PAM sequence: TTA
agggcaattagtatatgggc

SEQ ID NO: 370660 - DNA, 20 bp, Artificial Sequence
  Description of Artificial Sequence: Synthetic oligonucleotide
  Target: LAMA2; (+) strand; PAM type: YTN; PAM sequence: TTA
gtatatgggcaagtgaacac

SEQ ID NO: 370661 - DNA, 20 bp, Artificial Sequence
  Description of Artificial Sequence: Synthetic oligonucleotide
  Target: LAMA2; (+) strand; PAM type: YTN; PAM sequence: TTC
cagagaatcaaaattgcttg

SEQ ID NO: 370662 - DNA, 20 bp, Artificial Sequence
  Description of Artificial Sequence: Synthetic oligonucleotide
  Target: LAMA2; (+) strand; PAM type: YTN; PAM sequence: TTG
cttgggatgacatcgggtac

SEQ ID NO: 370663 - DNA, 20 bp, Artificial Sequence
  Description of Artificial Sequence: Synthetic oligonucleotide
  Target: LAMA2; (+) strand; PAM type: YTN; PAM sequence: CTT
gggatgacatcgggtactct

SEQ ID NO: 370664 - DNA, 20 bp, Artificial Sequence
  Description of Artificial Sequence: Synthetic oligonucleotide
  Target: LAMA2; (+) strand; PAM type: YTN; PAM sequence: TTG
ggatgacatcgggtactctc

SEQ ID NO: 370665 - DNA, 20 bp, Artificial Sequence
  Description of Artificial Sequence: Synthetic oligonucleotide
  Target: LAMA2; (+) strand; PAM type: YTN; PAM sequence: CTC
tcttaggctaagactatatg

SEQ ID NO: 370666 - DNA, 20 bp, Artificial Sequence
  Description of Artificial Sequence: Synthetic oligonucleotide
  Target: LAMA2; (+) strand; PAM type: YTN; PAM sequence: CTC
ttaggctaagactatatgat

SEQ ID NO: 370667 - DNA, 20 bp, Artificial Sequence
  Description of Artificial Sequence: Synthetic oligonucleotide
  Target: LAMA2; (+) strand; PAM type: YTN; PAM sequence: CTT
aggctaagactatatgatga

SEQ ID NO: 370668 - DNA, 20 bp, Artificial Sequence
  Description of Artificial Sequence: Synthetic oligonucleotide
  Target: LAMA2; (+) strand; PAM type: YTN; PAM sequence: TTA
ggctaagactatatgatgag

SEQ ID NO: 370669 - DNA, 20 bp, Artificial Sequence
  Description of Artificial Sequence: Synthetic oligonucleotide
  Target: LAMA2; (+) strand; PAM type: YTN; PAM sequence: CTA
agactatatgatgagtcctt

SEQ ID NO: 370670 - DNA, 20 bp, Artificial Sequence
  Description of Artificial Sequence: Synthetic oligonucleotide
  Target: LAMA2; (+) strand; PAM type: YTN; PAM sequence: CTA
tatgatgagtccttttatat

SEQ ID NO: 370671 - DNA, 20 bp, Artificial Sequence
  Description of Artificial Sequence: Synthetic oligonucleotide
  Target: LAMA2; (+) strand; PAM type: YTN; PAM sequence: CTT
ttatatcagctgcctttttt

SEQ ID NO: 370672 - DNA, 20 bp, Artificial Sequence
  Description of Artificial Sequence: Synthetic oligonucleotide
  Target: LAMA2; (+) strand; PAM type: YTN; PAM sequence: TTT
tatatcagctgcctttttta

SEQ ID NO: 370673 - DNA, 20 bp, Artificial Sequence
  Description of Artificial Sequence: Synthetic oligonucleotide
  Target: LAMA2; (+) strand; PAM type: YTN; PAM sequence: TTT
atatcagctgccttttttac

SEQ ID NO: 370674 - DNA, 20 bp, Artificial Sequence
  Description of Artificial Sequence: Synthetic oligonucleotide
  Target: LAMA2; (+) strand; PAM type: YTN; PAM sequence: TTA
tatcagctgccttttttaca

SEQ ID NO: 370675 - DNA, 20 bp, Artificial Sequence
  Description of Artificial Sequence: Synthetic oligonucleotide
  Target: LAMA2; (+) strand; PAM type: YTN; PAM sequence: CTG
ccttttttacagtacttttt

SEQ ID NO: 370676 - DNA, 20 bp, Artificial Sequence
  Description of Artificial Sequence: Synthetic oligonucleotide
  Target: LAMA2; (+) strand; PAM type: YTN; PAM sequence: CTT
ttttacagtactttttcttc

SEQ ID NO: 370677 - DNA, 20 bp, Artificial Sequence
  Description of Artificial Sequence: Synthetic oligonucleotide
  Target: LAMA2; (+) strand; PAM type: YTN; PAM sequence: TTT
tttacagtactttttcttct

SEQ ID NO: 370678 - DNA, 20 bp, Artificial Sequence
  Description of Artificial Sequence: Synthetic oligonucleotide
  Target: LAMA2; (+) strand; PAM type: YTN; PAM sequence: TTT
ttacagtactttttcttcta

SEQ ID NO: 370679 - DNA, 20 bp, Artificial Sequence
  Description of Artificial Sequence: Synthetic oligonucleotide
  Target: LAMA2; (+) strand; PAM type: YTN; PAM sequence: TTT
tacagtactttttcttctac

SEQ ID NO: 370680 - DNA, 20 bp, Artificial Sequence
  Description of Artificial Sequence: Synthetic oligonucleotide
  Target: LAMA2; (+) strand; PAM type: YTN; PAM sequence: TTT
acagtactttttcttctact

SEQ ID NO: 370681 - DNA, 20 bp, Artificial Sequence
  Description of Artificial Sequence: Synthetic oligonucleotide
  Target: LAMA2; (+) strand; PAM type: YTN; PAM sequence: TTA
cagtactttttcttctactt

SEQ ID NO: 370682 - DNA, 20 bp, Artificial Sequence
  Description of Artificial Sequence: Synthetic oligonucleotide
  Target: LAMA2; (+) strand; PAM type: YTN; PAM sequence: CTT
tttcttctactttcctgtct

SEQ ID NO: 370683 - DNA, 20 bp, Artificial Sequence
  Description of Artificial Sequence: Synthetic oligonucleotide
  Target: LAMA2; (+) strand; PAM type: YTN; PAM sequence: TTT
ttcttctactttcctgtctg

SEQ ID NO: 370684 - DNA, 20 bp, Artificial Sequence
  Description of Artificial Sequence: Synthetic oligonucleotide
  Target: LAMA2; (+) strand; PAM type: YTN; PAM sequence: TTT
tcttctactttcctgtctgt

SEQ ID NO: 370685 - DNA, 20 bp, Artificial Sequence
  Description of Artificial Sequence: Synthetic oligonucleotide
  Target: LAMA2; (+) strand; PAM type: YTN; PAM sequence: TTT
cttctactttcctgtctgtg

SEQ ID NO: 370686 - DNA, 20 bp, Artificial Sequence
  Description of Artificial Sequence: Synthetic oligonucleotide
  Target: LAMA2; (+) strand; PAM type: YTN; PAM sequence: TTC
ttctactttcctgtctgtgc

SEQ ID NO: 370687 - DNA, 20 bp, Artificial Sequence
  Description of Artificial Sequence: Synthetic oligonucleotide
  Target: LAMA2; (+) strand; PAM type: YTN; PAM sequence: CTT
ctactttcctgtctgtgctt

SEQ ID NO: 370688 - DNA, 20 bp, Artificial Sequence
  Description of Artificial Sequence: Synthetic oligonucleotide
  Target: LAMA2; (+) strand; PAM type: YTN; PAM sequence: TTC
tactttcctgtctgtgcttt

SEQ ID NO: 370689 - DNA, 20 bp, Artificial Sequence
  Description of Artificial Sequence: Synthetic oligonucleotide
  Target: LAMA2; (+) strand; PAM type: YTN; PAM sequence: CTA
ctttcctgtctgtgcttttt

SEQ ID NO: 370690 - DNA, 20 bp, Artificial Sequence
  Description of Artificial Sequence: Synthetic oligonucleotide
  Target: LAMA2; (+) strand; PAM type: YTN; PAM sequence: CTT
tcctgtctgtgcttttttct

SEQ ID NO: 370691 - DNA, 20 bp, Artificial Sequence
  Description of Artificial Sequence: Synthetic oligonucleotide
  Target: LAMA2; (+) strand; PAM type: YTN; PAM sequence: TTT
cctgtctgtgcttttttctt

SEQ ID NO: 370692 - DNA, 20 bp, Artificial Sequence
  Description of Artificial Sequence: Synthetic oligonucleotide
  Target: LAMA2; (+) strand; PAM type: YTN; PAM sequence: TTC
ctgtctgtgcttttttcttt

SEQ ID NO: 370693 - DNA, 20 bp, Artificial Sequence
  Description of Artificial Sequence: Synthetic oligonucleotide
  Target: LAMA2; (+) strand; PAM type: YTN; PAM sequence: CTG
tctgtgcttttttctttgag

SEQ ID NO: 370694 - DNA, 20 bp, Artificial Sequence
  Description of Artificial Sequence: Synthetic oligonucleotide
  Target: LAMA2; (+) strand; PAM type: YTN; PAM sequence: CTG
tgcttttttctttgagactg

SEQ ID NO: 370695 - DNA, 20 bp, Artificial Sequence
  Description of Artificial Sequence: Synthetic oligonucleotide
  Target: LAMA2; (+) strand; PAM type: YTN; PAM sequence: CTT
ttttctttgagactgtcaca

SEQ ID NO: 370696 - DNA, 20 bp, Artificial Sequence
  Description of Artificial Sequence: Synthetic oligonucleotide
  Target: LAMA2; (+) strand; PAM type: YTN; PAM sequence: TTT
tttctttgagactgtcacat

SEQ ID NO: 370697 - DNA, 20 bp, Artificial Sequence
  Description of Artificial Sequence: Synthetic oligonucleotide
  Target: LAMA2; (+) strand; PAM type: YTN; PAM sequence: TTT
ttctttgagactgtcacatt

SEQ ID NO: 370698 - DNA, 20 bp, Artificial Sequence
  Description of Artificial Sequence: Synthetic oligonucleotide
  Target: LAMA2; (+) strand; PAM type: YTN; PAM sequence: TTT
tctttgagactgtcacattt

SEQ ID NO: 370699 - DNA, 20 bp, Artificial Sequence
  Description of Artificial Sequence: Synthetic oligonucleotide
  Target: LAMA2; (+) strand; PAM type: YTN; PAM sequence: TTT
ctttgagactgtcacatttc

SEQ ID NO: 370700 - DNA, 20 bp, Artificial Sequence
  Description of Artificial Sequence: Synthetic oligonucleotide
  Target: LAMA2; (+) strand; PAM type: YTN; PAM sequence: TTC
tttgagactgtcacatttca

SEQ ID NO: 370701 - DNA, 20 bp, Artificial Sequence
  Description of Artificial Sequence: Synthetic oligonucleotide
  Target: LAMA2; (+) strand; PAM type: YTN; PAM sequence: CTT
tgagactgtcacatttcaat

SEQ ID NO: 370702 - DNA, 20 bp, Artificial Sequence
  Description of Artificial Sequence: Synthetic oligonucleotide
  Target: LAMA2; (+) strand; PAM type: YTN; PAM sequence: TTT
gagactgtcacatttcaatt

SEQ ID NO: 370703 - DNA, 20 bp, Artificial Sequence
  Description of Artificial Sequence: Synthetic oligonucleotide
  Target: LAMA2; (+) strand; PAM type: YTN; PAM sequence: TTG
agactgtcacatttcaattc

SEQ ID NO: 370704 - DNA, 20 bp, Artificial Sequence
  Description of Artificial Sequence: Synthetic oligonucleotide
  Target: LAMA2; (+) strand; PAM type: YTN; PAM sequence: CTG
tcacatttcaattctttata

SEQ ID NO: 370705 - DNA, 20 bp, Artificial Sequence
  Description of Artificial Sequence: Synthetic oligonucleotide
  Target: LAMA2; (+) strand; PAM type: YTN; PAM sequence: TTT
caattctttatatctctgct

SEQ ID NO: 370706 - DNA, 20 bp, Artificial Sequence
  Description of Artificial Sequence: Synthetic oligonucleotide
  Target: LAMA2; (+) strand; PAM type: YTN; PAM sequence: TTC
aattctttatatctctgctt

SEQ ID NO: 370707 - DNA, 20 bp, Artificial Sequence
  Description of Artificial Sequence: Synthetic oligonucleotide
  Target: LAMA2; (+) strand; PAM type: YTN; PAM sequence: TTC
tttatatctctgctttattt

SEQ ID NO: 370708 - DNA, 20 bp, Artificial Sequence
  Description of Artificial Sequence: Synthetic oligonucleotide
  Target: LAMA2; (+) strand; PAM type: YTN; PAM sequence: CTT
tatatctctgctttatttta

SEQ ID NO: 370709 - DNA, 20 bp, Artificial Sequence
  Description of Artificial Sequence: Synthetic oligonucleotide
  Target: LAMA2; (+) strand; PAM type: YTN; PAM sequence: TTT
atatctctgctttattttac

SEQ ID NO: 370710 - DNA, 20 bp, Artificial Sequence
  Description of Artificial Sequence: Synthetic oligonucleotide
  Target: LAMA2; (+) strand; PAM type: YTN; PAM sequence: TTA
tatctctgctttattttacc

SEQ ID NO: 370711 - DNA, 20 bp, Artificial Sequence
  Description of Artificial Sequence: Synthetic oligonucleotide
  Target: LAMA2; (+) strand; PAM type: YTN; PAM sequence: CTC
tgctttattttaccatttca

SEQ ID NO: 370712 - DNA, 20 bp, Artificial Sequence
  Description of Artificial Sequence: Synthetic oligonucleotide
  Target: LAMA2; (+) strand; PAM type: YTN; PAM sequence: CTG
ctttattttaccatttcaga

SEQ ID NO: 370713 - DNA, 20 bp, Artificial Sequence
  Description of Artificial Sequence: Synthetic oligonucleotide
  Target: LAMA2; (+) strand; PAM type: YTN; PAM sequence: CTT
tattttaccatttcagaaga

SEQ ID NO: 370714 - DNA, 20 bp, Artificial Sequence
  Description of Artificial Sequence: Synthetic oligonucleotide
  Target: LAMA2; (+) strand; PAM type: YTN; PAM sequence: TTT
attttaccatttcagaagaa

SEQ ID NO: 370715 - DNA, 20 bp, Artificial Sequence
  Description of Artificial Sequence: Synthetic oligonucleotide
  Target: LAMA2; (+) strand; PAM type: YTN; PAM sequence: TTA
ttttaccatttcagaagaaa

SEQ ID NO: 370716 - DNA, 20 bp, Artificial Sequence
  Description of Artificial Sequence: Synthetic oligonucleotide
  Target: LAMA2; (+) strand; PAM type: YTN; PAM sequence: TTT
taccatttcagaagaaacac

SEQ ID NO: 370717 - DNA, 20 bp, Artificial Sequence
  Description of Artificial Sequence: Synthetic oligonucleotide
  Target: LAMA2; (+) strand; PAM type: YTN; PAM sequence: TTT
accatttcagaagaaacacc

SEQ ID NO: 370718 - DNA, 20 bp, Artificial Sequence
  Description of Artificial Sequence: Synthetic oligonucleotide
  Target: LAMA2; (+) strand; PAM type: YTN; PAM sequence: TTA
ccatttcagaagaaacacca

SEQ ID NO: 370719 - DNA, 20 bp, Artificial Sequence
  Description of Artificial Sequence: Synthetic oligonucleotide
  Target: LAMA2; (+) strand; PAM type: YTN; PAM sequence: TTT
cagaagaaacaccaagctaa

SEQ ID NO: 370720 - DNA, 20 bp, Artificial Sequence
  Description of Artificial Sequence: Synthetic oligonucleotide
  Target: LAMA2; (+) strand; PAM type: YTN; PAM sequence: TTC
agaagaaacaccaagctaat

SEQ ID NO: 370721 - DNA, 20 bp, Artificial Sequence
  Description of Artificial Sequence: Synthetic oligonucleotide
  Target: LAMA2; (+) strand; PAM type: YTN; PAM sequence: CTA
atgcttcctctaatctcata

SEQ ID NO: 370722 - DNA, 20 bp, Artificial Sequence
  Description of Artificial Sequence: Synthetic oligonucleotide
  Target: LAMA2; (+) strand; PAM type: YTN; PAM sequence: CTT
cctctaatctcatacctgcc

SEQ ID NO: 370723 - DNA, 20 bp, Artificial Sequence
  Description of Artificial Sequence: Synthetic oligonucleotide
  Target: LAMA2; (+) strand; PAM type: YTN; PAM sequence: TTC
ctctaatctcatacctgcca

SEQ ID NO: 370724 - DNA, 20 bp, Artificial Sequence
  Description of Artificial Sequence: Synthetic oligonucleotide
  Target: LAMA2; (+) strand; PAM type: YTN; PAM sequence: CTC
taatctcatacctgccaata

SEQ ID NO: 370725 - DNA, 20 bp, Artificial Sequence
  Description of Artificial Sequence: Synthetic oligonucleotide
  Target: LAMA2; (+) strand; PAM type: YTN; PAM sequence: CTA
atctcatacctgccaataac

SEQ ID NO: 370726 - DNA, 20 bp, Artificial Sequence
  Description of Artificial Sequence: Synthetic oligonucleotide
  Target: LAMA2; (+) strand; PAM type: YTN; PAM sequence: CTC
atacctgccaataacactaa

SEQ ID NO: 370727 - DNA, 20 bp, Artificial Sequence
  Description of Artificial Sequence: Synthetic oligonucleotide
  Target: LAMA2; (+) strand; PAM type: YTN; PAM sequence: CTG
ccaataacactaaggtcagt

SEQ ID NO: 370728 - DNA, 20 bp, Artificial Sequence
  Description of Artificial Sequence: Synthetic oligonucleotide
  Target: LAMA2; (+) strand; PAM type: YTN; PAM sequence: CTA
aggtcagtgcaaagccccag

SEQ ID NO: 370729 - DNA, 20 bp, Artificial Sequence
  Description of Artificial Sequence: Synthetic oligonucleotide
  Target: LAMA2; (+) strand; PAM type: YTN; PAM sequence: CTC
tgttgcaatgtttcaataat

SEQ ID NO: 370730 - DNA, 20 bp, Artificial Sequence
  Description of Artificial Sequence: Synthetic oligonucleotide
  Target: LAMA2; (+) strand; PAM type: YTN; PAM sequence: CTG
ttgcaatgtttcaataatgg

SEQ ID NO: 370731 - DNA, 20 bp, Artificial Sequence
  Description of Artificial Sequence: Synthetic oligonucleotide
  Target: LAMA2; (+) strand; PAM type: YTN; PAM sequence: TTG
caatgtttcaataatggcaa

SEQ ID NO: 370732 - DNA, 20 bp, Artificial Sequence
  Description of Artificial Sequence: Synthetic oligonucleotide
  Target: LAMA2; (+) strand; PAM type: YTN; PAM sequence: TTT
caataatggcaatgctttga

SEQ ID NO: 370733 - DNA, 20 bp, Artificial Sequence
  Description of Artificial Sequence: Synthetic oligonucleotide
  Target: LAMA2; (+) strand; PAM type: YTN; PAM sequence: TTC
aataatggcaatgctttgac

SEQ ID NO: 370734 - DNA, 20 bp, Artificial Sequence
  Description of Artificial Sequence: Synthetic oligonucleotide
  Target: LAMA2; (+) strand; PAM type: YTN; PAM sequence: CTT
tgacaagcacatttgatgag

SEQ ID NO: 370735 - DNA, 20 bp, Artificial Sequence
  Description of Artificial Sequence: Synthetic oligonucleotide
  Target: LAMA2; (+) strand; PAM type: YTN; PAM sequence: TTT
gacaagcacatttgatgagt

SEQ ID NO: 370736 - DNA, 20 bp, Artificial Sequence
  Description of Artificial Sequence: Synthetic oligonucleotide
  Target: LAMA2; (+) strand; PAM type: YTN; PAM sequence: TTG
acaagcacatttgatgagtt

SEQ ID NO: 370737 - DNA, 20 bp, Artificial Sequence
  Description of Artificial Sequence: Synthetic oligonucleotide
  Target: LAMA2; (+) strand; PAM type: YTN; PAM sequence: TTT
gatgagtttcctacctgtta

SEQ ID NO: 370738 - DNA, 20 bp, Artificial Sequence
  Description of Artificial Sequence: Synthetic oligonucleotide
  Target: LAMA2; (+) strand; PAM type: YTN; PAM sequence: TTG
atgagtttcctacctgttat

SEQ ID NO: 370739 - DNA, 20 bp, Artificial Sequence
  Description of Artificial Sequence: Synthetic oligonucleotide
  Target: LAMA2; (+) strand; PAM type: YTN; PAM sequence: TTT
cctacctgttattttctgtt

SEQ ID NO: 370740 - DNA, 20 bp, Artificial Sequence
  Description of Artificial Sequence: Synthetic oligonucleotide
  Target: LAMA2; (+) strand; PAM type: YTN; PAM sequence: TTC
ctacctgttattttctgtta

SEQ ID NO: 370741 - DNA, 20 bp, Artificial Sequence
  Description of Artificial Sequence: Synthetic oligonucleotide
  Target: LAMA2; (+) strand; PAM type: YTN; PAM sequence: CTA
cctgttattttctgttatca

SEQ ID NO: 370742 - DNA, 20 bp, Artificial Sequence
  Description of Artificial Sequence: Synthetic oligonucleotide
  Target: LAMA2; (+) strand; PAM type: YTN; PAM sequence: CTG
ttattttctgttatcagaaa

SEQ ID NO: 370743 - DNA, 20 bp, Artificial Sequence
  Description of Artificial Sequence: Synthetic oligonucleotide
  Target: LAMA2; (+) strand; PAM type: YTN; PAM sequence: TTA
ttttctgttatcagaaaaca

SEQ ID NO: 370744 - DNA, 20 bp, Artificial Sequence
  Description of Artificial Sequence: Synthetic oligonucleotide
  Target: LAMA2; (+) strand; PAM type: YTN; PAM sequence: TTT
tctgttatcagaaaacaaac

SEQ ID NO: 370745 - DNA, 20 bp, Artificial Sequence
  Description of Artificial Sequence: Synthetic oligonucleotide
  Target: LAMA2; (+) strand; PAM type: YTN; PAM sequence: TTT
ctgttatcagaaaacaaaca

SEQ ID NO: 370746 - DNA, 20 bp, Artificial Sequence
  Description of Artificial Sequence: Synthetic oligonucleotide
  Target: LAMA2; (+) strand; PAM type: YTN; PAM sequence: TTC
tgttatcagaaaacaaacac

SEQ ID NO: 370747 - DNA, 20 bp, Artificial Sequence
  Description of Artificial Sequence: Synthetic oligonucleotide
  Target: LAMA2; (+) strand; PAM type: YTN; PAM sequence: CTG
ttatcagaaaacaaacacaa

SEQ ID NO: 370748 - DNA, 20 bp, Artificial Sequence
  Description of Artificial Sequence: Synthetic oligonucleotide
  Target: LAMA2; (+) strand; PAM type: YTN; PAM sequence: TTA
tcagaaaacaaacacaaaca

SEQ ID NO: 370749 - DNA, 20 bp, Artificial Sequence
  Description of Artificial Sequence: Synthetic oligonucleotide
  Target: LAMA2; (+) strand; PAM type: YTN; PAM sequence: CTT
tttgttttaatctccaagac

SEQ ID NO: 370750 - DNA, 20 bp, Artificial Sequence
  Description of Artificial Sequence: Synthetic oligonucleotide
  Target: LAMA2; (+) strand; PAM type: YTN; PAM sequence: TTT
ttgttttaatctccaagact

SEQ ID NO: 370751 - DNA, 20 bp, Artificial Sequence
  Description of Artificial Sequence: Synthetic oligonucleotide
  Target: LAMA2; (+) strand; PAM type: YTN; PAM sequence: TTT
tgttttaatctccaagactg

SEQ ID NO: 370752 - DNA, 20 bp, Artificial Sequence
  Description of Artificial Sequence: Synthetic oligonucleotide
  Target: LAMA2; (+) strand; PAM type: YTN; PAM sequence: TTT
gttttaatctccaagactga

SEQ ID NO: 370753 - DNA, 20 bp, Artificial Sequence
  Description of Artificial Sequence: Synthetic oligonucleotide
  Target: LAMA2; (+) strand; PAM type: YTN; PAM sequence: TTG
ttttaatctccaagactgac

SEQ ID NO: 370754 - DNA, 20 bp, Artificial Sequence
  Description of Artificial Sequence: Synthetic oligonucleotide
  Target: LAMA2; (+) strand; PAM type: YTN; PAM sequence: TTT
taatctccaagactgactaa

SEQ ID NO: 370755 - DNA, 20 bp, Artificial Sequence
  Description of Artificial Sequence: Synthetic oligonucleotide
  Target: LAMA2; (+) strand; PAM type: YTN; PAM sequence: TTT
aatctccaagactgactaaa

SEQ ID NO: 370756 - DNA, 20 bp, Artificial Sequence
  Description of Artificial Sequence: Synthetic oligonucleotide
  Target: LAMA2; (+) strand; PAM type: YTN; PAM sequence: TTA
atctccaagactgactaaag

SEQ ID NO: 370757 - DNA, 20 bp, Artificial Sequence
  Description of Artificial Sequence: Synthetic oligonucleotide
  Target: LAMA2; (+) strand; PAM type: YTN; PAM sequence: CTC
caagactgactaaagcctta

SEQ ID NO: 370758 - DNA, 20 bp, Artificial Sequence
  Description of Artificial Sequence: Synthetic oligonucleotide
  Target: LAMA2; (+) strand; PAM type: YTN; PAM sequence: CTG
actaaagccttatctttctc

SEQ ID NO: 370759 - DNA, 20 bp, Artificial Sequence
  Description of Artificial Sequence: Synthetic oligonucleotide
  Target: LAMA2; (+) strand; PAM type: YTN; PAM sequence: CTA
aagccttatctttctctcag

SEQ ID NO: 370760 - DNA, 20 bp, Artificial Sequence
  Description of Artificial Sequence: Synthetic oligonucleotide
  Target: LAMA2; (+) strand; PAM type: YTN; PAM sequence: CTT
atctttctctcagtcttgtt

SEQ ID NO: 370761 - DNA, 20 bp, Artificial Sequence
  Description of Artificial Sequence: Synthetic oligonucleotide
  Target: LAMA2; (+) strand; PAM type: YTN; PAM sequence: TTA
tctttctctcagtcttgttg

SEQ ID NO: 370762 - DNA, 20 bp, Artificial Sequence
  Description of Artificial Sequence: Synthetic oligonucleotide
  Target: LAMA2; (+) strand; PAM type: YTN; PAM sequence: CTT
tctctcagtcttgttggcct

SEQ ID NO: 370763 - DNA, 20 bp, Artificial Sequence
  Description of Artificial Sequence: Synthetic oligonucleotide
  Target: LAMA2; (+) strand; PAM type: YTN; PAM sequence: TTT
ctctcagtcttgttggccta

SEQ ID NO: 370764 - DNA, 20 bp, Artificial Sequence
  Description of Artificial Sequence: Synthetic oligonucleotide
  Target: LAMA2; (+) strand; PAM type: YTN; PAM sequence: TTC
tctcagtcttgttggcctag

SEQ ID NO: 370765 - DNA, 20 bp, Artificial Sequence
  Description of Artificial Sequence: Synthetic oligonucleotide
  Target: LAMA2; (+) strand; PAM type: YTN; PAM sequence: CTC
tcagtcttgttggcctaggc

SEQ ID NO: 370766 - DNA, 20 bp, Artificial Sequence
  Description of Artificial Sequence: Synthetic oligonucleotide
  Target: LAMA2; (+) strand; PAM type: YTN; PAM sequence: CTC
agtcttgttggcctaggcac

SEQ ID NO: 370767 - DNA, 20 bp, Artificial Sequence
  Description of Artificial Sequence: Synthetic oligonucleotide
  Target: LAMA2; (+) strand; PAM type: YTN; PAM sequence: CTT
gttggcctaggcacaggcga

SEQ ID NO: 370768 - DNA, 20 bp, Artificial Sequence
  Description of Artificial Sequence: Synthetic oligonucleotide
  Target: LAMA2; (+) strand; PAM type: YTN; PAM sequence: TTG
ttggcctaggcacaggcgag

SEQ ID NO: 370769 - DNA, 20 bp, Artificial Sequence
  Description of Artificial Sequence: Synthetic oligonucleotide
  Target: LAMA2; (+) strand; PAM type: YTN; PAM sequence: TTG
gcctaggcacaggcgagtta

SEQ ID NO: 370770 - DNA, 20 bp, Artificial Sequence
  Description of Artificial Sequence: Synthetic oligonucleotide
  Target: LAMA2; (+) strand; PAM type: YTN; PAM sequence: CTA
ggcacaggcgagttaacggc

SEQ ID NO: 370771 - DNA, 20 bp, Artificial Sequence
  Description of Artificial Sequence: Synthetic oligonucleotide
  Target: LAMA2; (+) strand; PAM type: YTN; PAM sequence: TTA
acggcactatttttggtggc

SEQ ID NO: 370772 - DNA, 20 bp, Artificial Sequence
  Description of Artificial Sequence: Synthetic oligonucleotide
  Target: LAMA2; (+) strand; PAM type: YTN; PAM sequence: CTA
tttttggtggcatctgtgag

SEQ ID NO: 370773 - DNA, 20 bp, Artificial Sequence
  Description of Artificial Sequence: Synthetic oligonucleotide
  Target: LAMA2; (+) strand; PAM type: YTN; PAM sequence: TTT
ttggtggcatctgtgagcca

SEQ ID NO: 370774 - DNA, 20 bp, Artificial Sequence
  Description of Artificial Sequence: Synthetic oligonucleotide
  Target: LAMA2; (+) strand; PAM type: YTN; PAM sequence: TTT
tggtggcatctgtgagccat

SEQ ID NO: 370775 - DNA, 20 bp, Artificial Sequence
  Description of Artificial Sequence: Synthetic oligonucleotide
  Target: LAMA2; (+) strand; PAM type: YTN; PAM sequence: TTT
ggtggcatctgtgagccatg

SEQ ID NO: 370776 - DNA, 20 bp, Artificial Sequence
  Description of Artificial Sequence: Synthetic oligonucleotide
  Target: LAMA2; (+) strand; PAM type: YTN; PAM sequence: TTG
gtggcatctgtgagccatgt

SEQ ID NO: 370777 - DNA, 20 bp, Artificial Sequence
  Description of Artificial Sequence: Synthetic oligonucleotide
  Target: LAMA2; (+) strand; PAM type: YTN; PAM sequence: CTG
tgagccatgtcagtgctttg

SEQ ID NO: 370778 - DNA, 20 bp, Artificial Sequence
  Description of Artificial Sequence: Synthetic oligonucleotide
  Target: LAMA2; (+) strand; PAM type: YTN; PAM sequence: CTT
tggtcatgcggagtcctgtg

SEQ ID NO: 370779 - DNA, 20 bp, Artificial Sequence
  Description of Artificial Sequence: Synthetic oligonucleotide
  Target: LAMA2; (+) strand; PAM type: YTN; PAM sequence: TTT
ggtcatgcggagtcctgtga

SEQ ID NO: 370780 - DNA, 20 bp, Artificial Sequence
  Description of Artificial Sequence: Synthetic oligonucleotide
  Target: LAMA2; (+) strand; PAM type: YTN; PAM sequence: TTG
gtcatgcggagtcctgtgat

SEQ ID NO: 370781 - DNA, 20 bp, Artificial Sequence
  Description of Artificial Sequence: Synthetic oligonucleotide
  Target: LAMA2; (+) strand; PAM type: YTN; PAM sequence: CTG
tgatgacgtcactggagaat

SEQ ID NO: 370782 - DNA, 20 bp, Artificial Sequence
  Description of Artificial Sequence: Synthetic oligonucleotide
  Target: LAMA2; (+) strand; PAM type: YTN; PAM sequence: CTG
gagaatgcctggtaagtgct

SEQ ID NO: 370783 - DNA, 20 bp, Artificial Sequence
  Description of Artificial Sequence: Synthetic oligonucleotide
  Target: LAMA2; (+) strand; PAM type: YTN; PAM sequence: CTG
gtaagtgctctcttctttgg

SEQ ID NO: 370784 - DNA, 20 bp, Artificial Sequence
  Description of Artificial Sequence: Synthetic oligonucleotide
  Target: LAMA2; (+) strand; PAM type: YTN; PAM sequence: CTC
tcttctttggggatgctgat

SEQ ID NO: 370785 - DNA, 20 bp, Artificial Sequence
  Description of Artificial Sequence: Synthetic oligonucleotide
  Target: LAMA2; (+) strand; PAM type: YTN; PAM sequence: CTC
ttctttggggatgctgattg

SEQ ID NO: 370786 - DNA, 20 bp, Artificial Sequence
  Description of Artificial Sequence: Synthetic oligonucleotide
  Target: LAMA2; (+) strand; PAM type: YTN; PAM sequence: CTT
ctttggggatgctgattgac

SEQ ID NO: 370787 - DNA, 20 bp, Artificial Sequence
  Description of Artificial Sequence: Synthetic oligonucleotide
  Target: LAMA2; (+) strand; PAM type: YTN; PAM sequence: TTC
tttggggatgctgattgaca

SEQ ID NO: 370788 - DNA, 20 bp, Artificial Sequence
  Description of Artificial Sequence: Synthetic oligonucleotide
  Target: LAMA2; (+) strand; PAM type: YTN; PAM sequence: CTT
tggggatgctgattgacaag

SEQ ID NO: 370789 - DNA, 20 bp, Artificial Sequence
  Description of Artificial Sequence: Synthetic oligonucleotide
  Target: LAMA2; (+) strand; PAM type: YTN; PAM sequence: TTT
ggggatgctgattgacaagg

SEQ ID NO: 370790 - DNA, 20 bp, Artificial Sequence
  Description of Artificial Sequence: Synthetic oligonucleotide
  Target: LAMA2; (+) strand; PAM type: YTN; PAM sequence: TTG
gggatgctgattgacaaggc

SEQ ID NO: 370791 - DNA, 20 bp, Artificial Sequence
  Description of Artificial Sequence: Synthetic oligonucleotide
  Target: LAMA2; (+) strand; PAM type: YTN; PAM sequence: CTG
attgacaaggctgaaatcac

SEQ ID NO: 370792 - DNA, 20 bp, Artificial Sequence
  Description of Artificial Sequence: Synthetic oligonucleotide
  Target: LAMA2; (+) strand; PAM type: YTN; PAM sequence: TTG
acaaggctgaaatcacctcg

SEQ ID NO: 370793 - DNA, 20 bp, Artificial Sequence
  Description of Artificial Sequence: Synthetic oligonucleotide
  Target: LAMA2; (+) strand; PAM type: YTN; PAM sequence: CTG
aaatcacctcgacagatgct

SEQ ID NO: 370794 - DNA, 20 bp, Artificial Sequence
  Description of Artificial Sequence: Synthetic oligonucleotide
  Target: LAMA2; (+) strand; PAM type: YTN; PAM sequence: CTC
gacagatgctacaattcagc

SEQ ID NO: 370795 - DNA, 20 bp, Artificial Sequence
  Description of Artificial Sequence: Synthetic oligonucleotide
  Target: LAMA2; (+) strand; PAM type: YTN; PAM sequence: CTA
caattcagctactaccctgg

SEQ ID NO: 370796 - DNA, 20 bp, Artificial Sequence
  Description of Artificial Sequence: Synthetic oligonucleotide
  Target: LAMA2; (+) strand; PAM type: YTN; PAM sequence: TTC
agctactaccctggggacct

SEQ ID NO: 370797 - DNA, 20 bp, Artificial Sequence
  Description of Artificial Sequence: Synthetic oligonucleotide
  Target: LAMA2; (+) strand; PAM type: YTN; PAM sequence: CTA
ctaccctggggaccttaaac

SEQ ID NO: 370798 - DNA, 20 bp, Artificial Sequence
  Description of Artificial Sequence: Synthetic oligonucleotide
  Target: LAMA2; (+) strand; PAM type: YTN; PAM sequence: CTA
ccctggggaccttaaacact

SEQ ID NO: 370799 - DNA, 20 bp, Artificial Sequence
  Description of Artificial Sequence: Synthetic oligonucleotide
  Target: LAMA2; (+) strand; PAM type: YTN; PAM sequence: CTG
gggaccttaaacacttgagt

SEQ ID NO: 370800 - DNA, 20 bp, Artificial Sequence
  Description of Artificial Sequence: Synthetic oligonucleotide
  Target: LAMA2; (+) strand; PAM type: YTN; PAM sequence: CTT
aaacacttgagtcaagaagt

SEQ ID NO: 370801 - DNA, 20 bp, Artificial Sequence
  Description of Artificial Sequence: Synthetic oligonucleotide
  Target: LAMA2; (+) strand; PAM type: YTN; PAM sequence: TTA
aacacttgagtcaagaagtg

SEQ ID NO: 370802 - DNA, 20 bp, Artificial Sequence
  Description of Artificial Sequence: Synthetic oligonucleotide
  Target: LAMA2; (+) strand; PAM type: YTN; PAM sequence: CTT
gagtcaagaagtgctttgac

SEQ ID NO: 370803 - DNA, 20 bp, Artificial Sequence
  Description of Artificial Sequence: Synthetic oligonucleotide
  Target: LAMA2; (+) strand; PAM type: YTN; PAM sequence: TTG
agtcaagaagtgctttgaca

SEQ ID NO: 370804 - DNA, 20 bp, Artificial Sequence
  Description of Artificial Sequence: Synthetic oligonucleotide
  Target: LAMA2; (+) strand; PAM type: YTN; PAM sequence: CTT
tgacaaagatctttgtattg

SEQ ID NO: 370805 - DNA, 20 bp, Artificial Sequence
  Description of Artificial Sequence: Synthetic oligonucleotide
  Target: LAMA2; (+) strand; PAM type: YTN; PAM sequence: TTT
gacaaagatctttgtattga

SEQ ID NO: 370806 - DNA, 20 bp, Artificial Sequence
  Description of Artificial Sequence: Synthetic oligonucleotide
  Target: LAMA2; (+) strand; PAM type: YTN; PAM sequence: TTG
acaaagatctttgtattgaa

SEQ ID NO: 370807 - DNA, 20 bp, Artificial Sequence
  Description of Artificial Sequence: Synthetic oligonucleotide
  Target: LAMA2; (+) strand; PAM type: YTN; PAM sequence: CTT
tgtattgaactgaattggaa

SEQ ID NO: 370808 - DNA, 20 bp, Artificial Sequence
  Description of Artificial Sequence: Synthetic oligonucleotide
  Target: LAMA2; (+) strand; PAM type: YTN; PAM sequence: TTT
gtattgaactgaattggaac

SEQ ID NO: 370809 - DNA, 20 bp, Artificial Sequence
  Description of Artificial Sequence: Synthetic oligonucleotide
  Target: LAMA2; (+) strand; PAM type: YTN; PAM sequence: TTG
tattgaactgaattggaact

SEQ ID NO: 370810 - DNA, 20 bp, Artificial Sequence
  Description of Artificial Sequence: Synthetic oligonucleotide
  Target: LAMA2; (+) strand; PAM type: YTN; PAM sequence: TTG
aactgaattggaactgagaa

SEQ ID NO: 370811 - DNA, 20 bp, Artificial Sequence
  Description of Artificial Sequence: Synthetic oligonucleotide
  Target: LAMA2; (+) strand; PAM type: YTN; PAM sequence: CTG
aattggaactgagaatgctc

SEQ ID NO: 370812 - DNA, 20 bp, Artificial Sequence
  Description of Artificial Sequence: Synthetic oligonucleotide
  Target: LAMA2; (+) strand; PAM type: YTN; PAM sequence: TTG
gaactgagaatgctctttca

SEQ ID NO: 370813 - DNA, 20 bp, Artificial Sequence
  Description of Artificial Sequence: Synthetic oligonucleotide
  Target: LAMA2; (+) strand; PAM type: YTN; PAM sequence: CTG
agaatgctctttcatatgtg

SEQ ID NO: 370814 - DNA, 20 bp, Artificial Sequence
  Description of Artificial Sequence: Synthetic oligonucleotide
  Target: LAMA2; (+) strand; PAM type: YTN; PAM sequence: CTC
tttcatatgtgatctcccta

SEQ ID NO: 370815 - DNA, 20 bp, Artificial Sequence
  Description of Artificial Sequence: Synthetic oligonucleotide
  Target: LAMA2; (+) strand; PAM type: YTN; PAM sequence: CTT
tcatatgtgatctccctaat

SEQ ID NO: 370816 - DNA, 20 bp, Artificial Sequence
  Description of Artificial Sequence: Synthetic oligonucleotide
  Target: LAMA2; (+) strand; PAM type: YTN; PAM sequence: TTT
catatgtgatctccctaatg

SEQ ID NO: 370817 - DNA, 20 bp, Artificial Sequence
  Description of Artificial Sequence: Synthetic oligonucleotide
  Target: LAMA2; (+) strand; PAM type: YTN; PAM sequence: TTC
atatgtgatctccctaatga

SEQ ID NO: 370818 - DNA, 20 bp, Artificial Sequence
  Description of Artificial Sequence: Synthetic oligonucleotide
  Target: LAMA2; (+) strand; PAM type: YTN; PAM sequence: CTC
cctaatgaatatgaggaagt

SEQ ID NO: 370819 - DNA, 20 bp, Artificial Sequence
  Description of Artificial Sequence: Synthetic oligonucleotide
  Target: LAMA2; (+) strand; PAM type: YTN; PAM sequence: CTA
atgaatatgaggaagtgttt

SEQ ID NO: 370820 - DNA, 20 bp, Artificial Sequence
  Description of Artificial Sequence: Synthetic oligonucleotide
  Target: LAMA2; (+) strand; PAM type: YTN; PAM sequence: TTT
attcatattaaatcaagaat

SEQ ID NO: 370821 - DNA, 20 bp, Artificial Sequence
  Description of Artificial Sequence: Synthetic oligonucleotide
  Target: LAMA2; (+) strand; PAM type: YTN; PAM sequence: TTA
ttcatattaaatcaagaatt

SEQ ID NO: 370822 - DNA, 20 bp, Artificial Sequence
  Description of Artificial Sequence: Synthetic oligonucleotide
  Target: LAMA2; (+) strand; PAM type: YTN; PAM sequence: TTC
atattaaatcaagaattaaa

SEQ ID NO: 370823 - DNA, 20 bp, Artificial Sequence
  Description of Artificial Sequence: Synthetic oligonucleotide
  Target: LAMA2; (+) strand; PAM type: YTN; PAM sequence: TTA
aatcaagaattaaattagaa

SEQ ID NO: 370824 - DNA, 20 bp, Artificial Sequence
  Description of Artificial Sequence: Synthetic oligonucleotide
  Target: LAMA2; (+) strand; PAM type: YTN; PAM sequence: TTA
aattagaatcagatatattt

SEQ ID NO: 370825 - DNA, 20 bp, Artificial Sequence
  Description of Artificial Sequence: Synthetic oligonucleotide
  Target: LAMA2; (+) strand; PAM type: YTN; PAM sequence: TTA
gaatcagatatatttttata

SEQ ID NO: 370826 - DNA, 20 bp, Artificial Sequence
  Description of Artificial Sequence: Synthetic oligonucleotide
  Target: LAMA2; (+) strand; PAM type: YTN; PAM sequence: TTT
ttataaggcataacttctga

SEQ ID NO: 370827 - DNA, 20 bp, Artificial Sequence
  Description of Artificial Sequence: Synthetic oligonucleotide
  Target: LAMA2; (+) strand; PAM type: YTN; PAM sequence: TTT
tataaggcataacttctgat

SEQ ID NO: 370828 - DNA, 20 bp, Artificial Sequence
  Description of Artificial Sequence: Synthetic oligonucleotide
  Target: LAMA2; (+) strand; PAM type: YTN; PAM sequence: TTT
ataaggcataacttctgatt

SEQ ID NO: 370829 - DNA, 20 bp, Artificial Sequence
  Description of Artificial Sequence: Synthetic oligonucleotide
  Target: LAMA2; (+) strand; PAM type: YTN; PAM sequence: TTA
taaggcataacttctgattg

SEQ ID NO: 370830 - DNA, 20 bp, Artificial Sequence
  Description of Artificial Sequence: Synthetic oligonucleotide
  Target: LAMA2; (+) strand; PAM type: YTN; PAM sequence: CTT
ctgattggaagtataactac

SEQ ID NO: 370831 - DNA, 20 bp, Artificial Sequence
  Description of Artificial Sequence: Synthetic oligonucleotide
  Target: LAMA2; (+) strand; PAM type: YTN; PAM sequence: TTC
tgattggaagtataactacc

SEQ ID NO: 370832 - DNA, 20 bp, Artificial Sequence
  Description of Artificial Sequence: Synthetic oligonucleotide
  Target: LAMA2; (+) strand; PAM type: YTN; PAM sequence: CTG
attggaagtataactaccat

SEQ ID NO: 370833 - DNA, 20 bp, Artificial Sequence
  Description of Artificial Sequence: Synthetic oligonucleotide
  Target: LAMA2; (+) strand; PAM type: YTN; PAM sequence: TTG
gaagtataactaccatgaat

SEQ ID NO: 370834 - DNA, 20 bp, Artificial Sequence
  Description of Artificial Sequence: Synthetic oligonucleotide
  Target: LAMA2; (+) strand; PAM type: YTN; PAM sequence: CTA
ccatgaatatatatggtttc

SEQ ID NO: 370835 - DNA, 20 bp, Artificial Sequence
  Description of Artificial Sequence: Synthetic oligonucleotide
  Target: LAMA2; (+) strand; PAM type: YTN; PAM sequence: TTT
cactttcttccataaatcta

SEQ ID NO: 370836 - DNA, 20 bp, Artificial Sequence
  Description of Artificial Sequence: Synthetic oligonucleotide
  Target: LAMA2; (+) strand; PAM type: YTN; PAM sequence: TTC
actttcttccataaatctat

SEQ ID NO: 370837 - DNA, 20 bp, Artificial Sequence
  Description of Artificial Sequence: Synthetic oligonucleotide
  Target: LAMA2; (+) strand; PAM type: YTN; PAM sequence: CTT
tcttccataaatctatgaaa

SEQ ID NO: 370838 - DNA, 20 bp, Artificial Sequence
  Description of Artificial Sequence: Synthetic oligonucleotide
  Target: LAMA2; (+) strand; PAM type: YTN; PAM sequence: TTT
cttccataaatctatgaaaa

SEQ ID NO: 370839 - DNA, 20 bp, Artificial Sequence
  Description of Artificial Sequence: Synthetic oligonucleotide
  Target: LAMA2; (+) strand; PAM type: YTN; PAM sequence: TTC
ttccataaatctatgaaaag

SEQ ID NO: 370840 - DNA, 20 bp, Artificial Sequence
  Description of Artificial Sequence: Synthetic oligonucleotide
  Target: LAMA2; (+) strand; PAM type: YTN; PAM sequence: CTT
ccataaatctatgaaaagta

SEQ ID NO: 370841 - DNA, 20 bp, Artificial Sequence
  Description of Artificial Sequence: Synthetic oligonucleotide
  Target: LAMA2; (+) strand; PAM type: YTN; PAM sequence: TTC
cataaatctatgaaaagtac

SEQ ID NO: 370842 - DNA, 20 bp, Artificial Sequence
  Description of Artificial Sequence: Synthetic oligonucleotide
  Target: LAMA2; (+) strand; PAM type: YTN; PAM sequence: CTA
tgaaaagtacagtgtacttt

SEQ ID NO: 370843 - DNA, 20 bp, Artificial Sequence
  Description of Artificial Sequence: Synthetic oligonucleotide
  Target: LAMA2; (+) strand; PAM type: YTN; PAM sequence: CTT
ttaaaatagaaaataattta

SEQ ID NO: 370844 - DNA, 20 bp, Artificial Sequence
  Description of Artificial Sequence: Synthetic oligonucleotide
  Target: LAMA2; (+) strand; PAM type: YTN; PAM sequence: TTT
taaaatagaaaataatttat

SEQ ID NO: 370845 - DNA, 20 bp, Artificial Sequence
  Description of Artificial Sequence: Synthetic oligonucleotide
  Target: LAMA2; (+) strand; PAM type: YTN; PAM sequence: TTT
aaaatagaaaataatttata

SEQ ID NO: 370846 - DNA, 20 bp, Artificial Sequence
  Description of Artificial Sequence: Synthetic oligonucleotide
  Target: LAMA2; (+) strand; PAM type: YTN; PAM sequence: TTA
aaatagaaaataatttatat

SEQ ID NO: 370847 - DNA, 20 bp, Artificial Sequence
  Description of Artificial Sequence: Synthetic oligonucleotide
  Target: LAMA2; (+) strand; PAM type: YTN; PAM sequence: TTT
atatccccataatatgaaaa

SEQ ID NO: 370848 - DNA, 20 bp, Artificial Sequence
  Description of Artificial Sequence: Synthetic oligonucleotide
  Target: LAMA2; (+) strand; PAM type: YTN; PAM sequence: TTA
tatccccataatatgaaaag

SEQ ID NO: 370849 - DNA, 20 bp, Artificial Sequence
  Description of Artificial Sequence: Synthetic oligonucleotide
  Target: LAMA2; (+) strand; PAM type: YTN; PAM sequence: CTT
tatagtaaacataattaagt

SEQ ID NO: 370850 - DNA, 20 bp, Artificial Sequence
  Description of Artificial Sequence: Synthetic oligonucleotide
  Target: LAMA2; (+) strand; PAM type: YTN; PAM sequence: TTT
atagtaaacataattaagtt

SEQ ID NO: 370851 - DNA, 20 bp, Artificial Sequence
  Description of Artificial Sequence: Synthetic oligonucleotide
  Target: LAMA2; (+) strand; PAM type: YTN; PAM sequence: TTA
tagtaaacataattaagttt

SEQ ID NO: 370852 - DNA, 20 bp, Artificial Sequence
  Description of Artificial Sequence: Synthetic oligonucleotide
  Target: LAMA2; (+) strand; PAM type: YTN; PAM sequence: TTA
agttttcttcatgttgaaaa

SEQ ID NO: 370853 - DNA, 20 bp, Artificial Sequence
  Description of Artificial Sequence: Synthetic oligonucleotide
  Target: LAMA2; (+) strand; PAM type: YTN; PAM sequence: TTT
tcttcatgttgaaaatgaaa

SEQ ID NO: 370854 - DNA, 20 bp, Artificial Sequence
  Description of Artificial Sequence: Synthetic oligonucleotide
  Target: LAMA2; (+) strand; PAM type: YTN; PAM sequence: TTT
cttcatgttgaaaatgaaaa

SEQ ID NO: 370855 - DNA, 20 bp, Artificial Sequence
  Description of Artificial Sequence: Synthetic oligonucleotide
  Target: LAMA2; (+) strand; PAM type: YTN; PAM sequence: TTC
ttcatgttgaaaatgaaaac

SEQ ID NO: 370856 - DNA, 20 bp, Artificial Sequence
  Description of Artificial Sequence: Synthetic oligonucleotide
  Target: LAMA2; (+) strand; PAM type: YTN; PAM sequence: CTT
catgttgaaaatgaaaacat

SEQ ID NO: 370857 - DNA, 20 bp, Artificial Sequence
  Description of Artificial Sequence: Synthetic oligonucleotide
  Target: LAMA2; (+) strand; PAM type: YTN; PAM sequence: TTC
atgttgaaaatgaaaacata

SEQ ID NO: 370858 - DNA, 20 bp, Artificial Sequence
  Description of Artificial Sequence: Synthetic oligonucleotide
  Target: LAMA2; (+) strand; PAM type: YTN; PAM sequence: TTG
aaaatgaaaacatactacat

SEQ ID NO: 370859 - DNA, 20 bp, Artificial Sequence
  Description of Artificial Sequence: Synthetic oligonucleotide
  Target: LAMA2; (+) strand; PAM type: YTN; PAM sequence: CTA
catatttttatttaaaatgt

SEQ ID NO: 370860 - DNA, 20 bp, Artificial Sequence
  Description of Artificial Sequence: Synthetic oligonucleotide
  Target: LAMA2; (+) strand; PAM type: YTN; PAM sequence: TTT
ttatttaaaatgttcataat

SEQ ID NO: 370861 - DNA, 20 bp, Artificial Sequence
  Description of Artificial Sequence: Synthetic oligonucleotide
  Target: LAMA2; (+) strand; PAM type: YTN; PAM sequence: TTT
tatttaaaatgttcataatt

SEQ ID NO: 370862 - DNA, 20 bp, Artificial Sequence
  Description of Artificial Sequence: Synthetic oligonucleotide
  Target: LAMA2; (+) strand; PAM type: YTN; PAM sequence: TTT
atttaaaatgttcataattt

SEQ ID NO: 370863 - DNA, 20 bp, Artificial Sequence
  Description of Artificial Sequence: Synthetic oligonucleotide
  Target: LAMA2; (+) strand; PAM type: YTN; PAM sequence: TTA
tttaaaatgttcataattta

SEQ ID NO: 370864 - DNA, 20 bp, Artificial Sequence
  Description of Artificial Sequence: Synthetic oligonucleotide
  Target: LAMA2; (+) strand; PAM type: YTN; PAM sequence: TTT
aaaatgttcataatttaact

SEQ ID NO: 370865 - DNA, 20 bp, Artificial Sequence
  Description of Artificial Sequence: Synthetic oligonucleotide
  Target: LAMA2; (+) strand; PAM type: YTN; PAM sequence: TTA
aaatgttcataatttaacta

SEQ ID NO: 370866 - DNA, 20 bp, Artificial Sequence
  Description of Artificial Sequence: Synthetic oligonucleotide
  Target: LAMA2; (+) strand; PAM type: YTN; PAM sequence: TTC
ataatttaactaaatgcata

SEQ ID NO: 370867 - DNA, 20 bp, Artificial Sequence
  Description of Artificial Sequence: Synthetic oligonucleotide
  Target: LAMA2; (+) strand; PAM type: YTN; PAM sequence: TTT
aactaaatgcatagtgtcat

SEQ ID NO: 370868 - DNA, 20 bp, Artificial Sequence
  Description of Artificial Sequence: Synthetic oligonucleotide
  Target: LAMA2; (+) strand; PAM type: YTN; PAM sequence: TTA
actaaatgcatagtgtcatt

SEQ ID NO: 370869 - DNA, 20 bp, Artificial Sequence
  Description of Artificial Sequence: Synthetic oligonucleotide
  Target: LAMA2; (+) strand; PAM type: YTN; PAM sequence: CTA
aatgcatagtgtcatttgta

SEQ ID NO: 370870 - DNA, 20 bp, Artificial Sequence
  Description of Artificial Sequence: Synthetic oligonucleotide
  Target: LAMA2; (+) strand; PAM type: YTN; PAM sequence: TTT
gtagattaaaaataaaaaca

SEQ ID NO: 370871 - DNA, 20 bp, Artificial Sequence
  Description of Artificial Sequence: Synthetic oligonucleotide
  Target: LAMA2; (+) strand; PAM type: YTN; PAM sequence: TTG
tagattaaaaataaaaacaa

SEQ ID NO: 370872 - DNA, 20 bp, Artificial Sequence
  Description of Artificial Sequence: Synthetic oligonucleotide
  Target: LAMA2; (+) strand; PAM type: YTN; PAM sequence: TTA
aaaataaaaacaatatgtaa

SEQ ID NO: 370873 - DNA, 20 bp, Artificial Sequence
  Description of Artificial Sequence: Synthetic oligonucleotide
  Target: LAMA2; (+) strand; PAM type: YTN; PAM sequence: TTC
accagagctgcttctccttt

SEQ ID NO: 370874 - DNA, 20 bp, Artificial Sequence
  Description of Artificial Sequence: Synthetic oligonucleotide
  Target: LAMA2; (+) strand; PAM type: YTN; PAM sequence: CTG
cttctcctttgcaattaagt

SEQ ID NO: 370875 - DNA, 20 bp, Artificial Sequence
  Description of Artificial Sequence: Synthetic oligonucleotide
  Target: LAMA2; (+) strand; PAM type: YTN; PAM sequence: CTT
ctcctttgcaattaagtcta

SEQ ID NO: 370876 - DNA, 20 bp, Artificial Sequence
  Description of Artificial Sequence: Synthetic oligonucleotide
  Target: LAMA2; (+) strand; PAM type: YTN; PAM sequence: TTC
tcctttgcaattaagtctaa

SEQ ID NO: 370877 - DNA, 20 bp, Artificial Sequence
  Description of Artificial Sequence: Synthetic oligonucleotide
  Target: LAMA2; (+) strand; PAM type: YTN; PAM sequence: CTC
ctttgcaattaagtctaagc

SEQ ID NO: 370878 - DNA, 20 bp, Artificial Sequence
  Description of Artificial Sequence: Synthetic oligonucleotide
  Target: LAMA2; (+) strand; PAM type: YTN; PAM sequence: CTT
tgcaattaagtctaagcttt

SEQ ID NO: 370879 - DNA, 20 bp, Artificial Sequence
  Description of Artificial Sequence: Synthetic oligonucleotide
  Target: LAMA2; (+) strand; PAM type: YTN; PAM sequence: TTT
gcaattaagtctaagcttta

SEQ ID NO: 370880 - DNA, 20 bp, Artificial Sequence
  Description of Artificial Sequence: Synthetic oligonucleotide
  Target: LAMA2; (+) strand; PAM type: YTN; PAM sequence: TTG
caattaagtctaagctttaa

SEQ ID NO: 370881 - DNA, 20 bp, Artificial Sequence
  Description of Artificial Sequence: Synthetic oligonucleotide
  Target: LAMA2; (+) strand; PAM type: YTN; PAM sequence: TTA
agtctaagctttaaccagaa

SEQ ID NO: 370882 - DNA, 20 bp, Artificial Sequence
  Description of Artificial Sequence: Synthetic oligonucleotide
  Target: LAMA2; (+) strand; PAM type: YTN; PAM sequence: CTA
agctttaaccagaaaatagg

SEQ ID NO: 370883 - DNA, 20 bp, Artificial Sequence
  Description of Artificial Sequence: Synthetic oligonucleotide
  Target: LAMA2; (+) strand; PAM type: YTN; PAM sequence: CTT
taaccagaaaataggcttta

SEQ ID NO: 370884 - DNA, 20 bp, Artificial Sequence
  Description of Artificial Sequence: Synthetic oligonucleotide
  Target: LAMA2; (+) strand; PAM type: YTN; PAM sequence: TTT
aaccagaaaataggctttac

SEQ ID NO: 370885 - DNA, 20 bp, Artificial Sequence
  Description of Artificial Sequence: Synthetic oligonucleotide
  Target: LAMA2; (+) strand; PAM type: YTN; PAM sequence: TTA
accagaaaataggctttaca

SEQ ID NO: 370886 - DNA, 20 bp, Artificial Sequence
  Description of Artificial Sequence: Synthetic oligonucleotide
  Target: LAMA2; (+) strand; PAM type: YTN; PAM sequence: CTT
tacaaagtgcaaagcacttt

SEQ ID NO: 370887 - DNA, 20 bp, Artificial Sequence
  Description of Artificial Sequence: Synthetic oligonucleotide
  Target: LAMA2; (+) strand; PAM type: YTN; PAM sequence: TTT
acaaagtgcaaagcactttc

SEQ ID NO: 370888 - DNA, 20 bp, Artificial Sequence
  Description of Artificial Sequence: Synthetic oligonucleotide
  Target: LAMA2; (+) strand; PAM type: YTN; PAM sequence: TTA
caaagtgcaaagcactttcc

SEQ ID NO: 370889 - DNA, 20 bp, Artificial Sequence
  Description of Artificial Sequence: Synthetic oligonucleotide
  Target: LAMA2; (+) strand; PAM type: YTN; PAM sequence: CTT
tccatcctgctaagaaacct

SEQ ID NO: 370890 - DNA, 20 bp, Artificial Sequence
  Description of Artificial Sequence: Synthetic oligonucleotide
  Target: LAMA2; (+) strand; PAM type: YTN; PAM sequence: TTT
ccatcctgctaagaaacctt

SEQ ID NO: 370891 - DNA, 20 bp, Artificial Sequence
  Description of Artificial Sequence: Synthetic oligonucleotide
  Target: LAMA2; (+) strand; PAM type: YTN; PAM sequence: TTC
catcctgctaagaaacctta

SEQ ID NO: 370892 - DNA, 20 bp, Artificial Sequence
  Description of Artificial Sequence: Synthetic oligonucleotide
  Target: LAMA2; (+) strand; PAM type: YTN; PAM sequence: CTG
ctaagaaaccttaggattgg

SEQ ID NO: 370893 - DNA, 20 bp, Artificial Sequence
  Description of Artificial Sequence: Synthetic oligonucleotide
  Target: LAMA2; (+) strand; PAM type: YTN; PAM sequence: CTA
agaaaccttaggattggaga

SEQ ID NO: 370894 - DNA, 20 bp, Artificial Sequence
  Description of Artificial Sequence: Synthetic oligonucleotide
  Target: LAMA2; (+) strand; PAM type: YTN; PAM sequence: CTT
aggattggagaattacactg

SEQ ID NO: 370895 - DNA, 20 bp, Artificial Sequence
  Description of Artificial Sequence: Synthetic oligonucleotide
  Target: LAMA2; (+) strand; PAM type: YTN; PAM sequence: TTA
ggattggagaattacactga

SEQ ID NO: 370896 - DNA, 20 bp, Artificial Sequence
  Description of Artificial Sequence: Synthetic oligonucleotide
  Target: LAMA2; (+) strand; PAM type: YTN; PAM sequence: TTG
gagaattacactgaatagac

SEQ ID NO: 370897 - DNA, 20 bp, Artificial Sequence
  Description of Artificial Sequence: Synthetic oligonucleotide
  Target: LAMA2; (+) strand; PAM type: YTN; PAM sequence: TTA
cactgaatagaccattctga

SEQ ID NO: 370898 - DNA, 20 bp, Artificial Sequence
  Description of Artificial Sequence: Synthetic oligonucleotide
  Target: LAMA2; (+) strand; PAM type: YTN; PAM sequence: CTG
aatagaccattctgattaac

SEQ ID NO: 370899 - DNA, 20 bp, Artificial Sequence
  Description of Artificial Sequence: Synthetic oligonucleotide
  Target: LAMA2; (+) strand; PAM type: YTN; PAM sequence: TTC
tgattaactcaagggcacat

SEQ ID NO: 370900 - DNA, 20 bp, Artificial Sequence
  Description of Artificial Sequence: Synthetic oligonucleotide
  Target: LAMA2; (+) strand; PAM type: YTN; PAM sequence: CTG
attaactcaagggcacatta

SEQ ID NO: 370901 - DNA, 20 bp, Artificial Sequence
  Description of Artificial Sequence: Synthetic oligonucleotide
  Target: LAMA2; (+) strand; PAM type: YTN; PAM sequence: TTA
actcaagggcacattagttt

SEQ ID NO: 370902 - DNA, 20 bp, Artificial Sequence
  Description of Artificial Sequence: Synthetic oligonucleotide
  Target: LAMA2; (+) strand; PAM type: YTN; PAM sequence: CTC
aagggcacattagttttata

SEQ ID NO: 370903 - DNA, 20 bp, Artificial Sequence
  Description of Artificial Sequence: Synthetic oligonucleotide
  Target: LAMA2; (+) strand; PAM type: YTN; PAM sequence: TTA
gttttatattgtctgacatg

SEQ ID NO: 370904 - DNA, 20 bp, Artificial Sequence
  Description of Artificial Sequence: Synthetic oligonucleotide
  Target: LAMA2; (+) strand; PAM type: YTN; PAM sequence: TTT
tatattgtctgacatggcat

SEQ ID NO: 370905 - DNA, 20 bp, Artificial Sequence
  Description of Artificial Sequence: Synthetic oligonucleotide
  Target: LAMA2; (+) strand; PAM type: YTN; PAM sequence: TTT
atattgtctgacatggcatg

SEQ ID NO: 370906 - DNA, 20 bp, Artificial Sequence
  Description of Artificial Sequence: Synthetic oligonucleotide
  Target: LAMA2; (+) strand; PAM type: YTN; PAM sequence: TTA
tattgtctgacatggcatga

SEQ ID NO: 370907 - DNA, 20 bp, Artificial Sequence
  Description of Artificial Sequence: Synthetic oligonucleotide
  Target: LAMA2; (+) strand; PAM type: YTN; PAM sequence: TTG
tctgacatggcatgaagctt

SEQ ID NO: 370908 - DNA, 20 bp, Artificial Sequence
  Description of Artificial Sequence: Synthetic oligonucleotide
  Target: LAMA2; (+) strand; PAM type: YTN; PAM sequence: CTG
acatggcatgaagcttgaaa

SEQ ID NO: 370909 - DNA, 20 bp, Artificial Sequence
  Description of Artificial Sequence: Synthetic oligonucleotide
  Target: LAMA2; (+) strand; PAM type: YTN; PAM sequence: CTT
gaaacaacacttctcctttc

SEQ ID NO: 370910 - DNA, 20 bp, Artificial Sequence
  Description of Artificial Sequence: Synthetic oligonucleotide
  Target: LAMA2; (+) strand; PAM type: YTN; PAM sequence: TTG
aaacaacacttctcctttca

SEQ ID NO: 370911 - DNA, 20 bp, Artificial Sequence
  Description of Artificial Sequence: Synthetic oligonucleotide
  Target: LAMA2; (+) strand; PAM type: YTN; PAM sequence: CTT
ctcctttcattagtcttgca

SEQ ID NO: 370912 - DNA, 20 bp, Artificial Sequence
  Description of Artificial Sequence: Synthetic oligonucleotide
  Target: LAMA2; (+) strand; PAM type: YTN; PAM sequence: TTC
tcctttcattagtcttgcag

SEQ ID NO: 370913 - DNA, 20 bp, Artificial Sequence
  Description of Artificial Sequence: Synthetic oligonucleotide
  Target: LAMA2; (+) strand; PAM type: YTN; PAM sequence: CTC
ctttcattagtcttgcagaa

SEQ ID NO: 370914 - DNA, 20 bp, Artificial Sequence
  Description of Artificial Sequence: Synthetic oligonucleotide
  Target: LAMA2; (+) strand; PAM type: YTN; PAM sequence: CTT
tcattagtcttgcagaaaca

SEQ ID NO: 370915 - DNA, 20 bp, Artificial Sequence
  Description of Artificial Sequence: Synthetic oligonucleotide
  Target: LAMA2; (+) strand; PAM type: YTN; PAM sequence: TTT
cattagtcttgcagaaacac

SEQ ID NO: 370916 - DNA, 20 bp, Artificial Sequence
  Description of Artificial Sequence: Synthetic oligonucleotide
  Target: LAMA2; (+) strand; PAM type: YTN; PAM sequence: TTC
attagtcttgcagaaacaca

SEQ ID NO: 370917 - DNA, 20 bp, Artificial Sequence
  Description of Artificial Sequence: Synthetic oligonucleotide
  Target: LAMA2; (+) strand; PAM type: YTN; PAM sequence: TTA
gtcttgcagaaacacaattt

SEQ ID NO: 370918 - DNA, 20 bp, Artificial Sequence
  Description of Artificial Sequence: Synthetic oligonucleotide
  Target: LAMA2; (+) strand; PAM type: YTN; PAM sequence: CTT
gcagaaacacaatttaaaat

SEQ ID NO: 370919 - DNA, 20 bp, Artificial Sequence
  Description of Artificial Sequence: Synthetic oligonucleotide
  Target: LAMA2; (+) strand; PAM type: YTN; PAM sequence: TTG
cagaaacacaatttaaaatg

SEQ ID NO: 370920 - DNA, 20 bp, Artificial Sequence
  Description of Artificial Sequence: Synthetic oligonucleotide
  Target: LAMA2; (+) strand; PAM type: YTN; PAM sequence: TTT
aaaatggtgccaattaagga

SEQ ID NO: 370921 - DNA, 20 bp, Artificial Sequence
  Description of Artificial Sequence: Synthetic oligonucleotide
  Target: LAMA2; (+) strand; PAM type: YTN; PAM sequence: TTA
aaatggtgccaattaaggag

SEQ ID NO: 370922 - DNA, 20 bp, Artificial Sequence
  Description of Artificial Sequence: Synthetic oligonucleotide
  Target: LAMA2; (+) strand; PAM type: YTN; PAM sequence: TTA
aggaggatattatactctca

SEQ ID NO: 370923 - DNA, 20 bp, Artificial Sequence
  Description of Artificial Sequence: Synthetic oligonucleotide
  Target: LAMA2; (+) strand; PAM type: YTN; PAM sequence: TTA
tactctcatttccctgaaga

SEQ ID NO: 370924 - DNA, 20 bp, Artificial Sequence
  Description of Artificial Sequence: Synthetic oligonucleotide
  Target: LAMA2; (+) strand; PAM type: YTN; PAM sequence: CTC
tcatttccctgaagaattta

SEQ ID NO: 370925 - DNA, 20 bp, Artificial Sequence
  Description of Artificial Sequence: Synthetic oligonucleotide
  Target: LAMA2; (+) strand; PAM type: YTN; PAM sequence: CTC
atttccctgaagaatttaag

SEQ ID NO: 370926 - DNA, 20 bp, Artificial Sequence
  Description of Artificial Sequence: Synthetic oligonucleotide
  Target: LAMA2; (+) strand; PAM type: YTN; PAM sequence: TTT
ccctgaagaatttaaggcgg

SEQ ID NO: 370927 - DNA, 20 bp, Artificial Sequence
  Description of Artificial Sequence: Synthetic oligonucleotide
  Target: LAMA2; (+) strand; PAM type: YTN; PAM sequence: TTC
cctgaagaatttaaggcgga

SEQ ID NO: 370928 - DNA, 20 bp, Artificial Sequence
  Description of Artificial Sequence: Synthetic oligonucleotide
  Target: LAMA2; (+) strand; PAM type: YTN; PAM sequence: CTG
aagaatttaaggcggattct

SEQ ID NO: 370929 - DNA, 20 bp, Artificial Sequence
  Description of Artificial Sequence: Synthetic oligonucleotide
  Target: LAMA2; (+) strand; PAM type: YTN; PAM sequence: TTT
aaggcggattctgttacctg

SEQ ID NO: 370930 - DNA, 20 bp, Artificial Sequence
  Description of Artificial Sequence: Synthetic oligonucleotide
  Target: LAMA2; (+) strand; PAM type: YTN; PAM sequence: TTA
aggcggattctgttacctgt

SEQ ID NO: 370931 - DNA, 20 bp, Artificial Sequence
  Description of Artificial Sequence: Synthetic oligonucleotide
  Target: LAMA2; (+) strand; PAM type: YTN; PAM sequence: TTC
tgttacctgtaattcttaat

SEQ ID NO: 370932 - DNA, 20 bp, Artificial Sequence
  Description of Artificial Sequence: Synthetic oligonucleotide
  Target: LAMA2; (+) strand; PAM type: YTN; PAM sequence: CTG
ttacctgtaattcttaatgt

SEQ ID NO: 370933 - DNA, 20 bp, Artificial Sequence
  Description of Artificial Sequence: Synthetic oligonucleotide
  Target: LAMA2; (+) strand; PAM type: YTN; PAM sequence: TTA
cctgtaattcttaatgttct

SEQ ID NO: 370934 - DNA, 20 bp, Artificial Sequence
  Description of Artificial Sequence: Synthetic oligonucleotide
  Target: LAMA2; (+) strand; PAM type: YTN; PAM sequence: CTG
taattcttaatgttctatct

SEQ ID NO: 370935 - DNA, 20 bp, Artificial Sequence
  Description of Artificial Sequence: Synthetic oligonucleotide
  Target: LAMA2; (+) strand; PAM type: YTN; PAM sequence: TTC
ttaatgttctatctttctct

SEQ ID NO: 370936 - DNA, 20 bp, Artificial Sequence
  Description of Artificial Sequence: Synthetic oligonucleotide
  Target: LAMA2; (+) strand; PAM type: YTN; PAM sequence: CTT
aatgttctatctttctcttg

SEQ ID NO: 370937 - DNA, 20 bp, Artificial Sequence
  Description of Artificial Sequence: Synthetic oligonucleotide
  Target: LAMA2; (+) strand; PAM type: YTN; PAM sequence: TTA
atgttctatctttctcttgc

SEQ ID NO: 370938 - DNA, 20 bp, Artificial Sequence
  Description of Artificial Sequence: Synthetic oligonucleotide
  Target: LAMA2; (+) strand; PAM type: YTN; PAM sequence: TTC
tatctttctcttgctcattt

SEQ ID NO: 370939 - DNA, 20 bp, Artificial Sequence
  Description of Artificial Sequence: Synthetic oligonucleotide
  Target: LAMA2; (+) strand; PAM type: YTN; PAM sequence: CTA
tctttctcttgctcattttc

SEQ ID NO: 370940 - DNA, 20 bp, Artificial Sequence
  Description of Artificial Sequence: Synthetic oligonucleotide
  Target: LAMA2; (+) strand; PAM type: YTN; PAM sequence: CTT
tctcttgctcattttccccc

SEQ ID NO: 370941 - DNA, 20 bp, Artificial Sequence
  Description of Artificial Sequence: Synthetic oligonucleotide
  Target: LAMA2; (+) strand; PAM type: YTN; PAM sequence: TTT
ctcttgctcattttccccca

SEQ ID NO: 370942 - DNA, 20 bp, Artificial Sequence
  Description of Artificial Sequence: Synthetic oligonucleotide
  Target: LAMA2; (+) strand; PAM type: YTN; PAM sequence: TTC
tcttgctcattttcccccat

SEQ ID NO: 370943 - DNA, 20 bp, Artificial Sequence
  Description of Artificial Sequence: Synthetic oligonucleotide
  Target: LAMA2; (+) strand; PAM type: YTN; PAM sequence: CTC
ttgctcattttcccccattt

SEQ ID NO: 370944 - DNA, 20 bp, Artificial Sequence
  Description of Artificial Sequence: Synthetic oligonucleotide
  Target: LAMA2; (+) strand; PAM type: YTN; PAM sequence: CTT
gctcattttcccccatttct

SEQ ID NO: 370945 - DNA, 20 bp, Artificial Sequence
  Description of Artificial Sequence: Synthetic oligonucleotide
  Target: LAMA2; (+) strand; PAM type: YTN; PAM sequence: TTG
ctcattttcccccatttctc

SEQ ID NO: 370946 - DNA, 20 bp, Artificial Sequence
  Description of Artificial Sequence: Synthetic oligonucleotide
  Target: LAMA2; (+) strand; PAM type: YTN; PAM sequence: CTC
attttcccccatttctcttc

SEQ ID NO: 370947 - DNA, 20 bp, Artificial Sequence
  Description of Artificial Sequence: Synthetic oligonucleotide
  Target: LAMA2; (+) strand; PAM type: YTN; PAM sequence: TTT
tcccccatttctcttctact

SEQ ID NO: 370948 - DNA, 20 bp, Artificial Sequence
  Description of Artificial Sequence: Synthetic oligonucleotide
  Target: LAMA2; (+) strand; PAM type: YTN; PAM sequence: TTT
cccccatttctcttctactt

SEQ ID NO: 370949 - DNA, 20 bp, Artificial Sequence
  Description of Artificial Sequence: Synthetic oligonucleotide
  Target: LAMA2; (+) strand; PAM type: YTN; PAM sequence: TTC
ccccatttctcttctactta

SEQ ID NO: 370950 - DNA, 20 bp, Artificial Sequence
  Description of Artificial Sequence: Synthetic oligonucleotide
  Target: LAMA2; (+) strand; PAM type: YTN; PAM sequence: TTT
ctcttctacttaaaagcttc

SEQ ID NO: 370951 - DNA, 20 bp, Artificial Sequence
  Description of Artificial Sequence: Synthetic oligonucleotide
  Target: LAMA2; (+) strand; PAM type: YTN; PAM sequence: TTC
tcttctacttaaaagcttct

SEQ ID NO: 370952 - DNA, 20 bp, Artificial Sequence
  Description of Artificial Sequence: Synthetic oligonucleotide
  Target: LAMA2; (+) strand; PAM type: YTN; PAM sequence: CTC
ttctacttaaaagcttctgg

SEQ ID NO: 370953 - DNA, 20 bp, Artificial Sequence
  Description of Artificial Sequence: Synthetic oligonucleotide
  Target: LAMA2; (+) strand; PAM type: YTN; PAM sequence: CTT
ctacttaaaagcttctggga

SEQ ID NO: 370954 - DNA, 20 bp, Artificial Sequence
  Description of Artificial Sequence: Synthetic oligonucleotide
  Target: LAMA2; (+) strand; PAM type: YTN; PAM sequence: TTC
tacttaaaagcttctgggaa

SEQ ID NO: 370955 - DNA, 20 bp, Artificial Sequence
  Description of Artificial Sequence: Synthetic oligonucleotide
  Target: LAMA2; (+) strand; PAM type: YTN; PAM sequence: CTA
cttaaaagcttctgggaaaa

SEQ ID NO: 370956 - DNA, 20 bp, Artificial Sequence
  Description of Artificial Sequence: Synthetic oligonucleotide
  Target: LAMA2; (+) strand; PAM type: YTN; PAM sequence: CTT
aaaagcttctgggaaaaatc

SEQ ID NO: 370957 - DNA, 20 bp, Artificial Sequence
  Description of Artificial Sequence: Synthetic oligonucleotide
  Target: LAMA2; (+) strand; PAM type: YTN; PAM sequence: TTA
aaagcttctgggaaaaatcc

SEQ ID NO: 370958 - DNA, 20 bp, Artificial Sequence
  Description of Artificial Sequence: Synthetic oligonucleotide
  Target: LAMA2; (+) strand; PAM type: YTN; PAM sequence: CTT
ctgggaaaaatccaaaatga

SEQ ID NO: 370959 - DNA, 20 bp, Artificial Sequence
  Description of Artificial Sequence: Synthetic oligonucleotide
  Target: LAMA2; (+) strand; PAM type: YTN; PAM sequence: TTC
tgggaaaaatccaaaatgaa

SEQ ID NO: 370960 - DNA, 20 bp, Artificial Sequence
  Description of Artificial Sequence: Synthetic oligonucleotide
  Target: LAMA2; (+) strand; PAM type: YTN; PAM sequence: CTG
ggaaaaatccaaaatgaaaa

SEQ ID NO: 370961 - DNA, 20 bp, Artificial Sequence
  Description of Artificial Sequence: Synthetic oligonucleotide
  Target: LAMA2; (+) strand; PAM type: YTN; PAM sequence: TTC
agggcttttgtttcagtgta

SEQ ID NO: 370962 - DNA, 20 bp, Artificial Sequence
  Description of Artificial Sequence: Synthetic oligonucleotide
  Target: LAMA2; (+) strand; PAM type: YTN; PAM sequence: CTT
ttgtttcagtgtaatttggc

SEQ ID NO: 370963 - DNA, 20 bp, Artificial Sequence
  Description of Artificial Sequence: Synthetic oligonucleotide
  Target: LAMA2; (+) strand; PAM type: YTN; PAM sequence: TTT
tgtttcagtgtaatttggca

SEQ ID NO: 370964 - DNA, 20 bp, Artificial Sequence
  Description of Artificial Sequence: Synthetic oligonucleotide
  Target: LAMA2; (+) strand; PAM type: YTN; PAM sequence: TTT
gtttcagtgtaatttggcat

SEQ ID NO: 370965 - DNA, 20 bp, Artificial Sequence
  Description of Artificial Sequence: Synthetic oligonucleotide
  Target: LAMA2; (+) strand; PAM type: YTN; PAM sequence: TTG
tttcagtgtaatttggcatt

SEQ ID NO: 370966 - DNA, 20 bp, Artificial Sequence
  Description of Artificial Sequence: Synthetic oligonucleotide
  Target: LAMA2; (+) strand; PAM type: YTN; PAM sequence: TTT
cagtgtaatttggcatttag

SEQ ID NO: 370967 - DNA, 20 bp, Artificial Sequence
  Description of Artificial Sequence: Synthetic oligonucleotide
  Target: LAMA2; (+) strand; PAM type: YTN; PAM sequence: TTC
agtgtaatttggcatttagg

SEQ ID NO: 370968 - DNA, 20 bp, Artificial Sequence
  Description of Artificial Sequence: Synthetic oligonucleotide
  Target: LAMA2; (+) strand; PAM type: YTN; PAM sequence: TTT
ggcatttaggtttgttgatg

SEQ ID NO: 370969 - DNA, 20 bp, Artificial Sequence
  Description of Artificial Sequence: Synthetic oligonucleotide
  Target: LAMA2; (+) strand; PAM type: YTN; PAM sequence: TTG
gcatttaggtttgttgatgc

SEQ ID NO: 370970 - DNA, 20 bp, Artificial Sequence
  Description of Artificial Sequence: Synthetic oligonucleotide
  Target: LAMA2; (+) strand; PAM type: YTN; PAM sequence: TTT
aggtttgttgatgctctttc

SEQ ID NO: 370971 - DNA, 20 bp, Artificial Sequence
  Description of Artificial Sequence: Synthetic oligonucleotide
  Target: LAMA2; (+) strand; PAM type: YTN; PAM sequence: TTA
ggtttgttgatgctctttcc

SEQ ID NO: 370972 - DNA, 20 bp, Artificial Sequence
  Description of Artificial Sequence: Synthetic oligonucleotide
  Target: LAMA2; (+) strand; PAM type: YTN; PAM sequence: TTT
gttgatgctctttccctttt

SEQ ID NO: 370973 - DNA, 20 bp, Artificial Sequence
  Description of Artificial Sequence: Synthetic oligonucleotide
  Target: LAMA2; (+) strand; PAM type: YTN; PAM sequence: TTG
ttgatgctctttcccttttc

SEQ ID NO: 370974 - DNA, 20 bp, Artificial Sequence
  Description of Artificial Sequence: Synthetic oligonucleotide
  Target: LAMA2; (+) strand; PAM type: YTN; PAM sequence: TTG
atgctctttcccttttctct

SEQ ID NO: 370975 - DNA, 20 bp, Artificial Sequence
  Description of Artificial Sequence: Synthetic oligonucleotide
  Target: LAMA2; (+) strand; PAM type: YTN; PAM sequence: CTC
tttcccttttctctatataa

SEQ ID NO: 370976 - DNA, 20 bp, Artificial Sequence
  Description of Artificial Sequence: Synthetic oligonucleotide
  Target: LAMA2; (+) strand; PAM type: YTN; PAM sequence: CTT
tcccttttctctatataaga

SEQ ID NO: 370977 - DNA, 20 bp, Artificial Sequence
  Description of Artificial Sequence: Synthetic oligonucleotide
  Target: LAMA2; (+) strand; PAM type: YTN; PAM sequence: TTT
cccttttctctatataagat

SEQ ID NO: 370978 - DNA, 20 bp, Artificial Sequence
  Description of Artificial Sequence: Synthetic oligonucleotide
  Target: LAMA2; (+) strand; PAM type: YTN; PAM sequence: TTC
ccttttctctatataagatt

SEQ ID NO: 370979 - DNA, 20 bp, Artificial Sequence
  Description of Artificial Sequence: Synthetic oligonucleotide
  Target: LAMA2; (+) strand; PAM type: YTN; PAM sequence: CTT
ttctctatataagattttgt

SEQ ID NO: 370980 - DNA, 20 bp, Artificial Sequence
  Description of Artificial Sequence: Synthetic oligonucleotide
  Target: LAMA2; (+) strand; PAM type: YTN; PAM sequence: TTT
tctctatataagattttgtt

SEQ ID NO: 370981 - DNA, 20 bp, Artificial Sequence
  Description of Artificial Sequence: Synthetic oligonucleotide
  Target: LAMA2; (+) strand; PAM type: YTN; PAM sequence: TTT
ctctatataagattttgttt

SEQ ID NO: 370982 - DNA, 20 bp, Artificial Sequence
  Description of Artificial Sequence: Synthetic oligonucleotide
  Target: LAMA2; (+) strand; PAM type: YTN; PAM sequence: TTC
tctatataagattttgttta

SEQ ID NO: 370983 - DNA, 20 bp, Artificial Sequence
  Description of Artificial Sequence: Synthetic oligonucleotide
  Target: LAMA2; (+) strand; PAM type: YTN; PAM sequence: CTC
tatataagattttgtttaat

SEQ ID NO: 370984 - DNA, 20 bp, Artificial Sequence
  Description of Artificial Sequence: Synthetic oligonucleotide
  Target: LAMA2; (+) strand; PAM type: YTN; PAM sequence: CTA
tataagattttgtttaattg

SEQ ID NO: 370985 - DNA, 20 bp, Artificial Sequence
  Description of Artificial Sequence: Synthetic oligonucleotide
  Target: LAMA2; (+) strand; PAM type: YTN; PAM sequence: TTT
tgtttaattgcattgcatta

SEQ ID NO: 370986 - DNA, 20 bp, Artificial Sequence
  Description of Artificial Sequence: Synthetic oligonucleotide
  Target: LAMA2; (+) strand; PAM type: YTN; PAM sequence: TTT
gtttaattgcattgcattat

SEQ ID NO: 370987 - DNA, 20 bp, Artificial Sequence
  Description of Artificial Sequence: Synthetic oligonucleotide
  Target: LAMA2; (+) strand; PAM type: YTN; PAM sequence: TTG
tttaattgcattgcattatg

SEQ ID NO: 370988 - DNA, 20 bp, Artificial Sequence
  Description of Artificial Sequence: Synthetic oligonucleotide
  Target: LAMA2; (+) strand; PAM type: YTN; PAM sequence: TTT
aattgcattgcattatgaag

SEQ ID NO: 370989 - DNA, 20 bp, Artificial Sequence
  Description of Artificial Sequence: Synthetic oligonucleotide
  Target: LAMA2; (+) strand; PAM type: YTN; PAM sequence: TTA
attgcattgcattatgaagc

SEQ ID NO: 370990 - DNA, 20 bp, Artificial Sequence
  Description of Artificial Sequence: Synthetic oligonucleotide
  Target: LAMA2; (+) strand; PAM type: YTN; PAM sequence: TTG
cattgcattatgaagcatga

SEQ ID NO: 370991 - DNA, 20 bp, Artificial Sequence
  Description of Artificial Sequence: Synthetic oligonucleotide
  Target: LAMA2; (+) strand; PAM type: YTN; PAM sequence: TTG
cattatgaagcatgagagcc

SEQ ID NO: 370992 - DNA, 20 bp, Artificial Sequence
  Description of Artificial Sequence: Synthetic oligonucleotide
  Target: LAMA2; (+) strand; PAM type: YTN; PAM sequence: TTA
tgaagcatgagagccttaat

SEQ ID NO: 370993 - DNA, 20 bp, Artificial Sequence
  Description of Artificial Sequence: Synthetic oligonucleotide
  Target: LAMA2; (+) strand; PAM type: YTN; PAM sequence: CTT
aatttgtggatcagtggatt

SEQ ID NO: 370994 - DNA, 20 bp, Artificial Sequence
  Description of Artificial Sequence: Synthetic oligonucleotide
  Target: LAMA2; (+) strand; PAM type: YTN; PAM sequence: TTA
atttgtggatcagtggattt

SEQ ID NO: 370995 - DNA, 20 bp, Artificial Sequence
  Description of Artificial Sequence: Synthetic oligonucleotide
  Target: LAMA2; (+) strand; PAM type: YTN; PAM sequence: TTT
gtggatcagtggatttttga

SEQ ID NO: 370996 - DNA, 20 bp, Artificial Sequence
  Description of Artificial Sequence: Synthetic oligonucleotide
  Target: LAMA2; (+) strand; PAM type: YTN; PAM sequence: TTG
tggatcagtggatttttgaa

SEQ ID NO: 370997 - DNA, 20 bp, Artificial Sequence
  Description of Artificial Sequence: Synthetic oligonucleotide
  Target: LAMA2; (+) strand; PAM type: YTN; PAM sequence: TTT
ttgaaatgacatttttatga

SEQ ID NO: 370998 - DNA, 20 bp, Artificial Sequence
  Description of Artificial Sequence: Synthetic oligonucleotide
  Target: LAMA2; (+) strand; PAM type: YTN; PAM sequence: TTT
tgaaatgacatttttatgaa

SEQ ID NO: 370999 - DNA, 20 bp, Artificial Sequence
  Description of Artificial Sequence: Synthetic oligonucleotide
  Target: LAMA2; (+) strand; PAM type: YTN; PAM sequence: TTT
gaaatgacatttttatgaat

SEQ ID NO: 371000 - DNA, 20 bp, Artificial Sequence
  Description of Artificial Sequence: Synthetic oligonucleotide
  Target: LAMA2; (+) strand; PAM type: YTN; PAM sequence: TTG
aaatgacatttttatgaata

SEQ ID NO: 371001 - DNA, 20 bp, Artificial Sequence
  Description of Artificial Sequence: Synthetic oligonucleotide
  Target: LAMA2; (+) strand; PAM type: YTN; PAM sequence: TTT
ttatgaatagaaagactaag

SEQ ID NO: 371002 - DNA, 20 bp, Artificial Sequence
  Description of Artificial Sequence: Synthetic oligonucleotide
  Target: LAMA2; (+) strand; PAM type: YTN; PAM sequence: TTT
tatgaatagaaagactaagt

SEQ ID NO: 371003 - DNA, 20 bp, Artificial Sequence
  Description of Artificial Sequence: Synthetic oligonucleotide
  Target: LAMA2; (+) strand; PAM type: YTN; PAM sequence: TTT
atgaatagaaagactaagtg

SEQ ID NO: 371004 - DNA, 20 bp, Artificial Sequence
  Description of Artificial Sequence: Synthetic oligonucleotide
  Target: LAMA2; (+) strand; PAM type: YTN; PAM sequence: TTA
tgaatagaaagactaagtga

SEQ ID NO: 371005 - DNA, 20 bp, Artificial Sequence
  Description of Artificial Sequence: Synthetic oligonucleotide
  Target: LAMA2; (+) strand; PAM type: YTN; PAM sequence: CTA
agtgattttcattttaatta

SEQ ID NO: 371006 - DNA, 20 bp, Artificial Sequence
  Description of Artificial Sequence: Synthetic oligonucleotide
  Target: LAMA2; (+) strand; PAM type: YTN; PAM sequence: TTT
tcattttaattatgccataa

SEQ ID NO: 371007 - DNA, 20 bp, Artificial Sequence
  Description of Artificial Sequence: Synthetic oligonucleotide
  Target: LAMA2; (+) strand; PAM type: YTN; PAM sequence: TTT
cattttaattatgccataag

SEQ ID NO: 371008 - DNA, 20 bp, Artificial Sequence
  Description of Artificial Sequence: Synthetic oligonucleotide
  Target: LAMA2; (+) strand; PAM type: YTN; PAM sequence: TTC
attttaattatgccataagt

SEQ ID NO: 371009 - DNA, 20 bp, Artificial Sequence
  Description of Artificial Sequence: Synthetic oligonucleotide
  Target: LAMA2; (+) strand; PAM type: YTN; PAM sequence: TTT
taattatgccataagtcttt

SEQ ID NO: 371010 - DNA, 20 bp, Artificial Sequence
  Description of Artificial Sequence: Synthetic oligonucleotide
  Target: LAMA2; (+) strand; PAM type: YTN; PAM sequence: TTT
aattatgccataagtctttt

SEQ ID NO: 371011 - DNA, 20 bp, Artificial Sequence
  Description of Artificial Sequence: Synthetic oligonucleotide
  Target: LAMA2; (+) strand; PAM type: YTN; PAM sequence: TTA
attatgccataagtctttta

SEQ ID NO: 371012 - DNA, 20 bp, Artificial Sequence
  Description of Artificial Sequence: Synthetic oligonucleotide
  Target: LAMA2; (+) strand; PAM type: YTN; PAM sequence: TTA
tgccataagtcttttaaaat

SEQ ID NO: 371013 - DNA, 20 bp, Artificial Sequence
  Description of Artificial Sequence: Synthetic oligonucleotide
  Target: LAMA2; (+) strand; PAM type: YTN; PAM sequence: CTT
ttaaaatgtactttgggaaa

SEQ ID NO: 371014 - DNA, 20 bp, Artificial Sequence
  Description of Artificial Sequence: Synthetic oligonucleotide
  Target: LAMA2; (+) strand; PAM type: YTN; PAM sequence: TTT
taaaatgtactttgggaaaa

SEQ ID NO: 371015 - DNA, 20 bp, Artificial Sequence
  Description of Artificial Sequence: Synthetic oligonucleotide
  Target: LAMA2; (+) strand; PAM type: YTN; PAM sequence: TTT
aaaatgtactttgggaaaaa

SEQ ID NO: 371016 - DNA, 20 bp, Artificial Sequence
  Description of Artificial Sequence: Synthetic oligonucleotide
  Target: LAMA2; (+) strand; PAM type: YTN; PAM sequence: TTA
aaatgtactttgggaaaaat

SEQ ID NO: 371017 - DNA, 20 bp, Artificial Sequence
  Description of Artificial Sequence: Synthetic oligonucleotide
  Target: LAMA2; (+) strand; PAM type: YTN; PAM sequence: CTT
tgggaaaaatattgggttac

SEQ ID NO: 371018 - DNA, 20 bp, Artificial Sequence
  Description of Artificial Sequence: Synthetic oligonucleotide
  Target: LAMA2; (+) strand; PAM type: YTN; PAM sequence: TTT
gggaaaaatattgggttacc

SEQ ID NO: 371019 - DNA, 20 bp, Artificial Sequence
  Description of Artificial Sequence: Synthetic oligonucleotide
  Target: LAMA2; (+) strand; PAM type: YTN; PAM sequence: TTG
ggaaaaatattgggttacct

SEQ ID NO: 371020 - DNA, 20 bp, Artificial Sequence
  Description of Artificial Sequence: Synthetic oligonucleotide
  Target: LAMA2; (+) strand; PAM type: YTN; PAM sequence: TTG
ggttacctttaaacacttca

SEQ ID NO: 371021 - DNA, 20 bp, Artificial Sequence
  Description of Artificial Sequence: Synthetic oligonucleotide
  Target: LAMA2; (+) strand; PAM type: YTN; PAM sequence: TTA
cctttaaacacttcactaac

SEQ ID NO: 371022 - DNA, 20 bp, Artificial Sequence
  Description of Artificial Sequence: Synthetic oligonucleotide
  Target: LAMA2; (+) strand; PAM type: YTN; PAM sequence: CTT
taaacacttcactaacatgc

SEQ ID NO: 371023 - DNA, 20 bp, Artificial Sequence
  Description of Artificial Sequence: Synthetic oligonucleotide
  Target: LAMA2; (+) strand; PAM type: YTN; PAM sequence: TTT
aaacacttcactaacatgca

SEQ ID NO: 371024 - DNA, 20 bp, Artificial Sequence
  Description of Artificial Sequence: Synthetic oligonucleotide
  Target: LAMA2; (+) strand; PAM type: YTN; PAM sequence: TTA
aacacttcactaacatgcag

SEQ ID NO: 371025 - DNA, 20 bp, Artificial Sequence
  Description of Artificial Sequence: Synthetic oligonucleotide
  Target: LAMA2; (+) strand; PAM type: YTN; PAM sequence: CTT
cactaacatgcagtaggaaa

SEQ ID NO: 371026 - DNA, 20 bp, Artificial Sequence
  Description of Artificial Sequence: Synthetic oligonucleotide
  Target: LAMA2; (+) strand; PAM type: YTN; PAM sequence: TTC
actaacatgcagtaggaaat

SEQ ID NO: 371027 - DNA, 20 bp, Artificial Sequence
  Description of Artificial Sequence: Synthetic oligonucleotide
  Target: LAMA2; (+) strand; PAM type: YTN; PAM sequence: CTA
acatgcagtaggaaataata

SEQ ID NO: 371028 - DNA, 20 bp, Artificial Sequence
  Description of Artificial Sequence: Synthetic oligonucleotide
  Target: LAMA2; (+) strand; PAM type: YTN; PAM sequence: CTC
agcccaaaactgacatggaa

SEQ ID NO: 371029 - DNA, 20 bp, Artificial Sequence
  Description of Artificial Sequence: Synthetic oligonucleotide
  Target: LAMA2; (+) strand; PAM type: YTN; PAM sequence: CTG
acatggaattgttttactta

SEQ ID NO: 371030 - DNA, 20 bp, Artificial Sequence
  Description of Artificial Sequence: Synthetic oligonucleotide
  Target: LAMA2; (+) strand; PAM type: YTN; PAM sequence: TTG
ttttacttaccctaagaaga

SEQ ID NO: 371031 - DNA, 20 bp, Artificial Sequence
  Description of Artificial Sequence: Synthetic oligonucleotide
  Target: LAMA2; (+) strand; PAM type: YTN; PAM sequence: TTT
tacttaccctaagaagacaa

SEQ ID NO: 371032 - DNA, 20 bp, Artificial Sequence
  Description of Artificial Sequence: Synthetic oligonucleotide
  Target: LAMA2; (+) strand; PAM type: YTN; PAM sequence: TTT
acttaccctaagaagacaaa

SEQ ID NO: 371033 - DNA, 20 bp, Artificial Sequence
  Description of Artificial Sequence: Synthetic oligonucleotide
  Target: LAMA2; (+) strand; PAM type: YTN; PAM sequence: TTA
cttaccctaagaagacaaaa

SEQ ID NO: 371034 - DNA, 20 bp, Artificial Sequence
  Description of Artificial Sequence: Synthetic oligonucleotide
  Target: LAMA2; (+) strand; PAM type: YTN; PAM sequence: CTT
accctaagaagacaaaaata

SEQ ID NO: 371035 - DNA, 20 bp, Artificial Sequence
  Description of Artificial Sequence: Synthetic oligonucleotide
  Target: LAMA2; (+) strand; PAM type: YTN; PAM sequence: TTA
ccctaagaagacaaaaataa

SEQ ID NO: 371036 - DNA, 20 bp, Artificial Sequence
  Description of Artificial Sequence: Synthetic oligonucleotide
  Target: LAMA2; (+) strand; PAM type: YTN; PAM sequence: CTA
agaagacaaaaataagtatg

SEQ ID NO: 371037 - DNA, 20 bp, Artificial Sequence
  Description of Artificial Sequence: Synthetic oligonucleotide
  Target: LAMA2; (+) strand; PAM type: YTN; PAM sequence: CTC
atgatgttccatatagtcat

SEQ ID NO: 371038 - DNA, 20 bp, Artificial Sequence
  Description of Artificial Sequence: Synthetic oligonucleotide
  Target: LAMA2; (+) strand; PAM type: YTN; PAM sequence: TTC
catatagtcatatttcatga

SEQ ID NO: 371039 - DNA, 20 bp, Artificial Sequence
  Description of Artificial Sequence: Synthetic oligonucleotide
  Target: LAMA2; (+) strand; PAM type: YTN; PAM sequence: TTT
catgaattcattaggataaa

SEQ ID NO: 371040 - DNA, 20 bp, Artificial Sequence
  Description of Artificial Sequence: Synthetic oligonucleotide
  Target: LAMA2; (+) strand; PAM type: YTN; PAM sequence: TTC
atgaattcattaggataaaa

SEQ ID NO: 371041 - DNA, 20 bp, Artificial Sequence
  Description of Artificial Sequence: Synthetic oligonucleotide
  Target: LAMA2; (+) strand; PAM type: YTN; PAM sequence: TTC
attaggataaaatcaaatca

SEQ ID NO: 371042 - DNA, 20 bp, Artificial Sequence
  Description of Artificial Sequence: Synthetic oligonucleotide
  Target: LAMA2; (+) strand; PAM type: YTN; PAM sequence: TTA
ggataaaatcaaatcaaatt

SEQ ID NO: 371043 - DNA, 20 bp, Artificial Sequence
  Description of Artificial Sequence: Synthetic oligonucleotide
  Target: LAMA2; (+) strand; PAM type: YTN; PAM sequence: TTT
tcatgctgaattcattagga

SEQ ID NO: 371044 - DNA, 20 bp, Artificial Sequence
  Description of Artificial Sequence: Synthetic oligonucleotide
  Target: LAMA2; (+) strand; PAM type: YTN; PAM sequence: TTT
catgctgaattcattaggat

SEQ ID NO: 371045 - DNA, 20 bp, Artificial Sequence
  Description of Artificial Sequence: Synthetic oligonucleotide
  Target: LAMA2; (+) strand; PAM type: YTN; PAM sequence: TTC
atgctgaattcattaggatg

SEQ ID NO: 371046 - DNA, 20 bp, Artificial Sequence
  Description of Artificial Sequence: Synthetic oligonucleotide
  Target: LAMA2; (+) strand; PAM type: YTN; PAM sequence: CTG
aattcattaggatgaaagca

SEQ ID NO: 371047 - DNA, 20 bp, Artificial Sequence
  Description of Artificial Sequence: Synthetic oligonucleotide
  Target: LAMA2; (+) strand; PAM type: YTN; PAM sequence: TTC
attaggatgaaagcaaatta

SEQ ID NO: 371048 - DNA, 20 bp, Artificial Sequence
  Description of Artificial Sequence: Synthetic oligonucleotide
  Target: LAMA2; (+) strand; PAM type: YTN; PAM sequence: TTA
ggatgaaagcaaattagtcc

SEQ ID NO: 371049 - DNA, 20 bp, Artificial Sequence
  Description of Artificial Sequence: Synthetic oligonucleotide
  Target: LAMA2; (+) strand; PAM type: YTN; PAM sequence: TTA
gtccatttgttgatgtgata

SEQ ID NO: 371050 - DNA, 20 bp, Artificial Sequence
  Description of Artificial Sequence: Synthetic oligonucleotide
  Target: LAMA2; (+) strand; PAM type: YTN; PAM sequence: TTT
gttgatgtgatatttctaaa

SEQ ID NO: 371051 - DNA, 20 bp, Artificial Sequence
  Description of Artificial Sequence: Synthetic oligonucleotide
  Target: LAMA2; (+) strand; PAM type: YTN; PAM sequence: TTG
ttgatgtgatatttctaaaa

SEQ ID NO: 371052 - DNA, 20 bp, Artificial Sequence
  Description of Artificial Sequence: Synthetic oligonucleotide
  Target: LAMA2; (+) strand; PAM type: YTN; PAM sequence: TTG
atgtgatatttctaaaacta

SEQ ID NO: 371053 - DNA, 20 bp, Artificial Sequence
  Description of Artificial Sequence: Synthetic oligonucleotide
  Target: LAMA2; (+) strand; PAM type: YTN; PAM sequence: TTT
ctaaaactagaagccttttt

SEQ ID NO: 371054 - DNA, 20 bp, Artificial Sequence
  Description of Artificial Sequence: Synthetic oligonucleotide
  Target: LAMA2; (+) strand; PAM type: YTN; PAM sequence: TTC
taaaactagaagcctttttt

SEQ ID NO: 371055 - DNA, 20 bp, Artificial Sequence
  Description of Artificial Sequence: Synthetic oligonucleotide
  Target: LAMA2; (+) strand; PAM type: YTN; PAM sequence: CTA
aaactagaagccttttttaa

SEQ ID NO: 371056 - DNA, 20 bp, Artificial Sequence
  Description of Artificial Sequence: Synthetic oligonucleotide
  Target: LAMA2; (+) strand; PAM type: YTN; PAM sequence: CTA
gaagccttttttaactaata

SEQ ID NO: 371057 - DNA, 20 bp, Artificial Sequence
  Description of Artificial Sequence: Synthetic oligonucleotide
  Target: LAMA2; (+) strand; PAM type: YTN; PAM sequence: CTT
ttttaactaataaaacagtg

SEQ ID NO: 371058 - DNA, 20 bp, Artificial Sequence
  Description of Artificial Sequence: Synthetic oligonucleotide
  Target: LAMA2; (+) strand; PAM type: YTN; PAM sequence: TTT
tttaactaataaaacagtgt

SEQ ID NO: 371059 - DNA, 20 bp, Artificial Sequence
  Description of Artificial Sequence: Synthetic oligonucleotide
  Target: LAMA2; (+) strand; PAM type: YTN; PAM sequence: TTT
ttaactaataaaacagtgtc

SEQ ID NO: 371060 - DNA, 20 bp, Artificial Sequence
  Description of Artificial Sequence: Synthetic oligonucleotide
  Target: LAMA2; (+) strand; PAM type: YTN; PAM sequence: TTT
taactaataaaacagtgtca

SEQ ID NO: 371061 - DNA, 20 bp, Artificial Sequence
  Description of Artificial Sequence: Synthetic oligonucleotide
  Target: LAMA2; (+) strand; PAM type: YTN; PAM sequence: TTT
aactaataaaacagtgtcat

SEQ ID NO: 371062 - DNA, 20 bp, Artificial Sequence
  Description of Artificial Sequence: Synthetic oligonucleotide
  Target: LAMA2; (+) strand; PAM type: YTN; PAM sequence: TTA
actaataaaacagtgtcatt

SEQ ID NO: 371063 - DNA, 20 bp, Artificial Sequence
  Description of Artificial Sequence: Synthetic oligonucleotide
  Target: LAMA2; (+) strand; PAM type: YTN; PAM sequence: CTA
ataaaacagtgtcattcagc

SEQ ID NO: 371064 - DNA, 20 bp, Artificial Sequence
  Description of Artificial Sequence: Synthetic oligonucleotide
  Target: LAMA2; (+) strand; PAM type: YTN; PAM sequence: TTC
agcataattttgagagaagg

SEQ ID NO: 371065 - DNA, 20 bp, Artificial Sequence
  Description of Artificial Sequence: Synthetic oligonucleotide
  Target: LAMA2; (+) strand; PAM type: YTN; PAM sequence: TTT
tgagagaaggaagggagaga

SEQ ID NO: 371066 - DNA, 20 bp, Artificial Sequence
  Description of Artificial Sequence: Synthetic oligonucleotide
  Target: LAMA2; (+) strand; PAM type: YTN; PAM sequence: TTT
gagagaaggaagggagagaa

SEQ ID NO: 371067 - DNA, 20 bp, Artificial Sequence
  Description of Artificial Sequence: Synthetic oligonucleotide
  Target: LAMA2; (+) strand; PAM type: YTN; PAM sequence: TTG
agagaaggaagggagagaac

SEQ ID NO: 371068 - DNA, 20 bp, Artificial Sequence
  Description of Artificial Sequence: Synthetic oligonucleotide
  Target: LAMA2; (+) strand; PAM type: YTN; PAM sequence: CTA
ctaatgatgcctagtttact

SEQ ID NO: 371069 - DNA, 20 bp, Artificial Sequence
  Description of Artificial Sequence: Synthetic oligonucleotide
  Target: LAMA2; (+) strand; PAM type: YTN; PAM sequence: CTA
atgatgcctagtttactgat

SEQ ID NO: 371070 - DNA, 20 bp, Artificial Sequence
  Description of Artificial Sequence: Synthetic oligonucleotide
  Target: LAMA2; (+) strand; PAM type: YTN; PAM sequence: CTA
gtttactgattttgtttcat

SEQ ID NO: 371071 - DNA, 20 bp, Artificial Sequence
  Description of Artificial Sequence: Synthetic oligonucleotide
  Target: LAMA2; (+) strand; PAM type: YTN; PAM sequence: TTT
actgattttgtttcatgaac

SEQ ID NO: 371072 - DNA, 20 bp, Artificial Sequence
  Description of Artificial Sequence: Synthetic oligonucleotide
  Target: LAMA2; (+) strand; PAM type: YTN; PAM sequence: TTA
ctgattttgtttcatgaaca

SEQ ID NO: 371073 - DNA, 20 bp, Artificial Sequence
  Description of Artificial Sequence: Synthetic oligonucleotide
  Target: LAMA2; (+) strand; PAM type: YTN; PAM sequence: CTG
attttgtttcatgaacaggg

SEQ ID NO: 371074 - DNA, 20 bp, Artificial Sequence
  Description of Artificial Sequence: Synthetic oligonucleotide
  Target: LAMA2; (+) strand; PAM type: YTN; PAM sequence: TTT
tgtttcatgaacagggagat

SEQ ID NO: 371075 - DNA, 20 bp, Artificial Sequence
  Description of Artificial Sequence: Synthetic oligonucleotide
  Target: LAMA2; (+) strand; PAM type: YTN; PAM sequence: TTT
gtttcatgaacagggagata

SEQ ID NO: 371076 - DNA, 20 bp, Artificial Sequence
  Description of Artificial Sequence: Synthetic oligonucleotide
  Target: LAMA2; (+) strand; PAM type: YTN; PAM sequence: TTG
tttcatgaacagggagatag

SEQ ID NO: 371077 - DNA, 20 bp, Artificial Sequence
  Description of Artificial Sequence: Synthetic oligonucleotide
  Target: LAMA2; (+) strand; PAM type: YTN; PAM sequence: TTT
catgaacagggagataggag

SEQ ID NO: 371078 - DNA, 20 bp, Artificial Sequence
  Description of Artificial Sequence: Synthetic oligonucleotide
  Target: LAMA2; (+) strand; PAM type: YTN; PAM sequence: TTC
atgaacagggagataggagg

SEQ ID NO: 371079 - DNA, 20 bp, Artificial Sequence
  Description of Artificial Sequence: Synthetic oligonucleotide
  Target: LAMA2; (+) strand; PAM type: YTN; PAM sequence: CTC
cttcaaataacagagcgatc

SEQ ID NO: 371080 - DNA, 20 bp, Artificial Sequence
  Description of Artificial Sequence: Synthetic oligonucleotide
  Target: LAMA2; (+) strand; PAM type: YTN; PAM sequence: CTT
caaataacagagcgatcttg

SEQ ID NO: 371081 - DNA, 20 bp, Artificial Sequence
  Description of Artificial Sequence: Synthetic oligonucleotide
  Target: LAMA2; (+) strand; PAM type: YTN; PAM sequence: TTC
aaataacagagcgatcttga

SEQ ID NO: 371082 - DNA, 20 bp, Artificial Sequence
  Description of Artificial Sequence: Synthetic oligonucleotide
  Target: LAMA2; (+) strand; PAM type: YTN; PAM sequence: CTT
gaggaaacagtggacatctt

SEQ ID NO: 371083 - DNA, 20 bp, Artificial Sequence
  Description of Artificial Sequence: Synthetic oligonucleotide
  Target: LAMA2; (+) strand; PAM type: YTN; PAM sequence: TTG
aggaaacagtggacatcttg

SEQ ID NO: 371084 - DNA, 20 bp, Artificial Sequence
  Description of Artificial Sequence: Synthetic oligonucleotide
  Target: LAMA2; (+) strand; PAM type: YTN; PAM sequence: CTT
gatgataaagacagaatctg

SEQ ID NO: 371085 - DNA, 20 bp, Artificial Sequence
  Description of Artificial Sequence: Synthetic oligonucleotide
  Target: LAMA2; (+) strand; PAM type: YTN; PAM sequence: TTG
atgataaagacagaatctgg

SEQ ID NO: 371086 - DNA, 20 bp, Artificial Sequence
  Description of Artificial Sequence: Synthetic oligonucleotide
  Target: LAMA2; (+) strand; PAM type: YTN; PAM sequence: CTG
gtgtttcctgaattttccat

SEQ ID NO: 371087 - DNA, 20 bp, Artificial Sequence
  Description of Artificial Sequence: Synthetic oligonucleotide
  Target: LAMA2; (+) strand; PAM type: YTN; PAM sequence: TTT
cctgaattttccatcatagc

SEQ ID NO: 371088 - DNA, 20 bp, Artificial Sequence
  Description of Artificial Sequence: Synthetic oligonucleotide
  Target: LAMA2; (+) strand; PAM type: YTN; PAM sequence: TTC
ctgaattttccatcatagct

SEQ ID NO: 371089 - DNA, 20 bp, Artificial Sequence
  Description of Artificial Sequence: Synthetic oligonucleotide
  Target: LAMA2; (+) strand; PAM type: YTN; PAM sequence: CTG
aattttccatcatagctagt

SEQ ID NO: 371090 - DNA, 20 bp, Artificial Sequence
  Description of Artificial Sequence: Synthetic oligonucleotide
  Target: LAMA2; (+) strand; PAM type: YTN; PAM sequence: TTT
tccatcatagctagtaaata

SEQ ID NO: 371091 - DNA, 20 bp, Artificial Sequence
  Description of Artificial Sequence: Synthetic oligonucleotide
  Target: LAMA2; (+) strand; PAM type: YTN; PAM sequence: TTT
ccatcatagctagtaaatag

SEQ ID NO: 371092 - DNA, 20 bp, Artificial Sequence
  Description of Artificial Sequence: Synthetic oligonucleotide
  Target: LAMA2; (+) strand; PAM type: YTN; PAM sequence: TTC
catcatagctagtaaatagg

SEQ ID NO: 371093 - DNA, 20 bp, Artificial Sequence
  Description of Artificial Sequence: Synthetic oligonucleotide
  Target: LAMA2; (+) strand; PAM type: YTN; PAM sequence: CTA
gtaaataggtgatcatgtag

SEQ ID NO: 371094 - DNA, 20 bp, Artificial Sequence
  Description of Artificial Sequence: Synthetic oligonucleotide
  Target: LAMA2; (+) strand; PAM type: YTN; PAM sequence: CTG
actttcaagtgccctttctc

SEQ ID NO: 371095 - DNA, 20 bp, Artificial Sequence
  Description of Artificial Sequence: Synthetic oligonucleotide
  Target: LAMA2; (+) strand; PAM type: YTN; PAM sequence: CTT
tcaagtgccctttctccaaa

SEQ ID NO: 371096 - DNA, 20 bp, Artificial Sequence
  Description of Artificial Sequence: Synthetic oligonucleotide
  Target: LAMA2; (+) strand; PAM type: YTN; PAM sequence: TTT
caagtgccctttctccaaaa

SEQ ID NO: 371097 - DNA, 20 bp, Artificial Sequence
  Description of Artificial Sequence: Synthetic oligonucleotide
  Target: LAMA2; (+) strand; PAM type: YTN; PAM sequence: TTC
aagtgccctttctccaaaat

SEQ ID NO: 371098 - DNA, 20 bp, Artificial Sequence
  Description of Artificial Sequence: Synthetic oligonucleotide
  Target: LAMA2; (+) strand; PAM type: YTN; PAM sequence: CTT
tctccaaaattgtattgata

SEQ ID NO: 371099 - DNA, 20 bp, Artificial Sequence
  Description of Artificial Sequence: Synthetic oligonucleotide
  Target: LAMA2; (+) strand; PAM type: YTN; PAM sequence: TTT
ctccaaaattgtattgataa

SEQ ID NO: 371100 - DNA, 20 bp, Artificial Sequence
  Description of Artificial Sequence: Synthetic oligonucleotide
  Target: LAMA2; (+) strand; PAM type: YTN; PAM sequence: TTC
tccaaaattgtattgataac

SEQ ID NO: 371101 - DNA, 20 bp, Artificial Sequence
  Description of Artificial Sequence: Synthetic oligonucleotide
  Target: LAMA2; (+) strand; PAM type: YTN; PAM sequence: CTC
caaaattgtattgataacta

SEQ ID NO: 371102 - DNA, 20 bp, Artificial Sequence
  Description of Artificial Sequence: Synthetic oligonucleotide
  Target: LAMA2; (+) strand; PAM type: YTN; PAM sequence: TTG
tattgataactaagtgctga

SEQ ID NO: 371103 - DNA, 20 bp, Artificial Sequence
  Description of Artificial Sequence: Synthetic oligonucleotide
  Target: LAMA2; (+) strand; PAM type: YTN; PAM sequence: TTG
ataactaagtgctgatattc

SEQ ID NO: 371104 - DNA, 20 bp, Artificial Sequence
  Description of Artificial Sequence: Synthetic oligonucleotide
  Target: LAMA2; (+) strand; PAM type: YTN; PAM sequence: CTA
agtgctgatattccattttg

SEQ ID NO: 371105 - DNA, 20 bp, Artificial Sequence
  Description of Artificial Sequence: Synthetic oligonucleotide
  Target: LAMA2; (+) strand; PAM type: YTN; PAM sequence: CTG
atattccattttgagtatat

SEQ ID NO: 371106 - DNA, 20 bp, Artificial Sequence
  Description of Artificial Sequence: Synthetic oligonucleotide
  Target: LAMA2; (+) strand; PAM type: YTN; PAM sequence: TTC
cattttgagtatatgggttc

SEQ ID NO: 371107 - DNA, 20 bp, Artificial Sequence
  Description of Artificial Sequence: Synthetic oligonucleotide
  Target: LAMA2; (+) strand; PAM type: YTN; PAM sequence: TTT
tgagtatatgggttctgata

SEQ ID NO: 371108 - DNA, 20 bp, Artificial Sequence
  Description of Artificial Sequence: Synthetic oligonucleotide
  Target: LAMA2; (+) strand; PAM type: YTN; PAM sequence: TTT
gagtatatgggttctgatac

SEQ ID NO: 371109 - DNA, 20 bp, Artificial Sequence
  Description of Artificial Sequence: Synthetic oligonucleotide
  Target: LAMA2; (+) strand; PAM type: YTN; PAM sequence: TTG
agtatatgggttctgataca

SEQ ID NO: 371110 - DNA, 20 bp, Artificial Sequence
  Description of Artificial Sequence: Synthetic oligonucleotide
  Target: LAMA2; (+) strand; PAM type: YTN; PAM sequence: TTC
tgatacaatacacaaagagg

SEQ ID NO: 371111 - DNA, 20 bp, Artificial Sequence
  Description of Artificial Sequence: Synthetic oligonucleotide
  Target: LAMA2; (+) strand; PAM type: YTN; PAM sequence: CTG
atacaatacacaaagaggag

SEQ ID NO: 371112 - DNA, 20 bp, Artificial Sequence
  Description of Artificial Sequence: Synthetic oligonucleotide
  Target: LAMA2; (+) strand; PAM type: YTN; PAM sequence: TTT
gaatgttgctcatcaagggc

SEQ ID NO: 371113 - DNA, 20 bp, Artificial Sequence
  Description of Artificial Sequence: Synthetic oligonucleotide
  Target: LAMA2; (+) strand; PAM type: YTN; PAM sequence: TTG
aatgttgctcatcaagggca

SEQ ID NO: 371114 - DNA, 20 bp, Artificial Sequence
  Description of Artificial Sequence: Synthetic oligonucleotide
  Target: LAMA2; (+) strand; PAM type: YTN; PAM sequence: TTG
ctcatcaagggcattcttac

SEQ ID NO: 371115 - DNA, 20 bp, Artificial Sequence
  Description of Artificial Sequence: Synthetic oligonucleotide
  Target: LAMA2; (+) strand; PAM type: YTN; PAM sequence: CTC
atcaagggcattcttactgt

SEQ ID NO: 371116 - DNA, 20 bp, Artificial Sequence
  Description of Artificial Sequence: Synthetic oligonucleotide
  Target: LAMA2; (+) strand; PAM type: YTN; PAM sequence: TTC
ttactgttcagctgaccctg

SEQ ID NO: 371117 - DNA, 20 bp, Artificial Sequence
  Description of Artificial Sequence: Synthetic oligonucleotide
  Target: LAMA2; (+) strand; PAM type: YTN; PAM sequence: CTT
actgttcagctgaccctgca

SEQ ID NO: 371118 - DNA, 20 bp, Artificial Sequence
  Description of Artificial Sequence: Synthetic oligonucleotide
  Target: LAMA2; (+) strand; PAM type: YTN; PAM sequence: TTA
ctgttcagctgaccctgcat

SEQ ID NO: 371119 - DNA, 20 bp, Artificial Sequence
  Description of Artificial Sequence: Synthetic oligonucleotide
  Target: LAMA2; (+) strand; PAM type: YTN; PAM sequence: CTG
ttcagctgaccctgcatttt

SEQ ID NO: 371120 - DNA, 20 bp, Artificial Sequence
  Description of Artificial Sequence: Synthetic oligonucleotide
  Target: LAMA2; (+) strand; PAM type: YTN; PAM sequence: TTC
agctgaccctgcattttagc

SEQ ID NO: 371121 - DNA, 20 bp, Artificial Sequence
  Description of Artificial Sequence: Synthetic oligonucleotide
  Target: LAMA2; (+) strand; PAM type: YTN; PAM sequence: CTG
accctgcattttagcttctt

SEQ ID NO: 371122 - DNA, 20 bp, Artificial Sequence
  Description of Artificial Sequence: Synthetic oligonucleotide
  Target: LAMA2; (+) strand; PAM type: YTN; PAM sequence: CTG
cattttagcttcttgtttat

SEQ ID NO: 371123 - DNA, 20 bp, Artificial Sequence
  Description of Artificial Sequence: Synthetic oligonucleotide
  Target: LAMA2; (+) strand; PAM type: YTN; PAM sequence: TTT
tagcttcttgtttatttttc

SEQ ID NO: 371124 - DNA, 20 bp, Artificial Sequence
  Description of Artificial Sequence: Synthetic oligonucleotide
  Target: LAMA2; (+) strand; PAM type: YTN; PAM sequence: TTT
agcttcttgtttatttttca

SEQ ID NO: 371125 - DNA, 20 bp, Artificial Sequence
  Description of Artificial Sequence: Synthetic oligonucleotide
  Target: LAMA2; (+) strand; PAM type: YTN; PAM sequence: TTA
gcttcttgtttatttttcat

SEQ ID NO: 371126 - DNA, 20 bp, Artificial Sequence
  Description of Artificial Sequence: Synthetic oligonucleotide
  Target: LAMA2; (+) strand; PAM type: YTN; PAM sequence: CTT
cttgtttatttttcatggtt

SEQ ID NO: 371127 - DNA, 20 bp, Artificial Sequence
  Description of Artificial Sequence: Synthetic oligonucleotide
  Target: LAMA2; (+) strand; PAM type: YTN; PAM sequence: TTC
ttgtttatttttcatggttt

SEQ ID NO: 371128 - DNA, 20 bp, Artificial Sequence
  Description of Artificial Sequence: Synthetic oligonucleotide
  Target: LAMA2; (+) strand; PAM type: YTN; PAM sequence: CTT
gtttatttttcatggtttta

SEQ ID NO: 371129 - DNA, 20 bp, Artificial Sequence
  Description of Artificial Sequence: Synthetic oligonucleotide
  Target: LAMA2; (+) strand; PAM type: YTN; PAM sequence: TTG
tttatttttcatggttttaa

SEQ ID NO: 371130 - DNA, 20 bp, Artificial Sequence
  Description of Artificial Sequence: Synthetic oligonucleotide
  Target: LAMA2; (+) strand; PAM type: YTN; PAM sequence: TTT
atttttcatggttttaaccc

SEQ ID NO: 371131 - DNA, 20 bp, Artificial Sequence
  Description of Artificial Sequence: Synthetic oligonucleotide
  Target: LAMA2; (+) strand; PAM type: YTN; PAM sequence: TTA
tttttcatggttttaaccca

SEQ ID NO: 371132 - DNA, 20 bp, Artificial Sequence
  Description of Artificial Sequence: Synthetic oligonucleotide
  Target: LAMA2; (+) strand; PAM type: YTN; PAM sequence: TTT
ttcatggttttaacccagca

SEQ ID NO: 371133 - DNA, 20 bp, Artificial Sequence
  Description of Artificial Sequence: Synthetic oligonucleotide
  Target: LAMA2; (+) strand; PAM type: YTN; PAM sequence: TTT
tcatggttttaacccagcat

SEQ ID NO: 371134 - DNA, 20 bp, Artificial Sequence
  Description of Artificial Sequence: Synthetic oligonucleotide
  Target: LAMA2; (+) strand; PAM type: YTN; PAM sequence: TTT
catggttttaacccagcatt

SEQ ID NO: 371135 - DNA, 20 bp, Artificial Sequence
  Description of Artificial Sequence: Synthetic oligonucleotide
  Target: LAMA2; (+) strand; PAM type: YTN; PAM sequence: TTC
atggttttaacccagcatta

SEQ ID NO: 371136 - DNA, 20 bp, Artificial Sequence
  Description of Artificial Sequence: Synthetic oligonucleotide
  Target: LAMA2; (+) strand; PAM type: YTN; PAM sequence: TTT
taacccagcattaagtagca

SEQ ID NO: 371137 - DNA, 20 bp, Artificial Sequence
  Description of Artificial Sequence: Synthetic oligonucleotide
  Target: LAMA2; (+) strand; PAM type: YTN; PAM sequence: TTT
aacccagcattaagtagcat

SEQ ID NO: 371138 - DNA, 20 bp, Artificial Sequence
  Description of Artificial Sequence: Synthetic oligonucleotide
  Target: LAMA2; (+) strand; PAM type: YTN; PAM sequence: TTA
acccagcattaagtagcatg

SEQ ID NO: 371139 - DNA, 20 bp, Artificial Sequence
  Description of Artificial Sequence: Synthetic oligonucleotide
  Target: LAMA2; (+) strand; PAM type: YTN; PAM sequence: TTA
agtagcatggtttttagcat

SEQ ID NO: 371140 - DNA, 20 bp, Artificial Sequence
  Description of Artificial Sequence: Synthetic oligonucleotide
  Target: LAMA2; (+) strand; PAM type: YTN; PAM sequence: TTT
ttagcatgaaaaataaattt

SEQ ID NO: 371141 - DNA, 20 bp, Artificial Sequence
  Description of Artificial Sequence: Synthetic oligonucleotide
  Target: LAMA2; (+) strand; PAM type: YTN; PAM sequence: TTT
tagcatgaaaaataaattta

SEQ ID NO: 371142 - DNA, 20 bp, Artificial Sequence
  Description of Artificial Sequence: Synthetic oligonucleotide
  Target: LAMA2; (+) strand; PAM type: YTN; PAM sequence: TTT
agcatgaaaaataaatttat

SEQ ID NO: 371143 - DNA, 20 bp, Artificial Sequence
  Description of Artificial Sequence: Synthetic oligonucleotide
  Target: LAMA2; (+) strand; PAM type: YTN; PAM sequence: TTA
gcatgaaaaataaatttata

SEQ ID NO: 371144 - DNA, 20 bp, Artificial Sequence
  Description of Artificial Sequence: Synthetic oligonucleotide
  Target: LAMA2; (+) strand; PAM type: YTN; PAM sequence: TTT
ataaatttataaagcttaac

SEQ ID NO: 371145 - DNA, 20 bp, Artificial Sequence
  Description of Artificial Sequence: Synthetic oligonucleotide
  Target: LAMA2; (+) strand; PAM type: YTN; PAM sequence: TTA
taaatttataaagcttaact

SEQ ID NO: 371146 - DNA, 20 bp, Artificial Sequence
  Description of Artificial Sequence: Synthetic oligonucleotide
  Target: LAMA2; (+) strand; PAM type: YTN; PAM sequence: TTT
ataaagcttaacttgcttta

SEQ ID NO: 371147 - DNA, 20 bp, Artificial Sequence
  Description of Artificial Sequence: Synthetic oligonucleotide
  Target: LAMA2; (+) strand; PAM type: YTN; PAM sequence: TTA
taaagcttaacttgctttaa

SEQ ID NO: 371148 - DNA, 20 bp, Artificial Sequence
  Description of Artificial Sequence: Synthetic oligonucleotide
  Target: LAMA2; (+) strand; PAM type: YTN; PAM sequence: CTT
aacttgctttaaaatttgat

SEQ ID NO: 371149 - DNA, 20 bp, Artificial Sequence
  Description of Artificial Sequence: Synthetic oligonucleotide
  Target: LAMA2; (+) strand; PAM type: YTN; PAM sequence: TTA
acttgctttaaaatttgatt

SEQ ID NO: 371150 - DNA, 20 bp, Artificial Sequence
  Description of Artificial Sequence: Synthetic oligonucleotide
  Target: LAMA2; (+) strand; PAM type: YTN; PAM sequence: CTT
gctttaaaatttgattataa

SEQ ID NO: 371151 - DNA, 20 bp, Artificial Sequence
  Description of Artificial Sequence: Synthetic oligonucleotide
  Target: LAMA2; (+) strand; PAM type: YTN; PAM sequence: TTG
ctttaaaatttgattataaa

SEQ ID NO: 371152 - DNA, 20 bp, Artificial Sequence
  Description of Artificial Sequence: Synthetic oligonucleotide
  Target: LAMA2; (+) strand; PAM type: YTN; PAM sequence: CTT
taaaatttgattataaatta

SEQ ID NO: 371153 - DNA, 20 bp, Artificial Sequence
  Description of Artificial Sequence: Synthetic oligonucleotide
  Target: LAMA2; (+) strand; PAM type: YTN; PAM sequence: TTT
aaaatttgattataaattat

SEQ ID NO: 371154 - DNA, 20 bp, Artificial Sequence
  Description of Artificial Sequence: Synthetic oligonucleotide
  Target: LAMA2; (+) strand; PAM type: YTN; PAM sequence: TTA
aaatttgattataaattatc

SEQ ID NO: 371155 - DNA, 20 bp, Artificial Sequence
  Description of Artificial Sequence: Synthetic oligonucleotide
  Target: LAMA2; (+) strand; PAM type: YTN; PAM sequence: TTT
gattataaattatctgaaaa

SEQ ID NO: 371156 - DNA, 20 bp, Artificial Sequence
  Description of Artificial Sequence: Synthetic oligonucleotide
  Target: LAMA2; (+) strand; PAM type: YTN; PAM sequence: TTG
attataaattatctgaaaaa

SEQ ID NO: 371157 - DNA, 20 bp, Artificial Sequence
  Description of Artificial Sequence: Synthetic oligonucleotide
  Target: LAMA2; (+) strand; PAM type: YTN; PAM sequence: TTA
taaattatctgaaaaatatt

SEQ ID NO: 371158 - DNA, 20 bp, Artificial Sequence
  Description of Artificial Sequence: Synthetic oligonucleotide
  Target: LAMA2; (+) strand; PAM type: YTN; PAM sequence: TTA
tctgaaaaatatttttggca

SEQ ID NO: 371159 - DNA, 20 bp, Artificial Sequence
  Description of Artificial Sequence: Synthetic oligonucleotide
  Target: LAMA2; (+) strand; PAM type: YTN; PAM sequence: CTG
aaaaatatttttggcaccag

SEQ ID NO: 371160 - DNA, 20 bp, Artificial Sequence
  Description of Artificial Sequence: Synthetic oligonucleotide
  Target: LAMA2; (+) strand; PAM type: YTN; PAM sequence: TTT
ttggcaccagaacaaaatct

SEQ ID NO: 371161 - DNA, 20 bp, Artificial Sequence
  Description of Artificial Sequence: Synthetic oligonucleotide
  Target: LAMA2; (+) strand; PAM type: YTN; PAM sequence: TTT
tggcaccagaacaaaatcta

SEQ ID NO: 371162 - DNA, 20 bp, Artificial Sequence
  Description of Artificial Sequence: Synthetic oligonucleotide
  Target: LAMA2; (+) strand; PAM type: YTN; PAM sequence: TTT
ggcaccagaacaaaatctaa

SEQ ID NO: 371163 - DNA, 20 bp, Artificial Sequence
  Description of Artificial Sequence: Synthetic oligonucleotide
  Target: LAMA2; (+) strand; PAM type: YTN; PAM sequence: TTG
gcaccagaacaaaatctaaa

SEQ ID NO: 371164 - DNA, 20 bp, Artificial Sequence
  Description of Artificial Sequence: Synthetic oligonucleotide
  Target: LAMA2; (+) strand; PAM type: YTN; PAM sequence: CTA
aacttctgcaatagtgtagg

SEQ ID NO: 371165 - DNA, 20 bp, Artificial Sequence
  Description of Artificial Sequence: Synthetic oligonucleotide
  Target: LAMA2; (+) strand; PAM type: YTN; PAM sequence: CTT
ctgcaatagtgtaggtctat

SEQ ID NO: 371166 - DNA, 20 bp, Artificial Sequence
  Description of Artificial Sequence: Synthetic oligonucleotide
  Target: LAMA2; (+) strand; PAM type: YTN; PAM sequence: TTC
tgcaatagtgtaggtctata

SEQ ID NO: 371167 - DNA, 20 bp, Artificial Sequence
  Description of Artificial Sequence: Synthetic oligonucleotide
  Target: LAMA2; (+) strand; PAM type: YTN; PAM sequence: CTG
caatagtgtaggtctatatt

SEQ ID NO: 371168 - DNA, 20 bp, Artificial Sequence
  Description of Artificial Sequence: Synthetic oligonucleotide
  Target: LAMA2; (+) strand; PAM type: YTN; PAM sequence: CTA
tatttaaaagacattttaac

SEQ ID NO: 371169 - DNA, 20 bp, Artificial Sequence
  Description of Artificial Sequence: Synthetic oligonucleotide
  Target: LAMA2; (+) strand; PAM type: YTN; PAM sequence: TTT
aaaagacattttaactcaaa

SEQ ID NO: 371170 - DNA, 20 bp, Artificial Sequence
  Description of Artificial Sequence: Synthetic oligonucleotide
  Target: LAMA2; (+) strand; PAM type: YTN; PAM sequence: TTA
aaagacattttaactcaaag

SEQ ID NO: 371171 - DNA, 20 bp, Artificial Sequence
  Description of Artificial Sequence: Synthetic oligonucleotide
  Target: LAMA2; (+) strand; PAM type: YTN; PAM sequence: TTT
taactcaaagtccatttgaa

SEQ ID NO: 371172 - DNA, 20 bp, Artificial Sequence
  Description of Artificial Sequence: Synthetic oligonucleotide
  Target: LAMA2; (+) strand; PAM type: YTN; PAM sequence: TTT
aactcaaagtccatttgaag

SEQ ID NO: 371173 - DNA, 20 bp, Artificial Sequence
  Description of Artificial Sequence: Synthetic oligonucleotide
  Target: LAMA2; (+) strand; PAM type: YTN; PAM sequence: TTA
actcaaagtccatttgaagt

SEQ ID NO: 371174 - DNA, 20 bp, Artificial Sequence
  Description of Artificial Sequence: Synthetic oligonucleotide
  Target: LAMA2; (+) strand; PAM type: YTN; PAM sequence: CTC
aaagtccatttgaagtaagc

SEQ ID NO: 371175 - DNA, 20 bp, Artificial Sequence
  Description of Artificial Sequence: Synthetic oligonucleotide
  Target: LAMA2; (+) strand; PAM type: YTN; PAM sequence: TTT
gaagtaagccaggaagtatt

SEQ ID NO: 371176 - DNA, 20 bp, Artificial Sequence
  Description of Artificial Sequence: Synthetic oligonucleotide
  Target: LAMA2; (+) strand; PAM type: YTN; PAM sequence: TTG
aagtaagccaggaagtattc

SEQ ID NO: 371177 - DNA, 20 bp, Artificial Sequence
  Description of Artificial Sequence: Synthetic oligonucleotide
  Target: LAMA2; (+) strand; PAM type: YTN; PAM sequence: TTC
aatgtcacatgggaagattt

SEQ ID NO: 371178 - DNA, 20 bp, Artificial Sequence
  Description of Artificial Sequence: Synthetic oligonucleotide
  Target: LAMA2; (+) strand; PAM type: YTN; PAM sequence: TTT
catgcttgcttcttctcata

SEQ ID NO: 371179 - DNA, 20 bp, Artificial Sequence
  Description of Artificial Sequence: Synthetic oligonucleotide
  Target: LAMA2; (+) strand; PAM type: YTN; PAM sequence: TTC
atgcttgcttcttctcatag

SEQ ID NO: 371180 - DNA, 20 bp, Artificial Sequence
  Description of Artificial Sequence: Synthetic oligonucleotide
  Target: LAMA2; (+) strand; PAM type: YTN; PAM sequence: CTT
gcttcttctcatagttcttg

SEQ ID NO: 371181 - DNA, 20 bp, Artificial Sequence
  Description of Artificial Sequence: Synthetic oligonucleotide
  Target: LAMA2; (+) strand; PAM type: YTN; PAM sequence: TTG
cttcttctcatagttcttgt

SEQ ID NO: 371182 - DNA, 20 bp, Artificial Sequence
  Description of Artificial Sequence: Synthetic oligonucleotide
  Target: LAMA2; (+) strand; PAM type: YTN; PAM sequence: CTT
cttctcatagttcttgtggt

SEQ ID NO: 371183 - DNA, 20 bp, Artificial Sequence
  Description of Artificial Sequence: Synthetic oligonucleotide
  Target: LAMA2; (+) strand; PAM type: YTN; PAM sequence: TTC
ttctcatagttcttgtggta

SEQ ID NO: 371184 - DNA, 20 bp, Artificial Sequence
  Description of Artificial Sequence: Synthetic oligonucleotide
  Target: LAMA2; (+) strand; PAM type: YTN; PAM sequence: CTT
ctcatagttcttgtggtatg

SEQ ID NO: 371185 - DNA, 20 bp, Artificial Sequence
  Description of Artificial Sequence: Synthetic oligonucleotide
  Target: LAMA2; (+) strand; PAM type: YTN; PAM sequence: TTC
tcatagttcttgtggtatgt

SEQ ID NO: 371186 - DNA, 20 bp, Artificial Sequence
  Description of Artificial Sequence: Synthetic oligonucleotide
  Target: LAMA2; (+) strand; PAM type: YTN; PAM sequence: CTC
atagttcttgtggtatgtaa

SEQ ID NO: 371187 - DNA, 20 bp, Artificial Sequence
  Description of Artificial Sequence: Synthetic oligonucleotide
  Target: LAMA2; (+) strand; PAM type: YTN; PAM sequence: TTC
ttgtggtatgtaatgtgagc

SEQ ID NO: 371188 - DNA, 20 bp, Artificial Sequence
  Description of Artificial Sequence: Synthetic oligonucleotide
  Target: LAMA2; (+) strand; PAM type: YTN; PAM sequence: CTT
gtggtatgtaatgtgagcaa

SEQ ID NO: 371189 - DNA, 20 bp, Artificial Sequence
  Description of Artificial Sequence: Synthetic oligonucleotide
  Target: LAMA2; (+) strand; PAM type: YTN; PAM sequence: TTG
tggtatgtaatgtgagcaaa

SEQ ID NO: 371190 - DNA, 20 bp, Artificial Sequence
  Description of Artificial Sequence: Synthetic oligonucleotide
  Target: LAMA2; (+) strand; PAM type: YTN; PAM sequence: TTT
tgtaaagcactttcgtaaca

SEQ ID NO: 371191 - DNA, 20 bp, Artificial Sequence
  Description of Artificial Sequence: Synthetic oligonucleotide
  Target: LAMA2; (+) strand; PAM type: YTN; PAM sequence: TTT
gtaaagcactttcgtaacag

SEQ ID NO: 371192 - DNA, 20 bp, Artificial Sequence
  Description of Artificial Sequence: Synthetic oligonucleotide
  Target: LAMA2; (+) strand; PAM type: YTN; PAM sequence: TTG
taaagcactttcgtaacagg

SEQ ID NO: 371193 - DNA, 20 bp, Artificial Sequence
  Description of Artificial Sequence: Synthetic oligonucleotide
  Target: LAMA2; (+) strand; PAM type: YTN; PAM sequence: CTT
tcgtaacaggacacctgtaa

SEQ ID NO: 371194 - DNA, 20 bp, Artificial Sequence
  Description of Artificial Sequence: Synthetic oligonucleotide
  Target: LAMA2; (+) strand; PAM type: YTN; PAM sequence: TTT
cgtaacaggacacctgtaaa

SEQ ID NO: 371195 - DNA, 20 bp, Artificial Sequence
  Description of Artificial Sequence: Synthetic oligonucleotide
  Target: LAMA2; (+) strand; PAM type: YTN; PAM sequence: TTC
gtaacaggacacctgtaaaa

SEQ ID NO: 371196 - DNA, 20 bp, Artificial Sequence
  Description of Artificial Sequence: Synthetic oligonucleotide
  Target: LAMA2; (+) strand; PAM type: YTN; PAM sequence: CTG
taaaaataaccaatccatca

SEQ ID NO: 371197 - DNA, 20 bp, Artificial Sequence
  Description of Artificial Sequence: Synthetic oligonucleotide
  Target: LAMA2; (+) strand; PAM type: YTN; PAM sequence: CTT
ccatctttttttttttttta

SEQ ID NO: 371198 - DNA, 20 bp, Artificial Sequence
  Description of Artificial Sequence: Synthetic oligonucleotide
  Target: LAMA2; (+) strand; PAM type: YTN; PAM sequence: TTC
catcttttttttttttttat

SEQ ID NO: 371199 - DNA, 20 bp, Artificial Sequence
  Description of Artificial Sequence: Synthetic oligonucleotide
  Target: LAMA2; (+) strand; PAM type: YTN; PAM sequence: CTT
ttttttttttttatttccat

SEQ ID NO: 371200 - DNA, 20 bp, Artificial Sequence
  Description of Artificial Sequence: Synthetic oligonucleotide
  Target: LAMA2; (+) strand; PAM type: YTN; PAM sequence: TTT
tttttttttttatttccatt

SEQ ID NO: 371201 - DNA, 20 bp, Artificial Sequence
  Description of Artificial Sequence: Synthetic oligonucleotide
  Target: LAMA2; (+) strand; PAM type: YTN; PAM sequence: TTT
ttttttttttatttccatta

SEQ ID NO: 371202 - DNA, 20 bp, Artificial Sequence
  Description of Artificial Sequence: Synthetic oligonucleotide
  Target: LAMA2; (+) strand; PAM type: YTN; PAM sequence: TTT
tttttttttatttccattat

SEQ ID NO: 371203 - DNA, 20 bp, Artificial Sequence
  Description of Artificial Sequence: Synthetic oligonucleotide
  Target: LAMA2; (+) strand; PAM type: YTN; PAM sequence: TTT
ttttttttatttccattata

SEQ ID NO: 371204 - DNA, 20 bp, Artificial Sequence
  Description of Artificial Sequence: Synthetic oligonucleotide
  Target: LAMA2; (+) strand; PAM type: YTN; PAM sequence: TTT
tttttttatttccattatat

SEQ ID NO: 371205 - DNA, 20 bp, Artificial Sequence
  Description of Artificial Sequence: Synthetic oligonucleotide
  Target: LAMA2; (+) strand; PAM type: YTN; PAM sequence: TTT
ttttttatttccattatata

SEQ ID NO: 371206 - DNA, 20 bp, Artificial Sequence
  Description of Artificial Sequence: Synthetic oligonucleotide
  Target: LAMA2; (+) strand; PAM type: YTN; PAM sequence: TTT
tttttatttccattatatag

SEQ ID NO: 371207 - DNA, 20 bp, Artificial Sequence
  Description of Artificial Sequence: Synthetic oligonucleotide
  Target: LAMA2; (+) strand; PAM type: YTN; PAM sequence: TTT
ttttatttccattatatagg

SEQ ID NO: 371208 - DNA, 20 bp, Artificial Sequence
  Description of Artificial Sequence: Synthetic oligonucleotide
  Target: LAMA2; (+) strand; PAM type: YTN; PAM sequence: TTT
tttatttccattatataggt

SEQ ID NO: 371209 - DNA, 20 bp, Artificial Sequence
  Description of Artificial Sequence: Synthetic oligonucleotide
  Target: LAMA2; (+) strand; PAM type: YTN; PAM sequence: TTT
ttatttccattatataggtt

SEQ ID NO: 371210 - DNA, 20 bp, Artificial Sequence
  Description of Artificial Sequence: Synthetic oligonucleotide
  Target: LAMA2; (+) strand; PAM type: YTN; PAM sequence: TTT
tatttccattatataggttg

SEQ ID NO: 371211 - DNA, 20 bp, Artificial Sequence
  Description of Artificial Sequence: Synthetic oligonucleotide
  Target: LAMA2; (+) strand; PAM type: YTN; PAM sequence: TTT
atttccattatataggttgt

SEQ ID NO: 371212 - DNA, 20 bp, Artificial Sequence
  Description of Artificial Sequence: Synthetic oligonucleotide
  Target: LAMA2; (+) strand; PAM type: YTN; PAM sequence: TTA
tttccattatataggttgtc

SEQ ID NO: 371213 - DNA, 20 bp, Artificial Sequence
  Description of Artificial Sequence: Synthetic oligonucleotide
  Target: LAMA2; (+) strand; PAM type: YTN; PAM sequence: TTT
ccattatataggttgtctga

SEQ ID NO: 371214 - DNA, 20 bp, Artificial Sequence
  Description of Artificial Sequence: Synthetic oligonucleotide
  Target: LAMA2; (+) strand; PAM type: YTN; PAM sequence: TTC
cattatataggttgtctgat

SEQ ID NO: 371215 - DNA, 20 bp, Artificial Sequence
  Description of Artificial Sequence: Synthetic oligonucleotide
  Target: LAMA2; (+) strand; PAM type: YTN; PAM sequence: TTA
tataggttgtctgatgcagt

SEQ ID NO: 371216 - DNA, 20 bp, Artificial Sequence
  Description of Artificial Sequence: Synthetic oligonucleotide
  Target: LAMA2; (+) strand; PAM type: YTN; PAM sequence: TTG
tctgatgcagttttctggtt

SEQ ID NO: 371217 - DNA, 20 bp, Artificial Sequence
  Description of Artificial Sequence: Synthetic oligonucleotide
  Target: LAMA2; (+) strand; PAM type: YTN; PAM sequence: CTG
atgcagttttctggtttcca

SEQ ID NO: 371218 - DNA, 20 bp, Artificial Sequence
  Description of Artificial Sequence: Synthetic oligonucleotide
  Target: LAMA2; (+) strand; PAM type: YTN; PAM sequence: TTT
tctggtttccactacaaaaa

SEQ ID NO: 371219 - DNA, 20 bp, Artificial Sequence
  Description of Artificial Sequence: Synthetic oligonucleotide
  Target: LAMA2; (+) strand; PAM type: YTN; PAM sequence: TTT
ctggtttccactacaaaaat

SEQ ID NO: 371220 - DNA, 20 bp, Artificial Sequence
  Description of Artificial Sequence: Synthetic oligonucleotide
  Target: LAMA2; (+) strand; PAM type: YTN; PAM sequence: TTC
tggtttccactacaaaaata

SEQ ID NO: 371221 - DNA, 20 bp, Artificial Sequence
  Description of Artificial Sequence: Synthetic oligonucleotide
  Target: LAMA2; (+) strand; PAM type: YTN; PAM sequence: CTG
gtttccactacaaaaatact

SEQ ID NO: 371222 - DNA, 20 bp, Artificial Sequence
  Description of Artificial Sequence: Synthetic oligonucleotide
  Target: LAMA2; (+) strand; PAM type: YTN; PAM sequence: TTT
ccactacaaaaatacttgag

SEQ ID NO: 371223 - DNA, 20 bp, Artificial Sequence
  Description of Artificial Sequence: Synthetic oligonucleotide
  Target: LAMA2; (+) strand; PAM type: YTN; PAM sequence: TTC
cactacaaaaatacttgagt

SEQ ID NO: 371224 - DNA, 20 bp, Artificial Sequence
  Description of Artificial Sequence: Synthetic oligonucleotide
  Target: LAMA2; (+) strand; PAM type: YTN; PAM sequence: CTA
caaaaatacttgagttttaa

SEQ ID NO: 371225 - DNA, 20 bp, Artificial Sequence
  Description of Artificial Sequence: Synthetic oligonucleotide
  Target: LAMA2; (+) strand; PAM type: YTN; PAM sequence: CTT
gagttttaagatgattttta

SEQ ID NO: 371226 - DNA, 20 bp, Artificial Sequence
  Description of Artificial Sequence: Synthetic oligonucleotide
  Target: LAMA2; (+) strand; PAM type: YTN; PAM sequence: TTG
agttttaagatgatttttat

SEQ ID NO: 371227 - DNA, 20 bp, Artificial Sequence
  Description of Artificial Sequence: Synthetic oligonucleotide
  Target: LAMA2; (+) strand; PAM type: YTN; PAM sequence: TTT
taagatgatttttatttgat

SEQ ID NO: 371228 - DNA, 20 bp, Artificial Sequence
  Description of Artificial Sequence: Synthetic oligonucleotide
  Target: LAMA2; (+) strand; PAM type: YTN; PAM sequence: TTT
aagatgatttttatttgatg

SEQ ID NO: 371229 - DNA, 20 bp, Artificial Sequence
  Description of Artificial Sequence: Synthetic oligonucleotide
  Target: LAMA2; (+) strand; PAM type: YTN; PAM sequence: TTA
agatgatttttatttgatga

SEQ ID NO: 371230 - DNA, 20 bp, Artificial Sequence
  Description of Artificial Sequence: Synthetic oligonucleotide
  Target: LAMA2; (+) strand; PAM type: YTN; PAM sequence: TTT
ttatttgatgaaacgtgaca

SEQ ID NO: 371231 - DNA, 20 bp, Artificial Sequence
  Description of Artificial Sequence: Synthetic oligonucleotide
  Target: LAMA2; (+) strand; PAM type: YTN; PAM sequence: TTT
tatttgatgaaacgtgacat

SEQ ID NO: 371232 - DNA, 20 bp, Artificial Sequence
  Description of Artificial Sequence: Synthetic oligonucleotide
  Target: LAMA2; (+) strand; PAM type: YTN; PAM sequence: TTT
atttgatgaaacgtgacatt

SEQ ID NO: 371233 - DNA, 20 bp, Artificial Sequence
  Description of Artificial Sequence: Synthetic oligonucleotide
  Target: LAMA2; (+) strand; PAM type: YTN; PAM sequence: TTA
tttgatgaaacgtgacatta

SEQ ID NO: 371234 - DNA, 20 bp, Artificial Sequence
  Description of Artificial Sequence: Synthetic oligonucleotide
  Target: LAMA2; (+) strand; PAM type: YTN; PAM sequence: TTT
gatgaaacgtgacattagaa

SEQ ID NO: 371235 - DNA, 20 bp, Artificial Sequence
  Description of Artificial Sequence: Synthetic oligonucleotide
  Target: LAMA2; (+) strand; PAM type: YTN; PAM sequence: TTG
atgaaacgtgacattagaaa

SEQ ID NO: 371236 - DNA, 20 bp, Artificial Sequence
  Description of Artificial Sequence: Synthetic oligonucleotide
  Target: LAMA2; (+) strand; PAM type: YTN; PAM sequence: TTA
gaaaatgtaagaactacatg

SEQ ID NO: 371237 - DNA, 20 bp, Artificial Sequence
  Description of Artificial Sequence: Synthetic oligonucleotide
  Target: LAMA2; (+) strand; PAM type: YTN; PAM sequence: CTA
catgttatttgtcttttaaa

SEQ ID NO: 371238 - DNA, 20 bp, Artificial Sequence
  Description of Artificial Sequence: Synthetic oligonucleotide
  Target: LAMA2; (+) strand; PAM type: YTN; PAM sequence: TTA
tttgtcttttaaatcaataa

SEQ ID NO: 371239 - DNA, 20 bp, Artificial Sequence
  Description of Artificial Sequence: Synthetic oligonucleotide
  Target: LAMA2; (+) strand; PAM type: YTN; PAM sequence: TTT
gtcttttaaatcaataattg

SEQ ID NO: 371240 - DNA, 20 bp, Artificial Sequence
  Description of Artificial Sequence: Synthetic oligonucleotide
  Target: LAMA2; (+) strand; PAM type: YTN; PAM sequence: TTG
tcttttaaatcaataattgg

SEQ ID NO: 371241 - DNA, 20 bp, Artificial Sequence
  Description of Artificial Sequence: Synthetic oligonucleotide
  Target: LAMA2; (+) strand; PAM type: YTN; PAM sequence: CTT
ttaaatcaataattggaaat

SEQ ID NO: 371242 - DNA, 20 bp, Artificial Sequence
  Description of Artificial Sequence: Synthetic oligonucleotide
  Target: LAMA2; (+) strand; PAM type: YTN; PAM sequence: TTT
taaatcaataattggaaata

SEQ ID NO: 371243 - DNA, 20 bp, Artificial Sequence
  Description of Artificial Sequence: Synthetic oligonucleotide
  Target: LAMA2; (+) strand; PAM type: YTN; PAM sequence: TTT
aaatcaataattggaaataa

SEQ ID NO: 371244 - DNA, 20 bp, Artificial Sequence
  Description of Artificial Sequence: Synthetic oligonucleotide
  Target: LAMA2; (+) strand; PAM type: YTN; PAM sequence: TTA
aatcaataattggaaataaa

SEQ ID NO: 371245 - DNA, 20 bp, Artificial Sequence
  Description of Artificial Sequence: Synthetic oligonucleotide
  Target: LAMA2; (+) strand; PAM type: YTN; PAM sequence: TTG
gaaataaaaaaccctctcaa

SEQ ID NO: 371246 - DNA, 20 bp, Artificial Sequence
  Description of Artificial Sequence: Synthetic oligonucleotide
  Target: LAMA2; (+) strand; PAM type: YTN; PAM sequence: CTC
tcaattatgcaagattttca

SEQ ID NO: 371247 - DNA, 20 bp, Artificial Sequence
  Description of Artificial Sequence: Synthetic oligonucleotide
  Target: LAMA2; (+) strand; PAM type: YTN; PAM sequence: CTC
aattatgcaagattttcagt

SEQ ID NO: 371248 - DNA, 20 bp, Artificial Sequence
  Description of Artificial Sequence: Synthetic oligonucleotide
  Target: LAMA2; (+) strand; PAM type: YTN; PAM sequence: TTA
tgcaagattttcagttgaat

SEQ ID NO: 371249 - DNA, 20 bp, Artificial Sequence
  Description of Artificial Sequence: Synthetic oligonucleotide
  Target: LAMA2; (+) strand; PAM type: YTN; PAM sequence: TTT
tcagttgaatgttagaaata

SEQ ID NO: 371250 - DNA, 20 bp, Artificial Sequence
  Description of Artificial Sequence: Synthetic oligonucleotide
  Target: LAMA2; (+) strand; PAM type: YTN; PAM sequence: TTT
cagttgaatgttagaaatac

SEQ ID NO: 371251 - DNA, 20 bp, Artificial Sequence
  Description of Artificial Sequence: Synthetic oligonucleotide
  Target: LAMA2; (+) strand; PAM type: YTN; PAM sequence: TTC
agttgaatgttagaaatacc

SEQ ID NO: 371252 - DNA, 20 bp, Artificial Sequence
  Description of Artificial Sequence: Synthetic oligonucleotide
  Target: LAMA2; (+) strand; PAM type: YTN; PAM sequence: TTG
aatgttagaaataccatttt

SEQ ID NO: 371253 - DNA, 20 bp, Artificial Sequence
  Description of Artificial Sequence: Synthetic oligonucleotide
  Target: LAMA2; (+) strand; PAM type: YTN; PAM sequence: TTA
gaaataccattttcaacatg

SEQ ID NO: 371254 - DNA, 20 bp, Artificial Sequence
  Description of Artificial Sequence: Synthetic oligonucleotide
  Target: LAMA2; (+) strand; PAM type: YTN; PAM sequence: TTT
tcaacatgtttaaggcaaaa

SEQ ID NO: 371255 - DNA, 20 bp, Artificial Sequence
  Description of Artificial Sequence: Synthetic oligonucleotide
  Target: LAMA2; (+) strand; PAM type: YTN; PAM sequence: TTT
caacatgtttaaggcaaaat

SEQ ID NO: 371256 - DNA, 20 bp, Artificial Sequence
  Description of Artificial Sequence: Synthetic oligonucleotide
  Target: LAMA2; (+) strand; PAM type: YTN; PAM sequence: TTC
aacatgtttaaggcaaaatt

SEQ ID NO: 371257 - DNA, 20 bp, Artificial Sequence
  Description of Artificial Sequence: Synthetic oligonucleotide
  Target: LAMA2; (+) strand; PAM type: YTN; PAM sequence: TTT
aaggcaaaattaatttttga

SEQ ID NO: 371258 - DNA, 20 bp, Artificial Sequence
  Description of Artificial Sequence: Synthetic oligonucleotide
  Target: LAMA2; (+) strand; PAM type: YTN; PAM sequence: TTA
aggcaaaattaatttttgat

SEQ ID NO: 371259 - DNA, 20 bp, Artificial Sequence
  Description of Artificial Sequence: Synthetic oligonucleotide
  Target: LAMA2; (+) strand; PAM type: YTN; PAM sequence: TTA
atttttgattcaatttttta

SEQ ID NO: 371260 - DNA, 20 bp, Artificial Sequence
  Description of Artificial Sequence: Synthetic oligonucleotide
  Target: LAMA2; (+) strand; PAM type: YTN; PAM sequence: TTT
ttgattcaattttttaaaac

SEQ ID NO: 371261 - DNA, 20 bp, Artificial Sequence
  Description of Artificial Sequence: Synthetic oligonucleotide
  Target: LAMA2; (+) strand; PAM type: YTN; PAM sequence: TTT
tgattcaattttttaaaacc

SEQ ID NO: 371262 - DNA, 20 bp, Artificial Sequence
  Description of Artificial Sequence: Synthetic oligonucleotide
  Target: LAMA2; (+) strand; PAM type: YTN; PAM sequence: TTT
gattcaattttttaaaaccc

SEQ ID NO: 371263 - DNA, 20 bp, Artificial Sequence
  Description of Artificial Sequence: Synthetic oligonucleotide
  Target: LAMA2; (+) strand; PAM type: YTN; PAM sequence: TTG
attcaattttttaaaaccct

SEQ ID NO: 371264 - DNA, 20 bp, Artificial Sequence
  Description of Artificial Sequence: Synthetic oligonucleotide
  Target: LAMA2; (+) strand; PAM type: YTN; PAM sequence: TTC
aattttttaaaacccttaag

SEQ ID NO: 371265 - DNA, 20 bp, Artificial Sequence
  Description of Artificial Sequence: Synthetic oligonucleotide
  Target: LAMA2; (+) strand; PAM type: YTN; PAM sequence: TTT
tttaaaacccttaagtattt

SEQ ID NO: 371266 - DNA, 20 bp, Artificial Sequence
  Description of Artificial Sequence: Synthetic oligonucleotide
  Target: LAMA2; (+) strand; PAM type: YTN; PAM sequence: TTT
ttaaaacccttaagtatttg

SEQ ID NO: 371267 - DNA, 20 bp, Artificial Sequence
  Description of Artificial Sequence: Synthetic oligonucleotide
  Target: LAMA2; (+) strand; PAM type: YTN; PAM sequence: TTT
taaaacccttaagtatttga

SEQ ID NO: 371268 - DNA, 20 bp, Artificial Sequence
  Description of Artificial Sequence: Synthetic oligonucleotide
  Target: LAMA2; (+) strand; PAM type: YTN; PAM sequence: TTT
aaaacccttaagtatttgaa

SEQ ID NO: 371269 - DNA, 20 bp, Artificial Sequence
  Description of Artificial Sequence: Synthetic oligonucleotide
  Target: LAMA2; (+) strand; PAM type: YTN; PAM sequence: TTA
aaacccttaagtatttgaag

SEQ ID NO: 371270 - DNA, 20 bp, Artificial Sequence
  Description of Artificial Sequence: Synthetic oligonucleotide
  Target: LAMA2; (+) strand; PAM type: YTN; PAM sequence: CTT
aagtatttgaagacataatt

SEQ ID NO: 371271 - DNA, 20 bp, Artificial Sequence
  Description of Artificial Sequence: Synthetic oligonucleotide
  Target: LAMA2; (+) strand; PAM type: YTN; PAM sequence: TTA
agtatttgaagacataattt

SEQ ID NO: 371272 - DNA, 20 bp, Artificial Sequence
  Description of Artificial Sequence: Synthetic oligonucleotide
  Target: LAMA2; (+) strand; PAM type: YTN; PAM sequence: TTT
gaagacataattttagttgt

SEQ ID NO: 371273 - DNA, 20 bp, Artificial Sequence
  Description of Artificial Sequence: Synthetic oligonucleotide
  Target: LAMA2; (+) strand; PAM type: YTN; PAM sequence: TTG
aagacataattttagttgta

SEQ ID NO: 371274 - DNA, 20 bp, Artificial Sequence
  Description of Artificial Sequence: Synthetic oligonucleotide
  Target: LAMA2; (+) strand; PAM type: YTN; PAM sequence: TTT
tagttgtatcagtgagataa

SEQ ID NO: 371275 - DNA, 20 bp, Artificial Sequence
  Description of Artificial Sequence: Synthetic oligonucleotide
  Target: LAMA2; (+) strand; PAM type: YTN; PAM sequence: TTT
agttgtatcagtgagataac

SEQ ID NO: 371276 - DNA, 20 bp, Artificial Sequence
  Description of Artificial Sequence: Synthetic oligonucleotide
  Target: LAMA2; (+) strand; PAM type: YTN; PAM sequence: TTA
gttgtatcagtgagataaca

SEQ ID NO: 371277 - DNA, 20 bp, Artificial Sequence
  Description of Artificial Sequence: Synthetic oligonucleotide
  Target: LAMA2; (+) strand; PAM type: YTN; PAM sequence: TTG
tatcagtgagataacatgca

SEQ ID NO: 371278 - DNA, 20 bp, Artificial Sequence
  Description of Artificial Sequence: Synthetic oligonucleotide
  Target: LAMA2; (+) strand; PAM type: YTN; PAM sequence: TTT
tacaaaaaaacaagcaattc

SEQ ID NO: 371279 - DNA, 20 bp, Artificial Sequence
  Description of Artificial Sequence: Synthetic oligonucleotide
  Target: LAMA2; (+) strand; PAM type: YTN; PAM sequence: TTT
acaaaaaaacaagcaattct

SEQ ID NO: 371280 - DNA, 20 bp, Artificial Sequence
  Description of Artificial Sequence: Synthetic oligonucleotide
  Target: LAMA2; (+) strand; PAM type: YTN; PAM sequence: TTA
caaaaaaacaagcaattctt

SEQ ID NO: 371281 - DNA, 20 bp, Artificial Sequence
  Description of Artificial Sequence: Synthetic oligonucleotide
  Target: LAMA2; (+) strand; PAM type: YTN; PAM sequence: TTC
ttcagtaatagcttagttta

SEQ ID NO: 371282 - DNA, 20 bp, Artificial Sequence
  Description of Artificial Sequence: Synthetic oligonucleotide
  Target: LAMA2; (+) strand; PAM type: YTN; PAM sequence: CTT
cagtaatagcttagtttagc

SEQ ID NO: 371283 - DNA, 20 bp, Artificial Sequence
  Description of Artificial Sequence: Synthetic oligonucleotide
  Target: LAMA2; (+) strand; PAM type: YTN; PAM sequence: TTC
agtaatagcttagtttagct

SEQ ID NO: 371284 - DNA, 20 bp, Artificial Sequence
  Description of Artificial Sequence: Synthetic oligonucleotide
  Target: LAMA2; (+) strand; PAM type: YTN; PAM sequence: CTT
agtttagctaaacttaaaaa

SEQ ID NO: 371285 - DNA, 20 bp, Artificial Sequence
  Description of Artificial Sequence: Synthetic oligonucleotide
  Target: LAMA2; (+) strand; PAM type: YTN; PAM sequence: TTA
gtttagctaaacttaaaaat

SEQ ID NO: 371286 - DNA, 20 bp, Artificial Sequence
  Description of Artificial Sequence: Synthetic oligonucleotide
  Target: LAMA2; (+) strand; PAM type: YTN; PAM sequence: TTT
agctaaacttaaaaattgaa

SEQ ID NO: 371287 - DNA, 20 bp, Artificial Sequence
  Description of Artificial Sequence: Synthetic oligonucleotide
  Target: LAMA2; (+) strand; PAM type: YTN; PAM sequence: TTA
gctaaacttaaaaattgaaa

SEQ ID NO: 371288 - DNA, 20 bp, Artificial Sequence
  Description of Artificial Sequence: Synthetic oligonucleotide
  Target: LAMA2; (+) strand; PAM type: YTN; PAM sequence: CTA
aacttaaaaattgaaaggaa

SEQ ID NO: 371289 - DNA, 20 bp, Artificial Sequence
  Description of Artificial Sequence: Synthetic oligonucleotide
  Target: LAMA2; (+) strand; PAM type: YTN; PAM sequence: CTT
aaaaattgaaaggaagtaaa

SEQ ID NO: 371290 - DNA, 20 bp, Artificial Sequence
  Description of Artificial Sequence: Synthetic oligonucleotide
  Target: LAMA2; (+) strand; PAM type: YTN; PAM sequence: TTA
aaaattgaaaggaagtaaaa

SEQ ID NO: 371291 - DNA, 20 bp, Artificial Sequence
  Description of Artificial Sequence: Synthetic oligonucleotide
  Target: LAMA2; (+) strand; PAM type: YTN; PAM sequence: TTG
aaaggaagtaaaacaaaaat

SEQ ID NO: 371292 - DNA, 20 bp, Artificial Sequence
  Description of Artificial Sequence: Synthetic oligonucleotide
  Target: LAMA2; (+) strand; PAM type: YTN; PAM sequence: CTT
tcttcaaatggatccatgtt

SEQ ID NO: 371293 - DNA, 20 bp, Artificial Sequence
  Description of Artificial Sequence: Synthetic oligonucleotide
  Target: LAMA2; (+) strand; PAM type: YTN; PAM sequence: TTT
cttcaaatggatccatgttt

SEQ ID NO: 371294 - DNA, 20 bp, Artificial Sequence
  Description of Artificial Sequence: Synthetic oligonucleotide
  Target: LAMA2; (+) strand; PAM type: YTN; PAM sequence: TTC
ttcaaatggatccatgtttt

SEQ ID NO: 371295 - DNA, 20 bp, Artificial Sequence
  Description of Artificial Sequence: Synthetic oligonucleotide
  Target: LAMA2; (+) strand; PAM type: YTN; PAM sequence: CTT
caaatggatccatgttttgc

SEQ ID NO: 371296 - DNA, 20 bp, Artificial Sequence
  Description of Artificial Sequence: Synthetic oligonucleotide
  Target: LAMA2; (+) strand; PAM type: YTN; PAM sequence: TTC
aaatggatccatgttttgca

SEQ ID NO: 371297 - DNA, 20 bp, Artificial Sequence
  Description of Artificial Sequence: Synthetic oligonucleotide
  Target: LAMA2; (+) strand; PAM type: YTN; PAM sequence: TTT
tgcacattaaatcccaatat

SEQ ID NO: 371298 - DNA, 20 bp, Artificial Sequence
  Description of Artificial Sequence: Synthetic oligonucleotide
  Target: LAMA2; (+) strand; PAM type: YTN; PAM sequence: TTT
gcacattaaatcccaatata

SEQ ID NO: 371299 - DNA, 20 bp, Artificial Sequence
  Description of Artificial Sequence: Synthetic oligonucleotide
  Target: LAMA2; (+) strand; PAM type: YTN; PAM sequence: TTG
cacattaaatcccaatatac

SEQ ID NO: 371300 - DNA, 20 bp, Artificial Sequence
  Description of Artificial Sequence: Synthetic oligonucleotide
  Target: LAMA2; (+) strand; PAM type: YTN; PAM sequence: TTA
aatcccaatatactgcatta

SEQ ID NO: 371301 - DNA, 20 bp, Artificial Sequence
  Description of Artificial Sequence: Synthetic oligonucleotide
  Target: LAMA2; (+) strand; PAM type: YTN; PAM sequence: CTG
cattattaaggcaactattc

SEQ ID NO: 371302 - DNA, 20 bp, Artificial Sequence
  Description of Artificial Sequence: Synthetic oligonucleotide
  Target: LAMA2; (+) strand; PAM type: YTN; PAM sequence: TTA
ttaaggcaactattcatagt

SEQ ID NO: 371303 - DNA, 20 bp, Artificial Sequence
  Description of Artificial Sequence: Synthetic oligonucleotide
  Target: LAMA2; (+) strand; PAM type: YTN; PAM sequence: TTA
aggcaactattcatagtgaa

SEQ ID NO: 371304 - DNA, 20 bp, Artificial Sequence
  Description of Artificial Sequence: Synthetic oligonucleotide
  Target: LAMA2; (+) strand; PAM type: YTN; PAM sequence: CTA
ttcatagtgaagctgacctt

SEQ ID NO: 371305 - DNA, 20 bp, Artificial Sequence
  Description of Artificial Sequence: Synthetic oligonucleotide
  Target: LAMA2; (+) strand; PAM type: YTN; PAM sequence: TTC
atagtgaagctgaccttaat

SEQ ID NO: 371306 - DNA, 20 bp, Artificial Sequence
  Description of Artificial Sequence: Synthetic oligonucleotide
  Target: LAMA2; (+) strand; PAM type: YTN; PAM sequence: CTG
accttaatgctatcttttaa

SEQ ID NO: 371307 - DNA, 20 bp, Artificial Sequence
  Description of Artificial Sequence: Synthetic oligonucleotide
  Target: LAMA2; (+) strand; PAM type: YTN; PAM sequence: CTT
aatgctatcttttaaaaagt

SEQ ID NO: 371308 - DNA, 20 bp, Artificial Sequence
  Description of Artificial Sequence: Synthetic oligonucleotide
  Target: LAMA2; (+) strand; PAM type: YTN; PAM sequence: TTA
atgctatcttttaaaaagtt

SEQ ID NO: 371309 - DNA, 20 bp, Artificial Sequence
  Description of Artificial Sequence: Synthetic oligonucleotide
  Target: LAMA2; (+) strand; PAM type: YTN; PAM sequence: CTA
tcttttaaaaagttttgtta

SEQ ID NO: 371310 - DNA, 20 bp, Artificial Sequence
  Description of Artificial Sequence: Synthetic oligonucleotide
  Target: LAMA2; (+) strand; PAM type: YTN; PAM sequence: CTT
ttaaaaagttttgttaaaaa

SEQ ID NO: 371311 - DNA, 20 bp, Artificial Sequence
  Description of Artificial Sequence: Synthetic oligonucleotide
  Target: LAMA2; (+) strand; PAM type: YTN; PAM sequence: TTT
taaaaagttttgttaaaaat

SEQ ID NO: 371312 - DNA, 20 bp, Artificial Sequence
  Description of Artificial Sequence: Synthetic oligonucleotide
  Target: LAMA2; (+) strand; PAM type: YTN; PAM sequence: TTT
aaaaagttttgttaaaaata

SEQ ID NO: 371313 - DNA, 20 bp, Artificial Sequence
  Description of Artificial Sequence: Synthetic oligonucleotide
  Target: LAMA2; (+) strand; PAM type: YTN; PAM sequence: TTA
aaaagttttgttaaaaataa

SEQ ID NO: 371314 - DNA, 20 bp, Artificial Sequence
  Description of Artificial Sequence: Synthetic oligonucleotide
  Target: LAMA2; (+) strand; PAM type: YTN; PAM sequence: TTT
tgttaaaaataaatttgaga

SEQ ID NO: 371315 - DNA, 20 bp, Artificial Sequence
  Description of Artificial Sequence: Synthetic oligonucleotide
  Target: LAMA2; (+) strand; PAM type: YTN; PAM sequence: TTT
gttaaaaataaatttgagaa

SEQ ID NO: 371316 - DNA, 20 bp, Artificial Sequence
  Description of Artificial Sequence: Synthetic oligonucleotide
  Target: LAMA2; (+) strand; PAM type: YTN; PAM sequence: TTG
ttaaaaataaatttgagaaa

SEQ ID NO: 371317 - DNA, 20 bp, Artificial Sequence
  Description of Artificial Sequence: Synthetic oligonucleotide
  Target: LAMA2; (+) strand; PAM type: YTN; PAM sequence: TTA
aaaataaatttgagaaagaa

SEQ ID NO: 371318 - DNA, 20 bp, Artificial Sequence
  Description of Artificial Sequence: Synthetic oligonucleotide
  Target: LAMA2; (+) strand; PAM type: YTN; PAM sequence: TTT
gagaaagaattttaaataac

SEQ ID NO: 371319 - DNA, 20 bp, Artificial Sequence
  Description of Artificial Sequence: Synthetic oligonucleotide
  Target: LAMA2; (+) strand; PAM type: YTN; PAM sequence: TTG
agaaagaattttaaataact

SEQ ID NO: 371320 - DNA, 20 bp, Artificial Sequence
  Description of Artificial Sequence: Synthetic oligonucleotide
  Target: LAMA2; (+) strand; PAM type: YTN; PAM sequence: TTT
taaataacttagagaaaagc

SEQ ID NO: 371321 - DNA, 20 bp, Artificial Sequence
  Description of Artificial Sequence: Synthetic oligonucleotide
  Target: LAMA2; (+) strand; PAM type: YTN; PAM sequence: TTT
aaataacttagagaaaagcc

SEQ ID NO: 371322 - DNA, 20 bp, Artificial Sequence
  Description of Artificial Sequence: Synthetic oligonucleotide
  Target: LAMA2; (+) strand; PAM type: YTN; PAM sequence: TTA
aataacttagagaaaagcct

SEQ ID NO: 371323 - DNA, 20 bp, Artificial Sequence
  Description of Artificial Sequence: Synthetic oligonucleotide
  Target: LAMA2; (+) strand; PAM type: YTN; PAM sequence: CTT
agagaaaagcctgttttcaa

SEQ ID NO: 371324 - DNA, 20 bp, Artificial Sequence
  Description of Artificial Sequence: Synthetic oligonucleotide
  Target: LAMA2; (+) strand; PAM type: YTN; PAM sequence: TTA
gagaaaagcctgttttcaaa

SEQ ID NO: 371325 - DNA, 20 bp, Artificial Sequence
  Description of Artificial Sequence: Synthetic oligonucleotide
  Target: LAMA2; (+) strand; PAM type: YTN; PAM sequence: CTG
ttttcaaatatcaccagtta

SEQ ID NO: 371326 - DNA, 20 bp, Artificial Sequence
  Description of Artificial Sequence: Synthetic oligonucleotide
  Target: LAMA2; (+) strand; PAM type: YTN; PAM sequence: TTT
tcaaatatcaccagttacta

SEQ ID NO: 371327 - DNA, 20 bp, Artificial Sequence
  Description of Artificial Sequence: Synthetic oligonucleotide
  Target: LAMA2; (+) strand; PAM type: YTN; PAM sequence: TTT
caaatatcaccagttactac

SEQ ID NO: 371328 - DNA, 20 bp, Artificial Sequence
  Description of Artificial Sequence: Synthetic oligonucleotide
  Target: LAMA2; (+) strand; PAM type: YTN; PAM sequence: TTC
aaatatcaccagttactaca

SEQ ID NO: 371329 - DNA, 20 bp, Artificial Sequence
  Description of Artificial Sequence: Synthetic oligonucleotide
  Target: LAMA2; (+) strand; PAM type: YTN; PAM sequence: TTA
ctacagaaatacatatccac

SEQ ID NO: 371330 - DNA, 20 bp, Artificial Sequence
  Description of Artificial Sequence: Synthetic oligonucleotide
  Target: LAMA2; (+) strand; PAM type: YTN; PAM sequence: CTA
cagaaatacatatccacatt

SEQ ID NO: 371331 - DNA, 20 bp, Artificial Sequence
  Description of Artificial Sequence: Synthetic oligonucleotide
  Target: LAMA2; (+) strand; PAM type: YTN; PAM sequence: TTT
agttgatgaaattggcacgt

SEQ ID NO: 371332 - DNA, 20 bp, Artificial Sequence
  Description of Artificial Sequence: Synthetic oligonucleotide
  Target: LAMA2; (+) strand; PAM type: YTN; PAM sequence: TTA
gttgatgaaattggcacgtg

SEQ ID NO: 371333 - DNA, 20 bp, Artificial Sequence
  Description of Artificial Sequence: Synthetic oligonucleotide
  Target: LAMA2; (+) strand; PAM type: YTN; PAM sequence: TTG
atgaaattggcacgtgatgt

SEQ ID NO: 371334 - DNA, 20 bp, Artificial Sequence
  Description of Artificial Sequence: Synthetic oligonucleotide
  Target: LAMA2; (+) strand; PAM type: YTN; PAM sequence: TTG
gcacgtgatgtttaaaattt

SEQ ID NO: 371335 - DNA, 20 bp, Artificial Sequence
  Description of Artificial Sequence: Synthetic oligonucleotide
  Target: LAMA2; (+) strand; PAM type: YTN; PAM sequence: TTT
aaaatttttcaattttctcc

SEQ ID NO: 371336 - DNA, 20 bp, Artificial Sequence
  Description of Artificial Sequence: Synthetic oligonucleotide
  Target: LAMA2; (+) strand; PAM type: YTN; PAM sequence: TTA
aaatttttcaattttctcca

SEQ ID NO: 371337 - DNA, 20 bp, Artificial Sequence
  Description of Artificial Sequence: Synthetic oligonucleotide
  Target: LAMA2; (+) strand; PAM type: YTN; PAM sequence: TTT
ttcaattttctccatgttta

SEQ ID NO: 371338 - DNA, 20 bp, Artificial Sequence
  Description of Artificial Sequence: Synthetic oligonucleotide
  Target: LAMA2; (+) strand; PAM type: YTN; PAM sequence: TTT
tcaattttctccatgtttaa

SEQ ID NO: 371339 - DNA, 20 bp, Artificial Sequence
  Description of Artificial Sequence: Synthetic oligonucleotide
  Target: LAMA2; (+) strand; PAM type: YTN; PAM sequence: TTT
caattttctccatgtttaat

SEQ ID NO: 371340 - DNA, 20 bp, Artificial Sequence
  Description of Artificial Sequence: Synthetic oligonucleotide
  Target: LAMA2; (+) strand; PAM type: YTN; PAM sequence: TTC
aattttctccatgtttaatt

SEQ ID NO: 371341 - DNA, 20 bp, Artificial Sequence
  Description of Artificial Sequence: Synthetic oligonucleotide
  Target: LAMA2; (+) strand; PAM type: YTN; PAM sequence: TTT
tctccatgtttaattatgag

SEQ ID NO: 371342 - DNA, 20 bp, Artificial Sequence
  Description of Artificial Sequence: Synthetic oligonucleotide
  Target: LAMA2; (+) strand; PAM type: YTN; PAM sequence: TTT
ctccatgtttaattatgagt

SEQ ID NO: 371343 - DNA, 20 bp, Artificial Sequence
  Description of Artificial Sequence: Synthetic oligonucleotide
  Target: LAMA2; (+) strand; PAM type: YTN; PAM sequence: TTC
tccatgtttaattatgagtc

SEQ ID NO: 371344 - DNA, 20 bp, Artificial Sequence
  Description of Artificial Sequence: Synthetic oligonucleotide
  Target: LAMA2; (+) strand; PAM type: YTN; PAM sequence: CTC
catgtttaattatgagtcaa

SEQ ID NO: 371345 - DNA, 20 bp, Artificial Sequence
  Description of Artificial Sequence: Synthetic oligonucleotide
  Target: LAMA2; (+) strand; PAM type: YTN; PAM sequence: TTT
aattatgagtcaagcaagct

SEQ ID NO: 371346 - DNA, 20 bp, Artificial Sequence
  Description of Artificial Sequence: Synthetic oligonucleotide
  Target: LAMA2; (+) strand; PAM type: YTN; PAM sequence: TTA
attatgagtcaagcaagctt

SEQ ID NO: 371347 - DNA, 20 bp, Artificial Sequence
  Description of Artificial Sequence: Synthetic oligonucleotide
  Target: LAMA2; (+) strand; PAM type: YTN; PAM sequence: TTA
tgagtcaagcaagcttctca

SEQ ID NO: 371348 - DNA, 20 bp, Artificial Sequence
  Description of Artificial Sequence: Synthetic oligonucleotide
  Target: LAMA2; (+) strand; PAM type: YTN; PAM sequence: CTT
ctcacagatgtaatacagta

SEQ ID NO: 371349 - DNA, 20 bp, Artificial Sequence
  Description of Artificial Sequence: Synthetic oligonucleotide
  Target: LAMA2; (+) strand; PAM type: YTN; PAM sequence: TTC
tcacagatgtaatacagtag

SEQ ID NO: 371350 - DNA, 20 bp, Artificial Sequence
  Description of Artificial Sequence: Synthetic oligonucleotide
  Target: LAMA2; (+) strand; PAM type: YTN; PAM sequence: CTC
acagatgtaatacagtagtg

SEQ ID NO: 371351 - DNA, 20 bp, Artificial Sequence
  Description of Artificial Sequence: Synthetic oligonucleotide
  Target: LAMA2; (+) strand; PAM type: YTN; PAM sequence: TTG
tccaaaccatcagagtccac

SEQ ID NO: 371352 - DNA, 20 bp, Artificial Sequence
  Description of Artificial Sequence: Synthetic oligonucleotide
  Target: LAMA2; (+) strand; PAM type: YTN; PAM sequence: CTG
aggccaaaattcatgtctga

SEQ ID NO: 371353 - DNA, 20 bp, Artificial Sequence
  Description of Artificial Sequence: Synthetic oligonucleotide
  Target: LAMA2; (+) strand; PAM type: YTN; PAM sequence: TTC
atgtctgagctaagaggcca

SEQ ID NO: 371354 - DNA, 20 bp, Artificial Sequence
  Description of Artificial Sequence: Synthetic oligonucleotide
  Target: LAMA2; (+) strand; PAM type: YTN; PAM sequence: CTG
agctaagaggccatagcccc

SEQ ID NO: 371355 - DNA, 20 bp, Artificial Sequence
  Description of Artificial Sequence: Synthetic oligonucleotide
  Target: LAMA2; (+) strand; PAM type: YTN; PAM sequence: CTA
agaggccatagccccggagg

SEQ ID NO: 371356 - DNA, 20 bp, Artificial Sequence
  Description of Artificial Sequence: Synthetic oligonucleotide
  Target: LAMA2; (+) strand; PAM type: YTN; PAM sequence: TTT
ctatgattagccacagttcc

SEQ ID NO: 371357 - DNA, 20 bp, Artificial Sequence
  Description of Artificial Sequence: Synthetic oligonucleotide
  Target: LAMA2; (+) strand; PAM type: YTN; PAM sequence: TTC
tatgattagccacagttccc

SEQ ID NO: 371358 - DNA, 20 bp, Artificial Sequence
  Description of Artificial Sequence: Synthetic oligonucleotide
  Target: LAMA2; (+) strand; PAM type: YTN; PAM sequence: CTA
tgattagccacagttcccat

SEQ ID NO: 371359 - DNA, 20 bp, Artificial Sequence
  Description of Artificial Sequence: Synthetic oligonucleotide
  Target: LAMA2; (+) strand; PAM type: YTN; PAM sequence: TTA
gccacagttcccattaaatc

SEQ ID NO: 371360 - DNA, 20 bp, Artificial Sequence
  Description of Artificial Sequence: Synthetic oligonucleotide
  Target: LAMA2; (+) strand; PAM type: YTN; PAM sequence: TTC
ccattaaatcagcaatttca

SEQ ID NO: 371361 - DNA, 20 bp, Artificial Sequence
  Description of Artificial Sequence: Synthetic oligonucleotide
  Target: LAMA2; (+) strand; PAM type: YTN; PAM sequence: TTA
aatcagcaatttcaagctga

SEQ ID NO: 371362 - DNA, 20 bp, Artificial Sequence
  Description of Artificial Sequence: Synthetic oligonucleotide
  Target: LAMA2; (+) strand; PAM type: YTN; PAM sequence: TTT
caagctgaacaattgatttt

SEQ ID NO: 371363 - DNA, 20 bp, Artificial Sequence
  Description of Artificial Sequence: Synthetic oligonucleotide
  Target: LAMA2; (+) strand; PAM type: YTN; PAM sequence: TTC
aagctgaacaattgattttt

SEQ ID NO: 371364 - DNA, 20 bp, Artificial Sequence
  Description of Artificial Sequence: Synthetic oligonucleotide
  Target: LAMA2; (+) strand; PAM type: YTN; PAM sequence: CTG
aacaattgatttttacctag

SEQ ID NO: 371365 - DNA, 20 bp, Artificial Sequence
  Description of Artificial Sequence: Synthetic oligonucleotide
  Target: LAMA2; (+) strand; PAM type: YTN; PAM sequence: TTG
atttttacctagaatcagct

SEQ ID NO: 371366 - DNA, 20 bp, Artificial Sequence
  Description of Artificial Sequence: Synthetic oligonucleotide
  Target: LAMA2; (+) strand; PAM type: YTN; PAM sequence: TTT
ttacctagaatcagctacaa

SEQ ID NO: 371367 - DNA, 20 bp, Artificial Sequence
  Description of Artificial Sequence: Synthetic oligonucleotide
  Target: LAMA2; (+) strand; PAM type: YTN; PAM sequence: TTT
tacctagaatcagctacaat

SEQ ID NO: 371368 - DNA, 20 bp, Artificial Sequence
  Description of Artificial Sequence: Synthetic oligonucleotide
  Target: LAMA2; (+) strand; PAM type: YTN; PAM sequence: TTT
acctagaatcagctacaatt

SEQ ID NO: 371369 - DNA, 20 bp, Artificial Sequence
  Description of Artificial Sequence: Synthetic oligonucleotide
  Target: LAMA2; (+) strand; PAM type: YTN; PAM sequence: TTA
cctagaatcagctacaattt

SEQ ID NO: 371370 - DNA, 20 bp, Artificial Sequence
  Description of Artificial Sequence: Synthetic oligonucleotide
  Target: LAMA2; (+) strand; PAM type: YTN; PAM sequence: CTA
gaatcagctacaatttccat

SEQ ID NO: 371371 - DNA, 20 bp, Artificial Sequence
  Description of Artificial Sequence: Synthetic oligonucleotide
  Target: LAMA2; (+) strand; PAM type: YTN; PAM sequence: CTA
caatttccattaaacatatg

SEQ ID NO: 371372 - DNA, 20 bp, Artificial Sequence
  Description of Artificial Sequence: Synthetic oligonucleotide
  Target: LAMA2; (+) strand; PAM type: YTN; PAM sequence: TTT
ccattaaacatatgttatta

SEQ ID NO: 371373 - DNA, 20 bp, Artificial Sequence
  Description of Artificial Sequence: Synthetic oligonucleotide
  Target: LAMA2; (+) strand; PAM type: YTN; PAM sequence: TTC
cattaaacatatgttattag

SEQ ID NO: 371374 - DNA, 20 bp, Artificial Sequence
  Description of Artificial Sequence: Synthetic oligonucleotide
  Target: LAMA2; (+) strand; PAM type: YTN; PAM sequence: TTA
aacatatgttattagtgctc

SEQ ID NO: 371375 - DNA, 20 bp, Artificial Sequence
  Description of Artificial Sequence: Synthetic oligonucleotide
  Target: LAMA2; (+) strand; PAM type: YTN; PAM sequence: TTA
ttagtgctctatgactacac

SEQ ID NO: 371376 - DNA, 20 bp, Artificial Sequence
  Description of Artificial Sequence: Synthetic oligonucleotide
  Target: LAMA2; (+) strand; PAM type: YTN; PAM sequence: TTA
gtgctctatgactacacaca

SEQ ID NO: 371377 - DNA, 20 bp, Artificial Sequence
  Description of Artificial Sequence: Synthetic oligonucleotide
  Target: LAMA2; (+) strand; PAM type: YTN; PAM sequence: CTC
tatgactacacacacacaca

SEQ ID NO: 371378 - DNA, 20 bp, Artificial Sequence
  Description of Artificial Sequence: Synthetic oligonucleotide
  Target: LAMA2; (+) strand; PAM type: YTN; PAM sequence: CTA
tgactacacacacacacaca

SEQ ID NO: 371379 - DNA, 20 bp, Artificial Sequence
  Description of Artificial Sequence: Synthetic oligonucleotide
  Target: LAMA2; (+) strand; PAM type: YTN; PAM sequence: CTA
cacacacacacacacacaca

SEQ ID NO: 371380 - DNA, 20 bp, Artificial Sequence
  Description of Artificial Sequence: Synthetic oligonucleotide
  Target: LAMA2; (+) strand; PAM type: YTN; PAM sequence: TTT
tcttaaggaaaataaagaaa

SEQ ID NO: 371381 - DNA, 20 bp, Artificial Sequence
  Description of Artificial Sequence: Synthetic oligonucleotide
  Target: LAMA2; (+) strand; PAM type: YTN; PAM sequence: TTT
cttaaggaaaataaagaaaa

SEQ ID NO: 371382 - DNA, 20 bp, Artificial Sequence
  Description of Artificial Sequence: Synthetic oligonucleotide
  Target: LAMA2; (+) strand; PAM type: YTN; PAM sequence: TTC
ttaaggaaaataaagaaaaa

SEQ ID NO: 371383 - DNA, 20 bp, Artificial Sequence
  Description of Artificial Sequence: Synthetic oligonucleotide
  Target: LAMA2; (+) strand; PAM type: YTN; PAM sequence: CTT
aaggaaaataaagaaaaaat

SEQ ID NO: 371384 - DNA, 20 bp, Artificial Sequence
  Description of Artificial Sequence: Synthetic oligonucleotide
  Target: LAMA2; (+) strand; PAM type: YTN; PAM sequence: TTA
aggaaaataaagaaaaaatg

SEQ ID NO: 371385 - DNA, 20 bp, Artificial Sequence
  Description of Artificial Sequence: Synthetic oligonucleotide
  Target: LAMA2; (+) strand; PAM type: YTN; PAM sequence: TTT
gcataatgaaaaacattaaa

SEQ ID NO: 371386 - DNA, 20 bp, Artificial Sequence
  Description of Artificial Sequence: Synthetic oligonucleotide
  Target: LAMA2; (+) strand; PAM type: YTN; PAM sequence: TTG
cataatgaaaaacattaaaa

SEQ ID NO: 371387 - DNA, 20 bp, Artificial Sequence
  Description of Artificial Sequence: Synthetic oligonucleotide
  Target: LAMA2; (+) strand; PAM type: YTN; PAM sequence: TTA
aaatgaatttcaatcatctt

SEQ ID NO: 371388 - DNA, 20 bp, Artificial Sequence
  Description of Artificial Sequence: Synthetic oligonucleotide
  Target: LAMA2; (+) strand; PAM type: YTN; PAM sequence: TTT
caatcatctttttgtaagta

SEQ ID NO: 371389 - DNA, 20 bp, Artificial Sequence
  Description of Artificial Sequence: Synthetic oligonucleotide
  Target: LAMA2; (+) strand; PAM type: YTN; PAM sequence: TTC
aatcatctttttgtaagtat

SEQ ID NO: 371390 - DNA, 20 bp, Artificial Sequence
  Description of Artificial Sequence: Synthetic oligonucleotide
  Target: LAMA2; (+) strand; PAM type: YTN; PAM sequence: CTT
tttgtaagtatgcatatgct

SEQ ID NO: 371391 - DNA, 20 bp, Artificial Sequence
  Description of Artificial Sequence: Synthetic oligonucleotide
  Target: LAMA2; (+) strand; PAM type: YTN; PAM sequence: TTT
ttgtaagtatgcatatgctg

SEQ ID NO: 371392 - DNA, 20 bp, Artificial Sequence
  Description of Artificial Sequence: Synthetic oligonucleotide
  Target: LAMA2; (+) strand; PAM type: YTN; PAM sequence: TTT
tgtaagtatgcatatgctga

SEQ ID NO: 371393 - DNA, 20 bp, Artificial Sequence
  Description of Artificial Sequence: Synthetic oligonucleotide
  Target: LAMA2; (+) strand; PAM type: YTN; PAM sequence: TTT
gtaagtatgcatatgctgaa

SEQ ID NO: 371394 - DNA, 20 bp, Artificial Sequence
  Description of Artificial Sequence: Synthetic oligonucleotide
  Target: LAMA2; (+) strand; PAM type: YTN; PAM sequence: TTG
taagtatgcatatgctgaaa

SEQ ID NO: 371395 - DNA, 20 bp, Artificial Sequence
  Description of Artificial Sequence: Synthetic oligonucleotide
  Target: LAMA2; (+) strand; PAM type: YTN; PAM sequence: CTG
aaactactgtgttgtttata

SEQ ID NO: 371396 - DNA, 20 bp, Artificial Sequence
  Description of Artificial Sequence: Synthetic oligonucleotide
  Target: LAMA2; (+) strand; PAM type: YTN; PAM sequence: CTA
ctgtgttgtttataagctag

SEQ ID NO: 371397 - DNA, 20 bp, Artificial Sequence
  Description of Artificial Sequence: Synthetic oligonucleotide
  Target: LAMA2; (+) strand; PAM type: YTN; PAM sequence: CTG
tgttgtttataagctagata

SEQ ID NO: 371398 - DNA, 20 bp, Artificial Sequence
  Description of Artificial Sequence: Synthetic oligonucleotide
  Target: LAMA2; (+) strand; PAM type: YTN; PAM sequence: TTG
tttataagctagatattaaa

SEQ ID NO: 371399 - DNA, 20 bp, Artificial Sequence
  Description of Artificial Sequence: Synthetic oligonucleotide
  Target: LAMA2; (+) strand; PAM type: YTN; PAM sequence: TTT
ataagctagatattaaatta

SEQ ID NO: 371400 - DNA, 20 bp, Artificial Sequence
  Description of Artificial Sequence: Synthetic oligonucleotide
  Target: LAMA2; (+) strand; PAM type: YTN; PAM sequence: TTA
taagctagatattaaattaa

SEQ ID NO: 371401 - DNA, 20 bp, Artificial Sequence
  Description of Artificial Sequence: Synthetic oligonucleotide
  Target: LAMA2; (+) strand; PAM type: YTN; PAM sequence: CTA
gatattaaattaactttcaa

SEQ ID NO: 371402 - DNA, 20 bp, Artificial Sequence
  Description of Artificial Sequence: Synthetic oligonucleotide
  Target: LAMA2; (+) strand; PAM type: YTN; PAM sequence: TTA
aattaactttcaatgctatt

SEQ ID NO: 371403 - DNA, 20 bp, Artificial Sequence
  Description of Artificial Sequence: Synthetic oligonucleotide
  Target: LAMA2; (+) strand; PAM type: YTN; PAM sequence: TTA
actttcaatgctatttctct

SEQ ID NO: 371404 - DNA, 20 bp, Artificial Sequence
  Description of Artificial Sequence: Synthetic oligonucleotide
  Target: LAMA2; (+) strand; PAM type: YTN; PAM sequence: CTT
tcaatgctatttctctgctg

SEQ ID NO: 371405 - DNA, 20 bp, Artificial Sequence
  Description of Artificial Sequence: Synthetic oligonucleotide
  Target: LAMA2; (+) strand; PAM type: YTN; PAM sequence: TTT
caatgctatttctctgctgt

SEQ ID NO: 371406 - DNA, 20 bp, Artificial Sequence
  Description of Artificial Sequence: Synthetic oligonucleotide
  Target: LAMA2; (+) strand; PAM type: YTN; PAM sequence: TTC
aatgctatttctctgctgta

SEQ ID NO: 371407 - DNA, 20 bp, Artificial Sequence
  Description of Artificial Sequence: Synthetic oligonucleotide
  Target: LAMA2; (+) strand; PAM type: YTN; PAM sequence: CTA
tttctctgctgtaaaattga

SEQ ID NO: 371408 - DNA, 20 bp, Artificial Sequence
  Description of Artificial Sequence: Synthetic oligonucleotide
  Target: LAMA2; (+) strand; PAM type: YTN; PAM sequence: TTT
ctctgctgtaaaattgacca

SEQ ID NO: 371409 - DNA, 20 bp, Artificial Sequence
  Description of Artificial Sequence: Synthetic oligonucleotide
  Target: LAMA2; (+) strand; PAM type: YTN; PAM sequence: TTC
tctgctgtaaaattgaccat

SEQ ID NO: 371410 - DNA, 20 bp, Artificial Sequence
  Description of Artificial Sequence: Synthetic oligonucleotide
  Target: LAMA2; (+) strand; PAM type: YTN; PAM sequence: CTC
tgctgtaaaattgaccattt

SEQ ID NO: 371411 - DNA, 20 bp, Artificial Sequence
  Description of Artificial Sequence: Synthetic oligonucleotide
  Target: LAMA2; (+) strand; PAM type: YTN; PAM sequence: CTG
ctgtaaaattgaccatttaa

SEQ ID NO: 371412 - DNA, 20 bp, Artificial Sequence
  Description of Artificial Sequence: Synthetic oligonucleotide
  Target: LAMA2; (+) strand; PAM type: YTN; PAM sequence: CTG
taaaattgaccatttaacat

SEQ ID NO: 371413 - DNA, 20 bp, Artificial Sequence
  Description of Artificial Sequence: Synthetic oligonucleotide
  Target: LAMA2; (+) strand; PAM type: YTN; PAM sequence: TTG
accatttaacatggaaaaat

SEQ ID NO: 371414 - DNA, 20 bp, Artificial Sequence
  Description of Artificial Sequence: Synthetic oligonucleotide
  Target: LAMA2; (+) strand; PAM type: YTN; PAM sequence: TTT
aacatggaaaaattattctt

SEQ ID NO: 371415 - DNA, 20 bp, Artificial Sequence
  Description of Artificial Sequence: Synthetic oligonucleotide
  Target: LAMA2; (+) strand; PAM type: YTN; PAM sequence: TTA
acatggaaaaattattcttg

SEQ ID NO: 371416 - DNA, 20 bp, Artificial Sequence
  Description of Artificial Sequence: Synthetic oligonucleotide
  Target: LAMA2; (+) strand; PAM type: YTN; PAM sequence: TTA
ttcttgctggcagggagcag

SEQ ID NO: 371417 - DNA, 20 bp, Artificial Sequence
  Description of Artificial Sequence: Synthetic oligonucleotide
  Target: LAMA2; (+) strand; PAM type: YTN; PAM sequence: TTC
ttgctggcagggagcagact

SEQ ID NO: 371418 - DNA, 20 bp, Artificial Sequence
  Description of Artificial Sequence: Synthetic oligonucleotide
  Target: LAMA2; (+) strand; PAM type: YTN; PAM sequence: CTT
gctggcagggagcagactaa

SEQ ID NO: 371419 - DNA, 20 bp, Artificial Sequence
  Description of Artificial Sequence: Synthetic oligonucleotide
  Target: LAMA2; (+) strand; PAM type: YTN; PAM sequence: TTG
ctggcagggagcagactaat

SEQ ID NO: 371420 - DNA, 20 bp, Artificial Sequence
  Description of Artificial Sequence: Synthetic oligonucleotide
  Target: LAMA2; (+) strand; PAM type: YTN; PAM sequence: CTG
gcagggagcagactaatgac

SEQ ID NO: 371421 - DNA, 20 bp, Artificial Sequence
  Description of Artificial Sequence: Synthetic oligonucleotide
  Target: LAMA2; (+) strand; PAM type: YTN; PAM sequence: CTA
atgacttcgtagacctattt

SEQ ID NO: 371422 - DNA, 20 bp, Artificial Sequence
  Description of Artificial Sequence: Synthetic oligonucleotide
  Target: LAMA2; (+) strand; PAM type: YTN; PAM sequence: CTT
cgtagacctatttttggcaa

SEQ ID NO: 371423 - DNA, 20 bp, Artificial Sequence
  Description of Artificial Sequence: Synthetic oligonucleotide
  Target: LAMA2; (+) strand; PAM type: YTN; PAM sequence: TTC
gtagacctatttttggcaac

SEQ ID NO: 371424 - DNA, 20 bp, Artificial Sequence
  Description of Artificial Sequence: Synthetic oligonucleotide
  Target: LAMA2; (+) strand; PAM type: YTN; PAM sequence: CTA
tttttggcaacatgttgatc

SEQ ID NO: 371425 - DNA, 20 bp, Artificial Sequence
  Description of Artificial Sequence: Synthetic oligonucleotide
  Target: LAMA2; (+) strand; PAM type: YTN; PAM sequence: TTT
ttggcaacatgttgatccct

SEQ ID NO: 371426 - DNA, 20 bp, Artificial Sequence
  Description of Artificial Sequence: Synthetic oligonucleotide
  Target: LAMA2; (+) strand; PAM type: YTN; PAM sequence: TTT
tggcaacatgttgatccctg

SEQ ID NO: 371427 - DNA, 20 bp, Artificial Sequence
  Description of Artificial Sequence: Synthetic oligonucleotide
  Target: LAMA2; (+) strand; PAM type: YTN; PAM sequence: TTT
ggcaacatgttgatccctga

SEQ ID NO: 371428 - DNA, 20 bp, Artificial Sequence
  Description of Artificial Sequence: Synthetic oligonucleotide
  Target: LAMA2; (+) strand; PAM type: YTN; PAM sequence: TTG
gcaacatgttgatccctgac

SEQ ID NO: 371429 - DNA, 20 bp, Artificial Sequence
  Description of Artificial Sequence: Synthetic oligonucleotide
  Target: LAMA2; (+) strand; PAM type: YTN; PAM sequence: TTG
atccctgacaccaaaataat

SEQ ID NO: 371430 - DNA, 20 bp, Artificial Sequence
  Description of Artificial Sequence: Synthetic oligonucleotide
  Target: LAMA2; (+) strand; PAM type: YTN; PAM sequence: CTG
acaccaaaataataaactct

SEQ ID NO: 371431 - DNA, 20 bp, Artificial Sequence
  Description of Artificial Sequence: Synthetic oligonucleotide
  Target: LAMA2; (+) strand; PAM type: YTN; PAM sequence: CTC
tgatgctcatttctttctca

SEQ ID NO: 371432 - DNA, 20 bp, Artificial Sequence
  Description of Artificial Sequence: Synthetic oligonucleotide
  Target: LAMA2; (+) strand; PAM type: YTN; PAM sequence: CTG
atgctcatttctttctcaga

SEQ ID NO: 371433 - DNA, 20 bp, Artificial Sequence
  Description of Artificial Sequence: Synthetic oligonucleotide
  Target: LAMA2; (+) strand; PAM type: YTN; PAM sequence: CTC
atttctttctcagaactgta

SEQ ID NO: 371434 - DNA, 20 bp, Artificial Sequence
  Description of Artificial Sequence: Synthetic oligonucleotide
  Target: LAMA2; (+) strand; PAM type: YTN; PAM sequence: TTT
ctttctcagaactgtaagga

SEQ ID NO: 371435 - DNA, 20 bp, Artificial Sequence
  Description of Artificial Sequence: Synthetic oligonucleotide
  Target: LAMA2; (+) strand; PAM type: YTN; PAM sequence: TTC
tttctcagaactgtaaggat

SEQ ID NO: 371436 - DNA, 20 bp, Artificial Sequence
  Description of Artificial Sequence: Synthetic oligonucleotide
  Target: LAMA2; (+) strand; PAM type: YTN; PAM sequence: CTT
tctcagaactgtaaggatca

SEQ ID NO: 371437 - DNA, 20 bp, Artificial Sequence
  Description of Artificial Sequence: Synthetic oligonucleotide
  Target: LAMA2; (+) strand; PAM type: YTN; PAM sequence: TTT
ctcagaactgtaaggatcac

SEQ ID NO: 371438 - DNA, 20 bp, Artificial Sequence
  Description of Artificial Sequence: Synthetic oligonucleotide
  Target: LAMA2; (+) strand; PAM type: YTN; PAM sequence: TTC
tcagaactgtaaggatcaca

SEQ ID NO: 371439 - DNA, 20 bp, Artificial Sequence
  Description of Artificial Sequence: Synthetic oligonucleotide
  Target: LAMA2; (+) strand; PAM type: YTN; PAM sequence: CTC
agaactgtaaggatcacaca

SEQ ID NO: 371440 - DNA, 20 bp, Artificial Sequence
  Description of Artificial Sequence: Synthetic oligonucleotide
  Target: LAMA2; (+) strand; PAM type: YTN; PAM sequence: CTG
taaggatcacacaggtggcc

SEQ ID NO: 371441 - DNA, 20 bp, Artificial Sequence
  Description of Artificial Sequence: Synthetic oligonucleotide
  Target: LAMA2; (+) strand; PAM type: YTN; PAM sequence: TTG
tgataaatgtcttcctggtt

SEQ ID NO: 371442 - DNA, 20 bp, Artificial Sequence
  Description of Artificial Sequence: Synthetic oligonucleotide
  Target: LAMA2; (+) strand; PAM type: YTN; PAM sequence: CTT
cctggtttctatggcgagcc

SEQ ID NO: 371443 - DNA, 20 bp, Artificial Sequence
  Description of Artificial Sequence: Synthetic oligonucleotide
  Target: LAMA2; (+) strand; PAM type: YTN; PAM sequence: TTC
ctggtttctatggcgagcct

SEQ ID NO: 371444 - DNA, 20 bp, Artificial Sequence
  Description of Artificial Sequence: Synthetic oligonucleotide
  Target: LAMA2; (+) strand; PAM type: YTN; PAM sequence: CTG
gtttctatggcgagcctact

SEQ ID NO: 371445 - DNA, 20 bp, Artificial Sequence
  Description of Artificial Sequence: Synthetic oligonucleotide
  Target: LAMA2; (+) strand; PAM type: YTN; PAM sequence: TTT
ctatggcgagcctactaaag

SEQ ID NO: 371446 - DNA, 20 bp, Artificial Sequence
  Description of Artificial Sequence: Synthetic oligonucleotide
  Target: LAMA2; (+) strand; PAM type: YTN; PAM sequence: TTC
tatggcgagcctactaaagg

SEQ ID NO: 371447 - DNA, 20 bp, Artificial Sequence
  Description of Artificial Sequence: Synthetic oligonucleotide
  Target: LAMA2; (+) strand; PAM type: YTN; PAM sequence: CTA
tggcgagcctactaaaggaa

SEQ ID NO: 371448 - DNA, 20 bp, Artificial Sequence
  Description of Artificial Sequence: Synthetic oligonucleotide
  Target: LAMA2; (+) strand; PAM type: YTN; PAM sequence: CTA
ctaaaggaacctctgaagac

SEQ ID NO: 371449 - DNA, 20 bp, Artificial Sequence
  Description of Artificial Sequence: Synthetic oligonucleotide
  Target: LAMA2; (+) strand; PAM type: YTN; PAM sequence: CTA
aaggaacctctgaagactgt

SEQ ID NO: 371450 - DNA, 20 bp, Artificial Sequence
  Description of Artificial Sequence: Synthetic oligonucleotide
  Target: LAMA2; (+) strand; PAM type: YTN; PAM sequence: CTC
tgaagactgtcaaccctgtg

SEQ ID NO: 371451 - DNA, 20 bp, Artificial Sequence
  Description of Artificial Sequence: Synthetic oligonucleotide
  Target: LAMA2; (+) strand; PAM type: YTN; PAM sequence: CTG
aagactgtcaaccctgtgcc

SEQ ID NO: 371452 - DNA, 20 bp, Artificial Sequence
  Description of Artificial Sequence: Synthetic oligonucleotide
  Target: LAMA2; (+) strand; PAM type: YTN; PAM sequence: CTG
tcaaccctgtgcctgtccac

SEQ ID NO: 371453 - DNA, 20 bp, Artificial Sequence
  Description of Artificial Sequence: Synthetic oligonucleotide
  Target: LAMA2; (+) strand; PAM type: YTN; PAM sequence: CTG
tgcctgtccactcaatatcc

SEQ ID NO: 371454 - DNA, 20 bp, Artificial Sequence
  Description of Artificial Sequence: Synthetic oligonucleotide
  Target: LAMA2; (+) strand; PAM type: YTN; PAM sequence: CTG
tccactcaatatcccatcca

SEQ ID NO: 371455 - DNA, 20 bp, Artificial Sequence
  Description of Artificial Sequence: Synthetic oligonucleotide
  Target: LAMA2; (+) strand; PAM type: YTN; PAM sequence: CTC
aatatcccatccaataagta

SEQ ID NO: 371456 - DNA, 20 bp, Artificial Sequence
  Description of Artificial Sequence: Synthetic oligonucleotide
  Target: LAMA2; (+) strand; PAM type: YTN; PAM sequence: CTT
accccatgaataagctcagc

SEQ ID NO: 371457 - DNA, 20 bp, Artificial Sequence
  Description of Artificial Sequence: Synthetic oligonucleotide
  Target: LAMA2; (+) strand; PAM type: YTN; PAM sequence: TTA
ccccatgaataagctcagca

SEQ ID NO: 371458 - DNA, 20 bp, Artificial Sequence
  Description of Artificial Sequence: Synthetic oligonucleotide
  Target: LAMA2; (+) strand; PAM type: YTN; PAM sequence: CTC
agcatccatttctgcaagta

SEQ ID NO: 371459 - DNA, 20 bp, Artificial Sequence
  Description of Artificial Sequence: Synthetic oligonucleotide
  Target: LAMA2; (+) strand; PAM type: YTN; PAM sequence: TTT
ctgcaagtacacttttcata

SEQ ID NO: 371460 - DNA, 20 bp, Artificial Sequence
  Description of Artificial Sequence: Synthetic oligonucleotide
  Target: LAMA2; (+) strand; PAM type: YTN; PAM sequence: TTC
tgcaagtacacttttcatag

SEQ ID NO: 371461 - DNA, 20 bp, Artificial Sequence
  Description of Artificial Sequence: Synthetic oligonucleotide
  Target: LAMA2; (+) strand; PAM type: YTN; PAM sequence: CTG
caagtacacttttcatagca

SEQ ID NO: 371462 - DNA, 20 bp, Artificial Sequence
  Description of Artificial Sequence: Synthetic oligonucleotide
  Target: LAMA2; (+) strand; PAM type: YTN; PAM sequence: CTT
ttcatagcaaatatacactt

SEQ ID NO: 371463 - DNA, 20 bp, Artificial Sequence
  Description of Artificial Sequence: Synthetic oligonucleotide
  Target: LAMA2; (+) strand; PAM type: YTN; PAM sequence: TTT
tcatagcaaatatacacttc

SEQ ID NO: 371464 - DNA, 20 bp, Artificial Sequence
  Description of Artificial Sequence: Synthetic oligonucleotide
  Target: LAMA2; (+) strand; PAM type: YTN; PAM sequence: TTT
catagcaaatatacacttcc

SEQ ID NO: 371465 - DNA, 20 bp, Artificial Sequence
  Description of Artificial Sequence: Synthetic oligonucleotide
  Target: LAMA2; (+) strand; PAM type: YTN; PAM sequence: TTC
atagcaaatatacacttcct

SEQ ID NO: 371466 - DNA, 20 bp, Artificial Sequence
  Description of Artificial Sequence: Synthetic oligonucleotide
  Target: LAMA2; (+) strand; PAM type: YTN; PAM sequence: CTT
ccttttatcccatgtaaata

SEQ ID NO: 371467 - DNA, 20 bp, Artificial Sequence
  Description of Artificial Sequence: Synthetic oligonucleotide
  Target: LAMA2; (+) strand; PAM type: YTN; PAM sequence: TTC
cttttatcccatgtaaataa

SEQ ID NO: 371468 - DNA, 20 bp, Artificial Sequence
  Description of Artificial Sequence: Synthetic oligonucleotide
  Target: LAMA2; (+) strand; PAM type: YTN; PAM sequence: CTT
ttatcccatgtaaataaata

SEQ ID NO: 371469 - DNA, 20 bp, Artificial Sequence
  Description of Artificial Sequence: Synthetic oligonucleotide
  Target: LAMA2; (+) strand; PAM type: YTN; PAM sequence: TTT
tatcccatgtaaataaataa

SEQ ID NO: 371470 - DNA, 20 bp, Artificial Sequence
  Description of Artificial Sequence: Synthetic oligonucleotide
  Target: LAMA2; (+) strand; PAM type: YTN; PAM sequence: TTT
atcccatgtaaataaataat

SEQ ID NO: 371471 - DNA, 20 bp, Artificial Sequence
  Description of Artificial Sequence: Synthetic oligonucleotide
  Target: LAMA2; (+) strand; PAM type: YTN; PAM sequence: TTA
tcccatgtaaataaataata

SEQ ID NO: 371472 - DNA, 20 bp, Artificial Sequence
  Description of Artificial Sequence: Synthetic oligonucleotide
  Target: LAMA2; (+) strand; PAM type: YTN; PAM sequence: TTT
tttcaggaaaattatatgaa

SEQ ID NO: 371473 - DNA, 20 bp, Artificial Sequence
  Description of Artificial Sequence: Synthetic oligonucleotide
  Target: LAMA2; (+) strand; PAM type: YTN; PAM sequence: TTT
ttcaggaaaattatatgaat

SEQ ID NO: 371474 - DNA, 20 bp, Artificial Sequence
  Description of Artificial Sequence: Synthetic oligonucleotide
  Target: LAMA2; (+) strand; PAM type: YTN; PAM sequence: TTT
tcaggaaaattatatgaatt

SEQ ID NO: 371475 - DNA, 20 bp, Artificial Sequence
  Description of Artificial Sequence: Synthetic oligonucleotide
  Target: LAMA2; (+) strand; PAM type: YTN; PAM sequence: TTT
caggaaaattatatgaattt

SEQ ID NO: 371476 - DNA, 20 bp, Artificial Sequence
  Description of Artificial Sequence: Synthetic oligonucleotide
  Target: LAMA2; (+) strand; PAM type: YTN; PAM sequence: TTC
aggaaaattatatgaatttt

SEQ ID NO: 371477 - DNA, 20 bp, Artificial Sequence
  Description of Artificial Sequence: Synthetic oligonucleotide
  Target: LAMA2; (+) strand; PAM type: YTN; PAM sequence: TTA
tatgaattttttcaaaccta

SEQ ID NO: 371478 - DNA, 20 bp, Artificial Sequence
  Description of Artificial Sequence: Synthetic oligonucleotide
  Target: LAMA2; (+) strand; PAM type: YTN; PAM sequence: TTT
tttcaaacctaagatattta

SEQ ID NO: 371479 - DNA, 20 bp, Artificial Sequence
  Description of Artificial Sequence: Synthetic oligonucleotide
  Target: LAMA2; (+) strand; PAM type: YTN; PAM sequence: TTT
ttcaaacctaagatatttaa

SEQ ID NO: 371480 - DNA, 20 bp, Artificial Sequence
  Description of Artificial Sequence: Synthetic oligonucleotide
  Target: LAMA2; (+) strand; PAM type: YTN; PAM sequence: TTT
tcaaacctaagatatttaaa

SEQ ID NO: 371481 - DNA, 20 bp, Artificial Sequence
  Description of Artificial Sequence: Synthetic oligonucleotide
  Target: LAMA2; (+) strand; PAM type: YTN; PAM sequence: TTT
caaacctaagatatttaaaa

SEQ ID NO: 371482 - DNA, 20 bp, Artificial Sequence
  Description of Artificial Sequence: Synthetic oligonucleotide
  Target: LAMA2; (+) strand; PAM type: YTN; PAM sequence: TTC
aaacctaagatatttaaaac

SEQ ID NO: 371483 - DNA, 20 bp, Artificial Sequence
  Description of Artificial Sequence: Synthetic oligonucleotide
  Target: LAMA2; (+) strand; PAM type: YTN; PAM sequence: CTA
agatatttaaaactatgagg

SEQ ID NO: 371484 - DNA, 20 bp, Artificial Sequence
  Description of Artificial Sequence: Synthetic oligonucleotide
  Target: LAMA2; (+) strand; PAM type: YTN; PAM sequence: TTT
aaaactatgaggatttctaa

SEQ ID NO: 371485 - DNA, 20 bp, Artificial Sequence
  Description of Artificial Sequence: Synthetic oligonucleotide
  Target: LAMA2; (+) strand; PAM type: YTN; PAM sequence: TTA
aaactatgaggatttctaag

SEQ ID NO: 371486 - DNA, 20 bp, Artificial Sequence
  Description of Artificial Sequence: Synthetic oligonucleotide
  Target: LAMA2; (+) strand; PAM type: YTN; PAM sequence: CTA
tgaggatttctaagaatttg

SEQ ID NO: 371487 - DNA, 20 bp, Artificial Sequence
  Description of Artificial Sequence: Synthetic oligonucleotide
  Target: LAMA2; (+) strand; PAM type: YTN; PAM sequence: TTT
ctaagaatttgtaatttttt

SEQ ID NO: 371488 - DNA, 20 bp, Artificial Sequence
  Description of Artificial Sequence: Synthetic oligonucleotide
  Target: LAMA2; (+) strand; PAM type: YTN; PAM sequence: TTC
taagaatttgtaattttttt

SEQ ID NO: 371489 - DNA, 20 bp, Artificial Sequence
  Description of Artificial Sequence: Synthetic oligonucleotide
  Target: LAMA2; (+) strand; PAM type: YTN; PAM sequence: CTA
agaatttgtaatttttttag

SEQ ID NO: 371490 - DNA, 20 bp, Artificial Sequence
  Description of Artificial Sequence: Synthetic oligonucleotide
  Target: LAMA2; (+) strand; PAM type: YTN; PAM sequence: TTT
gtaatttttttagctctagt

SEQ ID NO: 371491 - DNA, 20 bp, Artificial Sequence
  Description of Artificial Sequence: Synthetic oligonucleotide
  Target: LAMA2; (+) strand; PAM type: YTN; PAM sequence: TTG
taatttttttagctctagtt

SEQ ID NO: 371492 - DNA, 20 bp, Artificial Sequence
  Description of Artificial Sequence: Synthetic oligonucleotide
  Target: LAMA2; (+) strand; PAM type: YTN; PAM sequence: TTT
ttttagctctagttttggtg

SEQ ID NO: 371493 - DNA, 20 bp, Artificial Sequence
  Description of Artificial Sequence: Synthetic oligonucleotide
  Target: LAMA2; (+) strand; PAM type: YTN; PAM sequence: TTT
tttagctctagttttggtga

SEQ ID NO: 371494 - DNA, 20 bp, Artificial Sequence
  Description of Artificial Sequence: Synthetic oligonucleotide
  Target: LAMA2; (+) strand; PAM type: YTN; PAM sequence: TTT
ttagctctagttttggtgat

SEQ ID NO: 371495 - DNA, 20 bp, Artificial Sequence
  Description of Artificial Sequence: Synthetic oligonucleotide
  Target: LAMA2; (+) strand; PAM type: YTN; PAM sequence: TTT
tagctctagttttggtgatt

SEQ ID NO: 371496 - DNA, 20 bp, Artificial Sequence
  Description of Artificial Sequence: Synthetic oligonucleotide
  Target: LAMA2; (+) strand; PAM type: YTN; PAM sequence: TTT
agctctagttttggtgattt

SEQ ID NO: 371497 - DNA, 20 bp, Artificial Sequence
  Description of Artificial Sequence: Synthetic oligonucleotide
  Target: LAMA2; (+) strand; PAM type: YTN; PAM sequence: TTA
gctctagttttggtgattta

SEQ ID NO: 371498 - DNA, 20 bp, Artificial Sequence
  Description of Artificial Sequence: Synthetic oligonucleotide
  Target: LAMA2; (+) strand; PAM type: YTN; PAM sequence: CTC
tagttttggtgatttaattt

SEQ ID NO: 371499 - DNA, 20 bp, Artificial Sequence
  Description of Artificial Sequence: Synthetic oligonucleotide
  Target: LAMA2; (+) strand; PAM type: YTN; PAM sequence: CTA
gttttggtgatttaatttct

SEQ ID NO: 371500 - DNA, 20 bp, Artificial Sequence
  Description of Artificial Sequence: Synthetic oligonucleotide
  Target: LAMA2; (+) strand; PAM type: YTN; PAM sequence: TTT
tggtgatttaatttctaaga

SEQ ID NO: 371501 - DNA, 20 bp, Artificial Sequence
  Description of Artificial Sequence: Synthetic oligonucleotide
  Target: LAMA2; (+) strand; PAM type: YTN; PAM sequence: TTT
ggtgatttaatttctaagag

SEQ ID NO: 371502 - DNA, 20 bp, Artificial Sequence
  Description of Artificial Sequence: Synthetic oligonucleotide
  Target: LAMA2; (+) strand; PAM type: YTN; PAM sequence: TTG
gtgatttaatttctaagagt

SEQ ID NO: 371503 - DNA, 20 bp, Artificial Sequence
  Description of Artificial Sequence: Synthetic oligonucleotide
  Target: LAMA2; (+) strand; PAM type: YTN; PAM sequence: TTT
aatttctaagagtagaactc

SEQ ID NO: 371504 - DNA, 20 bp, Artificial Sequence
  Description of Artificial Sequence: Synthetic oligonucleotide
  Target: LAMA2; (+) strand; PAM type: YTN; PAM sequence: TTA
atttctaagagtagaactca

SEQ ID NO: 371505 - DNA, 20 bp, Artificial Sequence
  Description of Artificial Sequence: Synthetic oligonucleotide
  Target: LAMA2; (+) strand; PAM type: YTN; PAM sequence: TTT
ctaagagtagaactcaaata

SEQ ID NO: 371506 - DNA, 20 bp, Artificial Sequence
  Description of Artificial Sequence: Synthetic oligonucleotide
  Target: LAMA2; (+) strand; PAM type: YTN; PAM sequence: TTC
taagagtagaactcaaatag

SEQ ID NO: 371507 - DNA, 20 bp, Artificial Sequence
  Description of Artificial Sequence: Synthetic oligonucleotide
  Target: LAMA2; (+) strand; PAM type: YTN; PAM sequence: CTA
agagtagaactcaaatagaa

SEQ ID NO: 371508 - DNA, 20 bp, Artificial Sequence
  Description of Artificial Sequence: Synthetic oligonucleotide
  Target: LAMA2; (+) strand; PAM type: YTN; PAM sequence: CTC
aaatagaatttctacaccaa

SEQ ID NO: 371509 - DNA, 20 bp, Artificial Sequence
  Description of Artificial Sequence: Synthetic oligonucleotide
  Target: LAMA2; (+) strand; PAM type: YTN; PAM sequence: TTT
ctacaccaattccaaagaac

SEQ ID NO: 371510 - DNA, 20 bp, Artificial Sequence
  Description of Artificial Sequence: Synthetic oligonucleotide
  Target: LAMA2; (+) strand; PAM type: YTN; PAM sequence: TTC
tacaccaattccaaagaaca

SEQ ID NO: 371511 - DNA, 20 bp, Artificial Sequence
  Description of Artificial Sequence: Synthetic oligonucleotide
  Target: LAMA2; (+) strand; PAM type: YTN; PAM sequence: CTA
caccaattccaaagaacata

SEQ ID NO: 371512 - DNA, 20 bp, Artificial Sequence
  Description of Artificial Sequence: Synthetic oligonucleotide
  Target: LAMA2; (+) strand; PAM type: YTN; PAM sequence: TTC
caaagaacataaatatttta

SEQ ID NO: 371513 - DNA, 20 bp, Artificial Sequence
  Description of Artificial Sequence: Synthetic oligonucleotide
  Target: LAMA2; (+) strand; PAM type: YTN; PAM sequence: TTT
tatacaaacacatacatgtg

SEQ ID NO: 371514 - DNA, 20 bp, Artificial Sequence
  Description of Artificial Sequence: Synthetic oligonucleotide
  Target: LAMA2; (+) strand; PAM type: YTN; PAM sequence: TTT
atacaaacacatacatgtgc

SEQ ID NO: 371515 - DNA, 20 bp, Artificial Sequence
  Description of Artificial Sequence: Synthetic oligonucleotide
  Target: LAMA2; (+) strand; PAM type: YTN; PAM sequence: TTA
tacaaacacatacatgtgca

SEQ ID NO: 371516 - DNA, 20 bp, Artificial Sequence
  Description of Artificial Sequence: Synthetic oligonucleotide
  Target: LAMA2; (+) strand; PAM type: YTN; PAM sequence: CTA
cacacagacacatacccatc

SEQ ID NO: 371517 - DNA, 20 bp, Artificial Sequence
  Description of Artificial Sequence: Synthetic oligonucleotide
  Target: LAMA2; (+) strand; PAM type: YTN; PAM sequence: CTT
cataccttaataaaaggata

SEQ ID NO: 371518 - DNA, 20 bp, Artificial Sequence
  Description of Artificial Sequence: Synthetic oligonucleotide
  Target: LAMA2; (+) strand; PAM type: YTN; PAM sequence: TTC
ataccttaataaaaggatat

SEQ ID NO: 371519 - DNA, 20 bp, Artificial Sequence
  Description of Artificial Sequence: Synthetic oligonucleotide
  Target: LAMA2; (+) strand; PAM type: YTN; PAM sequence: CTT
aataaaaggatataaataca

SEQ ID NO: 371520 - DNA, 20 bp, Artificial Sequence
  Description of Artificial Sequence: Synthetic oligonucleotide
  Target: LAMA2; (+) strand; PAM type: YTN; PAM sequence: TTA
ataaaaggatataaatacag

SEQ ID NO: 371521 - DNA, 20 bp, Artificial Sequence
  Description of Artificial Sequence: Synthetic oligonucleotide
  Target: LAMA2; (+) strand; PAM type: YTN; PAM sequence: CTA
atttgggttctacccataca

SEQ ID NO: 371522 - DNA, 20 bp, Artificial Sequence
  Description of Artificial Sequence: Synthetic oligonucleotide
  Target: LAMA2; (+) strand; PAM type: YTN; PAM sequence: TTT
gggttctacccatacactat

SEQ ID NO: 371523 - DNA, 20 bp, Artificial Sequence
  Description of Artificial Sequence: Synthetic oligonucleotide
  Target: LAMA2; (+) strand; PAM type: YTN; PAM sequence: TTG
ggttctacccatacactatt

SEQ ID NO: 371524 - DNA, 20 bp, Artificial Sequence
  Description of Artificial Sequence: Synthetic oligonucleotide
  Target: LAMA2; (+) strand; PAM type: YTN; PAM sequence: TTC
tacccatacactattttttt

SEQ ID NO: 371525 - DNA, 20 bp, Artificial Sequence
  Description of Artificial Sequence: Synthetic oligonucleotide
  Target: LAMA2; (+) strand; PAM type: YTN; PAM sequence: CTA
cccatacactatttttttgt

SEQ ID NO: 371526 - DNA, 20 bp, Artificial Sequence
  Description of Artificial Sequence: Synthetic oligonucleotide
  Target: LAMA2; (+) strand; PAM type: YTN; PAM sequence: CTA
tttttttgtgaatcttgggc

SEQ ID NO: 371527 - DNA, 20 bp, Artificial Sequence
  Description of Artificial Sequence: Synthetic oligonucleotide
  Target: LAMA2; (+) strand; PAM type: YTN; PAM sequence: TTT
ttttgtgaatcttgggcaag

SEQ ID NO: 371528 - DNA, 20 bp, Artificial Sequence
  Description of Artificial Sequence: Synthetic oligonucleotide
  Target: LAMA2; (+) strand; PAM type: YTN; PAM sequence: TTT
tttgtgaatcttgggcaagt

SEQ ID NO: 371529 - DNA, 20 bp, Artificial Sequence
  Description of Artificial Sequence: Synthetic oligonucleotide
  Target: LAMA2; (+) strand; PAM type: YTN; PAM sequence: TTT
ttgtgaatcttgggcaagtc

SEQ ID NO: 371530 - DNA, 20 bp, Artificial Sequence
  Description of Artificial Sequence: Synthetic oligonucleotide
  Target: LAMA2; (+) strand; PAM type: YTN; PAM sequence: TTT
tgtgaatcttgggcaagtcg

SEQ ID NO: 371531 - DNA, 20 bp, Artificial Sequence
  Description of Artificial Sequence: Synthetic oligonucleotide
  Target: LAMA2; (+) strand; PAM type: YTN; PAM sequence: TTT
gtgaatcttgggcaagtcgt

SEQ ID NO: 371532 - DNA, 20 bp, Artificial Sequence
  Description of Artificial Sequence: Synthetic oligonucleotide
  Target: LAMA2; (+) strand; PAM type: YTN; PAM sequence: TTG
tgaatcttgggcaagtcgta

SEQ ID NO: 371533 - DNA, 20 bp, Artificial Sequence
  Description of Artificial Sequence: Synthetic oligonucleotide
  Target: LAMA2; (+) strand; PAM type: YTN; PAM sequence: CTT
gggcaagtcgtaaacctctc

SEQ ID NO: 371534 - DNA, 20 bp, Artificial Sequence
  Description of Artificial Sequence: Synthetic oligonucleotide
  Target: LAMA2; (+) strand; PAM type: YTN; PAM sequence: TTG
ggcaagtcgtaaacctctca

SEQ ID NO: 371535 - DNA, 20 bp, Artificial Sequence
  Description of Artificial Sequence: Synthetic oligonucleotide
  Target: LAMA2; (+) strand; PAM type: YTN; PAM sequence: CTC
tcaaaaagtaaaatgaaggg

SEQ ID NO: 371536 - DNA, 20 bp, Artificial Sequence
  Description of Artificial Sequence: Synthetic oligonucleotide
  Target: LAMA2; (+) strand; PAM type: YTN; PAM sequence: CTC
aaaaagtaaaatgaagggac

SEQ ID NO: 371537 - DNA, 20 bp, Artificial Sequence
  Description of Artificial Sequence: Synthetic oligonucleotide
  Target: LAMA2; (+) strand; PAM type: YTN; PAM sequence: CTG
atttaactgacttttaagta

SEQ ID NO: 371538 - DNA, 20 bp, Artificial Sequence
  Description of Artificial Sequence: Synthetic oligonucleotide
  Target: LAMA2; (+) strand; PAM type: YTN; PAM sequence: TTT
aactgacttttaagtaccca

SEQ ID NO: 371539 - DNA, 20 bp, Artificial Sequence
  Description of Artificial Sequence: Synthetic oligonucleotide
  Target: LAMA2; (+) strand; PAM type: YTN; PAM sequence: TTA
actgacttttaagtacccat

SEQ ID NO: 371540 - DNA, 20 bp, Artificial Sequence
  Description of Artificial Sequence: Synthetic oligonucleotide
  Target: LAMA2; (+) strand; PAM type: YTN; PAM sequence: CTG
acttttaagtacccattcta

SEQ ID NO: 371541 - DNA, 20 bp, Artificial Sequence
  Description of Artificial Sequence: Synthetic oligonucleotide
  Target: LAMA2; (+) strand; PAM type: YTN; PAM sequence: CTT
ttaagtacccattctatccc

SEQ ID NO: 371542 - DNA, 20 bp, Artificial Sequence
  Description of Artificial Sequence: Synthetic oligonucleotide
  Target: LAMA2; (+) strand; PAM type: YTN; PAM sequence: TTT
taagtacccattctatccct

SEQ ID NO: 371543 - DNA, 20 bp, Artificial Sequence
  Description of Artificial Sequence: Synthetic oligonucleotide
  Target: LAMA2; (+) strand; PAM type: YTN; PAM sequence: TTT
aagtacccattctatccctt

SEQ ID NO: 371544 - DNA, 20 bp, Artificial Sequence
  Description of Artificial Sequence: Synthetic oligonucleotide
  Target: LAMA2; (+) strand; PAM type: YTN; PAM sequence: TTA
agtacccattctatcccttc

SEQ ID NO: 371545 - DNA, 20 bp, Artificial Sequence
  Description of Artificial Sequence: Synthetic oligonucleotide
  Target: LAMA2; (+) strand; PAM type: YTN; PAM sequence: TTC
tatcccttctttttagaaaa

SEQ ID NO: 371546 - DNA, 20 bp, Artificial Sequence
  Description of Artificial Sequence: Synthetic oligonucleotide
  Target: LAMA2; (+) strand; PAM type: YTN; PAM sequence: CTA
tcccttctttttagaaaaat

SEQ ID NO: 371547 - DNA, 20 bp, Artificial Sequence
  Description of Artificial Sequence: Synthetic oligonucleotide
  Target: LAMA2; (+) strand; PAM type: YTN; PAM sequence: CTT
ctttttagaaaaattcgttg

SEQ ID NO: 371548 - DNA, 20 bp, Artificial Sequence
  Description of Artificial Sequence: Synthetic oligonucleotide
  Target: LAMA2; (+) strand; PAM type: YTN; PAM sequence: TTC
tttttagaaaaattcgttgt

SEQ ID NO: 371549 - DNA, 20 bp, Artificial Sequence
  Description of Artificial Sequence: Synthetic oligonucleotide
  Target: LAMA2; (+) strand; PAM type: YTN; PAM sequence: CTT
tttagaaaaattcgttgttc

SEQ ID NO: 371550 - DNA, 20 bp, Artificial Sequence
  Description of Artificial Sequence: Synthetic oligonucleotide
  Target: LAMA2; (+) strand; PAM type: YTN; PAM sequence: TTT
ttagaaaaattcgttgttca

SEQ ID NO: 371551 - DNA, 20 bp, Artificial Sequence
  Description of Artificial Sequence: Synthetic oligonucleotide
  Target: LAMA2; (+) strand; PAM type: YTN; PAM sequence: TTT
tagaaaaattcgttgttcac

SEQ ID NO: 371552 - DNA, 20 bp, Artificial Sequence
  Description of Artificial Sequence: Synthetic oligonucleotide
  Target: LAMA2; (+) strand; PAM type: YTN; PAM sequence: TTT
agaaaaattcgttgttcacc

SEQ ID NO: 371553 - DNA, 20 bp, Artificial Sequence
  Description of Artificial Sequence: Synthetic oligonucleotide
  Target: LAMA2; (+) strand; PAM type: YTN; PAM sequence: TTA
gaaaaattcgttgttcacct

SEQ ID NO: 371554 - DNA, 20 bp, Artificial Sequence
  Description of Artificial Sequence: Synthetic oligonucleotide
  Target: LAMA2; (+) strand; PAM type: YTN; PAM sequence: TTC
gttgttcacctagaacaacc

SEQ ID NO: 371555 - DNA, 20 bp, Artificial Sequence
  Description of Artificial Sequence: Synthetic oligonucleotide
  Target: LAMA2; (+) strand; PAM type: YTN; PAM sequence: TTG
ttcacctagaacaaccacct

SEQ ID NO: 371556 - DNA, 20 bp, Artificial Sequence
  Description of Artificial Sequence: Synthetic oligonucleotide
  Target: LAMA2; (+) strand; PAM type: YTN; PAM sequence: TTC
acctagaacaaccacctctt

SEQ ID NO: 371557 - DNA, 20 bp, Artificial Sequence
  Description of Artificial Sequence: Synthetic oligonucleotide
  Target: LAMA2; (+) strand; PAM type: YTN; PAM sequence: CTA
gaacaaccacctcttagagc

SEQ ID NO: 371558 - DNA, 20 bp, Artificial Sequence
  Description of Artificial Sequence: Synthetic oligonucleotide
  Target: LAMA2; (+) strand; PAM type: YTN; PAM sequence: CTC
ttagagcagatttaaaaaaa

SEQ ID NO: 371559 - DNA, 20 bp, Artificial Sequence
  Description of Artificial Sequence: Synthetic oligonucleotide
  Target: LAMA2; (+) strand; PAM type: YTN; PAM sequence: CTT
agagcagatttaaaaaaaca

SEQ ID NO: 371560 - DNA, 20 bp, Artificial Sequence
  Description of Artificial Sequence: Synthetic oligonucleotide
  Target: LAMA2; (+) strand; PAM type: YTN; PAM sequence: TTA
gagcagatttaaaaaaacaa

SEQ ID NO: 371561 - DNA, 20 bp, Artificial Sequence
  Description of Artificial Sequence: Synthetic oligonucleotide
  Target: LAMA2; (+) strand; PAM type: YTN; PAM sequence: TTT
aaaaaaacaaacaacaacaa

SEQ ID NO: 371562 - DNA, 20 bp, Artificial Sequence
  Description of Artificial Sequence: Synthetic oligonucleotide
  Target: LAMA2; (+) strand; PAM type: YTN; PAM sequence: TTA
aaaaaacaaacaacaacaag

SEQ ID NO: 371563 - DNA, 20 bp, Artificial Sequence
  Description of Artificial Sequence: Synthetic oligonucleotide
  Target: LAMA2; (+) strand; PAM type: YTN; PAM sequence: CTT
gacttcctcatttccttacc

SEQ ID NO: 371564 - DNA, 20 bp, Artificial Sequence
  Description of Artificial Sequence: Synthetic oligonucleotide
  Target: LAMA2; (+) strand; PAM type: YTN; PAM sequence: TTG
acttcctcatttccttacct

SEQ ID NO: 371565 - DNA, 20 bp, Artificial Sequence
  Description of Artificial Sequence: Synthetic oligonucleotide
  Target: LAMA2; (+) strand; PAM type: YTN; PAM sequence: CTT
cctcatttccttacctttta

SEQ ID NO: 371566 - DNA, 20 bp, Artificial Sequence
  Description of Artificial Sequence: Synthetic oligonucleotide
  Target: LAMA2; (+) strand; PAM type: YTN; PAM sequence: TTC
ctcatttccttaccttttag

SEQ ID NO: 371567 - DNA, 20 bp, Artificial Sequence
  Description of Artificial Sequence: Synthetic oligonucleotide
  Target: LAMA2; (+) strand; PAM type: YTN; PAM sequence: CTC
atttccttaccttttagagg

SEQ ID NO: 371568 - DNA, 20 bp, Artificial Sequence
  Description of Artificial Sequence: Synthetic oligonucleotide
  Target: LAMA2; (+) strand; PAM type: YTN; PAM sequence: TTT
ccttaccttttagaggaatg

SEQ ID NO: 371569 - DNA, 20 bp, Artificial Sequence
  Description of Artificial Sequence: Synthetic oligonucleotide
  Target: LAMA2; (+) strand; PAM type: YTN; PAM sequence: TTC
cttaccttttagaggaatgc

SEQ ID NO: 371570 - DNA, 20 bp, Artificial Sequence
  Description of Artificial Sequence: Synthetic oligonucleotide
  Target: LAMA2; (+) strand; PAM type: YTN; PAM sequence: CTT
accttttagaggaatgctat

SEQ ID NO: 371571 - DNA, 20 bp, Artificial Sequence
  Description of Artificial Sequence: Synthetic oligonucleotide
  Target: LAMA2; (+) strand; PAM type: YTN; PAM sequence: TTA
ccttttagaggaatgctata

SEQ ID NO: 371572 - DNA, 20 bp, Artificial Sequence
  Description of Artificial Sequence: Synthetic oligonucleotide
  Target: LAMA2; (+) strand; PAM type: YTN; PAM sequence: CTT
ttagaggaatgctatatcca

SEQ ID NO: 371573 - DNA, 20 bp, Artificial Sequence
  Description of Artificial Sequence: Synthetic oligonucleotide
  Target: LAMA2; (+) strand; PAM type: YTN; PAM sequence: TTT
tagaggaatgctatatccag

SEQ ID NO: 371574 - DNA, 20 bp, Artificial Sequence
  Description of Artificial Sequence: Synthetic oligonucleotide
  Target: LAMA2; (+) strand; PAM type: YTN; PAM sequence: TTT
agaggaatgctatatccagc

SEQ ID NO: 371575 - DNA, 20 bp, Artificial Sequence
  Description of Artificial Sequence: Synthetic oligonucleotide
  Target: LAMA2; (+) strand; PAM type: YTN; PAM sequence: TTA
gaggaatgctatatccagct

SEQ ID NO: 371576 - DNA, 20 bp, Artificial Sequence
  Description of Artificial Sequence: Synthetic oligonucleotide
  Target: LAMA2; (+) strand; PAM type: YTN; PAM sequence: CTA
tatccagctgcttgaattca

SEQ ID NO: 371577 - DNA, 20 bp, Artificial Sequence
  Description of Artificial Sequence: Synthetic oligonucleotide
  Target: LAMA2; (+) strand; PAM type: YTN; PAM sequence: CTG
cttgaattcacattccctca

SEQ ID NO: 371578 - DNA, 20 bp, Artificial Sequence
  Description of Artificial Sequence: Synthetic oligonucleotide
  Target: LAMA2; (+) strand; PAM type: YTN; PAM sequence: CTT
gaattcacattccctcaggg

SEQ ID NO: 371579 - DNA, 20 bp, Artificial Sequence
  Description of Artificial Sequence: Synthetic oligonucleotide
  Target: LAMA2; (+) strand; PAM type: YTN; PAM sequence: TTG
aattcacattccctcagggc

SEQ ID NO: 371580 - DNA, 20 bp, Artificial Sequence
  Description of Artificial Sequence: Synthetic oligonucleotide
  Target: LAMA2; (+) strand; PAM type: YTN; PAM sequence: TTC
acattccctcagggcagcct

SEQ ID NO: 371581 - DNA, 20 bp, Artificial Sequence
  Description of Artificial Sequence: Synthetic oligonucleotide
  Target: LAMA2; (+) strand; PAM type: YTN; PAM sequence: TTC
cctcagggcagcctctctca

SEQ ID NO: 371582 - DNA, 20 bp, Artificial Sequence
  Description of Artificial Sequence: Synthetic oligonucleotide
  Target: LAMA2; (+) strand; PAM type: YTN; PAM sequence: CTC
agggcagcctctctcagtaa

SEQ ID NO: 371583 - DNA, 20 bp, Artificial Sequence
  Description of Artificial Sequence: Synthetic oligonucleotide
  Target: LAMA2; (+) strand; PAM type: YTN; PAM sequence: CTC
tctcagtaaacagctaagca

SEQ ID NO: 371584 - DNA, 20 bp, Artificial Sequence
  Description of Artificial Sequence: Synthetic oligonucleotide
  Target: LAMA2; (+) strand; PAM type: YTN; PAM sequence: CTC
tcagtaaacagctaagcaca

SEQ ID NO: 371585 - DNA, 20 bp, Artificial Sequence
  Description of Artificial Sequence: Synthetic oligonucleotide
  Target: LAMA2; (+) strand; PAM type: YTN; PAM sequence: CTC
agtaaacagctaagcacacc

SEQ ID NO: 371586 - DNA, 20 bp, Artificial Sequence
  Description of Artificial Sequence: Synthetic oligonucleotide
  Target: LAMA2; (+) strand; PAM type: YTN; PAM sequence: CTA
agcacaccccaaccaaaaat

SEQ ID NO: 371587 - DNA, 20 bp, Artificial Sequence
  Description of Artificial Sequence: Synthetic oligonucleotide
  Target: LAMA2; (+) strand; PAM type: YTN; PAM sequence: TTG
ttttgtttttaaattgggat

SEQ ID NO: 371588 - DNA, 20 bp, Artificial Sequence
  Description of Artificial Sequence: Synthetic oligonucleotide
  Target: LAMA2; (+) strand; PAM type: YTN; PAM sequence: TTT
tgtttttaaattgggatact

SEQ ID NO: 371589 - DNA, 20 bp, Artificial Sequence
  Description of Artificial Sequence: Synthetic oligonucleotide
  Target: LAMA2; (+) strand; PAM type: YTN; PAM sequence: TTT
gtttttaaattgggatactt

SEQ ID NO: 371590 - DNA, 20 bp, Artificial Sequence
  Description of Artificial Sequence: Synthetic oligonucleotide
  Target: LAMA2; (+) strand; PAM type: YTN; PAM sequence: TTG
tttttaaattgggatacttt

SEQ ID NO: 371591 - DNA, 20 bp, Artificial Sequence
  Description of Artificial Sequence: Synthetic oligonucleotide
  Target: LAMA2; (+) strand; PAM type: YTN; PAM sequence: TTT
ttaaattgggatactttttt

SEQ ID NO: 371592 - DNA, 20 bp, Artificial Sequence
  Description of Artificial Sequence: Synthetic oligonucleotide
  Target: LAMA2; (+) strand; PAM type: YTN; PAM sequence: TTT
taaattgggatacttttttt

SEQ ID NO: 371593 - DNA, 20 bp, Artificial Sequence
  Description of Artificial Sequence: Synthetic oligonucleotide
  Target: LAMA2; (+) strand; PAM type: YTN; PAM sequence: TTT
aaattgggatactttttttt

SEQ ID NO: 371594 - DNA, 20 bp, Artificial Sequence
  Description of Artificial Sequence: Synthetic oligonucleotide
  Target: LAMA2; (+) strand; PAM type: YTN; PAM sequence: TTA
aattgggatacttttttttt

SEQ ID NO: 371595 - DNA, 20 bp, Artificial Sequence
  Description of Artificial Sequence: Synthetic oligonucleotide
  Target: LAMA2; (+) strand; PAM type: YTN; PAM sequence: TTG
ggatactttttttttttttt

SEQ ID NO: 371596 - DNA, 20 bp, Artificial Sequence
  Description of Artificial Sequence: Synthetic oligonucleotide
  Target: LAMA2; (+) strand; PAM type: YTN; PAM sequence: CTT
tttttttttttttttttttt

SEQ ID NO: 371597 - DNA, 20 bp, Artificial Sequence
  Description of Artificial Sequence: Synthetic oligonucleotide
  Target: LAMA2; (+) strand; PAM type: YTN; PAM sequence: TTT
tttttttttttttttttttt

SEQ ID NO: 371598 - DNA, 20 bp, Artificial Sequence
  Description of Artificial Sequence: Synthetic oligonucleotide
  Target: LAMA2; (+) strand; PAM type: YTN; PAM sequence: TTT
tttttttttttttttttttg

SEQ ID NO: 371599 - DNA, 20 bp, Artificial Sequence
  Description of Artificial Sequence: Synthetic oligonucleotide
  Target: LAMA2; (+) strand; PAM type: YTN; PAM sequence: TTT
ttttttttttttttttttga

SEQ ID NO: 371600 - DNA, 20 bp, Artificial Sequence
  Description of Artificial Sequence: Synthetic oligonucleotide
  Target: LAMA2; (+) strand; PAM type: YTN; PAM sequence: TTT
tttttttttttttttttgag

SEQ ID NO: 371601 - DNA, 20 bp, Artificial Sequence
  Description of Artificial Sequence: Synthetic oligonucleotide
  Target: LAMA2; (+) strand; PAM type: YTN; PAM sequence: TTT
ttttttttttttttttgaga

SEQ ID NO: 371602 - DNA, 20 bp, Artificial Sequence
  Description of Artificial Sequence: Synthetic oligonucleotide
  Target: LAMA2; (+) strand; PAM type: YTN; PAM sequence: TTT
tttttttttttttttgagac

SEQ ID NO: 371603 - DNA, 20 bp, Artificial Sequence
  Description of Artificial Sequence: Synthetic oligonucleotide
  Target: LAMA2; (+) strand; PAM type: YTN; PAM sequence: TTT
ttttttttttttttgagaca

SEQ ID NO: 371604 - DNA, 20 bp, Artificial Sequence
  Description of Artificial Sequence: Synthetic oligonucleotide
  Target: LAMA2; (+) strand; PAM type: YTN; PAM sequence: TTT
tttttttttttttgagacag

SEQ ID NO: 371605 - DNA, 20 bp, Artificial Sequence
  Description of Artificial Sequence: Synthetic oligonucleotide
  Target: LAMA2; (+) strand; PAM type: YTN; PAM sequence: TTT
ttttttttttttgagacaga

SEQ ID NO: 371606 - DNA, 20 bp, Artificial Sequence
  Description of Artificial Sequence: Synthetic oligonucleotide
  Target: LAMA2; (+) strand; PAM type: YTN; PAM sequence: TTT
tttttttttttgagacagag

SEQ ID NO: 371607 - DNA, 20 bp, Artificial Sequence
  Description of Artificial Sequence: Synthetic oligonucleotide
  Target: LAMA2; (+) strand; PAM type: YTN; PAM sequence: TTT
ttttttttttgagacagagt

SEQ ID NO: 371608 - DNA, 20 bp, Artificial Sequence
  Description of Artificial Sequence: Synthetic oligonucleotide
  Target: LAMA2; (+) strand; PAM type: YTN; PAM sequence: TTT
tttttttttgagacagagtc

SEQ ID NO: 371609 - DNA, 20 bp, Artificial Sequence
  Description of Artificial Sequence: Synthetic oligonucleotide
  Target: LAMA2; (+) strand; PAM type: YTN; PAM sequence: TTT
ttttttttgagacagagtct

SEQ ID NO: 371610 - DNA, 20 bp, Artificial Sequence
  Description of Artificial Sequence: Synthetic oligonucleotide
  Target: LAMA2; (+) strand; PAM type: YTN; PAM sequence: TTT
tttttttgagacagagtctc

SEQ ID NO: 371611 - DNA, 20 bp, Artificial Sequence
  Description of Artificial Sequence: Synthetic oligonucleotide
  Target: LAMA2; (+) strand; PAM type: YTN; PAM sequence: TTT
ttttttgagacagagtctcg

SEQ ID NO: 371612 - DNA, 20 bp, Artificial Sequence
  Description of Artificial Sequence: Synthetic oligonucleotide
  Target: LAMA2; (+) strand; PAM type: YTN; PAM sequence: TTT
tttttgagacagagtctcgc

SEQ ID NO: 371613 - DNA, 20 bp, Artificial Sequence
  Description of Artificial Sequence: Synthetic oligonucleotide
  Target: LAMA2; (+) strand; PAM type: YTN; PAM sequence: TTT
ttttgagacagagtctcgct

SEQ ID NO: 371614 - DNA, 20 bp, Artificial Sequence
  Description of Artificial Sequence: Synthetic oligonucleotide
  Target: LAMA2; (+) strand; PAM type: YTN; PAM sequence: TTT
tttgagacagagtctcgctc

SEQ ID NO: 371615 - DNA, 20 bp, Artificial Sequence
  Description of Artificial Sequence: Synthetic oligonucleotide
  Target: LAMA2; (+) strand; PAM type: YTN; PAM sequence: TTT
ttgagacagagtctcgctct

SEQ ID NO: 371616 - DNA, 20 bp, Artificial Sequence
  Description of Artificial Sequence: Synthetic oligonucleotide
  Target: LAMA2; (+) strand; PAM type: YTN; PAM sequence: TTT
tgagacagagtctcgctctg

SEQ ID NO: 371617 - DNA, 20 bp, Artificial Sequence
  Description of Artificial Sequence: Synthetic oligonucleotide
  Target: LAMA2; (+) strand; PAM type: YTN; PAM sequence: TTT
gagacagagtctcgctctgt

SEQ ID NO: 371618 - DNA, 20 bp, Artificial Sequence
  Description of Artificial Sequence: Synthetic oligonucleotide
  Target: LAMA2; (+) strand; PAM type: YTN; PAM sequence: TTG
agacagagtctcgctctgtt

SEQ ID NO: 371619 - DNA, 20 bp, Artificial Sequence
  Description of Artificial Sequence: Synthetic oligonucleotide
  Target: LAMA2; (+) strand; PAM type: YTN; PAM sequence: CTC
gctctgttgcccaggctaga

SEQ ID NO: 371620 - DNA, 20 bp, Artificial Sequence
  Description of Artificial Sequence: Synthetic oligonucleotide
  Target: LAMA2; (+) strand; PAM type: YTN; PAM sequence: CTC
tgttgcccaggctagagtgc

SEQ ID NO: 371621 - DNA, 20 bp, Artificial Sequence
  Description of Artificial Sequence: Synthetic oligonucleotide
  Target: LAMA2; (+) strand; PAM type: YTN; PAM sequence: CTG
ttgcccaggctagagtgcag

SEQ ID NO: 371622 - DNA, 20 bp, Artificial Sequence
  Description of Artificial Sequence: Synthetic oligonucleotide
  Target: LAMA2; (+) strand; PAM type: YTN; PAM sequence: TTG
cccaggctagagtgcagtgg

SEQ ID NO: 371623 - DNA, 20 bp, Artificial Sequence
  Description of Artificial Sequence: Synthetic oligonucleotide
  Target: LAMA2; (+) strand; PAM type: YTN; PAM sequence: CTA
gagtgcagtggtgcaatctt

SEQ ID NO: 371624 - DNA, 20 bp, Artificial Sequence
  Description of Artificial Sequence: Synthetic oligonucleotide
  Target: LAMA2; (+) strand; PAM type: YTN; PAM sequence: CTT
ggctcactgcaagctctgcc

SEQ ID NO: 371625 - DNA, 20 bp, Artificial Sequence
  Description of Artificial Sequence: Synthetic oligonucleotide
  Target: LAMA2; (+) strand; PAM type: YTN; PAM sequence: TTG
gctcactgcaagctctgcct

SEQ ID NO: 371626 - DNA, 20 bp, Artificial Sequence
  Description of Artificial Sequence: Synthetic oligonucleotide
  Target: LAMA2; (+) strand; PAM type: YTN; PAM sequence: CTC
actgcaagctctgcctcccg

SEQ ID NO: 371627 - DNA, 20 bp, Artificial Sequence
  Description of Artificial Sequence: Synthetic oligonucleotide
  Target: LAMA2; (+) strand; PAM type: YTN; PAM sequence: CTG
caagctctgcctcccgggtt

SEQ ID NO: 371628 - DNA, 20 bp, Artificial Sequence
  Description of Artificial Sequence: Synthetic oligonucleotide
  Target: LAMA2; (+) strand; PAM type: YTN; PAM sequence: CTC
tgcctcccgggttcaagcca

SEQ ID NO: 371629 - DNA, 20 bp, Artificial Sequence
  Description of Artificial Sequence: Synthetic oligonucleotide
  Target: LAMA2; (+) strand; PAM type: YTN; PAM sequence: CTG
cctcccgggttcaagccatt

SEQ ID NO: 371630 - DNA, 20 bp, Artificial Sequence
  Description of Artificial Sequence: Synthetic oligonucleotide
  Target: LAMA2; (+) strand; PAM type: YTN; PAM sequence: CTC
ccgggttcaagccattctcc

SEQ ID NO: 371631 - DNA, 20 bp, Artificial Sequence
  Description of Artificial Sequence: Synthetic oligonucleotide
  Target: LAMA2; (+) strand; PAM type: YTN; PAM sequence: TTC
aagccattctcctgcctcag

SEQ ID NO: 371632 - DNA, 20 bp, Artificial Sequence
  Description of Artificial Sequence: Synthetic oligonucleotide
  Target: LAMA2; (+) strand; PAM type: YTN; PAM sequence: TTC
tcctgcctcagctggactac

SEQ ID NO: 371633 - DNA, 20 bp, Artificial Sequence
  Description of Artificial Sequence: Synthetic oligonucleotide
  Target: LAMA2; (+) strand; PAM type: YTN; PAM sequence: CTC
ctgcctcagctggactacag

SEQ ID NO: 371634 - DNA, 20 bp, Artificial Sequence
  Description of Artificial Sequence: Synthetic oligonucleotide
  Target: LAMA2; (+) strand; PAM type: YTN; PAM sequence: CTG
cctcagctggactacaggct

SEQ ID NO: 371635 - DNA, 20 bp, Artificial Sequence
  Description of Artificial Sequence: Synthetic oligonucleotide
  Target: LAMA2; (+) strand; PAM type: YTN; PAM sequence: CTC
agctggactacaggctgtgt

SEQ ID NO: 371636 - DNA, 20 bp, Artificial Sequence
  Description of Artificial Sequence: Synthetic oligonucleotide
  Target: LAMA2; (+) strand; PAM type: YTN; PAM sequence: CTG
gactacaggctgtgttgaat

SEQ ID NO: 371637 - DNA, 20 bp, Artificial Sequence
  Description of Artificial Sequence: Synthetic oligonucleotide
  Target: LAMA2; (+) strand; PAM type: YTN; PAM sequence: CTA
caggctgtgttgaataaaaa

SEQ ID NO: 371638 - DNA, 20 bp, Artificial Sequence
  Description of Artificial Sequence: Synthetic oligonucleotide
  Target: LAMA2; (+) strand; PAM type: YTN; PAM sequence: CTG
tgttgaataaaaatcaacaa

SEQ ID NO: 371639 - DNA, 20 bp, Artificial Sequence
  Description of Artificial Sequence: Synthetic oligonucleotide
  Target: LAMA2; (+) strand; PAM type: YTN; PAM sequence: TTG
aataaaaatcaacaattttt

SEQ ID NO: 371640 - DNA, 20 bp, Artificial Sequence
  Description of Artificial Sequence: Synthetic oligonucleotide
  Target: LAMA2; (+) strand; PAM type: YTN; PAM sequence: TTT
ttactcaaaagtgattataa

SEQ ID NO: 371641 - DNA, 20 bp, Artificial Sequence
  Description of Artificial Sequence: Synthetic oligonucleotide
  Target: LAMA2; (+) strand; PAM type: YTN; PAM sequence: TTT
tactcaaaagtgattataaa

SEQ ID NO: 371642 - DNA, 20 bp, Artificial Sequence
  Description of Artificial Sequence: Synthetic oligonucleotide
  Target: LAMA2; (+) strand; PAM type: YTN; PAM sequence: TTT
actcaaaagtgattataaat

SEQ ID NO: 371643 - DNA, 20 bp, Artificial Sequence
  Description of Artificial Sequence: Synthetic oligonucleotide
  Target: LAMA2; (+) strand; PAM type: YTN; PAM sequence: TTA
ctcaaaagtgattataaata

SEQ ID NO: 371644 - DNA, 20 bp, Artificial Sequence
  Description of Artificial Sequence: Synthetic oligonucleotide
  Target: LAMA2; (+) strand; PAM type: YTN; PAM sequence: CTC
aaaagtgattataaataact

SEQ ID NO: 371645 - DNA, 20 bp, Artificial Sequence
  Description of Artificial Sequence: Synthetic oligonucleotide
  Target: LAMA2; (+) strand; PAM type: YTN; PAM sequence: TTA
taaataactatacttttaaa

SEQ ID NO: 371646 - DNA, 20 bp, Artificial Sequence
  Description of Artificial Sequence: Synthetic oligonucleotide
  Target: LAMA2; (+) strand; PAM type: YTN; PAM sequence: CTA
tacttttaaataaaaggaaa

SEQ ID NO: 371647 - DNA, 20 bp, Artificial Sequence
  Description of Artificial Sequence: Synthetic oligonucleotide
  Target: LAMA2; (+) strand; PAM type: YTN; PAM sequence: CTT
ttaaataaaaggaaattatt

SEQ ID NO: 371648 - DNA, 20 bp, Artificial Sequence
  Description of Artificial Sequence: Synthetic oligonucleotide
  Target: LAMA2; (+) strand; PAM type: YTN; PAM sequence: TTT
taaataaaaggaaattattt

SEQ ID NO: 371649 - DNA, 20 bp, Artificial Sequence
  Description of Artificial Sequence: Synthetic oligonucleotide
  Target: LAMA2; (+) strand; PAM type: YTN; PAM sequence: TTT
aaataaaaggaaattatttt

SEQ ID NO: 371650 - DNA, 20 bp, Artificial Sequence
  Description of Artificial Sequence: Synthetic oligonucleotide
  Target: LAMA2; (+) strand; PAM type: YTN; PAM sequence: TTA
aataaaaggaaattattttc

SEQ ID NO: 371651 - DNA, 20 bp, Artificial Sequence
  Description of Artificial Sequence: Synthetic oligonucleotide
  Target: LAMA2; (+) strand; PAM type: YTN; PAM sequence: TTA
ttttctgaagaactctctta

SEQ ID NO: 371652 - DNA, 20 bp, Artificial Sequence
  Description of Artificial Sequence: Synthetic oligonucleotide
  Target: LAMA2; (+) strand; PAM type: YTN; PAM sequence: TTT
tctgaagaactctcttaaag

SEQ ID NO: 371653 - DNA, 20 bp, Artificial Sequence
  Description of Artificial Sequence: Synthetic oligonucleotide
  Target: LAMA2; (+) strand; PAM type: YTN; PAM sequence: TTT
ctgaagaactctcttaaagg

SEQ ID NO: 371654 - DNA, 20 bp, Artificial Sequence
  Description of Artificial Sequence: Synthetic oligonucleotide
  Target: LAMA2; (+) strand; PAM type: YTN; PAM sequence: TTC
tgaagaactctcttaaaggt

SEQ ID NO: 371655 - DNA, 20 bp, Artificial Sequence
  Description of Artificial Sequence: Synthetic oligonucleotide
  Target: LAMA2; (+) strand; PAM type: YTN; PAM sequence: CTG
aagaactctcttaaaggtga

SEQ ID NO: 371656 - DNA, 20 bp, Artificial Sequence
  Description of Artificial Sequence: Synthetic oligonucleotide
  Target: LAMA2; (+) strand; PAM type: YTN; PAM sequence: CTC
tcttaaaggtgagcttagtg

SEQ ID NO: 371657 - DNA, 20 bp, Artificial Sequence
  Description of Artificial Sequence: Synthetic oligonucleotide
  Target: LAMA2; (+) strand; PAM type: YTN; PAM sequence: CTC
ttaaaggtgagcttagtgct

SEQ ID NO: 371658 - DNA, 20 bp, Artificial Sequence
  Description of Artificial Sequence: Synthetic oligonucleotide
  Target: LAMA2; (+) strand; PAM type: YTN; PAM sequence: CTT
aaaggtgagcttagtgctta

SEQ ID NO: 371659 - DNA, 20 bp, Artificial Sequence
  Description of Artificial Sequence: Synthetic oligonucleotide
  Target: LAMA2; (+) strand; PAM type: YTN; PAM sequence: TTA
aaggtgagcttagtgcttaa

SEQ ID NO: 371660 - DNA, 20 bp, Artificial Sequence
  Description of Artificial Sequence: Synthetic oligonucleotide
  Target: LAMA2; (+) strand; PAM type: YTN; PAM sequence: CTT
agtgcttaataaggttcata

SEQ ID NO: 371661 - DNA, 20 bp, Artificial Sequence
  Description of Artificial Sequence: Synthetic oligonucleotide
  Target: LAMA2; (+) strand; PAM type: YTN; PAM sequence: TTA
gtgcttaataaggttcatat

SEQ ID NO: 371662 - DNA, 20 bp, Artificial Sequence
  Description of Artificial Sequence: Synthetic oligonucleotide
  Target: LAMA2; (+) strand; PAM type: YTN; PAM sequence: CTT
aataaggttcatatcgtatt

SEQ ID NO: 371663 - DNA, 20 bp, Artificial Sequence
  Description of Artificial Sequence: Synthetic oligonucleotide
  Target: LAMA2; (+) strand; PAM type: YTN; PAM sequence: TTA
ataaggttcatatcgtattg

SEQ ID NO: 371664 - DNA, 20 bp, Artificial Sequence
  Description of Artificial Sequence: Synthetic oligonucleotide
  Target: LAMA2; (+) strand; PAM type: YTN; PAM sequence: TTC
atatcgtattgtacactttc

SEQ ID NO: 371665 - DNA, 20 bp, Artificial Sequence
  Description of Artificial Sequence: Synthetic oligonucleotide
  Target: LAMA2; (+) strand; PAM type: YTN; PAM sequence: TTG
tacactttccagctatctct

SEQ ID NO: 371666 - DNA, 20 bp, Artificial Sequence
  Description of Artificial Sequence: Synthetic oligonucleotide
  Target: LAMA2; (+) strand; PAM type: YTN; PAM sequence: CTT
tccagctatctctaggcact

SEQ ID NO: 371667 - DNA, 20 bp, Artificial Sequence
  Description of Artificial Sequence: Synthetic oligonucleotide
  Target: LAMA2; (+) strand; PAM type: YTN; PAM sequence: TTT
ccagctatctctaggcactg

SEQ ID NO: 371668 - DNA, 20 bp, Artificial Sequence
  Description of Artificial Sequence: Synthetic oligonucleotide
  Target: LAMA2; (+) strand; PAM type: YTN; PAM sequence: TTC
cagctatctctaggcactgt

SEQ ID NO: 371669 - DNA, 20 bp, Artificial Sequence
  Description of Artificial Sequence: Synthetic oligonucleotide
  Target: LAMA2; (+) strand; PAM type: YTN; PAM sequence: CTA
tctctaggcactgtgacaac

SEQ ID NO: 371670 - DNA, 20 bp, Artificial Sequence
  Description of Artificial Sequence: Synthetic oligonucleotide
  Target: LAMA2; (+) strand; PAM type: YTN; PAM sequence: CTC
taggcactgtgacaacactg

SEQ ID NO: 371671 - DNA, 20 bp, Artificial Sequence
  Description of Artificial Sequence: Synthetic oligonucleotide
  Target: LAMA2; (+) strand; PAM type: YTN; PAM sequence: CTA
ggcactgtgacaacactgac

SEQ ID NO: 371672 - DNA, 20 bp, Artificial Sequence
  Description of Artificial Sequence: Synthetic oligonucleotide
  Target: LAMA2; (+) strand; PAM type: YTN; PAM sequence: CTG
tgacaacactgacagagcaa

SEQ ID NO: 371673 - DNA, 20 bp, Artificial Sequence
  Description of Artificial Sequence: Synthetic oligonucleotide
  Target: LAMA2; (+) strand; PAM type: YTN; PAM sequence: CTG
acagagcaaaaattttcaat

SEQ ID NO: 371674 - DNA, 20 bp, Artificial Sequence
  Description of Artificial Sequence: Synthetic oligonucleotide
  Target: LAMA2; (+) strand; PAM type: YTN; PAM sequence: TTT
tcaatgatctttaagggaaa

SEQ ID NO: 371675 - DNA, 20 bp, Artificial Sequence
  Description of Artificial Sequence: Synthetic oligonucleotide
  Target: LAMA2; (+) strand; PAM type: YTN; PAM sequence: TTT
caatgatctttaagggaaat

SEQ ID NO: 371676 - DNA, 20 bp, Artificial Sequence
  Description of Artificial Sequence: Synthetic oligonucleotide
  Target: LAMA2; (+) strand; PAM type: YTN; PAM sequence: TTC
aatgatctttaagggaaatc

SEQ ID NO: 371677 - DNA, 20 bp, Artificial Sequence
  Description of Artificial Sequence: Synthetic oligonucleotide
  Target: LAMA2; (+) strand; PAM type: YTN; PAM sequence: CTT
taagggaaatctgtcagcta

SEQ ID NO: 371678 - DNA, 20 bp, Artificial Sequence
  Description of Artificial Sequence: Synthetic oligonucleotide
  Target: LAMA2; (+) strand; PAM type: YTN; PAM sequence: TTT
aagggaaatctgtcagctat

SEQ ID NO: 371679 - DNA, 20 bp, Artificial Sequence
  Description of Artificial Sequence: Synthetic oligonucleotide
  Target: LAMA2; (+) strand; PAM type: YTN; PAM sequence: TTA
agggaaatctgtcagctata

SEQ ID NO: 371680 - DNA, 20 bp, Artificial Sequence
  Description of Artificial Sequence: Synthetic oligonucleotide
  Target: LAMA2; (+) strand; PAM type: YTN; PAM sequence: CTG
tcagctatagtcttttaatg

SEQ ID NO: 371681 - DNA, 20 bp, Artificial Sequence
  Description of Artificial Sequence: Synthetic oligonucleotide
  Target: LAMA2; (+) strand; PAM type: YTN; PAM sequence: CTA
tagtcttttaatgtgtagat

SEQ ID NO: 371682 - DNA, 20 bp, Artificial Sequence
  Description of Artificial Sequence: Synthetic oligonucleotide
  Target: LAMA2; (+) strand; PAM type: YTN; PAM sequence: CTT
ttaatgtgtagatgtgatca

SEQ ID NO: 371683 - DNA, 20 bp, Artificial Sequence
  Description of Artificial Sequence: Synthetic oligonucleotide
  Target: LAMA2; (+) strand; PAM type: YTN; PAM sequence: TTT
taatgtgtagatgtgatcaa

SEQ ID NO: 371684 - DNA, 20 bp, Artificial Sequence
  Description of Artificial Sequence: Synthetic oligonucleotide
  Target: LAMA2; (+) strand; PAM type: YTN; PAM sequence: TTT
aatgtgtagatgtgatcaag

SEQ ID NO: 371685 - DNA, 20 bp, Artificial Sequence
  Description of Artificial Sequence: Synthetic oligonucleotide
  Target: LAMA2; (+) strand; PAM type: YTN; PAM sequence: TTA
atgtgtagatgtgatcaagt

SEQ ID NO: 371686 - DNA, 20 bp, Artificial Sequence
  Description of Artificial Sequence: Synthetic oligonucleotide
  Target: LAMA2; (+) strand; PAM type: YTN; PAM sequence: CTT
caaactcttacccagaatgc

SEQ ID NO: 371687 - DNA, 20 bp, Artificial Sequence
  Description of Artificial Sequence: Synthetic oligonucleotide
  Target: LAMA2; (+) strand; PAM type: YTN; PAM sequence: TTC
aaactcttacccagaatgcg

SEQ ID NO: 371688 - DNA, 20 bp, Artificial Sequence
  Description of Artificial Sequence: Synthetic oligonucleotide
  Target: LAMA2; (+) strand; PAM type: YTN; PAM sequence: CTC
ttacccagaatgcgcctaat

SEQ ID NO: 371689 - DNA, 20 bp, Artificial Sequence
  Description of Artificial Sequence: Synthetic oligonucleotide
  Target: LAMA2; (+) strand; PAM type: YTN; PAM sequence: CTT
acccagaatgcgcctaatta

SEQ ID NO: 371690 - DNA, 20 bp, Artificial Sequence
  Description of Artificial Sequence: Synthetic oligonucleotide
  Target: LAMA2; (+) strand; PAM type: YTN; PAM sequence: TTA
cccagaatgcgcctaattaa

SEQ ID NO: 371691 - DNA, 20 bp, Artificial Sequence
  Description of Artificial Sequence: Synthetic oligonucleotide
  Target: LAMA2; (+) strand; PAM type: YTN; PAM sequence: CTA
attaaaatggtcttttgtta

SEQ ID NO: 371692 - DNA, 20 bp, Artificial Sequence
  Description of Artificial Sequence: Synthetic oligonucleotide
  Target: LAMA2; (+) strand; PAM type: YTN; PAM sequence: TTA
aaatggtcttttgttagatt

SEQ ID NO: 371693 - DNA, 20 bp, Artificial Sequence
  Description of Artificial Sequence: Synthetic oligonucleotide
  Target: LAMA2; (+) strand; PAM type: YTN; PAM sequence: CTT
ttgttagattcaatgaatac

SEQ ID NO: 371694 - DNA, 20 bp, Artificial Sequence
  Description of Artificial Sequence: Synthetic oligonucleotide
  Target: LAMA2; (+) strand; PAM type: YTN; PAM sequence: TTT
tgttagattcaatgaatact

SEQ ID NO: 371695 - DNA, 20 bp, Artificial Sequence
  Description of Artificial Sequence: Synthetic oligonucleotide
  Target: LAMA2; (+) strand; PAM type: YTN; PAM sequence: TTT
gttagattcaatgaatacta

SEQ ID NO: 371696 - DNA, 20 bp, Artificial Sequence
  Description of Artificial Sequence: Synthetic oligonucleotide
  Target: LAMA2; (+) strand; PAM type: YTN; PAM sequence: TTG
ttagattcaatgaatactat

SEQ ID NO: 371697 - DNA, 20 bp, Artificial Sequence
  Description of Artificial Sequence: Synthetic oligonucleotide
  Target: LAMA2; (+) strand; PAM type: YTN; PAM sequence: TTA
gattcaatgaatactataag

SEQ ID NO: 371698 - DNA, 20 bp, Artificial Sequence
  Description of Artificial Sequence: Synthetic oligonucleotide
  Target: LAMA2; (+) strand; PAM type: YTN; PAM sequence: TTC
aatgaatactataagctaaa

SEQ ID NO: 371699 - DNA, 20 bp, Artificial Sequence
  Description of Artificial Sequence: Synthetic oligonucleotide
  Target: LAMA2; (+) strand; PAM type: YTN; PAM sequence: CTA
taagctaaagactttgagat

SEQ ID NO: 371700 - DNA, 20 bp, Artificial Sequence
  Description of Artificial Sequence: Synthetic oligonucleotide
  Target: LAMA2; (+) strand; PAM type: YTN; PAM sequence: CTA
aagactttgagataattcta

SEQ ID NO: 371701 - DNA, 20 bp, Artificial Sequence
  Description of Artificial Sequence: Synthetic oligonucleotide
  Target: LAMA2; (+) strand; PAM type: YTN; PAM sequence: CTT
tgagataattctaacattaa

SEQ ID NO: 371702 - DNA, 20 bp, Artificial Sequence
  Description of Artificial Sequence: Synthetic oligonucleotide
  Target: LAMA2; (+) strand; PAM type: YTN; PAM sequence: TTT
gagataattctaacattaag

SEQ ID NO: 371703 - DNA, 20 bp, Artificial Sequence
  Description of Artificial Sequence: Synthetic oligonucleotide
  Target: LAMA2; (+) strand; PAM type: YTN; PAM sequence: TTG
agataattctaacattaagt

SEQ ID NO: 371704 - DNA, 20 bp, Artificial Sequence
  Description of Artificial Sequence: Synthetic oligonucleotide
  Target: LAMA2; (+) strand; PAM type: YTN; PAM sequence: TTC
taacattaagtttaaatgtt

SEQ ID NO: 371705 - DNA, 20 bp, Artificial Sequence
  Description of Artificial Sequence: Synthetic oligonucleotide
  Target: LAMA2; (+) strand; PAM type: YTN; PAM sequence: CTA
acattaagtttaaatgttct

SEQ ID NO: 371706 - DNA, 20 bp, Artificial Sequence
  Description of Artificial Sequence: Synthetic oligonucleotide
  Target: LAMA2; (+) strand; PAM type: YTN; PAM sequence: TTA
agtttaaatgttctccttga

SEQ ID NO: 371707 - DNA, 20 bp, Artificial Sequence
  Description of Artificial Sequence: Synthetic oligonucleotide
  Target: LAMA2; (+) strand; PAM type: YTN; PAM sequence: TTT
aaatgttctccttgaaactg

SEQ ID NO: 371708 - DNA, 20 bp, Artificial Sequence
  Description of Artificial Sequence: Synthetic oligonucleotide
  Target: LAMA2; (+) strand; PAM type: YTN; PAM sequence: TTA
aatgttctccttgaaactgt

SEQ ID NO: 371709 - DNA, 20 bp, Artificial Sequence
  Description of Artificial Sequence: Synthetic oligonucleotide
  Target: LAMA2; (+) strand; PAM type: YTN; PAM sequence: TTC
tccttgaaactgtgcttcct

SEQ ID NO: 371710 - DNA, 20 bp, Artificial Sequence
  Description of Artificial Sequence: Synthetic oligonucleotide
  Target: LAMA2; (+) strand; PAM type: YTN; PAM sequence: CTC
cttgaaactgtgcttcctac

SEQ ID NO: 371711 - DNA, 20 bp, Artificial Sequence
  Description of Artificial Sequence: Synthetic oligonucleotide
  Target: LAMA2; (+) strand; PAM type: YTN; PAM sequence: CTT
gaaactgtgcttcctactgt

SEQ ID NO: 371712 - DNA, 20 bp, Artificial Sequence
  Description of Artificial Sequence: Synthetic oligonucleotide
  Target: LAMA2; (+) strand; PAM type: YTN; PAM sequence: TTG
aaactgtgcttcctactgtt

SEQ ID NO: 371713 - DNA, 20 bp, Artificial Sequence
  Description of Artificial Sequence: Synthetic oligonucleotide
  Target: LAMA2; (+) strand; PAM type: YTN; PAM sequence: CTG
tgcttcctactgttaatcca

SEQ ID NO: 371714 - DNA, 20 bp, Artificial Sequence
  Description of Artificial Sequence: Synthetic oligonucleotide
  Target: LAMA2; (+) strand; PAM type: YTN; PAM sequence: CTT
cctactgttaatccacatga

SEQ ID NO: 371715 - DNA, 20 bp, Artificial Sequence
  Description of Artificial Sequence: Synthetic oligonucleotide
  Target: LAMA2; (+) strand; PAM type: YTN; PAM sequence: TTC
ctactgttaatccacatgaa

SEQ ID NO: 371716 - DNA, 20 bp, Artificial Sequence
  Description of Artificial Sequence: Synthetic oligonucleotide
  Target: LAMA2; (+) strand; PAM type: YTN; PAM sequence: CTA
ctgttaatccacatgaaatg

SEQ ID NO: 371717 - DNA, 20 bp, Artificial Sequence
  Description of Artificial Sequence: Synthetic oligonucleotide
  Target: LAMA2; (+) strand; PAM type: YTN; PAM sequence: CTG
ttaatccacatgaaatgctt

SEQ ID NO: 371718 - DNA, 20 bp, Artificial Sequence
  Description of Artificial Sequence: Synthetic oligonucleotide
  Target: LAMA2; (+) strand; PAM type: YTN; PAM sequence: TTA
atccacatgaaatgcttatc

SEQ ID NO: 371719 - DNA, 20 bp, Artificial Sequence
  Description of Artificial Sequence: Synthetic oligonucleotide
  Target: LAMA2; (+) strand; PAM type: YTN; PAM sequence: CTT
atcctcccaatgaccttctt

SEQ ID NO: 371720 - DNA, 20 bp, Artificial Sequence
  Description of Artificial Sequence: Synthetic oligonucleotide
  Target: LAMA2; (+) strand; PAM type: YTN; PAM sequence: TTA
tcctcccaatgaccttcttt

SEQ ID NO: 371721 - DNA, 20 bp, Artificial Sequence
  Description of Artificial Sequence: Synthetic oligonucleotide
  Target: LAMA2; (+) strand; PAM type: YTN; PAM sequence: CTC
ccaatgaccttctttactca

SEQ ID NO: 371722 - DNA, 20 bp, Artificial Sequence
  Description of Artificial Sequence: Synthetic oligonucleotide
  Target: LAMA2; (+) strand; PAM type: YTN; PAM sequence: CTT
ctttactcagaattttttac

SEQ ID NO: 371723 - DNA, 20 bp, Artificial Sequence
  Description of Artificial Sequence: Synthetic oligonucleotide
  Target: LAMA2; (+) strand; PAM type: YTN; PAM sequence: TTC
tttactcagaattttttacc

SEQ ID NO: 371724 - DNA, 20 bp, Artificial Sequence
  Description of Artificial Sequence: Synthetic oligonucleotide
  Target: LAMA2; (+) strand; PAM type: YTN; PAM sequence: CTT
tactcagaattttttacctt

SEQ ID NO: 371725 - DNA, 20 bp, Artificial Sequence
  Description of Artificial Sequence: Synthetic oligonucleotide
  Target: LAMA2; (+) strand; PAM type: YTN; PAM sequence: TTT
actcagaattttttacctta

SEQ ID NO: 371726 - DNA, 20 bp, Artificial Sequence
  Description of Artificial Sequence: Synthetic oligonucleotide
  Target: LAMA2; (+) strand; PAM type: YTN; PAM sequence: TTA
ctcagaattttttaccttac

SEQ ID NO: 371727 - DNA, 20 bp, Artificial Sequence
  Description of Artificial Sequence: Synthetic oligonucleotide
  Target: LAMA2; (+) strand; PAM type: YTN; PAM sequence: CTC
agaattttttaccttactca

SEQ ID NO: 371728 - DNA, 20 bp, Artificial Sequence
  Description of Artificial Sequence: Synthetic oligonucleotide
  Target: LAMA2; (+) strand; PAM type: YTN; PAM sequence: TTT
tttaccttactcattgtttg

SEQ ID NO: 371729 - DNA, 20 bp, Artificial Sequence
  Description of Artificial Sequence: Synthetic oligonucleotide
  Target: LAMA2; (+) strand; PAM type: YTN; PAM sequence: TTT
ttaccttactcattgtttgg

SEQ ID NO: 371730 - DNA, 20 bp, Artificial Sequence
  Description of Artificial Sequence: Synthetic oligonucleotide
  Target: LAMA2; (+) strand; PAM type: YTN; PAM sequence: TTT
taccttactcattgtttgga

SEQ ID NO: 371731 - DNA, 20 bp, Artificial Sequence
  Description of Artificial Sequence: Synthetic oligonucleotide
  Target: LAMA2; (+) strand; PAM type: YTN; PAM sequence: TTT
accttactcattgtttggaa

SEQ ID NO: 371732 - DNA, 20 bp, Artificial Sequence
  Description of Artificial Sequence: Synthetic oligonucleotide
  Target: LAMA2; (+) strand; PAM type: YTN; PAM sequence: TTA
ccttactcattgtttggaaa

SEQ ID NO: 371733 - DNA, 20 bp, Artificial Sequence
  Description of Artificial Sequence: Synthetic oligonucleotide
  Target: LAMA2; (+) strand; PAM type: YTN; PAM sequence: CTT
actcattgtttggaaaagaa

SEQ ID NO: 371734 - DNA, 20 bp, Artificial Sequence
  Description of Artificial Sequence: Synthetic oligonucleotide
  Target: LAMA2; (+) strand; PAM type: YTN; PAM sequence: TTA
ctcattgtttggaaaagaag

SEQ ID NO: 371735 - DNA, 20 bp, Artificial Sequence
  Description of Artificial Sequence: Synthetic oligonucleotide
  Target: LAMA2; (+) strand; PAM type: YTN; PAM sequence: CTC
attgtttggaaaagaagaga

SEQ ID NO: 371736 - DNA, 20 bp, Artificial Sequence
  Description of Artificial Sequence: Synthetic oligonucleotide
  Target: LAMA2; (+) strand; PAM type: YTN; PAM sequence: TTG
tttggaaaagaagagaaagc

SEQ ID NO: 371737 - DNA, 20 bp, Artificial Sequence
  Description of Artificial Sequence: Synthetic oligonucleotide
  Target: LAMA2; (+) strand; PAM type: YTN; PAM sequence: TTT
ggaaaagaagagaaagcact

SEQ ID NO: 371738 - DNA, 20 bp, Artificial Sequence
  Description of Artificial Sequence: Synthetic oligonucleotide
  Target: LAMA2; (+) strand; PAM type: YTN; PAM sequence: TTG
gaaaagaagagaaagcacta

SEQ ID NO: 371739 - DNA, 20 bp, Artificial Sequence
  Description of Artificial Sequence: Synthetic oligonucleotide
  Target: LAMA2; (+) strand; PAM type: YTN; PAM sequence: CTA
ctatttaataaaagcagact

SEQ ID NO: 371740 - DNA, 20 bp, Artificial Sequence
  Description of Artificial Sequence: Synthetic oligonucleotide
  Target: LAMA2; (+) strand; PAM type: YTN; PAM sequence: CTA
tttaataaaagcagactact

SEQ ID NO: 371741 - DNA, 20 bp, Artificial Sequence
  Description of Artificial Sequence: Synthetic oligonucleotide
  Target: LAMA2; (+) strand; PAM type: YTN; PAM sequence: TTT
aataaaagcagactactata

SEQ ID NO: 371742 - DNA, 20 bp, Artificial Sequence
  Description of Artificial Sequence: Synthetic oligonucleotide
  Target: LAMA2; (+) strand; PAM type: YTN; PAM sequence: TTA
ataaaagcagactactatat

SEQ ID NO: 371743 - DNA, 20 bp, Artificial Sequence
  Description of Artificial Sequence: Synthetic oligonucleotide
  Target: LAMA2; (+) strand; PAM type: YTN; PAM sequence: CTA
ctatattctaggccaaacac

SEQ ID NO: 371744 - DNA, 20 bp, Artificial Sequence
  Description of Artificial Sequence: Synthetic oligonucleotide
  Target: LAMA2; (+) strand; PAM type: YTN; PAM sequence: CTA
tattctaggccaaacactgt

SEQ ID NO: 371745 - DNA, 20 bp, Artificial Sequence
  Description of Artificial Sequence: Synthetic oligonucleotide
  Target: LAMA2; (+) strand; PAM type: YTN; PAM sequence: TTC
taggccaaacactgtatttg

SEQ ID NO: 371746 - DNA, 20 bp, Artificial Sequence
  Description of Artificial Sequence: Synthetic oligonucleotide
  Target: LAMA2; (+) strand; PAM type: YTN; PAM sequence: CTA
ggccaaacactgtatttggt

SEQ ID NO: 371747 - DNA, 20 bp, Artificial Sequence
  Description of Artificial Sequence: Synthetic oligonucleotide
  Target: LAMA2; (+) strand; PAM type: YTN; PAM sequence: CTG
tatttggtattatttcacct

SEQ ID NO: 371748 - DNA, 20 bp, Artificial Sequence
  Description of Artificial Sequence: Synthetic oligonucleotide
  Target: LAMA2; (+) strand; PAM type: YTN; PAM sequence: TTT
ggtattatttcaccttcaac

SEQ ID NO: 371749 - DNA, 20 bp, Artificial Sequence
  Description of Artificial Sequence: Synthetic oligonucleotide
  Target: LAMA2; (+) strand; PAM type: YTN; PAM sequence: TTG
gtattatttcaccttcaact

SEQ ID NO: 371750 - DNA, 20 bp, Artificial Sequence
  Description of Artificial Sequence: Synthetic oligonucleotide
  Target: LAMA2; (+) strand; PAM type: YTN; PAM sequence: TTA
tttcaccttcaactataact

SEQ ID NO: 371751 - DNA, 20 bp, Artificial Sequence
  Description of Artificial Sequence: Synthetic oligonucleotide
  Target: LAMA2; (+) strand; PAM type: YTN; PAM sequence: TTT
caccttcaactataactcag

SEQ ID NO: 371752 - DNA, 20 bp, Artificial Sequence
  Description of Artificial Sequence: Synthetic oligonucleotide
  Target: LAMA2; (+) strand; PAM type: YTN; PAM sequence: TTC
accttcaactataactcagt

SEQ ID NO: 371753 - DNA, 20 bp, Artificial Sequence
  Description of Artificial Sequence: Synthetic oligonucleotide
  Target: LAMA2; (+) strand; PAM type: YTN; PAM sequence: CTT
caactataactcagtaaggt

SEQ ID NO: 371754 - DNA, 20 bp, Artificial Sequence
  Description of Artificial Sequence: Synthetic oligonucleotide
  Target: LAMA2; (+) strand; PAM type: YTN; PAM sequence: TTC
aactataactcagtaaggta

SEQ ID NO: 371755 - DNA, 20 bp, Artificial Sequence
  Description of Artificial Sequence: Synthetic oligonucleotide
  Target: LAMA2; (+) strand; PAM type: YTN; PAM sequence: CTA
taactcagtaaggtagatat

SEQ ID NO: 371756 - DNA, 20 bp, Artificial Sequence
  Description of Artificial Sequence: Synthetic oligonucleotide
  Target: LAMA2; (+) strand; PAM type: YTN; PAM sequence: CTC
agtaaggtagatattattat

SEQ ID NO: 371757 - DNA, 20 bp, Artificial Sequence
  Description of Artificial Sequence: Synthetic oligonucleotide
  Target: LAMA2; (+) strand; PAM type: YTN; PAM sequence: TTA
ttatcctcattgtatagatt

SEQ ID NO: 371758 - DNA, 20 bp, Artificial Sequence
  Description of Artificial Sequence: Synthetic oligonucleotide
  Target: LAMA2; (+) strand; PAM type: YTN; PAM sequence: TTA
tcctcattgtatagattaag

SEQ ID NO: 371759 - DNA, 20 bp, Artificial Sequence
  Description of Artificial Sequence: Synthetic oligonucleotide
  Target: LAMA2; (+) strand; PAM type: YTN; PAM sequence: CTC
attgtatagattaagaaatg

SEQ ID NO: 371760 - DNA, 20 bp, Artificial Sequence
  Description of Artificial Sequence: Synthetic oligonucleotide
  Target: LAMA2; (+) strand; PAM type: YTN; PAM sequence: TTG
tatagattaagaaatgaagg

SEQ ID NO: 371761 - DNA, 20 bp, Artificial Sequence
  Description of Artificial Sequence: Synthetic oligonucleotide
  Target: LAMA2; (+) strand; PAM type: YTN; PAM sequence: TTA
agaaatgaaggccattagta

SEQ ID NO: 371762 - DNA, 20 bp, Artificial Sequence
  Description of Artificial Sequence: Synthetic oligonucleotide
  Target: LAMA2; (+) strand; PAM type: YTN; PAM sequence: TTA
gtagaaaaatggcattatga

SEQ ID NO: 371763 - DNA, 20 bp, Artificial Sequence
  Description of Artificial Sequence: Synthetic oligonucleotide
  Target: LAMA2; (+) strand; PAM type: YTN; PAM sequence: TTA
tgatgccaattctggagcca

SEQ ID NO: 371764 - DNA, 20 bp, Artificial Sequence
  Description of Artificial Sequence: Synthetic oligonucleotide
  Target: LAMA2; (+) strand; PAM type: YTN; PAM sequence: TTC
tggagccagactctttggtt

SEQ ID NO: 371765 - DNA, 20 bp, Artificial Sequence
  Description of Artificial Sequence: Synthetic oligonucleotide
  Target: LAMA2; (+) strand; PAM type: YTN; PAM sequence: CTG
gagccagactctttggttta

SEQ ID NO: 371766 - DNA, 20 bp, Artificial Sequence
  Description of Artificial Sequence: Synthetic oligonucleotide
  Target: LAMA2; (+) strand; PAM type: YTN; PAM sequence: CTC
tttggtttaaatgctgggtt

SEQ ID NO: 371767 - DNA, 20 bp, Artificial Sequence
  Description of Artificial Sequence: Synthetic oligonucleotide
  Target: LAMA2; (+) strand; PAM type: YTN; PAM sequence: CTT
tggtttaaatgctgggttcc

SEQ ID NO: 371768 - DNA, 20 bp, Artificial Sequence
  Description of Artificial Sequence: Synthetic oligonucleotide
  Target: LAMA2; (+) strand; PAM type: YTN; PAM sequence: TTT
ggtttaaatgctgggttcca

SEQ ID NO: 371769 - DNA, 20 bp, Artificial Sequence
  Description of Artificial Sequence: Synthetic oligonucleotide
  Target: LAMA2; (+) strand; PAM type: YTN; PAM sequence: TTG
gtttaaatgctgggttccat

SEQ ID NO: 371770 - DNA, 20 bp, Artificial Sequence
  Description of Artificial Sequence: Synthetic oligonucleotide
  Target: LAMA2; (+) strand; PAM type: YTN; PAM sequence: TTT
aaatgctgggttccatactt

SEQ ID NO: 371771 - DNA, 20 bp, Artificial Sequence
  Description of Artificial Sequence: Synthetic oligonucleotide
  Target: LAMA2; (+) strand; PAM type: YTN; PAM sequence: TTA
aatgctgggttccatacttt

SEQ ID NO: 371772 - DNA, 20 bp, Artificial Sequence
  Description of Artificial Sequence: Synthetic oligonucleotide
  Target: LAMA2; (+) strand; PAM type: YTN; PAM sequence: CTG
ggttccatactttccagctg

SEQ ID NO: 371773 - DNA, 20 bp, Artificial Sequence
  Description of Artificial Sequence: Synthetic oligonucleotide
  Target: LAMA2; (+) strand; PAM type: YTN; PAM sequence: TTC
catactttccagctgtgcca

SEQ ID NO: 371774 - DNA, 20 bp, Artificial Sequence
  Description of Artificial Sequence: Synthetic oligonucleotide
  Target: LAMA2; (+) strand; PAM type: YTN; PAM sequence: CTT
tccagctgtgccactttagg

SEQ ID NO: 371775 - DNA, 20 bp, Artificial Sequence
  Description of Artificial Sequence: Synthetic oligonucleotide
  Target: LAMA2; (+) strand; PAM type: YTN; PAM sequence: TTT
ccagctgtgccactttaggc

SEQ ID NO: 371776 - DNA, 20 bp, Artificial Sequence
  Description of Artificial Sequence: Synthetic oligonucleotide
  Target: LAMA2; (+) strand; PAM type: YTN; PAM sequence: TTC
cagctgtgccactttaggca

SEQ ID NO: 371777 - DNA, 20 bp, Artificial Sequence
  Description of Artificial Sequence: Synthetic oligonucleotide
  Target: LAMA2; (+) strand; PAM type: YTN; PAM sequence: CTG
tgccactttaggcaagtcac

SEQ ID NO: 371778 - DNA, 20 bp, Artificial Sequence
  Description of Artificial Sequence: Synthetic oligonucleotide
  Target: LAMA2; (+) strand; PAM type: YTN; PAM sequence: CTT
taggcaagtcactgaaactc

SEQ ID NO: 371779 - DNA, 20 bp, Artificial Sequence
  Description of Artificial Sequence: Synthetic oligonucleotide
  Target: LAMA2; (+) strand; PAM type: YTN; PAM sequence: TTT
aggcaagtcactgaaactct

SEQ ID NO: 371780 - DNA, 20 bp, Artificial Sequence
  Description of Artificial Sequence: Synthetic oligonucleotide
  Target: LAMA2; (+) strand; PAM type: YTN; PAM sequence: TTA
ggcaagtcactgaaactctc

SEQ ID NO: 371781 - DNA, 20 bp, Artificial Sequence
  Description of Artificial Sequence: Synthetic oligonucleotide
  Target: LAMA2; (+) strand; PAM type: YTN; PAM sequence: CTG
aaactctctgtgcctcaatt

SEQ ID NO: 371782 - DNA, 20 bp, Artificial Sequence
  Description of Artificial Sequence: Synthetic oligonucleotide
  Target: LAMA2; (+) strand; PAM type: YTN; PAM sequence: CTC
tctgtgcctcaattttgtca

SEQ ID NO: 371783 - DNA, 20 bp, Artificial Sequence
  Description of Artificial Sequence: Synthetic oligonucleotide
  Target: LAMA2; (+) strand; PAM type: YTN; PAM sequence: CTC
tgtgcctcaattttgtcatc

SEQ ID NO: 371784 - DNA, 20 bp, Artificial Sequence
  Description of Artificial Sequence: Synthetic oligonucleotide
  Target: LAMA2; (+) strand; PAM type: YTN; PAM sequence: CTG
tgcctcaattttgtcatcat

SEQ ID NO: 371785 - DNA, 20 bp, Artificial Sequence
  Description of Artificial Sequence: Synthetic oligonucleotide
  Target: LAMA2; (+) strand; PAM type: YTN; PAM sequence: CTC
aattttgtcatcattagtta

SEQ ID NO: 371786 - DNA, 20 bp, Artificial Sequence
  Description of Artificial Sequence: Synthetic oligonucleotide
  Target: LAMA2; (+) strand; PAM type: YTN; PAM sequence: TTT
tgtcatcattagttataata

SEQ ID NO: 371787 - DNA, 20 bp, Artificial Sequence
  Description of Artificial Sequence: Synthetic oligonucleotide
  Target: LAMA2; (+) strand; PAM type: YTN; PAM sequence: TTT
gtcatcattagttataatag

SEQ ID NO: 371788 - DNA, 20 bp, Artificial Sequence
  Description of Artificial Sequence: Synthetic oligonucleotide
  Target: LAMA2; (+) strand; PAM type: YTN; PAM sequence: TTG
tcatcattagttataatagg

SEQ ID NO: 371789 - DNA, 20 bp, Artificial Sequence
  Description of Artificial Sequence: Synthetic oligonucleotide
  Target: LAMA2; (+) strand; PAM type: YTN; PAM sequence: TTA
gttataataggactctcata

SEQ ID NO: 371790 - DNA, 20 bp, Artificial Sequence
  Description of Artificial Sequence: Synthetic oligonucleotide
  Target: LAMA2; (+) strand; PAM type: YTN; PAM sequence: TTA
taataggactctcatagggt

SEQ ID NO: 371791 - DNA, 20 bp, Artificial Sequence
  Description of Artificial Sequence: Synthetic oligonucleotide
  Target: LAMA2; (+) strand; PAM type: YTN; PAM sequence: CTC
tcatagggttgatgtgggaa

SEQ ID NO: 371792 - DNA, 20 bp, Artificial Sequence
  Description of Artificial Sequence: Synthetic oligonucleotide
  Target: LAMA2; (+) strand; PAM type: YTN; PAM sequence: CTC
atagggttgatgtgggaaag

SEQ ID NO: 371793 - DNA, 20 bp, Artificial Sequence
  Description of Artificial Sequence: Synthetic oligonucleotide
  Target: LAMA2; (+) strand; PAM type: YTN; PAM sequence: TTG
atgtgggaaagacataatta

SEQ ID NO: 371794 - DNA, 20 bp, Artificial Sequence
  Description of Artificial Sequence: Synthetic oligonucleotide
  Target: LAMA2; (+) strand; PAM type: YTN; PAM sequence: TTA
aaatgtgtaaaccacctaaa

SEQ ID NO: 371795 - DNA, 20 bp, Artificial Sequence
  Description of Artificial Sequence: Synthetic oligonucleotide
  Target: LAMA2; (+) strand; PAM type: YTN; PAM sequence: CTA
aactgtgactggatatgatg

SEQ ID NO: 371796 - DNA, 20 bp, Artificial Sequence
  Description of Artificial Sequence: Synthetic oligonucleotide
  Target: LAMA2; (+) strand; PAM type: YTN; PAM sequence: CTG
tgactggatatgatgaaccc

SEQ ID NO: 371797 - DNA, 20 bp, Artificial Sequence
  Description of Artificial Sequence: Synthetic oligonucleotide
  Target: LAMA2; (+) strand; PAM type: YTN; PAM sequence: CTG
gatatgatgaacccaatcta

SEQ ID NO: 371798 - DNA, 20 bp, Artificial Sequence
  Description of Artificial Sequence: Synthetic oligonucleotide
  Target: LAMA2; (+) strand; PAM type: YTN; PAM sequence: CTA
agagctgattgttattaacc

SEQ ID NO: 371799 - DNA, 20 bp, Artificial Sequence
  Description of Artificial Sequence: Synthetic oligonucleotide
  Target: LAMA2; (+) strand; PAM type: YTN; PAM sequence: CTG
attgttattaacctgctcag

SEQ ID NO: 371800 - DNA, 20 bp, Artificial Sequence
  Description of Artificial Sequence: Synthetic oligonucleotide
  Target: LAMA2; (+) strand; PAM type: YTN; PAM sequence: TTG
ttattaacctgctcagagtc

SEQ ID NO: 371801 - DNA, 20 bp, Artificial Sequence
  Description of Artificial Sequence: Synthetic oligonucleotide
  Target: LAMA2; (+) strand; PAM type: YTN; PAM sequence: TTA
ttaacctgctcagagtcata

SEQ ID NO: 371802 - DNA, 20 bp, Artificial Sequence
  Description of Artificial Sequence: Synthetic oligonucleotide
  Target: LAMA2; (+) strand; PAM type: YTN; PAM sequence: TTA
acctgctcagagtcataaag

SEQ ID NO: 371803 - DNA, 20 bp, Artificial Sequence
  Description of Artificial Sequence: Synthetic oligonucleotide
  Target: LAMA2; (+) strand; PAM type: YTN; PAM sequence: CTG
ctcagagtcataaagtatta

SEQ ID NO: 371804 - DNA, 20 bp, Artificial Sequence
  Description of Artificial Sequence: Synthetic oligonucleotide
  Target: LAMA2; (+) strand; PAM type: YTN; PAM sequence: CTC
agagtcataaagtattaaag

SEQ ID NO: 371805 - DNA, 20 bp, Artificial Sequence
  Description of Artificial Sequence: Synthetic oligonucleotide
  Target: LAMA2; (+) strand; PAM type: YTN; PAM sequence: TTA
aagtatcagagttggaattt

SEQ ID NO: 371806 - DNA, 20 bp, Artificial Sequence
  Description of Artificial Sequence: Synthetic oligonucleotide
  Target: LAMA2; (+) strand; PAM type: YTN; PAM sequence: TTG
gaattttagttttaaaatcc

SEQ ID NO: 371807 - DNA, 20 bp, Artificial Sequence
  Description of Artificial Sequence: Synthetic oligonucleotide
  Target: LAMA2; (+) strand; PAM type: YTN; PAM sequence: TTT
tagttttaaaatccatgtgc

SEQ ID NO: 371808 - DNA, 20 bp, Artificial Sequence
  Description of Artificial Sequence: Synthetic oligonucleotide
  Target: LAMA2; (+) strand; PAM type: YTN; PAM sequence: TTT
agttttaaaatccatgtgct

SEQ ID NO: 371809 - DNA, 20 bp, Artificial Sequence
  Description of Artificial Sequence: Synthetic oligonucleotide
  Target: LAMA2; (+) strand; PAM type: YTN; PAM sequence: TTA
gttttaaaatccatgtgctt

SEQ ID NO: 371810 - DNA, 20 bp, Artificial Sequence
  Description of Artificial Sequence: Synthetic oligonucleotide
  Target: LAMA2; (+) strand; PAM type: YTN; PAM sequence: TTT
taaaatccatgtgctttcca

SEQ ID NO: 371811 - DNA, 20 bp, Artificial Sequence
  Description of Artificial Sequence: Synthetic oligonucleotide
  Target: LAMA2; (+) strand; PAM type: YTN; PAM sequence: TTT
aaaatccatgtgctttccaa

SEQ ID NO: 371812 - DNA, 20 bp, Artificial Sequence
  Description of Artificial Sequence: Synthetic oligonucleotide
  Target: LAMA2; (+) strand; PAM type: YTN; PAM sequence: TTA
aaatccatgtgctttccaaa

SEQ ID NO: 371813 - DNA, 20 bp, Artificial Sequence
  Description of Artificial Sequence: Synthetic oligonucleotide
  Target: LAMA2; (+) strand; PAM type: YTN; PAM sequence: CTT
tccaaatctctacggtctac

SEQ ID NO: 371814 - DNA, 20 bp, Artificial Sequence
  Description of Artificial Sequence: Synthetic oligonucleotide
  Target: LAMA2; (+) strand; PAM type: YTN; PAM sequence: TTT
ccaaatctctacggtctaca

SEQ ID NO: 371815 - DNA, 20 bp, Artificial Sequence
  Description of Artificial Sequence: Synthetic oligonucleotide
  Target: LAMA2; (+) strand; PAM type: YTN; PAM sequence: TTC
caaatctctacggtctacaa

SEQ ID NO: 371816 - DNA, 20 bp, Artificial Sequence
  Description of Artificial Sequence: Synthetic oligonucleotide
  Target: LAMA2; (+) strand; PAM type: YTN; PAM sequence: CTC
tacggtctacaatgaagact

SEQ ID NO: 371817 - DNA, 20 bp, Artificial Sequence
  Description of Artificial Sequence: Synthetic oligonucleotide
  Target: LAMA2; (+) strand; PAM type: YTN; PAM sequence: CTA
cggtctacaatgaagacttc

SEQ ID NO: 371818 - DNA, 20 bp, Artificial Sequence
  Description of Artificial Sequence: Synthetic oligonucleotide
  Target: LAMA2; (+) strand; PAM type: YTN; PAM sequence: CTA
caatgaagacttctttaaaa

SEQ ID NO: 371819 - DNA, 20 bp, Artificial Sequence
  Description of Artificial Sequence: Synthetic oligonucleotide
  Target: LAMA2; (+) strand; PAM type: YTN; PAM sequence: CTT
ctttaaaaaaaaatacacac

SEQ ID NO: 371820 - DNA, 20 bp, Artificial Sequence
  Description of Artificial Sequence: Synthetic oligonucleotide
  Target: LAMA2; (+) strand; PAM type: YTN; PAM sequence: TTC
tttaaaaaaaaatacacact

SEQ ID NO: 371821 - DNA, 20 bp, Artificial Sequence
  Description of Artificial Sequence: Synthetic oligonucleotide
  Target: LAMA2; (+) strand; PAM type: YTN; PAM sequence: CTT
taaaaaaaaatacacactgc

SEQ ID NO: 371822 - DNA, 20 bp, Artificial Sequence
  Description of Artificial Sequence: Synthetic oligonucleotide
  Target: LAMA2; (+) strand; PAM type: YTN; PAM sequence: TTT
aaaaaaaaatacacactgca

SEQ ID NO: 371823 - DNA, 20 bp, Artificial Sequence
  Description of Artificial Sequence: Synthetic oligonucleotide
  Target: LAMA2; (+) strand; PAM type: YTN; PAM sequence: TTA
aaaaaaaatacacactgcat

SEQ ID NO: 371824 - DNA, 20 bp, Artificial Sequence
  Description of Artificial Sequence: Synthetic oligonucleotide
  Target: LAMA2; (+) strand; PAM type: YTN; PAM sequence: CTG
cattttaagtgataacacta

SEQ ID NO: 371825 - DNA, 20 bp, Artificial Sequence
  Description of Artificial Sequence: Synthetic oligonucleotide
  Target: LAMA2; (+) strand; PAM type: YTN; PAM sequence: TTT
taagtgataacactaaaagc

SEQ ID NO: 371826 - DNA, 20 bp, Artificial Sequence
  Description of Artificial Sequence: Synthetic oligonucleotide
  Target: LAMA2; (+) strand; PAM type: YTN; PAM sequence: TTT
aagtgataacactaaaagca

SEQ ID NO: 371827 - DNA, 20 bp, Artificial Sequence
  Description of Artificial Sequence: Synthetic oligonucleotide
  Target: LAMA2; (+) strand; PAM type: YTN; PAM sequence: TTA
agtgataacactaaaagcag

SEQ ID NO: 371828 - DNA, 20 bp, Artificial Sequence
  Description of Artificial Sequence: Synthetic oligonucleotide
  Target: LAMA2; (+) strand; PAM type: YTN; PAM sequence: CTA
aaagcagtaattaattcatt

SEQ ID NO: 371829 - DNA, 20 bp, Artificial Sequence
  Description of Artificial Sequence: Synthetic oligonucleotide
  Target: LAMA2; (+) strand; PAM type: YTN; PAM sequence: TTA
attcattggataagtcaatt

SEQ ID NO: 371830 - DNA, 20 bp, Artificial Sequence
  Description of Artificial Sequence: Synthetic oligonucleotide
  Target: LAMA2; (+) strand; PAM type: YTN; PAM sequence: TTC
attggataagtcaatttatc

SEQ ID NO: 371831 - DNA, 20 bp, Artificial Sequence
  Description of Artificial Sequence: Synthetic oligonucleotide
  Target: LAMA2; (+) strand; PAM type: YTN; PAM sequence: TTG
gataagtcaatttatctagc

SEQ ID NO: 371832 - DNA, 20 bp, Artificial Sequence
  Description of Artificial Sequence: Synthetic oligonucleotide
  Target: LAMA2; (+) strand; PAM type: YTN; PAM sequence: TTT
atctagcaaggttttgagaa

SEQ ID NO: 371833 - DNA, 20 bp, Artificial Sequence
  Description of Artificial Sequence: Synthetic oligonucleotide
  Target: LAMA2; (+) strand; PAM type: YTN; PAM sequence: TTA
tctagcaaggttttgagaaa

SEQ ID NO: 371834 - DNA, 20 bp, Artificial Sequence
  Description of Artificial Sequence: Synthetic oligonucleotide
  Target: LAMA2; (+) strand; PAM type: YTN; PAM sequence: CTA
gcaaggttttgagaaaataa

SEQ ID NO: 371835 - DNA, 20 bp, Artificial Sequence
  Description of Artificial Sequence: Synthetic oligonucleotide
  Target: LAMA2; (+) strand; PAM type: YTN; PAM sequence: TTT
tgagaaaataagacattggt

SEQ ID NO: 371836 - DNA, 20 bp, Artificial Sequence
  Description of Artificial Sequence: Synthetic oligonucleotide
  Target: LAMA2; (+) strand; PAM type: YTN; PAM sequence: TTT
gagaaaataagacattggtt

SEQ ID NO: 371837 - DNA, 20 bp, Artificial Sequence
  Description of Artificial Sequence: Synthetic oligonucleotide
  Target: LAMA2; (+) strand; PAM type: YTN; PAM sequence: TTG
agaaaataagacattggttt

SEQ ID NO: 371838 - DNA, 20 bp, Artificial Sequence
  Description of Artificial Sequence: Synthetic oligonucleotide
  Target: LAMA2; (+) strand; PAM type: YTN; PAM sequence: TTG
gtttaatgcaggggtcctca

SEQ ID NO: 371839 - DNA, 20 bp, Artificial Sequence
  Description of Artificial Sequence: Synthetic oligonucleotide
  Target: LAMA2; (+) strand; PAM type: YTN; PAM sequence: TTT
aatgcaggggtcctcaacca

SEQ ID NO: 371840 - DNA, 20 bp, Artificial Sequence
  Description of Artificial Sequence: Synthetic oligonucleotide
  Target: LAMA2; (+) strand; PAM type: YTN; PAM sequence: TTA
atgcaggggtcctcaaccat

SEQ ID NO: 371841 - DNA, 20 bp, Artificial Sequence
  Description of Artificial Sequence: Synthetic oligonucleotide
  Target: LAMA2; (+) strand; PAM type: YTN; PAM sequence: CTC
aaccatctatagcctgttag

SEQ ID NO: 371842 - DNA, 20 bp, Artificial Sequence
  Description of Artificial Sequence: Synthetic oligonucleotide
  Target: LAMA2; (+) strand; PAM type: YTN; PAM sequence: CTA
tagcctgttaggaaccgggc

SEQ ID NO: 371843 - DNA, 20 bp, Artificial Sequence
  Description of Artificial Sequence: Synthetic oligonucleotide
  Target: LAMA2; (+) strand; PAM type: YTN; PAM sequence: CTG
ttaggaaccgggctgcctag

SEQ ID NO: 371844 - DNA, 20 bp, Artificial Sequence
  Description of Artificial Sequence: Synthetic oligonucleotide
  Target: LAMA2; (+) strand; PAM type: YTN; PAM sequence: TTA
ggaaccgggctgcctagcag

SEQ ID NO: 371845 - DNA, 20 bp, Artificial Sequence
  Description of Artificial Sequence: Synthetic oligonucleotide
  Target: LAMA2; (+) strand; PAM type: YTN; PAM sequence: CTG
cctagcaggaagtgagtggt

SEQ ID NO: 371846 - DNA, 20 bp, Artificial Sequence
  Description of Artificial Sequence: Synthetic oligonucleotide
  Target: LAMA2; (+) strand; PAM type: YTN; PAM sequence: CTA
gcaggaagtgagtggttggc

SEQ ID NO: 371847 - DNA, 20 bp, Artificial Sequence
  Description of Artificial Sequence: Synthetic oligonucleotide
  Target: LAMA2; (+) strand; PAM type: YTN; PAM sequence: TTG
gcattaccacctgagctcag

SEQ ID NO: 371848 - DNA, 20 bp, Artificial Sequence
  Description of Artificial Sequence: Synthetic oligonucleotide
  Target: LAMA2; (+) strand; PAM type: YTN; PAM sequence: TTA
ccacctgagctcagcctcct

SEQ ID NO: 371849 - DNA, 20 bp, Artificial Sequence
  Description of Artificial Sequence: Synthetic oligonucleotide
  Target: LAMA2; (+) strand; PAM type: YTN; PAM sequence: CTG
agctcagcctcctaacagat

SEQ ID NO: 371850 - DNA, 20 bp, Artificial Sequence
  Description of Artificial Sequence: Synthetic oligonucleotide
  Target: LAMA2; (+) strand; PAM type: YTN; PAM sequence: CTC
agcctcctaacagatcaggc

SEQ ID NO: 371851 - DNA, 20 bp, Artificial Sequence
  Description of Artificial Sequence: Synthetic oligonucleotide
  Target: LAMA2; (+) strand; PAM type: YTN; PAM sequence: CTC
ctaacagatcaggcaggcat

SEQ ID NO: 371852 - DNA, 20 bp, Artificial Sequence
  Description of Artificial Sequence: Synthetic oligonucleotide
  Target: LAMA2; (+) strand; PAM type: YTN; PAM sequence: CTA
acagatcaggcaggcattag

SEQ ID NO: 371853 - DNA, 20 bp, Artificial Sequence
  Description of Artificial Sequence: Synthetic oligonucleotide
  Target: LAMA2; (+) strand; PAM type: YTN; PAM sequence: TTA
gattctcatagaagctcaaa

SEQ ID NO: 371854 - DNA, 20 bp, Artificial Sequence
  Description of Artificial Sequence: Synthetic oligonucleotide
  Target: LAMA2; (+) strand; PAM type: YTN; PAM sequence: TTC
tcatagaagctcaaacccta

SEQ ID NO: 371855 - DNA, 20 bp, Artificial Sequence
  Description of Artificial Sequence: Synthetic oligonucleotide
  Target: LAMA2; (+) strand; PAM type: YTN; PAM sequence: CTC
atagaagctcaaaccctatt

SEQ ID NO: 371856 - DNA, 20 bp, Artificial Sequence
  Description of Artificial Sequence: Synthetic oligonucleotide
  Target: LAMA2; (+) strand; PAM type: YTN; PAM sequence: CTC
aaaccctattgcgaactgca

SEQ ID NO: 371857 - DNA, 20 bp, Artificial Sequence
  Description of Artificial Sequence: Synthetic oligonucleotide
  Target: LAMA2; (+) strand; PAM type: YTN; PAM sequence: CTA
ttgcgaactgcacctgcgag

SEQ ID NO: 371858 - DNA, 20 bp, Artificial Sequence
  Description of Artificial Sequence: Synthetic oligonucleotide
  Target: LAMA2; (+) strand; PAM type: YTN; PAM sequence: TTG
cgaactgcacctgcgaggga

SEQ ID NO: 371859 - DNA, 20 bp, Artificial Sequence
  Description of Artificial Sequence: Synthetic oligonucleotide
  Target: LAMA2; (+) strand; PAM type: YTN; PAM sequence: CTG
cacctgcgagggatctagct

SEQ ID NO: 371860 - DNA, 20 bp, Artificial Sequence
  Description of Artificial Sequence: Synthetic oligonucleotide
  Target: LAMA2; (+) strand; PAM type: YTN; PAM sequence: CTG
cgagggatctagcttgtatg

SEQ ID NO: 371861 - DNA, 20 bp, Artificial Sequence
  Description of Artificial Sequence: Synthetic oligonucleotide
  Target: LAMA2; (+) strand; PAM type: YTN; PAM sequence: CTA
gcttgtatgctccttatgag

SEQ ID NO: 371862 - DNA, 20 bp, Artificial Sequence
  Description of Artificial Sequence: Synthetic oligonucleotide
  Target: LAMA2; (+) strand; PAM type: YTN; PAM sequence: CTT
gtatgctccttatgagagtc

SEQ ID NO: 371863 - DNA, 20 bp, Artificial Sequence
  Description of Artificial Sequence: Synthetic oligonucleotide
  Target: LAMA2; (+) strand; PAM type: YTN; PAM sequence: TTG
tatgctccttatgagagtct

SEQ ID NO: 371864 - DNA, 20 bp, Artificial Sequence
  Description of Artificial Sequence: Synthetic oligonucleotide
  Target: LAMA2; (+) strand; PAM type: YTN; PAM sequence: CTC
cttatgagagtctaactgat

SEQ ID NO: 371865 - DNA, 20 bp, Artificial Sequence
  Description of Artificial Sequence: Synthetic oligonucleotide
  Target: LAMA2; (+) strand; PAM type: YTN; PAM sequence: CTT
atgagagtctaactgatgcc

SEQ ID NO: 371866 - DNA, 20 bp, Artificial Sequence
  Description of Artificial Sequence: Synthetic oligonucleotide
  Target: LAMA2; (+) strand; PAM type: YTN; PAM sequence: TTA
tgagagtctaactgatgcct

SEQ ID NO: 371867 - DNA, 20 bp, Artificial Sequence
  Description of Artificial Sequence: Synthetic oligonucleotide
  Target: LAMA2; (+) strand; PAM type: YTN; PAM sequence: CTA
actgatgcctgatgatctga

SEQ ID NO: 371868 - DNA, 20 bp, Artificial Sequence
  Description of Artificial Sequence: Synthetic oligonucleotide
  Target: LAMA2; (+) strand; PAM type: YTN; PAM sequence: CTG
atgcctgatgatctgacgtg

SEQ ID NO: 371869 - DNA, 20 bp, Artificial Sequence
  Description of Artificial Sequence: Synthetic oligonucleotide
  Target: LAMA2; (+) strand; PAM type: YTN; PAM sequence: CTG
atgatctgacgtggaacagt

SEQ ID NO: 371870 - DNA, 20 bp, Artificial Sequence
  Description of Artificial Sequence: Synthetic oligonucleotide
  Target: LAMA2; (+) strand; PAM type: YTN; PAM sequence: CTG
acgtggaacagttttatccc

SEQ ID NO: 371871 - DNA, 20 bp, Artificial Sequence
  Description of Artificial Sequence: Synthetic oligonucleotide
  Target: LAMA2; (+) strand; PAM type: YTN; PAM sequence: TTT
tatcccaaactcctcccctg

SEQ ID NO: 371872 - DNA, 20 bp, Artificial Sequence
  Description of Artificial Sequence: Synthetic oligonucleotide
  Target: LAMA2; (+) strand; PAM type: YTN; PAM sequence: TTT
atcccaaactcctcccctgc

SEQ ID NO: 371873 - DNA, 20 bp, Artificial Sequence
  Description of Artificial Sequence: Synthetic oligonucleotide
  Target: LAMA2; (+) strand; PAM type: YTN; PAM sequence: TTA
tcccaaactcctcccctgca

SEQ ID NO: 371874 - DNA, 20 bp, Artificial Sequence
  Description of Artificial Sequence: Synthetic oligonucleotide
  Target: LAMA2; (+) strand; PAM type: YTN; PAM sequence: CTC
ctcccctgcatctgtggaaa

SEQ ID NO: 371875 - DNA, 20 bp, Artificial Sequence
  Description of Artificial Sequence: Synthetic oligonucleotide
  Target: LAMA2; (+) strand; PAM type: YTN; PAM sequence: CTC
ccctgcatctgtggaaaaat

SEQ ID NO: 371876 - DNA, 20 bp, Artificial Sequence
  Description of Artificial Sequence: Synthetic oligonucleotide
  Target: LAMA2; (+) strand; PAM type: YTN; PAM sequence: CTG
catctgtggaaaaattgtct

SEQ ID NO: 371877 - DNA, 20 bp, Artificial Sequence
  Description of Artificial Sequence: Synthetic oligonucleotide
  Target: LAMA2; (+) strand; PAM type: YTN; PAM sequence: CTG
tggaaaaattgtctccaaca

SEQ ID NO: 371878 - DNA, 20 bp, Artificial Sequence
  Description of Artificial Sequence: Synthetic oligonucleotide
  Target: LAMA2; (+) strand; PAM type: YTN; PAM sequence: TTG
tctccaacaaaagaagtacc

SEQ ID NO: 371879 - DNA, 20 bp, Artificial Sequence
  Description of Artificial Sequence: Synthetic oligonucleotide
  Target: LAMA2; (+) strand; PAM type: YTN; PAM sequence: CTC
caacaaaagaagtacctggt

SEQ ID NO: 371880 - DNA, 20 bp, Artificial Sequence
  Description of Artificial Sequence: Synthetic oligonucleotide
  Target: LAMA2; (+) strand; PAM type: YTN; PAM sequence: CTG
gtgccaaaaattttggggac

SEQ ID NO: 371881 - DNA, 20 bp, Artificial Sequence
  Description of Artificial Sequence: Synthetic oligonucleotide
  Target: LAMA2; (+) strand; PAM type: YTN; PAM sequence: TTT
tggggaccactggttaatgt

SEQ ID NO: 371882 - DNA, 20 bp, Artificial Sequence
  Description of Artificial Sequence: Synthetic oligonucleotide
  Target: LAMA2; (+) strand; PAM type: YTN; PAM sequence: TTT
ggggaccactggttaatgta

SEQ ID NO: 371883 - DNA, 20 bp, Artificial Sequence
  Description of Artificial Sequence: Synthetic oligonucleotide
  Target: LAMA2; (+) strand; PAM type: YTN; PAM sequence: TTG
gggaccactggttaatgtat

SEQ ID NO: 371884 - DNA, 20 bp, Artificial Sequence
  Description of Artificial Sequence: Synthetic oligonucleotide
  Target: LAMA2; (+) strand; PAM type: YTN; PAM sequence: CTG
gttaatgtatgttagtgatc

SEQ ID NO: 371885 - DNA, 20 bp, Artificial Sequence
  Description of Artificial Sequence: Synthetic oligonucleotide
  Target: LAMA2; (+) strand; PAM type: YTN; PAM sequence: TTA
atgtatgttagtgatcagaa

SEQ ID NO: 371886 - DNA, 20 bp, Artificial Sequence
  Description of Artificial Sequence: Synthetic oligonucleotide
  Target: LAMA2; (+) strand; PAM type: YTN; PAM sequence: TTA
gtgatcagaacatttccagg

SEQ ID NO: 371887 - DNA, 20 bp, Artificial Sequence
  Description of Artificial Sequence: Synthetic oligonucleotide
  Target: LAMA2; (+) strand; PAM type: YTN; PAM sequence: TTT
ccagggcctaaggcatgagc

SEQ ID NO: 371888 - DNA, 20 bp, Artificial Sequence
  Description of Artificial Sequence: Synthetic oligonucleotide
  Target: LAMA2; (+) strand; PAM type: YTN; PAM sequence: TTC
cagggcctaaggcatgagcc

SEQ ID NO: 371889 - DNA, 20 bp, Artificial Sequence
  Description of Artificial Sequence: Synthetic oligonucleotide
  Target: LAMA2; (+) strand; PAM type: YTN; PAM sequence: CTA
aggcatgagcctgaatgggc

SEQ ID NO: 371890 - DNA, 20 bp, Artificial Sequence
  Description of Artificial Sequence: Synthetic oligonucleotide
  Target: LAMA2; (+) strand; PAM type: YTN; PAM sequence: CTG
aatgggctcaaaactgaaga

SEQ ID NO: 371891 - DNA, 20 bp, Artificial Sequence
  Description of Artificial Sequence: Synthetic oligonucleotide
  Target: LAMA2; (+) strand; PAM type: YTN; PAM sequence: CTC
aaaactgaagattctttaac

SEQ ID NO: 371892 - DNA, 20 bp, Artificial Sequence
  Description of Artificial Sequence: Synthetic oligonucleotide
  Target: LAMA2; (+) strand; PAM type: YTN; PAM sequence: CTG
aagattctttaacaaccaag

SEQ ID NO: 371893 - DNA, 20 bp, Artificial Sequence
  Description of Artificial Sequence: Synthetic oligonucleotide
  Target: LAMA2; (+) strand; PAM type: YTN; PAM sequence: TTC
tttaacaaccaaggatgtta

SEQ ID NO: 371894 - DNA, 20 bp, Artificial Sequence
  Description of Artificial Sequence: Synthetic oligonucleotide
  Target: LAMA2; (+) strand; PAM type: YTN; PAM sequence: CTT
taacaaccaaggatgttaga

SEQ ID NO: 371895 - DNA, 20 bp, Artificial Sequence
  Description of Artificial Sequence: Synthetic oligonucleotide
  Target: LAMA2; (+) strand; PAM type: YTN; PAM sequence: TTT
aacaaccaaggatgttagag

SEQ ID NO: 371896 - DNA, 20 bp, Artificial Sequence
  Description of Artificial Sequence: Synthetic oligonucleotide
  Target: LAMA2; (+) strand; PAM type: YTN; PAM sequence: TTA
acaaccaaggatgttagaga

SEQ ID NO: 371897 - DNA, 20 bp, Artificial Sequence
  Description of Artificial Sequence: Synthetic oligonucleotide
  Target: LAMA2; (+) strand; PAM type: YTN; PAM sequence: TTA
gagaagaggaagaaggcaag

SEQ ID NO: 371898 - DNA, 20 bp, Artificial Sequence
  Description of Artificial Sequence: Synthetic oligonucleotide
  Target: LAMA2; (+) strand; PAM type: YTN; PAM sequence: CTG
ttggaaaataattactatag

SEQ ID NO: 371899 - DNA, 20 bp, Artificial Sequence
  Description of Artificial Sequence: Synthetic oligonucleotide
  Target: LAMA2; (+) strand; PAM type: YTN; PAM sequence: TTG
gaaaataattactataggag

SEQ ID NO: 371900 - DNA, 20 bp, Artificial Sequence
  Description of Artificial Sequence: Synthetic oligonucleotide
  Target: LAMA2; (+) strand; PAM type: YTN; PAM sequence: TTA
ctataggagaacaaatgaaa

SEQ ID NO: 371901 - DNA, 20 bp, Artificial Sequence
  Description of Artificial Sequence: Synthetic oligonucleotide
  Target: LAMA2; (+) strand; PAM type: YTN; PAM sequence: CTA
taggagaacaaatgaaatat

SEQ ID NO: 371902 - DNA, 20 bp, Artificial Sequence
  Description of Artificial Sequence: Synthetic oligonucleotide
  Target: LAMA2; (+) strand; PAM type: YTN; PAM sequence: TTC
cttcataattaaaggctact

SEQ ID NO: 371903 - DNA, 20 bp, Artificial Sequence
  Description of Artificial Sequence: Synthetic oligonucleotide
  Target: LAMA2; (+) strand; PAM type: YTN; PAM sequence: CTT
cataattaaaggctactcaa

SEQ ID NO: 371904 - DNA, 20 bp, Artificial Sequence
  Description of Artificial Sequence: Synthetic oligonucleotide
  Target: LAMA2; (+) strand; PAM type: YTN; PAM sequence: TTC
ataattaaaggctactcaag

SEQ ID NO: 371905 - DNA, 20 bp, Artificial Sequence
  Description of Artificial Sequence: Synthetic oligonucleotide
  Target: LAMA2; (+) strand; PAM type: YTN; PAM sequence: TTA
aaggctactcaagcctatga

SEQ ID NO: 371906 - DNA, 20 bp, Artificial Sequence
  Description of Artificial Sequence: Synthetic oligonucleotide
  Target: LAMA2; (+) strand; PAM type: YTN; PAM sequence: CTA
ctcaagcctatgatagtcat

SEQ ID NO: 371907 - DNA, 20 bp, Artificial Sequence
  Description of Artificial Sequence: Synthetic oligonucleotide
  Target: LAMA2; (+) strand; PAM type: YTN; PAM sequence: CTC
aagcctatgatagtcataac

SEQ ID NO: 371908 - DNA, 20 bp, Artificial Sequence
  Description of Artificial Sequence: Synthetic oligonucleotide
  Target: LAMA2; (+) strand; PAM type: YTN; PAM sequence: CTA
tgatagtcataacatgacac

SEQ ID NO: 371909 - DNA, 20 bp, Artificial Sequence
  Description of Artificial Sequence: Synthetic oligonucleotide
  Target: LAMA2; (+) strand; PAM type: YTN; PAM sequence: CTG
cactttggtatatatgcgaa

SEQ ID NO: 371910 - DNA, 20 bp, Artificial Sequence
  Description of Artificial Sequence: Synthetic oligonucleotide
  Target: LAMA2; (+) strand; PAM type: YTN; PAM sequence: CTT
tggtatatatgcgaagggtt

SEQ ID NO: 371911 - DNA, 20 bp, Artificial Sequence
  Description of Artificial Sequence: Synthetic oligonucleotide
  Target: LAMA2; (+) strand; PAM type: YTN; PAM sequence: TTT
ggtatatatgcgaagggtta

SEQ ID NO: 371912 - DNA, 20 bp, Artificial Sequence
  Description of Artificial Sequence: Synthetic oligonucleotide
  Target: LAMA2; (+) strand; PAM type: YTN; PAM sequence: TTG
gtatatatgcgaagggttag

SEQ ID NO: 371913 - DNA, 20 bp, Artificial Sequence
  Description of Artificial Sequence: Synthetic oligonucleotide
  Target: LAMA2; (+) strand; PAM type: YTN; PAM sequence: TTA
gatcacccaatggaagacct

SEQ ID NO: 371914 - DNA, 20 bp, Artificial Sequence
  Description of Artificial Sequence: Synthetic oligonucleotide
  Target: LAMA2; (+) strand; PAM type: YTN; PAM sequence: CTA
cttgtttgccatggctgaat

SEQ ID NO: 371915 - DNA, 20 bp, Artificial Sequence
  Description of Artificial Sequence: Synthetic oligonucleotide
  Target: LAMA2; (+) strand; PAM type: YTN; PAM sequence: CTT
gtttgccatggctgaatggc

SEQ ID NO: 371916 - DNA, 20 bp, Artificial Sequence
  Description of Artificial Sequence: Synthetic oligonucleotide
  Target: LAMA2; (+) strand; PAM type: YTN; PAM sequence: TTG
tttgccatggctgaatggca

SEQ ID NO: 371917 - DNA, 20 bp, Artificial Sequence
  Description of Artificial Sequence: Synthetic oligonucleotide
  Target: LAMA2; (+) strand; PAM type: YTN; PAM sequence: TTT
gccatggctgaatggcattc

SEQ ID NO: 371918 - DNA, 20 bp, Artificial Sequence
  Description of Artificial Sequence: Synthetic oligonucleotide
  Target: LAMA2; (+) strand; PAM type: YTN; PAM sequence: TTG
ccatggctgaatggcattct

SEQ ID NO: 371919 - DNA, 20 bp, Artificial Sequence
  Description of Artificial Sequence: Synthetic oligonucleotide
  Target: LAMA2; (+) strand; PAM type: YTN; PAM sequence: CTG
aatggcattctcttaaccat

SEQ ID NO: 371920 - DNA, 20 bp, Artificial Sequence
  Description of Artificial Sequence: Synthetic oligonucleotide
  Target: LAMA2; (+) strand; PAM type: YTN; PAM sequence: TTC
tcttaaccatcttcatttac

SEQ ID NO: 371921 - DNA, 20 bp, Artificial Sequence
  Description of Artificial Sequence: Synthetic oligonucleotide
  Target: LAMA2; (+) strand; PAM type: YTN; PAM sequence: CTC
ttaaccatcttcatttacat

SEQ ID NO: 371922 - DNA, 20 bp, Artificial Sequence
  Description of Artificial Sequence: Synthetic oligonucleotide
  Target: LAMA2; (+) strand; PAM type: YTN; PAM sequence: CTT
aaccatcttcatttacatga

SEQ ID NO: 371923 - DNA, 20 bp, Artificial Sequence
  Description of Artificial Sequence: Synthetic oligonucleotide
  Target: LAMA2; (+) strand; PAM type: YTN; PAM sequence: TTA
accatcttcatttacatgaa

SEQ ID NO: 371924 - DNA, 20 bp, Artificial Sequence
  Description of Artificial Sequence: Synthetic oligonucleotide
  Target: LAMA2; (+) strand; PAM type: YTN; PAM sequence: CTT
catttacatgaaactcattg

SEQ ID NO: 371925 - DNA, 20 bp, Artificial Sequence
  Description of Artificial Sequence: Synthetic oligonucleotide
  Target: LAMA2; (+) strand; PAM type: YTN; PAM sequence: TTC
atttacatgaaactcattgt

SEQ ID NO: 371926 - DNA, 20 bp, Artificial Sequence
  Description of Artificial Sequence: Synthetic oligonucleotide
  Target: LAMA2; (+) strand; PAM type: YTN; PAM sequence: TTT
acatgaaactcattgttcac

SEQ ID NO: 371927 - DNA, 20 bp, Artificial Sequence
  Description of Artificial Sequence: Synthetic oligonucleotide
  Target: LAMA2; (+) strand; PAM type: YTN; PAM sequence: TTA
catgaaactcattgttcacg

SEQ ID NO: 371928 - DNA, 20 bp, Artificial Sequence
  Description of Artificial Sequence: Synthetic oligonucleotide
  Target: LAMA2; (+) strand; PAM type: YTN; PAM sequence: CTC
attgttcacgactaacttgc

SEQ ID NO: 371929 - DNA, 20 bp, Artificial Sequence
  Description of Artificial Sequence: Synthetic oligonucleotide
  Target: LAMA2; (+) strand; PAM type: YTN; PAM sequence: TTG
ttcacgactaacttgcattt

SEQ ID NO: 371930 - DNA, 20 bp, Artificial Sequence
  Description of Artificial Sequence: Synthetic oligonucleotide
  Target: LAMA2; (+) strand; PAM type: YTN; PAM sequence: TTC
acgactaacttgcatttgag

SEQ ID NO: 371931 - DNA, 20 bp, Artificial Sequence
  Description of Artificial Sequence: Synthetic oligonucleotide
  Target: LAMA2; (+) strand; PAM type: YTN; PAM sequence: CTA
acttgcatttgaggaaagca

SEQ ID NO: 371932 - DNA, 20 bp, Artificial Sequence
  Description of Artificial Sequence: Synthetic oligonucleotide
  Target: LAMA2; (+) strand; PAM type: YTN; PAM sequence: CTT
gcatttgaggaaagcagaag

SEQ ID NO: 371933 - DNA, 20 bp, Artificial Sequence
  Description of Artificial Sequence: Synthetic oligonucleotide
  Target: LAMA2; (+) strand; PAM type: YTN; PAM sequence: TTG
catttgaggaaagcagaagt

SEQ ID NO: 371934 - DNA, 20 bp, Artificial Sequence
  Description of Artificial Sequence: Synthetic oligonucleotide
  Target: LAMA2; (+) strand; PAM type: YTN; PAM sequence: TTT
gaggaaagcagaagtattgc

SEQ ID NO: 371935 - DNA, 20 bp, Artificial Sequence
  Description of Artificial Sequence: Synthetic oligonucleotide
  Target: LAMA2; (+) strand; PAM type: YTN; PAM sequence: TTG
aggaaagcagaagtattgca

SEQ ID NO: 371936 - DNA, 20 bp, Artificial Sequence
  Description of Artificial Sequence: Synthetic oligonucleotide
  Target: LAMA2; (+) strand; PAM type: YTN; PAM sequence: TTG
catctggccactcgtattgc

SEQ ID NO: 371937 - DNA, 20 bp, Artificial Sequence
  Description of Artificial Sequence: Synthetic oligonucleotide
  Target: LAMA2; (+) strand; PAM type: YTN; PAM sequence: CTG
gccactcgtattgcatctcc

SEQ ID NO: 371938 - DNA, 20 bp, Artificial Sequence
  Description of Artificial Sequence: Synthetic oligonucleotide
  Target: LAMA2; (+) strand; PAM type: YTN; PAM sequence: CTC
gtattgcatctccttctcag

SEQ ID NO: 371939 - DNA, 20 bp, Artificial Sequence
  Description of Artificial Sequence: Synthetic oligonucleotide
  Target: LAMA2; (+) strand; PAM type: YTN; PAM sequence: TTG
catctccttctcagccaaga

SEQ ID NO: 371940 - DNA, 20 bp, Artificial Sequence
  Description of Artificial Sequence: Synthetic oligonucleotide
  Target: LAMA2; (+) strand; PAM type: YTN; PAM sequence: CTC
cttctcagccaagatgtcat

SEQ ID NO: 371941 - DNA, 20 bp, Artificial Sequence
  Description of Artificial Sequence: Synthetic oligonucleotide
  Target: LAMA2; (+) strand; PAM type: YTN; PAM sequence: CTT
ctcagccaagatgtcatgag

SEQ ID NO: 371942 - DNA, 20 bp, Artificial Sequence
  Description of Artificial Sequence: Synthetic oligonucleotide
  Target: LAMA2; (+) strand; PAM type: YTN; PAM sequence: TTC
tcagccaagatgtcatgagc

SEQ ID NO: 371943 - DNA, 20 bp, Artificial Sequence
  Description of Artificial Sequence: Synthetic oligonucleotide
  Target: LAMA2; (+) strand; PAM type: YTN; PAM sequence: CTC
agccaagatgtcatgagcat

SEQ ID NO: 371944 - DNA, 20 bp, Artificial Sequence
  Description of Artificial Sequence: Synthetic oligonucleotide
  Target: LAMA2; (+) strand; PAM type: YTN; PAM sequence: TTA
gcaccactatcaatccagca

SEQ ID NO: 371945 - DNA, 20 bp, Artificial Sequence
  Description of Artificial Sequence: Synthetic oligonucleotide
  Target: LAMA2; (+) strand; PAM type: YTN; PAM sequence: CTA
tcaatccagcagagctggct

SEQ ID NO: 371946 - DNA, 20 bp, Artificial Sequence
  Description of Artificial Sequence: Synthetic oligonucleotide
  Target: LAMA2; (+) strand; PAM type: YTN; PAM sequence: CTG
gctgcccattgcatcatgtg

SEQ ID NO: 371947 - DNA, 20 bp, Artificial Sequence
  Description of Artificial Sequence: Synthetic oligonucleotide
  Target: LAMA2; (+) strand; PAM type: YTN; PAM sequence: CTG
cccattgcatcatgtgaatt

SEQ ID NO: 371948 - DNA, 20 bp, Artificial Sequence
  Description of Artificial Sequence: Synthetic oligonucleotide
  Target: LAMA2; (+) strand; PAM type: YTN; PAM sequence: TTG
catcatgtgaattccagctg

SEQ ID NO: 371949 - DNA, 20 bp, Artificial Sequence
  Description of Artificial Sequence: Synthetic oligonucleotide
  Target: LAMA2; (+) strand; PAM type: YTN; PAM sequence: TTC
cagctgaatacatattagaa

SEQ ID NO: 371950 - DNA, 20 bp, Artificial Sequence
  Description of Artificial Sequence: Synthetic oligonucleotide
  Target: LAMA2; (+) strand; PAM type: YTN; PAM sequence: CTG
aatacatattagaattatat

SEQ ID NO: 371951 - DNA, 20 bp, Artificial Sequence
  Description of Artificial Sequence: Synthetic oligonucleotide
  Target: LAMA2; (+) strand; PAM type: YTN; PAM sequence: TTA
gaattatataattgattgag

SEQ ID NO: 371952 - DNA, 20 bp, Artificial Sequence
  Description of Artificial Sequence: Synthetic oligonucleotide
  Target: LAMA2; (+) strand; PAM type: YTN; PAM sequence: TTA
tataattgattgagtatgca

SEQ ID NO: 371953 - DNA, 20 bp, Artificial Sequence
  Description of Artificial Sequence: Synthetic oligonucleotide
  Target: LAMA2; (+) strand; PAM type: YTN; PAM sequence: TTG
attgagtatgcaaaccctat

SEQ ID NO: 371954 - DNA, 20 bp, Artificial Sequence
  Description of Artificial Sequence: Synthetic oligonucleotide
  Target: LAMA2; (+) strand; PAM type: YTN; PAM sequence: TTG
agtatgcaaaccctatggat

SEQ ID NO: 371955 - DNA, 20 bp, Artificial Sequence
  Description of Artificial Sequence: Synthetic oligonucleotide
  Target: LAMA2; (+) strand; PAM type: YTN; PAM sequence: CTA
tggatttaccctcaagtctg

SEQ ID NO: 371956 - DNA, 20 bp, Artificial Sequence
  Description of Artificial Sequence: Synthetic oligonucleotide
  Target: LAMA2; (+) strand; PAM type: YTN; PAM sequence: TTT
accctcaagtctgaccaaca

SEQ ID NO: 371957 - DNA, 20 bp, Artificial Sequence
  Description of Artificial Sequence: Synthetic oligonucleotide
  Target: LAMA2; (+) strand; PAM type: YTN; PAM sequence: TTA
ccctcaagtctgaccaacat

SEQ ID NO: 371958 - DNA, 20 bp, Artificial Sequence
  Description of Artificial Sequence: Synthetic oligonucleotide
  Target: LAMA2; (+) strand; PAM type: YTN; PAM sequence: CTC
aagtctgaccaacattacta

SEQ ID NO: 371959 - DNA, 20 bp, Artificial Sequence
  Description of Artificial Sequence: Synthetic oligonucleotide
  Target: LAMA2; (+) strand; PAM type: YTN; PAM sequence: CTG
accaacattactataaatgc

SEQ ID NO: 371960 - DNA, 20 bp, Artificial Sequence
  Description of Artificial Sequence: Synthetic oligonucleotide
  Target: LAMA2; (+) strand; PAM type: YTN; PAM sequence: TTA
ctataaatgcagaggaaaca

SEQ ID NO: 371961 - DNA, 20 bp, Artificial Sequence
  Description of Artificial Sequence: Synthetic oligonucleotide
  Target: LAMA2; (+) strand; PAM type: YTN; PAM sequence: CTA
taaatgcagaggaaacatta

SEQ ID NO: 371962 - DNA, 20 bp, Artificial Sequence
  Description of Artificial Sequence: Synthetic oligonucleotide
  Target: LAMA2; (+) strand; PAM type: YTN; PAM sequence: TTA
gggagataattttgcttgga

SEQ ID NO: 371963 - DNA, 20 bp, Artificial Sequence
  Description of Artificial Sequence: Synthetic oligonucleotide
  Target: LAMA2; (+) strand; PAM type: YTN; PAM sequence: TTT
tgcttggataattataggca

SEQ ID NO: 371964 - DNA, 20 bp, Artificial Sequence
  Description of Artificial Sequence: Synthetic oligonucleotide
  Target: LAMA2; (+) strand; PAM type: YTN; PAM sequence: TTT
gcttggataattataggcat

SEQ ID NO: 371965 - DNA, 20 bp, Artificial Sequence
  Description of Artificial Sequence: Synthetic oligonucleotide
  Target: LAMA2; (+) strand; PAM type: YTN; PAM sequence: TTG
cttggataattataggcatt

SEQ ID NO: 371966 - DNA, 20 bp, Artificial Sequence
  Description of Artificial Sequence: Synthetic oligonucleotide
  Target: LAMA2; (+) strand; PAM type: YTN; PAM sequence: CTT
ggataattataggcattcat

SEQ ID NO: 371967 - DNA, 20 bp, Artificial Sequence
  Description of Artificial Sequence: Synthetic oligonucleotide
  Target: LAMA2; (+) strand; PAM type: YTN; PAM sequence: TTG
gataattataggcattcatg

SEQ ID NO: 371968 - DNA, 20 bp, Artificial Sequence
  Description of Artificial Sequence: Synthetic oligonucleotide
  Target: LAMA2; (+) strand; PAM type: YTN; PAM sequence: TTA
taggcattcatgacccattg

SEQ ID NO: 371969 - DNA, 20 bp, Artificial Sequence
  Description of Artificial Sequence: Synthetic oligonucleotide
  Target: LAMA2; (+) strand; PAM type: YTN; PAM sequence: TTC
atgacccattgttgtctctt

SEQ ID NO: 371970 - DNA, 20 bp, Artificial Sequence
  Description of Artificial Sequence: Synthetic oligonucleotide
  Target: LAMA2; (+) strand; PAM type: YTN; PAM sequence: TTG
ttgtctctttatttgttgtg

SEQ ID NO: 371971 - DNA, 20 bp, Artificial Sequence
  Description of Artificial Sequence: Synthetic oligonucleotide
  Target: LAMA2; (+) strand; PAM type: YTN; PAM sequence: TTG
tctctttatttgttgtgcat

SEQ ID NO: 371972 - DNA, 20 bp, Artificial Sequence
  Description of Artificial Sequence: Synthetic oligonucleotide
  Target: LAMA2; (+) strand; PAM type: YTN; PAM sequence: CTC
tttatttgttgtgcatttac

SEQ ID NO: 371973 - DNA, 20 bp, Artificial Sequence
  Description of Artificial Sequence: Synthetic oligonucleotide
  Target: LAMA2; (+) strand; PAM type: YTN; PAM sequence: CTT
tatttgttgtgcatttactt

SEQ ID NO: 371974 - DNA, 20 bp, Artificial Sequence
  Description of Artificial Sequence: Synthetic oligonucleotide
  Target: LAMA2; (+) strand; PAM type: YTN; PAM sequence: TTT
atttgttgtgcatttacttg

SEQ ID NO: 371975 - DNA, 20 bp, Artificial Sequence
  Description of Artificial Sequence: Synthetic oligonucleotide
  Target: LAMA2; (+) strand; PAM type: YTN; PAM sequence: TTA
tttgttgtgcatttacttgg

SEQ ID NO: 371976 - DNA, 20 bp, Artificial Sequence
  Description of Artificial Sequence: Synthetic oligonucleotide
  Target: LAMA2; (+) strand; PAM type: YTN; PAM sequence: TTT
gttgtgcatttacttggata

SEQ ID NO: 371977 - DNA, 20 bp, Artificial Sequence
  Description of Artificial Sequence: Synthetic oligonucleotide
  Target: LAMA2; (+) strand; PAM type: YTN; PAM sequence: TTG
ttgtgcatttacttggataa

SEQ ID NO: 371978 - DNA, 20 bp, Artificial Sequence
  Description of Artificial Sequence: Synthetic oligonucleotide
  Target: LAMA2; (+) strand; PAM type: YTN; PAM sequence: TTG
tgcatttacttggataatgg

SEQ ID NO: 371979 - DNA, 20 bp, Artificial Sequence
  Description of Artificial Sequence: Synthetic oligonucleotide
  Target: LAMA2; (+) strand; PAM type: YTN; PAM sequence: TTT
acttggataatgggttctaa

SEQ ID NO: 371980 - DNA, 20 bp, Artificial Sequence
  Description of Artificial Sequence: Synthetic oligonucleotide
  Target: LAMA2; (+) strand; PAM type: YTN; PAM sequence: TTA
cttggataatgggttctaat

SEQ ID NO: 371981 - DNA, 20 bp, Artificial Sequence
  Description of Artificial Sequence: Synthetic oligonucleotide
  Target: LAMA2; (+) strand; PAM type: YTN; PAM sequence: CTT
ggataatgggttctaattgt

SEQ ID NO: 371982 - DNA, 20 bp, Artificial Sequence
  Description of Artificial Sequence: Synthetic oligonucleotide
  Target: LAMA2; (+) strand; PAM type: YTN; PAM sequence: TTG
gataatgggttctaattgtt

SEQ ID NO: 371983 - DNA, 20 bp, Artificial Sequence
  Description of Artificial Sequence: Synthetic oligonucleotide
  Target: LAMA2; (+) strand; PAM type: YTN; PAM sequence: TTC
taattgttgttcctgaaaaa

SEQ ID NO: 371984 - DNA, 20 bp, Artificial Sequence
  Description of Artificial Sequence: Synthetic oligonucleotide
  Target: LAMA2; (+) strand; PAM type: YTN; PAM sequence: CTA
attgttgttcctgaaaaaga

SEQ ID NO: 371985 - DNA, 20 bp, Artificial Sequence
  Description of Artificial Sequence: Synthetic oligonucleotide
  Target: LAMA2; (+) strand; PAM type: YTN; PAM sequence: TTG
ttgttcctgaaaaagaaaga

SEQ ID NO: 371986 - DNA, 20 bp, Artificial Sequence
  Description of Artificial Sequence: Synthetic oligonucleotide
  Target: LAMA2; (+) strand; PAM type: YTN; PAM sequence: TTG
ttcctgaaaaagaaagaaag

SEQ ID NO: 371987 - DNA, 20 bp, Artificial Sequence
  Description of Artificial Sequence: Synthetic oligonucleotide
  Target: LAMA2; (+) strand; PAM type: YTN; PAM sequence: TTC
ctgaaaaagaaagaaagtct

SEQ ID NO: 371988 - DNA, 20 bp, Artificial Sequence
  Description of Artificial Sequence: Synthetic oligonucleotide
  Target: LAMA2; (+) strand; PAM type: YTN; PAM sequence: CTG
aaaaagaaagaaagtctgca

SEQ ID NO: 371989 - DNA, 20 bp, Artificial Sequence
  Description of Artificial Sequence: Synthetic oligonucleotide
  Target: LAMA2; (+) strand; PAM type: YTN; PAM sequence: CTG
caagcattaaaacacaatcc

SEQ ID NO: 371990 - DNA, 20 bp, Artificial Sequence
  Description of Artificial Sequence: Synthetic oligonucleotide
  Target: LAMA2; (+) strand; PAM type: YTN; PAM sequence: TTA
aaacacaatccatcagtgcc

SEQ ID NO: 371991 - DNA, 20 bp, Artificial Sequence
  Description of Artificial Sequence: Synthetic oligonucleotide
  Target: LAMA2; (+) strand; PAM type: YTN; PAM sequence: TTG
ggtttccagtgtccaataat

SEQ ID NO: 371992 - DNA, 20 bp, Artificial Sequence
  Description of Artificial Sequence: Synthetic oligonucleotide
  Target: LAMA2; (+) strand; PAM type: YTN; PAM sequence: TTT
ccagtgtccaataatattat

SEQ ID NO: 371993 - DNA, 20 bp, Artificial Sequence
  Description of Artificial Sequence: Synthetic oligonucleotide
  Target: LAMA2; (+) strand; PAM type: YTN; PAM sequence: TTC
cagtgtccaataatattatt

SEQ ID NO: 371994 - DNA, 20 bp, Artificial Sequence
  Description of Artificial Sequence: Synthetic oligonucleotide
  Target: LAMA2; (+) strand; PAM type: YTN; PAM sequence: TTA
tttcctaaaagatgtatatt

SEQ ID NO: 371995 - DNA, 20 bp, Artificial Sequence
  Description of Artificial Sequence: Synthetic oligonucleotide
  Target: LAMA2; (+) strand; PAM type: YTN; PAM sequence: TTT
cctaaaagatgtatattcta

SEQ ID NO: 371996 - DNA, 20 bp, Artificial Sequence
  Description of Artificial Sequence: Synthetic oligonucleotide
  Target: LAMA2; (+) strand; PAM type: YTN; PAM sequence: TTC
ctaaaagatgtatattctaa

SEQ ID NO: 371997 - DNA, 20 bp, Artificial Sequence
  Description of Artificial Sequence: Synthetic oligonucleotide
  Target: LAMA2; (+) strand; PAM type: YTN; PAM sequence: CTA
aaagatgtatattctaattt

SEQ ID NO: 371998 - DNA, 20 bp, Artificial Sequence
  Description of Artificial Sequence: Synthetic oligonucleotide
  Target: LAMA2; (+) strand; PAM type: YTN; PAM sequence: TTC
taatttggtataattacgtt

SEQ ID NO: 371999 - DNA, 20 bp, Artificial Sequence
  Description of Artificial Sequence: Synthetic oligonucleotide
  Target: LAMA2; (+) strand; PAM type: YTN; PAM sequence: CTA
atttggtataattacgttga

SEQ ID NO: 372000 - DNA, 20 bp, Artificial Sequence
  Description of Artificial Sequence: Synthetic oligonucleotide
  Target: LAMA2; (+) strand; PAM type: YTN; PAM sequence: TTT
ggtataattacgttgatcct

SEQ ID NO: 372001 - DNA, 20 bp, Artificial Sequence
  Description of Artificial Sequence: Synthetic oligonucleotide
  Target: LAMA2; (+) strand; PAM type: YTN; PAM sequence: TTG
gtataattacgttgatcctg

SEQ ID NO: 372002 - DNA, 20 bp, Artificial Sequence
  Description of Artificial Sequence: Synthetic oligonucleotide
  Target: LAMA2; (+) strand; PAM type: YTN; PAM sequence: TTA
cgttgatcctgatttttaaa

SEQ ID NO: 372003 - DNA, 20 bp, Artificial Sequence
  Description of Artificial Sequence: Synthetic oligonucleotide
  Target: LAMA2; (+) strand; PAM type: YTN; PAM sequence: TTG
atcctgatttttaaaaatgc

SEQ ID NO: 372004 - DNA, 20 bp, Artificial Sequence
  Description of Artificial Sequence: Synthetic oligonucleotide
  Target: LAMA2; (+) strand; PAM type: YTN; PAM sequence: CTG
atttttaaaaatgcatataa

SEQ ID NO: 372005 - DNA, 20 bp, Artificial Sequence
  Description of Artificial Sequence: Synthetic oligonucleotide
  Target: LAMA2; (+) strand; PAM type: YTN; PAM sequence: TTT
ttaaaaatgcatataacaca

SEQ ID NO: 372006 - DNA, 20 bp, Artificial Sequence
  Description of Artificial Sequence: Synthetic oligonucleotide
  Target: LAMA2; (+) strand; PAM type: YTN; PAM sequence: TTT
taaaaatgcatataacacag

SEQ ID NO: 372007 - DNA, 20 bp, Artificial Sequence
  Description of Artificial Sequence: Synthetic oligonucleotide
  Target: LAMA2; (+) strand; PAM type: YTN; PAM sequence: TTT
aaaaatgcatataacacagt

SEQ ID NO: 372008 - DNA, 20 bp, Artificial Sequence
  Description of Artificial Sequence: Synthetic oligonucleotide
  Target: LAMA2; (+) strand; PAM type: YTN; PAM sequence: TTA
aaaatgcatataacacagtg

SEQ ID NO: 372009 - DNA, 20 bp, Artificial Sequence
  Description of Artificial Sequence: Synthetic oligonucleotide
  Target: LAMA2; (+) strand; PAM type: YTN; PAM sequence: TTT
aatgattctttcattttcaa

SEQ ID NO: 372010 - DNA, 20 bp, Artificial Sequence
  Description of Artificial Sequence: Synthetic oligonucleotide
  Target: LAMA2; (+) strand; PAM type: YTN; PAM sequence: TTA
atgattctttcattttcaaa

SEQ ID NO: 372011 - DNA, 20 bp, Artificial Sequence
  Description of Artificial Sequence: Synthetic oligonucleotide
  Target: LAMA2; (+) strand; PAM type: YTN; PAM sequence: TTC
tttcattttcaaaatgtttt

SEQ ID NO: 372012 - DNA, 20 bp, Artificial Sequence
  Description of Artificial Sequence: Synthetic oligonucleotide
  Target: LAMA2; (+) strand; PAM type: YTN; PAM sequence: CTT
tcattttcaaaatgttttca

SEQ ID NO: 372013 - DNA, 20 bp, Artificial Sequence
  Description of Artificial Sequence: Synthetic oligonucleotide
  Target: LAMA2; (+) strand; PAM type: YTN; PAM sequence: TTT
cattttcaaaatgttttcac

SEQ ID NO: 372014 - DNA, 20 bp, Artificial Sequence
  Description of Artificial Sequence: Synthetic oligonucleotide
  Target: LAMA2; (+) strand; PAM type: YTN; PAM sequence: TTC
attttcaaaatgttttcact

SEQ ID NO: 372015 - DNA, 20 bp, Artificial Sequence
  Description of Artificial Sequence: Synthetic oligonucleotide
  Target: LAMA2; (+) strand; PAM type: YTN; PAM sequence: TTT
tcaaaatgttttcacttaga

SEQ ID NO: 372016 - DNA, 20 bp, Artificial Sequence
  Description of Artificial Sequence: Synthetic oligonucleotide
  Target: LAMA2; (+) strand; PAM type: YTN; PAM sequence: TTT
caaaatgttttcacttagag

SEQ ID NO: 372017 - DNA, 20 bp, Artificial Sequence
  Description of Artificial Sequence: Synthetic oligonucleotide
  Target: LAMA2; (+) strand; PAM type: YTN; PAM sequence: TTC
aaaatgttttcacttagagt

SEQ ID NO: 372018 - DNA, 20 bp, Artificial Sequence
  Description of Artificial Sequence: Synthetic oligonucleotide
  Target: LAMA2; (+) strand; PAM type: YTN; PAM sequence: TTT
tcacttagagtaagcaatta

SEQ ID NO: 372019 - DNA, 20 bp, Artificial Sequence
  Description of Artificial Sequence: Synthetic oligonucleotide
  Target: LAMA2; (+) strand; PAM type: YTN; PAM sequence: TTT
cacttagagtaagcaattaa

SEQ ID NO: 372020 - DNA, 20 bp, Artificial Sequence
  Description of Artificial Sequence: Synthetic oligonucleotide
  Target: LAMA2; (+) strand; PAM type: YTN; PAM sequence: TTC
acttagagtaagcaattaat

SEQ ID NO: 372021 - DNA, 20 bp, Artificial Sequence
  Description of Artificial Sequence: Synthetic oligonucleotide
  Target: LAMA2; (+) strand; PAM type: YTN; PAM sequence: CTT
agagtaagcaattaataatt

SEQ ID NO: 372022 - DNA, 20 bp, Artificial Sequence
  Description of Artificial Sequence: Synthetic oligonucleotide
  Target: LAMA2; (+) strand; PAM type: YTN; PAM sequence: TTA
gagtaagcaattaataatta

SEQ ID NO: 372023 - DNA, 20 bp, Artificial Sequence
  Description of Artificial Sequence: Synthetic oligonucleotide
  Target: LAMA2; (+) strand; PAM type: YTN; PAM sequence: TTA
ataattattagtaaatatta

SEQ ID NO: 372024 - DNA, 20 bp, Artificial Sequence
  Description of Artificial Sequence: Synthetic oligonucleotide
  Target: LAMA2; (+) strand; PAM type: YTN; PAM sequence: TTA
ttagtaaatattaataatta

SEQ ID NO: 372025 - DNA, 20 bp, Artificial Sequence
  Description of Artificial Sequence: Synthetic oligonucleotide
  Target: LAMA2; (+) strand; PAM type: YTN; PAM sequence: TTA
gtaaatattaataattacca

SEQ ID NO: 372026 - DNA, 20 bp, Artificial Sequence
  Description of Artificial Sequence: Synthetic oligonucleotide
  Target: LAMA2; (+) strand; PAM type: YTN; PAM sequence: TTA
ataattaccaaattatcaaa

SEQ ID NO: 372027 - DNA, 20 bp, Artificial Sequence
  Description of Artificial Sequence: Synthetic oligonucleotide
  Target: LAMA2; (+) strand; PAM type: YTN; PAM sequence: TTA
ccaaattatcaaatattaat

SEQ ID NO: 372028 - DNA, 20 bp, Artificial Sequence
  Description of Artificial Sequence: Synthetic oligonucleotide
  Target: LAMA2; (+) strand; PAM type: YTN; PAM sequence: TTA
tcaaatattaatataaaata

SEQ ID NO: 372029 - DNA, 20 bp, Artificial Sequence
  Description of Artificial Sequence: Synthetic oligonucleotide
  Target: LAMA2; (+) strand; PAM type: YTN; PAM sequence: TTA
atataaaatattaaaattag

SEQ ID NO: 372030 - DNA, 20 bp, Artificial Sequence
  Description of Artificial Sequence: Synthetic oligonucleotide
  Target: LAMA2; (+) strand; PAM type: YTN; PAM sequence: TTA
aaattagcaaattactaaat

SEQ ID NO: 372031 - DNA, 20 bp, Artificial Sequence
  Description of Artificial Sequence: Synthetic oligonucleotide
  Target: LAMA2; (+) strand; PAM type: YTN; PAM sequence: TTA
gcaaattactaaataataat

SEQ ID NO: 372032 - DNA, 20 bp, Artificial Sequence
  Description of Artificial Sequence: Synthetic oligonucleotide
  Target: LAMA2; (+) strand; PAM type: YTN; PAM sequence: TTA
ctaaataataattttacttc

SEQ ID NO: 372033 - DNA, 20 bp, Artificial Sequence
  Description of Artificial Sequence: Synthetic oligonucleotide
  Target: LAMA2; (+) strand; PAM type: YTN; PAM sequence: CTA
aataataattttacttctag

SEQ ID NO: 372034 - DNA, 20 bp, Artificial Sequence
  Description of Artificial Sequence: Synthetic oligonucleotide
  Target: LAMA2; (+) strand; PAM type: YTN; PAM sequence: TTT
tacttctagcagtagaattg

SEQ ID NO: 372035 - DNA, 20 bp, Artificial Sequence
  Description of Artificial Sequence: Synthetic oligonucleotide
  Target: LAMA2; (+) strand; PAM type: YTN; PAM sequence: TTT
acttctagcagtagaattgg

SEQ ID NO: 372036 - DNA, 20 bp, Artificial Sequence
  Description of Artificial Sequence: Synthetic oligonucleotide
  Target: LAMA2; (+) strand; PAM type: YTN; PAM sequence: TTA
cttctagcagtagaattggg

SEQ ID NO: 372037 - DNA, 20 bp, Artificial Sequence
  Description of Artificial Sequence: Synthetic oligonucleotide
  Target: LAMA2; (+) strand; PAM type: YTN; PAM sequence: CTT
ctagcagtagaattgggact

SEQ ID NO: 372038 - DNA, 20 bp, Artificial Sequence
  Description of Artificial Sequence: Synthetic oligonucleotide
  Target: LAMA2; (+) strand; PAM type: YTN; PAM sequence: TTC
tagcagtagaattgggacta

SEQ ID NO: 372039 - DNA, 20 bp, Artificial Sequence
  Description of Artificial Sequence: Synthetic oligonucleotide
  Target: LAMA2; (+) strand; PAM type: YTN; PAM sequence: CTA
gcagtagaattgggactaga

SEQ ID NO: 372040 - DNA, 20 bp, Artificial Sequence
  Description of Artificial Sequence: Synthetic oligonucleotide
  Target: LAMA2; (+) strand; PAM type: YTN; PAM sequence: TTG
ggactagaatagcaatttat

SEQ ID NO: 372041 - DNA, 20 bp, Artificial Sequence
  Description of Artificial Sequence: Synthetic oligonucleotide
  Target: LAMA2; (+) strand; PAM type: YTN; PAM sequence: CTA
gaatagcaatttattttaaa

SEQ ID NO: 372042 - DNA, 20 bp, Artificial Sequence
  Description of Artificial Sequence: Synthetic oligonucleotide
  Target: LAMA2; (+) strand; PAM type: YTN; PAM sequence: TTT
attttaaattccagctttca

SEQ ID NO: 372043 - DNA, 20 bp, Artificial Sequence
  Description of Artificial Sequence: Synthetic oligonucleotide
  Target: LAMA2; (+) strand; PAM type: YTN; PAM sequence: TTA
ttttaaattccagctttcaa

SEQ ID NO: 372044 - DNA, 20 bp, Artificial Sequence
  Description of Artificial Sequence: Synthetic oligonucleotide
  Target: LAMA2; (+) strand; PAM type: YTN; PAM sequence: TTT
taaattccagctttcaatgt

SEQ ID NO: 372045 - DNA, 20 bp, Artificial Sequence
  Description of Artificial Sequence: Synthetic oligonucleotide
  Target: LAMA2; (+) strand; PAM type: YTN; PAM sequence: TTT
aaattccagctttcaatgtg

SEQ ID NO: 372046 - DNA, 20 bp, Artificial Sequence
  Description of Artificial Sequence: Synthetic oligonucleotide
  Target: LAMA2; (+) strand; PAM type: YTN; PAM sequence: TTA
aattccagctttcaatgtgg

SEQ ID NO: 372047 - DNA, 20 bp, Artificial Sequence
  Description of Artificial Sequence: Synthetic oligonucleotide
  Target: LAMA2; (+) strand; PAM type: YTN; PAM sequence: TTC
cagctttcaatgtggtattt

SEQ ID NO: 372048 - DNA, 20 bp, Artificial Sequence
  Description of Artificial Sequence: Synthetic oligonucleotide
  Target: LAMA2; (+) strand; PAM type: YTN; PAM sequence: CTT
tcaatgtggtattttaacaa

SEQ ID NO: 372049 - DNA, 20 bp, Artificial Sequence
  Description of Artificial Sequence: Synthetic oligonucleotide
  Target: LAMA2; (+) strand; PAM type: YTN; PAM sequence: TTT
caatgtggtattttaacaag

SEQ ID NO: 372050 - DNA, 20 bp, Artificial Sequence
  Description of Artificial Sequence: Synthetic oligonucleotide
  Target: LAMA2; (+) strand; PAM type: YTN; PAM sequence: TTC
aatgtggtattttaacaagt

SEQ ID NO: 372051 - DNA, 20 bp, Artificial Sequence
  Description of Artificial Sequence: Synthetic oligonucleotide
  Target: LAMA2; (+) strand; PAM type: YTN; PAM sequence: TTT
taacaagtagaaagagaggg

SEQ ID NO: 372052 - DNA, 20 bp, Artificial Sequence
  Description of Artificial Sequence: Synthetic oligonucleotide
  Target: LAMA2; (+) strand; PAM type: YTN; PAM sequence: TTT
aacaagtagaaagagagggc

SEQ ID NO: 372053 - DNA, 20 bp, Artificial Sequence
  Description of Artificial Sequence: Synthetic oligonucleotide
  Target: LAMA2; (+) strand; PAM type: YTN; PAM sequence: TTA
acaagtagaaagagagggca

SEQ ID NO: 372054 - DNA, 20 bp, Artificial Sequence
  Description of Artificial Sequence: Synthetic oligonucleotide
  Target: LAMA2; (+) strand; PAM type: YTN; PAM sequence: TTC
acttagtttataaatcctag

SEQ ID NO: 372055 - DNA, 20 bp, Artificial Sequence
  Description of Artificial Sequence: Synthetic oligonucleotide
  Target: LAMA2; (+) strand; PAM type: YTN; PAM sequence: CTT
agtttataaatcctagaagt

SEQ ID NO: 372056 - DNA, 20 bp, Artificial Sequence
  Description of Artificial Sequence: Synthetic oligonucleotide
  Target: LAMA2; (+) strand; PAM type: YTN; PAM sequence: TTA
gtttataaatcctagaagtt

SEQ ID NO: 372057 - DNA, 20 bp, Artificial Sequence
  Description of Artificial Sequence: Synthetic oligonucleotide
  Target: LAMA2; (+) strand; PAM type: YTN; PAM sequence: TTT
ataaatcctagaagttttgt

SEQ ID NO: 372058 - DNA, 20 bp, Artificial Sequence
  Description of Artificial Sequence: Synthetic oligonucleotide
  Target: LAMA2; (+) strand; PAM type: YTN; PAM sequence: TTA
taaatcctagaagttttgtg

SEQ ID NO: 372059 - DNA, 20 bp, Artificial Sequence
  Description of Artificial Sequence: Synthetic oligonucleotide
  Target: LAMA2; (+) strand; PAM type: YTN; PAM sequence: CTA
gaagttttgtgagagggtta

SEQ ID NO: 372060 - DNA, 20 bp, Artificial Sequence
  Description of Artificial Sequence: Synthetic oligonucleotide
  Target: LAMA2; (+) strand; PAM type: YTN; PAM sequence: TTT
tgtgagagggttataatgtc

SEQ ID NO: 372061 - DNA, 20 bp, Artificial Sequence
  Description of Artificial Sequence: Synthetic oligonucleotide
  Target: LAMA2; (+) strand; PAM type: YTN; PAM sequence: TTT
gtgagagggttataatgtct

SEQ ID NO: 372062 - DNA, 20 bp, Artificial Sequence
  Description of Artificial Sequence: Synthetic oligonucleotide
  Target: LAMA2; (+) strand; PAM type: YTN; PAM sequence: TTG
tgagagggttataatgtctt

SEQ ID NO: 372063 - DNA, 20 bp, Artificial Sequence
  Description of Artificial Sequence: Synthetic oligonucleotide
  Target: LAMA2; (+) strand; PAM type: YTN; PAM sequence: TTA
taatgtcttttacatttaaa

SEQ ID NO: 372064 - DNA, 20 bp, Artificial Sequence
  Description of Artificial Sequence: Synthetic oligonucleotide
  Target: LAMA2; (+) strand; PAM type: YTN; PAM sequence: CTT
ttacatttaaaacaatttta

SEQ ID NO: 372065 - DNA, 20 bp, Artificial Sequence
  Description of Artificial Sequence: Synthetic oligonucleotide
  Target: LAMA2; (+) strand; PAM type: YTN; PAM sequence: TTT
tacatttaaaacaattttac

SEQ ID NO: 372066 - DNA, 20 bp, Artificial Sequence
  Description of Artificial Sequence: Synthetic oligonucleotide
  Target: LAMA2; (+) strand; PAM type: YTN; PAM sequence: TTT
acatttaaaacaattttaca

SEQ ID NO: 372067 - DNA, 20 bp, Artificial Sequence
  Description of Artificial Sequence: Synthetic oligonucleotide
  Target: LAMA2; (+) strand; PAM type: YTN; PAM sequence: TTA
catttaaaacaattttacat

SEQ ID NO: 372068 - DNA, 20 bp, Artificial Sequence
  Description of Artificial Sequence: Synthetic oligonucleotide
  Target: LAMA2; (+) strand; PAM type: YTN; PAM sequence: TTT
aaaacaattttacatttaaa

SEQ ID NO: 372069 - DNA, 20 bp, Artificial Sequence
  Description of Artificial Sequence: Synthetic oligonucleotide
  Target: LAMA2; (+) strand; PAM type: YTN; PAM sequence: TTA
aaacaattttacatttaaaa

SEQ ID NO: 372070 - DNA, 20 bp, Artificial Sequence
  Description of Artificial Sequence: Synthetic oligonucleotide
  Target: LAMA2; (+) strand; PAM type: YTN; PAM sequence: TTT
tacatttaaaacaattttac

SEQ ID NO: 372071 - DNA, 20 bp, Artificial Sequence
  Description of Artificial Sequence: Synthetic oligonucleotide
  Target: LAMA2; (+) strand; PAM type: YTN; PAM sequence: TTT
acatttaaaacaattttaca

SEQ ID NO: 372072 - DNA, 20 bp, Artificial Sequence
  Description of Artificial Sequence: Synthetic oligonucleotide
  Target: LAMA2; (+) strand; PAM type: YTN; PAM sequence: TTA
catttaaaacaattttacat

SEQ ID NO: 372073 - DNA, 20 bp, Artificial Sequence
  Description of Artificial Sequence: Synthetic oligonucleotide
  Target: LAMA2; (+) strand; PAM type: YTN; PAM sequence: TTT
aaaacaattttacatttaaa

SEQ ID NO: 372074 - DNA, 20 bp, Artificial Sequence
  Description of Artificial Sequence: Synthetic oligonucleotide
  Target: LAMA2; (+) strand; PAM type: YTN; PAM sequence: TTA
aaacaattttacatttaaaa

SEQ ID NO: 372075 - DNA, 20 bp, Artificial Sequence
  Description of Artificial Sequence: Synthetic oligonucleotide
  Target: LAMA2; (+) strand; PAM type: YTN; PAM sequence: TTT
tacatttaaaacaactagaa

SEQ ID NO: 372076 - DNA, 20 bp, Artificial Sequence
  Description of Artificial Sequence: Synthetic oligonucleotide
  Target: LAMA2; (+) strand; PAM type: YTN; PAM sequence: TTT
acatttaaaacaactagaaa

SEQ ID NO: 372077 - DNA, 20 bp, Artificial Sequence
  Description of Artificial Sequence: Synthetic oligonucleotide
  Target: LAMA2; (+) strand; PAM type: YTN; PAM sequence: TTA
catttaaaacaactagaaaa

SEQ ID NO: 372078 - DNA, 20 bp, Artificial Sequence
  Description of Artificial Sequence: Synthetic oligonucleotide
  Target: LAMA2; (+) strand; PAM type: YTN; PAM sequence: TTT
aaaacaactagaaaattatc

SEQ ID NO: 372079 - DNA, 20 bp, Artificial Sequence
  Description of Artificial Sequence: Synthetic oligonucleotide
  Target: LAMA2; (+) strand; PAM type: YTN; PAM sequence: TTA
aaacaactagaaaattatca

SEQ ID NO: 372080 - DNA, 20 bp, Artificial Sequence
  Description of Artificial Sequence: Synthetic oligonucleotide
  Target: LAMA2; (+) strand; PAM type: YTN; PAM sequence: CTA
gaaaattatcatggtttagt

SEQ ID NO: 372081 - DNA, 20 bp, Artificial Sequence
  Description of Artificial Sequence: Synthetic oligonucleotide
  Target: LAMA2; (+) strand; PAM type: YTN; PAM sequence: TTA
tcatggtttagttgcacaac

SEQ ID NO: 372082 - DNA, 20 bp, Artificial Sequence
  Description of Artificial Sequence: Synthetic oligonucleotide
  Target: LAMA2; (+) strand; PAM type: YTN; PAM sequence: TTT
agttgcacaactgtgatgag

SEQ ID NO: 372083 - DNA, 20 bp, Artificial Sequence
  Description of Artificial Sequence: Synthetic oligonucleotide
  Target: LAMA2; (+) strand; PAM type: YTN; PAM sequence: TTA
gttgcacaactgtgatgaga

SEQ ID NO: 372084 - DNA, 20 bp, Artificial Sequence
  Description of Artificial Sequence: Synthetic oligonucleotide
  Target: LAMA2; (+) strand; PAM type: YTN; PAM sequence: TTG
cacaactgtgatgagaaaaa

SEQ ID NO: 372085 - DNA, 20 bp, Artificial Sequence
  Description of Artificial Sequence: Synthetic oligonucleotide
  Target: LAMA2; (+) strand; PAM type: YTN; PAM sequence: CTG
tgatgagaaaaatccatttt

SEQ ID NO: 372086 - DNA, 20 bp, Artificial Sequence
  Description of Artificial Sequence: Synthetic oligonucleotide
  Target: LAMA2; (+) strand; PAM type: YTN; PAM sequence: TTT
tcatctaacaacctgaaatg

SEQ ID NO: 372087 - DNA, 20 bp, Artificial Sequence
  Description of Artificial Sequence: Synthetic oligonucleotide
  Target: LAMA2; (+) strand; PAM type: YTN; PAM sequence: TTT
catctaacaacctgaaatgt

SEQ ID NO: 372088 - DNA, 20 bp, Artificial Sequence
  Description of Artificial Sequence: Synthetic oligonucleotide
  Target: LAMA2; (+) strand; PAM type: YTN; PAM sequence: TTC
atctaacaacctgaaatgtt

SEQ ID NO: 372089 - DNA, 20 bp, Artificial Sequence
  Description of Artificial Sequence: Synthetic oligonucleotide
  Target: LAMA2; (+) strand; PAM type: YTN; PAM sequence: CTA
acaacctgaaatgtttaaaa

SEQ ID NO: 372090 - DNA, 20 bp, Artificial Sequence
  Description of Artificial Sequence: Synthetic oligonucleotide
  Target: LAMA2; (+) strand; PAM type: YTN; PAM sequence: CTG
aaatgtttaaaaaaaaaatc

SEQ ID NO: 372091 - DNA, 20 bp, Artificial Sequence
  Description of Artificial Sequence: Synthetic oligonucleotide
  Target: LAMA2; (+) strand; PAM type: YTN; PAM sequence: TTT
aaaaaaaaaatcactaaaca

SEQ ID NO: 372092 - DNA, 20 bp, Artificial Sequence
  Description of Artificial Sequence: Synthetic oligonucleotide
  Target: LAMA2; (+) strand; PAM type: YTN; PAM sequence: TTA
aaaaaaaaatcactaaacaa

SEQ ID NO: 372093 - DNA, 20 bp, Artificial Sequence
  Description of Artificial Sequence: Synthetic oligonucleotide
  Target: LAMA2; (+) strand; PAM type: YTN; PAM sequence: CTA
aacaagacacttaatgacct

SEQ ID NO: 372094 - DNA, 20 bp, Artificial Sequence
  Description of Artificial Sequence: Synthetic oligonucleotide
  Target: LAMA2; (+) strand; PAM type: YTN; PAM sequence: CTT
aatgacctagggaaactatc

SEQ ID NO: 372095 - DNA, 20 bp, Artificial Sequence
  Description of Artificial Sequence: Synthetic oligonucleotide
  Target: LAMA2; (+) strand; PAM type: YTN; PAM sequence: TTA
atgacctagggaaactatcc

SEQ ID NO: 372096 - DNA, 20 bp, Artificial Sequence
  Description of Artificial Sequence: Synthetic oligonucleotide
  Target: LAMA2; (+) strand; PAM type: YTN; PAM sequence: CTA
gggaaactatcctttttaaa

SEQ ID NO: 372097 - DNA, 20 bp, Artificial Sequence
  Description of Artificial Sequence: Synthetic oligonucleotide
  Target: LAMA2; (+) strand; PAM type: YTN; PAM sequence: CTA
tcctttttaaaaatatttta

SEQ ID NO: 372098 - DNA, 20 bp, Artificial Sequence
  Description of Artificial Sequence: Synthetic oligonucleotide
  Target: LAMA2; (+) strand; PAM type: YTN; PAM sequence: CTT
tttaaaaatattttataaaa

SEQ ID NO: 372099 - DNA, 20 bp, Artificial Sequence
  Description of Artificial Sequence: Synthetic oligonucleotide
  Target: LAMA2; (+) strand; PAM type: YTN; PAM sequence: TTT
ttaaaaatattttataaaaa

SEQ ID NO: 372100 - DNA, 20 bp, Artificial Sequence
  Description of Artificial Sequence: Synthetic oligonucleotide
  Target: LAMA2; (+) strand; PAM type: YTN; PAM sequence: TTT
taaaaatattttataaaaaa

SEQ ID NO: 372101 - DNA, 20 bp, Artificial Sequence
  Description of Artificial Sequence: Synthetic oligonucleotide
  Target: LAMA2; (+) strand; PAM type: YTN; PAM sequence: TTT
aaaaatattttataaaaaac

SEQ ID NO: 372102 - DNA, 20 bp, Artificial Sequence
  Description of Artificial Sequence: Synthetic oligonucleotide
  Target: LAMA2; (+) strand; PAM type: YTN; PAM sequence: TTA
aaaatattttataaaaaaca

SEQ ID NO: 372103 - DNA, 20 bp, Artificial Sequence
  Description of Artificial Sequence: Synthetic oligonucleotide
  Target: LAMA2; (+) strand; PAM type: YTN; PAM sequence: TTT
tataaaaaacattactgtta

SEQ ID NO: 372104 - DNA, 20 bp, Artificial Sequence
  Description of Artificial Sequence: Synthetic oligonucleotide
  Target: LAMA2; (+) strand; PAM type: YTN; PAM sequence: TTT
ataaaaaacattactgttat

SEQ ID NO: 372105 - DNA, 20 bp, Artificial Sequence
  Description of Artificial Sequence: Synthetic oligonucleotide
  Target: LAMA2; (+) strand; PAM type: YTN; PAM sequence: TTA
taaaaaacattactgttata

SEQ ID NO: 372106 - DNA, 20 bp, Artificial Sequence
  Description of Artificial Sequence: Synthetic oligonucleotide
  Target: LAMA2; (+) strand; PAM type: YTN; PAM sequence: TTA
ctgttataatgtgagctaga

SEQ ID NO: 372107 - DNA, 20 bp, Artificial Sequence
  Description of Artificial Sequence: Synthetic oligonucleotide
  Target: LAMA2; (+) strand; PAM type: YTN; PAM sequence: CTG
ttataatgtgagctagaaac

SEQ ID NO: 372108 - DNA, 20 bp, Artificial Sequence
  Description of Artificial Sequence: Synthetic oligonucleotide
  Target: LAMA2; (+) strand; PAM type: YTN; PAM sequence: TTA
taatgtgagctagaaactct

SEQ ID NO: 372109 - DNA, 20 bp, Artificial Sequence
  Description of Artificial Sequence: Synthetic oligonucleotide
  Target: LAMA2; (+) strand; PAM type: YTN; PAM sequence: CTA
gaaactctgagatatgaatt

SEQ ID NO: 372110 - DNA, 20 bp, Artificial Sequence
  Description of Artificial Sequence: Synthetic oligonucleotide
  Target: LAMA2; (+) strand; PAM type: YTN; PAM sequence: CTC
tgagatatgaattgaatatt

SEQ ID NO: 372111 - DNA, 20 bp, Artificial Sequence
  Description of Artificial Sequence: Synthetic oligonucleotide
  Target: LAMA2; (+) strand; PAM type: YTN; PAM sequence: CTG
agatatgaattgaatatttg

SEQ ID NO: 372112 - DNA, 20 bp, Artificial Sequence
  Description of Artificial Sequence: Synthetic oligonucleotide
  Target: LAMA2; (+) strand; PAM type: YTN; PAM sequence: TTG
aatatttgcatacaatcctg

SEQ ID NO: 372113 - DNA, 20 bp, Artificial Sequence
  Description of Artificial Sequence: Synthetic oligonucleotide
  Target: LAMA2; (+) strand; PAM type: YTN; PAM sequence: TTT
gcatacaatcctgaagacga

SEQ ID NO: 372114 - DNA, 20 bp, Artificial Sequence
  Description of Artificial Sequence: Synthetic oligonucleotide
  Target: LAMA2; (+) strand; PAM type: YTN; PAM sequence: TTG
catacaatcctgaagacgag

SEQ ID NO: 372115 - DNA, 20 bp, Artificial Sequence
  Description of Artificial Sequence: Synthetic oligonucleotide
  Target: LAMA2; (+) strand; PAM type: YTN; PAM sequence: CTG
aagacgagattttaatttcc

SEQ ID NO: 372116 - DNA, 20 bp, Artificial Sequence
  Description of Artificial Sequence: Synthetic oligonucleotide
  Target: LAMA2; (+) strand; PAM type: YTN; PAM sequence: TTT
taatttccacaggttattca

SEQ ID NO: 372117 - DNA, 20 bp, Artificial Sequence
  Description of Artificial Sequence: Synthetic oligonucleotide
  Target: LAMA2; (+) strand; PAM type: YTN; PAM sequence: TTT
aatttccacaggttattcag

SEQ ID NO: 372118 - DNA, 20 bp, Artificial Sequence
  Description of Artificial Sequence: Synthetic oligonucleotide
  Target: LAMA2; (+) strand; PAM type: YTN; PAM sequence: TTA
atttccacaggttattcaga

SEQ ID NO: 372119 - DNA, 20 bp, Artificial Sequence
  Description of Artificial Sequence: Synthetic oligonucleotide
  Target: LAMA2; (+) strand; PAM type: YTN; PAM sequence: TTT
ccacaggttattcagagaaa

SEQ ID NO: 372120 - DNA, 20 bp, Artificial Sequence
  Description of Artificial Sequence: Synthetic oligonucleotide
  Target: LAMA2; (+) strand; PAM type: YTN; PAM sequence: TTC
cacaggttattcagagaaaa

SEQ ID NO: 372121 - DNA, 20 bp, Artificial Sequence
  Description of Artificial Sequence: Synthetic oligonucleotide
  Target: LAMA2; (+) strand; PAM type: YTN; PAM sequence: TTA
ttcagagaaaaaaaaaaagg

SEQ ID NO: 372122 - DNA, 20 bp, Artificial Sequence
  Description of Artificial Sequence: Synthetic oligonucleotide
  Target: LAMA2; (+) strand; PAM type: YTN; PAM sequence: TTC
agagaaaaaaaaaaagggag

SEQ ID NO: 372123 - DNA, 20 bp, Artificial Sequence
  Description of Artificial Sequence: Synthetic oligonucleotide
  Target: LAMA2; (+) strand; PAM type: YTN; PAM sequence: CTA
aaggttgacgcaaccttcat

SEQ ID NO: 372124 - DNA, 20 bp, Artificial Sequence
  Description of Artificial Sequence: Synthetic oligonucleotide
  Target: LAMA2; (+) strand; PAM type: YTN; PAM sequence: TTG
acgcaaccttcatgggaagt

SEQ ID NO: 372125 - DNA, 20 bp, Artificial Sequence
  Description of Artificial Sequence: Synthetic oligonucleotide
  Target: LAMA2; (+) strand; PAM type: YTN; PAM sequence: CTT
catgggaagtctaaagctta

SEQ ID NO: 372126 - DNA, 20 bp, Artificial Sequence
  Description of Artificial Sequence: Synthetic oligonucleotide
  Target: LAMA2; (+) strand; PAM type: YTN; PAM sequence: TTC
atgggaagtctaaagcttag

SEQ ID NO: 372127 - DNA, 20 bp, Artificial Sequence
  Description of Artificial Sequence: Synthetic oligonucleotide
  Target: LAMA2; (+) strand; PAM type: YTN; PAM sequence: CTA
aagcttagtgatagttttac

SEQ ID NO: 372128 - DNA, 20 bp, Artificial Sequence
  Description of Artificial Sequence: Synthetic oligonucleotide
  Target: LAMA2; (+) strand; PAM type: YTN; PAM sequence: CTT
agtgatagttttaccttggt

SEQ ID NO: 372129 - DNA, 20 bp, Artificial Sequence
  Description of Artificial Sequence: Synthetic oligonucleotide
  Target: LAMA2; (+) strand; PAM type: YTN; PAM sequence: TTA
gtgatagttttaccttggtg

SEQ ID NO: 372130 - DNA, 20 bp, Artificial Sequence
  Description of Artificial Sequence: Synthetic oligonucleotide
  Target: LAMA2; (+) strand; PAM type: YTN; PAM sequence: TTT
taccttggtgatttatctat

SEQ ID NO: 372131 - DNA, 20 bp, Artificial Sequence
  Description of Artificial Sequence: Synthetic oligonucleotide
  Target: LAMA2; (+) strand; PAM type: YTN; PAM sequence: TTT
accttggtgatttatctatt

SEQ ID NO: 372132 - DNA, 20 bp, Artificial Sequence
  Description of Artificial Sequence: Synthetic oligonucleotide
  Target: LAMA2; (+) strand; PAM type: YTN; PAM sequence: TTA
ccttggtgatttatctattt

SEQ ID NO: 372133 - DNA, 20 bp, Artificial Sequence
  Description of Artificial Sequence: Synthetic oligonucleotide
  Target: LAMA2; (+) strand; PAM type: YTN; PAM sequence: CTT
ggtgatttatctatttaatc

SEQ ID NO: 372134 - DNA, 20 bp, Artificial Sequence
  Description of Artificial Sequence: Synthetic oligonucleotide
  Target: LAMA2; (+) strand; PAM type: YTN; PAM sequence: TTG
gtgatttatctatttaatcc

SEQ ID NO: 372135 - DNA, 20 bp, Artificial Sequence
  Description of Artificial Sequence: Synthetic oligonucleotide
  Target: LAMA2; (+) strand; PAM type: YTN; PAM sequence: TTT
atctatttaatccctggtca

SEQ ID NO: 372136 - DNA, 20 bp, Artificial Sequence
  Description of Artificial Sequence: Synthetic oligonucleotide
  Target: LAMA2; (+) strand; PAM type: YTN; PAM sequence: TTA
tctatttaatccctggtcat

SEQ ID NO: 372137 - DNA, 20 bp, Artificial Sequence
  Description of Artificial Sequence: Synthetic oligonucleotide
  Target: LAMA2; (+) strand; PAM type: YTN; PAM sequence: CTA
tttaatccctggtcataaat

SEQ ID NO: 372138 - DNA, 20 bp, Artificial Sequence
  Description of Artificial Sequence: Synthetic oligonucleotide
  Target: LAMA2; (+) strand; PAM type: YTN; PAM sequence: TTT
aatccctggtcataaatctt

SEQ ID NO: 372139 - DNA, 20 bp, Artificial Sequence
  Description of Artificial Sequence: Synthetic oligonucleotide
  Target: LAMA2; (+) strand; PAM type: YTN; PAM sequence: TTA
atccctggtcataaatctta

SEQ ID NO: 372140 - DNA, 20 bp, Artificial Sequence
  Description of Artificial Sequence: Synthetic oligonucleotide
  Target: LAMA2; (+) strand; PAM type: YTN; PAM sequence: CTG
gtcataaatcttatagatca

SEQ ID NO: 372141 - DNA, 20 bp, Artificial Sequence
  Description of Artificial Sequence: Synthetic oligonucleotide
  Target: LAMA2; (+) strand; PAM type: YTN; PAM sequence: CTT
atagatcacaagcattttgg

SEQ ID NO: 372142 - DNA, 20 bp, Artificial Sequence
  Description of Artificial Sequence: Synthetic oligonucleotide
  Target: LAMA2; (+) strand; PAM type: YTN; PAM sequence: TTA
tagatcacaagcattttggc

SEQ ID NO: 372143 - DNA, 20 bp, Artificial Sequence
  Description of Artificial Sequence: Synthetic oligonucleotide
  Target: LAMA2; (+) strand; PAM type: YTN; PAM sequence: TTT
tggctccaaatttcttagat

SEQ ID NO: 372144 - DNA, 20 bp, Artificial Sequence
  Description of Artificial Sequence: Synthetic oligonucleotide
  Target: LAMA2; (+) strand; PAM type: YTN; PAM sequence: TTT
ggctccaaatttcttagata

SEQ ID NO: 372145 - DNA, 20 bp, Artificial Sequence
  Description of Artificial Sequence: Synthetic oligonucleotide
  Target: LAMA2; (+) strand; PAM type: YTN; PAM sequence: TTG
gctccaaatttcttagataa

SEQ ID NO: 372146 - DNA, 20 bp, Artificial Sequence
  Description of Artificial Sequence: Synthetic oligonucleotide
  Target: LAMA2; (+) strand; PAM type: YTN; PAM sequence: CTC
caaatttcttagataatatt

SEQ ID NO: 372147 - DNA, 20 bp, Artificial Sequence
  Description of Artificial Sequence: Synthetic oligonucleotide
  Target: LAMA2; (+) strand; PAM type: YTN; PAM sequence: TTT
cttagataatattgctaaat

SEQ ID NO: 372148 - DNA, 20 bp, Artificial Sequence
  Description of Artificial Sequence: Synthetic oligonucleotide
  Target: LAMA2; (+) strand; PAM type: YTN; PAM sequence: TTC
ttagataatattgctaaata

SEQ ID NO: 372149 - DNA, 20 bp, Artificial Sequence
  Description of Artificial Sequence: Synthetic oligonucleotide
  Target: LAMA2; (+) strand; PAM type: YTN; PAM sequence: CTT
agataatattgctaaataaa

SEQ ID NO: 372150 - DNA, 20 bp, Artificial Sequence
  Description of Artificial Sequence: Synthetic oligonucleotide
  Target: LAMA2; (+) strand; PAM type: YTN; PAM sequence: TTA
gataatattgctaaataaat

SEQ ID NO: 372151 - DNA, 20 bp, Artificial Sequence
  Description of Artificial Sequence: Synthetic oligonucleotide
  Target: LAMA2; (+) strand; PAM type: YTN; PAM sequence: TTG
ctaaataaatcaaatatgta

SEQ ID NO: 372152 - DNA, 20 bp, Artificial Sequence
  Description of Artificial Sequence: Synthetic oligonucleotide
  Target: LAMA2; (+) strand; PAM type: YTN; PAM sequence: CTA
aataaatcaaatatgtaaga

SEQ ID NO: 372153 - DNA, 20 bp, Artificial Sequence
  Description of Artificial Sequence: Synthetic oligonucleotide
  Target: LAMA2; (+) strand; PAM type: YTN; PAM sequence: TTG
gtataattattatgatgtat

SEQ ID NO: 372154 - DNA, 20 bp, Artificial Sequence
  Description of Artificial Sequence: Synthetic oligonucleotide
  Target: LAMA2; (+) strand; PAM type: YTN; PAM sequence: TTA
ttatgatgtatgaatacaga

SEQ ID NO: 372155 - DNA, 20 bp, Artificial Sequence
  Description of Artificial Sequence: Synthetic oligonucleotide
  Target: LAMA2; (+) strand; PAM type: YTN; PAM sequence: TTA
tgatgtatgaatacagagaa

SEQ ID NO: 372156 - DNA, 20 bp, Artificial Sequence
  Description of Artificial Sequence: Synthetic oligonucleotide
  Target: LAMA2; (+) strand; PAM type: YTN; PAM sequence: TTT
aaattatacatatatatcaa

SEQ ID NO: 372157 - DNA, 20 bp, Artificial Sequence
  Description of Artificial Sequence: Synthetic oligonucleotide
  Target: LAMA2; (+) strand; PAM type: YTN; PAM sequence: TTA
aattatacatatatatcaac

SEQ ID NO: 372158 - DNA, 20 bp, Artificial Sequence
  Description of Artificial Sequence: Synthetic oligonucleotide
  Target: LAMA2; (+) strand; PAM type: YTN; PAM sequence: TTA
tacatatatatcaacttcat

SEQ ID NO: 372159 - DNA, 20 bp, Artificial Sequence
  Description of Artificial Sequence: Synthetic oligonucleotide
  Target: LAMA2; (+) strand; PAM type: YTN; PAM sequence: CTT
catcaactatttatggtgat

SEQ ID NO: 372160 - DNA, 20 bp, Artificial Sequence
  Description of Artificial Sequence: Synthetic oligonucleotide
  Target: LAMA2; (+) strand; PAM type: YTN; PAM sequence: TTC
atcaactatttatggtgatc

SEQ ID NO: 372161 - DNA, 20 bp, Artificial Sequence
  Description of Artificial Sequence: Synthetic oligonucleotide
  Target: LAMA2; (+) strand; PAM type: YTN; PAM sequence: CTA
tttatggtgatcactatgct

SEQ ID NO: 372162 - DNA, 20 bp, Artificial Sequence
  Description of Artificial Sequence: Synthetic oligonucleotide
  Target: LAMA2; (+) strand; PAM type: YTN; PAM sequence: TTT
atggtgatcactatgcttgg

SEQ ID NO: 372163 - DNA, 20 bp, Artificial Sequence
  Description of Artificial Sequence: Synthetic oligonucleotide
  Target: LAMA2; (+) strand; PAM type: YTN; PAM sequence: TTA
tggtgatcactatgcttggc

SEQ ID NO: 372164 - DNA, 20 bp, Artificial Sequence
  Description of Artificial Sequence: Synthetic oligonucleotide
  Target: LAMA2; (+) strand; PAM type: YTN; PAM sequence: CTA
tgcttggccttctcatcttg

SEQ ID NO: 372165 - DNA, 20 bp, Artificial Sequence
  Description of Artificial Sequence: Synthetic oligonucleotide
  Target: LAMA2; (+) strand; PAM type: YTN; PAM sequence: CTT
ggccttctcatcttgttgat

SEQ ID NO: 372166 - DNA, 20 bp, Artificial Sequence
  Description of Artificial Sequence: Synthetic oligonucleotide
  Target: LAMA2; (+) strand; PAM type: YTN; PAM sequence: TTG
gccttctcatcttgttgatg

SEQ ID NO: 372167 - DNA, 20 bp, Artificial Sequence
  Description of Artificial Sequence: Synthetic oligonucleotide
  Target: LAMA2; (+) strand; PAM type: YTN; PAM sequence: CTT
ctcatcttgttgatgtatat

SEQ ID NO: 372168 - DNA, 20 bp, Artificial Sequence
  Description of Artificial Sequence: Synthetic oligonucleotide
  Target: LAMA2; (+) strand; PAM type: YTN; PAM sequence: TTC
tcatcttgttgatgtatata

SEQ ID NO: 372169 - DNA, 20 bp, Artificial Sequence
  Description of Artificial Sequence: Synthetic oligonucleotide
  Target: LAMA2; (+) strand; PAM type: YTN; PAM sequence: CTC
atcttgttgatgtatatatt

SEQ ID NO: 372170 - DNA, 20 bp, Artificial Sequence
  Description of Artificial Sequence: Synthetic oligonucleotide
  Target: LAMA2; (+) strand; PAM type: YTN; PAM sequence: CTT
gttgatgtatatattctagc

SEQ ID NO: 372171 - DNA, 20 bp, Artificial Sequence
  Description of Artificial Sequence: Synthetic oligonucleotide
  Target: LAMA2; (+) strand; PAM type: YTN; PAM sequence: TTG
ttgatgtatatattctagct

SEQ ID NO: 372172 - DNA, 20 bp, Artificial Sequence
  Description of Artificial Sequence: Synthetic oligonucleotide
  Target: LAMA2; (+) strand; PAM type: YTN; PAM sequence: TTG
atgtatatattctagctata

SEQ ID NO: 372173 - DNA, 20 bp, Artificial Sequence
  Description of Artificial Sequence: Synthetic oligonucleotide
  Target: LAMA2; (+) strand; PAM type: YTN; PAM sequence: TTC
tagctataggttgtaactag

SEQ ID NO: 372174 - DNA, 20 bp, Artificial Sequence
  Description of Artificial Sequence: Synthetic oligonucleotide
  Target: LAMA2; (+) strand; PAM type: YTN; PAM sequence: CTA
gctataggttgtaactaggc

SEQ ID NO: 372175 - DNA, 20 bp, Artificial Sequence
  Description of Artificial Sequence: Synthetic oligonucleotide
  Target: LAMA2; (+) strand; PAM type: YTN; PAM sequence: CTA
taggttgtaactaggcagta

SEQ ID NO: 372176 - DNA, 20 bp, Artificial Sequence
  Description of Artificial Sequence: Synthetic oligonucleotide
  Target: LAMA2; (+) strand; PAM type: YTN; PAM sequence: TTG
taactaggcagtaaaagtta

SEQ ID NO: 372177 - DNA, 20 bp, Artificial Sequence
  Description of Artificial Sequence: Synthetic oligonucleotide
  Target: LAMA2; (+) strand; PAM type: YTN; PAM sequence: CTA
ggcagtaaaagttatctgga

SEQ ID NO: 372178 - DNA, 20 bp, Artificial Sequence
  Description of Artificial Sequence: Synthetic oligonucleotide
  Target: LAMA2; (+) strand; PAM type: YTN; PAM sequence: TTA
tctggagagaagcaaataac

SEQ ID NO: 372179 - DNA, 20 bp, Artificial Sequence
  Description of Artificial Sequence: Synthetic oligonucleotide
  Target: LAMA2; (+) strand; PAM type: YTN; PAM sequence: CTG
gagagaagcaaataacaatg

SEQ ID NO: 372180 - DNA, 20 bp, Artificial Sequence
  Description of Artificial Sequence: Synthetic oligonucleotide
  Target: LAMA2; (+) strand; PAM type: YTN; PAM sequence: CTA
tttcgaatgtttatattctt

SEQ ID NO: 372181 - DNA, 20 bp, Artificial Sequence
  Description of Artificial Sequence: Synthetic oligonucleotide
  Target: LAMA2; (+) strand; PAM type: YTN; PAM sequence: TTT
cgaatgtttatattctttaa

SEQ ID NO: 372182 - DNA, 20 bp, Artificial Sequence
  Description of Artificial Sequence: Synthetic oligonucleotide
  Target: LAMA2; (+) strand; PAM type: YTN; PAM sequence: TTC
gaatgtttatattctttaat

SEQ ID NO: 372183 - DNA, 20 bp, Artificial Sequence
  Description of Artificial Sequence: Synthetic oligonucleotide
  Target: LAMA2; (+) strand; PAM type: YTN; PAM sequence: TTT
atattctttaatttctggca

SEQ ID NO: 372184 - DNA, 20 bp, Artificial Sequence
  Description of Artificial Sequence: Synthetic oligonucleotide
  Target: LAMA2; (+) strand; PAM type: YTN; PAM sequence: TTA
tattctttaatttctggcat

SEQ ID NO: 372185 - DNA, 20 bp, Artificial Sequence
  Description of Artificial Sequence: Synthetic oligonucleotide
  Target: LAMA2; (+) strand; PAM type: YTN; PAM sequence: TTC
tttaatttctggcatcacat

SEQ ID NO: 372186 - DNA, 20 bp, Artificial Sequence
  Description of Artificial Sequence: Synthetic oligonucleotide
  Target: LAMA2; (+) strand; PAM type: YTN; PAM sequence: CTT
taatttctggcatcacatag

SEQ ID NO: 372187 - DNA, 20 bp, Artificial Sequence
  Description of Artificial Sequence: Synthetic oligonucleotide
  Target: LAMA2; (+) strand; PAM type: YTN; PAM sequence: TTT
aatttctggcatcacatagc

SEQ ID NO: 372188 - DNA, 20 bp, Artificial Sequence
  Description of Artificial Sequence: Synthetic oligonucleotide
  Target: LAMA2; (+) strand; PAM type: YTN; PAM sequence: TTA
atttctggcatcacatagct

SEQ ID NO: 372189 - DNA, 20 bp, Artificial Sequence
  Description of Artificial Sequence: Synthetic oligonucleotide
  Target: LAMA2; (+) strand; PAM type: YTN; PAM sequence: TTT
ctggcatcacatagcttata

SEQ ID NO: 372190 - DNA, 20 bp, Artificial Sequence
  Description of Artificial Sequence: Synthetic oligonucleotide
  Target: LAMA2; (+) strand; PAM type: YTN; PAM sequence: TTC
tggcatcacatagcttatag

SEQ ID NO: 372191 - DNA, 20 bp, Artificial Sequence
  Description of Artificial Sequence: Synthetic oligonucleotide
  Target: LAMA2; (+) strand; PAM type: YTN; PAM sequence: CTG
gcatcacatagcttataggt

SEQ ID NO: 372192 - DNA, 20 bp, Artificial Sequence
  Description of Artificial Sequence: Synthetic oligonucleotide
  Target: LAMA2; (+) strand; PAM type: YTN; PAM sequence: CTT
ataggttaaataaaatatga

SEQ ID NO: 372193 - DNA, 20 bp, Artificial Sequence
  Description of Artificial Sequence: Synthetic oligonucleotide
  Target: LAMA2; (+) strand; PAM type: YTN; PAM sequence: TTA
taggttaaataaaatatgaa

SEQ ID NO: 372194 - DNA, 20 bp, Artificial Sequence
  Description of Artificial Sequence: Synthetic oligonucleotide
  Target: LAMA2; (+) strand; PAM type: YTN; PAM sequence: TTA
aataaaatatgaaagagaca

SEQ ID NO: 372195 - DNA, 20 bp, Artificial Sequence
  Description of Artificial Sequence: Synthetic oligonucleotide
  Target: LAMA2; (+) strand; PAM type: YTN; PAM sequence: CTC
tgcctttgaatacttaggat

SEQ ID NO: 372196 - DNA, 20 bp, Artificial Sequence
  Description of Artificial Sequence: Synthetic oligonucleotide
  Target: LAMA2; (+) strand; PAM type: YTN; PAM sequence: CTG
cctttgaatacttaggatgt

SEQ ID NO: 372197 - DNA, 20 bp, Artificial Sequence
  Description of Artificial Sequence: Synthetic oligonucleotide
  Target: LAMA2; (+) strand; PAM type: YTN; PAM sequence: CTT
tgaatacttaggatgtgttt

SEQ ID NO: 372198 - DNA, 20 bp, Artificial Sequence
  Description of Artificial Sequence: Synthetic oligonucleotide
  Target: LAMA2; (+) strand; PAM type: YTN; PAM sequence: TTT
gaatacttaggatgtgtttg

SEQ ID NO: 372199 - DNA, 20 bp, Artificial Sequence
  Description of Artificial Sequence: Synthetic oligonucleotide
  Target: LAMA2; (+) strand; PAM type: YTN; PAM sequence: TTG
aatacttaggatgtgtttga

SEQ ID NO: 372200 - DNA, 20 bp, Artificial Sequence
  Description of Artificial Sequence: Synthetic oligonucleotide
  Target: LAMA2; (+) strand; PAM type: YTN; PAM sequence: CTT
aggatgtgtttgaatatata

SEQ ID NO: 372201 - DNA, 20 bp, Artificial Sequence
  Description of Artificial Sequence: Synthetic oligonucleotide
  Target: LAMA2; (+) strand; PAM type: YTN; PAM sequence: TTA
ggatgtgtttgaatatataa

SEQ ID NO: 372202 - DNA, 20 bp, Artificial Sequence
  Description of Artificial Sequence: Synthetic oligonucleotide
  Target: LAMA2; (+) strand; PAM type: YTN; PAM sequence: TTT
gaatatataatattattgaa

SEQ ID NO: 372203 - DNA, 20 bp, Artificial Sequence
  Description of Artificial Sequence: Synthetic oligonucleotide
  Target: LAMA2; (+) strand; PAM type: YTN; PAM sequence: TTG
aatatataatattattgaag

SEQ ID NO: 372204 - DNA, 20 bp, Artificial Sequence
  Description of Artificial Sequence: Synthetic oligonucleotide
  Target: LAMA2; (+) strand; PAM type: YTN; PAM sequence: TTA
ttgaagttgttatagatttt

SEQ ID NO: 372205 - DNA, 20 bp, Artificial Sequence
  Description of Artificial Sequence: Synthetic oligonucleotide
  Target: LAMA2; (+) strand; PAM type: YTN; PAM sequence: TTG
aagttgttatagattttcat

SEQ ID NO: 372206 - DNA, 20 bp, Artificial Sequence
  Description of Artificial Sequence: Synthetic oligonucleotide
  Target: LAMA2; (+) strand; PAM type: YTN; PAM sequence: TTG
ttatagattttcatcagtta

SEQ ID NO: 372207 - DNA, 20 bp, Artificial Sequence
  Description of Artificial Sequence: Synthetic oligonucleotide
  Target: LAMA2; (+) strand; PAM type: YTN; PAM sequence: TTA
tagattttcatcagttatat

SEQ ID NO: 372208 - DNA, 20 bp, Artificial Sequence
  Description of Artificial Sequence: Synthetic oligonucleotide
  Target: LAMA2; (+) strand; PAM type: YTN; PAM sequence: TTT
tcatcagttatataataaaa

SEQ ID NO: 372209 - DNA, 20 bp, Artificial Sequence
  Description of Artificial Sequence: Synthetic oligonucleotide
  Target: LAMA2; (+) strand; PAM type: YTN; PAM sequence: TTT
catcagttatataataaaat

SEQ ID NO: 372210 - DNA, 20 bp, Artificial Sequence
  Description of Artificial Sequence: Synthetic oligonucleotide
  Target: LAMA2; (+) strand; PAM type: YTN; PAM sequence: TTC
atcagttatataataaaata

SEQ ID NO: 372211 - DNA, 20 bp, Artificial Sequence
  Description of Artificial Sequence: Synthetic oligonucleotide
  Target: LAMA2; (+) strand; PAM type: YTN; PAM sequence: TTA
tataataaaatatattattg

SEQ ID NO: 372212 - DNA, 20 bp, Artificial Sequence
  Description of Artificial Sequence: Synthetic oligonucleotide
  Target: LAMA2; (+) strand; PAM type: YTN; PAM sequence: TTA
ttggcacaaggctggacaga

SEQ ID NO: 372213 - DNA, 20 bp, Artificial Sequence
  Description of Artificial Sequence: Synthetic oligonucleotide
  Target: LAMA2; (+) strand; PAM type: YTN; PAM sequence: TTG
gcacaaggctggacagagat

SEQ ID NO: 372214 - DNA, 20 bp, Artificial Sequence
  Description of Artificial Sequence: Synthetic oligonucleotide
  Target: LAMA2; (+) strand; PAM type: YTN; PAM sequence: CTG
gacagagataggacctcaat

SEQ ID NO: 372215 - DNA, 20 bp, Artificial Sequence
  Description of Artificial Sequence: Synthetic oligonucleotide
  Target: LAMA2; (+) strand; PAM type: YTN; PAM sequence: CTC
aataagttctatctactaat

SEQ ID NO: 372216 - DNA, 20 bp, Artificial Sequence
  Description of Artificial Sequence: Synthetic oligonucleotide
  Target: LAMA2; (+) strand; PAM type: YTN; PAM sequence: TTC
tatctactaatatcactgta

SEQ ID NO: 372217 - DNA, 20 bp, Artificial Sequence
  Description of Artificial Sequence: Synthetic oligonucleotide
  Target: LAMA2; (+) strand; PAM type: YTN; PAM sequence: CTA
tctactaatatcactgtaaa

SEQ ID NO: 372218 - DNA, 20 bp, Artificial Sequence
  Description of Artificial Sequence: Synthetic oligonucleotide
  Target: LAMA2; (+) strand; PAM type: YTN; PAM sequence: CTA
ctaatatcactgtaaatact

SEQ ID NO: 372219 - DNA, 20 bp, Artificial Sequence
  Description of Artificial Sequence: Synthetic oligonucleotide
  Target: LAMA2; (+) strand; PAM type: YTN; PAM sequence: CTA
atatcactgtaaatactact

SEQ ID NO: 372220 - DNA, 20 bp, Artificial Sequence
  Description of Artificial Sequence: Synthetic oligonucleotide
  Target: LAMA2; (+) strand; PAM type: YTN; PAM sequence: CTG
taaatactactggtttgtgt

SEQ ID NO: 372221 - DNA, 20 bp, Artificial Sequence
  Description of Artificial Sequence: Synthetic oligonucleotide
  Target: LAMA2; (+) strand; PAM type: YTN; PAM sequence: CTA
ctggtttgtgtgggtcagga

SEQ ID NO: 372222 - DNA, 20 bp, Artificial Sequence
  Description of Artificial Sequence: Synthetic oligonucleotide
  Target: LAMA2; (+) strand; PAM type: YTN; PAM sequence: CTG
gtttgtgtgggtcaggaatg

SEQ ID NO: 372223 - DNA, 20 bp, Artificial Sequence
  Description of Artificial Sequence: Synthetic oligonucleotide
  Target: LAMA2; (+) strand; PAM type: YTN; PAM sequence: TTT
gtgtgggtcaggaatgctga

SEQ ID NO: 372224 - DNA, 20 bp, Artificial Sequence
  Description of Artificial Sequence: Synthetic oligonucleotide
  Target: LAMA2; (+) strand; PAM type: YTN; PAM sequence: TTG
tgtgggtcaggaatgctgaa

SEQ ID NO: 372225 - DNA, 20 bp, Artificial Sequence
  Description of Artificial Sequence: Synthetic oligonucleotide
  Target: LAMA2; (+) strand; PAM type: YTN; PAM sequence: CTG
aaatttaagtttttgaaaga

SEQ ID NO: 372226 - DNA, 20 bp, Artificial Sequence
  Description of Artificial Sequence: Synthetic oligonucleotide
  Target: LAMA2; (+) strand; PAM type: YTN; PAM sequence: TTT
aagtttttgaaagaatgaaa

SEQ ID NO: 372227 - DNA, 20 bp, Artificial Sequence
  Description of Artificial Sequence: Synthetic oligonucleotide
  Target: LAMA2; (+) strand; PAM type: YTN; PAM sequence: TTA
agtttttgaaagaatgaaac

SEQ ID NO: 372228 - DNA, 20 bp, Artificial Sequence
  Description of Artificial Sequence: Synthetic oligonucleotide
  Target: LAMA2; (+) strand; PAM type: YTN; PAM sequence: TTT
ttgaaagaatgaaactcaaa

SEQ ID NO: 372229 - DNA, 20 bp, Artificial Sequence
  Description of Artificial Sequence: Synthetic oligonucleotide
  Target: LAMA2; (+) strand; PAM type: YTN; PAM sequence: TTT
tgaaagaatgaaactcaaat

SEQ ID NO: 372230 - DNA, 20 bp, Artificial Sequence
  Description of Artificial Sequence: Synthetic oligonucleotide
  Target: LAMA2; (+) strand; PAM type: YTN; PAM sequence: TTT
gaaagaatgaaactcaaatt

SEQ ID NO: 372231 - DNA, 20 bp, Artificial Sequence
  Description of Artificial Sequence: Synthetic oligonucleotide
  Target: LAMA2; (+) strand; PAM type: YTN; PAM sequence: TTG
aaagaatgaaactcaaattt

SEQ ID NO: 372232 - DNA, 20 bp, Artificial Sequence
  Description of Artificial Sequence: Synthetic oligonucleotide
  Target: LAMA2; (+) strand; PAM type: YTN; PAM sequence: CTC
aaatttgagttgacctttgg

SEQ ID NO: 372233 - DNA, 20 bp, Artificial Sequence
  Description of Artificial Sequence: Synthetic oligonucleotide
  Target: LAMA2; (+) strand; PAM type: YTN; PAM sequence: TTT
gagttgacctttgggctcac

SEQ ID NO: 372234 - DNA, 20 bp, Artificial Sequence
  Description of Artificial Sequence: Synthetic oligonucleotide
  Target: LAMA2; (+) strand; PAM type: YTN; PAM sequence: TTG
agttgacctttgggctcact

SEQ ID NO: 372235 - DNA, 20 bp, Artificial Sequence
  Description of Artificial Sequence: Synthetic oligonucleotide
  Target: LAMA2; (+) strand; PAM type: YTN; PAM sequence: TTG
acctttgggctcactcaaga

SEQ ID NO: 372236 - DNA, 20 bp, Artificial Sequence
  Description of Artificial Sequence: Synthetic oligonucleotide
  Target: LAMA2; (+) strand; PAM type: YTN; PAM sequence: CTT
tgggctcactcaagagatca

SEQ ID NO: 372237 - DNA, 20 bp, Artificial Sequence
  Description of Artificial Sequence: Synthetic oligonucleotide
  Target: LAMA2; (+) strand; PAM type: YTN; PAM sequence: TTT
gggctcactcaagagatcat

SEQ ID NO: 372238 - DNA, 20 bp, Artificial Sequence
  Description of Artificial Sequence: Synthetic oligonucleotide
  Target: LAMA2; (+) strand; PAM type: YTN; PAM sequence: TTG
ggctcactcaagagatcata

SEQ ID NO: 372239 - DNA, 20 bp, Artificial Sequence
  Description of Artificial Sequence: Synthetic oligonucleotide
  Target: LAMA2; (+) strand; PAM type: YTN; PAM sequence: CTC
actcaagagatcatattgaa

SEQ ID NO: 372240 - DNA, 20 bp, Artificial Sequence
  Description of Artificial Sequence: Synthetic oligonucleotide
  Target: LAMA2; (+) strand; PAM type: YTN; PAM sequence: CTC
aagagatcatattgaatgca

SEQ ID NO: 372241 - DNA, 20 bp, Artificial Sequence
  Description of Artificial Sequence: Synthetic oligonucleotide
  Target: LAMA2; (+) strand; PAM type: YTN; PAM sequence: TTG
aatgcacgttgttaaaatta

SEQ ID NO: 372242 - DNA, 20 bp, Artificial Sequence
  Description of Artificial Sequence: Synthetic oligonucleotide
  Target: LAMA2; (+) strand; PAM type: YTN; PAM sequence: TTG
ttaaaattaatatagagaaa

SEQ ID NO: 372243 - DNA, 20 bp, Artificial Sequence
  Description of Artificial Sequence: Synthetic oligonucleotide
  Target: LAMA2; (+) strand; PAM type: YTN; PAM sequence: TTA
aaattaatatagagaaatgt

SEQ ID NO: 372244 - DNA, 20 bp, Artificial Sequence
  Description of Artificial Sequence: Synthetic oligonucleotide
  Target: LAMA2; (+) strand; PAM type: YTN; PAM sequence: TTA
atatagagaaatgtattcca

SEQ ID NO: 372245 - DNA, 20 bp, Artificial Sequence
  Description of Artificial Sequence: Synthetic oligonucleotide
  Target: LAMA2; (+) strand; PAM type: YTN; PAM sequence: TTC
caagacaataggtaaattta

SEQ ID NO: 372246 - DNA, 20 bp, Artificial Sequence
  Description of Artificial Sequence: Synthetic oligonucleotide
  Target: LAMA2; (+) strand; PAM type: YTN; PAM sequence: TTT
aaggaaacaatcaattcagc

SEQ ID NO: 372247 - DNA, 20 bp, Artificial Sequence
  Description of Artificial Sequence: Synthetic oligonucleotide
  Target: LAMA2; (+) strand; PAM type: YTN; PAM sequence: TTA
aggaaacaatcaattcagcc

SEQ ID NO: 372248 - DNA, 20 bp, Artificial Sequence
  Description of Artificial Sequence: Synthetic oligonucleotide
  Target: LAMA2; (+) strand; PAM type: YTN; PAM sequence: TTC
agccatattctctagaaaat

SEQ ID NO: 372249 - DNA, 20 bp, Artificial Sequence
  Description of Artificial Sequence: Synthetic oligonucleotide
  Target: LAMA2; (+) strand; PAM type: YTN; PAM sequence: TTC
tctagaaaattgagaatgct

SEQ ID NO: 372250 - DNA, 20 bp, Artificial Sequence
  Description of Artificial Sequence: Synthetic oligonucleotide
  Target: LAMA2; (+) strand; PAM type: YTN; PAM sequence: CTC
tagaaaattgagaatgctct

SEQ ID NO: 372251 - DNA, 20 bp, Artificial Sequence
  Description of Artificial Sequence: Synthetic oligonucleotide
  Target: LAMA2; (+) strand; PAM type: YTN; PAM sequence: CTA
gaaaattgagaatgctctag

SEQ ID NO: 372252 - DNA, 20 bp, Artificial Sequence
  Description of Artificial Sequence: Synthetic oligonucleotide
  Target: LAMA2; (+) strand; PAM type: YTN; PAM sequence: TTG
agaatgctctagatgtttta

SEQ ID NO: 372253 - DNA, 20 bp, Artificial Sequence
  Description of Artificial Sequence: Synthetic oligonucleotide
  Target: LAMA2; (+) strand; PAM type: YTN; PAM sequence: CTC
tagatgttttagtgctcttt

SEQ ID NO: 372254 - DNA, 20 bp, Artificial Sequence
  Description of Artificial Sequence: Synthetic oligonucleotide
  Target: LAMA2; (+) strand; PAM type: YTN; PAM sequence: CTA
gatgttttagtgctctttcc

SEQ ID NO: 372255 - DNA, 20 bp, Artificial Sequence
  Description of Artificial Sequence: Synthetic oligonucleotide
  Target: LAMA2; (+) strand; PAM type: YTN; PAM sequence: TTT
tagtgctctttcctacacat

SEQ ID NO: 372256 - DNA, 20 bp, Artificial Sequence
  Description of Artificial Sequence: Synthetic oligonucleotide
  Target: LAMA2; (+) strand; PAM type: YTN; PAM sequence: TTT
agtgctctttcctacacatt

SEQ ID NO: 372257 - DNA, 20 bp, Artificial Sequence
  Description of Artificial Sequence: Synthetic oligonucleotide
  Target: LAMA2; (+) strand; PAM type: YTN; PAM sequence: TTA
gtgctctttcctacacattg

SEQ ID NO: 372258 - DNA, 20 bp, Artificial Sequence
  Description of Artificial Sequence: Synthetic oligonucleotide
  Target: LAMA2; (+) strand; PAM type: YTN; PAM sequence: CTC
tttcctacacattgttttat

SEQ ID NO: 372259 - DNA, 20 bp, Artificial Sequence
  Description of Artificial Sequence: Synthetic oligonucleotide
  Target: LAMA2; (+) strand; PAM type: YTN; PAM sequence: CTT
tcctacacattgttttatgt

SEQ ID NO: 372260 - DNA, 20 bp, Artificial Sequence
  Description of Artificial Sequence: Synthetic oligonucleotide
  Target: LAMA2; (+) strand; PAM type: YTN; PAM sequence: TTT
cctacacattgttttatgtg

SEQ ID NO: 372261 - DNA, 20 bp, Artificial Sequence
  Description of Artificial Sequence: Synthetic oligonucleotide
  Target: LAMA2; (+) strand; PAM type: YTN; PAM sequence: TTC
ctacacattgttttatgtgc

SEQ ID NO: 372262 - DNA, 20 bp, Artificial Sequence
  Description of Artificial Sequence: Synthetic oligonucleotide
  Target: LAMA2; (+) strand; PAM type: YTN; PAM sequence: CTA
cacattgttttatgtgcaca

SEQ ID NO: 372263 - DNA, 20 bp, Artificial Sequence
  Description of Artificial Sequence: Synthetic oligonucleotide
  Target: LAMA2; (+) strand; PAM type: YTN; PAM sequence: TTG
ttttatgtgcacatgggaga

SEQ ID NO: 372264 - DNA, 20 bp, Artificial Sequence
  Description of Artificial Sequence: Synthetic oligonucleotide
  Target: LAMA2; (+) strand; PAM type: YTN; PAM sequence: TTT
tatgtgcacatgggagatta

SEQ ID NO: 372265 - DNA, 20 bp, Artificial Sequence
  Description of Artificial Sequence: Synthetic oligonucleotide
  Target: LAMA2; (+) strand; PAM type: YTN; PAM sequence: TTT
atgtgcacatgggagattat

SEQ ID NO: 372266 - DNA, 20 bp, Artificial Sequence
  Description of Artificial Sequence: Synthetic oligonucleotide
  Target: LAMA2; (+) strand; PAM type: YTN; PAM sequence: TTA
tgtgcacatgggagattatg

SEQ ID NO: 372267 - DNA, 20 bp, Artificial Sequence
  Description of Artificial Sequence: Synthetic oligonucleotide
  Target: LAMA2; (+) strand; PAM type: YTN; PAM sequence: TTA
tgatgggtcttcctggttcc

SEQ ID NO: 372268 - DNA, 20 bp, Artificial Sequence
  Description of Artificial Sequence: Synthetic oligonucleotide
  Target: LAMA2; (+) strand; PAM type: YTN; PAM sequence: CTT
cctggttccatatgccaaag

SEQ ID NO: 372269 - DNA, 20 bp, Artificial Sequence
  Description of Artificial Sequence: Synthetic oligonucleotide
  Target: LAMA2; (+) strand; PAM type: YTN; PAM sequence: TTC
ctggttccatatgccaaagg

SEQ ID NO: 372270 - DNA, 20 bp, Artificial Sequence
  Description of Artificial Sequence: Synthetic oligonucleotide
  Target: LAMA2; (+) strand; PAM type: YTN; PAM sequence: CTG
gttccatatgccaaaggaaa

SEQ ID NO: 372271 - DNA, 20 bp, Artificial Sequence
  Description of Artificial Sequence: Synthetic oligonucleotide
  Target: LAMA2; (+) strand; PAM type: YTN; PAM sequence: TTC
catatgccaaaggaaaaaac

SEQ ID NO: 372272 - DNA, 20 bp, Artificial Sequence
  Description of Artificial Sequence: Synthetic oligonucleotide
  Target: LAMA2; (+) strand; PAM type: YTN; PAM sequence: CTA
aagttcagagaaattaagtg

SEQ ID NO: 372273 - DNA, 20 bp, Artificial Sequence
  Description of Artificial Sequence: Synthetic oligonucleotide
  Target: LAMA2; (+) strand; PAM type: YTN; PAM sequence: TTC
agagaaattaagtgccttga

SEQ ID NO: 372274 - DNA, 20 bp, Artificial Sequence
  Description of Artificial Sequence: Synthetic oligonucleotide
  Target: LAMA2; (+) strand; PAM type: YTN; PAM sequence: TTA
agtgccttgatagtgattat

SEQ ID NO: 372275 - DNA, 20 bp, Artificial Sequence
  Description of Artificial Sequence: Synthetic oligonucleotide
  Target: LAMA2; (+) strand; PAM type: YTN; PAM sequence: CTT
gatagtgattatacagcttg

SEQ ID NO: 372276 - DNA, 20 bp, Artificial Sequence
  Description of Artificial Sequence: Synthetic oligonucleotide
  Target: LAMA2; (+) strand; PAM type: YTN; PAM sequence: TTG
atagtgattatacagcttgc

SEQ ID NO: 372277 - DNA, 20 bp, Artificial Sequence
  Description of Artificial Sequence: Synthetic oligonucleotide
  Target: LAMA2; (+) strand; PAM type: YTN; PAM sequence: TTA
tacagcttgcttgtggcaga

SEQ ID NO: 372278 - DNA, 20 bp, Artificial Sequence
  Description of Artificial Sequence: Synthetic oligonucleotide
  Target: LAMA2; (+) strand; PAM type: YTN; PAM sequence: CTT
gcttgtggcagaaccaatat

SEQ ID NO: 372279 - DNA, 20 bp, Artificial Sequence
  Description of Artificial Sequence: Synthetic oligonucleotide
  Target: LAMA2; (+) strand; PAM type: YTN; PAM sequence: TTG
cttgtggcagaaccaatatt

SEQ ID NO: 372280 - DNA, 20 bp, Artificial Sequence
  Description of Artificial Sequence: Synthetic oligonucleotide
  Target: LAMA2; (+) strand; PAM type: YTN; PAM sequence: CTT
gtggcagaaccaatattgga

SEQ ID NO: 372281 - DNA, 20 bp, Artificial Sequence
  Description of Artificial Sequence: Synthetic oligonucleotide
  Target: LAMA2; (+) strand; PAM type: YTN; PAM sequence: TTG
tggcagaaccaatattggaa

SEQ ID NO: 372282 - DNA, 20 bp, Artificial Sequence
  Description of Artificial Sequence: Synthetic oligonucleotide
  Target: LAMA2; (+) strand; PAM type: YTN; PAM sequence: TTG
gaactcatatattttgactc

SEQ ID NO: 372283 - DNA, 20 bp, Artificial Sequence
  Description of Artificial Sequence: Synthetic oligonucleotide
  Target: LAMA2; (+) strand; PAM type: YTN; PAM sequence: CTC
atatattttgactcacctct

SEQ ID NO: 372284 - DNA, 20 bp, Artificial Sequence
  Description of Artificial Sequence: Synthetic oligonucleotide
  Target: LAMA2; (+) strand; PAM type: YTN; PAM sequence: TTT
tgactcacctctctgtgctt

SEQ ID NO: 372285 - DNA, 20 bp, Artificial Sequence
  Description of Artificial Sequence: Synthetic oligonucleotide
  Target: LAMA2; (+) strand; PAM type: YTN; PAM sequence: TTT
gactcacctctctgtgcttc

SEQ ID NO: 372286 - DNA, 20 bp, Artificial Sequence
  Description of Artificial Sequence: Synthetic oligonucleotide
  Target: LAMA2; (+) strand; PAM type: YTN; PAM sequence: TTG
actcacctctctgtgcttct

SEQ ID NO: 372287 - DNA, 20 bp, Artificial Sequence
  Description of Artificial Sequence: Synthetic oligonucleotide
  Target: LAMA2; (+) strand; PAM type: YTN; PAM sequence: CTC
acctctctgtgcttcttcca

SEQ ID NO: 372288 - DNA, 20 bp, Artificial Sequence
  Description of Artificial Sequence: Synthetic oligonucleotide
  Target: LAMA2; (+) strand; PAM type: YTN; PAM sequence: CTC
tctgtgcttcttccaatggg

SEQ ID NO: 372289 - DNA, 20 bp, Artificial Sequence
  Description of Artificial Sequence: Synthetic oligonucleotide
  Target: LAMA2; (+) strand; PAM type: YTN; PAM sequence: CTC
tgtgcttcttccaatggggc

SEQ ID NO: 372290 - DNA, 20 bp, Artificial Sequence
  Description of Artificial Sequence: Synthetic oligonucleotide
  Target: LAMA2; (+) strand; PAM type: YTN; PAM sequence: CTG
tgcttcttccaatggggcta

SEQ ID NO: 372291 - DNA, 20 bp, Artificial Sequence
  Description of Artificial Sequence: Synthetic oligonucleotide
  Target: LAMA2; (+) strand; PAM type: YTN; PAM sequence: CTT
cttccaatggggctacagta

SEQ ID NO: 372292 - DNA, 20 bp, Artificial Sequence
  Description of Artificial Sequence: Synthetic oligonucleotide
  Target: LAMA2; (+) strand; PAM type: YTN; PAM sequence: TTC
ttccaatggggctacagtaa

SEQ ID NO: 372293 - DNA, 20 bp, Artificial Sequence
  Description of Artificial Sequence: Synthetic oligonucleotide
  Target: LAMA2; (+) strand; PAM type: YTN; PAM sequence: CTT
ccaatggggctacagtaata

SEQ ID NO: 372294 - DNA, 20 bp, Artificial Sequence
  Description of Artificial Sequence: Synthetic oligonucleotide
  Target: LAMA2; (+) strand; PAM type: YTN; PAM sequence: TTC
caatggggctacagtaatag

SEQ ID NO: 372295 - DNA, 20 bp, Artificial Sequence
  Description of Artificial Sequence: Synthetic oligonucleotide
  Target: LAMA2; (+) strand; PAM type: YTN; PAM sequence: CTA
cagtaatagaaacaattaca

SEQ ID NO: 372296 - DNA, 20 bp, Artificial Sequence
  Description of Artificial Sequence: Synthetic oligonucleotide
  Target: LAMA2; (+) strand; PAM type: YTN; PAM sequence: TTA
cagaaacattgaaaagaagc

SEQ ID NO: 372297 - DNA, 20 bp, Artificial Sequence
  Description of Artificial Sequence: Synthetic oligonucleotide
  Target: LAMA2; (+) strand; PAM type: YTN; PAM sequence: TTG
aaaagaagcaaaaaaaaatc

SEQ ID NO: 372298 - DNA, 20 bp, Artificial Sequence
  Description of Artificial Sequence: Synthetic oligonucleotide
  Target: LAMA2; (+) strand; PAM type: YTN; PAM sequence: TTT
aatgtcagacaaactgtaaa

SEQ ID NO: 372299 - DNA, 20 bp, Artificial Sequence
  Description of Artificial Sequence: Synthetic oligonucleotide
  Target: LAMA2; (+) strand; PAM type: YTN; PAM sequence: TTA
atgtcagacaaactgtaaat

SEQ ID NO: 372300 - DNA, 20 bp, Artificial Sequence
  Description of Artificial Sequence: Synthetic oligonucleotide
  Target: LAMA2; (+) strand; PAM type: YTN; PAM sequence: CTG
taaatgttcactgtaaaaat

SEQ ID NO: 372301 - DNA, 20 bp, Artificial Sequence
  Description of Artificial Sequence: Synthetic oligonucleotide
  Target: LAMA2; (+) strand; PAM type: YTN; PAM sequence: TTC
actgtaaaaatcagtaaatc

SEQ ID NO: 372302 - DNA, 20 bp, Artificial Sequence
  Description of Artificial Sequence: Synthetic oligonucleotide
  Target: LAMA2; (+) strand; PAM type: YTN; PAM sequence: CTG
taaaaatcagtaaatcttca

SEQ ID NO: 372303 - DNA, 20 bp, Artificial Sequence
  Description of Artificial Sequence: Synthetic oligonucleotide
  Target: LAMA2; (+) strand; PAM type: YTN; PAM sequence: CTT
cactgtttggcaagagttat

SEQ ID NO: 372304 - DNA, 20 bp, Artificial Sequence
  Description of Artificial Sequence: Synthetic oligonucleotide
  Target: LAMA2; (+) strand; PAM type: YTN; PAM sequence: TTC
actgtttggcaagagttatg

SEQ ID NO: 372305 - DNA, 20 bp, Artificial Sequence
  Description of Artificial Sequence: Synthetic oligonucleotide
  Target: LAMA2; (+) strand; PAM type: YTN; PAM sequence: CTG
tttggcaagagttatgttaa

SEQ ID NO: 372306 - DNA, 20 bp, Artificial Sequence
  Description of Artificial Sequence: Synthetic oligonucleotide
  Target: LAMA2; (+) strand; PAM type: YTN; PAM sequence: TTT
ggcaagagttatgttaatta

SEQ ID NO: 372307 - DNA, 20 bp, Artificial Sequence
  Description of Artificial Sequence: Synthetic oligonucleotide
  Target: LAMA2; (+) strand; PAM type: YTN; PAM sequence: TTG
gcaagagttatgttaattat

SEQ ID NO: 372308 - DNA, 20 bp, Artificial Sequence
  Description of Artificial Sequence: Synthetic oligonucleotide
  Target: LAMA2; (+) strand; PAM type: YTN; PAM sequence: TTA
tgttaattatgctacatagt

SEQ ID NO: 372309 - DNA, 20 bp, Artificial Sequence
  Description of Artificial Sequence: Synthetic oligonucleotide
  Target: LAMA2; (+) strand; PAM type: YTN; PAM sequence: TTA
attatgctacatagttacag

SEQ ID NO: 372310 - DNA, 20 bp, Artificial Sequence
  Description of Artificial Sequence: Synthetic oligonucleotide
  Target: LAMA2; (+) strand; PAM type: YTN; PAM sequence: TTA
tgctacatagttacagttat

SEQ ID NO: 372311 - DNA, 20 bp, Artificial Sequence
  Description of Artificial Sequence: Synthetic oligonucleotide
  Target: LAMA2; (+) strand; PAM type: YTN; PAM sequence: CTA
catagttacagttatattaa

SEQ ID NO: 372312 - DNA, 20 bp, Artificial Sequence
  Description of Artificial Sequence: Synthetic oligonucleotide
  Target: LAMA2; (+) strand; PAM type: YTN; PAM sequence: TTA
cagttatattaacagctatg

SEQ ID NO: 372313 - DNA, 20 bp, Artificial Sequence
  Description of Artificial Sequence: Synthetic oligonucleotide
  Target: LAMA2; (+) strand; PAM type: YTN; PAM sequence: TTA
tattaacagctatgttaata

SEQ ID NO: 372314 - DNA, 20 bp, Artificial Sequence
  Description of Artificial Sequence: Synthetic oligonucleotide
  Target: LAMA2; (+) strand; PAM type: YTN; PAM sequence: TTA
acagctatgttaatataagg

SEQ ID NO: 372315 - DNA, 20 bp, Artificial Sequence
  Description of Artificial Sequence: Synthetic oligonucleotide
  Target: LAMA2; (+) strand; PAM type: YTN; PAM sequence: CTA
tgttaatataagggactaga

SEQ ID NO: 372316 - DNA, 20 bp, Artificial Sequence
  Description of Artificial Sequence: Synthetic oligonucleotide
  Target: LAMA2; (+) strand; PAM type: YTN; PAM sequence: TTA
atataagggactagagcagg

SEQ ID NO: 372317 - DNA, 20 bp, Artificial Sequence
  Description of Artificial Sequence: Synthetic oligonucleotide
  Target: LAMA2; (+) strand; PAM type: YTN; PAM sequence: CTA
gagcaggatgagaaaactgc

SEQ ID NO: 372318 - DNA, 20 bp, Artificial Sequence
  Description of Artificial Sequence: Synthetic oligonucleotide
  Target: LAMA2; (+) strand; PAM type: YTN; PAM sequence: CTG
cagatttaattctttaacta

SEQ ID NO: 372319 - DNA, 20 bp, Artificial Sequence
  Description of Artificial Sequence: Synthetic oligonucleotide
  Target: LAMA2; (+) strand; PAM type: YTN; PAM sequence: TTT
aattctttaactattaacta

SEQ ID NO: 372320 - DNA, 20 bp, Artificial Sequence
  Description of Artificial Sequence: Synthetic oligonucleotide
  Target: LAMA2; (+) strand; PAM type: YTN; PAM sequence: TTA
attctttaactattaactaa

SEQ ID NO: 372321 - DNA, 20 bp, Artificial Sequence
  Description of Artificial Sequence: Synthetic oligonucleotide
  Target: LAMA2; (+) strand; PAM type: YTN; PAM sequence: TTC
tttaactattaactaaatac

SEQ ID NO: 372322 - DNA, 20 bp, Artificial Sequence
  Description of Artificial Sequence: Synthetic oligonucleotide
  Target: LAMA2; (+) strand; PAM type: YTN; PAM sequence: CTT
taactattaactaaatacct

SEQ ID NO: 372323 - DNA, 20 bp, Artificial Sequence
  Description of Artificial Sequence: Synthetic oligonucleotide
  Target: LAMA2; (+) strand; PAM type: YTN; PAM sequence: TTT
aactattaactaaatacctt

SEQ ID NO: 372324 - DNA, 20 bp, Artificial Sequence
  Description of Artificial Sequence: Synthetic oligonucleotide
  Target: LAMA2; (+) strand; PAM type: YTN; PAM sequence: TTA
actattaactaaataccttt

SEQ ID NO: 372325 - DNA, 20 bp, Artificial Sequence
  Description of Artificial Sequence: Synthetic oligonucleotide
  Target: LAMA2; (+) strand; PAM type: YTN; PAM sequence: CTA
ttaactaaatacctttcacg

SEQ ID NO: 372326 - DNA, 20 bp, Artificial Sequence
  Description of Artificial Sequence: Synthetic oligonucleotide
  Target: LAMA2; (+) strand; PAM type: YTN; PAM sequence: TTA
actaaatacctttcacgtta

SEQ ID NO: 372327 - DNA, 20 bp, Artificial Sequence
  Description of Artificial Sequence: Synthetic oligonucleotide
  Target: LAMA2; (+) strand; PAM type: YTN; PAM sequence: CTA
aatacctttcacgttaaatc

SEQ ID NO: 372328 - DNA, 20 bp, Artificial Sequence
  Description of Artificial Sequence: Synthetic oligonucleotide
  Target: LAMA2; (+) strand; PAM type: YTN; PAM sequence: CTT
tcacgttaaatcaacatatc

SEQ ID NO: 372329 - DNA, 20 bp, Artificial Sequence
  Description of Artificial Sequence: Synthetic oligonucleotide
  Target: LAMA2; (+) strand; PAM type: YTN; PAM sequence: TTT
cacgttaaatcaacatatct

SEQ ID NO: 372330 - DNA, 20 bp, Artificial Sequence
  Description of Artificial Sequence: Synthetic oligonucleotide
  Target: LAMA2; (+) strand; PAM type: YTN; PAM sequence: TTC
acgttaaatcaacatatctt

SEQ ID NO: 372331 - DNA, 20 bp, Artificial Sequence
  Description of Artificial Sequence: Synthetic oligonucleotide
  Target: LAMA2; (+) strand; PAM type: YTN; PAM sequence: TTA
aatcaacatatcttattttg

SEQ ID NO: 372332 - DNA, 20 bp, Artificial Sequence
  Description of Artificial Sequence: Synthetic oligonucleotide
  Target: LAMA2; (+) strand; PAM type: YTN; PAM sequence: CTT
attttgtttaaaaatttgta

SEQ ID NO: 372333 - DNA, 20 bp, Artificial Sequence
  Description of Artificial Sequence: Synthetic oligonucleotide
  Target: LAMA2; (+) strand; PAM type: YTN; PAM sequence: TTA
ttttgtttaaaaatttgtaa

SEQ ID NO: 372334 - DNA, 20 bp, Artificial Sequence
  Description of Artificial Sequence: Synthetic oligonucleotide
  Target: LAMA2; (+) strand; PAM type: YTN; PAM sequence: TTT
tgtttaaaaatttgtaaaaa

SEQ ID NO: 372335 - DNA, 20 bp, Artificial Sequence
  Description of Artificial Sequence: Synthetic oligonucleotide
  Target: LAMA2; (+) strand; PAM type: YTN; PAM sequence: TTT
gtttaaaaatttgtaaaaaa

SEQ ID NO: 372336 - DNA, 20 bp, Artificial Sequence
  Description of Artificial Sequence: Synthetic oligonucleotide
  Target: LAMA2; (+) strand; PAM type: YTN; PAM sequence: TTG
tttaaaaatttgtaaaaaaa

SEQ ID NO: 372337 - DNA, 20 bp, Artificial Sequence
  Description of Artificial Sequence: Synthetic oligonucleotide
  Target: LAMA2; (+) strand; PAM type: YTN; PAM sequence: TTT
aaaaatttgtaaaaaaaaaa

SEQ ID NO: 372338 - DNA, 20 bp, Artificial Sequence
  Description of Artificial Sequence: Synthetic oligonucleotide
  Target: LAMA2; (+) strand; PAM type: YTN; PAM sequence: TTA
aaaatttgtaaaaaaaaaaa

SEQ ID NO: 372339 - DNA, 20 bp, Artificial Sequence
  Description of Artificial Sequence: Synthetic oligonucleotide
  Target: LAMA2; (+) strand; PAM type: YTN; PAM sequence: TTT
gtaaaaaaaaaaaaaaaggc

SEQ ID NO: 372340 - DNA, 20 bp, Artificial Sequence
  Description of Artificial Sequence: Synthetic oligonucleotide
  Target: LAMA2; (+) strand; PAM type: YTN; PAM sequence: TTG
taaaaaaaaaaaaaaaggca

SEQ ID NO: 372341 - DNA, 20 bp, Artificial Sequence
  Description of Artificial Sequence: Synthetic oligonucleotide
  Target: LAMA2; (+) strand; PAM type: YTN; PAM sequence: TTT
tttaaaaaattaataagtcg

SEQ ID NO: 372342 - DNA, 20 bp, Artificial Sequence
  Description of Artificial Sequence: Synthetic oligonucleotide
  Target: LAMA2; (+) strand; PAM type: YTN; PAM sequence: TTT
ttaaaaaattaataagtcgt

SEQ ID NO: 372343 - DNA, 20 bp, Artificial Sequence
  Description of Artificial Sequence: Synthetic oligonucleotide
  Target: LAMA2; (+) strand; PAM type: YTN; PAM sequence: TTT
taaaaaattaataagtcgta

SEQ ID NO: 372344 - DNA, 20 bp, Artificial Sequence
  Description of Artificial Sequence: Synthetic oligonucleotide
  Target: LAMA2; (+) strand; PAM type: YTN; PAM sequence: TTT
aaaaaattaataagtcgtat

SEQ ID NO: 372345 - DNA, 20 bp, Artificial Sequence
  Description of Artificial Sequence: Synthetic oligonucleotide
  Target: LAMA2; (+) strand; PAM type: YTN; PAM sequence: TTA
aaaaattaataagtcgtatc

SEQ ID NO: 372346 - DNA, 20 bp, Artificial Sequence
  Description of Artificial Sequence: Synthetic oligonucleotide
  Target: LAMA2; (+) strand; PAM type: YTN; PAM sequence: TTA
ataagtcgtatctataattt

SEQ ID NO: 372347 - DNA, 20 bp, Artificial Sequence
  Description of Artificial Sequence: Synthetic oligonucleotide
  Target: LAMA2; (+) strand; PAM type: YTN; PAM sequence: CTA
taatttattatggcaatatg

SEQ ID NO: 372348 - DNA, 20 bp, Artificial Sequence
  Description of Artificial Sequence: Synthetic oligonucleotide
  Target: LAMA2; (+) strand; PAM type: YTN; PAM sequence: TTT
attatggcaatatgctttca

SEQ ID NO: 372349 - DNA, 20 bp, Artificial Sequence
  Description of Artificial Sequence: Synthetic oligonucleotide
  Target: LAMA2; (+) strand; PAM type: YTN; PAM sequence: TTA
ttatggcaatatgctttcat

SEQ ID NO: 372350 - DNA, 20 bp, Artificial Sequence
  Description of Artificial Sequence: Synthetic oligonucleotide
  Target: LAMA2; (+) strand; PAM type: YTN; PAM sequence: TTA
tggcaatatgctttcatact

SEQ ID NO: 372351 - DNA, 20 bp, Artificial Sequence
  Description of Artificial Sequence: Synthetic oligonucleotide
  Target: LAMA2; (+) strand; PAM type: YTN; PAM sequence: CTT
tcatactttttcagtataaa

SEQ ID NO: 372352 - DNA, 20 bp, Artificial Sequence
  Description of Artificial Sequence: Synthetic oligonucleotide
  Target: LAMA2; (+) strand; PAM type: YTN; PAM sequence: TTT
catactttttcagtataaaa

SEQ ID NO: 372353 - DNA, 20 bp, Artificial Sequence
  Description of Artificial Sequence: Synthetic oligonucleotide
  Target: LAMA2; (+) strand; PAM type: YTN; PAM sequence: TTC
atactttttcagtataaaag

SEQ ID NO: 372354 - DNA, 20 bp, Artificial Sequence
  Description of Artificial Sequence: Synthetic oligonucleotide
  Target: LAMA2; (+) strand; PAM type: YTN; PAM sequence: CTT
tttcagtataaaagggttta

SEQ ID NO: 372355 - DNA, 20 bp, Artificial Sequence
  Description of Artificial Sequence: Synthetic oligonucleotide
  Target: LAMA2; (+) strand; PAM type: YTN; PAM sequence: TTT
ttcagtataaaagggtttat

SEQ ID NO: 372356 - DNA, 20 bp, Artificial Sequence
  Description of Artificial Sequence: Synthetic oligonucleotide
  Target: LAMA2; (+) strand; PAM type: YTN; PAM sequence: TTT
tcagtataaaagggtttatc

SEQ ID NO: 372357 - DNA, 20 bp, Artificial Sequence
  Description of Artificial Sequence: Synthetic oligonucleotide
  Target: LAMA2; (+) strand; PAM type: YTN; PAM sequence: TTT
cagtataaaagggtttatca

SEQ ID NO: 372358 - DNA, 20 bp, Artificial Sequence
  Description of Artificial Sequence: Synthetic oligonucleotide
  Target: LAMA2; (+) strand; PAM type: YTN; PAM sequence: TTC
agtataaaagggtttatcaa

SEQ ID NO: 372359 - DNA, 20 bp, Artificial Sequence
  Description of Artificial Sequence: Synthetic oligonucleotide
  Target: LAMA2; (+) strand; PAM type: YTN; PAM sequence: TTT
atcaaatcaatcatattatt

SEQ ID NO: 372360 - DNA, 20 bp, Artificial Sequence
  Description of Artificial Sequence: Synthetic oligonucleotide
  Target: LAMA2; (+) strand; PAM type: YTN; PAM sequence: TTA
tcaaatcaatcatattattc

SEQ ID NO: 372361 - DNA, 20 bp, Artificial Sequence
  Description of Artificial Sequence: Synthetic oligonucleotide
  Target: LAMA2; (+) strand; PAM type: YTN; PAM sequence: TTA
ttccattttgcagaatggga

SEQ ID NO: 372362 - DNA, 20 bp, Artificial Sequence
  Description of Artificial Sequence: Synthetic oligonucleotide
  Target: LAMA2; (+) strand; PAM type: YTN; PAM sequence: TTC
cattttgcagaatgggaaac

SEQ ID NO: 372363 - DNA, 20 bp, Artificial Sequence
  Description of Artificial Sequence: Synthetic oligonucleotide
  Target: LAMA2; (+) strand; PAM type: YTN; PAM sequence: TTT
tgcagaatgggaaacaggtt

SEQ ID NO: 372364 - DNA, 20 bp, Artificial Sequence
  Description of Artificial Sequence: Synthetic oligonucleotide
  Target: LAMA2; (+) strand; PAM type: YTN; PAM sequence: TTT
gcagaatgggaaacaggttt

SEQ ID NO: 372365 - DNA, 20 bp, Artificial Sequence
  Description of Artificial Sequence: Synthetic oligonucleotide
  Target: LAMA2; (+) strand; PAM type: YTN; PAM sequence: TTG
cagaatgggaaacaggttta

SEQ ID NO: 372366 - DNA, 20 bp, Artificial Sequence
  Description of Artificial Sequence: Synthetic oligonucleotide
  Target: LAMA2; (+) strand; PAM type: YTN; PAM sequence: TTT
agagaaatatatcgttcaaa

SEQ ID NO: 372367 - DNA, 20 bp, Artificial Sequence
  Description of Artificial Sequence: Synthetic oligonucleotide
  Target: LAMA2; (+) strand; PAM type: YTN; PAM sequence: TTA
gagaaatatatcgttcaaag

SEQ ID NO: 372368 - DNA, 20 bp, Artificial Sequence
  Description of Artificial Sequence: Synthetic oligonucleotide
  Target: LAMA2; (+) strand; PAM type: YTN; PAM sequence: TTC
aaagacatacttagaaaata

SEQ ID NO: 372369 - DNA, 20 bp, Artificial Sequence
  Description of Artificial Sequence: Synthetic oligonucleotide
  Target: LAMA2; (+) strand; PAM type: YTN; PAM sequence: CTT
agaaaataaatcaagtctaa

SEQ ID NO: 372370 - DNA, 20 bp, Artificial Sequence
  Description of Artificial Sequence: Synthetic oligonucleotide
  Target: LAMA2; (+) strand; PAM type: YTN; PAM sequence: TTA
gaaaataaatcaagtctaat

SEQ ID NO: 372371 - DNA, 20 bp, Artificial Sequence
  Description of Artificial Sequence: Synthetic oligonucleotide
  Target: LAMA2; (+) strand; PAM type: YTN; PAM sequence: CTA
attaagaaatgcaattgtgg

SEQ ID NO: 372372 - DNA, 20 bp, Artificial Sequence
  Description of Artificial Sequence: Synthetic oligonucleotide
  Target: LAMA2; (+) strand; PAM type: YTN; PAM sequence: TTA
agaaatgcaattgtggagat

SEQ ID NO: 372373 - DNA, 20 bp, Artificial Sequence
  Description of Artificial Sequence: Synthetic oligonucleotide
  Target: LAMA2; (+) strand; PAM type: YTN; PAM sequence: TTG
tggagattaaatcagatttc

SEQ ID NO: 372374 - DNA, 20 bp, Artificial Sequence
  Description of Artificial Sequence: Synthetic oligonucleotide
  Target: LAMA2; (+) strand; PAM type: YTN; PAM sequence: TTA
aatcagatttcatagtactt

SEQ ID NO: 372375 - DNA, 20 bp, Artificial Sequence
  Description of Artificial Sequence: Synthetic oligonucleotide
  Target: LAMA2; (+) strand; PAM type: YTN; PAM sequence: TTT
catagtacttaaaggtaatt

SEQ ID NO: 372376 - DNA, 20 bp, Artificial Sequence
  Description of Artificial Sequence: Synthetic oligonucleotide
  Target: LAMA2; (+) strand; PAM type: YTN; PAM sequence: TTC
atagtacttaaaggtaatta

SEQ ID NO: 372377 - DNA, 20 bp, Artificial Sequence
  Description of Artificial Sequence: Synthetic oligonucleotide
  Target: LAMA2; (+) strand; PAM type: YTN; PAM sequence: CTT
aaaggtaattaaagaaataa

SEQ ID NO: 372378 - DNA, 20 bp, Artificial Sequence
  Description of Artificial Sequence: Synthetic oligonucleotide
  Target: LAMA2; (+) strand; PAM type: YTN; PAM sequence: TTA
aaggtaattaaagaaataag

SEQ ID NO: 372379 - DNA, 20 bp, Artificial Sequence
  Description of Artificial Sequence: Synthetic oligonucleotide
  Target: LAMA2; (+) strand; PAM type: YTN; PAM sequence: TTA
aagaaataagtgtttgctta

SEQ ID NO: 372380 - DNA, 20 bp, Artificial Sequence
  Description of Artificial Sequence: Synthetic oligonucleotide
  Target: LAMA2; (+) strand; PAM type: YTN; PAM sequence: TTT
gcttaatgattctcctgaga

SEQ ID NO: 372381 - DNA, 20 bp, Artificial Sequence
  Description of Artificial Sequence: Synthetic oligonucleotide
  Target: LAMA2; (+) strand; PAM type: YTN; PAM sequence: TTG
cttaatgattctcctgagaa

SEQ ID NO: 372382 - DNA, 20 bp, Artificial Sequence
  Description of Artificial Sequence: Synthetic oligonucleotide
  Target: LAMA2; (+) strand; PAM type: YTN; PAM sequence: CTT
aatgattctcctgagaataa

SEQ ID NO: 372383 - DNA, 20 bp, Artificial Sequence
  Description of Artificial Sequence: Synthetic oligonucleotide
  Target: LAMA2; (+) strand; PAM type: YTN; PAM sequence: TTA
atgattctcctgagaataag

SEQ ID NO: 372384 - DNA, 20 bp, Artificial Sequence
  Description of Artificial Sequence: Synthetic oligonucleotide
  Target: LAMA2; (+) strand; PAM type: YTN; PAM sequence: TTC
tcctgagaataagtaggaga

SEQ ID NO: 372385 - DNA, 20 bp, Artificial Sequence
  Description of Artificial Sequence: Synthetic oligonucleotide
  Target: LAMA2; (+) strand; PAM type: YTN; PAM sequence: CTC
ctgagaataagtaggagaga

SEQ ID NO: 372386 - DNA, 20 bp, Artificial Sequence
  Description of Artificial Sequence: Synthetic oligonucleotide
  Target: LAMA2; (+) strand; PAM type: YTN; PAM sequence: CTG
agaataagtaggagagatca

SEQ ID NO: 372387 - DNA, 20 bp, Artificial Sequence
  Description of Artificial Sequence: Synthetic oligonucleotide
  Target: LAMA2; (+) strand; PAM type: YTN; PAM sequence: TTG
aactgaagaagaaaatactt

SEQ ID NO: 372388 - DNA, 20 bp, Artificial Sequence
  Description of Artificial Sequence: Synthetic oligonucleotide
  Target: LAMA2; (+) strand; PAM type: YTN; PAM sequence: CTG
aagaagaaaatacttagaaa

SEQ ID NO: 372389 - DNA, 20 bp, Artificial Sequence
  Description of Artificial Sequence: Synthetic oligonucleotide
  Target: LAMA2; (+) strand; PAM type: YTN; PAM sequence: CTT
agaaacttcagaaatttatg

SEQ ID NO: 372390 - DNA, 20 bp, Artificial Sequence
  Description of Artificial Sequence: Synthetic oligonucleotide
  Target: LAMA2; (+) strand; PAM type: YTN; PAM sequence: TTA
gaaacttcagaaatttatga

SEQ ID NO: 372391 - DNA, 20 bp, Artificial Sequence
  Description of Artificial Sequence: Synthetic oligonucleotide
  Target: LAMA2; (+) strand; PAM type: YTN; PAM sequence: CTT
cagaaatttatgacgctaac

SEQ ID NO: 372392 - DNA, 20 bp, Artificial Sequence
  Description of Artificial Sequence: Synthetic oligonucleotide
  Target: LAMA2; (+) strand; PAM type: YTN; PAM sequence: TTC
agaaatttatgacgctaaca

SEQ ID NO: 372393 - DNA, 20 bp, Artificial Sequence
  Description of Artificial Sequence: Synthetic oligonucleotide
  Target: LAMA2; (+) strand; PAM type: YTN; PAM sequence: TTT
atgacgctaacaccaaaatc

SEQ ID NO: 372394 - DNA, 20 bp, Artificial Sequence
  Description of Artificial Sequence: Synthetic oligonucleotide
  Target: LAMA2; (+) strand; PAM type: YTN; PAM sequence: TTA
tgacgctaacaccaaaatca

SEQ ID NO: 372395 - DNA, 20 bp, Artificial Sequence
  Description of Artificial Sequence: Synthetic oligonucleotide
  Target: LAMA2; (+) strand; PAM type: YTN; PAM sequence: CTA
acaccaaaatcatgaagtaa

SEQ ID NO: 372396 - DNA, 20 bp, Artificial Sequence
  Description of Artificial Sequence: Synthetic oligonucleotide
  Target: LAMA2; (+) strand; PAM type: YTN; PAM sequence: TTT
tttctttttctcctcttcct

SEQ ID NO: 372397 - DNA, 20 bp, Artificial Sequence
  Description of Artificial Sequence: Synthetic oligonucleotide
  Target: LAMA2; (+) strand; PAM type: YTN; PAM sequence: TTT
ttctttttctcctcttcctc

SEQ ID NO: 372398 - DNA, 20 bp, Artificial Sequence
  Description of Artificial Sequence: Synthetic oligonucleotide
  Target: LAMA2; (+) strand; PAM type: YTN; PAM sequence: TTT
tctttttctcctcttcctct

SEQ ID NO: 372399 - DNA, 20 bp, Artificial Sequence
  Description of Artificial Sequence: Synthetic oligonucleotide
  Target: LAMA2; (+) strand; PAM type: YTN; PAM sequence: TTT
ctttttctcctcttcctctc

SEQ ID NO: 372400 - DNA, 20 bp, Artificial Sequence
  Description of Artificial Sequence: Synthetic oligonucleotide
  Target: LAMA2; (+) strand; PAM type: YTN; PAM sequence: TTC
tttttctcctcttcctctca

SEQ ID NO: 372401 - DNA, 20 bp, Artificial Sequence
  Description of Artificial Sequence: Synthetic oligonucleotide
  Target: LAMA2; (+) strand; PAM type: YTN; PAM sequence: CTT
tttctcctcttcctctcagt

SEQ ID NO: 372402 - DNA, 20 bp, Artificial Sequence
  Description of Artificial Sequence: Synthetic oligonucleotide
  Target: LAMA2; (+) strand; PAM type: YTN; PAM sequence: TTT
ttctcctcttcctctcagtc

SEQ ID NO: 372403 - DNA, 20 bp, Artificial Sequence
  Description of Artificial Sequence: Synthetic oligonucleotide
  Target: LAMA2; (+) strand; PAM type: YTN; PAM sequence: TTT
tctcctcttcctctcagtcc

SEQ ID NO: 372404 - DNA, 20 bp, Artificial Sequence
  Description of Artificial Sequence: Synthetic oligonucleotide
  Target: LAMA2; (+) strand; PAM type: YTN; PAM sequence: TTT
ctcctcttcctctcagtccc

SEQ ID NO: 372405 - DNA, 20 bp, Artificial Sequence
  Description of Artificial Sequence: Synthetic oligonucleotide
  Target: LAMA2; (+) strand; PAM type: YTN; PAM sequence: TTC
tcctcttcctctcagtccct

SEQ ID NO: 372406 - DNA, 20 bp, Artificial Sequence
  Description of Artificial Sequence: Synthetic oligonucleotide
  Target: LAMA2; (+) strand; PAM type: YTN; PAM sequence: CTC
ctcttcctctcagtccctgc

SEQ ID NO: 372407 - DNA, 20 bp, Artificial Sequence
  Description of Artificial Sequence: Synthetic oligonucleotide
  Target: LAMA2; (+) strand; PAM type: YTN; PAM sequence: CTC
ttcctctcagtccctgcccc

SEQ ID NO: 372408 - DNA, 20 bp, Artificial Sequence
  Description of Artificial Sequence: Synthetic oligonucleotide
  Target: LAMA2; (+) strand; PAM type: YTN; PAM sequence: CTT
cctctcagtccctgcccctt

SEQ ID NO: 372409 - DNA, 20 bp, Artificial Sequence
  Description of Artificial Sequence: Synthetic oligonucleotide
  Target: LAMA2; (+) strand; PAM type: YTN; PAM sequence: TTC
ctctcagtccctgccccttt

SEQ ID NO: 372410 - DNA, 20 bp, Artificial Sequence
  Description of Artificial Sequence: Synthetic oligonucleotide
  Target: LAMA2; (+) strand; PAM type: YTN; PAM sequence: CTC
tcagtccctgccccttttca

SEQ ID NO: 372411 - DNA, 20 bp, Artificial Sequence
  Description of Artificial Sequence: Synthetic oligonucleotide
  Target: LAMA2; (+) strand; PAM type: YTN; PAM sequence: CTC
agtccctgccccttttcagt

SEQ ID NO: 372412 - DNA, 20 bp, Artificial Sequence
  Description of Artificial Sequence: Synthetic oligonucleotide
  Target: LAMA2; (+) strand; PAM type: YTN; PAM sequence: CTG
ccccttttcagttatgtgtg

SEQ ID NO: 372413 - DNA, 20 bp, Artificial Sequence
  Description of Artificial Sequence: Synthetic oligonucleotide
  Target: LAMA2; (+) strand; PAM type: YTN; PAM sequence: CTT
ttcagttatgtgtgaatatt

SEQ ID NO: 372414 - DNA, 20 bp, Artificial Sequence
  Description of Artificial Sequence: Synthetic oligonucleotide
  Target: LAMA2; (+) strand; PAM type: YTN; PAM sequence: TTT
tcagttatgtgtgaatattc

SEQ ID NO: 372415 - DNA, 20 bp, Artificial Sequence
  Description of Artificial Sequence: Synthetic oligonucleotide
  Target: LAMA2; (+) strand; PAM type: YTN; PAM sequence: TTT
cagttatgtgtgaatattct

SEQ ID NO: 372416 - DNA, 20 bp, Artificial Sequence
  Description of Artificial Sequence: Synthetic oligonucleotide
  Target: LAMA2; (+) strand; PAM type: YTN; PAM sequence: TTC
agttatgtgtgaatattctc

SEQ ID NO: 372417 - DNA, 20 bp, Artificial Sequence
  Description of Artificial Sequence: Synthetic oligonucleotide
  Target: LAMA2; (+) strand; PAM type: YTN; PAM sequence: TTA
tgtgtgaatattctcattac

SEQ ID NO: 372418 - DNA, 20 bp, Artificial Sequence
  Description of Artificial Sequence: Synthetic oligonucleotide
  Target: LAMA2; (+) strand; PAM type: YTN; PAM sequence: TTC
tcattaccctcatctccagc

SEQ ID NO: 372419 - DNA, 20 bp, Artificial Sequence
  Description of Artificial Sequence: Synthetic oligonucleotide
  Target: LAMA2; (+) strand; PAM type: YTN; PAM sequence: CTC
attaccctcatctccagctt

SEQ ID NO: 372420 - DNA, 20 bp, Artificial Sequence
  Description of Artificial Sequence: Synthetic oligonucleotide
  Target: LAMA2; (+) strand; PAM type: YTN; PAM sequence: TTA
ccctcatctccagcttctcc

SEQ ID NO: 372421 - DNA, 20 bp, Artificial Sequence
  Description of Artificial Sequence: Synthetic oligonucleotide
  Target: LAMA2; (+) strand; PAM type: YTN; PAM sequence: CTC
atctccagcttctccactga

SEQ ID NO: 372422 - DNA, 20 bp, Artificial Sequence
  Description of Artificial Sequence: Synthetic oligonucleotide
  Target: LAMA2; (+) strand; PAM type: YTN; PAM sequence: CTC
cagcttctccactgacattg

SEQ ID NO: 372423 - DNA, 20 bp, Artificial Sequence
  Description of Artificial Sequence: Synthetic oligonucleotide
  Target: LAMA2; (+) strand; PAM type: YTN; PAM sequence: CTT
ctccactgacattgtgtagc

SEQ ID NO: 372424 - DNA, 20 bp, Artificial Sequence
  Description of Artificial Sequence: Synthetic oligonucleotide
  Target: LAMA2; (+) strand; PAM type: YTN; PAM sequence: TTC
tccactgacattgtgtagcc

SEQ ID NO: 372425 - DNA, 20 bp, Artificial Sequence
  Description of Artificial Sequence: Synthetic oligonucleotide
  Target: LAMA2; (+) strand; PAM type: YTN; PAM sequence: CTC
cactgacattgtgtagccac

SEQ ID NO: 372426 - DNA, 20 bp, Artificial Sequence
  Description of Artificial Sequence: Synthetic oligonucleotide
  Target: LAMA2; (+) strand; PAM type: YTN; PAM sequence: CTG
acattgtgtagccactcaaa

SEQ ID NO: 372427 - DNA, 20 bp, Artificial Sequence
  Description of Artificial Sequence: Synthetic oligonucleotide
  Target: LAMA2; (+) strand; PAM type: YTN; PAM sequence: TTG
tgtagccactcaaaatggtt

SEQ ID NO: 372428 - DNA, 20 bp, Artificial Sequence
  Description of Artificial Sequence: Synthetic oligonucleotide
  Target: LAMA2; (+) strand; PAM type: YTN; PAM sequence: CTC
aaaatggtttctcttatcct

SEQ ID NO: 372429 - DNA, 20 bp, Artificial Sequence
  Description of Artificial Sequence: Synthetic oligonucleotide
  Target: LAMA2; (+) strand; PAM type: YTN; PAM sequence: TTT
ctcttatcctacccaactgt

SEQ ID NO: 372430 - DNA, 20 bp, Artificial Sequence
  Description of Artificial Sequence: Synthetic oligonucleotide
  Target: LAMA2; (+) strand; PAM type: YTN; PAM sequence: TTC
tcttatcctacccaactgtt

SEQ ID NO: 372431 - DNA, 20 bp, Artificial Sequence
  Description of Artificial Sequence: Synthetic oligonucleotide
  Target: LAMA2; (+) strand; PAM type: YTN; PAM sequence: CTC
ttatcctacccaactgttca

SEQ ID NO: 372432 - DNA, 20 bp, Artificial Sequence
  Description of Artificial Sequence: Synthetic oligonucleotide
  Target: LAMA2; (+) strand; PAM type: YTN; PAM sequence: CTT
atcctacccaactgttcaag

SEQ ID NO: 372433 - DNA, 20 bp, Artificial Sequence
  Description of Artificial Sequence: Synthetic oligonucleotide
  Target: LAMA2; (+) strand; PAM type: YTN; PAM sequence: TTA
tcctacccaactgttcaaga

SEQ ID NO: 372434 - DNA, 20 bp, Artificial Sequence
  Description of Artificial Sequence: Synthetic oligonucleotide
  Target: LAMA2; (+) strand; PAM type: YTN; PAM sequence: CTA
cccaactgttcaagataata

SEQ ID NO: 372435 - DNA, 20 bp, Artificial Sequence
  Description of Artificial Sequence: Synthetic oligonucleotide
  Target: LAMA2; (+) strand; PAM type: YTN; PAM sequence: CTG
ttcaagataataattagttg

SEQ ID NO: 372436 - DNA, 20 bp, Artificial Sequence
  Description of Artificial Sequence: Synthetic oligonucleotide
  Target: LAMA2; (+) strand; PAM type: YTN; PAM sequence: TTC
aagataataattagttgaaa

SEQ ID NO: 372437 - DNA, 20 bp, Artificial Sequence
  Description of Artificial Sequence: Synthetic oligonucleotide
  Target: LAMA2; (+) strand; PAM type: YTN; PAM sequence: TTA
gttgaaaggagtcctgatcc

SEQ ID NO: 372438 - DNA, 20 bp, Artificial Sequence
  Description of Artificial Sequence: Synthetic oligonucleotide
  Target: LAMA2; (+) strand; PAM type: YTN; PAM sequence: TTG
aaaggagtcctgatcccctg

SEQ ID NO: 372439 - DNA, 20 bp, Artificial Sequence
  Description of Artificial Sequence: Synthetic oligonucleotide
  Target: LAMA2; (+) strand; PAM type: YTN; PAM sequence: CTG
atcccctgttgtgtatgcaa

SEQ ID NO: 372440 - DNA, 20 bp, Artificial Sequence
  Description of Artificial Sequence: Synthetic oligonucleotide
  Target: LAMA2; (+) strand; PAM type: YTN; PAM sequence: CTG
ttgtgtatgcaaatacagaa

SEQ ID NO: 372441 - DNA, 20 bp, Artificial Sequence
  Description of Artificial Sequence: Synthetic oligonucleotide
  Target: LAMA2; (+) strand; PAM type: YTN; PAM sequence: TTG
tgtatgcaaatacagaacat

SEQ ID NO: 372442 - DNA, 20 bp, Artificial Sequence
  Description of Artificial Sequence: Synthetic oligonucleotide
  Target: LAMA2; (+) strand; PAM type: YTN; PAM sequence: CTG
attttctaaccctaatgatg

SEQ ID NO: 372443 - DNA, 20 bp, Artificial Sequence
  Description of Artificial Sequence: Synthetic oligonucleotide
  Target: LAMA2; (+) strand; PAM type: YTN; PAM sequence: TTT
tctaaccctaatgatggaag

SEQ ID NO: 372444 - DNA, 20 bp, Artificial Sequence
  Description of Artificial Sequence: Synthetic oligonucleotide
  Target: LAMA2; (+) strand; PAM type: YTN; PAM sequence: TTT
ctaaccctaatgatggaagt

SEQ ID NO: 372445 - DNA, 20 bp, Artificial Sequence
  Description of Artificial Sequence: Synthetic oligonucleotide
  Target: LAMA2; (+) strand; PAM type: YTN; PAM sequence: TTC
taaccctaatgatggaagtt

SEQ ID NO: 372446 - DNA, 20 bp, Artificial Sequence
  Description of Artificial Sequence: Synthetic oligonucleotide
  Target: LAMA2; (+) strand; PAM type: YTN; PAM sequence: CTA
accctaatgatggaagtttt

SEQ ID NO: 372447 - DNA, 20 bp, Artificial Sequence
  Description of Artificial Sequence: Synthetic oligonucleotide
  Target: LAMA2; (+) strand; PAM type: YTN; PAM sequence: CTA
atgatggaagttttaatttt

SEQ ID NO: 372448 - DNA, 20 bp, Artificial Sequence
  Description of Artificial Sequence: Synthetic oligonucleotide
  Target: LAMA2; (+) strand; PAM type: YTN; PAM sequence: TTT
taattttatacccatgatta

SEQ ID NO: 372449 - DNA, 20 bp, Artificial Sequence
  Description of Artificial Sequence: Synthetic oligonucleotide
  Target: LAMA2; (+) strand; PAM type: YTN; PAM sequence: TTT
aattttatacccatgattaa

SEQ ID NO: 372450 - DNA, 20 bp, Artificial Sequence
  Description of Artificial Sequence: Synthetic oligonucleotide
  Target: LAMA2; (+) strand; PAM type: YTN; PAM sequence: TTA
attttatacccatgattaaa

SEQ ID NO: 372451 - DNA, 20 bp, Artificial Sequence
  Description of Artificial Sequence: Synthetic oligonucleotide
  Target: LAMA2; (+) strand; PAM type: YTN; PAM sequence: TTT
tatacccatgattaaaggag

SEQ ID NO: 372452 - DNA, 20 bp, Artificial Sequence
  Description of Artificial Sequence: Synthetic oligonucleotide
  Target: LAMA2; (+) strand; PAM type: YTN; PAM sequence: TTT
atacccatgattaaaggagt

SEQ ID NO: 372453 - DNA, 20 bp, Artificial Sequence
  Description of Artificial Sequence: Synthetic oligonucleotide
  Target: LAMA2; (+) strand; PAM type: YTN; PAM sequence: TTA
tacccatgattaaaggagtg

SEQ ID NO: 372454 - DNA, 20 bp, Artificial Sequence
  Description of Artificial Sequence: Synthetic oligonucleotide
  Target: LAMA2; (+) strand; PAM type: YTN; PAM sequence: TTA
aaggagtgcttgttttatat

SEQ ID NO: 372455 - DNA, 20 bp, Artificial Sequence
  Description of Artificial Sequence: Synthetic oligonucleotide
  Target: LAMA2; (+) strand; PAM type: YTN; PAM sequence: CTT
gttttatatcacatacaatc

SEQ ID NO: 372456 - DNA, 20 bp, Artificial Sequence
  Description of Artificial Sequence: Synthetic oligonucleotide
  Target: LAMA2; (+) strand; PAM type: YTN; PAM sequence: TTG
ttttatatcacatacaatcc

SEQ ID NO: 372457 - DNA, 20 bp, Artificial Sequence
  Description of Artificial Sequence: Synthetic oligonucleotide
  Target: LAMA2; (+) strand; PAM type: YTN; PAM sequence: TTT
tatatcacatacaatcccaa

SEQ ID NO: 372458 - DNA, 20 bp, Artificial Sequence
  Description of Artificial Sequence: Synthetic oligonucleotide
  Target: LAMA2; (+) strand; PAM type: YTN; PAM sequence: TTT
atatcacatacaatcccaag

SEQ ID NO: 372459 - DNA, 20 bp, Artificial Sequence
  Description of Artificial Sequence: Synthetic oligonucleotide
  Target: LAMA2; (+) strand; PAM type: YTN; PAM sequence: TTA
tatcacatacaatcccaaga

SEQ ID NO: 372460 - DNA, 20 bp, Artificial Sequence
  Description of Artificial Sequence: Synthetic oligonucleotide
  Target: LAMA2; (+) strand; PAM type: YTN; PAM sequence: TTC
attatattttatttcaaatg

SEQ ID NO: 372461 - DNA, 20 bp, Artificial Sequence
  Description of Artificial Sequence: Synthetic oligonucleotide
  Target: LAMA2; (+) strand; PAM type: YTN; PAM sequence: TTA
tattttatttcaaatgcatg

SEQ ID NO: 372462 - DNA, 20 bp, Artificial Sequence
  Description of Artificial Sequence: Synthetic oligonucleotide
  Target: LAMA2; (+) strand; PAM type: YTN; PAM sequence: TTT
tatttcaaatgcatgacagt

SEQ ID NO: 372463 - DNA, 20 bp, Artificial Sequence
  Description of Artificial Sequence: Synthetic oligonucleotide
  Target: LAMA2; (+) strand; PAM type: YTN; PAM sequence: TTT
atttcaaatgcatgacagtt

SEQ ID NO: 372464 - DNA, 20 bp, Artificial Sequence
  Description of Artificial Sequence: Synthetic oligonucleotide
  Target: LAMA2; (+) strand; PAM type: YTN; PAM sequence: TTA
tttcaaatgcatgacagtta

SEQ ID NO: 372465 - DNA, 20 bp, Artificial Sequence
  Description of Artificial Sequence: Synthetic oligonucleotide
  Target: LAMA2; (+) strand; PAM type: YTN; PAM sequence: TTT
caaatgcatgacagttaaag

SEQ ID NO: 372466 - DNA, 20 bp, Artificial Sequence
  Description of Artificial Sequence: Synthetic oligonucleotide
  Target: LAMA2; (+) strand; PAM type: YTN; PAM sequence: TTC
aaatgcatgacagttaaaga

SEQ ID NO: 372467 - DNA, 20 bp, Artificial Sequence
  Description of Artificial Sequence: Synthetic oligonucleotide
  Target: LAMA2; (+) strand; PAM type: YTN; PAM sequence: TTA
aagacacacaaaatattctc

SEQ ID NO: 372468 - DNA, 20 bp, Artificial Sequence
  Description of Artificial Sequence: Synthetic oligonucleotide
  Target: LAMA2; (+) strand; PAM type: YTN; PAM sequence: TTC
tcacacattgacttaatatg

SEQ ID NO: 372469 - DNA, 20 bp, Artificial Sequence
  Description of Artificial Sequence: Synthetic oligonucleotide
  Target: LAMA2; (+) strand; PAM type: YTN; PAM sequence: CTC
acacattgacttaatatgtg

SEQ ID NO: 372470 - DNA, 20 bp, Artificial Sequence
  Description of Artificial Sequence: Synthetic oligonucleotide
  Target: LAMA2; (+) strand; PAM type: YTN; PAM sequence: TTG
acttaatatgtgtttaattt

SEQ ID NO: 372471 - DNA, 20 bp, Artificial Sequence
  Description of Artificial Sequence: Synthetic oligonucleotide
  Target: LAMA2; (+) strand; PAM type: YTN; PAM sequence: CTT
aatatgtgtttaattttatt

SEQ ID NO: 372472 - DNA, 20 bp, Artificial Sequence
  Description of Artificial Sequence: Synthetic oligonucleotide
  Target: LAMA2; (+) strand; PAM type: YTN; PAM sequence: TTA
atatgtgtttaattttattt

SEQ ID NO: 372473 - DNA, 20 bp, Artificial Sequence
  Description of Artificial Sequence: Synthetic oligonucleotide
  Target: LAMA2; (+) strand; PAM type: YTN; PAM sequence: TTT
aattttattttagagtattg

SEQ ID NO: 372474 - DNA, 20 bp, Artificial Sequence
  Description of Artificial Sequence: Synthetic oligonucleotide
  Target: LAMA2; (+) strand; PAM type: YTN; PAM sequence: TTA
attttattttagagtattgg

SEQ ID NO: 372475 - DNA, 20 bp, Artificial Sequence
  Description of Artificial Sequence: Synthetic oligonucleotide
  Target: LAMA2; (+) strand; PAM type: YTN; PAM sequence: TTT
tattttagagtattggatta

SEQ ID NO: 372476 - DNA, 20 bp, Artificial Sequence
  Description of Artificial Sequence: Synthetic oligonucleotide
  Target: LAMA2; (+) strand; PAM type: YTN; PAM sequence: TTT
attttagagtattggattaa

SEQ ID NO: 372477 - DNA, 20 bp, Artificial Sequence
  Description of Artificial Sequence: Synthetic oligonucleotide
  Target: LAMA2; (+) strand; PAM type: YTN; PAM sequence: TTA
ttttagagtattggattaac

SEQ ID NO: 372478 - DNA, 20 bp, Artificial Sequence
  Description of Artificial Sequence: Synthetic oligonucleotide
  Target: LAMA2; (+) strand; PAM type: YTN; PAM sequence: TTT
tagagtattggattaactct

SEQ ID NO: 372479 - DNA, 20 bp, Artificial Sequence
  Description of Artificial Sequence: Synthetic oligonucleotide
  Target: LAMA2; (+) strand; PAM type: YTN; PAM sequence: TTT
agagtattggattaactctc

SEQ ID NO: 372480 - DNA, 20 bp, Artificial Sequence
  Description of Artificial Sequence: Synthetic oligonucleotide
  Target: LAMA2; (+) strand; PAM type: YTN; PAM sequence: TTA
gagtattggattaactctct

SEQ ID NO: 372481 - DNA, 20 bp, Artificial Sequence
  Description of Artificial Sequence: Synthetic oligonucleotide
  Target: LAMA2; (+) strand; PAM type: YTN; PAM sequence: TTG
gattaactctctgtgggagc

SEQ ID NO: 372482 - DNA, 20 bp, Artificial Sequence
  Description of Artificial Sequence: Synthetic oligonucleotide
  Target: LAMA2; (+) strand; PAM type: YTN; PAM sequence: TTA
actctctgtgggagcattta

SEQ ID NO: 372483 - DNA, 20 bp, Artificial Sequence
  Description of Artificial Sequence: Synthetic oligonucleotide
  Target: LAMA2; (+) strand; PAM type: YTN; PAM sequence: CTC
tctgtgggagcatttaacgt

SEQ ID NO: 372484 - DNA, 20 bp, Artificial Sequence
  Description of Artificial Sequence: Synthetic oligonucleotide
  Target: LAMA2; (+) strand; PAM type: YTN; PAM sequence: CTC
tgtgggagcatttaacgtta

SEQ ID NO: 372485 - DNA, 20 bp, Artificial Sequence
  Description of Artificial Sequence: Synthetic oligonucleotide
  Target: LAMA2; (+) strand; PAM type: YTN; PAM sequence: CTG
tgggagcatttaacgttaga

SEQ ID NO: 372486 - DNA, 20 bp, Artificial Sequence
  Description of Artificial Sequence: Synthetic oligonucleotide
  Target: LAMA2; (+) strand; PAM type: YTN; PAM sequence: TTT
aacgttagaactgaatttca

SEQ ID NO: 372487 - DNA, 20 bp, Artificial Sequence
  Description of Artificial Sequence: Synthetic oligonucleotide
  Target: LAMA2; (+) strand; PAM type: YTN; PAM sequence: TTA
acgttagaactgaatttcag

SEQ ID NO: 372488 - DNA, 20 bp, Artificial Sequence
  Description of Artificial Sequence: Synthetic oligonucleotide
  Target: LAMA2; (+) strand; PAM type: YTN; PAM sequence: TTA
gaactgaatttcaggaccca

SEQ ID NO: 372489 - DNA, 20 bp, Artificial Sequence
  Description of Artificial Sequence: Synthetic oligonucleotide
  Target: LAMA2; (+) strand; PAM type: YTN; PAM sequence: CTG
aatttcaggacccacagaag

SEQ ID NO: 372490 - DNA, 20 bp, Artificial Sequence
  Description of Artificial Sequence: Synthetic oligonucleotide
  Target: LAMA2; (+) strand; PAM type: YTN; PAM sequence: TTT
caggacccacagaaggaccc

SEQ ID NO: 372491 - DNA, 20 bp, Artificial Sequence
  Description of Artificial Sequence: Synthetic oligonucleotide
  Target: LAMA2; (+) strand; PAM type: YTN; PAM sequence: TTC
aggacccacagaaggaccca

SEQ ID NO: 372492 - DNA, 20 bp, Artificial Sequence
  Description of Artificial Sequence: Synthetic oligonucleotide
  Target: LAMA2; (+) strand; PAM type: YTN; PAM sequence: TTT
ccctaatgtctgataatcag

SEQ ID NO: 372493 - DNA, 20 bp, Artificial Sequence
  Description of Artificial Sequence: Synthetic oligonucleotide
  Target: LAMA2; (+) strand; PAM type: YTN; PAM sequence: TTC
cctaatgtctgataatcagg

SEQ ID NO: 372494 - DNA, 20 bp, Artificial Sequence
  Description of Artificial Sequence: Synthetic oligonucleotide
  Target: LAMA2; (+) strand; PAM type: YTN; PAM sequence: CTA
atgtctgataatcaggaatt

SEQ ID NO: 372495 - DNA, 20 bp, Artificial Sequence
  Description of Artificial Sequence: Synthetic oligonucleotide
  Target: LAMA2; (+) strand; PAM type: YTN; PAM sequence: CTG
ataatcaggaattgttgagc

SEQ ID NO: 372496 - DNA, 20 bp, Artificial Sequence
  Description of Artificial Sequence: Synthetic oligonucleotide
  Target: LAMA2; (+) strand; PAM type: YTN; PAM sequence: TTG
ttgagcttctattgagcaat

SEQ ID NO: 372497 - DNA, 20 bp, Artificial Sequence
  Description of Artificial Sequence: Synthetic oligonucleotide
  Target: LAMA2; (+) strand; PAM type: YTN; PAM sequence: TTG
agcttctattgagcaattgt

SEQ ID NO: 372498 - DNA, 20 bp, Artificial Sequence
  Description of Artificial Sequence: Synthetic oligonucleotide
  Target: LAMA2; (+) strand; PAM type: YTN; PAM sequence: CTT
ctattgagcaattgttttgc

SEQ ID NO: 372499 - DNA, 20 bp, Artificial Sequence
  Description of Artificial Sequence: Synthetic oligonucleotide
  Target: LAMA2; (+) strand; PAM type: YTN; PAM sequence: TTC
tattgagcaattgttttgct

SEQ ID NO: 372500 - DNA, 20 bp, Artificial Sequence
  Description of Artificial Sequence: Synthetic oligonucleotide
  Target: LAMA2; (+) strand; PAM type: YTN; PAM sequence: CTA
ttgagcaattgttttgcttt

SEQ ID NO: 372501 - DNA, 20 bp, Artificial Sequence
  Description of Artificial Sequence: Synthetic oligonucleotide
  Target: LAMA2; (+) strand; PAM type: YTN; PAM sequence: TTG
agcaattgttttgcttttgg

SEQ ID NO: 372502 - DNA, 20 bp, Artificial Sequence
  Description of Artificial Sequence: Synthetic oligonucleotide
  Target: LAMA2; (+) strand; PAM type: YTN; PAM sequence: TTG
ttttgcttttggcttctggc

SEQ ID NO: 372503 - DNA, 20 bp, Artificial Sequence
  Description of Artificial Sequence: Synthetic oligonucleotide
  Target: LAMA2; (+) strand; PAM type: YTN; PAM sequence: TTT
tgcttttggcttctggctgc

SEQ ID NO: 372504 - DNA, 20 bp, Artificial Sequence
  Description of Artificial Sequence: Synthetic oligonucleotide
  Target: LAMA2; (+) strand; PAM type: YTN; PAM sequence: TTT
gcttttggcttctggctgct

SEQ ID NO: 372505 - DNA, 20 bp, Artificial Sequence
  Description of Artificial Sequence: Synthetic oligonucleotide
  Target: LAMA2; (+) strand; PAM type: YTN; PAM sequence: TTG
cttttggcttctggctgctc

SEQ ID NO: 372506 - DNA, 20 bp, Artificial Sequence
  Description of Artificial Sequence: Synthetic oligonucleotide
  Target: LAMA2; (+) strand; PAM type: YTN; PAM sequence: CTT
ttggcttctggctgctctga

SEQ ID NO: 372507 - DNA, 20 bp, Artificial Sequence
  Description of Artificial Sequence: Synthetic oligonucleotide
  Target: LAMA2; (+) strand; PAM type: YTN; PAM sequence: TTT
tggcttctggctgctctgaa

SEQ ID NO: 372508 - DNA, 20 bp, Artificial Sequence
  Description of Artificial Sequence: Synthetic oligonucleotide
  Target: LAMA2; (+) strand; PAM type: YTN; PAM sequence: TTT
ggcttctggctgctctgaat

SEQ ID NO: 372509 - DNA, 20 bp, Artificial Sequence
  Description of Artificial Sequence: Synthetic oligonucleotide
  Target: LAMA2; (+) strand; PAM type: YTN; PAM sequence: TTG
gcttctggctgctctgaatc

SEQ ID NO: 372510 - DNA, 20 bp, Artificial Sequence
  Description of Artificial Sequence: Synthetic oligonucleotide
  Target: LAMA2; (+) strand; PAM type: YTN; PAM sequence: CTT
ctggctgctctgaatcattt

SEQ ID NO: 372511 - DNA, 20 bp, Artificial Sequence
  Description of Artificial Sequence: Synthetic oligonucleotide
  Target: LAMA2; (+) strand; PAM type: YTN; PAM sequence: TTC
tggctgctctgaatcattta

SEQ ID NO: 372512 - DNA, 20 bp, Artificial Sequence
  Description of Artificial Sequence: Synthetic oligonucleotide
  Target: LAMA2; (+) strand; PAM type: YTN; PAM sequence: CTG
gctgctctgaatcatttacc

SEQ ID NO: 372513 - DNA, 20 bp, Artificial Sequence
  Description of Artificial Sequence: Synthetic oligonucleotide
  Target: LAMA2; (+) strand; PAM type: YTN; PAM sequence: CTG
ctctgaatcatttacctgtt

SEQ ID NO: 372514 - DNA, 20 bp, Artificial Sequence
  Description of Artificial Sequence: Synthetic oligonucleotide
  Target: LAMA2; (+) strand; PAM type: YTN; PAM sequence: CTC
tgaatcatttacctgttgat

SEQ ID NO: 372515 - DNA, 20 bp, Artificial Sequence
  Description of Artificial Sequence: Synthetic oligonucleotide
  Target: LAMA2; (+) strand; PAM type: YTN; PAM sequence: CTG
aatcatttacctgttgattg

SEQ ID NO: 372516 - DNA, 20 bp, Artificial Sequence
  Description of Artificial Sequence: Synthetic oligonucleotide
  Target: LAMA2; (+) strand; PAM type: YTN; PAM sequence: TTT
acctgttgattgttcccttt

SEQ ID NO: 372517 - DNA, 20 bp, Artificial Sequence
  Description of Artificial Sequence: Synthetic oligonucleotide
  Target: LAMA2; (+) strand; PAM type: YTN; PAM sequence: TTA
cctgttgattgttccctttt

SEQ ID NO: 372518 - DNA, 20 bp, Artificial Sequence
  Description of Artificial Sequence: Synthetic oligonucleotide
  Target: LAMA2; (+) strand; PAM type: YTN; PAM sequence: CTG
ttgattgttcccttttgcat

SEQ ID NO: 372519 - DNA, 20 bp, Artificial Sequence
  Description of Artificial Sequence: Synthetic oligonucleotide
  Target: LAMA2; (+) strand; PAM type: YTN; PAM sequence: TTG
attgttcccttttgcattag

SEQ ID NO: 372520 - DNA, 20 bp, Artificial Sequence
  Description of Artificial Sequence: Synthetic oligonucleotide
  Target: LAMA2; (+) strand; PAM type: YTN; PAM sequence: TTG
ttcccttttgcattagctgt

SEQ ID NO: 372521 - DNA, 20 bp, Artificial Sequence
  Description of Artificial Sequence: Synthetic oligonucleotide
  Target: LAMA2; (+) strand; PAM type: YTN; PAM sequence: TTC
ccttttgcattagctgtgaa

SEQ ID NO: 372522 - DNA, 20 bp, Artificial Sequence
  Description of Artificial Sequence: Synthetic oligonucleotide
  Target: LAMA2; (+) strand; PAM type: YTN; PAM sequence: CTT
ttgcattagctgtgaaaaac

SEQ ID NO: 372523 - DNA, 20 bp, Artificial Sequence
  Description of Artificial Sequence: Synthetic oligonucleotide
  Target: LAMA2; (+) strand; PAM type: YTN; PAM sequence: TTT
tgcattagctgtgaaaaacc

SEQ ID NO: 372524 - DNA, 20 bp, Artificial Sequence
  Description of Artificial Sequence: Synthetic oligonucleotide
  Target: LAMA2; (+) strand; PAM type: YTN; PAM sequence: TTT
gcattagctgtgaaaaacct

SEQ ID NO: 372525 - DNA, 20 bp, Artificial Sequence
  Description of Artificial Sequence: Synthetic oligonucleotide
  Target: LAMA2; (+) strand; PAM type: YTN; PAM sequence: TTG
cattagctgtgaaaaacctc

SEQ ID NO: 372526 - DNA, 20 bp, Artificial Sequence
  Description of Artificial Sequence: Synthetic oligonucleotide
  Target: LAMA2; (+) strand; PAM type: YTN; PAM sequence: TTA
gctgtgaaaaacctcaaagc

SEQ ID NO: 372527 - DNA, 20 bp, Artificial Sequence
  Description of Artificial Sequence: Synthetic oligonucleotide
  Target: LAMA2; (+) strand; PAM type: YTN; PAM sequence: CTG
tgaaaaacctcaaagccaaa

SEQ ID NO: 372528 - DNA, 20 bp, Artificial Sequence
  Description of Artificial Sequence: Synthetic oligonucleotide
  Target: LAMA2; (+) strand; PAM type: YTN; PAM sequence: CTC
aaagccaaatgttgatccac

SEQ ID NO: 372529 - DNA, 20 bp, Artificial Sequence
  Description of Artificial Sequence: Synthetic oligonucleotide
  Target: LAMA2; (+) strand; PAM type: YTN; PAM sequence: TTG
atccacccttatcaaatgaa

SEQ ID NO: 372530 - DNA, 20 bp, Artificial Sequence
  Description of Artificial Sequence: Synthetic oligonucleotide
  Target: LAMA2; (+) strand; PAM type: YTN; PAM sequence: CTT
atcaaatgaacatatgttat

SEQ ID NO: 372531 - DNA, 20 bp, Artificial Sequence
  Description of Artificial Sequence: Synthetic oligonucleotide
  Target: LAMA2; (+) strand; PAM type: YTN; PAM sequence: TTA
tcaaatgaacatatgttata

SEQ ID NO: 372532 - DNA, 20 bp, Artificial Sequence
  Description of Artificial Sequence: Synthetic oligonucleotide
  Target: LAMA2; (+) strand; PAM type: YTN; PAM sequence: TTA
taacatgcattttgaattct

SEQ ID NO: 372533 - DNA, 20 bp, Artificial Sequence
  Description of Artificial Sequence: Synthetic oligonucleotide
  Target: LAMA2; (+) strand; PAM type: YTN; PAM sequence: TTT
tgaattctaaatacaccctt

SEQ ID NO: 372534 - DNA, 20 bp, Artificial Sequence
  Description of Artificial Sequence: Synthetic oligonucleotide
  Target: LAMA2; (+) strand; PAM type: YTN; PAM sequence: TTT
gaattctaaatacaccctta

SEQ ID NO: 372535 - DNA, 20 bp, Artificial Sequence
  Description of Artificial Sequence: Synthetic oligonucleotide
  Target: LAMA2; (+) strand; PAM type: YTN; PAM sequence: TTG
aattctaaatacacccttaa

SEQ ID NO: 372536 - DNA, 20 bp, Artificial Sequence
  Description of Artificial Sequence: Synthetic oligonucleotide
  Target: LAMA2; (+) strand; PAM type: YTN; PAM sequence: TTC
taaatacacccttaagttta

SEQ ID NO: 372537 - DNA, 20 bp, Artificial Sequence
  Description of Artificial Sequence: Synthetic oligonucleotide
  Target: LAMA2; (+) strand; PAM type: YTN; PAM sequence: CTA
aatacacccttaagtttatc

SEQ ID NO: 372538 - DNA, 20 bp, Artificial Sequence
  Description of Artificial Sequence: Synthetic oligonucleotide
  Target: LAMA2; (+) strand; PAM type: YTN; PAM sequence: CTT
aagtttatcttttttttagt

SEQ ID NO: 372539 - DNA, 20 bp, Artificial Sequence
  Description of Artificial Sequence: Synthetic oligonucleotide
  Target: LAMA2; (+) strand; PAM type: YTN; PAM sequence: TTA
agtttatcttttttttagta

SEQ ID NO: 372540 - DNA, 20 bp, Artificial Sequence
  Description of Artificial Sequence: Synthetic oligonucleotide
  Target: LAMA2; (+) strand; PAM type: YTN; PAM sequence: TTT
atcttttttttagtattttt

SEQ ID NO: 372541 - DNA, 20 bp, Artificial Sequence
  Description of Artificial Sequence: Synthetic oligonucleotide
  Target: LAMA2; (+) strand; PAM type: YTN; PAM sequence: TTA
tcttttttttagtatttttt

SEQ ID NO: 372542 - DNA, 20 bp, Artificial Sequence
  Description of Artificial Sequence: Synthetic oligonucleotide
  Target: LAMA2; (+) strand; PAM type: YTN; PAM sequence: CTT
ttttttagtatttttttctc

SEQ ID NO: 372543 - DNA, 20 bp, Artificial Sequence
  Description of Artificial Sequence: Synthetic oligonucleotide
  Target: LAMA2; (+) strand; PAM type: YTN; PAM sequence: TTT
tttttagtatttttttctct

SEQ ID NO: 372544 - DNA, 20 bp, Artificial Sequence
  Description of Artificial Sequence: Synthetic oligonucleotide
  Target: LAMA2; (+) strand; PAM type: YTN; PAM sequence: TTT
ttttagtatttttttctctt

SEQ ID NO: 372545 - DNA, 20 bp, Artificial Sequence
  Description of Artificial Sequence: Synthetic oligonucleotide
  Target: LAMA2; (+) strand; PAM type: YTN; PAM sequence: TTT
tttagtatttttttctcttt

SEQ ID NO: 372546 - DNA, 20 bp, Artificial Sequence
  Description of Artificial Sequence: Synthetic oligonucleotide
  Target: LAMA2; (+) strand; PAM type: YTN; PAM sequence: TTT
ttagtatttttttctcttta

SEQ ID NO: 372547 - DNA, 20 bp, Artificial Sequence
  Description of Artificial Sequence: Synthetic oligonucleotide
  Target: LAMA2; (+) strand; PAM type: YTN; PAM sequence: TTT
tagtatttttttctctttaa

SEQ ID NO: 372548 - DNA, 20 bp, Artificial Sequence
  Description of Artificial Sequence: Synthetic oligonucleotide
  Target: LAMA2; (+) strand; PAM type: YTN; PAM sequence: TTT
agtatttttttctctttaac

SEQ ID NO: 372549 - DNA, 20 bp, Artificial Sequence
  Description of Artificial Sequence: Synthetic oligonucleotide
  Target: LAMA2; (+) strand; PAM type: YTN; PAM sequence: TTA
gtatttttttctctttaacc

SEQ ID NO: 372550 - DNA, 20 bp, Artificial Sequence
  Description of Artificial Sequence: Synthetic oligonucleotide
  Target: LAMA2; (+) strand; PAM type: YTN; PAM sequence: TTT
ttttctctttaaccttgctt

SEQ ID NO: 372551 - DNA, 20 bp, Artificial Sequence
  Description of Artificial Sequence: Synthetic oligonucleotide
  Target: LAMA2; (+) strand; PAM type: YTN; PAM sequence: TTT
tttctctttaaccttgcttt

SEQ ID NO: 372552 - DNA, 20 bp, Artificial Sequence
  Description of Artificial Sequence: Synthetic oligonucleotide
  Target: LAMA2; (+) strand; PAM type: YTN; PAM sequence: TTT
ttctctttaaccttgcttta

SEQ ID NO: 372553 - DNA, 20 bp, Artificial Sequence
  Description of Artificial Sequence: Synthetic oligonucleotide
  Target: LAMA2; (+) strand; PAM type: YTN; PAM sequence: TTT
tctctttaaccttgctttat

SEQ ID NO: 372554 - DNA, 20 bp, Artificial Sequence
  Description of Artificial Sequence: Synthetic oligonucleotide
  Target: LAMA2; (+) strand; PAM type: YTN; PAM sequence: TTT
ctctttaaccttgctttatt

SEQ ID NO: 372555 - DNA, 20 bp, Artificial Sequence
  Description of Artificial Sequence: Synthetic oligonucleotide
  Target: LAMA2; (+) strand; PAM type: YTN; PAM sequence: TTC
tctttaaccttgctttattc

SEQ ID NO: 372556 - DNA, 20 bp, Artificial Sequence
  Description of Artificial Sequence: Synthetic oligonucleotide
  Target: LAMA2; (+) strand; PAM type: YTN; PAM sequence: CTC
tttaaccttgctttattctt

SEQ ID NO: 372557 - DNA, 20 bp, Artificial Sequence
  Description of Artificial Sequence: Synthetic oligonucleotide
  Target: LAMA2; (+) strand; PAM type: YTN; PAM sequence: CTT
taaccttgctttattcttaa

SEQ ID NO: 372558 - DNA, 20 bp, Artificial Sequence
  Description of Artificial Sequence: Synthetic oligonucleotide
  Target: LAMA2; (+) strand; PAM type: YTN; PAM sequence: TTT
aaccttgctttattcttaat

SEQ ID NO: 372559 - DNA, 20 bp, Artificial Sequence
  Description of Artificial Sequence: Synthetic oligonucleotide
  Target: LAMA2; (+) strand; PAM type: YTN; PAM sequence: TTA
accttgctttattcttaatg

SEQ ID NO: 372560 - DNA, 20 bp, Artificial Sequence
  Description of Artificial Sequence: Synthetic oligonucleotide
  Target: LAMA2; (+) strand; PAM type: YTN; PAM sequence: CTT
gctttattcttaatgcacat

SEQ ID NO: 372561 - DNA, 20 bp, Artificial Sequence
  Description of Artificial Sequence: Synthetic oligonucleotide
  Target: LAMA2; (+) strand; PAM type: YTN; PAM sequence: TTG
ctttattcttaatgcacata

SEQ ID NO: 372562 - DNA, 20 bp, Artificial Sequence
  Description of Artificial Sequence: Synthetic oligonucleotide
  Target: LAMA2; (+) strand; PAM type: YTN; PAM sequence: CTT
tattcttaatgcacatattt

SEQ ID NO: 372563 - DNA, 20 bp, Artificial Sequence
  Description of Artificial Sequence: Synthetic oligonucleotide
  Target: LAMA2; (+) strand; PAM type: YTN; PAM sequence: TTT
attcttaatgcacatatttt

SEQ ID NO: 372564 - DNA, 20 bp, Artificial Sequence
  Description of Artificial Sequence: Synthetic oligonucleotide
  Target: LAMA2; (+) strand; PAM type: YTN; PAM sequence: TTA
ttcttaatgcacatattttg

SEQ ID NO: 372565 - DNA, 20 bp, Artificial Sequence
  Description of Artificial Sequence: Synthetic oligonucleotide
  Target: LAMA2; (+) strand; PAM type: YTN; PAM sequence: TTC
ttaatgcacatattttgaca

SEQ ID NO: 372566 - DNA, 20 bp, Artificial Sequence
  Description of Artificial Sequence: Synthetic oligonucleotide
  Target: LAMA2; (+) strand; PAM type: YTN; PAM sequence: CTT
aatgcacatattttgacaga

SEQ ID NO: 372567 - DNA, 20 bp, Artificial Sequence
  Description of Artificial Sequence: Synthetic oligonucleotide
  Target: LAMA2; (+) strand; PAM type: YTN; PAM sequence: TTA
atgcacatattttgacagat

SEQ ID NO: 372568 - DNA, 20 bp, Artificial Sequence
  Description of Artificial Sequence: Synthetic oligonucleotide
  Target: LAMA2; (+) strand; PAM type: YTN; PAM sequence: TTT
tgacagatagaattaaattc

SEQ ID NO: 372569 - DNA, 20 bp, Artificial Sequence
  Description of Artificial Sequence: Synthetic oligonucleotide
  Target: LAMA2; (+) strand; PAM type: YTN; PAM sequence: TTT
gacagatagaattaaattct

SEQ ID NO: 372570 - DNA, 20 bp, Artificial Sequence
  Description of Artificial Sequence: Synthetic oligonucleotide
  Target: LAMA2; (+) strand; PAM type: YTN; PAM sequence: TTG
acagatagaattaaattctt

SEQ ID NO: 372571 - DNA, 20 bp, Artificial Sequence
  Description of Artificial Sequence: Synthetic oligonucleotide
  Target: LAMA2; (+) strand; PAM type: YTN; PAM sequence: TTA
aattctttttagaacaaggt

SEQ ID NO: 372572 - DNA, 20 bp, Artificial Sequence
  Description of Artificial Sequence: Synthetic oligonucleotide
  Target: LAMA2; (+) strand; PAM type: YTN; PAM sequence: TTC
tttttagaacaaggttaatt

SEQ ID NO: 372573 - DNA, 20 bp, Artificial Sequence
  Description of Artificial Sequence: Synthetic oligonucleotide
  Target: LAMA2; (+) strand; PAM type: YTN; PAM sequence: CTT
tttagaacaaggttaattgt

SEQ ID NO: 372574 - DNA, 20 bp, Artificial Sequence
  Description of Artificial Sequence: Synthetic oligonucleotide
  Target: LAMA2; (+) strand; PAM type: YTN; PAM sequence: TTT
ttagaacaaggttaattgtt

SEQ ID NO: 372575 - DNA, 20 bp, Artificial Sequence
  Description of Artificial Sequence: Synthetic oligonucleotide
  Target: LAMA2; (+) strand; PAM type: YTN; PAM sequence: TTT
tagaacaaggttaattgttt

SEQ ID NO: 372576 - DNA, 20 bp, Artificial Sequence
  Description of Artificial Sequence: Synthetic oligonucleotide
  Target: LAMA2; (+) strand; PAM type: YTN; PAM sequence: TTT
agaacaaggttaattgtttc

SEQ ID NO: 372577 - DNA, 20 bp, Artificial Sequence
  Description of Artificial Sequence: Synthetic oligonucleotide
  Target: LAMA2; (+) strand; PAM type: YTN; PAM sequence: TTA
gaacaaggttaattgtttct

SEQ ID NO: 372578 - DNA, 20 bp, Artificial Sequence
  Description of Artificial Sequence: Synthetic oligonucleotide
  Target: LAMA2; (+) strand; PAM type: YTN; PAM sequence: TTA
attgtttctctatgtatgca

SEQ ID NO: 372579 - DNA, 20 bp, Artificial Sequence
  Description of Artificial Sequence: Synthetic oligonucleotide
  Target: LAMA2; (+) strand; PAM type: YTN; PAM sequence: TTG
tttctctatgtatgcattca

SEQ ID NO: 372580 - DNA, 20 bp, Artificial Sequence
  Description of Artificial Sequence: Synthetic oligonucleotide
  Target: LAMA2; (+) strand; PAM type: YTN; PAM sequence: TTT
ctctatgtatgcattcacat

SEQ ID NO: 372581 - DNA, 20 bp, Artificial Sequence
  Description of Artificial Sequence: Synthetic oligonucleotide
  Target: LAMA2; (+) strand; PAM type: YTN; PAM sequence: TTC
tctatgtatgcattcacata

SEQ ID NO: 372582 - DNA, 20 bp, Artificial Sequence
  Description of Artificial Sequence: Synthetic oligonucleotide
  Target: LAMA2; (+) strand; PAM type: YTN; PAM sequence: CTC
tatgtatgcattcacataca

SEQ ID NO: 372583 - DNA, 20 bp, Artificial Sequence
  Description of Artificial Sequence: Synthetic oligonucleotide
  Target: LAMA2; (+) strand; PAM type: YTN; PAM sequence: CTA
tgtatgcattcacatacata

SEQ ID NO: 372584 - DNA, 20 bp, Artificial Sequence
  Description of Artificial Sequence: Synthetic oligonucleotide
  Target: LAMA2; (+) strand; PAM type: YTN; PAM sequence: TTC
acatacataaacatatatag

SEQ ID NO: 372585 - DNA, 20 bp, Artificial Sequence
  Description of Artificial Sequence: Synthetic oligonucleotide
  Target: LAMA2; (+) strand; PAM type: YTN; PAM sequence: TTG
ttgacatagtcacatgtata

SEQ ID NO: 372586 - DNA, 20 bp, Artificial Sequence
  Description of Artificial Sequence: Synthetic oligonucleotide
  Target: LAMA2; (+) strand; PAM type: YTN; PAM sequence: TTG
acatagtcacatgtatacac

SEQ ID NO: 372587 - DNA, 20 bp, Artificial Sequence
  Description of Artificial Sequence: Synthetic oligonucleotide
  Target: LAMA2; (+) strand; PAM type: YTN; PAM sequence: CTT
ataagtagattataaaaata

SEQ ID NO: 372588 - DNA, 20 bp, Artificial Sequence
  Description of Artificial Sequence: Synthetic oligonucleotide
  Target: LAMA2; (+) strand; PAM type: YTN; PAM sequence: TTA
taagtagattataaaaataa

SEQ ID NO: 372589 - DNA, 20 bp, Artificial Sequence
  Description of Artificial Sequence: Synthetic oligonucleotide
  Target: LAMA2; (+) strand; PAM type: YTN; PAM sequence: TTA
taaaaataaaagtatatatt

SEQ ID NO: 372590 - DNA, 20 bp, Artificial Sequence
  Description of Artificial Sequence: Synthetic oligonucleotide
  Target: LAMA2; (+) strand; PAM type: YTN; PAM sequence: TTC
agccattaagagggattatt

SEQ ID NO: 372591 - DNA, 20 bp, Artificial Sequence
  Description of Artificial Sequence: Synthetic oligonucleotide
  Target: LAMA2; (+) strand; PAM type: YTN; PAM sequence: TTA
agagggattattttcatgtc

SEQ ID NO: 372592 - DNA, 20 bp, Artificial Sequence
  Description of Artificial Sequence: Synthetic oligonucleotide
  Target: LAMA2; (+) strand; PAM type: YTN; PAM sequence: TTA
ttttcatgtccagcttttta

SEQ ID NO: 372593 - DNA, 20 bp, Artificial Sequence
  Description of Artificial Sequence: Synthetic oligonucleotide
  Target: LAMA2; (+) strand; PAM type: YTN; PAM sequence: TTT
tcatgtccagctttttattg

SEQ ID NO: 372594 - DNA, 20 bp, Artificial Sequence
  Description of Artificial Sequence: Synthetic oligonucleotide
  Target: LAMA2; (+) strand; PAM type: YTN; PAM sequence: TTT
catgtccagctttttattgg

SEQ ID NO: 372595 - DNA, 20 bp, Artificial Sequence
  Description of Artificial Sequence: Synthetic oligonucleotide
  Target: LAMA2; (+) strand; PAM type: YTN; PAM sequence: TTC
atgtccagctttttattggt

SEQ ID NO: 372596 - DNA, 20 bp, Artificial Sequence
  Description of Artificial Sequence: Synthetic oligonucleotide
  Target: LAMA2; (+) strand; PAM type: YTN; PAM sequence: CTT
tttattggttatcccaataa

SEQ ID NO: 372597 - DNA, 20 bp, Artificial Sequence
  Description of Artificial Sequence: Synthetic oligonucleotide
  Target: LAMA2; (+) strand; PAM type: YTN; PAM sequence: TTT
ttattggttatcccaataac

SEQ ID NO: 372598 - DNA, 20 bp, Artificial Sequence
  Description of Artificial Sequence: Synthetic oligonucleotide
  Target: LAMA2; (+) strand; PAM type: YTN; PAM sequence: TTT
tattggttatcccaataaca

SEQ ID NO: 372599 - DNA, 20 bp, Artificial Sequence
  Description of Artificial Sequence: Synthetic oligonucleotide
  Target: LAMA2; (+) strand; PAM type: YTN; PAM sequence: TTT
attggttatcccaataacag

SEQ ID NO: 372600 - DNA, 20 bp, Artificial Sequence
  Description of Artificial Sequence: Synthetic oligonucleotide
  Target: LAMA2; (+) strand; PAM type: YTN; PAM sequence: TTA
ttggttatcccaataacagc

SEQ ID NO: 372601 - DNA, 20 bp, Artificial Sequence
  Description of Artificial Sequence: Synthetic oligonucleotide
  Target: LAMA2; (+) strand; PAM type: YTN; PAM sequence: TTG
gttatcccaataacagcttc

SEQ ID NO: 372602 - DNA, 20 bp, Artificial Sequence
  Description of Artificial Sequence: Synthetic oligonucleotide
  Target: LAMA2; (+) strand; PAM type: YTN; PAM sequence: TTA
tcccaataacagcttcccct

SEQ ID NO: 372603 - DNA, 20 bp, Artificial Sequence
  Description of Artificial Sequence: Synthetic oligonucleotide
  Target: LAMA2; (+) strand; PAM type: YTN; PAM sequence: CTT
cccctcctcccctatttgtg

SEQ ID NO: 372604 - DNA, 20 bp, Artificial Sequence
  Description of Artificial Sequence: Synthetic oligonucleotide
  Target: LAMA2; (+) strand; PAM type: YTN; PAM sequence: TTC
ccctcctcccctatttgtgg

SEQ ID NO: 372605 - DNA, 20 bp, Artificial Sequence
  Description of Artificial Sequence: Synthetic oligonucleotide
  Target: LAMA2; (+) strand; PAM type: YTN; PAM sequence: CTC
ctcccctatttgtggaaaat

SEQ ID NO: 372606 - DNA, 20 bp, Artificial Sequence
  Description of Artificial Sequence: Synthetic oligonucleotide
  Target: LAMA2; (+) strand; PAM type: YTN; PAM sequence: CTC
ccctatttgtggaaaatgcc

SEQ ID NO: 372607 - DNA, 20 bp, Artificial Sequence
  Description of Artificial Sequence: Synthetic oligonucleotide
  Target: LAMA2; (+) strand; PAM type: YTN; PAM sequence: CTA
tttgtggaaaatgcccgctg

SEQ ID NO: 372608 - DNA, 20 bp, Artificial Sequence
  Description of Artificial Sequence: Synthetic oligonucleotide
  Target: LAMA2; (+) strand; PAM type: YTN; PAM sequence: TTT
gtggaaaatgcccgctgctc

SEQ ID NO: 372609 - DNA, 20 bp, Artificial Sequence
  Description of Artificial Sequence: Synthetic oligonucleotide
  Target: LAMA2; (+) strand; PAM type: YTN; PAM sequence: TTG
tggaaaatgcccgctgctct

SEQ ID NO: 372610 - DNA, 20 bp, Artificial Sequence
  Description of Artificial Sequence: Synthetic oligonucleotide
  Target: LAMA2; (+) strand; PAM type: YTN; PAM sequence: CTG
ctcttggctttcttgtgttt

SEQ ID NO: 372611 - DNA, 20 bp, Artificial Sequence
  Description of Artificial Sequence: Synthetic oligonucleotide
  Target: LAMA2; (+) strand; PAM type: YTN; PAM sequence: CTC
ttggctttcttgtgtttcct

SEQ ID NO: 372612 - DNA, 20 bp, Artificial Sequence
  Description of Artificial Sequence: Synthetic oligonucleotide
  Target: LAMA2; (+) strand; PAM type: YTN; PAM sequence: CTT
ggctttcttgtgtttcctgt

SEQ ID NO: 372613 - DNA, 20 bp, Artificial Sequence
  Description of Artificial Sequence: Synthetic oligonucleotide
  Target: LAMA2; (+) strand; PAM type: YTN; PAM sequence: TTG
gctttcttgtgtttcctgtg

SEQ ID NO: 372614 - DNA, 20 bp, Artificial Sequence
  Description of Artificial Sequence: Synthetic oligonucleotide
  Target: LAMA2; (+) strand; PAM type: YTN; PAM sequence: CTT
tcttgtgtttcctgtggcgt

SEQ ID NO: 372615 - DNA, 20 bp, Artificial Sequence
  Description of Artificial Sequence: Synthetic oligonucleotide
  Target: LAMA2; (+) strand; PAM type: YTN; PAM sequence: TTT
cttgtgtttcctgtggcgtg

SEQ ID NO: 372616 - DNA, 20 bp, Artificial Sequence
  Description of Artificial Sequence: Synthetic oligonucleotide
  Target: LAMA2; (+) strand; PAM type: YTN; PAM sequence: TTC
ttgtgtttcctgtggcgtgg

SEQ ID NO: 372617 - DNA, 20 bp, Artificial Sequence
  Description of Artificial Sequence: Synthetic oligonucleotide
  Target: LAMA2; (+) strand; PAM type: YTN; PAM sequence: CTT
gtgtttcctgtggcgtggtt

SEQ ID NO: 372618 - DNA, 20 bp, Artificial Sequence
  Description of Artificial Sequence: Synthetic oligonucleotide
  Target: LAMA2; (+) strand; PAM type: YTN; PAM sequence: TTG
tgtttcctgtggcgtggttt

SEQ ID NO: 372619 - DNA, 20 bp, Artificial Sequence
  Description of Artificial Sequence: Synthetic oligonucleotide
  Target: LAMA2; (+) strand; PAM type: YTN; PAM sequence: TTT
cctgtggcgtggtttggata

SEQ ID NO: 372620 - DNA, 20 bp, Artificial Sequence
  Description of Artificial Sequence: Synthetic oligonucleotide
  Target: LAMA2; (+) strand; PAM type: YTN; PAM sequence: TTC
ctgtggcgtggtttggataa

SEQ ID NO: 372621 - DNA, 20 bp, Artificial Sequence
  Description of Artificial Sequence: Synthetic oligonucleotide
  Target: LAMA2; (+) strand; PAM type: YTN; PAM sequence: CTG
tggcgtggtttggataatcc

SEQ ID NO: 372622 - DNA, 20 bp, Artificial Sequence
  Description of Artificial Sequence: Synthetic oligonucleotide
  Target: LAMA2; (+) strand; PAM type: YTN; PAM sequence: TTT
ggataatccgggatgaagaa

SEQ ID NO: 372623 - DNA, 20 bp, Artificial Sequence
  Description of Artificial Sequence: Synthetic oligonucleotide
  Target: LAMA2; (+) strand; PAM type: YTN; PAM sequence: TTG
gataatccgggatgaagaac

SEQ ID NO: 372624 - DNA, 20 bp, Artificial Sequence
  Description of Artificial Sequence: Synthetic oligonucleotide
  Target: LAMA2; (+) strand; PAM type: YTN; PAM sequence: TTT
tctgctggtgtggagctagc

SEQ ID NO: 372625 - DNA, 20 bp, Artificial Sequence
  Description of Artificial Sequence: Synthetic oligonucleotide
  Target: LAMA2; (+) strand; PAM type: YTN; PAM sequence: TTT
ctgctggtgtggagctagcc

SEQ ID NO: 372626 - DNA, 20 bp, Artificial Sequence
  Description of Artificial Sequence: Synthetic oligonucleotide
  Target: LAMA2; (+) strand; PAM type: YTN; PAM sequence: TTC
tgctggtgtggagctagcca

SEQ ID NO: 372627 - DNA, 20 bp, Artificial Sequence
  Description of Artificial Sequence: Synthetic oligonucleotide
  Target: LAMA2; (+) strand; PAM type: YTN; PAM sequence: CTG
ctggtgtggagctagccaaa

SEQ ID NO: 372628 - DNA, 20 bp, Artificial Sequence
  Description of Artificial Sequence: Synthetic oligonucleotide
  Target: LAMA2; (+) strand; PAM type: YTN; PAM sequence: CTG
gtgtggagctagccaaatag

SEQ ID NO: 372629 - DNA, 20 bp, Artificial Sequence
  Description of Artificial Sequence: Synthetic oligonucleotide
  Target: LAMA2; (+) strand; PAM type: YTN; PAM sequence: CTA
gccaaatagagttaaatgac

SEQ ID NO: 372630 - DNA, 20 bp, Artificial Sequence
  Description of Artificial Sequence: Synthetic oligonucleotide
  Target: LAMA2; (+) strand; PAM type: YTN; PAM sequence: TTA
aatgacataatcttggaatc

SEQ ID NO: 372631 - DNA, 20 bp, Artificial Sequence
  Description of Artificial Sequence: Synthetic oligonucleotide
  Target: LAMA2; (+) strand; PAM type: YTN; PAM sequence: CTT
ggaatcacttgaggtcaatg

SEQ ID NO: 372632 - DNA, 20 bp, Artificial Sequence
  Description of Artificial Sequence: Synthetic oligonucleotide
  Target: LAMA2; (+) strand; PAM type: YTN; PAM sequence: TTG
gaatcacttgaggtcaatga

SEQ ID NO: 372633 - DNA, 20 bp, Artificial Sequence
  Description of Artificial Sequence: Synthetic oligonucleotide
  Target: LAMA2; (+) strand; PAM type: YTN; PAM sequence: CTT
gaggtcaatgatgatctcac

SEQ ID NO: 372634 - DNA, 20 bp, Artificial Sequence
  Description of Artificial Sequence: Synthetic oligonucleotide
  Target: LAMA2; (+) strand; PAM type: YTN; PAM sequence: TTG
aggtcaatgatgatctcaca

SEQ ID NO: 372635 - DNA, 20 bp, Artificial Sequence
  Description of Artificial Sequence: Synthetic oligonucleotide
  Target: LAMA2; (+) strand; PAM type: YTN; PAM sequence: CTC
acaatttcctctttgtgtca

SEQ ID NO: 372636 - DNA, 20 bp, Artificial Sequence
  Description of Artificial Sequence: Synthetic oligonucleotide
  Target: LAMA2; (+) strand; PAM type: YTN; PAM sequence: TTT
cctctttgtgtcacggaaca

SEQ ID NO: 372637 - DNA, 20 bp, Artificial Sequence
  Description of Artificial Sequence: Synthetic oligonucleotide
  Target: LAMA2; (+) strand; PAM type: YTN; PAM sequence: TTC
ctctttgtgtcacggaacaa

SEQ ID NO: 372638 - DNA, 20 bp, Artificial Sequence
  Description of Artificial Sequence: Synthetic oligonucleotide
  Target: LAMA2; (+) strand; PAM type: YTN; PAM sequence: CTC
tttgtgtcacggaacaatta

SEQ ID NO: 372639 - DNA, 20 bp, Artificial Sequence
  Description of Artificial Sequence: Synthetic oligonucleotide
  Target: LAMA2; (+) strand; PAM type: YTN; PAM sequence: CTT
tgtgtcacggaacaattagc

SEQ ID NO: 372640 - DNA, 20 bp, Artificial Sequence
  Description of Artificial Sequence: Synthetic oligonucleotide
  Target: LAMA2; (+) strand; PAM type: YTN; PAM sequence: TTT
gtgtcacggaacaattagct

SEQ ID NO: 372641 - DNA, 20 bp, Artificial Sequence
  Description of Artificial Sequence: Synthetic oligonucleotide
  Target: LAMA2; (+) strand; PAM type: YTN; PAM sequence: TTG
tgtcacggaacaattagctt

SEQ ID NO: 372642 - DNA, 20 bp, Artificial Sequence
  Description of Artificial Sequence: Synthetic oligonucleotide
  Target: LAMA2; (+) strand; PAM type: YTN; PAM sequence: TTA
gcttcatgtcttggccaaaa

SEQ ID NO: 372643 - DNA, 20 bp, Artificial Sequence
  Description of Artificial Sequence: Synthetic oligonucleotide
  Target: LAMA2; (+) strand; PAM type: YTN; PAM sequence: CTT
catgtcttggccaaaattag

SEQ ID NO: 372644 - DNA, 20 bp, Artificial Sequence
  Description of Artificial Sequence: Synthetic oligonucleotide
  Target: LAMA2; (+) strand; PAM type: YTN; PAM sequence: TTC
atgtcttggccaaaattagt

SEQ ID NO: 372645 - DNA, 20 bp, Artificial Sequence
  Description of Artificial Sequence: Synthetic oligonucleotide
  Target: LAMA2; (+) strand; PAM type: YTN; PAM sequence: CTT
ggccaaaattagtgctaagt

SEQ ID NO: 372646 - DNA, 20 bp, Artificial Sequence
  Description of Artificial Sequence: Synthetic oligonucleotide
  Target: LAMA2; (+) strand; PAM type: YTN; PAM sequence: TTG
gccaaaattagtgctaagtg

SEQ ID NO: 372647 - DNA, 20 bp, Artificial Sequence
  Description of Artificial Sequence: Synthetic oligonucleotide
  Target: LAMA2; (+) strand; PAM type: YTN; PAM sequence: TTA
gtgctaagtgactgcatttg

SEQ ID NO: 372648 - DNA, 20 bp, Artificial Sequence
  Description of Artificial Sequence: Synthetic oligonucleotide
  Target: LAMA2; (+) strand; PAM type: YTN; PAM sequence: CTA
agtgactgcatttgccaagg

SEQ ID NO: 372649 - DNA, 20 bp, Artificial Sequence
  Description of Artificial Sequence: Synthetic oligonucleotide
  Target: LAMA2; (+) strand; PAM type: YTN; PAM sequence: CTG
catttgccaaggcaaattct

SEQ ID NO: 372650 - DNA, 20 bp, Artificial Sequence
  Description of Artificial Sequence: Synthetic oligonucleotide
  Target: LAMA2; (+) strand; PAM type: YTN; PAM sequence: TTT
gccaaggcaaattctgtaga

SEQ ID NO: 372651 - DNA, 20 bp, Artificial Sequence
  Description of Artificial Sequence: Synthetic oligonucleotide
  Target: LAMA2; (+) strand; PAM type: YTN; PAM sequence: TTG
ccaaggcaaattctgtagat

SEQ ID NO: 372652 - DNA, 20 bp, Artificial Sequence
  Description of Artificial Sequence: Synthetic oligonucleotide
  Target: LAMA2; (+) strand; PAM type: YTN; PAM sequence: TTC
tgtagatgttttttattgtg

SEQ ID NO: 372653 - DNA, 20 bp, Artificial Sequence
  Description of Artificial Sequence: Synthetic oligonucleotide
  Target: LAMA2; (+) strand; PAM type: YTN; PAM sequence: CTG
tagatgttttttattgtgca

SEQ ID NO: 372654 - DNA, 20 bp, Artificial Sequence
  Description of Artificial Sequence: Synthetic oligonucleotide
  Target: LAMA2; (+) strand; PAM type: YTN; PAM sequence: TTT
tttattgtgcatgtttattt

SEQ ID NO: 372655 - DNA, 20 bp, Artificial Sequence
  Description of Artificial Sequence: Synthetic oligonucleotide
  Target: LAMA2; (+) strand; PAM type: YTN; PAM sequence: TTT
ttattgtgcatgtttatttc

SEQ ID NO: 372656 - DNA, 20 bp, Artificial Sequence
  Description of Artificial Sequence: Synthetic oligonucleotide
  Target: LAMA2; (+) strand; PAM type: YTN; PAM sequence: TTT
tattgtgcatgtttatttct

SEQ ID NO: 372657 - DNA, 20 bp, Artificial Sequence
  Description of Artificial Sequence: Synthetic oligonucleotide
  Target: LAMA2; (+) strand; PAM type: YTN; PAM sequence: TTT
attgtgcatgtttatttctc

SEQ ID NO: 372658 - DNA, 20 bp, Artificial Sequence
  Description of Artificial Sequence: Synthetic oligonucleotide
  Target: LAMA2; (+) strand; PAM type: YTN; PAM sequence: TTA
ttgtgcatgtttatttctca

SEQ ID NO: 372659 - DNA, 20 bp, Artificial Sequence
  Description of Artificial Sequence: Synthetic oligonucleotide
  Target: LAMA2; (+) strand; PAM type: YTN; PAM sequence: TTG
tgcatgtttatttctcactc

SEQ ID NO: 372660 - DNA, 20 bp, Artificial Sequence
  Description of Artificial Sequence: Synthetic oligonucleotide
  Target: LAMA2; (+) strand; PAM type: YTN; PAM sequence: TTT
atttctcactctaattttat

SEQ ID NO: 372661 - DNA, 20 bp, Artificial Sequence
  Description of Artificial Sequence: Synthetic oligonucleotide
  Target: LAMA2; (+) strand; PAM type: YTN; PAM sequence: TTA
tttctcactctaattttatt

SEQ ID NO: 372662 - DNA, 20 bp, Artificial Sequence
  Description of Artificial Sequence: Synthetic oligonucleotide
  Target: LAMA2; (+) strand; PAM type: YTN; PAM sequence: TTT
ctcactctaattttattttt

SEQ ID NO: 372663 - DNA, 20 bp, Artificial Sequence
  Description of Artificial Sequence: Synthetic oligonucleotide
  Target: LAMA2; (+) strand; PAM type: YTN; PAM sequence: TTC
tcactctaattttatttttg

SEQ ID NO: 372664 - DNA, 20 bp, Artificial Sequence
  Description of Artificial Sequence: Synthetic oligonucleotide
  Target: LAMA2; (+) strand; PAM type: YTN; PAM sequence: CTC
actctaattttatttttgtt

SEQ ID NO: 372665 - DNA, 20 bp, Artificial Sequence
  Description of Artificial Sequence: Synthetic oligonucleotide
  Target: LAMA2; (+) strand; PAM type: YTN; PAM sequence: CTC
taattttatttttgttgttg

SEQ ID NO: 372666 - DNA, 20 bp, Artificial Sequence
  Description of Artificial Sequence: Synthetic oligonucleotide
  Target: LAMA2; (+) strand; PAM type: YTN; PAM sequence: CTA
attttatttttgttgttgaa

SEQ ID NO: 372667 - DNA, 20 bp, Artificial Sequence
  Description of Artificial Sequence: Synthetic oligonucleotide
  Target: LAMA2; (+) strand; PAM type: YTN; PAM sequence: TTT
tatttttgttgttgaatgcc

SEQ ID NO: 372668 - DNA, 20 bp, Artificial Sequence
  Description of Artificial Sequence: Synthetic oligonucleotide
  Target: LAMA2; (+) strand; PAM type: YTN; PAM sequence: TTT
atttttgttgttgaatgcca

SEQ ID NO: 372669 - DNA, 20 bp, Artificial Sequence
  Description of Artificial Sequence: Synthetic oligonucleotide
  Target: LAMA2; (+) strand; PAM type: YTN; PAM sequence: TTA
tttttgttgttgaatgccat

SEQ ID NO: 372670 - DNA, 20 bp, Artificial Sequence
  Description of Artificial Sequence: Synthetic oligonucleotide
  Target: LAMA2; (+) strand; PAM type: YTN; PAM sequence: TTT
ttgttgttgaatgccatctt

SEQ ID NO: 372671 - DNA, 20 bp, Artificial Sequence
  Description of Artificial Sequence: Synthetic oligonucleotide
  Target: LAMA2; (+) strand; PAM type: YTN; PAM sequence: TTT
tgttgttgaatgccatcttc

SEQ ID NO: 372672 - DNA, 20 bp, Artificial Sequence
  Description of Artificial Sequence: Synthetic oligonucleotide
  Target: LAMA2; (+) strand; PAM type: YTN; PAM sequence: TTT
gttgttgaatgccatcttct

SEQ ID NO: 372673 - DNA, 20 bp, Artificial Sequence
  Description of Artificial Sequence: Synthetic oligonucleotide
  Target: LAMA2; (+) strand; PAM type: YTN; PAM sequence: TTG
ttgttgaatgccatcttctg

SEQ ID NO: 372674 - DNA, 20 bp, Artificial Sequence
  Description of Artificial Sequence: Synthetic oligonucleotide
  Target: LAMA2; (+) strand; PAM type: YTN; PAM sequence: TTG
ttgaatgccatcttctgcca

SEQ ID NO: 372675 - DNA, 20 bp, Artificial Sequence
  Description of Artificial Sequence: Synthetic oligonucleotide
  Target: LAMA2; (+) strand; PAM type: YTN; PAM sequence: TTG
aatgccatcttctgccatag

SEQ ID NO: 372676 - DNA, 20 bp, Artificial Sequence
  Description of Artificial Sequence: Synthetic oligonucleotide
  Target: LAMA2; (+) strand; PAM type: YTN; PAM sequence: CTT
ctgccatagctgtaactgca

SEQ ID NO: 372677 - DNA, 20 bp, Artificial Sequence
  Description of Artificial Sequence: Synthetic oligonucleotide
  Target: LAMA2; (+) strand; PAM type: YTN; PAM sequence: TTC
tgccatagctgtaactgcaa

SEQ ID NO: 372678 - DNA, 20 bp, Artificial Sequence
  Description of Artificial Sequence: Synthetic oligonucleotide
  Target: LAMA2; (+) strand; PAM type: YTN; PAM sequence: CTG
ccatagctgtaactgcaatt

SEQ ID NO: 372679 - DNA, 20 bp, Artificial Sequence
  Description of Artificial Sequence: Synthetic oligonucleotide
  Target: LAMA2; (+) strand; PAM type: YTN; PAM sequence: CTG
taactgcaattacagcaata

SEQ ID NO: 372680 - DNA, 20 bp, Artificial Sequence
  Description of Artificial Sequence: Synthetic oligonucleotide
  Target: LAMA2; (+) strand; PAM type: YTN; PAM sequence: CTG
caattacagcaataagagag

SEQ ID NO: 372681 - DNA, 20 bp, Artificial Sequence
  Description of Artificial Sequence: Synthetic oligonucleotide
  Target: LAMA2; (+) strand; PAM type: YTN; PAM sequence: TTA
cagcaataagagagtgaatc

SEQ ID NO: 372682 - DNA, 20 bp, Artificial Sequence
  Description of Artificial Sequence: Synthetic oligonucleotide
  Target: LAMA2; (+) strand; PAM type: YTN; PAM sequence: CTT
cagtttatgttgttgaaaga

SEQ ID NO: 372683 - DNA, 20 bp, Artificial Sequence
  Description of Artificial Sequence: Synthetic oligonucleotide
  Target: LAMA2; (+) strand; PAM type: YTN; PAM sequence: TTC
agtttatgttgttgaaagaa

SEQ ID NO: 372684 - DNA, 20 bp, Artificial Sequence
  Description of Artificial Sequence: Synthetic oligonucleotide
  Target: LAMA2; (+) strand; PAM type: YTN; PAM sequence: TTT
atgttgttgaaagaatatca

SEQ ID NO: 372685 - DNA, 20 bp, Artificial Sequence
  Description of Artificial Sequence: Synthetic oligonucleotide
  Target: LAMA2; (+) strand; PAM type: YTN; PAM sequence: TTA
tgttgttgaaagaatatcaa

SEQ ID NO: 372686 - DNA, 20 bp, Artificial Sequence
  Description of Artificial Sequence: Synthetic oligonucleotide
  Target: LAMA2; (+) strand; PAM type: YTN; PAM sequence: TTG
ttgaaagaatatcaaagcac

SEQ ID NO: 372687 - DNA, 20 bp, Artificial Sequence
  Description of Artificial Sequence: Synthetic oligonucleotide
  Target: LAMA2; (+) strand; PAM type: YTN; PAM sequence: TTG
aaagaatatcaaagcacaaa

SEQ ID NO: 372688 - DNA, 20 bp, Artificial Sequence
  Description of Artificial Sequence: Synthetic oligonucleotide
  Target: LAMA2; (+) strand; PAM type: YTN; PAM sequence: TTT
tatgagaaagttttatttgg

SEQ ID NO: 372689 - DNA, 20 bp, Artificial Sequence
  Description of Artificial Sequence: Synthetic oligonucleotide
  Target: LAMA2; (+) strand; PAM type: YTN; PAM sequence: TTT
atgagaaagttttatttgga

SEQ ID NO: 372690 - DNA, 20 bp, Artificial Sequence
  Description of Artificial Sequence: Synthetic oligonucleotide
  Target: LAMA2; (+) strand; PAM type: YTN; PAM sequence: TTA
tgagaaagttttatttggat

SEQ ID NO: 372691 - DNA, 20 bp, Artificial Sequence
  Description of Artificial Sequence: Synthetic oligonucleotide
  Target: LAMA2; (+) strand; PAM type: YTN; PAM sequence: TTT
tatttggatgcgttatgtcg

SEQ ID NO: 372692 - DNA, 20 bp, Artificial Sequence
  Description of Artificial Sequence: Synthetic oligonucleotide
  Target: LAMA2; (+) strand; PAM type: YTN; PAM sequence: TTT
atttggatgcgttatgtcga

SEQ ID NO: 372693 - DNA, 20 bp, Artificial Sequence
  Description of Artificial Sequence: Synthetic oligonucleotide
  Target: LAMA2; (+) strand; PAM type: YTN; PAM sequence: TTA
tttggatgcgttatgtcgag

SEQ ID NO: 372694 - DNA, 20 bp, Artificial Sequence
  Description of Artificial Sequence: Synthetic oligonucleotide
  Target: LAMA2; (+) strand; PAM type: YTN; PAM sequence: TTT
ggatgcgttatgtcgagtat

SEQ ID NO: 372695 - DNA, 20 bp, Artificial Sequence
  Description of Artificial Sequence: Synthetic oligonucleotide
  Target: LAMA2; (+) strand; PAM type: YTN; PAM sequence: TTG
gatgcgttatgtcgagtatc

SEQ ID NO: 372696 - DNA, 20 bp, Artificial Sequence
  Description of Artificial Sequence: Synthetic oligonucleotide
  Target: LAMA2; (+) strand; PAM type: YTN; PAM sequence: TTA
tgtcgagtatctatattact

SEQ ID NO: 372697 - DNA, 20 bp, Artificial Sequence
  Description of Artificial Sequence: Synthetic oligonucleotide
  Target: LAMA2; (+) strand; PAM type: YTN; PAM sequence: CTA
tattactagaaacttaaact

SEQ ID NO: 372698 - DNA, 20 bp, Artificial Sequence
  Description of Artificial Sequence: Synthetic oligonucleotide
  Target: LAMA2; (+) strand; PAM type: YTN; PAM sequence: TTA
ctagaaacttaaacttactt

SEQ ID NO: 372699 - DNA, 20 bp, Artificial Sequence
  Description of Artificial Sequence: Synthetic oligonucleotide
  Target: LAMA2; (+) strand; PAM type: YTN; PAM sequence: CTA
gaaacttaaacttacttaat

SEQ ID NO: 372700 - DNA, 20 bp, Artificial Sequence
  Description of Artificial Sequence: Synthetic oligonucleotide
  Target: LAMA2; (+) strand; PAM type: YTN; PAM sequence: CTT
aaacttacttaattcttacc

SEQ ID NO: 372701 - DNA, 20 bp, Artificial Sequence
  Description of Artificial Sequence: Synthetic oligonucleotide
  Target: LAMA2; (+) strand; PAM type: YTN; PAM sequence: TTA
aacttacttaattcttacca

SEQ ID NO: 372702 - DNA, 20 bp, Artificial Sequence
  Description of Artificial Sequence: Synthetic oligonucleotide
  Target: LAMA2; (+) strand; PAM type: YTN; PAM sequence: CTT
acttaattcttaccagtagg

SEQ ID NO: 372703 - DNA, 20 bp, Artificial Sequence
  Description of Artificial Sequence: Synthetic oligonucleotide
  Target: LAMA2; (+) strand; PAM type: YTN; PAM sequence: TTA
cttaattcttaccagtaggt

SEQ ID NO: 372704 - DNA, 20 bp, Artificial Sequence
  Description of Artificial Sequence: Synthetic oligonucleotide
  Target: LAMA2; (+) strand; PAM type: YTN; PAM sequence: CTT
aattcttaccagtaggtttc

SEQ ID NO: 372705 - DNA, 20 bp, Artificial Sequence
  Description of Artificial Sequence: Synthetic oligonucleotide
  Target: LAMA2; (+) strand; PAM type: YTN; PAM sequence: TTA
attcttaccagtaggtttca

SEQ ID NO: 372706 - DNA, 20 bp, Artificial Sequence
  Description of Artificial Sequence: Synthetic oligonucleotide
  Target: LAMA2; (+) strand; PAM type: YTN; PAM sequence: TTC
ttaccagtaggtttcaatga

SEQ ID NO: 372707 - DNA, 20 bp, Artificial Sequence
  Description of Artificial Sequence: Synthetic oligonucleotide
  Target: LAMA2; (+) strand; PAM type: YTN; PAM sequence: CTT
accagtaggtttcaatgaca

SEQ ID NO: 372708 - DNA, 20 bp, Artificial Sequence
  Description of Artificial Sequence: Synthetic oligonucleotide
  Target: LAMA2; (+) strand; PAM type: YTN; PAM sequence: TTA
ccagtaggtttcaatgacaa

SEQ ID NO: 372709 - DNA, 20 bp, Artificial Sequence
  Description of Artificial Sequence: Synthetic oligonucleotide
  Target: LAMA2; (+) strand; PAM type: YTN; PAM sequence: TTT
caatgacaattggttatagg

SEQ ID NO: 372710 - DNA, 20 bp, Artificial Sequence
  Description of Artificial Sequence: Synthetic oligonucleotide
  Target: LAMA2; (+) strand; PAM type: YTN; PAM sequence: TTC
aatgacaattggttatagga

SEQ ID NO: 372711 - DNA, 20 bp, Artificial Sequence
  Description of Artificial Sequence: Synthetic oligonucleotide
  Target: LAMA2; (+) strand; PAM type: YTN; PAM sequence: TTG
gttataggaagaagagaata

SEQ ID NO: 372712 - DNA, 20 bp, Artificial Sequence
  Description of Artificial Sequence: Synthetic oligonucleotide
  Target: LAMA2; (+) strand; PAM type: YTN; PAM sequence: TTA
taggaagaagagaatatcac

SEQ ID NO: 372713 - DNA, 20 bp, Artificial Sequence
  Description of Artificial Sequence: Synthetic oligonucleotide
  Target: LAMA2; (+) strand; PAM type: YTN; PAM sequence: TTA
agaatctaaagtcctagatc

SEQ ID NO: 372714 - DNA, 20 bp, Artificial Sequence
  Description of Artificial Sequence: Synthetic oligonucleotide
  Target: LAMA2; (+) strand; PAM type: YTN; PAM sequence: CTA
aagtcctagatcccatacta

SEQ ID NO: 372715 - DNA, 20 bp, Artificial Sequence
  Description of Artificial Sequence: Synthetic oligonucleotide
  Target: LAMA2; (+) strand; PAM type: YTN; PAM sequence: CTA
gatcccatactaaattctcc

SEQ ID NO: 372716 - DNA, 20 bp, Artificial Sequence
  Description of Artificial Sequence: Synthetic oligonucleotide
  Target: LAMA2; (+) strand; PAM type: YTN; PAM sequence: CTA
aattctcctggaaattttgt

SEQ ID NO: 372717 - DNA, 20 bp, Artificial Sequence
  Description of Artificial Sequence: Synthetic oligonucleotide
  Target: LAMA2; (+) strand; PAM type: YTN; PAM sequence: TTC
tcctggaaattttgtatatg

SEQ ID NO: 372718 - DNA, 20 bp, Artificial Sequence
  Description of Artificial Sequence: Synthetic oligonucleotide
  Target: LAMA2; (+) strand; PAM type: YTN; PAM sequence: CTC
ctggaaattttgtatatgac

SEQ ID NO: 372719 - DNA, 20 bp, Artificial Sequence
  Description of Artificial Sequence: Synthetic oligonucleotide
  Target: LAMA2; (+) strand; PAM type: YTN; PAM sequence: CTG
gaaattttgtatatgacctt

SEQ ID NO: 372720 - DNA, 20 bp, Artificial Sequence
  Description of Artificial Sequence: Synthetic oligonucleotide
  Target: LAMA2; (+) strand; PAM type: YTN; PAM sequence: TTT
tgtatatgaccttggttaag

SEQ ID NO: 372721 - DNA, 20 bp, Artificial Sequence
  Description of Artificial Sequence: Synthetic oligonucleotide
  Target: LAMA2; (+) strand; PAM type: YTN; PAM sequence: TTT
gtatatgaccttggttaaga

SEQ ID NO: 372722 - DNA, 20 bp, Artificial Sequence
  Description of Artificial Sequence: Synthetic oligonucleotide
  Target: LAMA2; (+) strand; PAM type: YTN; PAM sequence: TTG
tatatgaccttggttaagaa

SEQ ID NO: 372723 - DNA, 20 bp, Artificial Sequence
  Description of Artificial Sequence: Synthetic oligonucleotide
  Target: LAMA2; (+) strand; PAM type: YTN; PAM sequence: CTT
ggttaagaaaaactgtgcct

SEQ ID NO: 372724 - DNA, 20 bp, Artificial Sequence
  Description of Artificial Sequence: Synthetic oligonucleotide
  Target: LAMA2; (+) strand; PAM type: YTN; PAM sequence: TTG
gttaagaaaaactgtgcctg

SEQ ID NO: 372725 - DNA, 20 bp, Artificial Sequence
  Description of Artificial Sequence: Synthetic oligonucleotide
  Target: LAMA2; (+) strand; PAM type: YTN; PAM sequence: TTA
agaaaaactgtgcctgccct

SEQ ID NO: 372726 - DNA, 20 bp, Artificial Sequence
  Description of Artificial Sequence: Synthetic oligonucleotide
  Target: LAMA2; (+) strand; PAM type: YTN; PAM sequence: CTG
tgcctgccctaaccagctca

SEQ ID NO: 372727 - DNA, 20 bp, Artificial Sequence
  Description of Artificial Sequence: Synthetic oligonucleotide
  Target: LAMA2; (+) strand; PAM type: YTN; PAM sequence: CTG
ccctaaccagctcataggat

SEQ ID NO: 372728 - DNA, 20 bp, Artificial Sequence
  Description of Artificial Sequence: Synthetic oligonucleotide
  Target: LAMA2; (+) strand; PAM type: YTN; PAM sequence: CTA
accagctcataggattttgt

SEQ ID NO: 372729 - DNA, 20 bp, Artificial Sequence
  Description of Artificial Sequence: Synthetic oligonucleotide
  Target: LAMA2; (+) strand; PAM type: YTN; PAM sequence: CTC
ataggattttgtgaaaatgt

SEQ ID NO: 372730 - DNA, 20 bp, Artificial Sequence
  Description of Artificial Sequence: Synthetic oligonucleotide
  Target: LAMA2; (+) strand; PAM type: YTN; PAM sequence: TTT
tgtgaaaatgtgataaaatt

SEQ ID NO: 372731 - DNA, 20 bp, Artificial Sequence
  Description of Artificial Sequence: Synthetic oligonucleotide
  Target: LAMA2; (+) strand; PAM type: YTN; PAM sequence: TTT
gtgaaaatgtgataaaattg

SEQ ID NO: 372732 - DNA, 20 bp, Artificial Sequence
  Description of Artificial Sequence: Synthetic oligonucleotide
  Target: LAMA2; (+) strand; PAM type: YTN; PAM sequence: TTG
tgaaaatgtgataaaattgt

SEQ ID NO: 372733 - DNA, 20 bp, Artificial Sequence
  Description of Artificial Sequence: Synthetic oligonucleotide
  Target: LAMA2; (+) strand; PAM type: YTN; PAM sequence: TTG
taaaagtattctgaactgta

SEQ ID NO: 372734 - DNA, 20 bp, Artificial Sequence
  Description of Artificial Sequence: Synthetic oligonucleotide
  Target: LAMA2; (+) strand; PAM type: YTN; PAM sequence: TTC
tgaactgtaaggagctagtc

SEQ ID NO: 372735 - DNA, 20 bp, Artificial Sequence
  Description of Artificial Sequence: Synthetic oligonucleotide
  Target: LAMA2; (+) strand; PAM type: YTN; PAM sequence: CTG
aactgtaaggagctagtcaa

SEQ ID NO: 372736 - DNA, 20 bp, Artificial Sequence
  Description of Artificial Sequence: Synthetic oligonucleotide
  Target: LAMA2; (+) strand; PAM type: YTN; PAM sequence: CTG
taaggagctagtcaaattta

SEQ ID NO: 372737 - DNA, 20 bp, Artificial Sequence
  Description of Artificial Sequence: Synthetic oligonucleotide
  Target: LAMA2; (+) strand; PAM type: YTN; PAM sequence: CTA
gtcaaatttaacatattttt

SEQ ID NO: 372738 - DNA, 20 bp, Artificial Sequence
  Description of Artificial Sequence: Synthetic oligonucleotide
  Target: LAMA2; (+) strand; PAM type: YTN; PAM sequence: TTT
aacatatttttattgcctaa

SEQ ID NO: 372739 - DNA, 20 bp, Artificial Sequence
  Description of Artificial Sequence: Synthetic oligonucleotide
  Target: LAMA2; (+) strand; PAM type: YTN; PAM sequence: TTA
acatatttttattgcctaat

SEQ ID NO: 372740 - DNA, 20 bp, Artificial Sequence
  Description of Artificial Sequence: Synthetic oligonucleotide
  Target: LAMA2; (+) strand; PAM type: YTN; PAM sequence: TTT
ttattgcctaatttttttct

SEQ ID NO: 372741 - DNA, 20 bp, Artificial Sequence
  Description of Artificial Sequence: Synthetic oligonucleotide
  Target: LAMA2; (+) strand; PAM type: YTN; PAM sequence: TTT
tattgcctaatttttttctc

SEQ ID NO: 372742 - DNA, 20 bp, Artificial Sequence
  Description of Artificial Sequence: Synthetic oligonucleotide
  Target: LAMA2; (+) strand; PAM type: YTN; PAM sequence: TTT
attgcctaatttttttctcg

SEQ ID NO: 372743 - DNA, 20 bp, Artificial Sequence
  Description of Artificial Sequence: Synthetic oligonucleotide
  Target: LAMA2; (+) strand; PAM type: YTN; PAM sequence: TTA
ttgcctaatttttttctcga

SEQ ID NO: 372744 - DNA, 20 bp, Artificial Sequence
  Description of Artificial Sequence: Synthetic oligonucleotide
  Target: LAMA2; (+) strand; PAM type: YTN; PAM sequence: TTG
cctaatttttttctcgaaaa

SEQ ID NO: 372745 - DNA, 20 bp, Artificial Sequence
  Description of Artificial Sequence: Synthetic oligonucleotide
  Target: LAMA2; (+) strand; PAM type: YTN; PAM sequence: CTA
atttttttctcgaaaaagtg

SEQ ID NO: 372746 - DNA, 20 bp, Artificial Sequence
  Description of Artificial Sequence: Synthetic oligonucleotide
  Target: LAMA2; (+) strand; PAM type: YTN; PAM sequence: TTT
ttttctcgaaaaagtgttga

SEQ ID NO: 372747 - DNA, 20 bp, Artificial Sequence
  Description of Artificial Sequence: Synthetic oligonucleotide
  Target: LAMA2; (+) strand; PAM type: YTN; PAM sequence: TTT
tttctcgaaaaagtgttgat

SEQ ID NO: 372748 - DNA, 20 bp, Artificial Sequence
  Description of Artificial Sequence: Synthetic oligonucleotide
  Target: LAMA2; (+) strand; PAM type: YTN; PAM sequence: TTT
ttctcgaaaaagtgttgatt

SEQ ID NO: 372749 - DNA, 20 bp, Artificial Sequence
  Description of Artificial Sequence: Synthetic oligonucleotide
  Target: LAMA2; (+) strand; PAM type: YTN; PAM sequence: TTT
tctcgaaaaagtgttgattt

SEQ ID NO: 372750 - DNA, 20 bp, Artificial Sequence
  Description of Artificial Sequence: Synthetic oligonucleotide
  Target: LAMA2; (+) strand; PAM type: YTN; PAM sequence: TTT
ctcgaaaaagtgttgatttt

SEQ ID NO: 372751 - DNA, 20 bp, Artificial Sequence
  Description of Artificial Sequence: Synthetic oligonucleotide
  Target: LAMA2; (+) strand; PAM type: YTN; PAM sequence: TTC
tcgaaaaagtgttgattttt

SEQ ID NO: 372752 - DNA, 20 bp, Artificial Sequence
  Description of Artificial Sequence: Synthetic oligonucleotide
  Target: LAMA2; (+) strand; PAM type: YTN; PAM sequence: CTC
gaaaaagtgttgatttttgt

SEQ ID NO: 372753 - DNA, 20 bp, Artificial Sequence
  Description of Artificial Sequence: Synthetic oligonucleotide
  Target: LAMA2; (+) strand; PAM type: YTN; PAM sequence: TTG
atttttgtcagtgagcacct

SEQ ID NO: 372754 - DNA, 20 bp, Artificial Sequence
  Description of Artificial Sequence: Synthetic oligonucleotide
  Target: LAMA2; (+) strand; PAM type: YTN; PAM sequence: TTT
ttgtcagtgagcacctttta

SEQ ID NO: 372755 - DNA, 20 bp, Artificial Sequence
  Description of Artificial Sequence: Synthetic oligonucleotide
  Target: LAMA2; (+) strand; PAM type: YTN; PAM sequence: TTT
tgtcagtgagcaccttttac

SEQ ID NO: 372756 - DNA, 20 bp, Artificial Sequence
  Description of Artificial Sequence: Synthetic oligonucleotide
  Target: LAMA2; (+) strand; PAM type: YTN; PAM sequence: TTT
gtcagtgagcaccttttact

SEQ ID NO: 372757 - DNA, 20 bp, Artificial Sequence
  Description of Artificial Sequence: Synthetic oligonucleotide
  Target: LAMA2; (+) strand; PAM type: YTN; PAM sequence: TTG
tcagtgagcaccttttactt

SEQ ID NO: 372758 - DNA, 20 bp, Artificial Sequence
  Description of Artificial Sequence: Synthetic oligonucleotide
  Target: LAMA2; (+) strand; PAM type: YTN; PAM sequence: CTT
ttacttatgttggttttaac

SEQ ID NO: 372759 - DNA, 20 bp, Artificial Sequence
  Description of Artificial Sequence: Synthetic oligonucleotide
  Target: LAMA2; (+) strand; PAM type: YTN; PAM sequence: TTT
tacttatgttggttttaact

SEQ ID NO: 372760 - DNA, 20 bp, Artificial Sequence
  Description of Artificial Sequence: Synthetic oligonucleotide
  Target: LAMA2; (+) strand; PAM type: YTN; PAM sequence: TTT
acttatgttggttttaactg

SEQ ID NO: 372761 - DNA, 20 bp, Artificial Sequence
  Description of Artificial Sequence: Synthetic oligonucleotide
  Target: LAMA2; (+) strand; PAM type: YTN; PAM sequence: TTA
cttatgttggttttaactga

SEQ ID NO: 372762 - DNA, 20 bp, Artificial Sequence
  Description of Artificial Sequence: Synthetic oligonucleotide
  Target: LAMA2; (+) strand; PAM type: YTN; PAM sequence: CTT
atgttggttttaactgacat

SEQ ID NO: 372763 - DNA, 20 bp, Artificial Sequence
  Description of Artificial Sequence: Synthetic oligonucleotide
  Target: LAMA2; (+) strand; PAM type: YTN; PAM sequence: TTA
tgttggttttaactgacatg

SEQ ID NO: 372764 - DNA, 20 bp, Artificial Sequence
  Description of Artificial Sequence: Synthetic oligonucleotide
  Target: LAMA2; (+) strand; PAM type: YTN; PAM sequence: TTG
gttttaactgacatgtgagt

SEQ ID NO: 372765 - DNA, 20 bp, Artificial Sequence
  Description of Artificial Sequence: Synthetic oligonucleotide
  Target: LAMA2; (+) strand; PAM type: YTN; PAM sequence: TTT
taactgacatgtgagtgtat

SEQ ID NO: 372766 - DNA, 20 bp, Artificial Sequence
  Description of Artificial Sequence: Synthetic oligonucleotide
  Target: LAMA2; (+) strand; PAM type: YTN; PAM sequence: TTT
aactgacatgtgagtgtatt

SEQ ID NO: 372767 - DNA, 20 bp, Artificial Sequence
  Description of Artificial Sequence: Synthetic oligonucleotide
  Target: LAMA2; (+) strand; PAM type: YTN; PAM sequence: TTA
actgacatgtgagtgtattt

SEQ ID NO: 372768 - DNA, 20 bp, Artificial Sequence
  Description of Artificial Sequence: Synthetic oligonucleotide
  Target: LAMA2; (+) strand; PAM type: YTN; PAM sequence: CTG
acatgtgagtgtatttaaga

SEQ ID NO: 372769 - DNA, 20 bp, Artificial Sequence
  Description of Artificial Sequence: Synthetic oligonucleotide
  Target: LAMA2; (+) strand; PAM type: YTN; PAM sequence: TTT
aagaatctgaaatctatttt

SEQ ID NO: 372770 - DNA, 20 bp, Artificial Sequence
  Description of Artificial Sequence: Synthetic oligonucleotide
  Target: LAMA2; (+) strand; PAM type: YTN; PAM sequence: TTA
agaatctgaaatctatttta

SEQ ID NO: 372771 - DNA, 20 bp, Artificial Sequence
  Description of Artificial Sequence: Synthetic oligonucleotide
  Target: LAMA2; (+) strand; PAM type: YTN; PAM sequence: CTG
aaatctattttatgaatagc

SEQ ID NO: 372772 - DNA, 20 bp, Artificial Sequence
  Description of Artificial Sequence: Synthetic oligonucleotide
  Target: LAMA2; (+) strand; PAM type: YTN; PAM sequence: CTA
ttttatgaatagctttaaag

SEQ ID NO: 372773 - DNA, 20 bp, Artificial Sequence
  Description of Artificial Sequence: Synthetic oligonucleotide
  Target: LAMA2; (+) strand; PAM type: YTN; PAM sequence: TTT
tatgaatagctttaaagtgt

SEQ ID NO: 372774 - DNA, 20 bp, Artificial Sequence
  Description of Artificial Sequence: Synthetic oligonucleotide
  Target: LAMA2; (+) strand; PAM type: YTN; PAM sequence: TTT
atgaatagctttaaagtgtc

SEQ ID NO: 372775 - DNA, 20 bp, Artificial Sequence
  Description of Artificial Sequence: Synthetic oligonucleotide
  Target: LAMA2; (+) strand; PAM type: YTN; PAM sequence: TTA
tgaatagctttaaagtgtca

SEQ ID NO: 372776 - DNA, 20 bp, Artificial Sequence
  Description of Artificial Sequence: Synthetic oligonucleotide
  Target: LAMA2; (+) strand; PAM type: YTN; PAM sequence: CTT
taaagtgtcaaggccaggtg

SEQ ID NO: 372777 - DNA, 20 bp, Artificial Sequence
  Description of Artificial Sequence: Synthetic oligonucleotide
  Target: LAMA2; (+) strand; PAM type: YTN; PAM sequence: TTT
aaagtgtcaaggccaggtgc

SEQ ID NO: 372778 - DNA, 20 bp, Artificial Sequence
  Description of Artificial Sequence: Synthetic oligonucleotide
  Target: LAMA2; (+) strand; PAM type: YTN; PAM sequence: TTA
aagtgtcaaggccaggtgca

SEQ ID NO: 372779 - DNA, 20 bp, Artificial Sequence
  Description of Artificial Sequence: Synthetic oligonucleotide
  Target: LAMA2; (+) strand; PAM type: YTN; PAM sequence: CTC
atgcctgtaatcctagcact

SEQ ID NO: 372780 - DNA, 20 bp, Artificial Sequence
  Description of Artificial Sequence: Synthetic oligonucleotide
  Target: LAMA2; (+) strand; PAM type: YTN; PAM sequence: CTG
taatcctagcactttgggag

SEQ ID NO: 372781 - DNA, 20 bp, Artificial Sequence
  Description of Artificial Sequence: Synthetic oligonucleotide
  Target: LAMA2; (+) strand; PAM type: YTN; PAM sequence: CTA
gcactttgggaggccaaggc

SEQ ID NO: 372782 - DNA, 20 bp, Artificial Sequence
  Description of Artificial Sequence: Synthetic oligonucleotide
  Target: LAMA2; (+) strand; PAM type: YTN; PAM sequence: CTT
tgggaggccaaggcaggtgg

SEQ ID NO: 372783 - DNA, 20 bp, Artificial Sequence
  Description of Artificial Sequence: Synthetic oligonucleotide
  Target: LAMA2; (+) strand; PAM type: YTN; PAM sequence: TTT
gggaggccaaggcaggtgga

SEQ ID NO: 372784 - DNA, 20 bp, Artificial Sequence
  Description of Artificial Sequence: Synthetic oligonucleotide
  Target: LAMA2; (+) strand; PAM type: YTN; PAM sequence: TTG
ggaggccaaggcaggtggat

SEQ ID NO: 372785 - DNA, 20 bp, Artificial Sequence
  Description of Artificial Sequence: Synthetic oligonucleotide
  Target: LAMA2; (+) strand; PAM type: YTN; PAM sequence: CTT
gaggtcaggagttcaagacc

SEQ ID NO: 372786 - DNA, 20 bp, Artificial Sequence
  Description of Artificial Sequence: Synthetic oligonucleotide
  Target: LAMA2; (+) strand; PAM type: YTN; PAM sequence: TTG
aggtcaggagttcaagacca

SEQ ID NO: 372787 - DNA, 20 bp, Artificial Sequence
  Description of Artificial Sequence: Synthetic oligonucleotide
  Target: LAMA2; (+) strand; PAM type: YTN; PAM sequence: TTC
aagaccagcccggccaatat

SEQ ID NO: 372788 - DNA, 20 bp, Artificial Sequence
  Description of Artificial Sequence: Synthetic oligonucleotide
  Target: LAMA2; (+) strand; PAM type: YTN; PAM sequence: TTT
ctactaaaaatacaaaaatg

SEQ ID NO: 372789 - DNA, 20 bp, Artificial Sequence
  Description of Artificial Sequence: Synthetic oligonucleotide
  Target: LAMA2; (+) strand; PAM type: YTN; PAM sequence: TTC
tactaaaaatacaaaaatgg

SEQ ID NO: 372790 - DNA, 20 bp, Artificial Sequence
  Description of Artificial Sequence: Synthetic oligonucleotide
  Target: LAMA2; (+) strand; PAM type: YTN; PAM sequence: CTA
ctaaaaatacaaaaatgggc

SEQ ID NO: 372791 - DNA, 20 bp, Artificial Sequence
  Description of Artificial Sequence: Synthetic oligonucleotide
  Target: LAMA2; (+) strand; PAM type: YTN; PAM sequence: CTA
aaaatacaaaaatgggccag

SEQ ID NO: 372792 - DNA, 20 bp, Artificial Sequence
  Description of Artificial Sequence: Synthetic oligonucleotide
  Target: LAMA2; (+) strand; PAM type: YTN; PAM sequence: CTG
gtagcacctgcctgcaatcc

SEQ ID NO: 372793 - DNA, 20 bp, Artificial Sequence
  Description of Artificial Sequence: Synthetic oligonucleotide
  Target: LAMA2; (+) strand; PAM type: YTN; PAM sequence: CTG
cctgcaatcccagctactca

SEQ ID NO: 372794 - DNA, 20 bp, Artificial Sequence
  Description of Artificial Sequence: Synthetic oligonucleotide
  Target: LAMA2; (+) strand; PAM type: YTN; PAM sequence: CTG
caatcccagctactcaggag

SEQ ID NO: 372795 - DNA, 20 bp, Artificial Sequence
  Description of Artificial Sequence: Synthetic oligonucleotide
  Target: LAMA2; (+) strand; PAM type: YTN; PAM sequence: CTA
ctcaggaggctgagacacta

SEQ ID NO: 372796 - DNA, 20 bp, Artificial Sequence
  Description of Artificial Sequence: Synthetic oligonucleotide
  Target: LAMA2; (+) strand; PAM type: YTN; PAM sequence: CTC
aggaggctgagacactagaa

SEQ ID NO: 372797 - DNA, 20 bp, Artificial Sequence
  Description of Artificial Sequence: Synthetic oligonucleotide
  Target: LAMA2; (+) strand; PAM type: YTN; PAM sequence: CTG
agacactagaatcgcttgaa

SEQ ID NO: 372798 - DNA, 20 bp, Artificial Sequence
  Description of Artificial Sequence: Synthetic oligonucleotide
  Target: LAMA2; (+) strand; PAM type: YTN; PAM sequence: CTA
gaatcgcttgaacccagtag

SEQ ID NO: 372799 - DNA, 20 bp, Artificial Sequence
  Description of Artificial Sequence: Synthetic oligonucleotide
  Target: LAMA2; (+) strand; PAM type: YTN; PAM sequence: CTT
gaacccagtaggcaggggtt

SEQ ID NO: 372800 - DNA, 20 bp, Artificial Sequence
  Description of Artificial Sequence: Synthetic oligonucleotide
  Target: LAMA2; (+) strand; PAM type: YTN; PAM sequence: TTG
aacccagtaggcaggggttt

SEQ ID NO: 372801 - DNA, 20 bp, Artificial Sequence
  Description of Artificial Sequence: Synthetic oligonucleotide
  Target: LAMA2; (+) strand; PAM type: YTN; PAM sequence: TTT
cagtgagccaagattgcacc

SEQ ID NO: 372802 - DNA, 20 bp, Artificial Sequence
  Description of Artificial Sequence: Synthetic oligonucleotide
  Target: LAMA2; (+) strand; PAM type: YTN; PAM sequence: TTC
agtgagccaagattgcacca

SEQ ID NO: 372803 - DNA, 20 bp, Artificial Sequence
  Description of Artificial Sequence: Synthetic oligonucleotide
  Target: LAMA2; (+) strand; PAM type: YTN; PAM sequence: TTG
caccactgcactccagtctg

SEQ ID NO: 372804 - DNA, 20 bp, Artificial Sequence
  Description of Artificial Sequence: Synthetic oligonucleotide
  Target: LAMA2; (+) strand; PAM type: YTN; PAM sequence: CTG
cactccagtctgggcaacag

SEQ ID NO: 372805 - DNA, 20 bp, Artificial Sequence
  Description of Artificial Sequence: Synthetic oligonucleotide
  Target: LAMA2; (+) strand; PAM type: YTN; PAM sequence: CTC
cagtctgggcaacagagcaa

SEQ ID NO: 372806 - DNA, 20 bp, Artificial Sequence
  Description of Artificial Sequence: Synthetic oligonucleotide
  Target: LAMA2; (+) strand; PAM type: YTN; PAM sequence: CTG
ggcaacagagcaagactctg

SEQ ID NO: 372807 - DNA, 20 bp, Artificial Sequence
  Description of Artificial Sequence: Synthetic oligonucleotide
  Target: LAMA2; (+) strand; PAM type: YTN; PAM sequence: CTC
tgtctcaaataaaataaaat

SEQ ID NO: 372808 - DNA, 20 bp, Artificial Sequence
  Description of Artificial Sequence: Synthetic oligonucleotide
  Target: LAMA2; (+) strand; PAM type: YTN; PAM sequence: CTG
tctcaaataaaataaaataa

SEQ ID NO: 372809 - DNA, 20 bp, Artificial Sequence
  Description of Artificial Sequence: Synthetic oligonucleotide
  Target: LAMA2; (+) strand; PAM type: YTN; PAM sequence: CTC
aaataaaataaaataaaata

SEQ ID NO: 372810 - DNA, 20 bp, Artificial Sequence
  Description of Artificial Sequence: Synthetic oligonucleotide
  Target: LAMA2; (+) strand; PAM type: YTN; PAM sequence: TTT
ttaaaaatgtcagaagcctt

SEQ ID NO: 372811 - DNA, 20 bp, Artificial Sequence
  Description of Artificial Sequence: Synthetic oligonucleotide
  Target: LAMA2; (+) strand; PAM type: YTN; PAM sequence: TTT
taaaaatgtcagaagccttg

SEQ ID NO: 372812 - DNA, 20 bp, Artificial Sequence
  Description of Artificial Sequence: Synthetic oligonucleotide
  Target: LAMA2; (+) strand; PAM type: YTN; PAM sequence: TTT
aaaaatgtcagaagccttgt

SEQ ID NO: 372813 - DNA, 20 bp, Artificial Sequence
  Description of Artificial Sequence: Synthetic oligonucleotide
  Target: LAMA2; (+) strand; PAM type: YTN; PAM sequence: TTA
aaaatgtcagaagccttgtc

SEQ ID NO: 372814 - DNA, 20 bp, Artificial Sequence
  Description of Artificial Sequence: Synthetic oligonucleotide
  Target: LAMA2; (+) strand; PAM type: YTN; PAM sequence: CTT
gtcaaccaccattgacaaga

SEQ ID NO: 372815 - DNA, 20 bp, Artificial Sequence
  Description of Artificial Sequence: Synthetic oligonucleotide
  Target: LAMA2; (+) strand; PAM type: YTN; PAM sequence: TTG
tcaaccaccattgacaagag

SEQ ID NO: 372816 - DNA, 20 bp, Artificial Sequence
  Description of Artificial Sequence: Synthetic oligonucleotide
  Target: LAMA2; (+) strand; PAM type: YTN; PAM sequence: TTG
acaagagttatgataaactg

SEQ ID NO: 372817 - DNA, 20 bp, Artificial Sequence
  Description of Artificial Sequence: Synthetic oligonucleotide
  Target: LAMA2; (+) strand; PAM type: YTN; PAM sequence: TTA
tgataaactgatttaggatt

SEQ ID NO: 372818 - DNA, 20 bp, Artificial Sequence
  Description of Artificial Sequence: Synthetic oligonucleotide
  Target: LAMA2; (+) strand; PAM type: YTN; PAM sequence: CTG
atttaggattataaaaaaca

SEQ ID NO: 372819 - DNA, 20 bp, Artificial Sequence
  Description of Artificial Sequence: Synthetic oligonucleotide
  Target: LAMA2; (+) strand; PAM type: YTN; PAM sequence: TTT
aggattataaaaaacaattg

SEQ ID NO: 372820 - DNA, 20 bp, Artificial Sequence
  Description of Artificial Sequence: Synthetic oligonucleotide
  Target: LAMA2; (+) strand; PAM type: YTN; PAM sequence: TTA
ggattataaaaaacaattgg

SEQ ID NO: 372821 - DNA, 20 bp, Artificial Sequence
  Description of Artificial Sequence: Synthetic oligonucleotide
  Target: LAMA2; (+) strand; PAM type: YTN; PAM sequence: TTA
taaaaaacaattggtatggt

SEQ ID NO: 372822 - DNA, 20 bp, Artificial Sequence
  Description of Artificial Sequence: Synthetic oligonucleotide
  Target: LAMA2; (+) strand; PAM type: YTN; PAM sequence: TTG
gtatggttttctttcaatca

SEQ ID NO: 372823 - DNA, 20 bp, Artificial Sequence
  Description of Artificial Sequence: Synthetic oligonucleotide
  Target: LAMA2; (+) strand; PAM type: YTN; PAM sequence: TTT
tctttcaatcagtgtagtcc

SEQ ID NO: 372824 - DNA, 20 bp, Artificial Sequence
  Description of Artificial Sequence: Synthetic oligonucleotide
  Target: LAMA2; (+) strand; PAM type: YTN; PAM sequence: TTT
ctttcaatcagtgtagtccc

SEQ ID NO: 372825 - DNA, 20 bp, Artificial Sequence
  Description of Artificial Sequence: Synthetic oligonucleotide
  Target: LAMA2; (+) strand; PAM type: YTN; PAM sequence: TTC
tttcaatcagtgtagtccca

SEQ ID NO: 372826 - DNA, 20 bp, Artificial Sequence
  Description of Artificial Sequence: Synthetic oligonucleotide
  Target: LAMA2; (+) strand; PAM type: YTN; PAM sequence: CTT
tcaatcagtgtagtcccaca

SEQ ID NO: 372827 - DNA, 20 bp, Artificial Sequence
  Description of Artificial Sequence: Synthetic oligonucleotide
  Target: LAMA2; (+) strand; PAM type: YTN; PAM sequence: TTT
caatcagtgtagtcccacag

SEQ ID NO: 372828 - DNA, 20 bp, Artificial Sequence
  Description of Artificial Sequence: Synthetic oligonucleotide
  Target: LAMA2; (+) strand; PAM type: YTN; PAM sequence: TTC
aatcagtgtagtcccacaga

SEQ ID NO: 372829 - DNA, 20 bp, Artificial Sequence
  Description of Artificial Sequence: Synthetic oligonucleotide
  Target: LAMA2; (+) strand; PAM type: YTN; PAM sequence: CTT
ctggttggagtcagtttctc

SEQ ID NO: 372830 - DNA, 20 bp, Artificial Sequence
  Description of Artificial Sequence: Synthetic oligonucleotide
  Target: LAMA2; (+) strand; PAM type: YTN; PAM sequence: TTC
tggttggagtcagtttctca

SEQ ID NO: 372831 - DNA, 20 bp, Artificial Sequence
  Description of Artificial Sequence: Synthetic oligonucleotide
  Target: LAMA2; (+) strand; PAM type: YTN; PAM sequence: CTG
gttggagtcagtttctcagt

SEQ ID NO: 372832 - DNA, 20 bp, Artificial Sequence
  Description of Artificial Sequence: Synthetic oligonucleotide
  Target: LAMA2; (+) strand; PAM type: YTN; PAM sequence: TTG
gagtcagtttctcagtagat

SEQ ID NO: 372833 - DNA, 20 bp, Artificial Sequence
  Description of Artificial Sequence: Synthetic oligonucleotide
  Target: LAMA2; (+) strand; PAM type: YTN; PAM sequence: TTT
ctcagtagatgatgagatag

SEQ ID NO: 372834 - DNA, 20 bp, Artificial Sequence
  Description of Artificial Sequence: Synthetic oligonucleotide
  Target: LAMA2; (+) strand; PAM type: YTN; PAM sequence: TTC
tcagtagatgatgagatagt

SEQ ID NO: 372835 - DNA, 20 bp, Artificial Sequence
  Description of Artificial Sequence: Synthetic oligonucleotide
  Target: LAMA2; (+) strand; PAM type: YTN; PAM sequence: CTC
agtagatgatgagatagtta

SEQ ID NO: 372836 - DNA, 20 bp, Artificial Sequence
  Description of Artificial Sequence: Synthetic oligonucleotide
  Target: LAMA2; (+) strand; PAM type: YTN; PAM sequence: TTA
cagaatgccaattttcaaag

SEQ ID NO: 372837 - DNA, 20 bp, Artificial Sequence
  Description of Artificial Sequence: Synthetic oligonucleotide
  Target: LAMA2; (+) strand; PAM type: YTN; PAM sequence: TTT
tcaaagaagacatatatatg

SEQ ID NO: 372838 - DNA, 20 bp, Artificial Sequence
  Description of Artificial Sequence: Synthetic oligonucleotide
  Target: LAMA2; (+) strand; PAM type: YTN; PAM sequence: TTT
caaagaagacatatatatgc

SEQ ID NO: 372839 - DNA, 20 bp, Artificial Sequence
  Description of Artificial Sequence: Synthetic oligonucleotide
  Target: LAMA2; (+) strand; PAM type: YTN; PAM sequence: TTC
aaagaagacatatatatgct

SEQ ID NO: 372840 - DNA, 20 bp, Artificial Sequence
  Description of Artificial Sequence: Synthetic oligonucleotide
  Target: LAMA2; (+) strand; PAM type: YTN; PAM sequence: CTA
cagagatgcagttctcactt

SEQ ID NO: 372841 - DNA, 20 bp, Artificial Sequence
  Description of Artificial Sequence: Synthetic oligonucleotide
  Target: LAMA2; (+) strand; PAM type: YTN; PAM sequence: TTC
tcacttttatgtctgaaaac

SEQ ID NO: 372842 - DNA, 20 bp, Artificial Sequence
  Description of Artificial Sequence: Synthetic oligonucleotide
  Target: LAMA2; (+) strand; PAM type: YTN; PAM sequence: CTC
acttttatgtctgaaaacag

SEQ ID NO: 372843 - DNA, 20 bp, Artificial Sequence
  Description of Artificial Sequence: Synthetic oligonucleotide
  Target: LAMA2; (+) strand; PAM type: YTN; PAM sequence: CTT
ttatgtctgaaaacagtaac

SEQ ID NO: 372844 - DNA, 20 bp, Artificial Sequence
  Description of Artificial Sequence: Synthetic oligonucleotide
  Target: LAMA2; (+) strand; PAM type: YTN; PAM sequence: TTT
tatgtctgaaaacagtaaca

SEQ ID NO: 372845 - DNA, 20 bp, Artificial Sequence
  Description of Artificial Sequence: Synthetic oligonucleotide
  Target: LAMA2; (+) strand; PAM type: YTN; PAM sequence: TTT
atgtctgaaaacagtaacag

SEQ ID NO: 372846 - DNA, 20 bp, Artificial Sequence
  Description of Artificial Sequence: Synthetic oligonucleotide
  Target: LAMA2; (+) strand; PAM type: YTN; PAM sequence: TTA
tgtctgaaaacagtaacagc

SEQ ID NO: 372847 - DNA, 20 bp, Artificial Sequence
  Description of Artificial Sequence: Synthetic oligonucleotide
  Target: LAMA2; (+) strand; PAM type: YTN; PAM sequence: CTG
aaaacagtaacagcaaatca

SEQ ID NO: 372848 - DNA, 20 bp, Artificial Sequence
  Description of Artificial Sequence: Synthetic oligonucleotide
  Target: LAMA2; (+) strand; PAM type: YTN; PAM sequence: CTT
tttttttattttattttaac

SEQ ID NO: 372849 - DNA, 20 bp, Artificial Sequence
  Description of Artificial Sequence: Synthetic oligonucleotide
  Target: LAMA2; (+) strand; PAM type: YTN; PAM sequence: TTT
ttttttattttattttaacc

SEQ ID NO: 372850 - DNA, 20 bp, Artificial Sequence
  Description of Artificial Sequence: Synthetic oligonucleotide
  Target: LAMA2; (+) strand; PAM type: YTN; PAM sequence: TTT
tttttattttattttaacct

SEQ ID NO: 372851 - DNA, 20 bp, Artificial Sequence
  Description of Artificial Sequence: Synthetic oligonucleotide
  Target: LAMA2; (+) strand; PAM type: YTN; PAM sequence: TTT
ttttattttattttaacctg

SEQ ID NO: 372852 - DNA, 20 bp, Artificial Sequence
  Description of Artificial Sequence: Synthetic oligonucleotide
  Target: LAMA2; (+) strand; PAM type: YTN; PAM sequence: TTT
tttattttattttaacctgt

SEQ ID NO: 372853 - DNA, 20 bp, Artificial Sequence
  Description of Artificial Sequence: Synthetic oligonucleotide
  Target: LAMA2; (+) strand; PAM type: YTN; PAM sequence: TTT
ttattttattttaacctgtg

SEQ ID NO: 372854 - DNA, 20 bp, Artificial Sequence
  Description of Artificial Sequence: Synthetic oligonucleotide
  Target: LAMA2; (+) strand; PAM type: YTN; PAM sequence: TTT
tattttattttaacctgtgc

SEQ ID NO: 372855 - DNA, 20 bp, Artificial Sequence
  Description of Artificial Sequence: Synthetic oligonucleotide
  Target: LAMA2; (+) strand; PAM type: YTN; PAM sequence: TTT
attttattttaacctgtgca

SEQ ID NO: 372856 - DNA, 20 bp, Artificial Sequence
  Description of Artificial Sequence: Synthetic oligonucleotide
  Target: LAMA2; (+) strand; PAM type: YTN; PAM sequence: TTA
ttttattttaacctgtgcat

SEQ ID NO: 372857 - DNA, 20 bp, Artificial Sequence
  Description of Artificial Sequence: Synthetic oligonucleotide
  Target: LAMA2; (+) strand; PAM type: YTN; PAM sequence: TTT
tattttaacctgtgcatctt

SEQ ID NO: 372858 - DNA, 20 bp, Artificial Sequence
  Description of Artificial Sequence: Synthetic oligonucleotide
  Target: LAMA2; (+) strand; PAM type: YTN; PAM sequence: TTT
attttaacctgtgcatcttc

SEQ ID NO: 372859 - DNA, 20 bp, Artificial Sequence
  Description of Artificial Sequence: Synthetic oligonucleotide
  Target: LAMA2; (+) strand; PAM type: YTN; PAM sequence: TTA
ttttaacctgtgcatcttca

SEQ ID NO: 372860 - DNA, 20 bp, Artificial Sequence
  Description of Artificial Sequence: Synthetic oligonucleotide
  Target: LAMA2; (+) strand; PAM type: YTN; PAM sequence: TTT
taacctgtgcatcttcagtg

SEQ ID NO: 372861 - DNA, 20 bp, Artificial Sequence
  Description of Artificial Sequence: Synthetic oligonucleotide
  Target: LAMA2; (+) strand; PAM type: YTN; PAM sequence: TTT
aacctgtgcatcttcagtgc

SEQ ID NO: 372862 - DNA, 20 bp, Artificial Sequence
  Description of Artificial Sequence: Synthetic oligonucleotide
  Target: LAMA2; (+) strand; PAM type: YTN; PAM sequence: TTA
acctgtgcatcttcagtgca

SEQ ID NO: 372863 - DNA, 20 bp, Artificial Sequence
  Description of Artificial Sequence: Synthetic oligonucleotide
  Target: LAMA2; (+) strand; PAM type: YTN; PAM sequence: CTG
tgcatcttcagtgcaatcac

SEQ ID NO: 372864 - DNA, 20 bp, Artificial Sequence
  Description of Artificial Sequence: Synthetic oligonucleotide
  Target: LAMA2; (+) strand; PAM type: YTN; PAM sequence: CTT
cagtgcaatcacaatcccgt

SEQ ID NO: 372865 - DNA, 20 bp, Artificial Sequence
  Description of Artificial Sequence: Synthetic oligonucleotide
  Target: LAMA2; (+) strand; PAM type: YTN; PAM sequence: TTC
agtgcaatcacaatcccgtc

SEQ ID NO: 372866 - DNA, 20 bp, Artificial Sequence
  Description of Artificial Sequence: Synthetic oligonucleotide
  Target: LAMA2; (+) strand; PAM type: YTN; PAM sequence: CTG
tctttgggtcatgcgtagca

SEQ ID NO: 372867 - DNA, 20 bp, Artificial Sequence
  Description of Artificial Sequence: Synthetic oligonucleotide
  Target: LAMA2; (+) strand; PAM type: YTN; PAM sequence: CTT
tgggtcatgcgtagcaaagt

SEQ ID NO: 372868 - DNA, 20 bp, Artificial Sequence
  Description of Artificial Sequence: Synthetic oligonucleotide
  Target: LAMA2; (+) strand; PAM type: YTN; PAM sequence: TTT
gggtcatgcgtagcaaagta

SEQ ID NO: 372869 - DNA, 20 bp, Artificial Sequence
  Description of Artificial Sequence: Synthetic oligonucleotide
  Target: LAMA2; (+) strand; PAM type: YTN; PAM sequence: TTG
ggtcatgcgtagcaaagtac

SEQ ID NO: 372870 - DNA, 20 bp, Artificial Sequence
  Description of Artificial Sequence: Synthetic oligonucleotide
  Target: LAMA2; (+) strand; PAM type: YTN; PAM sequence: CTT
tataaaaggagattctttac

SEQ ID NO: 372871 - DNA, 20 bp, Artificial Sequence
  Description of Artificial Sequence: Synthetic oligonucleotide
  Target: LAMA2; (+) strand; PAM type: YTN; PAM sequence: TTT
ataaaaggagattctttact

SEQ ID NO: 372872 - DNA, 20 bp, Artificial Sequence
  Description of Artificial Sequence: Synthetic oligonucleotide
  Target: LAMA2; (+) strand; PAM type: YTN; PAM sequence: TTA
taaaaggagattctttactc

SEQ ID NO: 372873 - DNA, 20 bp, Artificial Sequence
  Description of Artificial Sequence: Synthetic oligonucleotide
  Target: LAMA2; (+) strand; PAM type: YTN; PAM sequence: TTC
tttactcgcagtgcacacgc

SEQ ID NO: 372874 - DNA, 20 bp, Artificial Sequence
  Description of Artificial Sequence: Synthetic oligonucleotide
  Target: LAMA2; (+) strand; PAM type: YTN; PAM sequence: CTT
tactcgcagtgcacacgctg

SEQ ID NO: 372875 - DNA, 20 bp, Artificial Sequence
  Description of Artificial Sequence: Synthetic oligonucleotide
  Target: LAMA2; (+) strand; PAM type: YTN; PAM sequence: TTT
actcgcagtgcacacgctgg

SEQ ID NO: 372876 - DNA, 20 bp, Artificial Sequence
  Description of Artificial Sequence: Synthetic oligonucleotide
  Target: LAMA2; (+) strand; PAM type: YTN; PAM sequence: TTA
ctcgcagtgcacacgctggg

SEQ ID NO: 372877 - DNA, 20 bp, Artificial Sequence
  Description of Artificial Sequence: Synthetic oligonucleotide
  Target: LAMA2; (+) strand; PAM type: YTN; PAM sequence: CTC
gcagtgcacacgctgggtat

SEQ ID NO: 372878 - DNA, 20 bp, Artificial Sequence
  Description of Artificial Sequence: Synthetic oligonucleotide
  Target: LAMA2; (+) strand; PAM type: YTN; PAM sequence: CTG
ggtatgtcttgtctgctgtt

SEQ ID NO: 372879 - DNA, 20 bp, Artificial Sequence
  Description of Artificial Sequence: Synthetic oligonucleotide
  Target: LAMA2; (+) strand; PAM type: YTN; PAM sequence: CTT
gtctgctgttcatcacagct

SEQ ID NO: 372880 - DNA, 20 bp, Artificial Sequence
  Description of Artificial Sequence: Synthetic oligonucleotide
  Target: LAMA2; (+) strand; PAM type: YTN; PAM sequence: TTG
tctgctgttcatcacagcta

SEQ ID NO: 372881 - DNA, 20 bp, Artificial Sequence
  Description of Artificial Sequence: Synthetic oligonucleotide
  Target: LAMA2; (+) strand; PAM type: YTN; PAM sequence: CTG
ctgttcatcacagctaccag

SEQ ID NO: 372882 - DNA, 20 bp, Artificial Sequence
  Description of Artificial Sequence: Synthetic oligonucleotide
  Target: LAMA2; (+) strand; PAM type: YTN; PAM sequence: CTG
ttcatcacagctaccagaac

SEQ ID NO: 372883 - DNA, 20 bp, Artificial Sequence
  Description of Artificial Sequence: Synthetic oligonucleotide
  Target: LAMA2; (+) strand; PAM type: YTN; PAM sequence: TTC
atcacagctaccagaactcc

SEQ ID NO: 372884 - DNA, 20 bp, Artificial Sequence
  Description of Artificial Sequence: Synthetic oligonucleotide
  Target: LAMA2; (+) strand; PAM type: YTN; PAM sequence: CTA
ccagaactccttaatgtgga

SEQ ID NO: 372885 - DNA, 20 bp, Artificial Sequence
  Description of Artificial Sequence: Synthetic oligonucleotide
  Target: LAMA2; (+) strand; PAM type: YTN; PAM sequence: CTC
cttaatgtggaatctttgat

SEQ ID NO: 372886 - DNA, 20 bp, Artificial Sequence
  Description of Artificial Sequence: Synthetic oligonucleotide
  Target: LAMA2; (+) strand; PAM type: YTN; PAM sequence: CTT
aatgtggaatctttgatcca

SEQ ID NO: 372887 - DNA, 20 bp, Artificial Sequence
  Description of Artificial Sequence: Synthetic oligonucleotide
  Target: LAMA2; (+) strand; PAM type: YTN; PAM sequence: TTA
atgtggaatctttgatccag

SEQ ID NO: 372888 - DNA, 20 bp, Artificial Sequence
  Description of Artificial Sequence: Synthetic oligonucleotide
  Target: LAMA2; (+) strand; PAM type: YTN; PAM sequence: CTT
tgatccagataatatttata

SEQ ID NO: 372889 - DNA, 20 bp, Artificial Sequence
  Description of Artificial Sequence: Synthetic oligonucleotide
  Target: LAMA2; (+) strand; PAM type: YTN; PAM sequence: TTT
gatccagataatatttataa

SEQ ID NO: 372890 - DNA, 20 bp, Artificial Sequence
  Description of Artificial Sequence: Synthetic oligonucleotide
  Target: LAMA2; (+) strand; PAM type: YTN; PAM sequence: TTG
atccagataatatttataaa

SEQ ID NO: 372891 - DNA, 20 bp, Artificial Sequence
  Description of Artificial Sequence: Synthetic oligonucleotide
  Target: LAMA2; (+) strand; PAM type: YTN; PAM sequence: TTT
ataaattcaaagcatcccag

SEQ ID NO: 372892 - DNA, 20 bp, Artificial Sequence
  Description of Artificial Sequence: Synthetic oligonucleotide
  Target: LAMA2; (+) strand; PAM type: YTN; PAM sequence: TTA
taaattcaaagcatcccaga

SEQ ID NO: 372893 - DNA, 20 bp, Artificial Sequence
  Description of Artificial Sequence: Synthetic oligonucleotide
  Target: LAMA2; (+) strand; PAM type: YTN; PAM sequence: TTC
aaagcatcccagaccagcct

SEQ ID NO: 372894 - DNA, 20 bp, Artificial Sequence
  Description of Artificial Sequence: Synthetic oligonucleotide
  Target: LAMA2; (+) strand; PAM type: YTN; PAM sequence: CTT
tatctccttgacccagcaga

SEQ ID NO: 372895 - DNA, 20 bp, Artificial Sequence
  Description of Artificial Sequence: Synthetic oligonucleotide
  Target: LAMA2; (+) strand; PAM type: YTN; PAM sequence: TTT
atctccttgacccagcagat

SEQ ID NO: 372896 - DNA, 20 bp, Artificial Sequence
  Description of Artificial Sequence: Synthetic oligonucleotide
  Target: LAMA2; (+) strand; PAM type: YTN; PAM sequence: TTA
tctccttgacccagcagatt

SEQ ID NO: 372897 - DNA, 20 bp, Artificial Sequence
  Description of Artificial Sequence: Synthetic oligonucleotide
  Target: LAMA2; (+) strand; PAM type: YTN; PAM sequence: CTC
cttgacccagcagattcatt

SEQ ID NO: 372898 - DNA, 20 bp, Artificial Sequence
  Description of Artificial Sequence: Synthetic oligonucleotide
  Target: LAMA2; (+) strand; PAM type: YTN; PAM sequence: CTT
gacccagcagattcatttag

SEQ ID NO: 372899 - DNA, 20 bp, Artificial Sequence
  Description of Artificial Sequence: Synthetic oligonucleotide
  Target: LAMA2; (+) strand; PAM type: YTN; PAM sequence: TTG
acccagcagattcatttaga

SEQ ID NO: 372900 - DNA, 20 bp, Artificial Sequence
  Description of Artificial Sequence: Synthetic oligonucleotide
  Target: LAMA2; (+) strand; PAM type: YTN; PAM sequence: TTC
atttagactttccactgagt

SEQ ID NO: 372901 - DNA, 20 bp, Artificial Sequence
  Description of Artificial Sequence: Synthetic oligonucleotide
  Target: LAMA2; (+) strand; PAM type: YTN; PAM sequence: TTT
agactttccactgagttgaa

SEQ ID NO: 372902 - DNA, 20 bp, Artificial Sequence
  Description of Artificial Sequence: Synthetic oligonucleotide
  Target: LAMA2; (+) strand; PAM type: YTN; PAM sequence: TTA
gactttccactgagttgaaa

SEQ ID NO: 372903 - DNA, 20 bp, Artificial Sequence
  Description of Artificial Sequence: Synthetic oligonucleotide
  Target: LAMA2; (+) strand; PAM type: YTN; PAM sequence: CTT
tccactgagttgaaatgttt

SEQ ID NO: 372904 - DNA, 20 bp, Artificial Sequence
  Description of Artificial Sequence: Synthetic oligonucleotide
  Target: LAMA2; (+) strand; PAM type: YTN; PAM sequence: TTT
ccactgagttgaaatgttta

SEQ ID NO: 372905 - DNA, 20 bp, Artificial Sequence
  Description of Artificial Sequence: Synthetic oligonucleotide
  Target: LAMA2; (+) strand; PAM type: YTN; PAM sequence: TTC
cactgagttgaaatgtttaa

SEQ ID NO: 372906 - DNA, 20 bp, Artificial Sequence
  Description of Artificial Sequence: Synthetic oligonucleotide
  Target: LAMA2; (+) strand; PAM type: YTN; PAM sequence: CTG
agttgaaatgtttaaaatga

SEQ ID NO: 372907 - DNA, 20 bp, Artificial Sequence
  Description of Artificial Sequence: Synthetic oligonucleotide
  Target: LAMA2; (+) strand; PAM type: YTN; PAM sequence: TTG
aaatgtttaaaatgatagac

SEQ ID NO: 372908 - DNA, 20 bp, Artificial Sequence
  Description of Artificial Sequence: Synthetic oligonucleotide
  Target: LAMA2; (+) strand; PAM type: YTN; PAM sequence: TTT
aaaatgatagacttacctgg

SEQ ID NO: 372909 - DNA, 20 bp, Artificial Sequence
  Description of Artificial Sequence: Synthetic oligonucleotide
  Target: LAMA2; (+) strand; PAM type: YTN; PAM sequence: TTA
aaatgatagacttacctggt

SEQ ID NO: 372910 - DNA, 20 bp, Artificial Sequence
  Description of Artificial Sequence: Synthetic oligonucleotide
  Target: LAMA2; (+) strand; PAM type: YTN; PAM sequence: CTT
acctggtcctaataccttgc

SEQ ID NO: 372911 - DNA, 20 bp, Artificial Sequence
  Description of Artificial Sequence: Synthetic oligonucleotide
  Target: LAMA2; (+) strand; PAM type: YTN; PAM sequence: TTA
cctggtcctaataccttgct

SEQ ID NO: 372912 - DNA, 20 bp, Artificial Sequence
  Description of Artificial Sequence: Synthetic oligonucleotide
  Target: LAMA2; (+) strand; PAM type: YTN; PAM sequence: CTG
gtcctaataccttgctagta

SEQ ID NO: 372913 - DNA, 20 bp, Artificial Sequence
  Description of Artificial Sequence: Synthetic oligonucleotide
  Target: LAMA2; (+) strand; PAM type: YTN; PAM sequence: CTA
ataccttgctagtatcccaa

SEQ ID NO: 372914 - DNA, 20 bp, Artificial Sequence
  Description of Artificial Sequence: Synthetic oligonucleotide
  Target: LAMA2; (+) strand; PAM type: YTN; PAM sequence: CTT
gctagtatcccaaaaatagg

SEQ ID NO: 372915 - DNA, 20 bp, Artificial Sequence
  Description of Artificial Sequence: Synthetic oligonucleotide
  Target: LAMA2; (+) strand; PAM type: YTN; PAM sequence: TTG
ctagtatcccaaaaatagga

SEQ ID NO: 372916 - DNA, 20 bp, Artificial Sequence
  Description of Artificial Sequence: Synthetic oligonucleotide
  Target: LAMA2; (+) strand; PAM type: YTN; PAM sequence: CTA
gtatcccaaaaataggaaga

SEQ ID NO: 372917 - DNA, 20 bp, Artificial Sequence
  Description of Artificial Sequence: Synthetic oligonucleotide
  Target: LAMA2; (+) strand; PAM type: YTN; PAM sequence: CTA
ttaaatctttacagaactac

SEQ ID NO: 372918 - DNA, 20 bp, Artificial Sequence
  Description of Artificial Sequence: Synthetic oligonucleotide
  Target: LAMA2; (+) strand; PAM type: YTN; PAM sequence: TTA
aatctttacagaactaccct

SEQ ID NO: 372919 - DNA, 20 bp, Artificial Sequence
  Description of Artificial Sequence: Synthetic oligonucleotide
  Target: LAMA2; (+) strand; PAM type: YTN; PAM sequence: CTT
tacagaactaccctgagtta

SEQ ID NO: 372920 - DNA, 20 bp, Artificial Sequence
  Description of Artificial Sequence: Synthetic oligonucleotide
  Target: LAMA2; (+) strand; PAM type: YTN; PAM sequence: TTT
acagaactaccctgagttaa

SEQ ID NO: 372921 - DNA, 20 bp, Artificial Sequence
  Description of Artificial Sequence: Synthetic oligonucleotide
  Target: LAMA2; (+) strand; PAM type: YTN; PAM sequence: TTA
cagaactaccctgagttaag

SEQ ID NO: 372922 - DNA, 20 bp, Artificial Sequence
  Description of Artificial Sequence: Synthetic oligonucleotide
  Target: LAMA2; (+) strand; PAM type: YTN; PAM sequence: CTA
ccctgagttaagccagagaa

SEQ ID NO: 372923 - DNA, 20 bp, Artificial Sequence
  Description of Artificial Sequence: Synthetic oligonucleotide
  Target: LAMA2; (+) strand; PAM type: YTN; PAM sequence: CTG
agttaagccagagaaatact

SEQ ID NO: 372924 - DNA, 20 bp, Artificial Sequence
  Description of Artificial Sequence: Synthetic oligonucleotide
  Target: LAMA2; (+) strand; PAM type: YTN; PAM sequence: TTA
agccagagaaatactattca

SEQ ID NO: 372925 - DNA, 20 bp, Artificial Sequence
  Description of Artificial Sequence: Synthetic oligonucleotide
  Target: LAMA2; (+) strand; PAM type: YTN; PAM sequence: CTA
ttcagaaatagtgttcatga

SEQ ID NO: 372926 - DNA, 20 bp, Artificial Sequence
  Description of Artificial Sequence: Synthetic oligonucleotide
  Target: LAMA2; (+) strand; PAM type: YTN; PAM sequence: TTC
agaaatagtgttcatgatct

SEQ ID NO: 372927 - DNA, 20 bp, Artificial Sequence
  Description of Artificial Sequence: Synthetic oligonucleotide
  Target: LAMA2; (+) strand; PAM type: YTN; PAM sequence: TTC
atgatctgatctgcaccaaa

SEQ ID NO: 372928 - DNA, 20 bp, Artificial Sequence
  Description of Artificial Sequence: Synthetic oligonucleotide
  Target: LAMA2; (+) strand; PAM type: YTN; PAM sequence: CTG
atctgcaccaaagttaagaa

SEQ ID NO: 372929 - DNA, 20 bp, Artificial Sequence
  Description of Artificial Sequence: Synthetic oligonucleotide
  Target: LAMA2; (+) strand; PAM type: YTN; PAM sequence: CTG
caccaaagttaagaaagtat

SEQ ID NO: 372930 - DNA, 20 bp, Artificial Sequence
  Description of Artificial Sequence: Synthetic oligonucleotide
  Target: LAMA2; (+) strand; PAM type: YTN; PAM sequence: TTA
agaaagtatttcaaagtaat

SEQ ID NO: 372931 - DNA, 20 bp, Artificial Sequence
  Description of Artificial Sequence: Synthetic oligonucleotide
  Target: LAMA2; (+) strand; PAM type: YTN; PAM sequence: TTT
caaagtaattcaagtgtcag

SEQ ID NO: 372932 - DNA, 20 bp, Artificial Sequence
  Description of Artificial Sequence: Synthetic oligonucleotide
  Target: LAMA2; (+) strand; PAM type: YTN; PAM sequence: TTC
aaagtaattcaagtgtcagg

SEQ ID NO: 372933 - DNA, 20 bp, Artificial Sequence
  Description of Artificial Sequence: Synthetic oligonucleotide
  Target: LAMA2; (+) strand; PAM type: YTN; PAM sequence: TTC
aagtgtcaggagcaggatca

SEQ ID NO: 372934 - DNA, 20 bp, Artificial Sequence
  Description of Artificial Sequence: Synthetic oligonucleotide
  Target: LAMA2; (+) strand; PAM type: YTN; PAM sequence: CTT
ggaatgtttaatttgttgtt

SEQ ID NO: 372935 - DNA, 20 bp, Artificial Sequence
  Description of Artificial Sequence: Synthetic oligonucleotide
  Target: LAMA2; (+) strand; PAM type: YTN; PAM sequence: TTG
gaatgtttaatttgttgtta

SEQ ID NO: 372936 - DNA, 20 bp, Artificial Sequence
  Description of Artificial Sequence: Synthetic oligonucleotide
  Target: LAMA2; (+) strand; PAM type: YTN; PAM sequence: TTT
aatttgttgttatgtcttta

SEQ ID NO: 372937 - DNA, 20 bp, Artificial Sequence
  Description of Artificial Sequence: Synthetic oligonucleotide
  Target: LAMA2; (+) strand; PAM type: YTN; PAM sequence: TTA
atttgttgttatgtctttaa

SEQ ID NO: 372938 - DNA, 20 bp, Artificial Sequence
  Description of Artificial Sequence: Synthetic oligonucleotide
  Target: LAMA2; (+) strand; PAM type: YTN; PAM sequence: TTT
gttgttatgtctttaattca

SEQ ID NO: 372939 - DNA, 20 bp, Artificial Sequence
  Description of Artificial Sequence: Synthetic oligonucleotide
  Target: LAMA2; (+) strand; PAM type: YTN; PAM sequence: TTG
ttgttatgtctttaattcat

SEQ ID NO: 372940 - DNA, 20 bp, Artificial Sequence
  Description of Artificial Sequence: Synthetic oligonucleotide
  Target: LAMA2; (+) strand; PAM type: YTN; PAM sequence: TTG
ttatgtctttaattcattta

SEQ ID NO: 372941 - DNA, 20 bp, Artificial Sequence
  Description of Artificial Sequence: Synthetic oligonucleotide
  Target: LAMA2; (+) strand; PAM type: YTN; PAM sequence: TTA
tgtctttaattcatttagcc

SEQ ID NO: 372942 - DNA, 20 bp, Artificial Sequence
  Description of Artificial Sequence: Synthetic oligonucleotide
  Target: LAMA2; (+) strand; PAM type: YTN; PAM sequence: CTT
taattcatttagccatcaag

SEQ ID NO: 372943 - DNA, 20 bp, Artificial Sequence
  Description of Artificial Sequence: Synthetic oligonucleotide
  Target: LAMA2; (+) strand; PAM type: YTN; PAM sequence: TTT
aattcatttagccatcaagc

SEQ ID NO: 372944 - DNA, 20 bp, Artificial Sequence
  Description of Artificial Sequence: Synthetic oligonucleotide
  Target: LAMA2; (+) strand; PAM type: YTN; PAM sequence: TTA
attcatttagccatcaagca

SEQ ID NO: 372945 - DNA, 20 bp, Artificial Sequence
  Description of Artificial Sequence: Synthetic oligonucleotide
  Target: LAMA2; (+) strand; PAM type: YTN; PAM sequence: TTC
atttagccatcaagcaagtc

SEQ ID NO: 372946 - DNA, 20 bp, Artificial Sequence
  Description of Artificial Sequence: Synthetic oligonucleotide
  Target: LAMA2; (+) strand; PAM type: YTN; PAM sequence: TTT
agccatcaagcaagtctcta

SEQ ID NO: 372947 - DNA, 20 bp, Artificial Sequence
  Description of Artificial Sequence: Synthetic oligonucleotide
  Target: LAMA2; (+) strand; PAM type: YTN; PAM sequence: TTA
gccatcaagcaagtctctat

SEQ ID NO: 372948 - DNA, 20 bp, Artificial Sequence
  Description of Artificial Sequence: Synthetic oligonucleotide
  Target: LAMA2; (+) strand; PAM type: YTN; PAM sequence: CTC
tattgaattgccctgtcata

SEQ ID NO: 372949 - DNA, 20 bp, Artificial Sequence
  Description of Artificial Sequence: Synthetic oligonucleotide
  Target: LAMA2; (+) strand; PAM type: YTN; PAM sequence: CTA
ttgaattgccctgtcatata

SEQ ID NO: 372950 - DNA, 20 bp, Artificial Sequence
  Description of Artificial Sequence: Synthetic oligonucleotide
  Target: LAMA2; (+) strand; PAM type: YTN; PAM sequence: TTG
aattgccctgtcatatataa

SEQ ID NO: 372951 - DNA, 20 bp, Artificial Sequence
  Description of Artificial Sequence: Synthetic oligonucleotide
  Target: LAMA2; (+) strand; PAM type: YTN; PAM sequence: TTG
ccctgtcatatataatagaa

SEQ ID NO: 372952 - DNA, 20 bp, Artificial Sequence
  Description of Artificial Sequence: Synthetic oligonucleotide
  Target: LAMA2; (+) strand; PAM type: YTN; PAM sequence: CTG
tcatatataatagaaaacaa

SEQ ID NO: 372953 - DNA, 20 bp, Artificial Sequence
  Description of Artificial Sequence: Synthetic oligonucleotide
  Target: LAMA2; (+) strand; PAM type: YTN; PAM sequence: CTA
cttagggaaaacataataag

SEQ ID NO: 372954 - DNA, 20 bp, Artificial Sequence
  Description of Artificial Sequence: Synthetic oligonucleotide
  Target: LAMA2; (+) strand; PAM type: YTN; PAM sequence: CTT
agggaaaacataataagaga

SEQ ID NO: 372955 - DNA, 20 bp, Artificial Sequence
  Description of Artificial Sequence: Synthetic oligonucleotide
  Target: LAMA2; (+) strand; PAM type: YTN; PAM sequence: TTA
gggaaaacataataagagaa

SEQ ID NO: 372956 - DNA, 20 bp, Artificial Sequence
  Description of Artificial Sequence: Synthetic oligonucleotide
  Target: LAMA2; (+) strand; PAM type: YTN; PAM sequence: TTA
attgagggcatttcccttta

SEQ ID NO: 372957 - DNA, 20 bp, Artificial Sequence
  Description of Artificial Sequence: Synthetic oligonucleotide
  Target: LAMA2; (+) strand; PAM type: YTN; PAM sequence: TTG
agggcatttccctttaaaac

SEQ ID NO: 372958 - DNA, 20 bp, Artificial Sequence
  Description of Artificial Sequence: Synthetic oligonucleotide
  Target: LAMA2; (+) strand; PAM type: YTN; PAM sequence: TTT
ccctttaaaacggtagcgca

SEQ ID NO: 372959 - DNA, 20 bp, Artificial Sequence
  Description of Artificial Sequence: Synthetic oligonucleotide
  Target: LAMA2; (+) strand; PAM type: YTN; PAM sequence: TTC
cctttaaaacggtagcgcaa

SEQ ID NO: 372960 - DNA, 20 bp, Artificial Sequence
  Description of Artificial Sequence: Synthetic oligonucleotide
  Target: LAMA2; (+) strand; PAM type: YTN; PAM sequence: CTT
taaaacggtagcgcaacaga

SEQ ID NO: 372961 - DNA, 20 bp, Artificial Sequence
  Description of Artificial Sequence: Synthetic oligonucleotide
  Target: LAMA2; (+) strand; PAM type: YTN; PAM sequence: TTT
aaaacggtagcgcaacagac

SEQ ID NO: 372962 - DNA, 20 bp, Artificial Sequence
  Description of Artificial Sequence: Synthetic oligonucleotide
  Target: LAMA2; (+) strand; PAM type: YTN; PAM sequence: TTA
aaacggtagcgcaacagacc

SEQ ID NO: 372963 - DNA, 20 bp, Artificial Sequence
  Description of Artificial Sequence: Synthetic oligonucleotide
  Target: LAMA2; (+) strand; PAM type: YTN; PAM sequence: CTT
acagaattcaaaatggttga

SEQ ID NO: 372964 - DNA, 20 bp, Artificial Sequence
  Description of Artificial Sequence: Synthetic oligonucleotide
  Target: LAMA2; (+) strand; PAM type: YTN; PAM sequence: TTA
cagaattcaaaatggttgat

SEQ ID NO: 372965 - DNA, 20 bp, Artificial Sequence
  Description of Artificial Sequence: Synthetic oligonucleotide
  Target: LAMA2; (+) strand; PAM type: YTN; PAM sequence: TTC
aaaatggttgatggcccttc

SEQ ID NO: 372966 - DNA, 20 bp, Artificial Sequence
  Description of Artificial Sequence: Synthetic oligonucleotide
  Target: LAMA2; (+) strand; PAM type: YTN; PAM sequence: TTG
atggcccttcagagagccag

SEQ ID NO: 372967 - DNA, 20 bp, Artificial Sequence
  Description of Artificial Sequence: Synthetic oligonucleotide
  Target: LAMA2; (+) strand; PAM type: YTN; PAM sequence: CTT
cagagagccagtcgagaacg

SEQ ID NO: 372968 - DNA, 20 bp, Artificial Sequence
  Description of Artificial Sequence: Synthetic oligonucleotide
  Target: LAMA2; (+) strand; PAM type: YTN; PAM sequence: TTC
agagagccagtcgagaacgc

SEQ ID NO: 372969 - DNA, 20 bp, Artificial Sequence
  Description of Artificial Sequence: Synthetic oligonucleotide
  Target: LAMA2; (+) strand; PAM type: YTN; PAM sequence: TTA
ccgtgtgtcaatcttggggt

SEQ ID NO: 372970 - DNA, 20 bp, Artificial Sequence
  Description of Artificial Sequence: Synthetic oligonucleotide
  Target: LAMA2; (+) strand; PAM type: YTN; PAM sequence: CTT
ggggtaggggttcatgtatg

SEQ ID NO: 372971 - DNA, 20 bp, Artificial Sequence
  Description of Artificial Sequence: Synthetic oligonucleotide
  Target: LAMA2; (+) strand; PAM type: YTN; PAM sequence: TTG
gggtaggggttcatgtatga

SEQ ID NO: 372972 - DNA, 20 bp, Artificial Sequence
  Description of Artificial Sequence: Synthetic oligonucleotide
  Target: LAMA2; (+) strand; PAM type: YTN; PAM sequence: TTC
atgtatgagaggtgcctctc

SEQ ID NO: 372973 - DNA, 20 bp, Artificial Sequence
  Description of Artificial Sequence: Synthetic oligonucleotide
  Target: LAMA2; (+) strand; PAM type: YTN; PAM sequence: CTC
tcacaaggcaaagaagcatg

SEQ ID NO: 372974 - DNA, 20 bp, Artificial Sequence
  Description of Artificial Sequence: Synthetic oligonucleotide
  Target: LAMA2; (+) strand; PAM type: YTN; PAM sequence: CTC
acaaggcaaagaagcatggc

SEQ ID NO: 372975 - DNA, 20 bp, Artificial Sequence
  Description of Artificial Sequence: Synthetic oligonucleotide
  Target: LAMA2; (+) strand; PAM type: YTN; PAM sequence: CTG
gagtgaaacatgttgctgaa

SEQ ID NO: 372976 - DNA, 20 bp, Artificial Sequence
  Description of Artificial Sequence: Synthetic oligonucleotide
  Target: LAMA2; (+) strand; PAM type: YTN; PAM sequence: TTG
ctgaaagctaaagctagcac

SEQ ID NO: 372977 - DNA, 20 bp, Artificial Sequence
  Description of Artificial Sequence: Synthetic oligonucleotide
  Target: LAMA2; (+) strand; PAM type: YTN; PAM sequence: CTG
aaagctaaagctagcacctg

SEQ ID NO: 372978 - DNA, 20 bp, Artificial Sequence
  Description of Artificial Sequence: Synthetic oligonucleotide
  Target: LAMA2; (+) strand; PAM type: YTN; PAM sequence: CTA
aagctagcacctgagttctc

SEQ ID NO: 372979 - DNA, 20 bp, Artificial Sequence
  Description of Artificial Sequence: Synthetic oligonucleotide
  Target: LAMA2; (+) strand; PAM type: YTN; PAM sequence: CTA
gcacctgagttctctgttgg

SEQ ID NO: 372980 - DNA, 20 bp, Artificial Sequence
  Description of Artificial Sequence: Synthetic oligonucleotide
  Target: LAMA2; (+) strand; PAM type: YTN; PAM sequence: CTG
agttctctgttggttcttca

SEQ ID NO: 372981 - DNA, 20 bp, Artificial Sequence
  Description of Artificial Sequence: Synthetic oligonucleotide
  Target: LAMA2; (+) strand; PAM type: YTN; PAM sequence: TTC
tctgttggttcttcatctgg

SEQ ID NO: 372982 - DNA, 20 bp, Artificial Sequence
  Description of Artificial Sequence: Synthetic oligonucleotide
  Target: LAMA2; (+) strand; PAM type: YTN; PAM sequence: CTC
tgttggttcttcatctggtg

SEQ ID NO: 372983 - DNA, 20 bp, Artificial Sequence
  Description of Artificial Sequence: Synthetic oligonucleotide
  Target: LAMA2; (+) strand; PAM type: YTN; PAM sequence: CTG
ttggttcttcatctggtgtt

SEQ ID NO: 372984 - DNA, 20 bp, Artificial Sequence
  Description of Artificial Sequence: Synthetic oligonucleotide
  Target: LAMA2; (+) strand; PAM type: YTN; PAM sequence: TTG
gttcttcatctggtgttcag

SEQ ID NO: 372985 - DNA, 20 bp, Artificial Sequence
  Description of Artificial Sequence: Synthetic oligonucleotide
  Target: LAMA2; (+) strand; PAM type: YTN; PAM sequence: TTC
ttcatctggtgttcagctct

SEQ ID NO: 372986 - DNA, 20 bp, Artificial Sequence
  Description of Artificial Sequence: Synthetic oligonucleotide
  Target: LAMA2; (+) strand; PAM type: YTN; PAM sequence: CTT
catctggtgttcagctctat

SEQ ID NO: 372987 - DNA, 20 bp, Artificial Sequence
  Description of Artificial Sequence: Synthetic oligonucleotide
  Target: LAMA2; (+) strand; PAM type: YTN; PAM sequence: TTC
atctggtgttcagctctatt

SEQ ID NO: 372988 - DNA, 20 bp, Artificial Sequence
  Description of Artificial Sequence: Synthetic oligonucleotide
  Target: LAMA2; (+) strand; PAM type: YTN; PAM sequence: CTG
gtgttcagctctattgcttc

SEQ ID NO: 372989 - DNA, 20 bp, Artificial Sequence
  Description of Artificial Sequence: Synthetic oligonucleotide
  Target: LAMA2; (+) strand; PAM type: YTN; PAM sequence: TTC
agctctattgcttcagaccc

SEQ ID NO: 372990 - DNA, 20 bp, Artificial Sequence
  Description of Artificial Sequence: Synthetic oligonucleotide
  Target: LAMA2; (+) strand; PAM type: YTN; PAM sequence: CTC
tattgcttcagacccaaatt

SEQ ID NO: 372991 - DNA, 20 bp, Artificial Sequence
  Description of Artificial Sequence: Synthetic oligonucleotide
  Target: LAMA2; (+) strand; PAM type: YTN; PAM sequence: CTA
ttgcttcagacccaaattag

SEQ ID NO: 372992 - DNA, 20 bp, Artificial Sequence
  Description of Artificial Sequence: Synthetic oligonucleotide
  Target: LAMA2; (+) strand; PAM type: YTN; PAM sequence: TTG
cttcagacccaaattagaaa

SEQ ID NO: 372993 - DNA, 20 bp, Artificial Sequence
  Description of Artificial Sequence: Synthetic oligonucleotide
  Target: LAMA2; (+) strand; PAM type: YTN; PAM sequence: CTT
cagacccaaattagaaatat

SEQ ID NO: 372994 - DNA, 20 bp, Artificial Sequence
  Description of Artificial Sequence: Synthetic oligonucleotide
  Target: LAMA2; (+) strand; PAM type: YTN; PAM sequence: TTC
agacccaaattagaaatatg

SEQ ID NO: 372995 - DNA, 20 bp, Artificial Sequence
  Description of Artificial Sequence: Synthetic oligonucleotide
  Target: LAMA2; (+) strand; PAM type: YTN; PAM sequence: TTA
gaaatatgtgcaaagagaga

SEQ ID NO: 372996 - DNA, 20 bp, Artificial Sequence
  Description of Artificial Sequence: Synthetic oligonucleotide
  Target: LAMA2; (+) strand; PAM type: YTN; PAM sequence: TTT
tgaaacatgccagagggtat

SEQ ID NO: 372997 - DNA, 20 bp, Artificial Sequence
  Description of Artificial Sequence: Synthetic oligonucleotide
  Target: LAMA2; (+) strand; PAM type: YTN; PAM sequence: TTT
gaaacatgccagagggtatg

SEQ ID NO: 372998 - DNA, 20 bp, Artificial Sequence
  Description of Artificial Sequence: Synthetic oligonucleotide
  Target: LAMA2; (+) strand; PAM type: YTN; PAM sequence: TTG
aaacatgccagagggtatga

SEQ ID NO: 372999 - DNA, 20 bp, Artificial Sequence
  Description of Artificial Sequence: Synthetic oligonucleotide
  Target: LAMA2; (+) strand; PAM type: YTN; PAM sequence: TTG
cttttgtttggttaggttta

SEQ ID NO: 373000 - DNA, 20 bp, Artificial Sequence
  Description of Artificial Sequence: Synthetic oligonucleotide
  Target: LAMA2; (+) strand; PAM type: YTN; PAM sequence: CTT
ttgtttggttaggtttatga

SEQ ID NO: 373001 - DNA, 20 bp, Artificial Sequence
  Description of Artificial Sequence: Synthetic oligonucleotide
  Target: LAMA2; (+) strand; PAM type: YTN; PAM sequence: TTT
tgtttggttaggtttatgat

SEQ ID NO: 373002 - DNA, 20 bp, Artificial Sequence
  Description of Artificial Sequence: Synthetic oligonucleotide
  Target: LAMA2; (+) strand; PAM type: YTN; PAM sequence: TTT
gtttggttaggtttatgata

SEQ ID NO: 373003 - DNA, 20 bp, Artificial Sequence
  Description of Artificial Sequence: Synthetic oligonucleotide
  Target: LAMA2; (+) strand; PAM type: YTN; PAM sequence: TTG
tttggttaggtttatgataa

SEQ ID NO: 373004 - DNA, 20 bp, Artificial Sequence
  Description of Artificial Sequence: Synthetic oligonucleotide
  Target: LAMA2; (+) strand; PAM type: YTN; PAM sequence: TTT
ggttaggtttatgataagtt

SEQ ID NO: 373005 - DNA, 20 bp, Artificial Sequence
  Description of Artificial Sequence: Synthetic oligonucleotide
  Target: LAMA2; (+) strand; PAM type: YTN; PAM sequence: TTG
gttaggtttatgataagttt

SEQ ID NO: 373006 - DNA, 20 bp, Artificial Sequence
  Description of Artificial Sequence: Synthetic oligonucleotide
  Target: LAMA2; (+) strand; PAM type: YTN; PAM sequence: TTA
ggtttatgataagtttaggt

SEQ ID NO: 373007 - DNA, 20 bp, Artificial Sequence
  Description of Artificial Sequence: Synthetic oligonucleotide
  Target: LAMA2; (+) strand; PAM type: YTN; PAM sequence: TTT
atgataagtttaggtagaat

SEQ ID NO: 373008 - DNA, 20 bp, Artificial Sequence
  Description of Artificial Sequence: Synthetic oligonucleotide
  Target: LAMA2; (+) strand; PAM type: YTN; PAM sequence: TTA
tgataagtttaggtagaata

SEQ ID NO: 373009 - DNA, 20 bp, Artificial Sequence
  Description of Artificial Sequence: Synthetic oligonucleotide
  Target: LAMA2; (+) strand; PAM type: YTN; PAM sequence: TTT
aggtagaatatgcacacttg

SEQ ID NO: 373010 - DNA, 20 bp, Artificial Sequence
  Description of Artificial Sequence: Synthetic oligonucleotide
  Target: LAMA2; (+) strand; PAM type: YTN; PAM sequence: TTA
ggtagaatatgcacacttga

SEQ ID NO: 373011 - DNA, 20 bp, Artificial Sequence
  Description of Artificial Sequence: Synthetic oligonucleotide
  Target: LAMA2; (+) strand; PAM type: YTN; PAM sequence: CTT
gatctcttctgaaagctttc

SEQ ID NO: 373012 - DNA, 20 bp, Artificial Sequence
  Description of Artificial Sequence: Synthetic oligonucleotide
  Target: LAMA2; (+) strand; PAM type: YTN; PAM sequence: TTG
atctcttctgaaagctttcc

SEQ ID NO: 373013 - DNA, 20 bp, Artificial Sequence
  Description of Artificial Sequence: Synthetic oligonucleotide
  Target: LAMA2; (+) strand; PAM type: YTN; PAM sequence: CTC
ttctgaaagctttcctgagg

SEQ ID NO: 373014 - DNA, 20 bp, Artificial Sequence
  Description of Artificial Sequence: Synthetic oligonucleotide
  Target: LAMA2; (+) strand; PAM type: YTN; PAM sequence: CTT
ctgaaagctttcctgaggat

SEQ ID NO: 373015 - DNA, 20 bp, Artificial Sequence
  Description of Artificial Sequence: Synthetic oligonucleotide
  Target: LAMA2; (+) strand; PAM type: YTN; PAM sequence: TTC
tgaaagctttcctgaggatt

SEQ ID NO: 373016 - DNA, 20 bp, Artificial Sequence
  Description of Artificial Sequence: Synthetic oligonucleotide
  Target: LAMA2; (+) strand; PAM type: YTN; PAM sequence: CTG
aaagctttcctgaggattcc

SEQ ID NO: 373017 - DNA, 20 bp, Artificial Sequence
  Description of Artificial Sequence: Synthetic oligonucleotide
  Target: LAMA2; (+) strand; PAM type: YTN; PAM sequence: CTT
tcctgaggattccatcagtg

SEQ ID NO: 373018 - DNA, 20 bp, Artificial Sequence
  Description of Artificial Sequence: Synthetic oligonucleotide
  Target: LAMA2; (+) strand; PAM type: YTN; PAM sequence: TTT
cctgaggattccatcagtgt

SEQ ID NO: 373019 - DNA, 20 bp, Artificial Sequence
  Description of Artificial Sequence: Synthetic oligonucleotide
  Target: LAMA2; (+) strand; PAM type: YTN; PAM sequence: TTC
ctgaggattccatcagtgtg

SEQ ID NO: 373020 - DNA, 20 bp, Artificial Sequence
  Description of Artificial Sequence: Synthetic oligonucleotide
  Target: LAMA2; (+) strand; PAM type: YTN; PAM sequence: CTG
aggattccatcagtgtgagg

SEQ ID NO: 373021 - DNA, 20 bp, Artificial Sequence
  Description of Artificial Sequence: Synthetic oligonucleotide
  Target: LAMA2; (+) strand; PAM type: YTN; PAM sequence: TTC
catcagtgtgagggcatacc

SEQ ID NO: 373022 - DNA, 20 bp, Artificial Sequence
  Description of Artificial Sequence: Synthetic oligonucleotide
  Target: LAMA2; (+) strand; PAM type: YTN; PAM sequence: CTG
caaggaagcacatgccgcag

SEQ ID NO: 373023 - DNA, 20 bp, Artificial Sequence
  Description of Artificial Sequence: Synthetic oligonucleotide
  Target: LAMA2; (+) strand; PAM type: YTN; PAM sequence: CTG
cacacaggcacgccccacta

SEQ ID NO: 373024 - DNA, 20 bp, Artificial Sequence
  Description of Artificial Sequence: Synthetic oligonucleotide
  Target: LAMA2; (+) strand; PAM type: YTN; PAM sequence: CTA
tggcagtagctgaagaagga

SEQ ID NO: 373025 - DNA, 20 bp, Artificial Sequence
  Description of Artificial Sequence: Synthetic oligonucleotide
  Target: LAMA2; (+) strand; PAM type: YTN; PAM sequence: CTG
aagaaggaagcactgccacc

SEQ ID NO: 373026 - DNA, 20 bp, Artificial Sequence
  Description of Artificial Sequence: Synthetic oligonucleotide
  Target: LAMA2; (+) strand; PAM type: YTN; PAM sequence: CTG
ccaccaccactaccacatac

SEQ ID NO: 373027 - DNA, 20 bp, Artificial Sequence
  Description of Artificial Sequence: Synthetic oligonucleotide
  Target: LAMA2; (+) strand; PAM type: YTN; PAM sequence: CTA
ccacatactgagatttccaa

SEQ ID NO: 373028 - DNA, 20 bp, Artificial Sequence
  Description of Artificial Sequence: Synthetic oligonucleotide
  Target: LAMA2; (+) strand; PAM type: YTN; PAM sequence: CTG
agatttccaaaatcactaac

SEQ ID NO: 373029 - DNA, 20 bp, Artificial Sequence
  Description of Artificial Sequence: Synthetic oligonucleotide
  Target: LAMA2; (+) strand; PAM type: YTN; PAM sequence: TTT
ccaaaatcactaacaaattt

SEQ ID NO: 373030 - DNA, 20 bp, Artificial Sequence
  Description of Artificial Sequence: Synthetic oligonucleotide
  Target: LAMA2; (+) strand; PAM type: YTN; PAM sequence: TTC
caaaatcactaacaaatttc

SEQ ID NO: 373031 - DNA, 20 bp, Artificial Sequence
  Description of Artificial Sequence: Synthetic oligonucleotide
  Target: LAMA2; (+) strand; PAM type: YTN; PAM sequence: CTA
acaaatttctccaggctgct

SEQ ID NO: 373032 - DNA, 20 bp, Artificial Sequence
  Description of Artificial Sequence: Synthetic oligonucleotide
  Target: LAMA2; (+) strand; PAM type: YTN; PAM sequence: TTT
ctccaggctgcttcaaattc

SEQ ID NO: 373033 - DNA, 20 bp, Artificial Sequence
  Description of Artificial Sequence: Synthetic oligonucleotide
  Target: LAMA2; (+) strand; PAM type: YTN; PAM sequence: TTC
tccaggctgcttcaaattca

SEQ ID NO: 373034 - DNA, 20 bp, Artificial Sequence
  Description of Artificial Sequence: Synthetic oligonucleotide
  Target: LAMA2; (+) strand; PAM type: YTN; PAM sequence: CTC
caggctgcttcaaattcaga

SEQ ID NO: 373035 - DNA, 20 bp, Artificial Sequence
  Description of Artificial Sequence: Synthetic oligonucleotide
  Target: LAMA2; (+) strand; PAM type: YTN; PAM sequence: CTG
cttcaaattcagagggattt

SEQ ID NO: 373036 - DNA, 20 bp, Artificial Sequence
  Description of Artificial Sequence: Synthetic oligonucleotide
  Target: LAMA2; (+) strand; PAM type: YTN; PAM sequence: CTT
caaattcagagggatttggc

SEQ ID NO: 373037 - DNA, 20 bp, Artificial Sequence
  Description of Artificial Sequence: Synthetic oligonucleotide
  Target: LAMA2; (+) strand; PAM type: YTN; PAM sequence: TTC
aaattcagagggatttggct

SEQ ID NO: 373038 - DNA, 20 bp, Artificial Sequence
  Description of Artificial Sequence: Synthetic oligonucleotide
  Target: LAMA2; (+) strand; PAM type: YTN; PAM sequence: TTC
agagggatttggctacagaa

SEQ ID NO: 373039 - DNA, 20 bp, Artificial Sequence
  Description of Artificial Sequence: Synthetic oligonucleotide
  Target: LAMA2; (+) strand; PAM type: YTN; PAM sequence: TTT
ggctacagaagaaagtatgt

SEQ ID NO: 373040 - DNA, 20 bp, Artificial Sequence
  Description of Artificial Sequence: Synthetic oligonucleotide
  Target: LAMA2; (+) strand; PAM type: YTN; PAM sequence: TTG
gctacagaagaaagtatgtg

SEQ ID NO: 373041 - DNA, 20 bp, Artificial Sequence
  Description of Artificial Sequence: Synthetic oligonucleotide
  Target: LAMA2; (+) strand; PAM type: YTN; PAM sequence: CTA
cagaagaaagtatgtgaggc

SEQ ID NO: 373042 - DNA, 20 bp, Artificial Sequence
  Description of Artificial Sequence: Synthetic oligonucleotide
  Target: LAMA2; (+) strand; PAM type: YTN; PAM sequence: CTG
catatgtgccaggcctggag

SEQ ID NO: 373043 - DNA, 20 bp, Artificial Sequence
  Description of Artificial Sequence: Synthetic oligonucleotide
  Target: LAMA2; (+) strand; PAM type: YTN; PAM sequence: CTG
gaggaatttctaaaaagcag

SEQ ID NO: 373044 - DNA, 20 bp, Artificial Sequence
  Description of Artificial Sequence: Synthetic oligonucleotide
  Target: LAMA2; (+) strand; PAM type: YTN; PAM sequence: TTT
ctaaaaagcagctatacatt

SEQ ID NO: 373045 - DNA, 20 bp, Artificial Sequence
  Description of Artificial Sequence: Synthetic oligonucleotide
  Target: LAMA2; (+) strand; PAM type: YTN; PAM sequence: TTC
taaaaagcagctatacattt

SEQ ID NO: 373046 - DNA, 20 bp, Artificial Sequence
  Description of Artificial Sequence: Synthetic oligonucleotide
  Target: LAMA2; (+) strand; PAM type: YTN; PAM sequence: CTA
aaaagcagctatacatttcc

SEQ ID NO: 373047 - DNA, 20 bp, Artificial Sequence
  Description of Artificial Sequence: Synthetic oligonucleotide
  Target: LAMA2; (+) strand; PAM type: YTN; PAM sequence: CTA
tacatttccacttgttactg

SEQ ID NO: 373048 - DNA, 20 bp, Artificial Sequence
  Description of Artificial Sequence: Synthetic oligonucleotide
  Target: LAMA2; (+) strand; PAM type: YTN; PAM sequence: TTT
ccacttgttactgatgatca

SEQ ID NO: 373049 - DNA, 20 bp, Artificial Sequence
  Description of Artificial Sequence: Synthetic oligonucleotide
  Target: LAMA2; (+) strand; PAM type: YTN; PAM sequence: TTC
cacttgttactgatgatcac

SEQ ID NO: 373050 - DNA, 20 bp, Artificial Sequence
  Description of Artificial Sequence: Synthetic oligonucleotide
  Target: LAMA2; (+) strand; PAM type: YTN; PAM sequence: CTT
gttactgatgatcactactc

SEQ ID NO: 373051 - DNA, 20 bp, Artificial Sequence
  Description of Artificial Sequence: Synthetic oligonucleotide
  Target: LAMA2; (+) strand; PAM type: YTN; PAM sequence: TTG
ttactgatgatcactactca

SEQ ID NO: 373052 - DNA, 20 bp, Artificial Sequence
  Description of Artificial Sequence: Synthetic oligonucleotide
  Target: LAMA2; (+) strand; PAM type: YTN; PAM sequence: TTA
ctgatgatcactactcagag

SEQ ID NO: 373053 - DNA, 20 bp, Artificial Sequence
  Description of Artificial Sequence: Synthetic oligonucleotide
  Target: LAMA2; (+) strand; PAM type: YTN; PAM sequence: CTG
atgatcactactcagagcag

SEQ ID NO: 373054 - DNA, 20 bp, Artificial Sequence
  Description of Artificial Sequence: Synthetic oligonucleotide
  Target: LAMA2; (+) strand; PAM type: YTN; PAM sequence: CTA
ctcagagcagtcgaaagtca

SEQ ID NO: 373055 - DNA, 20 bp, Artificial Sequence
  Description of Artificial Sequence: Synthetic oligonucleotide
  Target: LAMA2; (+) strand; PAM type: YTN; PAM sequence: CTC
agagcagtcgaaagtcagtt

SEQ ID NO: 373056 - DNA, 20 bp, Artificial Sequence
  Description of Artificial Sequence: Synthetic oligonucleotide
  Target: LAMA2; (+) strand; PAM type: YTN; PAM sequence: TTA
ataacatgtcacagggatac

SEQ ID NO: 373057 - DNA, 20 bp, Artificial Sequence
  Description of Artificial Sequence: Synthetic oligonucleotide
  Target: LAMA2; (+) strand; PAM type: YTN; PAM sequence: CTG
ctctccactgggctatattc

SEQ ID NO: 373058 - DNA, 20 bp, Artificial Sequence
  Description of Artificial Sequence: Synthetic oligonucleotide
  Target: LAMA2; (+) strand; PAM type: YTN; PAM sequence: CTC
tccactgggctatattcacg

SEQ ID NO: 373059 - DNA, 20 bp, Artificial Sequence
  Description of Artificial Sequence: Synthetic oligonucleotide
  Target: LAMA2; (+) strand; PAM type: YTN; PAM sequence: CTC
cactgggctatattcacgtc

SEQ ID NO: 373060 - DNA, 20 bp, Artificial Sequence
  Description of Artificial Sequence: Synthetic oligonucleotide
  Target: LAMA2; (+) strand; PAM type: YTN; PAM sequence: CTG
ggctatattcacgtctgcag

SEQ ID NO: 373061 - DNA, 20 bp, Artificial Sequence
  Description of Artificial Sequence: Synthetic oligonucleotide
  Target: LAMA2; (+) strand; PAM type: YTN; PAM sequence: CTA
tattcacgtctgcagaaata

SEQ ID NO: 373062 - DNA, 20 bp, Artificial Sequence
  Description of Artificial Sequence: Synthetic oligonucleotide
  Target: LAMA2; (+) strand; PAM type: YTN; PAM sequence: TTC
acgtctgcagaaatagcaat

SEQ ID NO: 373063 - DNA, 20 bp, Artificial Sequence
  Description of Artificial Sequence: Synthetic oligonucleotide
  Target: LAMA2; (+) strand; PAM type: YTN; PAM sequence: CTG
cagaaatagcaatgtcattt

SEQ ID NO: 373064 - DNA, 20 bp, Artificial Sequence
  Description of Artificial Sequence: Synthetic oligonucleotide
  Target: LAMA2; (+) strand; PAM type: YTN; PAM sequence: TTT
catcctccattggccagacc

SEQ ID NO: 373065 - DNA, 20 bp, Artificial Sequence
  Description of Artificial Sequence: Synthetic oligonucleotide
  Target: LAMA2; (+) strand; PAM type: YTN; PAM sequence: TTC
atcctccattggccagaccc

SEQ ID NO: 373066 - DNA, 20 bp, Artificial Sequence
  Description of Artificial Sequence: Synthetic oligonucleotide
  Target: LAMA2; (+) strand; PAM type: YTN; PAM sequence: CTC
cattggccagaccctaatct

SEQ ID NO: 373067 - DNA, 20 bp, Artificial Sequence
  Description of Artificial Sequence: Synthetic oligonucleotide
  Target: LAMA2; (+) strand; PAM type: YTN; PAM sequence: TTG
gccagaccctaatctctgtc

SEQ ID NO: 373068 - DNA, 20 bp, Artificial Sequence
  Description of Artificial Sequence: Synthetic oligonucleotide
  Target: LAMA2; (+) strand; PAM type: YTN; PAM sequence: CTA
atctctgtctctggggtgag

SEQ ID NO: 373069 - DNA, 20 bp, Artificial Sequence
  Description of Artificial Sequence: Synthetic oligonucleotide
  Target: LAMA2; (+) strand; PAM type: YTN; PAM sequence: CTC
tgtctctggggtgagaatga

SEQ ID NO: 373070 - DNA, 20 bp, Artificial Sequence
  Description of Artificial Sequence: Synthetic oligonucleotide
  Target: LAMA2; (+) strand; PAM type: YTN; PAM sequence: CTG
tctctggggtgagaatgacc

SEQ ID NO: 373071 - DNA, 20 bp, Artificial Sequence
  Description of Artificial Sequence: Synthetic oligonucleotide
  Target: LAMA2; (+) strand; PAM type: YTN; PAM sequence: CTC
tggggtgagaatgaccagcc

SEQ ID NO: 373072 - DNA, 20 bp, Artificial Sequence
  Description of Artificial Sequence: Synthetic oligonucleotide
  Target: LAMA2; (+) strand; PAM type: YTN; PAM sequence: CTG
gggtgagaatgaccagcctg

SEQ ID NO: 373073 - DNA, 20 bp, Artificial Sequence
  Description of Artificial Sequence: Synthetic oligonucleotide
  Target: LAMA2; (+) strand; PAM type: YTN; PAM sequence: CTG
tactcttttgtcagagcagt

SEQ ID NO: 373074 - DNA, 20 bp, Artificial Sequence
  Description of Artificial Sequence: Synthetic oligonucleotide
  Target: LAMA2; (+) strand; PAM type: YTN; PAM sequence: CTC
ttttgtcagagcagtagtgg

SEQ ID NO: 373075 - DNA, 20 bp, Artificial Sequence
  Description of Artificial Sequence: Synthetic oligonucleotide
  Target: LAMA2; (+) strand; PAM type: YTN; PAM sequence: CTT
ttgtcagagcagtagtggag

SEQ ID NO: 373076 - DNA, 20 bp, Artificial Sequence
  Description of Artificial Sequence: Synthetic oligonucleotide
  Target: LAMA2; (+) strand; PAM type: YTN; PAM sequence: TTT
tgtcagagcagtagtggaga

SEQ ID NO: 373077 - DNA, 20 bp, Artificial Sequence
  Description of Artificial Sequence: Synthetic oligonucleotide
  Target: LAMA2; (+) strand; PAM type: YTN; PAM sequence: TTT
gtcagagcagtagtggagag

SEQ ID NO: 373078 - DNA, 20 bp, Artificial Sequence
  Description of Artificial Sequence: Synthetic oligonucleotide
  Target: LAMA2; (+) strand; PAM type: YTN; PAM sequence: TTG
tcagagcagtagtggagaga

SEQ ID NO: 373079 - DNA, 20 bp, Artificial Sequence
  Description of Artificial Sequence: Synthetic oligonucleotide
  Target: LAMA2; (+) strand; PAM type: YTN; PAM sequence: CTA
atgactttgtgtatgtcctt

SEQ ID NO: 373080 - DNA, 20 bp, Artificial Sequence
  Description of Artificial Sequence: Synthetic oligonucleotide
  Target: LAMA2; (+) strand; PAM type: YTN; PAM sequence: CTT
tgtgtatgtccttcttcctt

SEQ ID NO: 373081 - DNA, 20 bp, Artificial Sequence
  Description of Artificial Sequence: Synthetic oligonucleotide
  Target: LAMA2; (+) strand; PAM type: YTN; PAM sequence: TTT
gtgtatgtccttcttccttg

SEQ ID NO: 373082 - DNA, 20 bp, Artificial Sequence
  Description of Artificial Sequence: Synthetic oligonucleotide
  Target: LAMA2; (+) strand; PAM type: YTN; PAM sequence: TTG
tgtatgtccttcttccttgt

SEQ ID NO: 373083 - DNA, 20 bp, Artificial Sequence
  Description of Artificial Sequence: Synthetic oligonucleotide
  Target: LAMA2; (+) strand; PAM type: YTN; PAM sequence: CTT
cttccttgtccctgttttcc

SEQ ID NO: 373084 - DNA, 20 bp, Artificial Sequence
  Description of Artificial Sequence: Synthetic oligonucleotide
  Target: LAMA2; (+) strand; PAM type: YTN; PAM sequence: TTC
ttccttgtccctgttttccg

SEQ ID NO: 373085 - DNA, 20 bp, Artificial Sequence
  Description of Artificial Sequence: Synthetic oligonucleotide
  Target: LAMA2; (+) strand; PAM type: YTN; PAM sequence: CTT
ccttgtccctgttttccgca

SEQ ID NO: 373086 - DNA, 20 bp, Artificial Sequence
  Description of Artificial Sequence: Synthetic oligonucleotide
  Target: LAMA2; (+) strand; PAM type: YTN; PAM sequence: TTC
cttgtccctgttttccgcaa

SEQ ID NO: 373087 - DNA, 20 bp, Artificial Sequence
  Description of Artificial Sequence: Synthetic oligonucleotide
  Target: LAMA2; (+) strand; PAM type: YTN; PAM sequence: CTT
gtccctgttttccgcaacaa

SEQ ID NO: 373088 - DNA, 20 bp, Artificial Sequence
  Description of Artificial Sequence: Synthetic oligonucleotide
  Target: LAMA2; (+) strand; PAM type: YTN; PAM sequence: TTG
tccctgttttccgcaacaac

SEQ ID NO: 373089 - DNA, 20 bp, Artificial Sequence
  Description of Artificial Sequence: Synthetic oligonucleotide
  Target: LAMA2; (+) strand; PAM type: YTN; PAM sequence: CTG
ttttccgcaacaacatcaac

SEQ ID NO: 373090 - DNA, 20 bp, Artificial Sequence
  Description of Artificial Sequence: Synthetic oligonucleotide
  Target: LAMA2; (+) strand; PAM type: YTN; PAM sequence: TTT
tccgcaacaacatcaacata

SEQ ID NO: 373091 - DNA, 20 bp, Artificial Sequence
  Description of Artificial Sequence: Synthetic oligonucleotide
  Target: LAMA2; (+) strand; PAM type: YTN; PAM sequence: TTT
ccgcaacaacatcaacatag

SEQ ID NO: 373092 - DNA, 20 bp, Artificial Sequence
  Description of Artificial Sequence: Synthetic oligonucleotide
  Target: LAMA2; (+) strand; PAM type: YTN; PAM sequence: TTC
cgcaacaacatcaacatagc

SEQ ID NO: 373093 - DNA, 20 bp, Artificial Sequence
  Description of Artificial Sequence: Synthetic oligonucleotide
  Target: LAMA2; (+) strand; PAM type: YTN; PAM sequence: CTT
tagcccaacgtgccatttag

SEQ ID NO: 373094 - DNA, 20 bp, Artificial Sequence
  Description of Artificial Sequence: Synthetic oligonucleotide
  Target: LAMA2; (+) strand; PAM type: YTN; PAM sequence: TTT
agcccaacgtgccatttaga

SEQ ID NO: 373095 - DNA, 20 bp, Artificial Sequence
  Description of Artificial Sequence: Synthetic oligonucleotide
  Target: LAMA2; (+) strand; PAM type: YTN; PAM sequence: TTA
gcccaacgtgccatttagac

SEQ ID NO: 373096 - DNA, 20 bp, Artificial Sequence
  Description of Artificial Sequence: Synthetic oligonucleotide
  Target: LAMA2; (+) strand; PAM type: YTN; PAM sequence: TTT
agaccggagtcttggattga

SEQ ID NO: 373097 - DNA, 20 bp, Artificial Sequence
  Description of Artificial Sequence: Synthetic oligonucleotide
  Target: LAMA2; (+) strand; PAM type: YTN; PAM sequence: TTA
gaccggagtcttggattgat

SEQ ID NO: 373098 - DNA, 20 bp, Artificial Sequence
  Description of Artificial Sequence: Synthetic oligonucleotide
  Target: LAMA2; (+) strand; PAM type: YTN; PAM sequence: CTT
ggattgatctgtgatggatg

SEQ ID NO: 373099 - DNA, 20 bp, Artificial Sequence
  Description of Artificial Sequence: Synthetic oligonucleotide
  Target: LAMA2; (+) strand; PAM type: YTN; PAM sequence: TTG
gattgatctgtgatggatgc

SEQ ID NO: 373100 - DNA, 20 bp, Artificial Sequence
  Description of Artificial Sequence: Synthetic oligonucleotide
  Target: LAMA2; (+) strand; PAM type: YTN; PAM sequence: TTG
atctgtgatggatgccctgt

SEQ ID NO: 373101 - DNA, 20 bp, Artificial Sequence
  Description of Artificial Sequence: Synthetic oligonucleotide
  Target: LAMA2; (+) strand; PAM type: YTN; PAM sequence: CTG
tgatggatgccctgtcgggt

SEQ ID NO: 373102 - DNA, 20 bp, Artificial Sequence
  Description of Artificial Sequence: Synthetic oligonucleotide
  Target: LAMA2; (+) strand; PAM type: YTN; PAM sequence: CTG
tcgggtacacaggaccacgc

SEQ ID NO: 373103 - DNA, 20 bp, Artificial Sequence
  Description of Artificial Sequence: Synthetic oligonucleotide
  Target: LAMA2; (+) strand; PAM type: YTN; PAM sequence: CTG
tgagaggtaagagtatacta

SEQ ID NO: 373104 - DNA, 20 bp, Artificial Sequence
  Description of Artificial Sequence: Synthetic oligonucleotide
  Target: LAMA2; (+) strand; PAM type: YTN; PAM sequence: CTA
cactgtcttgcaaaatgatt

SEQ ID NO: 373105 - DNA, 20 bp, Artificial Sequence
  Description of Artificial Sequence: Synthetic oligonucleotide
  Target: LAMA2; (+) strand; PAM type: YTN; PAM sequence: CTG
tcttgcaaaatgatttctac

SEQ ID NO: 373106 - DNA, 20 bp, Artificial Sequence
  Description of Artificial Sequence: Synthetic oligonucleotide
  Target: LAMA2; (+) strand; PAM type: YTN; PAM sequence: CTT
gcaaaatgatttctaccttg

SEQ ID NO: 373107 - DNA, 20 bp, Artificial Sequence
  Description of Artificial Sequence: Synthetic oligonucleotide
  Target: LAMA2; (+) strand; PAM type: YTN; PAM sequence: TTG
caaaatgatttctaccttgg

SEQ ID NO: 373108 - DNA, 20 bp, Artificial Sequence
  Description of Artificial Sequence: Synthetic oligonucleotide
  Target: LAMA2; (+) strand; PAM type: YTN; PAM sequence: TTT
ctaccttgggagttataaaa

SEQ ID NO: 373109 - DNA, 20 bp, Artificial Sequence
  Description of Artificial Sequence: Synthetic oligonucleotide
  Target: LAMA2; (+) strand; PAM type: YTN; PAM sequence: TTC
taccttgggagttataaaac

SEQ ID NO: 373110 - DNA, 20 bp, Artificial Sequence
  Description of Artificial Sequence: Synthetic oligonucleotide
  Target: LAMA2; (+) strand; PAM type: YTN; PAM sequence: CTA
ccttgggagttataaaaccg

SEQ ID NO: 373111 - DNA, 20 bp, Artificial Sequence
  Description of Artificial Sequence: Synthetic oligonucleotide
  Target: LAMA2; (+) strand; PAM type: YTN; PAM sequence: CTT
gggagttataaaaccgcaga

SEQ ID NO: 373112 - DNA, 20 bp, Artificial Sequence
  Description of Artificial Sequence: Synthetic oligonucleotide
  Target: LAMA2; (+) strand; PAM type: YTN; PAM sequence: TTG
ggagttataaaaccgcagat

SEQ ID NO: 373113 - DNA, 20 bp, Artificial Sequence
  Description of Artificial Sequence: Synthetic oligonucleotide
  Target: LAMA2; (+) strand; PAM type: YTN; PAM sequence: TTA
taaaaccgcagatacaatca

SEQ ID NO: 373114 - DNA, 20 bp, Artificial Sequence
  Description of Artificial Sequence: Synthetic oligonucleotide
  Target: LAMA2; (+) strand; PAM type: YTN; PAM sequence: CTT
tgcatcatcctttggagaaa

SEQ ID NO: 373115 - DNA, 20 bp, Artificial Sequence
  Description of Artificial Sequence: Synthetic oligonucleotide
  Target: LAMA2; (+) strand; PAM type: YTN; PAM sequence: TTT
gcatcatcctttggagaaaa

SEQ ID NO: 373116 - DNA, 20 bp, Artificial Sequence
  Description of Artificial Sequence: Synthetic oligonucleotide
  Target: LAMA2; (+) strand; PAM type: YTN; PAM sequence: TTG
catcatcctttggagaaaaa

SEQ ID NO: 373117 - DNA, 20 bp, Artificial Sequence
  Description of Artificial Sequence: Synthetic oligonucleotide
  Target: LAMA2; (+) strand; PAM type: YTN; PAM sequence: CTT
tggagaaaaaaggccacact

SEQ ID NO: 373118 - DNA, 20 bp, Artificial Sequence
  Description of Artificial Sequence: Synthetic oligonucleotide
  Target: LAMA2; (+) strand; PAM type: YTN; PAM sequence: TTT
ggagaaaaaaggccacactc

SEQ ID NO: 373119 - DNA, 20 bp, Artificial Sequence
  Description of Artificial Sequence: Synthetic oligonucleotide
  Target: LAMA2; (+) strand; PAM type: YTN; PAM sequence: TTG
gagaaaaaaggccacactca

SEQ ID NO: 373120 - DNA, 20 bp, Artificial Sequence
  Description of Artificial Sequence: Synthetic oligonucleotide
  Target: LAMA2; (+) strand; PAM type: YTN; PAM sequence: CTC
aatgaggtgaaataaagttt

SEQ ID NO: 373121 - DNA, 20 bp, Artificial Sequence
  Description of Artificial Sequence: Synthetic oligonucleotide
  Target: LAMA2; (+) strand; PAM type: YTN; PAM sequence: TTT
ctcaacgcacttgtcaaaca

SEQ ID NO: 373122 - DNA, 20 bp, Artificial Sequence
  Description of Artificial Sequence: Synthetic oligonucleotide
  Target: LAMA2; (+) strand; PAM type: YTN; PAM sequence: TTC
tcaacgcacttgtcaaacaa

SEQ ID NO: 373123 - DNA, 20 bp, Artificial Sequence
  Description of Artificial Sequence: Synthetic oligonucleotide
  Target: LAMA2; (+) strand; PAM type: YTN; PAM sequence: CTC
aacgcacttgtcaaacaaat

SEQ ID NO: 373124 - DNA, 20 bp, Artificial Sequence
  Description of Artificial Sequence: Synthetic oligonucleotide
  Target: LAMA2; (+) strand; PAM type: YTN; PAM sequence: CTT
gtcaaacaaatgcattatat

SEQ ID NO: 373125 - DNA, 20 bp, Artificial Sequence
  Description of Artificial Sequence: Synthetic oligonucleotide
  Target: LAMA2; (+) strand; PAM type: YTN; PAM sequence: TTG
tcaaacaaatgcattatatt

SEQ ID NO: 373126 - DNA, 20 bp, Artificial Sequence
  Description of Artificial Sequence: Synthetic oligonucleotide
  Target: LAMA2; (+) strand; PAM type: YTN; PAM sequence: TTA
tatttttgtaatttatttat

SEQ ID NO: 373127 - DNA, 20 bp, Artificial Sequence
  Description of Artificial Sequence: Synthetic oligonucleotide
  Target: LAMA2; (+) strand; PAM type: YTN; PAM sequence: TTT
ttgtaatttatttatttttc

SEQ ID NO: 373128 - DNA, 20 bp, Artificial Sequence
  Description of Artificial Sequence: Synthetic oligonucleotide
  Target: LAMA2; (+) strand; PAM type: YTN; PAM sequence: TTT
tgtaatttatttatttttca

SEQ ID NO: 373129 - DNA, 20 bp, Artificial Sequence
  Description of Artificial Sequence: Synthetic oligonucleotide
  Target: LAMA2; (+) strand; PAM type: YTN; PAM sequence: TTT
gtaatttatttatttttcag

SEQ ID NO: 373130 - DNA, 20 bp, Artificial Sequence
  Description of Artificial Sequence: Synthetic oligonucleotide
  Target: LAMA2; (+) strand; PAM type: YTN; PAM sequence: TTG
taatttatttatttttcaga

SEQ ID NO: 373131 - DNA, 20 bp, Artificial Sequence
  Description of Artificial Sequence: Synthetic oligonucleotide
  Target: LAMA2; (+) strand; PAM type: YTN; PAM sequence: TTT
atttatttttcagaaattgc

SEQ ID NO: 373132 - DNA, 20 bp, Artificial Sequence
  Description of Artificial Sequence: Synthetic oligonucleotide
  Target: LAMA2; (+) strand; PAM type: YTN; PAM sequence: TTA
tttatttttcagaaattgct

SEQ ID NO: 373133 - DNA, 20 bp, Artificial Sequence
  Description of Artificial Sequence: Synthetic oligonucleotide
  Target: LAMA2; (+) strand; PAM type: YTN; PAM sequence: TTT
atttttcagaaattgcttca

SEQ ID NO: 373134 - DNA, 20 bp, Artificial Sequence
  Description of Artificial Sequence: Synthetic oligonucleotide
  Target: LAMA2; (+) strand; PAM type: YTN; PAM sequence: TTA
tttttcagaaattgcttcat

SEQ ID NO: 373135 - DNA, 20 bp, Artificial Sequence
  Description of Artificial Sequence: Synthetic oligonucleotide
  Target: LAMA2; (+) strand; PAM type: YTN; PAM sequence: TTT
ttcagaaattgcttcataaa

SEQ ID NO: 373136 - DNA, 20 bp, Artificial Sequence
  Description of Artificial Sequence: Synthetic oligonucleotide
  Target: LAMA2; (+) strand; PAM type: YTN; PAM sequence: TTT
tcagaaattgcttcataaat

SEQ ID NO: 373137 - DNA, 20 bp, Artificial Sequence
  Description of Artificial Sequence: Synthetic oligonucleotide
  Target: LAMA2; (+) strand; PAM type: YTN; PAM sequence: TTT
cagaaattgcttcataaatc

SEQ ID NO: 373138 - DNA, 20 bp, Artificial Sequence
  Description of Artificial Sequence: Synthetic oligonucleotide
  Target: LAMA2; (+) strand; PAM type: YTN; PAM sequence: TTC
agaaattgcttcataaatct

SEQ ID NO: 373139 - DNA, 20 bp, Artificial Sequence
  Description of Artificial Sequence: Synthetic oligonucleotide
  Target: LAMA2; (+) strand; PAM type: YTN; PAM sequence: TTG
cttcataaatcttcattcac

SEQ ID NO: 373140 - DNA, 20 bp, Artificial Sequence
  Description of Artificial Sequence: Synthetic oligonucleotide
  Target: LAMA2; (+) strand; PAM type: YTN; PAM sequence: CTT
cataaatcttcattcactca

SEQ ID NO: 373141 - DNA, 20 bp, Artificial Sequence
  Description of Artificial Sequence: Synthetic oligonucleotide
  Target: LAMA2; (+) strand; PAM type: YTN; PAM sequence: TTC
ataaatcttcattcactcag

SEQ ID NO: 373142 - DNA, 20 bp, Artificial Sequence
  Description of Artificial Sequence: Synthetic oligonucleotide
  Target: LAMA2; (+) strand; PAM type: YTN; PAM sequence: CTT
cattcactcagagaatatct

SEQ ID NO: 373143 - DNA, 20 bp, Artificial Sequence
  Description of Artificial Sequence: Synthetic oligonucleotide
  Target: LAMA2; (+) strand; PAM type: YTN; PAM sequence: TTC
attcactcagagaatatctg

SEQ ID NO: 373144 - DNA, 20 bp, Artificial Sequence
  Description of Artificial Sequence: Synthetic oligonucleotide
  Target: LAMA2; (+) strand; PAM type: YTN; PAM sequence: TTC
actcagagaatatctgatta

SEQ ID NO: 373145 - DNA, 20 bp, Artificial Sequence
  Description of Artificial Sequence: Synthetic oligonucleotide
  Target: LAMA2; (+) strand; PAM type: YTN; PAM sequence: CTC
agagaatatctgattaatgt

SEQ ID NO: 373146 - DNA, 20 bp, Artificial Sequence
  Description of Artificial Sequence: Synthetic oligonucleotide
  Target: LAMA2; (+) strand; PAM type: YTN; PAM sequence: CTG
attaatgttttaatcttaaa

SEQ ID NO: 373147 - DNA, 20 bp, Artificial Sequence
  Description of Artificial Sequence: Synthetic oligonucleotide
  Target: LAMA2; (+) strand; PAM type: YTN; PAM sequence: TTA
atgttttaatcttaaaggtt

SEQ ID NO: 373148 - DNA, 20 bp, Artificial Sequence
  Description of Artificial Sequence: Synthetic oligonucleotide
  Target: LAMA2; (+) strand; PAM type: YTN; PAM sequence: TTT
taatcttaaaggttaagtat

SEQ ID NO: 373149 - DNA, 20 bp, Artificial Sequence
  Description of Artificial Sequence: Synthetic oligonucleotide
  Target: LAMA2; (+) strand; PAM type: YTN; PAM sequence: TTT
aatcttaaaggttaagtatt

SEQ ID NO: 373150 - DNA, 20 bp, Artificial Sequence
  Description of Artificial Sequence: Synthetic oligonucleotide
  Target: LAMA2; (+) strand; PAM type: YTN; PAM sequence: TTA
atcttaaaggttaagtatta

SEQ ID NO: 373151 - DNA, 20 bp, Artificial Sequence
  Description of Artificial Sequence: Synthetic oligonucleotide
  Target: LAMA2; (+) strand; PAM type: YTN; PAM sequence: CTT
aaaggttaagtattaaccta

SEQ ID NO: 373152 - DNA, 20 bp, Artificial Sequence
  Description of Artificial Sequence: Synthetic oligonucleotide
  Target: LAMA2; (+) strand; PAM type: YTN; PAM sequence: TTA
aaggttaagtattaacctac

SEQ ID NO: 373153 - DNA, 20 bp, Artificial Sequence
  Description of Artificial Sequence: Synthetic oligonucleotide
  Target: LAMA2; (+) strand; PAM type: YTN; PAM sequence: TTA
agtattaacctacaatcttt

SEQ ID NO: 373154 - DNA, 20 bp, Artificial Sequence
  Description of Artificial Sequence: Synthetic oligonucleotide
  Target: LAMA2; (+) strand; PAM type: YTN; PAM sequence: TTA
acctacaatctttgtagaaa

SEQ ID NO: 373155 - DNA, 20 bp, Artificial Sequence
  Description of Artificial Sequence: Synthetic oligonucleotide
  Target: LAMA2; (+) strand; PAM type: YTN; PAM sequence: CTA
caatctttgtagaaagcatt

SEQ ID NO: 373156 - DNA, 20 bp, Artificial Sequence
  Description of Artificial Sequence: Synthetic oligonucleotide
  Target: LAMA2; (+) strand; PAM type: YTN; PAM sequence: CTT
tgtagaaagcattgctcaag

SEQ ID NO: 373157 - DNA, 20 bp, Artificial Sequence
  Description of Artificial Sequence: Synthetic oligonucleotide
  Target: LAMA2; (+) strand; PAM type: YTN; PAM sequence: TTT
gtagaaagcattgctcaagt

SEQ ID NO: 373158 - DNA, 20 bp, Artificial Sequence
  Description of Artificial Sequence: Synthetic oligonucleotide
  Target: LAMA2; (+) strand; PAM type: YTN; PAM sequence: TTG
tagaaagcattgctcaagtg

SEQ ID NO: 373159 - DNA, 20 bp, Artificial Sequence
  Description of Artificial Sequence: Synthetic oligonucleotide
  Target: LAMA2; (+) strand; PAM type: YTN; PAM sequence: TTG
ctcaagtggaaagtcatgca

SEQ ID NO: 373160 - DNA, 20 bp, Artificial Sequence
  Description of Artificial Sequence: Synthetic oligonucleotide
  Target: LAMA2; (+) strand; PAM type: YTN; PAM sequence: CTC
aagtggaaagtcatgcactt

SEQ ID NO: 373161 - DNA, 20 bp, Artificial Sequence
  Description of Artificial Sequence: Synthetic oligonucleotide
  Target: LAMA2; (+) strand; PAM type: YTN; PAM sequence: CTT
taagatttatcttactgtct

SEQ ID NO: 373162 - DNA, 20 bp, Artificial Sequence
  Description of Artificial Sequence: Synthetic oligonucleotide
  Target: LAMA2; (+) strand; PAM type: YTN; PAM sequence: TTT
aagatttatcttactgtctg

SEQ ID NO: 373163 - DNA, 20 bp, Artificial Sequence
  Description of Artificial Sequence: Synthetic oligonucleotide
  Target: LAMA2; (+) strand; PAM type: YTN; PAM sequence: TTA
agatttatcttactgtctgt

SEQ ID NO: 373164 - DNA, 20 bp, Artificial Sequence
  Description of Artificial Sequence: Synthetic oligonucleotide
  Target: LAMA2; (+) strand; PAM type: YTN; PAM sequence: TTT
atcttactgtctgtgtaggc

SEQ ID NO: 373165 - DNA, 20 bp, Artificial Sequence
  Description of Artificial Sequence: Synthetic oligonucleotide
  Target: LAMA2; (+) strand; PAM type: YTN; PAM sequence: TTA
tcttactgtctgtgtaggca

SEQ ID NO: 373166 - DNA, 20 bp, Artificial Sequence
  Description of Artificial Sequence: Synthetic oligonucleotide
  Target: LAMA2; (+) strand; PAM type: YTN; PAM sequence: CTT
actgtctgtgtaggcaccat

SEQ ID NO: 373167 - DNA, 20 bp, Artificial Sequence
  Description of Artificial Sequence: Synthetic oligonucleotide
  Target: LAMA2; (+) strand; PAM type: YTN; PAM sequence: TTA
ctgtctgtgtaggcaccatt

SEQ ID NO: 373168 - DNA, 20 bp, Artificial Sequence
  Description of Artificial Sequence: Synthetic oligonucleotide
  Target: LAMA2; (+) strand; PAM type: YTN; PAM sequence: CTG
tctgtgtaggcaccatttat

SEQ ID NO: 373169 - DNA, 20 bp, Artificial Sequence
  Description of Artificial Sequence: Synthetic oligonucleotide
  Target: LAMA2; (+) strand; PAM type: YTN; PAM sequence: CTG
tgtaggcaccatttattttt

SEQ ID NO: 373170 - DNA, 20 bp, Artificial Sequence
  Description of Artificial Sequence: Synthetic oligonucleotide
  Target: LAMA2; (+) strand; PAM type: YTN; PAM sequence: TTT
atttttcataattagctttt

SEQ ID NO: 373171 - DNA, 20 bp, Artificial Sequence
  Description of Artificial Sequence: Synthetic oligonucleotide
  Target: LAMA2; (+) strand; PAM type: YTN; PAM sequence: TTA
tttttcataattagcttttt

SEQ ID NO: 373172 - DNA, 20 bp, Artificial Sequence
  Description of Artificial Sequence: Synthetic oligonucleotide
  Target: LAMA2; (+) strand; PAM type: YTN; PAM sequence: TTT
ttcataattagctttttgtc

SEQ ID NO: 373173 - DNA, 20 bp, Artificial Sequence
  Description of Artificial Sequence: Synthetic oligonucleotide
  Target: LAMA2; (+) strand; PAM type: YTN; PAM sequence: TTT
tcataattagctttttgtcc

SEQ ID NO: 373174 - DNA, 20 bp, Artificial Sequence
  Description of Artificial Sequence: Synthetic oligonucleotide
  Target: LAMA2; (+) strand; PAM type: YTN; PAM sequence: TTT
cataattagctttttgtcct

SEQ ID NO: 373175 - DNA, 20 bp, Artificial Sequence
  Description of Artificial Sequence: Synthetic oligonucleotide
  Target: LAMA2; (+) strand; PAM type: YTN; PAM sequence: TTC
ataattagctttttgtcctt

SEQ ID NO: 373176 - DNA, 20 bp, Artificial Sequence
  Description of Artificial Sequence: Synthetic oligonucleotide
  Target: LAMA2; (+) strand; PAM type: YTN; PAM sequence: TTA
gctttttgtccttaaaatgt

SEQ ID NO: 373177 - DNA, 20 bp, Artificial Sequence
  Description of Artificial Sequence: Synthetic oligonucleotide
  Target: LAMA2; (+) strand; PAM type: YTN; PAM sequence: CTT
tttgtccttaaaatgtagct

SEQ ID NO: 373178 - DNA, 20 bp, Artificial Sequence
  Description of Artificial Sequence: Synthetic oligonucleotide
  Target: LAMA2; (+) strand; PAM type: YTN; PAM sequence: TTT
ttgtccttaaaatgtagctt

SEQ ID NO: 373179 - DNA, 20 bp, Artificial Sequence
  Description of Artificial Sequence: Synthetic oligonucleotide
  Target: LAMA2; (+) strand; PAM type: YTN; PAM sequence: TTT
tgtccttaaaatgtagctta

SEQ ID NO: 373180 - DNA, 20 bp, Artificial Sequence
  Description of Artificial Sequence: Synthetic oligonucleotide
  Target: LAMA2; (+) strand; PAM type: YTN; PAM sequence: TTT
gtccttaaaatgtagcttaa

SEQ ID NO: 373181 - DNA, 20 bp, Artificial Sequence
  Description of Artificial Sequence: Synthetic oligonucleotide
  Target: LAMA2; (+) strand; PAM type: YTN; PAM sequence: TTG
tccttaaaatgtagcttaaa

SEQ ID NO: 373182 - DNA, 20 bp, Artificial Sequence
  Description of Artificial Sequence: Synthetic oligonucleotide
  Target: LAMA2; (+) strand; PAM type: YTN; PAM sequence: CTT
aaaatgtagcttaaatgcat

SEQ ID NO: 373183 - DNA, 20 bp, Artificial Sequence
  Description of Artificial Sequence: Synthetic oligonucleotide
  Target: LAMA2; (+) strand; PAM type: YTN; PAM sequence: TTA
aaatgtagcttaaatgcata

SEQ ID NO: 373184 - DNA, 20 bp, Artificial Sequence
  Description of Artificial Sequence: Synthetic oligonucleotide
  Target: LAMA2; (+) strand; PAM type: YTN; PAM sequence: CTT
aaatgcatagttcatagttc

SEQ ID NO: 373185 - DNA, 20 bp, Artificial Sequence
  Description of Artificial Sequence: Synthetic oligonucleotide
  Target: LAMA2; (+) strand; PAM type: YTN; PAM sequence: TTA
aatgcatagttcatagttca

SEQ ID NO: 373186 - DNA, 20 bp, Artificial Sequence
  Description of Artificial Sequence: Synthetic oligonucleotide
  Target: LAMA2; (+) strand; PAM type: YTN; PAM sequence: TTC
atagttcagcaagtggttca

SEQ ID NO: 373187 - DNA, 20 bp, Artificial Sequence
  Description of Artificial Sequence: Synthetic oligonucleotide
  Target: LAMA2; (+) strand; PAM type: YTN; PAM sequence: TTC
agcaagtggttcataattta

SEQ ID NO: 373188 - DNA, 20 bp, Artificial Sequence
  Description of Artificial Sequence: Synthetic oligonucleotide
  Target: LAMA2; (+) strand; PAM type: YTN; PAM sequence: TTC
ataatttactttaaatatac

SEQ ID NO: 373189 - DNA, 20 bp, Artificial Sequence
  Description of Artificial Sequence: Synthetic oligonucleotide
  Target: LAMA2; (+) strand; PAM type: YTN; PAM sequence: TTT
actttaaatatacttgaaaa

SEQ ID NO: 373190 - DNA, 20 bp, Artificial Sequence
  Description of Artificial Sequence: Synthetic oligonucleotide
  Target: LAMA2; (+) strand; PAM type: YTN; PAM sequence: TTA
ctttaaatatacttgaaaat

SEQ ID NO: 373191 - DNA, 20 bp, Artificial Sequence
  Description of Artificial Sequence: Synthetic oligonucleotide
  Target: LAMA2; (+) strand; PAM type: YTN; PAM sequence: CTT
taaatatacttgaaaataga

SEQ ID NO: 373192 - DNA, 20 bp, Artificial Sequence
  Description of Artificial Sequence: Synthetic oligonucleotide
  Target: LAMA2; (+) strand; PAM type: YTN; PAM sequence: TTT
aaatatacttgaaaatagaa

SEQ ID NO: 373193 - DNA, 20 bp, Artificial Sequence
  Description of Artificial Sequence: Synthetic oligonucleotide
  Target: LAMA2; (+) strand; PAM type: YTN; PAM sequence: TTA
aatatacttgaaaatagaaa

SEQ ID NO: 373194 - DNA, 20 bp, Artificial Sequence
  Description of Artificial Sequence: Synthetic oligonucleotide
  Target: LAMA2; (+) strand; PAM type: YTN; PAM sequence: CTT
gaaaatagaaacaaaatgta

SEQ ID NO: 373195 - DNA, 20 bp, Artificial Sequence
  Description of Artificial Sequence: Synthetic oligonucleotide
  Target: LAMA2; (+) strand; PAM type: YTN; PAM sequence: TTG
aaaatagaaacaaaatgtaa

SEQ ID NO: 373196 - DNA, 20 bp, Artificial Sequence
  Description of Artificial Sequence: Synthetic oligonucleotide
  Target: LAMA2; (+) strand; PAM type: YTN; PAM sequence: TTT
attatcatgatttatatcct

SEQ ID NO: 373197 - DNA, 20 bp, Artificial Sequence
  Description of Artificial Sequence: Synthetic oligonucleotide
  Target: LAMA2; (+) strand; PAM type: YTN; PAM sequence: TTA
ttatcatgatttatatcctc

SEQ ID NO: 373198 - DNA, 20 bp, Artificial Sequence
  Description of Artificial Sequence: Synthetic oligonucleotide
  Target: LAMA2; (+) strand; PAM type: YTN; PAM sequence: TTA
tcatgatttatatcctcttc

SEQ ID NO: 373199 - DNA, 20 bp, Artificial Sequence
  Description of Artificial Sequence: Synthetic oligonucleotide
  Target: LAMA2; (+) strand; PAM type: YTN; PAM sequence: TTT
atatcctcttctaattgctc

SEQ ID NO: 373200 - DNA, 20 bp, Artificial Sequence
  Description of Artificial Sequence: Synthetic oligonucleotide
  Target: LAMA2; (+) strand; PAM type: YTN; PAM sequence: TTA
tatcctcttctaattgctcc

SEQ ID NO: 373201 - DNA, 20 bp, Artificial Sequence
  Description of Artificial Sequence: Synthetic oligonucleotide
  Target: LAMA2; (+) strand; PAM type: YTN; PAM sequence: CTC
ttctaattgctcctaaacca

SEQ ID NO: 373202 - DNA, 20 bp, Artificial Sequence
  Description of Artificial Sequence: Synthetic oligonucleotide
  Target: LAMA2; (+) strand; PAM type: YTN; PAM sequence: CTT
ctaattgctcctaaaccagt

SEQ ID NO: 373203 - DNA, 20 bp, Artificial Sequence
  Description of Artificial Sequence: Synthetic oligonucleotide
  Target: LAMA2; (+) strand; PAM type: YTN; PAM sequence: TTC
taattgctcctaaaccagta

SEQ ID NO: 373204 - DNA, 20 bp, Artificial Sequence
  Description of Artificial Sequence: Synthetic oligonucleotide
  Target: LAMA2; (+) strand; PAM type: YTN; PAM sequence: CTA
attgctcctaaaccagtatt

SEQ ID NO: 373205 - DNA, 20 bp, Artificial Sequence
  Description of Artificial Sequence: Synthetic oligonucleotide
  Target: LAMA2; (+) strand; PAM type: YTN; PAM sequence: TTG
ctcctaaaccagtattttaa

SEQ ID NO: 373206 - DNA, 20 bp, Artificial Sequence
  Description of Artificial Sequence: Synthetic oligonucleotide
  Target: LAMA2; (+) strand; PAM type: YTN; PAM sequence: CTC
ctaaaccagtattttaattc

SEQ ID NO: 373207 - DNA, 20 bp, Artificial Sequence
  Description of Artificial Sequence: Synthetic oligonucleotide
  Target: LAMA2; (+) strand; PAM type: YTN; PAM sequence: CTA
aaccagtattttaattcctg

SEQ ID NO: 373208 - DNA, 20 bp, Artificial Sequence
  Description of Artificial Sequence: Synthetic oligonucleotide
  Target: LAMA2; (+) strand; PAM type: YTN; PAM sequence: TTT
taattcctgttgattttact

SEQ ID NO: 373209 - DNA, 20 bp, Artificial Sequence
  Description of Artificial Sequence: Synthetic oligonucleotide
  Target: LAMA2; (+) strand; PAM type: YTN; PAM sequence: TTT
aattcctgttgattttactg

SEQ ID NO: 373210 - DNA, 20 bp, Artificial Sequence
  Description of Artificial Sequence: Synthetic oligonucleotide
  Target: LAMA2; (+) strand; PAM type: YTN; PAM sequence: TTA
attcctgttgattttactgg

SEQ ID NO: 373211 - DNA, 20 bp, Artificial Sequence
  Description of Artificial Sequence: Synthetic oligonucleotide
  Target: LAMA2; (+) strand; PAM type: YTN; PAM sequence: TTC
ctgttgattttactgggttg

SEQ ID NO: 373212 - DNA, 20 bp, Artificial Sequence
  Description of Artificial Sequence: Synthetic oligonucleotide
  Target: LAMA2; (+) strand; PAM type: YTN; PAM sequence: CTG
ttgattttactgggttgctt

SEQ ID NO: 373213 - DNA, 20 bp, Artificial Sequence
  Description of Artificial Sequence: Synthetic oligonucleotide
  Target: LAMA2; (+) strand; PAM type: YTN; PAM sequence: TTG
attttactgggttgctttgc

SEQ ID NO: 373214 - DNA, 20 bp, Artificial Sequence
  Description of Artificial Sequence: Synthetic oligonucleotide
  Target: LAMA2; (+) strand; PAM type: YTN; PAM sequence: TTT
tactgggttgctttgcagca

SEQ ID NO: 373215 - DNA, 20 bp, Artificial Sequence
  Description of Artificial Sequence: Synthetic oligonucleotide
  Target: LAMA2; (+) strand; PAM type: YTN; PAM sequence: TTT
actgggttgctttgcagcag

SEQ ID NO: 373216 - DNA, 20 bp, Artificial Sequence
  Description of Artificial Sequence: Synthetic oligonucleotide
  Target: LAMA2; (+) strand; PAM type: YTN; PAM sequence: TTA
ctgggttgctttgcagcaga

SEQ ID NO: 373217 - DNA, 20 bp, Artificial Sequence
  Description of Artificial Sequence: Synthetic oligonucleotide
  Target: LAMA2; (+) strand; PAM type: YTN; PAM sequence: CTG
ggttgctttgcagcagaaac

SEQ ID NO: 373218 - DNA, 20 bp, Artificial Sequence
  Description of Artificial Sequence: Synthetic oligonucleotide
  Target: LAMA2; (+) strand; PAM type: YTN; PAM sequence: TTG
ctttgcagcagaaacaagag

SEQ ID NO: 373219 - DNA, 20 bp, Artificial Sequence
  Description of Artificial Sequence: Synthetic oligonucleotide
  Target: LAMA2; (+) strand; PAM type: YTN; PAM sequence: CTT
tgcagcagaaacaagagtat

SEQ ID NO: 373220 - DNA, 20 bp, Artificial Sequence
  Description of Artificial Sequence: Synthetic oligonucleotide
  Target: LAMA2; (+) strand; PAM type: YTN; PAM sequence: TTT
gcagcagaaacaagagtatt

SEQ ID NO: 373221 - DNA, 20 bp, Artificial Sequence
  Description of Artificial Sequence: Synthetic oligonucleotide
  Target: LAMA2; (+) strand; PAM type: YTN; PAM sequence: TTG
cagcagaaacaagagtatta

SEQ ID NO: 373222 - DNA, 20 bp, Artificial Sequence
  Description of Artificial Sequence: Synthetic oligonucleotide
  Target: LAMA2; (+) strand; PAM type: YTN; PAM sequence: TTA
ttttatgtaatttgtgtgat

SEQ ID NO: 373223 - DNA, 20 bp, Artificial Sequence
  Description of Artificial Sequence: Synthetic oligonucleotide
  Target: LAMA2; (+) strand; PAM type: YTN; PAM sequence: TTT
tatgtaatttgtgtgattat

SEQ ID NO: 373224 - DNA, 20 bp, Artificial Sequence
  Description of Artificial Sequence: Synthetic oligonucleotide
  Target: LAMA2; (+) strand; PAM type: YTN; PAM sequence: TTT
atgtaatttgtgtgattata

SEQ ID NO: 373225 - DNA, 20 bp, Artificial Sequence
  Description of Artificial Sequence: Synthetic oligonucleotide
  Target: LAMA2; (+) strand; PAM type: YTN; PAM sequence: TTA
tgtaatttgtgtgattatat

SEQ ID NO: 373226 - DNA, 20 bp, Artificial Sequence
  Description of Artificial Sequence: Synthetic oligonucleotide
  Target: LAMA2; (+) strand; PAM type: YTN; PAM sequence: TTT
gtgtgattatatttccttct

SEQ ID NO: 373227 - DNA, 20 bp, Artificial Sequence
  Description of Artificial Sequence: Synthetic oligonucleotide
  Target: LAMA2; (+) strand; PAM type: YTN; PAM sequence: TTG
tgtgattatatttccttctg

SEQ ID NO: 373228 - DNA, 20 bp, Artificial Sequence
  Description of Artificial Sequence: Synthetic oligonucleotide
  Target: LAMA2; (+) strand; PAM type: YTN; PAM sequence: TTA
tatttccttctgaaatgttt

SEQ ID NO: 373229 - DNA, 20 bp, Artificial Sequence
  Description of Artificial Sequence: Synthetic oligonucleotide
  Target: LAMA2; (+) strand; PAM type: YTN; PAM sequence: TTT
ccttctgaaatgtttttgaa

SEQ ID NO: 373230 - DNA, 20 bp, Artificial Sequence
  Description of Artificial Sequence: Synthetic oligonucleotide
  Target: LAMA2; (+) strand; PAM type: YTN; PAM sequence: TTC
cttctgaaatgtttttgaag

SEQ ID NO: 373231 - DNA, 20 bp, Artificial Sequence
  Description of Artificial Sequence: Synthetic oligonucleotide
  Target: LAMA2; (+) strand; PAM type: YTN; PAM sequence: CTT
ctgaaatgtttttgaagaaa

SEQ ID NO: 373232 - DNA, 20 bp, Artificial Sequence
  Description of Artificial Sequence: Synthetic oligonucleotide
  Target: LAMA2; (+) strand; PAM type: YTN; PAM sequence: TTC
tgaaatgtttttgaagaaat

SEQ ID NO: 373233 - DNA, 20 bp, Artificial Sequence
  Description of Artificial Sequence: Synthetic oligonucleotide
  Target: LAMA2; (+) strand; PAM type: YTN; PAM sequence: CTG
aaatgtttttgaagaaataa

SEQ ID NO: 373234 - DNA, 20 bp, Artificial Sequence
  Description of Artificial Sequence: Synthetic oligonucleotide
  Target: LAMA2; (+) strand; PAM type: YTN; PAM sequence: TTT
ttgaagaaataattcttcta

SEQ ID NO: 373235 - DNA, 20 bp, Artificial Sequence
  Description of Artificial Sequence: Synthetic oligonucleotide
  Target: LAMA2; (+) strand; PAM type: YTN; PAM sequence: TTT
tgaagaaataattcttctat

SEQ ID NO: 373236 - DNA, 20 bp, Artificial Sequence
  Description of Artificial Sequence: Synthetic oligonucleotide
  Target: LAMA2; (+) strand; PAM type: YTN; PAM sequence: TTT
gaagaaataattcttctata

SEQ ID NO: 373237 - DNA, 20 bp, Artificial Sequence
  Description of Artificial Sequence: Synthetic oligonucleotide
  Target: LAMA2; (+) strand; PAM type: YTN; PAM sequence: TTG
aagaaataattcttctatat

SEQ ID NO: 373238 - DNA, 20 bp, Artificial Sequence
  Description of Artificial Sequence: Synthetic oligonucleotide
  Target: LAMA2; (+) strand; PAM type: YTN; PAM sequence: TTC
ttctatatattcagcctcag

SEQ ID NO: 373239 - DNA, 20 bp, Artificial Sequence
  Description of Artificial Sequence: Synthetic oligonucleotide
  Target: LAMA2; (+) strand; PAM type: YTN; PAM sequence: CTT
ctatatattcagcctcagca

SEQ ID NO: 373240 - DNA, 20 bp, Artificial Sequence
  Description of Artificial Sequence: Synthetic oligonucleotide
  Target: LAMA2; (+) strand; PAM type: YTN; PAM sequence: TTC
tatatattcagcctcagcat

SEQ ID NO: 373241 - DNA, 20 bp, Artificial Sequence
  Description of Artificial Sequence: Synthetic oligonucleotide
  Target: LAMA2; (+) strand; PAM type: YTN; PAM sequence: CTA
tatattcagcctcagcataa

SEQ ID NO: 373242 - DNA, 20 bp, Artificial Sequence
  Description of Artificial Sequence: Synthetic oligonucleotide
  Target: LAMA2; (+) strand; PAM type: YTN; PAM sequence: TTC
agcctcagcataaaagtgat

SEQ ID NO: 373243 - DNA, 20 bp, Artificial Sequence
  Description of Artificial Sequence: Synthetic oligonucleotide
  Target: LAMA2; (+) strand; PAM type: YTN; PAM sequence: CTC
agcataaaagtgatacaaac

SEQ ID NO: 373244 - DNA, 20 bp, Artificial Sequence
  Description of Artificial Sequence: Synthetic oligonucleotide
  Target: LAMA2; (+) strand; PAM type: YTN; PAM sequence: CTT
cccccttgacatcattgcca

SEQ ID NO: 373245 - DNA, 20 bp, Artificial Sequence
  Description of Artificial Sequence: Synthetic oligonucleotide
  Target: LAMA2; (+) strand; PAM type: YTN; PAM sequence: TTC
ccccttgacatcattgccaa

SEQ ID NO: 373246 - DNA, 20 bp, Artificial Sequence
  Description of Artificial Sequence: Synthetic oligonucleotide
  Target: LAMA2; (+) strand; PAM type: YTN; PAM sequence: CTT
gacatcattgccaaaaacaa

SEQ ID NO: 373247 - DNA, 20 bp, Artificial Sequence
  Description of Artificial Sequence: Synthetic oligonucleotide
  Target: LAMA2; (+) strand; PAM type: YTN; PAM sequence: TTG
acatcattgccaaaaacaaa

SEQ ID NO: 373248 - DNA, 20 bp, Artificial Sequence
  Description of Artificial Sequence: Synthetic oligonucleotide
  Target: LAMA2; (+) strand; PAM type: YTN; PAM sequence: TTG
ccaaaaacaaaaacctccct

SEQ ID NO: 373249 - DNA, 20 bp, Artificial Sequence
  Description of Artificial Sequence: Synthetic oligonucleotide
  Target: LAMA2; (+) strand; PAM type: YTN; PAM sequence: CTC
cctctggtttcagcactgga

SEQ ID NO: 373250 - DNA, 20 bp, Artificial Sequence
  Description of Artificial Sequence: Synthetic oligonucleotide
  Target: LAMA2; (+) strand; PAM type: YTN; PAM sequence: CTC
tggtttcagcactggaaata

SEQ ID NO: 373251 - DNA, 20 bp, Artificial Sequence
  Description of Artificial Sequence: Synthetic oligonucleotide
  Target: LAMA2; (+) strand; PAM type: YTN; PAM sequence: CTG
gtttcagcactggaaatagt

SEQ ID NO: 373252 - DNA, 20 bp, Artificial Sequence
  Description of Artificial Sequence: Synthetic oligonucleotide
  Target: LAMA2; (+) strand; PAM type: YTN; PAM sequence: TTT
cagcactggaaatagtccct

SEQ ID NO: 373253 - DNA, 20 bp, Artificial Sequence
  Description of Artificial Sequence: Synthetic oligonucleotide
  Target: LAMA2; (+) strand; PAM type: YTN; PAM sequence: TTC
agcactggaaatagtccctg

SEQ ID NO: 373254 - DNA, 20 bp, Artificial Sequence
  Description of Artificial Sequence: Synthetic oligonucleotide
  Target: LAMA2; (+) strand; PAM type: YTN; PAM sequence: CTG
gaaatagtccctgctgccac

SEQ ID NO: 373255 - DNA, 20 bp, Artificial Sequence
  Description of Artificial Sequence: Synthetic oligonucleotide
  Target: LAMA2; (+) strand; PAM type: YTN; PAM sequence: CTG
ctgccacccttcctgggagg

SEQ ID NO: 373256 - DNA, 20 bp, Artificial Sequence
  Description of Artificial Sequence: Synthetic oligonucleotide
  Target: LAMA2; (+) strand; PAM type: YTN; PAM sequence: CTG
ccacccttcctgggagggag

SEQ ID NO: 373257 - DNA, 20 bp, Artificial Sequence
  Description of Artificial Sequence: Synthetic oligonucleotide
  Target: LAMA2; (+) strand; PAM type: YTN; PAM sequence: CTT
cctgggagggaggggtgcaa

SEQ ID NO: 373258 - DNA, 20 bp, Artificial Sequence
  Description of Artificial Sequence: Synthetic oligonucleotide
  Target: LAMA2; (+) strand; PAM type: YTN; PAM sequence: TTC
ctgggagggaggggtgcaaa

SEQ ID NO: 373259 - DNA, 20 bp, Artificial Sequence
  Description of Artificial Sequence: Synthetic oligonucleotide
  Target: LAMA2; (+) strand; PAM type: YTN; PAM sequence: CTG
ggagggaggggtgcaaagga

SEQ ID NO: 373260 - DNA, 20 bp, Artificial Sequence
  Description of Artificial Sequence: Synthetic oligonucleotide
  Target: LAMA2; (+) strand; PAM type: YTN; PAM sequence: CTA
ctttcactcatcatcactga

SEQ ID NO: 373261 - DNA, 20 bp, Artificial Sequence
  Description of Artificial Sequence: Synthetic oligonucleotide
  Target: LAMA2; (+) strand; PAM type: YTN; PAM sequence: CTT
tcactcatcatcactgaggc

SEQ ID NO: 373262 - DNA, 20 bp, Artificial Sequence
  Description of Artificial Sequence: Synthetic oligonucleotide
  Target: LAMA2; (+) strand; PAM type: YTN; PAM sequence: TTT
cactcatcatcactgaggct

SEQ ID NO: 373263 - DNA, 20 bp, Artificial Sequence
  Description of Artificial Sequence: Synthetic oligonucleotide
  Target: LAMA2; (+) strand; PAM type: YTN; PAM sequence: TTC
actcatcatcactgaggcta

SEQ ID NO: 373264 - DNA, 20 bp, Artificial Sequence
  Description of Artificial Sequence: Synthetic oligonucleotide
  Target: LAMA2; (+) strand; PAM type: YTN; PAM sequence: CTC
atcatcactgaggctaaccc

SEQ ID NO: 373265 - DNA, 20 bp, Artificial Sequence
  Description of Artificial Sequence: Synthetic oligonucleotide
  Target: LAMA2; (+) strand; PAM type: YTN; PAM sequence: CTG
aggctaaccctgaagagggc

SEQ ID NO: 373266 - DNA, 20 bp, Artificial Sequence
  Description of Artificial Sequence: Synthetic oligonucleotide
  Target: LAMA2; (+) strand; PAM type: YTN; PAM sequence: CTA
accctgaagagggctgtttc

SEQ ID NO: 373267 - DNA, 20 bp, Artificial Sequence
  Description of Artificial Sequence: Synthetic oligonucleotide
  Target: LAMA2; (+) strand; PAM type: YTN; PAM sequence: CTG
aagagggctgtttctgcccg

SEQ ID NO: 373268 - DNA, 20 bp, Artificial Sequence
  Description of Artificial Sequence: Synthetic oligonucleotide
  Target: LAMA2; (+) strand; PAM type: YTN; PAM sequence: CTG
tttctgcccgtcttttcctg

SEQ ID NO: 373269 - DNA, 20 bp, Artificial Sequence
  Description of Artificial Sequence: Synthetic oligonucleotide
  Target: LAMA2; (+) strand; PAM type: YTN; PAM sequence: TTT
ctgcccgtcttttcctgtca

SEQ ID NO: 373270 - DNA, 20 bp, Artificial Sequence
  Description of Artificial Sequence: Synthetic oligonucleotide
  Target: LAMA2; (+) strand; PAM type: YTN; PAM sequence: TTC
tgcccgtcttttcctgtcat

SEQ ID NO: 373271 - DNA, 20 bp, Artificial Sequence
  Description of Artificial Sequence: Synthetic oligonucleotide
  Target: LAMA2; (+) strand; PAM type: YTN; PAM sequence: CTG
cccgtcttttcctgtcatct

SEQ ID NO: 373272 - DNA, 20 bp, Artificial Sequence
  Description of Artificial Sequence: Synthetic oligonucleotide
  Target: LAMA2; (+) strand; PAM type: YTN; PAM sequence: CTT
ttcctgtcatcttggcagct

SEQ ID NO: 373273 - DNA, 20 bp, Artificial Sequence
  Description of Artificial Sequence: Synthetic oligonucleotide
  Target: LAMA2; (+) strand; PAM type: YTN; PAM sequence: TTT
tcctgtcatcttggcagcta

SEQ ID NO: 373274 - DNA, 20 bp, Artificial Sequence
  Description of Artificial Sequence: Synthetic oligonucleotide
  Target: LAMA2; (+) strand; PAM type: YTN; PAM sequence: TTT
cctgtcatcttggcagctat

SEQ ID NO: 373275 - DNA, 20 bp, Artificial Sequence
  Description of Artificial Sequence: Synthetic oligonucleotide
  Target: LAMA2; (+) strand; PAM type: YTN; PAM sequence: TTC
ctgtcatcttggcagctatc

SEQ ID NO: 373276 - DNA, 20 bp, Artificial Sequence
  Description of Artificial Sequence: Synthetic oligonucleotide
  Target: LAMA2; (+) strand; PAM type: YTN; PAM sequence: CTG
tcatcttggcagctatcacc

SEQ ID NO: 373277 - DNA, 20 bp, Artificial Sequence
  Description of Artificial Sequence: Synthetic oligonucleotide
  Target: LAMA2; (+) strand; PAM type: YTN; PAM sequence: CTT
ggcagctatcacccctgttt

SEQ ID NO: 373278 - DNA, 20 bp, Artificial Sequence
  Description of Artificial Sequence: Synthetic oligonucleotide
  Target: LAMA2; (+) strand; PAM type: YTN; PAM sequence: TTG
gcagctatcacccctgtttc

SEQ ID NO: 373279 - DNA, 20 bp, Artificial Sequence
  Description of Artificial Sequence: Synthetic oligonucleotide
  Target: LAMA2; (+) strand; PAM type: YTN; PAM sequence: CTA
tcacccctgtttcaaccagg

SEQ ID NO: 373280 - DNA, 20 bp, Artificial Sequence
  Description of Artificial Sequence: Synthetic oligonucleotide
  Target: LAMA2; (+) strand; PAM type: YTN; PAM sequence: CTG
tttcaaccaggatgcataaa

SEQ ID NO: 373281 - DNA, 20 bp, Artificial Sequence
  Description of Artificial Sequence: Synthetic oligonucleotide
  Target: LAMA2; (+) strand; PAM type: YTN; PAM sequence: TTT
caaccaggatgcataaaatt

SEQ ID NO: 373282 - DNA, 20 bp, Artificial Sequence
  Description of Artificial Sequence: Synthetic oligonucleotide
  Target: LAMA2; (+) strand; PAM type: YTN; PAM sequence: TTC
aaccaggatgcataaaatta

SEQ ID NO: 373283 - DNA, 20 bp, Artificial Sequence
  Description of Artificial Sequence: Synthetic oligonucleotide
  Target: LAMA2; (+) strand; PAM type: YTN; PAM sequence: TTA
atgaagcaggagcctatcac

SEQ ID NO: 373284 - DNA, 20 bp, Artificial Sequence
  Description of Artificial Sequence: Synthetic oligonucleotide
  Target: LAMA2; (+) strand; PAM type: YTN; PAM sequence: CTA
tcacccagagagaatttagc

SEQ ID NO: 373285 - DNA, 20 bp, Artificial Sequence
  Description of Artificial Sequence: Synthetic oligonucleotide
  Target: LAMA2; (+) strand; PAM type: YTN; PAM sequence: TTT
agctagcaactagcagtctg

SEQ ID NO: 373286 - DNA, 20 bp, Artificial Sequence
  Description of Artificial Sequence: Synthetic oligonucleotide
  Target: LAMA2; (+) strand; PAM type: YTN; PAM sequence: TTA
gctagcaactagcagtctgt

SEQ ID NO: 373287 - DNA, 20 bp, Artificial Sequence
  Description of Artificial Sequence: Synthetic oligonucleotide
  Target: LAMA2; (+) strand; PAM type: YTN; PAM sequence: CTA
gcaactagcagtctgtggac

SEQ ID NO: 373288 - DNA, 20 bp, Artificial Sequence
  Description of Artificial Sequence: Synthetic oligonucleotide
  Target: LAMA2; (+) strand; PAM type: YTN; PAM sequence: CTA
gcagtctgtggacaaagtgc

SEQ ID NO: 373289 - DNA, 20 bp, Artificial Sequence
  Description of Artificial Sequence: Synthetic oligonucleotide
  Target: LAMA2; (+) strand; PAM type: YTN; PAM sequence: CTG
tggacaaagtgccaatgaca

SEQ ID NO: 373290 - DNA, 20 bp, Artificial Sequence
  Description of Artificial Sequence: Synthetic oligonucleotide
  Target: LAMA2; (+) strand; PAM type: YTN; PAM sequence: TTC
ctagcagcaacaagtactat

SEQ ID NO: 373291 - DNA, 20 bp, Artificial Sequence
  Description of Artificial Sequence: Synthetic oligonucleotide
  Target: LAMA2; (+) strand; PAM type: YTN; PAM sequence: CTA
gcagcaacaagtactatttg

SEQ ID NO: 373292 - DNA, 20 bp, Artificial Sequence
  Description of Artificial Sequence: Synthetic oligonucleotide
  Target: LAMA2; (+) strand; PAM type: YTN; PAM sequence: CTA
tttgtgagtatggaagcatc

SEQ ID NO: 373293 - DNA, 20 bp, Artificial Sequence
  Description of Artificial Sequence: Synthetic oligonucleotide
  Target: LAMA2; (+) strand; PAM type: YTN; PAM sequence: TTT
gtgagtatggaagcatctgt

SEQ ID NO: 373294 - DNA, 20 bp, Artificial Sequence
  Description of Artificial Sequence: Synthetic oligonucleotide
  Target: LAMA2; (+) strand; PAM type: YTN; PAM sequence: TTG
tgagtatggaagcatctgta

SEQ ID NO: 373295 - DNA, 20 bp, Artificial Sequence
  Description of Artificial Sequence: Synthetic oligonucleotide
  Target: LAMA2; (+) strand; PAM type: YTN; PAM sequence: CTG
taaattaggaatgaaagaaa

SEQ ID NO: 373296 - DNA, 20 bp, Artificial Sequence
  Description of Artificial Sequence: Synthetic oligonucleotide
  Target: LAMA2; (+) strand; PAM type: YTN; PAM sequence: TTA
ggaatgaaagaaaaaaaaat

SEQ ID NO: 373297 - DNA, 20 bp, Artificial Sequence
  Description of Artificial Sequence: Synthetic oligonucleotide
  Target: LAMA2; (+) strand; PAM type: YTN; PAM sequence: TTT
atttgcaatcaagaaactag

SEQ ID NO: 373298 - DNA, 20 bp, Artificial Sequence
  Description of Artificial Sequence: Synthetic oligonucleotide
  Target: LAMA2; (+) strand; PAM type: YTN; PAM sequence: TTA
tttgcaatcaagaaactaga

SEQ ID NO: 373299 - DNA, 20 bp, Artificial Sequence
  Description of Artificial Sequence: Synthetic oligonucleotide
  Target: LAMA2; (+) strand; PAM type: YTN; PAM sequence: TTT
gcaatcaagaaactagatat

SEQ ID NO: 373300 - DNA, 20 bp, Artificial Sequence
  Description of Artificial Sequence: Synthetic oligonucleotide
  Target: LAMA2; (+) strand; PAM type: YTN; PAM sequence: TTG
caatcaagaaactagatatc

SEQ ID NO: 373301 - DNA, 20 bp, Artificial Sequence
  Description of Artificial Sequence: Synthetic oligonucleotide
  Target: LAMA2; (+) strand; PAM type: YTN; PAM sequence: CTA
gatatctttaattgtgtgtg

SEQ ID NO: 373302 - DNA, 20 bp, Artificial Sequence
  Description of Artificial Sequence: Synthetic oligonucleotide
  Target: LAMA2; (+) strand; PAM type: YTN; PAM sequence: CTT
taattgtgtgtgtgtgtctg

SEQ ID NO: 373303 - DNA, 20 bp, Artificial Sequence
  Description of Artificial Sequence: Synthetic oligonucleotide
  Target: LAMA2; (+) strand; PAM type: YTN; PAM sequence: TTT
aattgtgtgtgtgtgtctgt

SEQ ID NO: 373304 - DNA, 20 bp, Artificial Sequence
  Description of Artificial Sequence: Synthetic oligonucleotide
  Target: LAMA2; (+) strand; PAM type: YTN; PAM sequence: TTA
attgtgtgtgtgtgtctgtg

SEQ ID NO: 373305 - DNA, 20 bp, Artificial Sequence
  Description of Artificial Sequence: Synthetic oligonucleotide
  Target: LAMA2; (+) strand; PAM type: YTN; PAM sequence: TTG
tgtgtgtgtgtctgtgtgtg

SEQ ID NO: 373306 - DNA, 20 bp, Artificial Sequence
  Description of Artificial Sequence: Synthetic oligonucleotide
  Target: LAMA2; (+) strand; PAM type: YTN; PAM sequence: CTG
tgtgtgtgtttaaagaaagg

SEQ ID NO: 373307 - DNA, 20 bp, Artificial Sequence
  Description of Artificial Sequence: Synthetic oligonucleotide
  Target: LAMA2; (+) strand; PAM type: YTN; PAM sequence: TTT
aaagaaaggcatgtgcatat

SEQ ID NO: 373308 - DNA, 20 bp, Artificial Sequence
  Description of Artificial Sequence: Synthetic oligonucleotide
  Target: LAMA2; (+) strand; PAM type: YTN; PAM sequence: TTA
aagaaaggcatgtgcatatt

SEQ ID NO: 373309 - DNA, 20 bp, Artificial Sequence
  Description of Artificial Sequence: Synthetic oligonucleotide
  Target: LAMA2; (+) strand; PAM type: YTN; PAM sequence: TTA
cttactataataggagaaca

SEQ ID NO: 373310 - DNA, 20 bp, Artificial Sequence
  Description of Artificial Sequence: Synthetic oligonucleotide
  Target: LAMA2; (+) strand; PAM type: YTN; PAM sequence: CTT
actataataggagaacatat

SEQ ID NO: 373311 - DNA, 20 bp, Artificial Sequence
  Description of Artificial Sequence: Synthetic oligonucleotide
  Target: LAMA2; (+) strand; PAM type: YTN; PAM sequence: TTA
ctataataggagaacatatc

SEQ ID NO: 373312 - DNA, 20 bp, Artificial Sequence
  Description of Artificial Sequence: Synthetic oligonucleotide
  Target: LAMA2; (+) strand; PAM type: YTN; PAM sequence: CTA
taataggagaacatatcatt

SEQ ID NO: 373313 - DNA, 20 bp, Artificial Sequence
  Description of Artificial Sequence: Synthetic oligonucleotide
  Target: LAMA2; (+) strand; PAM type: YTN; PAM sequence: TTG
ccaagacagatttacatcaa

SEQ ID NO: 373314 - DNA, 20 bp, Artificial Sequence
  Description of Artificial Sequence: Synthetic oligonucleotide
  Target: LAMA2; (+) strand; PAM type: YTN; PAM sequence: TTT
acatcaagtgcctaaacccc

SEQ ID NO: 373315 - DNA, 20 bp, Artificial Sequence
  Description of Artificial Sequence: Synthetic oligonucleotide
  Target: LAMA2; (+) strand; PAM type: YTN; PAM sequence: TTA
catcaagtgcctaaaccccc

SEQ ID NO: 373316 - DNA, 20 bp, Artificial Sequence
  Description of Artificial Sequence: Synthetic oligonucleotide
  Target: LAMA2; (+) strand; PAM type: YTN; PAM sequence: CTA
aaccccccagttcactacag

SEQ ID NO: 373317 - DNA, 20 bp, Artificial Sequence
  Description of Artificial Sequence: Synthetic oligonucleotide
  Target: LAMA2; (+) strand; PAM type: YTN; PAM sequence: TTC
actacaggcaaccttttttt

SEQ ID NO: 373318 - DNA, 20 bp, Artificial Sequence
  Description of Artificial Sequence: Synthetic oligonucleotide
  Target: LAMA2; (+) strand; PAM type: YTN; PAM sequence: CTA
caggcaacctttttttagca

SEQ ID NO: 373319 - DNA, 20 bp, Artificial Sequence
  Description of Artificial Sequence: Synthetic oligonucleotide
  Target: LAMA2; (+) strand; PAM type: YTN; PAM sequence: CTT
tttttagcaactggaaaatg

SEQ ID NO: 373320 - DNA, 20 bp, Artificial Sequence
  Description of Artificial Sequence: Synthetic oligonucleotide
  Target: LAMA2; (+) strand; PAM type: YTN; PAM sequence: TTT
ttttagcaactggaaaatga

SEQ ID NO: 373321 - DNA, 20 bp, Artificial Sequence
  Description of Artificial Sequence: Synthetic oligonucleotide
  Target: LAMA2; (+) strand; PAM type: YTN; PAM sequence: TTT
tttagcaactggaaaatgac

SEQ ID NO: 373322 - DNA, 20 bp, Artificial Sequence
  Description of Artificial Sequence: Synthetic oligonucleotide
  Target: LAMA2; (+) strand; PAM type: YTN; PAM sequence: TTT
ttagcaactggaaaatgaca

SEQ ID NO: 373323 - DNA, 20 bp, Artificial Sequence
  Description of Artificial Sequence: Synthetic oligonucleotide
  Target: LAMA2; (+) strand; PAM type: YTN; PAM sequence: TTT
tagcaactggaaaatgacag

SEQ ID NO: 373324 - DNA, 20 bp, Artificial Sequence
  Description of Artificial Sequence: Synthetic oligonucleotide
  Target: LAMA2; (+) strand; PAM type: YTN; PAM sequence: TTT
agcaactggaaaatgacagc

SEQ ID NO: 373325 - DNA, 20 bp, Artificial Sequence
  Description of Artificial Sequence: Synthetic oligonucleotide
  Target: LAMA2; (+) strand; PAM type: YTN; PAM sequence: TTA
gcaactggaaaatgacagct

SEQ ID NO: 373326 - DNA, 20 bp, Artificial Sequence
  Description of Artificial Sequence: Synthetic oligonucleotide
  Target: LAMA2; (+) strand; PAM type: YTN; PAM sequence: CTG
gaaaatgacagctgctctgt

SEQ ID NO: 373327 - DNA, 20 bp, Artificial Sequence
  Description of Artificial Sequence: Synthetic oligonucleotide
  Target: LAMA2; (+) strand; PAM type: YTN; PAM sequence: CTG
ctctgtcatacaaggctatt

SEQ ID NO: 373328 - DNA, 20 bp, Artificial Sequence
  Description of Artificial Sequence: Synthetic oligonucleotide
  Target: LAMA2; (+) strand; PAM type: YTN; PAM sequence: CTC
tgtcatacaaggctattaaa

SEQ ID NO: 373329 - DNA, 20 bp, Artificial Sequence
  Description of Artificial Sequence: Synthetic oligonucleotide
  Target: LAMA2; (+) strand; PAM type: YTN; PAM sequence: CTG
tcatacaaggctattaaatc

SEQ ID NO: 373330 - DNA, 20 bp, Artificial Sequence
  Description of Artificial Sequence: Synthetic oligonucleotide
  Target: LAMA2; (+) strand; PAM type: YTN; PAM sequence: CTA
ttaaatccacttatctaggt

SEQ ID NO: 373331 - DNA, 20 bp, Artificial Sequence
  Description of Artificial Sequence: Synthetic oligonucleotide
  Target: LAMA2; (+) strand; PAM type: YTN; PAM sequence: TTA
aatccacttatctaggtgag

SEQ ID NO: 373332 - DNA, 20 bp, Artificial Sequence
  Description of Artificial Sequence: Synthetic oligonucleotide
  Target: LAMA2; (+) strand; PAM type: YTN; PAM sequence: CTT
atctaggtgagcataatctc

SEQ ID NO: 373333 - DNA, 20 bp, Artificial Sequence
  Description of Artificial Sequence: Synthetic oligonucleotide
  Target: LAMA2; (+) strand; PAM type: YTN; PAM sequence: TTA
tctaggtgagcataatctct

SEQ ID NO: 373334 - DNA, 20 bp, Artificial Sequence
  Description of Artificial Sequence: Synthetic oligonucleotide
  Target: LAMA2; (+) strand; PAM type: YTN; PAM sequence: CTA
ggtgagcataatctctgatg

SEQ ID NO: 373335 - DNA, 20 bp, Artificial Sequence
  Description of Artificial Sequence: Synthetic oligonucleotide
  Target: LAMA2; (+) strand; PAM type: YTN; PAM sequence: CTC
tgatgtacttatattgcttt

SEQ ID NO: 373336 - DNA, 20 bp, Artificial Sequence
  Description of Artificial Sequence: Synthetic oligonucleotide
  Target: LAMA2; (+) strand; PAM type: YTN; PAM sequence: CTG
atgtacttatattgctttgc

SEQ ID NO: 373337 - DNA, 20 bp, Artificial Sequence
  Description of Artificial Sequence: Synthetic oligonucleotide
  Target: LAMA2; (+) strand; PAM type: YTN; PAM sequence: CTT
atattgctttgctttatgta

SEQ ID NO: 373338 - DNA, 20 bp, Artificial Sequence
  Description of Artificial Sequence: Synthetic oligonucleotide
  Target: LAMA2; (+) strand; PAM type: YTN; PAM sequence: TTA
tattgctttgctttatgtac

SEQ ID NO: 373339 - DNA, 20 bp, Artificial Sequence
  Description of Artificial Sequence: Synthetic oligonucleotide
  Target: LAMA2; (+) strand; PAM type: YTN; PAM sequence: TTG
ctttgctttatgtactatac

SEQ ID NO: 373340 - DNA, 20 bp, Artificial Sequence
  Description of Artificial Sequence: Synthetic oligonucleotide
  Target: LAMA2; (+) strand; PAM type: YTN; PAM sequence: CTT
tgctttatgtactatactcc

SEQ ID NO: 373341 - DNA, 20 bp, Artificial Sequence
  Description of Artificial Sequence: Synthetic oligonucleotide
  Target: LAMA2; (+) strand; PAM type: YTN; PAM sequence: TTT
gctttatgtactatactccc

SEQ ID NO: 373342 - DNA, 20 bp, Artificial Sequence
  Description of Artificial Sequence: Synthetic oligonucleotide
  Target: LAMA2; (+) strand; PAM type: YTN; PAM sequence: TTG
ctttatgtactatactccct

SEQ ID NO: 373343 - DNA, 20 bp, Artificial Sequence
  Description of Artificial Sequence: Synthetic oligonucleotide
  Target: LAMA2; (+) strand; PAM type: YTN; PAM sequence: CTT
tatgtactatactccctata

SEQ ID NO: 373344 - DNA, 20 bp, Artificial Sequence
  Description of Artificial Sequence: Synthetic oligonucleotide
  Target: LAMA2; (+) strand; PAM type: YTN; PAM sequence: TTT
atgtactatactccctatac

SEQ ID NO: 373345 - DNA, 20 bp, Artificial Sequence
  Description of Artificial Sequence: Synthetic oligonucleotide
  Target: LAMA2; (+) strand; PAM type: YTN; PAM sequence: TTA
tgtactatactccctataca

SEQ ID NO: 373346 - DNA, 20 bp, Artificial Sequence
  Description of Artificial Sequence: Synthetic oligonucleotide
  Target: LAMA2; (+) strand; PAM type: YTN; PAM sequence: CTA
tactccctatacatgttaga

SEQ ID NO: 373347 - DNA, 20 bp, Artificial Sequence
  Description of Artificial Sequence: Synthetic oligonucleotide
  Target: LAMA2; (+) strand; PAM type: YTN; PAM sequence: CTC
cctatacatgttagacaata

SEQ ID NO: 373348 - DNA, 20 bp, Artificial Sequence
  Description of Artificial Sequence: Synthetic oligonucleotide
  Target: LAMA2; (+) strand; PAM type: YTN; PAM sequence: CTA
tacatgttagacaatagttt

SEQ ID NO: 373349 - DNA, 20 bp, Artificial Sequence
  Description of Artificial Sequence: Synthetic oligonucleotide
  Target: LAMA2; (+) strand; PAM type: YTN; PAM sequence: TTA
gacaatagtttctgaaccat

SEQ ID NO: 373350 - DNA, 20 bp, Artificial Sequence
  Description of Artificial Sequence: Synthetic oligonucleotide
  Target: LAMA2; (+) strand; PAM type: YTN; PAM sequence: TTT
ctgaaccatctataatttaa

SEQ ID NO: 373351 - DNA, 20 bp, Artificial Sequence
  Description of Artificial Sequence: Synthetic oligonucleotide
  Target: LAMA2; (+) strand; PAM type: YTN; PAM sequence: TTC
tgaaccatctataatttaaa

SEQ ID NO: 373352 - DNA, 20 bp, Artificial Sequence
  Description of Artificial Sequence: Synthetic oligonucleotide
  Target: LAMA2; (+) strand; PAM type: YTN; PAM sequence: CTG
aaccatctataatttaaaac

SEQ ID NO: 373353 - DNA, 20 bp, Artificial Sequence
  Description of Artificial Sequence: Synthetic oligonucleotide
  Target: LAMA2; (+) strand; PAM type: YTN; PAM sequence: CTA
taatttaaaaccctacattt

SEQ ID NO: 373354 - DNA, 20 bp, Artificial Sequence
  Description of Artificial Sequence: Synthetic oligonucleotide
  Target: LAMA2; (+) strand; PAM type: YTN; PAM sequence: TTT
aaaaccctacattttattta

SEQ ID NO: 373355 - DNA, 20 bp, Artificial Sequence
  Description of Artificial Sequence: Synthetic oligonucleotide
  Target: LAMA2; (+) strand; PAM type: YTN; PAM sequence: TTA
aaaccctacattttatttaa

SEQ ID NO: 373356 - DNA, 20 bp, Artificial Sequence
  Description of Artificial Sequence: Synthetic oligonucleotide
  Target: LAMA2; (+) strand; PAM type: YTN; PAM sequence: CTA
cattttatttaacaaacatc

SEQ ID NO: 373357 - DNA, 20 bp, Artificial Sequence
  Description of Artificial Sequence: Synthetic oligonucleotide
  Target: LAMA2; (+) strand; PAM type: YTN; PAM sequence: TTT
tatttaacaaacatctgttt

SEQ ID NO: 373358 - DNA, 20 bp, Artificial Sequence
  Description of Artificial Sequence: Synthetic oligonucleotide
  Target: LAMA2; (+) strand; PAM type: YTN; PAM sequence: TTT
atttaacaaacatctgttta

SEQ ID NO: 373359 - DNA, 20 bp, Artificial Sequence
  Description of Artificial Sequence: Synthetic oligonucleotide
  Target: LAMA2; (+) strand; PAM type: YTN; PAM sequence: TTA
tttaacaaacatctgtttag

SEQ ID NO: 373360 - DNA, 20 bp, Artificial Sequence
  Description of Artificial Sequence: Synthetic oligonucleotide
  Target: LAMA2; (+) strand; PAM type: YTN; PAM sequence: TTT
aacaaacatctgtttagcaa

SEQ ID NO: 373361 - DNA, 20 bp, Artificial Sequence
  Description of Artificial Sequence: Synthetic oligonucleotide
  Target: LAMA2; (+) strand; PAM type: YTN; PAM sequence: TTA
acaaacatctgtttagcaac

SEQ ID NO: 373362 - DNA, 20 bp, Artificial Sequence
  Description of Artificial Sequence: Synthetic oligonucleotide
  Target: LAMA2; (+) strand; PAM type: YTN; PAM sequence: CTG
tttagcaactaccatgtgct

SEQ ID NO: 373363 - DNA, 20 bp, Artificial Sequence
  Description of Artificial Sequence: Synthetic oligonucleotide
  Target: LAMA2; (+) strand; PAM type: YTN; PAM sequence: TTT
agcaactaccatgtgctggg

SEQ ID NO: 373364 - DNA, 20 bp, Artificial Sequence
  Description of Artificial Sequence: Synthetic oligonucleotide
  Target: LAMA2; (+) strand; PAM type: YTN; PAM sequence: TTA
gcaactaccatgtgctgggt

SEQ ID NO: 373365 - DNA, 20 bp, Artificial Sequence
  Description of Artificial Sequence: Synthetic oligonucleotide
  Target: LAMA2; (+) strand; PAM type: YTN; PAM sequence: CTA
ccatgtgctgggtacaaggc

SEQ ID NO: 373366 - DNA, 20 bp, Artificial Sequence
  Description of Artificial Sequence: Synthetic oligonucleotide
  Target: LAMA2; (+) strand; PAM type: YTN; PAM sequence: CTG
ggtacaaggctagacattgg

SEQ ID NO: 373367 - DNA, 20 bp, Artificial Sequence
  Description of Artificial Sequence: Synthetic oligonucleotide
  Target: LAMA2; (+) strand; PAM type: YTN; PAM sequence: CTA
gacattggatataaatagat

SEQ ID NO: 373368 - DNA, 20 bp, Artificial Sequence
  Description of Artificial Sequence: Synthetic oligonucleotide
  Target: LAMA2; (+) strand; PAM type: YTN; PAM sequence: TTG
gatataaatagatgcatttt

SEQ ID NO: 373369 - DNA, 20 bp, Artificial Sequence
  Description of Artificial Sequence: Synthetic oligonucleotide
  Target: LAMA2; (+) strand; PAM type: YTN; PAM sequence: TTT
tcccatccttgccctcagca

SEQ ID NO: 373370 - DNA, 20 bp, Artificial Sequence
  Description of Artificial Sequence: Synthetic oligonucleotide
  Target: LAMA2; (+) strand; PAM type: YTN; PAM sequence: TTT
cccatccttgccctcagcac

SEQ ID NO: 373371 - DNA, 20 bp, Artificial Sequence
  Description of Artificial Sequence: Synthetic oligonucleotide
  Target: LAMA2; (+) strand; PAM type: YTN; PAM sequence: TTC
ccatccttgccctcagcacc

SEQ ID NO: 373372 - DNA, 20 bp, Artificial Sequence
  Description of Artificial Sequence: Synthetic oligonucleotide
  Target: LAMA2; (+) strand; PAM type: YTN; PAM sequence: CTT
gccctcagcacctcacatct

SEQ ID NO: 373373 - DNA, 20 bp, Artificial Sequence
  Description of Artificial Sequence: Synthetic oligonucleotide
  Target: LAMA2; (+) strand; PAM type: YTN; PAM sequence: TTG
ccctcagcacctcacatctt

SEQ ID NO: 373374 - DNA, 20 bp, Artificial Sequence
  Description of Artificial Sequence: Synthetic oligonucleotide
  Target: LAMA2; (+) strand; PAM type: YTN; PAM sequence: CTC
agcacctcacatctttcttt

SEQ ID NO: 373375 - DNA, 20 bp, Artificial Sequence
  Description of Artificial Sequence: Synthetic oligonucleotide
  Target: LAMA2; (+) strand; PAM type: YTN; PAM sequence: CTC
acatctttctttaatgcaag

SEQ ID NO: 373376 - DNA, 20 bp, Artificial Sequence
  Description of Artificial Sequence: Synthetic oligonucleotide
  Target: LAMA2; (+) strand; PAM type: YTN; PAM sequence: CTT
tctttaatgcaagtgaggat

SEQ ID NO: 373377 - DNA, 20 bp, Artificial Sequence
  Description of Artificial Sequence: Synthetic oligonucleotide
  Target: LAMA2; (+) strand; PAM type: YTN; PAM sequence: TTT
ctttaatgcaagtgaggatg

SEQ ID NO: 373378 - DNA, 20 bp, Artificial Sequence
  Description of Artificial Sequence: Synthetic oligonucleotide
  Target: LAMA2; (+) strand; PAM type: YTN; PAM sequence: TTC
tttaatgcaagtgaggatgg

SEQ ID NO: 373379 - DNA, 20 bp, Artificial Sequence
  Description of Artificial Sequence: Synthetic oligonucleotide
  Target: LAMA2; (+) strand; PAM type: YTN; PAM sequence: CTT
taatgcaagtgaggatggtt

SEQ ID NO: 373380 - DNA, 20 bp, Artificial Sequence
  Description of Artificial Sequence: Synthetic oligonucleotide
  Target: LAMA2; (+) strand; PAM type: YTN; PAM sequence: TTT
aatgcaagtgaggatggttg

SEQ ID NO: 373381 - DNA, 20 bp, Artificial Sequence
  Description of Artificial Sequence: Synthetic oligonucleotide
  Target: LAMA2; (+) strand; PAM type: YTN; PAM sequence: TTA
atgcaagtgaggatggttgc

SEQ ID NO: 373382 - DNA, 20 bp, Artificial Sequence
  Description of Artificial Sequence: Synthetic oligonucleotide
  Target: LAMA2; (+) strand; PAM type: YTN; PAM sequence: TTG
cttgtattcttgggagaatt

SEQ ID NO: 373383 - DNA, 20 bp, Artificial Sequence
  Description of Artificial Sequence: Synthetic oligonucleotide
  Target: LAMA2; (+) strand; PAM type: YTN; PAM sequence: CTT
gtattcttgggagaattcca

SEQ ID NO: 373384 - DNA, 20 bp, Artificial Sequence
  Description of Artificial Sequence: Synthetic oligonucleotide
  Target: LAMA2; (+) strand; PAM type: YTN; PAM sequence: TTG
tattcttgggagaattccat

SEQ ID NO: 373385 - DNA, 20 bp, Artificial Sequence
  Description of Artificial Sequence: Synthetic oligonucleotide
  Target: LAMA2; (+) strand; PAM type: YTN; PAM sequence: TTC
ttgggagaattccatttgaa

SEQ ID NO: 373386 - DNA, 20 bp, Artificial Sequence
  Description of Artificial Sequence: Synthetic oligonucleotide
  Target: LAMA2; (+) strand; PAM type: YTN; PAM sequence: CTT
gggagaattccatttgaata

SEQ ID NO: 373387 - DNA, 20 bp, Artificial Sequence
  Description of Artificial Sequence: Synthetic oligonucleotide
  Target: LAMA2; (+) strand; PAM type: YTN; PAM sequence: TTG
ggagaattccatttgaatag

SEQ ID NO: 373388 - DNA, 20 bp, Artificial Sequence
  Description of Artificial Sequence: Synthetic oligonucleotide
  Target: LAMA2; (+) strand; PAM type: YTN; PAM sequence: TTC
catttgaatagtaaaaatca

SEQ ID NO: 373389 - DNA, 20 bp, Artificial Sequence
  Description of Artificial Sequence: Synthetic oligonucleotide
  Target: LAMA2; (+) strand; PAM type: YTN; PAM sequence: TTT
gaatagtaaaaatcaccaag

SEQ ID NO: 373390 - DNA, 20 bp, Artificial Sequence
  Description of Artificial Sequence: Synthetic oligonucleotide
  Target: LAMA2; (+) strand; PAM type: YTN; PAM sequence: TTG
aatagtaaaaatcaccaagg

SEQ ID NO: 373391 - DNA, 20 bp, Artificial Sequence
  Description of Artificial Sequence: Synthetic oligonucleotide
  Target: LAMA2; (+) strand; PAM type: YTN; PAM sequence: CTG
acagaaagtatgatttcctg

SEQ ID NO: 373392 - DNA, 20 bp, Artificial Sequence
  Description of Artificial Sequence: Synthetic oligonucleotide
  Target: LAMA2; (+) strand; PAM type: YTN; PAM sequence: TTT
cctgtctaaaatctgtatta

SEQ ID NO: 373393 - DNA, 20 bp, Artificial Sequence
  Description of Artificial Sequence: Synthetic oligonucleotide
  Target: LAMA2; (+) strand; PAM type: YTN; PAM sequence: TTC
ctgtctaaaatctgtattaa

SEQ ID NO: 373394 - DNA, 20 bp, Artificial Sequence
  Description of Artificial Sequence: Synthetic oligonucleotide
  Target: LAMA2; (+) strand; PAM type: YTN; PAM sequence: CTG
tctaaaatctgtattaatct

SEQ ID NO: 373395 - DNA, 20 bp, Artificial Sequence
  Description of Artificial Sequence: Synthetic oligonucleotide
  Target: LAMA2; (+) strand; PAM type: YTN; PAM sequence: CTA
aaatctgtattaatctgatt

SEQ ID NO: 373396 - DNA, 20 bp, Artificial Sequence
  Description of Artificial Sequence: Synthetic oligonucleotide
  Target: LAMA2; (+) strand; PAM type: YTN; PAM sequence: CTG
tattaatctgattcagaaga

SEQ ID NO: 373397 - DNA, 20 bp, Artificial Sequence
  Description of Artificial Sequence: Synthetic oligonucleotide
  Target: LAMA2; (+) strand; PAM type: YTN; PAM sequence: TTA
atctgattcagaagatggca

SEQ ID NO: 373398 - DNA, 20 bp, Artificial Sequence
  Description of Artificial Sequence: Synthetic oligonucleotide
  Target: LAMA2; (+) strand; PAM type: YTN; PAM sequence: CTG
attcagaagatggcaacatg

SEQ ID NO: 373399 - DNA, 20 bp, Artificial Sequence
  Description of Artificial Sequence: Synthetic oligonucleotide
  Target: LAMA2; (+) strand; PAM type: YTN; PAM sequence: TTC
agaagatggcaacatgcata

SEQ ID NO: 373400 - DNA, 20 bp, Artificial Sequence
  Description of Artificial Sequence: Synthetic oligonucleotide
  Target: LAMA2; (+) strand; PAM type: YTN; PAM sequence: TTT
tatctccagctcaagttttt

SEQ ID NO: 373401 - DNA, 20 bp, Artificial Sequence
  Description of Artificial Sequence: Synthetic oligonucleotide
  Target: LAMA2; (+) strand; PAM type: YTN; PAM sequence: TTT
atctccagctcaagtttttc

SEQ ID NO: 373402 - DNA, 20 bp, Artificial Sequence
  Description of Artificial Sequence: Synthetic oligonucleotide
  Target: LAMA2; (+) strand; PAM type: YTN; PAM sequence: TTA
tctccagctcaagtttttcc

SEQ ID NO: 373403 - DNA, 20 bp, Artificial Sequence
  Description of Artificial Sequence: Synthetic oligonucleotide
  Target: LAMA2; (+) strand; PAM type: YTN; PAM sequence: CTC
cagctcaagtttttccacag

SEQ ID NO: 373404 - DNA, 20 bp, Artificial Sequence
  Description of Artificial Sequence: Synthetic oligonucleotide
  Target: LAMA2; (+) strand; PAM type: YTN; PAM sequence: CTC
aagtttttccacagttgata

SEQ ID NO: 373405 - DNA, 20 bp, Artificial Sequence
  Description of Artificial Sequence: Synthetic oligonucleotide
  Target: LAMA2; (+) strand; PAM type: YTN; PAM sequence: TTT
ttccacagttgataccatat

SEQ ID NO: 373406 - DNA, 20 bp, Artificial Sequence
  Description of Artificial Sequence: Synthetic oligonucleotide
  Target: LAMA2; (+) strand; PAM type: YTN; PAM sequence: TTT
tccacagttgataccatatt

SEQ ID NO: 373407 - DNA, 20 bp, Artificial Sequence
  Description of Artificial Sequence: Synthetic oligonucleotide
  Target: LAMA2; (+) strand; PAM type: YTN; PAM sequence: TTT
ccacagttgataccatattt

SEQ ID NO: 373408 - DNA, 20 bp, Artificial Sequence
  Description of Artificial Sequence: Synthetic oligonucleotide
  Target: LAMA2; (+) strand; PAM type: YTN; PAM sequence: TTC
cacagttgataccatatttt

SEQ ID NO: 373409 - DNA, 20 bp, Artificial Sequence
  Description of Artificial Sequence: Synthetic oligonucleotide
  Target: LAMA2; (+) strand; PAM type: YTN; PAM sequence: TTG
ataccatatttttctagcca

SEQ ID NO: 373410 - DNA, 20 bp, Artificial Sequence
  Description of Artificial Sequence: Synthetic oligonucleotide
  Target: LAMA2; (+) strand; PAM type: YTN; PAM sequence: TTT
ttctagccagaatttagatt

SEQ ID NO: 373411 - DNA, 20 bp, Artificial Sequence
  Description of Artificial Sequence: Synthetic oligonucleotide
  Target: LAMA2; (+) strand; PAM type: YTN; PAM sequence: TTT
tctagccagaatttagatta

SEQ ID NO: 373412 - DNA, 20 bp, Artificial Sequence
  Description of Artificial Sequence: Synthetic oligonucleotide
  Target: LAMA2; (+) strand; PAM type: YTN; PAM sequence: TTT
ctagccagaatttagattag

SEQ ID NO: 373413 - DNA, 20 bp, Artificial Sequence
  Description of Artificial Sequence: Synthetic oligonucleotide
  Target: LAMA2; (+) strand; PAM type: YTN; PAM sequence: TTC
tagccagaatttagattagg

SEQ ID NO: 373414 - DNA, 20 bp, Artificial Sequence
  Description of Artificial Sequence: Synthetic oligonucleotide
  Target: LAMA2; (+) strand; PAM type: YTN; PAM sequence: CTA
gccagaatttagattagggt

SEQ ID NO: 373415 - DNA, 20 bp, Artificial Sequence
  Description of Artificial Sequence: Synthetic oligonucleotide
  Target: LAMA2; (+) strand; PAM type: YTN; PAM sequence: TTT
agattagggttttccaggaa

SEQ ID NO: 373416 - DNA, 20 bp, Artificial Sequence
  Description of Artificial Sequence: Synthetic oligonucleotide
  Target: LAMA2; (+) strand; PAM type: YTN; PAM sequence: TTA
gattagggttttccaggaat

SEQ ID NO: 373417 - DNA, 20 bp, Artificial Sequence
  Description of Artificial Sequence: Synthetic oligonucleotide
  Target: LAMA2; (+) strand; PAM type: YTN; PAM sequence: TTA
gggttttccaggaatattta

SEQ ID NO: 373418 - DNA, 20 bp, Artificial Sequence
  Description of Artificial Sequence: Synthetic oligonucleotide
  Target: LAMA2; (+) strand; PAM type: YTN; PAM sequence: TTT
tccaggaatatttaagattt

SEQ ID NO: 373419 - DNA, 20 bp, Artificial Sequence
  Description of Artificial Sequence: Synthetic oligonucleotide
  Target: LAMA2; (+) strand; PAM type: YTN; PAM sequence: TTT
ccaggaatatttaagattta

SEQ ID NO: 373420 - DNA, 20 bp, Artificial Sequence
  Description of Artificial Sequence: Synthetic oligonucleotide
  Target: LAMA2; (+) strand; PAM type: YTN; PAM sequence: TTC
caggaatatttaagatttat

SEQ ID NO: 373421 - DNA, 20 bp, Artificial Sequence
  Description of Artificial Sequence: Synthetic oligonucleotide
  Target: LAMA2; (+) strand; PAM type: YTN; PAM sequence: TTT
aagatttataatttcattgt

SEQ ID NO: 373422 - DNA, 20 bp, Artificial Sequence
  Description of Artificial Sequence: Synthetic oligonucleotide
  Target: LAMA2; (+) strand; PAM type: YTN; PAM sequence: TTA
agatttataatttcattgta

SEQ ID NO: 373423 - DNA, 20 bp, Artificial Sequence
  Description of Artificial Sequence: Synthetic oligonucleotide
  Target: LAMA2; (+) strand; PAM type: YTN; PAM sequence: TTT
ataatttcattgtatttatg

SEQ ID NO: 373424 - DNA, 20 bp, Artificial Sequence
  Description of Artificial Sequence: Synthetic oligonucleotide
  Target: LAMA2; (+) strand; PAM type: YTN; PAM sequence: TTA
taatttcattgtatttatgt

SEQ ID NO: 373425 - DNA, 20 bp, Artificial Sequence
  Description of Artificial Sequence: Synthetic oligonucleotide
  Target: LAMA2; (+) strand; PAM type: YTN; PAM sequence: TTT
cattgtatttatgtaagcca

SEQ ID NO: 373426 - DNA, 20 bp, Artificial Sequence
  Description of Artificial Sequence: Synthetic oligonucleotide
  Target: LAMA2; (+) strand; PAM type: YTN; PAM sequence: TTC
attgtatttatgtaagccaa

SEQ ID NO: 373427 - DNA, 20 bp, Artificial Sequence
  Description of Artificial Sequence: Synthetic oligonucleotide
  Target: LAMA2; (+) strand; PAM type: YTN; PAM sequence: TTG
tatttatgtaagccaaaaga

SEQ ID NO: 373428 - DNA, 20 bp, Artificial Sequence
  Description of Artificial Sequence: Synthetic oligonucleotide
  Target: LAMA2; (+) strand; PAM type: YTN; PAM sequence: TTT
atgtaagccaaaagaacacc

SEQ ID NO: 373429 - DNA, 20 bp, Artificial Sequence
  Description of Artificial Sequence: Synthetic oligonucleotide
  Target: LAMA2; (+) strand; PAM type: YTN; PAM sequence: TTA
tgtaagccaaaagaacacct

SEQ ID NO: 373430 - DNA, 20 bp, Artificial Sequence
  Description of Artificial Sequence: Synthetic oligonucleotide
  Target: LAMA2; (+) strand; PAM type: YTN; PAM sequence: CTT
agatagatctaaaatatgag

SEQ ID NO: 373431 - DNA, 20 bp, Artificial Sequence
  Description of Artificial Sequence: Synthetic oligonucleotide
  Target: LAMA2; (+) strand; PAM type: YTN; PAM sequence: TTA
gatagatctaaaatatgagg

SEQ ID NO: 373432 - DNA, 20 bp, Artificial Sequence
  Description of Artificial Sequence: Synthetic oligonucleotide
  Target: LAMA2; (+) strand; PAM type: YTN; PAM sequence: CTA
aaatatgagggaaacatttt

SEQ ID NO: 373433 - DNA, 20 bp, Artificial Sequence
  Description of Artificial Sequence: Synthetic oligonucleotide
  Target: LAMA2; (+) strand; PAM type: YTN; PAM sequence: TTT
tttgtttgagatgtgcctgt

SEQ ID NO: 373434 - DNA, 20 bp, Artificial Sequence
  Description of Artificial Sequence: Synthetic oligonucleotide
  Target: LAMA2; (+) strand; PAM type: YTN; PAM sequence: TTT
ttgtttgagatgtgcctgtt

SEQ ID NO: 373435 - DNA, 20 bp, Artificial Sequence
  Description of Artificial Sequence: Synthetic oligonucleotide
  Target: LAMA2; (+) strand; PAM type: YTN; PAM sequence: TTT
tgtttgagatgtgcctgttg

SEQ ID NO: 373436 - DNA, 20 bp, Artificial Sequence
  Description of Artificial Sequence: Synthetic oligonucleotide
  Target: LAMA2; (+) strand; PAM type: YTN; PAM sequence: TTT
gtttgagatgtgcctgttga

SEQ ID NO: 373437 - DNA, 20 bp, Artificial Sequence
  Description of Artificial Sequence: Synthetic oligonucleotide
  Target: LAMA2; (+) strand; PAM type: YTN; PAM sequence: TTG
tttgagatgtgcctgttgaa

SEQ ID NO: 373438 - DNA, 20 bp, Artificial Sequence
  Description of Artificial Sequence: Synthetic oligonucleotide
  Target: LAMA2; (+) strand; PAM type: YTN; PAM sequence: TTT
gagatgtgcctgttgaagta

SEQ ID NO: 373439 - DNA, 20 bp, Artificial Sequence
  Description of Artificial Sequence: Synthetic oligonucleotide
  Target: LAMA2; (+) strand; PAM type: YTN; PAM sequence: TTG
agatgtgcctgttgaagtag

SEQ ID NO: 373440 - DNA, 20 bp, Artificial Sequence
  Description of Artificial Sequence: Synthetic oligonucleotide
  Target: LAMA2; (+) strand; PAM type: YTN; PAM sequence: CTG
ttgaagtagaagagagggaa

SEQ ID NO: 373441 - DNA, 20 bp, Artificial Sequence
  Description of Artificial Sequence: Synthetic oligonucleotide
  Target: LAMA2; (+) strand; PAM type: YTN; PAM sequence: TTG
aagtagaagagagggaagat

SEQ ID NO: 373442 - DNA, 20 bp, Artificial Sequence
  Description of Artificial Sequence: Synthetic oligonucleotide
  Target: LAMA2; (+) strand; PAM type: YTN; PAM sequence: CTG
gttgcattaaaaatcttgta

SEQ ID NO: 373443 - DNA, 20 bp, Artificial Sequence
  Description of Artificial Sequence: Synthetic oligonucleotide
  Target: LAMA2; (+) strand; PAM type: YTN; PAM sequence: TTG
cattaaaaatcttgtaatca

SEQ ID NO: 373444 - DNA, 20 bp, Artificial Sequence
  Description of Artificial Sequence: Synthetic oligonucleotide
  Target: LAMA2; (+) strand; PAM type: YTN; PAM sequence: TTA
aaaatcttgtaatcaaaacc

SEQ ID NO: 373445 - DNA, 20 bp, Artificial Sequence
  Description of Artificial Sequence: Synthetic oligonucleotide
  Target: LAMA2; (+) strand; PAM type: YTN; PAM sequence: CTT
gtaatcaaaaccattctgta

SEQ ID NO: 373446 - DNA, 20 bp, Artificial Sequence
  Description of Artificial Sequence: Synthetic oligonucleotide
  Target: LAMA2; (+) strand; PAM type: YTN; PAM sequence: TTG
taatcaaaaccattctgtaa

SEQ ID NO: 373447 - DNA, 20 bp, Artificial Sequence
  Description of Artificial Sequence: Synthetic oligonucleotide
  Target: LAMA2; (+) strand; PAM type: YTN; PAM sequence: TTC
tgtaagtgatttgtgtgatc

SEQ ID NO: 373448 - DNA, 20 bp, Artificial Sequence
  Description of Artificial Sequence: Synthetic oligonucleotide
  Target: LAMA2; (+) strand; PAM type: YTN; PAM sequence: CTG
taagtgatttgtgtgatcag

SEQ ID NO: 373449 - DNA, 20 bp, Artificial Sequence
  Description of Artificial Sequence: Synthetic oligonucleotide
  Target: LAMA2; (+) strand; PAM type: YTN; PAM sequence: TTT
gtgtgatcagcttatgcaca

SEQ ID NO: 373450 - DNA, 20 bp, Artificial Sequence
  Description of Artificial Sequence: Synthetic oligonucleotide
  Target: LAMA2; (+) strand; PAM type: YTN; PAM sequence: TTG
tgtgatcagcttatgcacat

SEQ ID NO: 373451 - DNA, 20 bp, Artificial Sequence
  Description of Artificial Sequence: Synthetic oligonucleotide
  Target: LAMA2; (+) strand; PAM type: YTN; PAM sequence: CTT
atgcacatcatctaaataag

SEQ ID NO: 373452 - DNA, 20 bp, Artificial Sequence
  Description of Artificial Sequence: Synthetic oligonucleotide
  Target: LAMA2; (+) strand; PAM type: YTN; PAM sequence: TTA
tgcacatcatctaaataaga

SEQ ID NO: 373453 - DNA, 20 bp, Artificial Sequence
  Description of Artificial Sequence: Synthetic oligonucleotide
  Target: LAMA2; (+) strand; PAM type: YTN; PAM sequence: CTA
aataagaccagaatttaaaa

SEQ ID NO: 373454 - DNA, 20 bp, Artificial Sequence
  Description of Artificial Sequence: Synthetic oligonucleotide
  Target: LAMA2; (+) strand; PAM type: YTN; PAM sequence: TTT
aaaaactaaatcaacatttc

SEQ ID NO: 373455 - DNA, 20 bp, Artificial Sequence
  Description of Artificial Sequence: Synthetic oligonucleotide
  Target: LAMA2; (+) strand; PAM type: YTN; PAM sequence: TTA
aaaactaaatcaacatttcc

SEQ ID NO: 373456 - DNA, 20 bp, Artificial Sequence
  Description of Artificial Sequence: Synthetic oligonucleotide
  Target: LAMA2; (+) strand; PAM type: YTN; PAM sequence: CTA
aatcaacatttcccaaattg

SEQ ID NO: 373457 - DNA, 20 bp, Artificial Sequence
  Description of Artificial Sequence: Synthetic oligonucleotide
  Target: LAMA2; (+) strand; PAM type: YTN; PAM sequence: TTT
cccaaattgtagatgttcct

SEQ ID NO: 373458 - DNA, 20 bp, Artificial Sequence
  Description of Artificial Sequence: Synthetic oligonucleotide
  Target: LAMA2; (+) strand; PAM type: YTN; PAM sequence: TTC
ccaaattgtagatgttcctg

SEQ ID NO: 373459 - DNA, 20 bp, Artificial Sequence
  Description of Artificial Sequence: Synthetic oligonucleotide
  Target: LAMA2; (+) strand; PAM type: YTN; PAM sequence: TTG
tagatgttcctggaataaag

SEQ ID NO: 373460 - DNA, 20 bp, Artificial Sequence
  Description of Artificial Sequence: Synthetic oligonucleotide
  Target: LAMA2; (+) strand; PAM type: YTN; PAM sequence: TTC
ctggaataaagaattctgtg

SEQ ID NO: 373461 - DNA, 20 bp, Artificial Sequence
  Description of Artificial Sequence: Synthetic oligonucleotide
  Target: LAMA2; (+) strand; PAM type: YTN; PAM sequence: CTG
gaataaagaattctgtgatc

SEQ ID NO: 373462 - DNA, 20 bp, Artificial Sequence
  Description of Artificial Sequence: Synthetic oligonucleotide
  Target: LAMA2; (+) strand; PAM type: YTN; PAM sequence: TTC
tgtgatcacatgagtttggg

SEQ ID NO: 373463 - DNA, 20 bp, Artificial Sequence
  Description of Artificial Sequence: Synthetic oligonucleotide
  Target: LAMA2; (+) strand; PAM type: YTN; PAM sequence: CTG
tgatcacatgagtttgggaa

SEQ ID NO: 373464 - DNA, 20 bp, Artificial Sequence
  Description of Artificial Sequence: Synthetic oligonucleotide
  Target: LAMA2; (+) strand; PAM type: YTN; PAM sequence: TTT
gggaagcatccatttgcatg

SEQ ID NO: 373465 - DNA, 20 bp, Artificial Sequence
  Description of Artificial Sequence: Synthetic oligonucleotide
  Target: LAMA2; (+) strand; PAM type: YTN; PAM sequence: TTG
ggaagcatccatttgcatgt

SEQ ID NO: 373466 - DNA, 20 bp, Artificial Sequence
  Description of Artificial Sequence: Synthetic oligonucleotide
  Target: LAMA2; (+) strand; PAM type: YTN; PAM sequence: TTT
gcatgttaaaagttctggca

SEQ ID NO: 373467 - DNA, 20 bp, Artificial Sequence
  Description of Artificial Sequence: Synthetic oligonucleotide
  Target: LAMA2; (+) strand; PAM type: YTN; PAM sequence: TTG
catgttaaaagttctggcat

SEQ ID NO: 373468 - DNA, 20 bp, Artificial Sequence
  Description of Artificial Sequence: Synthetic oligonucleotide
  Target: LAMA2; (+) strand; PAM type: YTN; PAM sequence: TTA
aaagttctggcatgtcctac

SEQ ID NO: 373469 - DNA, 20 bp, Artificial Sequence
  Description of Artificial Sequence: Synthetic oligonucleotide
  Target: LAMA2; (+) strand; PAM type: YTN; PAM sequence: TTC
tggcatgtcctacagtgtgt

SEQ ID NO: 373470 - DNA, 20 bp, Artificial Sequence
  Description of Artificial Sequence: Synthetic oligonucleotide
  Target: LAMA2; (+) strand; PAM type: YTN; PAM sequence: CTG
gcatgtcctacagtgtgtaa

SEQ ID NO: 373471 - DNA, 20 bp, Artificial Sequence
  Description of Artificial Sequence: Synthetic oligonucleotide
  Target: LAMA2; (+) strand; PAM type: YTN; PAM sequence: CTA
cagtgtgtaattaagaaatc

SEQ ID NO: 373472 - DNA, 20 bp, Artificial Sequence
  Description of Artificial Sequence: Synthetic oligonucleotide
  Target: LAMA2; (+) strand; PAM type: YTN; PAM sequence: TTA
agaaatctgttcaatttgtt

SEQ ID NO: 373473 - DNA, 20 bp, Artificial Sequence
  Description of Artificial Sequence: Synthetic oligonucleotide
  Target: LAMA2; (+) strand; PAM type: YTN; PAM sequence: CTG
ttcaatttgtttagctcagc

SEQ ID NO: 373474 - DNA, 20 bp, Artificial Sequence
  Description of Artificial Sequence: Synthetic oligonucleotide
  Target: LAMA2; (+) strand; PAM type: YTN; PAM sequence: TTC
aatttgtttagctcagcatt

SEQ ID NO: 373475 - DNA, 20 bp, Artificial Sequence
  Description of Artificial Sequence: Synthetic oligonucleotide
  Target: LAMA2; (+) strand; PAM type: YTN; PAM sequence: TTT
gtttagctcagcatttccta

SEQ ID NO: 373476 - DNA, 20 bp, Artificial Sequence
  Description of Artificial Sequence: Synthetic oligonucleotide
  Target: LAMA2; (+) strand; PAM type: YTN; PAM sequence: TTG
tttagctcagcatttcctaa

SEQ ID NO: 373477 - DNA, 20 bp, Artificial Sequence
  Description of Artificial Sequence: Synthetic oligonucleotide
  Target: LAMA2; (+) strand; PAM type: YTN; PAM sequence: TTT
agctcagcatttcctaaact

SEQ ID NO: 373478 - DNA, 20 bp, Artificial Sequence
  Description of Artificial Sequence: Synthetic oligonucleotide
  Target: LAMA2; (+) strand; PAM type: YTN; PAM sequence: TTA
gctcagcatttcctaaactt

SEQ ID NO: 373479 - DNA, 20 bp, Artificial Sequence
  Description of Artificial Sequence: Synthetic oligonucleotide
  Target: LAMA2; (+) strand; PAM type: YTN; PAM sequence: CTC
agcatttcctaaacttatgt

SEQ ID NO: 373480 - DNA, 20 bp, Artificial Sequence
  Description of Artificial Sequence: Synthetic oligonucleotide
  Target: LAMA2; (+) strand; PAM type: YTN; PAM sequence: TTT
cctaaacttatgtggccata

SEQ ID NO: 373481 - DNA, 20 bp, Artificial Sequence
  Description of Artificial Sequence: Synthetic oligonucleotide
  Target: LAMA2; (+) strand; PAM type: YTN; PAM sequence: TTC
ctaaacttatgtggccataa

SEQ ID NO: 373482 - DNA, 20 bp, Artificial Sequence
  Description of Artificial Sequence: Synthetic oligonucleotide
  Target: LAMA2; (+) strand; PAM type: YTN; PAM sequence: CTA
aacttatgtggccataaacc

SEQ ID NO: 373483 - DNA, 20 bp, Artificial Sequence
  Description of Artificial Sequence: Synthetic oligonucleotide
  Target: LAMA2; (+) strand; PAM type: YTN; PAM sequence: CTT
atgtggccataaaccctctg

SEQ ID NO: 373484 - DNA, 20 bp, Artificial Sequence
  Description of Artificial Sequence: Synthetic oligonucleotide
  Target: LAMA2; (+) strand; PAM type: YTN; PAM sequence: TTA
tgtggccataaaccctctgc

SEQ ID NO: 373485 - DNA, 20 bp, Artificial Sequence
  Description of Artificial Sequence: Synthetic oligonucleotide
  Target: LAMA2; (+) strand; PAM type: YTN; PAM sequence: CTC
tgctttaactatatagcaag

SEQ ID NO: 373486 - DNA, 20 bp, Artificial Sequence
  Description of Artificial Sequence: Synthetic oligonucleotide
  Target: LAMA2; (+) strand; PAM type: YTN; PAM sequence: CTG
ctttaactatatagcaagaa

SEQ ID NO: 373487 - DNA, 20 bp, Artificial Sequence
  Description of Artificial Sequence: Synthetic oligonucleotide
  Target: LAMA2; (+) strand; PAM type: YTN; PAM sequence: CTT
taactatatagcaagaatat

SEQ ID NO: 373488 - DNA, 20 bp, Artificial Sequence
  Description of Artificial Sequence: Synthetic oligonucleotide
  Target: LAMA2; (+) strand; PAM type: YTN; PAM sequence: TTT
aactatatagcaagaatata

SEQ ID NO: 373489 - DNA, 20 bp, Artificial Sequence
  Description of Artificial Sequence: Synthetic oligonucleotide
  Target: LAMA2; (+) strand; PAM type: YTN; PAM sequence: TTA
actatatagcaagaatatat

SEQ ID NO: 373490 - DNA, 20 bp, Artificial Sequence
  Description of Artificial Sequence: Synthetic oligonucleotide
  Target: LAMA2; (+) strand; PAM type: YTN; PAM sequence: CTA
tatagcaagaatatatctca

SEQ ID NO: 373491 - DNA, 20 bp, Artificial Sequence
  Description of Artificial Sequence: Synthetic oligonucleotide
  Target: LAMA2; (+) strand; PAM type: YTN; PAM sequence: CTC
agactacagctcaggtggga

SEQ ID NO: 373492 - DNA, 20 bp, Artificial Sequence
  Description of Artificial Sequence: Synthetic oligonucleotide
  Target: LAMA2; (+) strand; PAM type: YTN; PAM sequence: CTA
cagctcaggtgggacaagag

SEQ ID NO: 373493 - DNA, 20 bp, Artificial Sequence
  Description of Artificial Sequence: Synthetic oligonucleotide
  Target: LAMA2; (+) strand; PAM type: YTN; PAM sequence: CTC
aggtgggacaagagttataa

SEQ ID NO: 373494 - DNA, 20 bp, Artificial Sequence
  Description of Artificial Sequence: Synthetic oligonucleotide
  Target: LAMA2; (+) strand; PAM type: YTN; PAM sequence: TTA
taactttatagtctttatca

SEQ ID NO: 373495 - DNA, 20 bp, Artificial Sequence
  Description of Artificial Sequence: Synthetic oligonucleotide
  Target: LAMA2; (+) strand; PAM type: YTN; PAM sequence: CTT
tatagtctttatcacaattt

SEQ ID NO: 373496 - DNA, 20 bp, Artificial Sequence
  Description of Artificial Sequence: Synthetic oligonucleotide
  Target: LAMA2; (+) strand; PAM type: YTN; PAM sequence: TTT
atagtctttatcacaattta

SEQ ID NO: 373497 - DNA, 20 bp, Artificial Sequence
  Description of Artificial Sequence: Synthetic oligonucleotide
  Target: LAMA2; (+) strand; PAM type: YTN; PAM sequence: TTA
tagtctttatcacaatttaa

SEQ ID NO: 373498 - DNA, 20 bp, Artificial Sequence
  Description of Artificial Sequence: Synthetic oligonucleotide
  Target: LAMA2; (+) strand; PAM type: YTN; PAM sequence: CTT
tatcacaatttaatttctat

SEQ ID NO: 373499 - DNA, 20 bp, Artificial Sequence
  Description of Artificial Sequence: Synthetic oligonucleotide
  Target: LAMA2; (+) strand; PAM type: YTN; PAM sequence: TTT
atcacaatttaatttctatt

SEQ ID NO: 373500 - DNA, 20 bp, Artificial Sequence
  Description of Artificial Sequence: Synthetic oligonucleotide
  Target: LAMA2; (+) strand; PAM type: YTN; PAM sequence: TTA
tcacaatttaatttctattt

SEQ ID NO: 373501 - DNA, 20 bp, Artificial Sequence
  Description of Artificial Sequence: Synthetic oligonucleotide
  Target: LAMA2; (+) strand; PAM type: YTN; PAM sequence: TTT
aatttctattttgagacccc

SEQ ID NO: 373502 - DNA, 20 bp, Artificial Sequence
  Description of Artificial Sequence: Synthetic oligonucleotide
  Target: LAMA2; (+) strand; PAM type: YTN; PAM sequence: TTA
atttctattttgagacccct

SEQ ID NO: 373503 - DNA, 20 bp, Artificial Sequence
  Description of Artificial Sequence: Synthetic oligonucleotide
  Target: LAMA2; (+) strand; PAM type: YTN; PAM sequence: TTT
ctattttgagacccctttct

SEQ ID NO: 373504 - DNA, 20 bp, Artificial Sequence
  Description of Artificial Sequence: Synthetic oligonucleotide
  Target: LAMA2; (+) strand; PAM type: YTN; PAM sequence: TTC
tattttgagacccctttctc

SEQ ID NO: 373505 - DNA, 20 bp, Artificial Sequence
  Description of Artificial Sequence: Synthetic oligonucleotide
  Target: LAMA2; (+) strand; PAM type: YTN; PAM sequence: CTA
ttttgagacccctttctcta

SEQ ID NO: 373506 - DNA, 20 bp, Artificial Sequence
  Description of Artificial Sequence: Synthetic oligonucleotide
  Target: LAMA2; (+) strand; PAM type: YTN; PAM sequence: TTT
tgagacccctttctctatat

SEQ ID NO: 373507 - DNA, 20 bp, Artificial Sequence
  Description of Artificial Sequence: Synthetic oligonucleotide
  Target: LAMA2; (+) strand; PAM type: YTN; PAM sequence: TTT
gagacccctttctctatatg

SEQ ID NO: 373508 - DNA, 20 bp, Artificial Sequence
  Description of Artificial Sequence: Synthetic oligonucleotide
  Target: LAMA2; (+) strand; PAM type: YTN; PAM sequence: TTG
agacccctttctctatatgt

SEQ ID NO: 373509 - DNA, 20 bp, Artificial Sequence
  Description of Artificial Sequence: Synthetic oligonucleotide
  Target: LAMA2; (+) strand; PAM type: YTN; PAM sequence: CTT
tctctatatgtgggaactgt

SEQ ID NO: 373510 - DNA, 20 bp, Artificial Sequence
  Description of Artificial Sequence: Synthetic oligonucleotide
  Target: LAMA2; (+) strand; PAM type: YTN; PAM sequence: TTT
ctctatatgtgggaactgtg

SEQ ID NO: 373511 - DNA, 20 bp, Artificial Sequence
  Description of Artificial Sequence: Synthetic oligonucleotide
  Target: LAMA2; (+) strand; PAM type: YTN; PAM sequence: TTC
tctatatgtgggaactgtga

SEQ ID NO: 373512 - DNA, 20 bp, Artificial Sequence
  Description of Artificial Sequence: Synthetic oligonucleotide
  Target: LAMA2; (+) strand; PAM type: YTN; PAM sequence: CTC
tatatgtgggaactgtgagg

SEQ ID NO: 373513 - DNA, 20 bp, Artificial Sequence
  Description of Artificial Sequence: Synthetic oligonucleotide
  Target: LAMA2; (+) strand; PAM type: YTN; PAM sequence: CTA
tatgtgggaactgtgaggtc

SEQ ID NO: 373514 - DNA, 20 bp, Artificial Sequence
  Description of Artificial Sequence: Synthetic oligonucleotide
  Target: LAMA2; (+) strand; PAM type: YTN; PAM sequence: CTG
tgaggtcttagaaacataat

SEQ ID NO: 373515 - DNA, 20 bp, Artificial Sequence
  Description of Artificial Sequence: Synthetic oligonucleotide
  Target: LAMA2; (+) strand; PAM type: YTN; PAM sequence: CTT
agaaacataatctgagccca

SEQ ID NO: 373516 - DNA, 20 bp, Artificial Sequence
  Description of Artificial Sequence: Synthetic oligonucleotide
  Target: LAMA2; (+) strand; PAM type: YTN; PAM sequence: TTA
gaaacataatctgagcccat

SEQ ID NO: 373517 - DNA, 20 bp, Artificial Sequence
  Description of Artificial Sequence: Synthetic oligonucleotide
  Target: LAMA2; (+) strand; PAM type: YTN; PAM sequence: CTG
agcccatttcaagttgtttt

SEQ ID NO: 373518 - DNA, 20 bp, Artificial Sequence
  Description of Artificial Sequence: Synthetic oligonucleotide
  Target: LAMA2; (+) strand; PAM type: YTN; PAM sequence: TTT
caagttgttttcttctcctc

SEQ ID NO: 373519 - DNA, 20 bp, Artificial Sequence
  Description of Artificial Sequence: Synthetic oligonucleotide
  Target: LAMA2; (+) strand; PAM type: YTN; PAM sequence: TTC
aagttgttttcttctcctct

SEQ ID NO: 373520 - DNA, 20 bp, Artificial Sequence
  Description of Artificial Sequence: Synthetic oligonucleotide
  Target: LAMA2; (+) strand; PAM type: YTN; PAM sequence: TTG
ttttcttctcctctctccca

SEQ ID NO: 373521 - DNA, 20 bp, Artificial Sequence
  Description of Artificial Sequence: Synthetic oligonucleotide
  Target: LAMA2; (+) strand; PAM type: YTN; PAM sequence: TTT
tcttctcctctctcccagct

SEQ ID NO: 373522 - DNA, 20 bp, Artificial Sequence
  Description of Artificial Sequence: Synthetic oligonucleotide
  Target: LAMA2; (+) strand; PAM type: YTN; PAM sequence: TTT
cttctcctctctcccagcta

SEQ ID NO: 373523 - DNA, 20 bp, Artificial Sequence
  Description of Artificial Sequence: Synthetic oligonucleotide
  Target: LAMA2; (+) strand; PAM type: YTN; PAM sequence: TTC
ttctcctctctcccagctag

SEQ ID NO: 373524 - DNA, 20 bp, Artificial Sequence
  Description of Artificial Sequence: Synthetic oligonucleotide
  Target: LAMA2; (+) strand; PAM type: YTN; PAM sequence: CTT
ctcctctctcccagctagaa

SEQ ID NO: 373525 - DNA, 20 bp, Artificial Sequence
  Description of Artificial Sequence: Synthetic oligonucleotide
  Target: LAMA2; (+) strand; PAM type: YTN; PAM sequence: TTC
tcctctctcccagctagaat

SEQ ID NO: 373526 - DNA, 20 bp, Artificial Sequence
  Description of Artificial Sequence: Synthetic oligonucleotide
  Target: LAMA2; (+) strand; PAM type: YTN; PAM sequence: CTC
ctctctcccagctagaatca

SEQ ID NO: 373527 - DNA, 20 bp, Artificial Sequence
  Description of Artificial Sequence: Synthetic oligonucleotide
  Target: LAMA2; (+) strand; PAM type: YTN; PAM sequence: CTC
tctcccagctagaatcaaag

SEQ ID NO: 373528 - DNA, 20 bp, Artificial Sequence
  Description of Artificial Sequence: Synthetic oligonucleotide
  Target: LAMA2; (+) strand; PAM type: YTN; PAM sequence: CTC
tcccagctagaatcaaagtt

SEQ ID NO: 373529 - DNA, 20 bp, Artificial Sequence
  Description of Artificial Sequence: Synthetic oligonucleotide
  Target: LAMA2; (+) strand; PAM type: YTN; PAM sequence: CTC
ccagctagaatcaaagttct

SEQ ID NO: 373530 - DNA, 20 bp, Artificial Sequence
  Description of Artificial Sequence: Synthetic oligonucleotide
  Target: LAMA2; (+) strand; PAM type: YTN; PAM sequence: CTA
gaatcaaagttctattaagc

SEQ ID NO: 373531 - DNA, 20 bp, Artificial Sequence
  Description of Artificial Sequence: Synthetic oligonucleotide
  Target: LAMA2; (+) strand; PAM type: YTN; PAM sequence: TTC
tattaagcttacctagtacc

SEQ ID NO: 373532 - DNA, 20 bp, Artificial Sequence
  Description of Artificial Sequence: Synthetic oligonucleotide
  Target: LAMA2; (+) strand; PAM type: YTN; PAM sequence: CTA
ttaagcttacctagtaccaa

SEQ ID NO: 373533 - DNA, 20 bp, Artificial Sequence
  Description of Artificial Sequence: Synthetic oligonucleotide
  Target: LAMA2; (+) strand; PAM type: YTN; PAM sequence: TTA
agcttacctagtaccaaagg

SEQ ID NO: 373534 - DNA, 20 bp, Artificial Sequence
  Description of Artificial Sequence: Synthetic oligonucleotide
  Target: LAMA2; (+) strand; PAM type: YTN; PAM sequence: CTT
acctagtaccaaaggcctta

SEQ ID NO: 373535 - DNA, 20 bp, Artificial Sequence
  Description of Artificial Sequence: Synthetic oligonucleotide
  Target: LAMA2; (+) strand; PAM type: YTN; PAM sequence: TTA
cctagtaccaaaggccttat

SEQ ID NO: 373536 - DNA, 20 bp, Artificial Sequence
  Description of Artificial Sequence: Synthetic oligonucleotide
  Target: LAMA2; (+) strand; PAM type: YTN; PAM sequence: CTA
gtaccaaaggccttatatgc

SEQ ID NO: 373537 - DNA, 20 bp, Artificial Sequence
  Description of Artificial Sequence: Synthetic oligonucleotide
  Target: LAMA2; (+) strand; PAM type: YTN; PAM sequence: CTT
atatgcaagggtagagggga

SEQ ID NO: 373538 - DNA, 20 bp, Artificial Sequence
  Description of Artificial Sequence: Synthetic oligonucleotide
  Target: LAMA2; (+) strand; PAM type: YTN; PAM sequence: TTA
tatgcaagggtagaggggag

SEQ ID NO: 373539 - DNA, 20 bp, Artificial Sequence
  Description of Artificial Sequence: Synthetic oligonucleotide
  Target: LAMA2; (+) strand; PAM type: YTN; PAM sequence: CTG
tgtgtatatgttgagcaagg

SEQ ID NO: 373540 - DNA, 20 bp, Artificial Sequence
  Description of Artificial Sequence: Synthetic oligonucleotide
  Target: LAMA2; (+) strand; PAM type: YTN; PAM sequence: TTG
agcaaggggacatgtgatag

SEQ ID NO: 373541 - DNA, 20 bp, Artificial Sequence
  Description of Artificial Sequence: Synthetic oligonucleotide
  Target: LAMA2; (+) strand; PAM type: YTN; PAM sequence: CTG
agtatttcacccaagcatgt

SEQ ID NO: 373542 - DNA, 20 bp, Artificial Sequence
  Description of Artificial Sequence: Synthetic oligonucleotide
  Target: LAMA2; (+) strand; PAM type: YTN; PAM sequence: TTT
cacccaagcatgtttctgct

SEQ ID NO: 373543 - DNA, 20 bp, Artificial Sequence
  Description of Artificial Sequence: Synthetic oligonucleotide
  Target: LAMA2; (+) strand; PAM type: YTN; PAM sequence: TTC
acccaagcatgtttctgctg

SEQ ID NO: 373544 - DNA, 20 bp, Artificial Sequence
  Description of Artificial Sequence: Synthetic oligonucleotide
  Target: LAMA2; (+) strand; PAM type: YTN; PAM sequence: TTT
ctgctgacctatcccttttt

SEQ ID NO: 373545 - DNA, 20 bp, Artificial Sequence
  Description of Artificial Sequence: Synthetic oligonucleotide
  Target: LAMA2; (+) strand; PAM type: YTN; PAM sequence: TTC
tgctgacctatccctttttc

SEQ ID NO: 373546 - DNA, 20 bp, Artificial Sequence
  Description of Artificial Sequence: Synthetic oligonucleotide
  Target: LAMA2; (+) strand; PAM type: YTN; PAM sequence: CTG
ctgacctatccctttttctc

SEQ ID NO: 373547 - DNA, 20 bp, Artificial Sequence
  Description of Artificial Sequence: Synthetic oligonucleotide
  Target: LAMA2; (+) strand; PAM type: YTN; PAM sequence: CTG
acctatccctttttctccgt

SEQ ID NO: 373548 - DNA, 20 bp, Artificial Sequence
  Description of Artificial Sequence: Synthetic oligonucleotide
  Target: LAMA2; (+) strand; PAM type: YTN; PAM sequence: CTA
tccctttttctccgtcctcc

SEQ ID NO: 373549 - DNA, 20 bp, Artificial Sequence
  Description of Artificial Sequence: Synthetic oligonucleotide
  Target: LAMA2; (+) strand; PAM type: YTN; PAM sequence: CTT
tttctccgtcctcctaatta

SEQ ID NO: 373550 - DNA, 20 bp, Artificial Sequence
  Description of Artificial Sequence: Synthetic oligonucleotide
  Target: LAMA2; (+) strand; PAM type: YTN; PAM sequence: TTT
ttctccgtcctcctaattac

SEQ ID NO: 373551 - DNA, 20 bp, Artificial Sequence
  Description of Artificial Sequence: Synthetic oligonucleotide
  Target: LAMA2; (+) strand; PAM type: YTN; PAM sequence: TTT
tctccgtcctcctaattacc

SEQ ID NO: 373552 - DNA, 20 bp, Artificial Sequence
  Description of Artificial Sequence: Synthetic oligonucleotide
  Target: LAMA2; (+) strand; PAM type: YTN; PAM sequence: TTT
ctccgtcctcctaattacct

SEQ ID NO: 373553 - DNA, 20 bp, Artificial Sequence
  Description of Artificial Sequence: Synthetic oligonucleotide
  Target: LAMA2; (+) strand; PAM type: YTN; PAM sequence: TTC
tccgtcctcctaattacctt

SEQ ID NO: 373554 - DNA, 20 bp, Artificial Sequence
  Description of Artificial Sequence: Synthetic oligonucleotide
  Target: LAMA2; (+) strand; PAM type: YTN; PAM sequence: CTC
cgtcctcctaattacctttc

SEQ ID NO: 373555 - DNA, 20 bp, Artificial Sequence
  Description of Artificial Sequence: Synthetic oligonucleotide
  Target: LAMA2; (+) strand; PAM type: YTN; PAM sequence: CTC
ctaattacctttcctttcag

SEQ ID NO: 373556 - DNA, 20 bp, Artificial Sequence
  Description of Artificial Sequence: Synthetic oligonucleotide
  Target: LAMA2; (+) strand; PAM type: YTN; PAM sequence: CTA
attacctttcctttcaggtc

SEQ ID NO: 373557 - DNA, 20 bp, Artificial Sequence
  Description of Artificial Sequence: Synthetic oligonucleotide
  Target: LAMA2; (+) strand; PAM type: YTN; PAM sequence: TTA
cctttcctttcaggtctaga

SEQ ID NO: 373558 - DNA, 20 bp, Artificial Sequence
  Description of Artificial Sequence: Synthetic oligonucleotide
  Target: LAMA2; (+) strand; PAM type: YTN; PAM sequence: CTT
tcctttcaggtctagaaagt

SEQ ID NO: 373559 - DNA, 20 bp, Artificial Sequence
  Description of Artificial Sequence: Synthetic oligonucleotide
  Target: LAMA2; (+) strand; PAM type: YTN; PAM sequence: TTT
cctttcaggtctagaaagtc

SEQ ID NO: 373560 - DNA, 20 bp, Artificial Sequence
  Description of Artificial Sequence: Synthetic oligonucleotide
  Target: LAMA2; (+) strand; PAM type: YTN; PAM sequence: TTC
ctttcaggtctagaaagtct

SEQ ID NO: 373561 - DNA, 20 bp, Artificial Sequence
  Description of Artificial Sequence: Synthetic oligonucleotide
  Target: LAMA2; (+) strand; PAM type: YTN; PAM sequence: CTT
tcaggtctagaaagtctctc

SEQ ID NO: 373562 - DNA, 20 bp, Artificial Sequence
  Description of Artificial Sequence: Synthetic oligonucleotide
  Target: LAMA2; (+) strand; PAM type: YTN; PAM sequence: TTT
caggtctagaaagtctctca

SEQ ID NO: 373563 - DNA, 20 bp, Artificial Sequence
  Description of Artificial Sequence: Synthetic oligonucleotide
  Target: LAMA2; (+) strand; PAM type: YTN; PAM sequence: TTC
aggtctagaaagtctctcaa

SEQ ID NO: 373564 - DNA, 20 bp, Artificial Sequence
  Description of Artificial Sequence: Synthetic oligonucleotide
  Target: LAMA2; (+) strand; PAM type: YTN; PAM sequence: CTA
gaaagtctctcaactacttt

SEQ ID NO: 373565 - DNA, 20 bp, Artificial Sequence
  Description of Artificial Sequence: Synthetic oligonucleotide
  Target: LAMA2; (+) strand; PAM type: YTN; PAM sequence: CTC
tcaactactttcattccatt

SEQ ID NO: 373566 - DNA, 20 bp, Artificial Sequence
  Description of Artificial Sequence: Synthetic oligonucleotide
  Target: LAMA2; (+) strand; PAM type: YTN; PAM sequence: CTC
aactactttcattccattct

SEQ ID NO: 373567 - DNA, 20 bp, Artificial Sequence
  Description of Artificial Sequence: Synthetic oligonucleotide
  Target: LAMA2; (+) strand; PAM type: YTN; PAM sequence: CTA
ctttcattccattcttagag

SEQ ID NO: 373568 - DNA, 20 bp, Artificial Sequence
  Description of Artificial Sequence: Synthetic oligonucleotide
  Target: LAMA2; (+) strand; PAM type: YTN; PAM sequence: CTT
tcattccattcttagaggca

SEQ ID NO: 373569 - DNA, 20 bp, Artificial Sequence
  Description of Artificial Sequence: Synthetic oligonucleotide
  Target: LAMA2; (+) strand; PAM type: YTN; PAM sequence: TTT
cattccattcttagaggcac

SEQ ID NO: 373570 - DNA, 20 bp, Artificial Sequence
  Description of Artificial Sequence: Synthetic oligonucleotide
  Target: LAMA2; (+) strand; PAM type: YTN; PAM sequence: TTC
attccattcttagaggcaca

SEQ ID NO: 373571 - DNA, 20 bp, Artificial Sequence
  Description of Artificial Sequence: Synthetic oligonucleotide
  Target: LAMA2; (+) strand; PAM type: YTN; PAM sequence: TTC
cattcttagaggcacaggaa

SEQ ID NO: 373572 - DNA, 20 bp, Artificial Sequence
  Description of Artificial Sequence: Synthetic oligonucleotide
  Target: LAMA2; (+) strand; PAM type: YTN; PAM sequence: TTC
ttagaggcacaggaatcatt

SEQ ID NO: 373573 - DNA, 20 bp, Artificial Sequence
  Description of Artificial Sequence: Synthetic oligonucleotide
  Target: LAMA2; (+) strand; PAM type: YTN; PAM sequence: CTT
agaggcacaggaatcattca

SEQ ID NO: 373574 - DNA, 20 bp, Artificial Sequence
  Description of Artificial Sequence: Synthetic oligonucleotide
  Target: LAMA2; (+) strand; PAM type: YTN; PAM sequence: TTA
gaggcacaggaatcattcag

SEQ ID NO: 373575 - DNA, 20 bp, Artificial Sequence
  Description of Artificial Sequence: Synthetic oligonucleotide
  Target: LAMA2; (+) strand; PAM type: YTN; PAM sequence: TTC
agcttctttcattccatgct

SEQ ID NO: 373576 - DNA, 20 bp, Artificial Sequence
  Description of Artificial Sequence: Synthetic oligonucleotide
  Target: LAMA2; (+) strand; PAM type: YTN; PAM sequence: CTT
ctttcattccatgctaagac

SEQ ID NO: 373577 - DNA, 20 bp, Artificial Sequence
  Description of Artificial Sequence: Synthetic oligonucleotide
  Target: LAMA2; (+) strand; PAM type: YTN; PAM sequence: TTC
tttcattccatgctaagacc

SEQ ID NO: 373578 - DNA, 20 bp, Artificial Sequence
  Description of Artificial Sequence: Synthetic oligonucleotide
  Target: LAMA2; (+) strand; PAM type: YTN; PAM sequence: CTT
tcattccatgctaagaccca

SEQ ID NO: 373579 - DNA, 20 bp, Artificial Sequence
  Description of Artificial Sequence: Synthetic oligonucleotide
  Target: LAMA2; (+) strand; PAM type: YTN; PAM sequence: TTT
cattccatgctaagacccac

SEQ ID NO: 373580 - DNA, 20 bp, Artificial Sequence
  Description of Artificial Sequence: Synthetic oligonucleotide
  Target: LAMA2; (+) strand; PAM type: YTN; PAM sequence: TTC
attccatgctaagacccacc

SEQ ID NO: 373581 - DNA, 20 bp, Artificial Sequence
  Description of Artificial Sequence: Synthetic oligonucleotide
  Target: LAMA2; (+) strand; PAM type: YTN; PAM sequence: TTC
catgctaagacccaccaaca

SEQ ID NO: 373582 - DNA, 20 bp, Artificial Sequence
  Description of Artificial Sequence: Synthetic oligonucleotide
  Target: LAMA2; (+) strand; PAM type: YTN; PAM sequence: CTA
agacccaccaacatctctac

SEQ ID NO: 373583 - DNA, 20 bp, Artificial Sequence
  Description of Artificial Sequence: Synthetic oligonucleotide
  Target: LAMA2; (+) strand; PAM type: YTN; PAM sequence: CTC
taccatcatcatttttccat

SEQ ID NO: 373584 - DNA, 20 bp, Artificial Sequence
  Description of Artificial Sequence: Synthetic oligonucleotide
  Target: LAMA2; (+) strand; PAM type: YTN; PAM sequence: CTA
ccatcatcatttttccatct

SEQ ID NO: 373585 - DNA, 20 bp, Artificial Sequence
  Description of Artificial Sequence: Synthetic oligonucleotide
  Target: LAMA2; (+) strand; PAM type: YTN; PAM sequence: TTT
ttccatctgcctttccaaat

SEQ ID NO: 373586 - DNA, 20 bp, Artificial Sequence
  Description of Artificial Sequence: Synthetic oligonucleotide
  Target: LAMA2; (+) strand; PAM type: YTN; PAM sequence: TTT
tccatctgcctttccaaatc

SEQ ID NO: 373587 - DNA, 20 bp, Artificial Sequence
  Description of Artificial Sequence: Synthetic oligonucleotide
  Target: LAMA2; (+) strand; PAM type: YTN; PAM sequence: TTT
ccatctgcctttccaaatcc

SEQ ID NO: 373588 - DNA, 20 bp, Artificial Sequence
  Description of Artificial Sequence: Synthetic oligonucleotide
  Target: LAMA2; (+) strand; PAM type: YTN; PAM sequence: TTC
catctgcctttccaaatcca

SEQ ID NO: 373589 - DNA, 20 bp, Artificial Sequence
  Description of Artificial Sequence: Synthetic oligonucleotide
  Target: LAMA2; (+) strand; PAM type: YTN; PAM sequence: CTG
cctttccaaatccatcccat

SEQ ID NO: 373590 - DNA, 20 bp, Artificial Sequence
  Description of Artificial Sequence: Synthetic oligonucleotide
  Target: LAMA2; (+) strand; PAM type: YTN; PAM sequence: CTT
tccaaatccatcccattttc

SEQ ID NO: 373591 - DNA, 20 bp, Artificial Sequence
  Description of Artificial Sequence: Synthetic oligonucleotide
  Target: LAMA2; (+) strand; PAM type: YTN; PAM sequence: TTT
ccaaatccatcccattttct

SEQ ID NO: 373592 - DNA, 20 bp, Artificial Sequence
  Description of Artificial Sequence: Synthetic oligonucleotide
  Target: LAMA2; (+) strand; PAM type: YTN; PAM sequence: TTC
caaatccatcccattttcta

SEQ ID NO: 373593 - DNA, 20 bp, Artificial Sequence
  Description of Artificial Sequence: Synthetic oligonucleotide
  Target: LAMA2; (+) strand; PAM type: YTN; PAM sequence: TTT
tctatttgaaaaaggatgag

SEQ ID NO: 373594 - DNA, 20 bp, Artificial Sequence
  Description of Artificial Sequence: Synthetic oligonucleotide
  Target: LAMA2; (+) strand; PAM type: YTN; PAM sequence: TTT
ctatttgaaaaaggatgagc

SEQ ID NO: 373595 - DNA, 20 bp, Artificial Sequence
  Description of Artificial Sequence: Synthetic oligonucleotide
  Target: LAMA2; (+) strand; PAM type: YTN; PAM sequence: TTC
tatttgaaaaaggatgagct

SEQ ID NO: 373596 - DNA, 20 bp, Artificial Sequence
  Description of Artificial Sequence: Synthetic oligonucleotide
  Target: LAMA2; (+) strand; PAM type: YTN; PAM sequence: CTA
tttgaaaaaggatgagctac

SEQ ID NO: 373597 - DNA, 20 bp, Artificial Sequence
  Description of Artificial Sequence: Synthetic oligonucleotide
  Target: LAMA2; (+) strand; PAM type: YTN; PAM sequence: TTT
gaaaaaggatgagctacatt

SEQ ID NO: 373598 - DNA, 20 bp, Artificial Sequence
  Description of Artificial Sequence: Synthetic oligonucleotide
  Target: LAMA2; (+) strand; PAM type: YTN; PAM sequence: TTG
aaaaaggatgagctacattt

SEQ ID NO: 373599 - DNA, 20 bp, Artificial Sequence
  Description of Artificial Sequence: Synthetic oligonucleotide
  Target: LAMA2; (+) strand; PAM type: YTN; PAM sequence: CTA
catttgtggaactggtggct

SEQ ID NO: 373600 - DNA, 20 bp, Artificial Sequence
  Description of Artificial Sequence: Synthetic oligonucleotide
  Target: LAMA2; (+) strand; PAM type: YTN; PAM sequence: TTT
gtggaactggtggctttcag

SEQ ID NO: 373601 - DNA, 20 bp, Artificial Sequence
  Description of Artificial Sequence: Synthetic oligonucleotide
  Target: LAMA2; (+) strand; PAM type: YTN; PAM sequence: TTG
tggaactggtggctttcaga

SEQ ID NO: 373602 - DNA, 20 bp, Artificial Sequence
  Description of Artificial Sequence: Synthetic oligonucleotide
  Target: LAMA2; (+) strand; PAM type: YTN; PAM sequence: CTG
gtggctttcagagctcgggg

SEQ ID NO: 373603 - DNA, 20 bp, Artificial Sequence
  Description of Artificial Sequence: Synthetic oligonucleotide
  Target: LAMA2; (+) strand; PAM type: YTN; PAM sequence: CTT
tcagagctcggggtctggca

SEQ ID NO: 373604 - DNA, 20 bp, Artificial Sequence
  Description of Artificial Sequence: Synthetic oligonucleotide
  Target: LAMA2; (+) strand; PAM type: YTN; PAM sequence: TTT
cagagctcggggtctggcag

SEQ ID NO: 373605 - DNA, 20 bp, Artificial Sequence
  Description of Artificial Sequence: Synthetic oligonucleotide
  Target: LAMA2; (+) strand; PAM type: YTN; PAM sequence: TTC
agagctcggggtctggcaga

SEQ ID NO: 373606 - DNA, 20 bp, Artificial Sequence
  Description of Artificial Sequence: Synthetic oligonucleotide
  Target: LAMA2; (+) strand; PAM type: YTN; PAM sequence: CTC
ggggtctggcagattcctat

SEQ ID NO: 373607 - DNA, 20 bp, Artificial Sequence
  Description of Artificial Sequence: Synthetic oligonucleotide
  Target: LAMA2; (+) strand; PAM type: YTN; PAM sequence: CTG
gcagattcctatgtctctgc

SEQ ID NO: 373608 - DNA, 20 bp, Artificial Sequence
  Description of Artificial Sequence: Synthetic oligonucleotide
  Target: LAMA2; (+) strand; PAM type: YTN; PAM sequence: TTC
ctatgtctctgccttttgcc

SEQ ID NO: 373609 - DNA, 20 bp, Artificial Sequence
  Description of Artificial Sequence: Synthetic oligonucleotide
  Target: LAMA2; (+) strand; PAM type: YTN; PAM sequence: CTA
tgtctctgccttttgccctg

SEQ ID NO: 373610 - DNA, 20 bp, Artificial Sequence
  Description of Artificial Sequence: Synthetic oligonucleotide
  Target: LAMA2; (+) strand; PAM type: YTN; PAM sequence: CTC
tgccttttgccctgtcaaat

SEQ ID NO: 373611 - DNA, 20 bp, Artificial Sequence
  Description of Artificial Sequence: Synthetic oligonucleotide
  Target: LAMA2; (+) strand; PAM type: YTN; PAM sequence: CTG
ccttttgccctgtcaaatcc

SEQ ID NO: 373612 - DNA, 20 bp, Artificial Sequence
  Description of Artificial Sequence: Synthetic oligonucleotide
  Target: LAMA2; (+) strand; PAM type: YTN; PAM sequence: CTT
ttgccctgtcaaatcccttc

SEQ ID NO: 373613 - DNA, 20 bp, Artificial Sequence
  Description of Artificial Sequence: Synthetic oligonucleotide
  Target: LAMA2; (+) strand; PAM type: YTN; PAM sequence: TTT
tgccctgtcaaatcccttca

SEQ ID NO: 373614 - DNA, 20 bp, Artificial Sequence
  Description of Artificial Sequence: Synthetic oligonucleotide
  Target: LAMA2; (+) strand; PAM type: YTN; PAM sequence: TTT
gccctgtcaaatcccttcat

SEQ ID NO: 373615 - DNA, 20 bp, Artificial Sequence
  Description of Artificial Sequence: Synthetic oligonucleotide
  Target: LAMA2; (+) strand; PAM type: YTN; PAM sequence: TTG
ccctgtcaaatcccttcatt

SEQ ID NO: 373616 - DNA, 20 bp, Artificial Sequence
  Description of Artificial Sequence: Synthetic oligonucleotide
  Target: LAMA2; (+) strand; PAM type: YTN; PAM sequence: CTG
tcaaatcccttcattcaaac

SEQ ID NO: 373617 - DNA, 20 bp, Artificial Sequence
  Description of Artificial Sequence: Synthetic oligonucleotide
  Target: LAMA2; (+) strand; PAM type: YTN; PAM sequence: CTT
cattcaaacatgtagcacaa

SEQ ID NO: 373618 - DNA, 20 bp, Artificial Sequence
  Description of Artificial Sequence: Synthetic oligonucleotide
  Target: LAMA2; (+) strand; PAM type: YTN; PAM sequence: TTC
attcaaacatgtagcacaag

SEQ ID NO: 373619 - DNA, 20 bp, Artificial Sequence
  Description of Artificial Sequence: Synthetic oligonucleotide
  Target: LAMA2; (+) strand; PAM type: YTN; PAM sequence: TTC
aaacatgtagcacaagatgg

SEQ ID NO: 373620 - DNA, 20 bp, Artificial Sequence
  Description of Artificial Sequence: Synthetic oligonucleotide
  Target: LAMA2; (+) strand; PAM type: YTN; PAM sequence: CTT
gcttcttgaatcgagggggt

SEQ ID NO: 373621 - DNA, 20 bp, Artificial Sequence
  Description of Artificial Sequence: Synthetic oligonucleotide
  Target: LAMA2; (+) strand; PAM type: YTN; PAM sequence: TTG
cttcttgaatcgagggggtg

SEQ ID NO: 373622 - DNA, 20 bp, Artificial Sequence
  Description of Artificial Sequence: Synthetic oligonucleotide
  Target: LAMA2; (+) strand; PAM type: YTN; PAM sequence: CTT
cttgaatcgagggggtgaag

SEQ ID NO: 373623 - DNA, 20 bp, Artificial Sequence
  Description of Artificial Sequence: Synthetic oligonucleotide
  Target: LAMA2; (+) strand; PAM type: YTN; PAM sequence: TTC
ttgaatcgagggggtgaaga

SEQ ID NO: 373624 - DNA, 20 bp, Artificial Sequence
  Description of Artificial Sequence: Synthetic oligonucleotide
  Target: LAMA2; (+) strand; PAM type: YTN; PAM sequence: CTT
gaatcgagggggtgaagaga

SEQ ID NO: 373625 - DNA, 20 bp, Artificial Sequence
  Description of Artificial Sequence: Synthetic oligonucleotide
  Target: LAMA2; (+) strand; PAM type: YTN; PAM sequence: TTG
aatcgagggggtgaagagaa

SEQ ID NO: 373626 - DNA, 20 bp, Artificial Sequence
  Description of Artificial Sequence: Synthetic oligonucleotide
  Target: LAMA2; (+) strand; PAM type: YTN; PAM sequence: TTG
gtattctgtcacaagttgaa

SEQ ID NO: 373627 - DNA, 20 bp, Artificial Sequence
  Description of Artificial Sequence: Synthetic oligonucleotide
  Target: LAMA2; (+) strand; PAM type: YTN; PAM sequence: TTC
tgtcacaagttgaacactag

SEQ ID NO: 373628 - DNA, 20 bp, Artificial Sequence
  Description of Artificial Sequence: Synthetic oligonucleotide
  Target: LAMA2; (+) strand; PAM type: YTN; PAM sequence: CTG
tcacaagttgaacactagtt

SEQ ID NO: 373629 - DNA, 20 bp, Artificial Sequence
  Description of Artificial Sequence: Synthetic oligonucleotide
  Target: LAMA2; (+) strand; PAM type: YTN; PAM sequence: TTG
aacactagttacagcttgga

SEQ ID NO: 373630 - DNA, 20 bp, Artificial Sequence
  Description of Artificial Sequence: Synthetic oligonucleotide
  Target: LAMA2; (+) strand; PAM type: YTN; PAM sequence: CTA
gttacagcttggaaaacatt

SEQ ID NO: 373631 - DNA, 20 bp, Artificial Sequence
  Description of Artificial Sequence: Synthetic oligonucleotide
  Target: LAMA2; (+) strand; PAM type: YTN; PAM sequence: TTA
cagcttggaaaacattcact

SEQ ID NO: 373632 - DNA, 20 bp, Artificial Sequence
  Description of Artificial Sequence: Synthetic oligonucleotide
  Target: LAMA2; (+) strand; PAM type: YTN; PAM sequence: CTT
ggaaaacattcacttagggc

SEQ ID NO: 373633 - DNA, 20 bp, Artificial Sequence
  Description of Artificial Sequence: Synthetic oligonucleotide
  Target: LAMA2; (+) strand; PAM type: YTN; PAM sequence: TTG
gaaaacattcacttagggcc

SEQ ID NO: 373634 - DNA, 20 bp, Artificial Sequence
  Description of Artificial Sequence: Synthetic oligonucleotide
  Target: LAMA2; (+) strand; PAM type: YTN; PAM sequence: TTC
acttagggccaaaacaccac

SEQ ID NO: 373635 - DNA, 20 bp, Artificial Sequence
  Description of Artificial Sequence: Synthetic oligonucleotide
  Target: LAMA2; (+) strand; PAM type: YTN; PAM sequence: CTT
agggccaaaacaccactatt

SEQ ID NO: 373636 - DNA, 20 bp, Artificial Sequence
  Description of Artificial Sequence: Synthetic oligonucleotide
  Target: LAMA2; (+) strand; PAM type: YTN; PAM sequence: TTA
gggccaaaacaccactattt

SEQ ID NO: 373637 - DNA, 20 bp, Artificial Sequence
  Description of Artificial Sequence: Synthetic oligonucleotide
  Target: LAMA2; (+) strand; PAM type: YTN; PAM sequence: CTA
tttttgaggtatcactgctt

SEQ ID NO: 373638 - DNA, 20 bp, Artificial Sequence
  Description of Artificial Sequence: Synthetic oligonucleotide
  Target: LAMA2; (+) strand; PAM type: YTN; PAM sequence: TTT
ttgaggtatcactgctttgc

SEQ ID NO: 373639 - DNA, 20 bp, Artificial Sequence
  Description of Artificial Sequence: Synthetic oligonucleotide
  Target: LAMA2; (+) strand; PAM type: YTN; PAM sequence: TTT
tgaggtatcactgctttgct

SEQ ID NO: 373640 - DNA, 20 bp, Artificial Sequence
  Description of Artificial Sequence: Synthetic oligonucleotide
  Target: LAMA2; (+) strand; PAM type: YTN; PAM sequence: TTT
gaggtatcactgctttgctg

SEQ ID NO: 373641 - DNA, 20 bp, Artificial Sequence
  Description of Artificial Sequence: Synthetic oligonucleotide
  Target: LAMA2; (+) strand; PAM type: YTN; PAM sequence: TTG
aggtatcactgctttgctgg

SEQ ID NO: 373642 - DNA, 20 bp, Artificial Sequence
  Description of Artificial Sequence: Synthetic oligonucleotide
  Target: LAMA2; (+) strand; PAM type: YTN; PAM sequence: CTG
ctttgctggggaatgattta

SEQ ID NO: 373643 - DNA, 20 bp, Artificial Sequence
  Description of Artificial Sequence: Synthetic oligonucleotide
  Target: LAMA2; (+) strand; PAM type: YTN; PAM sequence: CTT
tgctggggaatgatttaaac

SEQ ID NO: 373644 - DNA, 20 bp, Artificial Sequence
  Description of Artificial Sequence: Synthetic oligonucleotide
  Target: LAMA2; (+) strand; PAM type: YTN; PAM sequence: TTT
gctggggaatgatttaaaca

SEQ ID NO: 373645 - DNA, 20 bp, Artificial Sequence
  Description of Artificial Sequence: Synthetic oligonucleotide
  Target: LAMA2; (+) strand; PAM type: YTN; PAM sequence: TTG
ctggggaatgatttaaacaa

SEQ ID NO: 373646 - DNA, 20 bp, Artificial Sequence
  Description of Artificial Sequence: Synthetic oligonucleotide
  Target: LAMA2; (+) strand; PAM type: YTN; PAM sequence: CTG
gggaatgatttaaacaaagg

SEQ ID NO: 373647 - DNA, 20 bp, Artificial Sequence
  Description of Artificial Sequence: Synthetic oligonucleotide
  Target: LAMA2; (+) strand; PAM type: YTN; PAM sequence: TTT
aaacaaaggaaaaaaaagag

SEQ ID NO: 373648 - DNA, 20 bp, Artificial Sequence
  Description of Artificial Sequence: Synthetic oligonucleotide
  Target: LAMA2; (+) strand; PAM type: YTN; PAM sequence: TTA
aacaaaggaaaaaaaagagt

SEQ ID NO: 373649 - DNA, 20 bp, Artificial Sequence
  Description of Artificial Sequence: Synthetic oligonucleotide
  Target: LAMA2; (+) strand; PAM type: YTN; PAM sequence: TTC
atgatgatacctttgctaag

SEQ ID NO: 373650 - DNA, 20 bp, Artificial Sequence
  Description of Artificial Sequence: Synthetic oligonucleotide
  Target: LAMA2; (+) strand; PAM type: YTN; PAM sequence: CTT
tgctaagattctagactttt

SEQ ID NO: 373651 - DNA, 20 bp, Artificial Sequence
  Description of Artificial Sequence: Synthetic oligonucleotide
  Target: LAMA2; (+) strand; PAM type: YTN; PAM sequence: TTT
gctaagattctagactttta

SEQ ID NO: 373652 - DNA, 20 bp, Artificial Sequence
  Description of Artificial Sequence: Synthetic oligonucleotide
  Target: LAMA2; (+) strand; PAM type: YTN; PAM sequence: TTG
ctaagattctagacttttat

SEQ ID NO: 373653 - DNA, 20 bp, Artificial Sequence
  Description of Artificial Sequence: Synthetic oligonucleotide
  Target: LAMA2; (+) strand; PAM type: YTN; PAM sequence: CTA
agattctagacttttatcat

SEQ ID NO: 373654 - DNA, 20 bp, Artificial Sequence
  Description of Artificial Sequence: Synthetic oligonucleotide
  Target: LAMA2; (+) strand; PAM type: YTN; PAM sequence: TTC
tagacttttatcatctggac

SEQ ID NO: 373655 - DNA, 20 bp, Artificial Sequence
  Description of Artificial Sequence: Synthetic oligonucleotide
  Target: LAMA2; (+) strand; PAM type: YTN; PAM sequence: CTA
gacttttatcatctggacaa

SEQ ID NO: 373656 - DNA, 20 bp, Artificial Sequence
  Description of Artificial Sequence: Synthetic oligonucleotide
  Target: LAMA2; (+) strand; PAM type: YTN; PAM sequence: CTT
ttatcatctggacaagagga

SEQ ID NO: 373657 - DNA, 20 bp, Artificial Sequence
  Description of Artificial Sequence: Synthetic oligonucleotide
  Target: LAMA2; (+) strand; PAM type: YTN; PAM sequence: TTT
tatcatctggacaagaggag

SEQ ID NO: 373658 - DNA, 20 bp, Artificial Sequence
  Description of Artificial Sequence: Synthetic oligonucleotide
  Target: LAMA2; (+) strand; PAM type: YTN; PAM sequence: TTT
atcatctggacaagaggaga

SEQ ID NO: 373659 - DNA, 20 bp, Artificial Sequence
  Description of Artificial Sequence: Synthetic oligonucleotide
  Target: LAMA2; (+) strand; PAM type: YTN; PAM sequence: TTA
tcatctggacaagaggagaa

SEQ ID NO: 373660 - DNA, 20 bp, Artificial Sequence
  Description of Artificial Sequence: Synthetic oligonucleotide
  Target: LAMA2; (+) strand; PAM type: YTN; PAM sequence: CTG
gacaagaggagaacaaaaat

SEQ ID NO: 373661 - DNA, 20 bp, Artificial Sequence
  Description of Artificial Sequence: Synthetic oligonucleotide
  Target: LAMA2; (+) strand; PAM type: YTN; PAM sequence: CTT
gaagggctaaaagagattaa

SEQ ID NO: 373662 - DNA, 20 bp, Artificial Sequence
  Description of Artificial Sequence: Synthetic oligonucleotide
  Target: LAMA2; (+) strand; PAM type: YTN; PAM sequence: TTG
aagggctaaaagagattaag

SEQ ID NO: 373663 - DNA, 20 bp, Artificial Sequence
  Description of Artificial Sequence: Synthetic oligonucleotide
  Target: LAMA2; (+) strand; PAM type: YTN; PAM sequence: CTA
aaagagattaagtaagcaat

SEQ ID NO: 373664 - DNA, 20 bp, Artificial Sequence
  Description of Artificial Sequence: Synthetic oligonucleotide
  Target: LAMA2; (+) strand; PAM type: YTN; PAM sequence: TTA
agtaagcaattggaatatca

SEQ ID NO: 373665 - DNA, 20 bp, Artificial Sequence
  Description of Artificial Sequence: Synthetic oligonucleotide
  Target: LAMA2; (+) strand; PAM type: YTN; PAM sequence: TTG
gaatatcaagagcaattaaa

SEQ ID NO: 373666 - DNA, 20 bp, Artificial Sequence
  Description of Artificial Sequence: Synthetic oligonucleotide
  Target: LAMA2; (+) strand; PAM type: YTN; PAM sequence: TTA
aaaagactgttgagctaaaa

SEQ ID NO: 373667 - DNA, 20 bp, Artificial Sequence
  Description of Artificial Sequence: Synthetic oligonucleotide
  Target: LAMA2; (+) strand; PAM type: YTN; PAM sequence: CTG
ttgagctaaaagtgagtcaa

SEQ ID NO: 373668 - DNA, 20 bp, Artificial Sequence
  Description of Artificial Sequence: Synthetic oligonucleotide
  Target: LAMA2; (+) strand; PAM type: YTN; PAM sequence: TTG
agctaaaagtgagtcaaatg

SEQ ID NO: 373669 - DNA, 20 bp, Artificial Sequence
  Description of Artificial Sequence: Synthetic oligonucleotide
  Target: LAMA2; (+) strand; PAM type: YTN; PAM sequence: CTA
aaagtgagtcaaatgctgag

SEQ ID NO: 373670 - DNA, 20 bp, Artificial Sequence
  Description of Artificial Sequence: Synthetic oligonucleotide
  Target: LAMA2; (+) strand; PAM type: YTN; PAM sequence: CTG
aggatacctgcctgatcgga

SEQ ID NO: 373671 - DNA, 20 bp, Artificial Sequence
  Description of Artificial Sequence: Synthetic oligonucleotide
  Target: LAMA2; (+) strand; PAM type: YTN; PAM sequence: CTG
cctgatcggacactaagtta

SEQ ID NO: 373672 - DNA, 20 bp, Artificial Sequence
  Description of Artificial Sequence: Synthetic oligonucleotide
  Target: LAMA2; (+) strand; PAM type: YTN; PAM sequence: CTG
atcggacactaagttacttt

SEQ ID NO: 373673 - DNA, 20 bp, Artificial Sequence
  Description of Artificial Sequence: Synthetic oligonucleotide
  Target: LAMA2; (+) strand; PAM type: YTN; PAM sequence: CTA
agttactttcagaataagtt

SEQ ID NO: 373674 - DNA, 20 bp, Artificial Sequence
  Description of Artificial Sequence: Synthetic oligonucleotide
  Target: LAMA2; (+) strand; PAM type: YTN; PAM sequence: TTA
ctttcagaataagtttgtaa

SEQ ID NO: 373675 - DNA, 20 bp, Artificial Sequence
  Description of Artificial Sequence: Synthetic oligonucleotide
  Target: LAMA2; (+) strand; PAM type: YTN; PAM sequence: CTT
tcagaataagtttgtaacct

SEQ ID NO: 373676 - DNA, 20 bp, Artificial Sequence
  Description of Artificial Sequence: Synthetic oligonucleotide
  Target: LAMA2; (+) strand; PAM type: YTN; PAM sequence: TTT
cagaataagtttgtaacctc

SEQ ID NO: 373677 - DNA, 20 bp, Artificial Sequence
  Description of Artificial Sequence: Synthetic oligonucleotide
  Target: LAMA2; (+) strand; PAM type: YTN; PAM sequence: TTC
agaataagtttgtaacctca

SEQ ID NO: 373678 - DNA, 20 bp, Artificial Sequence
  Description of Artificial Sequence: Synthetic oligonucleotide
  Target: LAMA2; (+) strand; PAM type: YTN; PAM sequence: TTT
gtaacctcagcaacatgtca

SEQ ID NO: 373679 - DNA, 20 bp, Artificial Sequence
  Description of Artificial Sequence: Synthetic oligonucleotide
  Target: LAMA2; (+) strand; PAM type: YTN; PAM sequence: TTG
taacctcagcaacatgtcat

SEQ ID NO: 373680 - DNA, 20 bp, Artificial Sequence
  Description of Artificial Sequence: Synthetic oligonucleotide
  Target: LAMA2; (+) strand; PAM type: YTN; PAM sequence: CTC
agcaacatgtcatacattat

SEQ ID NO: 373681 - DNA, 20 bp, Artificial Sequence
  Description of Artificial Sequence: Synthetic oligonucleotide
  Target: LAMA2; (+) strand; PAM type: YTN; PAM sequence: TTA
tggagaaggcatttcaaaaa

SEQ ID NO: 373682 - DNA, 20 bp, Artificial Sequence
  Description of Artificial Sequence: Synthetic oligonucleotide
  Target: LAMA2; (+) strand; PAM type: YTN; PAM sequence: TTT
caaaaaggcaggcaagttca

SEQ ID NO: 373683 - DNA, 20 bp, Artificial Sequence
  Description of Artificial Sequence: Synthetic oligonucleotide
  Target: LAMA2; (+) strand; PAM type: YTN; PAM sequence: TTC
aaaaaggcaggcaagttcat

SEQ ID NO: 373684 - DNA, 20 bp, Artificial Sequence
  Description of Artificial Sequence: Synthetic oligonucleotide
  Target: LAMA2; (+) strand; PAM type: YTN; PAM sequence: TTC
atctggtggattctatagga

SEQ ID NO: 373685 - DNA, 20 bp, Artificial Sequence
  Description of Artificial Sequence: Synthetic oligonucleotide
  Target: LAMA2; (+) strand; PAM type: YTN; PAM sequence: CTG
gtggattctataggacaaca

SEQ ID NO: 373686 - DNA, 20 bp, Artificial Sequence
  Description of Artificial Sequence: Synthetic oligonucleotide
  Target: LAMA2; (+) strand; PAM type: YTN; PAM sequence: TTC
tataggacaacatgaaactt

SEQ ID NO: 373687 - DNA, 20 bp, Artificial Sequence
  Description of Artificial Sequence: Synthetic oligonucleotide
  Target: LAMA2; (+) strand; PAM type: YTN; PAM sequence: CTA
taggacaacatgaaacttaa

SEQ ID NO: 373688 - DNA, 20 bp, Artificial Sequence
  Description of Artificial Sequence: Synthetic oligonucleotide
  Target: LAMA2; (+) strand; PAM type: YTN; PAM sequence: CTT
aatgggatacatagacttct

SEQ ID NO: 373689 - DNA, 20 bp, Artificial Sequence
  Description of Artificial Sequence: Synthetic oligonucleotide
  Target: LAMA2; (+) strand; PAM type: YTN; PAM sequence: TTA
atgggatacatagacttctt

SEQ ID NO: 373690 - DNA, 20 bp, Artificial Sequence
  Description of Artificial Sequence: Synthetic oligonucleotide
  Target: LAMA2; (+) strand; PAM type: YTN; PAM sequence: CTT
cttaagccctccccgctccc

SEQ ID NO: 373691 - DNA, 20 bp, Artificial Sequence
  Description of Artificial Sequence: Synthetic oligonucleotide
  Target: LAMA2; (+) strand; PAM type: YTN; PAM sequence: TTC
ttaagccctccccgctcccc

SEQ ID NO: 373692 - DNA, 20 bp, Artificial Sequence
  Description of Artificial Sequence: Synthetic oligonucleotide
  Target: LAMA2; (+) strand; PAM type: YTN; PAM sequence: CTT
aagccctccccgctccccag

SEQ ID NO: 373693 - DNA, 20 bp, Artificial Sequence
  Description of Artificial Sequence: Synthetic oligonucleotide
  Target: LAMA2; (+) strand; PAM type: YTN; PAM sequence: TTA
agccctccccgctccccagc

SEQ ID NO: 373694 - DNA, 20 bp, Artificial Sequence
  Description of Artificial Sequence: Synthetic oligonucleotide
  Target: LAMA2; (+) strand; PAM type: YTN; PAM sequence: CTC
cccgctccccagctggcaaa

SEQ ID NO: 373695 - DNA, 20 bp, Artificial Sequence
  Description of Artificial Sequence: Synthetic oligonucleotide
  Target: LAMA2; (+) strand; PAM type: YTN; PAM sequence: CTC
cccagctggcaaatttttaa

SEQ ID NO: 373696 - DNA, 20 bp, Artificial Sequence
  Description of Artificial Sequence: Synthetic oligonucleotide
  Target: LAMA2; (+) strand; PAM type: YTN; PAM sequence: CTG
gcaaatttttaacaacttct

SEQ ID NO: 373697 - DNA, 20 bp, Artificial Sequence
  Description of Artificial Sequence: Synthetic oligonucleotide
  Target: LAMA2; (+) strand; PAM type: YTN; PAM sequence: TTT
ttaacaacttctccttaagt

SEQ ID NO: 373698 - DNA, 20 bp, Artificial Sequence
  Description of Artificial Sequence: Synthetic oligonucleotide
  Target: LAMA2; (+) strand; PAM type: YTN; PAM sequence: TTT
taacaacttctccttaagtg

SEQ ID NO: 373699 - DNA, 20 bp, Artificial Sequence
  Description of Artificial Sequence: Synthetic oligonucleotide
  Target: LAMA2; (+) strand; PAM type: YTN; PAM sequence: TTT
aacaacttctccttaagtga

SEQ ID NO: 373700 - DNA, 20 bp, Artificial Sequence
  Description of Artificial Sequence: Synthetic oligonucleotide
  Target: LAMA2; (+) strand; PAM type: YTN; PAM sequence: TTA
acaacttctccttaagtgat

SEQ ID NO: 373701 - DNA, 20 bp, Artificial Sequence
  Description of Artificial Sequence: Synthetic oligonucleotide
  Target: LAMA2; (+) strand; PAM type: YTN; PAM sequence: CTT
ctccttaagtgatgagagag

SEQ ID NO: 373702 - DNA, 20 bp, Artificial Sequence
  Description of Artificial Sequence: Synthetic oligonucleotide
  Target: LAMA2; (+) strand; PAM type: YTN; PAM sequence: TTC
tccttaagtgatgagagagg

SEQ ID NO: 373703 - DNA, 20 bp, Artificial Sequence
  Description of Artificial Sequence: Synthetic oligonucleotide
  Target: LAMA2; (+) strand; PAM type: YTN; PAM sequence: CTC
cttaagtgatgagagagggg

SEQ ID NO: 373704 - DNA, 20 bp, Artificial Sequence
  Description of Artificial Sequence: Synthetic oligonucleotide
  Target: LAMA2; (+) strand; PAM type: YTN; PAM sequence: CTT
aagtgatgagagaggggtca

SEQ ID NO: 373705 - DNA, 20 bp, Artificial Sequence
  Description of Artificial Sequence: Synthetic oligonucleotide
  Target: LAMA2; (+) strand; PAM type: YTN; PAM sequence: TTA
agtgatgagagaggggtcaa

SEQ ID NO: 373706 - DNA, 20 bp, Artificial Sequence
  Description of Artificial Sequence: Synthetic oligonucleotide
  Target: LAMA2; (+) strand; PAM type: YTN; PAM sequence: CTA
atctcacaattgccactgaa

SEQ ID NO: 373707 - DNA, 20 bp, Artificial Sequence
  Description of Artificial Sequence: Synthetic oligonucleotide
  Target: LAMA2; (+) strand; PAM type: YTN; PAM sequence: CTC
acaattgccactgaaaatgt

SEQ ID NO: 373708 - DNA, 20 bp, Artificial Sequence
  Description of Artificial Sequence: Synthetic oligonucleotide
  Target: LAMA2; (+) strand; PAM type: YTN; PAM sequence: TTG
ccactgaaaatgtggaaggt

SEQ ID NO: 373709 - DNA, 20 bp, Artificial Sequence
  Description of Artificial Sequence: Synthetic oligonucleotide
  Target: LAMA2; (+) strand; PAM type: YTN; PAM sequence: CTG
aaaatgtggaaggtgtttga

SEQ ID NO: 373710 - DNA, 20 bp, Artificial Sequence
  Description of Artificial Sequence: Synthetic oligonucleotide
  Target: LAMA2; (+) strand; PAM type: YTN; PAM sequence: TTT
gaatctaattgcttaatatt

SEQ ID NO: 373711 - DNA, 20 bp, Artificial Sequence
  Description of Artificial Sequence: Synthetic oligonucleotide
  Target: LAMA2; (+) strand; PAM type: YTN; PAM sequence: TTG
aatctaattgcttaatattt

SEQ ID NO: 373712 - DNA, 20 bp, Artificial Sequence
  Description of Artificial Sequence: Synthetic oligonucleotide
  Target: LAMA2; (+) strand; PAM type: YTN; PAM sequence: CTA
attgcttaatattttgaaaa

SEQ ID NO: 373713 - DNA, 20 bp, Artificial Sequence
  Description of Artificial Sequence: Synthetic oligonucleotide
  Target: LAMA2; (+) strand; PAM type: YTN; PAM sequence: TTG
cttaatattttgaaaattca

SEQ ID NO: 373714 - DNA, 20 bp, Artificial Sequence
  Description of Artificial Sequence: Synthetic oligonucleotide
  Target: LAMA2; (+) strand; PAM type: YTN; PAM sequence: CTT
aatattttgaaaattcatct

SEQ ID NO: 373715 - DNA, 20 bp, Artificial Sequence
  Description of Artificial Sequence: Synthetic oligonucleotide
  Target: LAMA2; (+) strand; PAM type: YTN; PAM sequence: TTA
atattttgaaaattcatcta

SEQ ID NO: 373716 - DNA, 20 bp, Artificial Sequence
  Description of Artificial Sequence: Synthetic oligonucleotide
  Target: LAMA2; (+) strand; PAM type: YTN; PAM sequence: TTT
tgaaaattcatctacagttt

SEQ ID NO: 373717 - DNA, 20 bp, Artificial Sequence
  Description of Artificial Sequence: Synthetic oligonucleotide
  Target: LAMA2; (+) strand; PAM type: YTN; PAM sequence: TTT
gaaaattcatctacagtttt

SEQ ID NO: 373718 - DNA, 20 bp, Artificial Sequence
  Description of Artificial Sequence: Synthetic oligonucleotide
  Target: LAMA2; (+) strand; PAM type: YTN; PAM sequence: TTG
aaaattcatctacagtttta

SEQ ID NO: 373719 - DNA, 20 bp, Artificial Sequence
  Description of Artificial Sequence: Synthetic oligonucleotide
  Target: LAMA2; (+) strand; PAM type: YTN; PAM sequence: TTC
atctacagttttatcctcaa

SEQ ID NO: 373720 - DNA, 20 bp, Artificial Sequence
  Description of Artificial Sequence: Synthetic oligonucleotide
  Target: LAMA2; (+) strand; PAM type: YTN; PAM sequence: CTA
cagttttatcctcaagattc

SEQ ID NO: 373721 - DNA, 20 bp, Artificial Sequence
  Description of Artificial Sequence: Synthetic oligonucleotide
  Target: LAMA2; (+) strand; PAM type: YTN; PAM sequence: TTT
tatcctcaagattcatacta

SEQ ID NO: 373722 - DNA, 20 bp, Artificial Sequence
  Description of Artificial Sequence: Synthetic oligonucleotide
  Target: LAMA2; (+) strand; PAM type: YTN; PAM sequence: TTT
atcctcaagattcatactag

SEQ ID NO: 373723 - DNA, 20 bp, Artificial Sequence
  Description of Artificial Sequence: Synthetic oligonucleotide
  Target: LAMA2; (+) strand; PAM type: YTN; PAM sequence: TTA
tcctcaagattcatactaga

SEQ ID NO: 373724 - DNA, 20 bp, Artificial Sequence
  Description of Artificial Sequence: Synthetic oligonucleotide
  Target: LAMA2; (+) strand; PAM type: YTN; PAM sequence: CTC
aagattcatactagatatca

SEQ ID NO: 373725 - DNA, 20 bp, Artificial Sequence
  Description of Artificial Sequence: Synthetic oligonucleotide
  Target: LAMA2; (+) strand; PAM type: YTN; PAM sequence: TTC
atactagatatcaaagaaat

SEQ ID NO: 373726 - DNA, 20 bp, Artificial Sequence
  Description of Artificial Sequence: Synthetic oligonucleotide
  Target: LAMA2; (+) strand; PAM type: YTN; PAM sequence: CTA
gatatcaaagaaattccttt

SEQ ID NO: 373727 - DNA, 20 bp, Artificial Sequence
  Description of Artificial Sequence: Synthetic oligonucleotide
  Target: LAMA2; (+) strand; PAM type: YTN; PAM sequence: TTC
ctttttgtatcttaaatttc

SEQ ID NO: 373728 - DNA, 20 bp, Artificial Sequence
  Description of Artificial Sequence: Synthetic oligonucleotide
  Target: LAMA2; (+) strand; PAM type: YTN; PAM sequence: CTT
tttgtatcttaaatttcagt

SEQ ID NO: 373729 - DNA, 20 bp, Artificial Sequence
  Description of Artificial Sequence: Synthetic oligonucleotide
  Target: LAMA2; (+) strand; PAM type: YTN; PAM sequence: TTT
ttgtatcttaaatttcagtt

SEQ ID NO: 373730 - DNA, 20 bp, Artificial Sequence
  Description of Artificial Sequence: Synthetic oligonucleotide
  Target: LAMA2; (+) strand; PAM type: YTN; PAM sequence: TTT
tgtatcttaaatttcagttc

SEQ ID NO: 373731 - DNA, 20 bp, Artificial Sequence
  Description of Artificial Sequence: Synthetic oligonucleotide
  Target: LAMA2; (+) strand; PAM type: YTN; PAM sequence: TTT
gtatcttaaatttcagttcc

SEQ ID NO: 373732 - DNA, 20 bp, Artificial Sequence
  Description of Artificial Sequence: Synthetic oligonucleotide
  Target: LAMA2; (+) strand; PAM type: YTN; PAM sequence: TTG
tatcttaaatttcagttcca

SEQ ID NO: 373733 - DNA, 20 bp, Artificial Sequence
  Description of Artificial Sequence: Synthetic oligonucleotide
  Target: LAMA2; (+) strand; PAM type: YTN; PAM sequence: CTT
aaatttcagttccaaaatcc

SEQ ID NO: 373734 - DNA, 20 bp, Artificial Sequence
  Description of Artificial Sequence: Synthetic oligonucleotide
  Target: LAMA2; (+) strand; PAM type: YTN; PAM sequence: TTA
aatttcagttccaaaatccc

SEQ ID NO: 373735 - DNA, 20 bp, Artificial Sequence
  Description of Artificial Sequence: Synthetic oligonucleotide
  Target: LAMA2; (+) strand; PAM type: YTN; PAM sequence: TTT
cagttccaaaatcccattta

SEQ ID NO: 373736 - DNA, 20 bp, Artificial Sequence
  Description of Artificial Sequence: Synthetic oligonucleotide
  Target: LAMA2; (+) strand; PAM type: YTN; PAM sequence: TTC
agttccaaaatcccatttag

SEQ ID NO: 373737 - DNA, 20 bp, Artificial Sequence
  Description of Artificial Sequence: Synthetic oligonucleotide
  Target: LAMA2; (+) strand; PAM type: YTN; PAM sequence: TTC
caaaatcccatttagatttt

SEQ ID NO: 373738 - DNA, 20 bp, Artificial Sequence
  Description of Artificial Sequence: Synthetic oligonucleotide
  Target: LAMA2; (+) strand; PAM type: YTN; PAM sequence: TTT
agattttgtctgcttcagaa

SEQ ID NO: 373739 - DNA, 20 bp, Artificial Sequence
  Description of Artificial Sequence: Synthetic oligonucleotide
  Target: LAMA2; (+) strand; PAM type: YTN; PAM sequence: TTA
gattttgtctgcttcagaat

SEQ ID NO: 373740 - DNA, 20 bp, Artificial Sequence
  Description of Artificial Sequence: Synthetic oligonucleotide
  Target: LAMA2; (+) strand; PAM type: YTN; PAM sequence: TTT
tgtctgcttcagaatgtctg

SEQ ID NO: 373741 - DNA, 20 bp, Artificial Sequence
  Description of Artificial Sequence: Synthetic oligonucleotide
  Target: LAMA2; (+) strand; PAM type: YTN; PAM sequence: TTT
gtctgcttcagaatgtctga

SEQ ID NO: 373742 - DNA, 20 bp, Artificial Sequence
  Description of Artificial Sequence: Synthetic oligonucleotide
  Target: LAMA2; (+) strand; PAM type: YTN; PAM sequence: TTG
tctgcttcagaatgtctgaa

SEQ ID NO: 373743 - DNA, 20 bp, Artificial Sequence
  Description of Artificial Sequence: Synthetic oligonucleotide
  Target: LAMA2; (+) strand; PAM type: YTN; PAM sequence: CTG
cttcagaatgtctgaattcg

SEQ ID NO: 373744 - DNA, 20 bp, Artificial Sequence
  Description of Artificial Sequence: Synthetic oligonucleotide
  Target: LAMA2; (+) strand; PAM type: YTN; PAM sequence: CTT
cagaatgtctgaattcgaat

SEQ ID NO: 373745 - DNA, 20 bp, Artificial Sequence
  Description of Artificial Sequence: Synthetic oligonucleotide
  Target: LAMA2; (+) strand; PAM type: YTN; PAM sequence: TTC
agaatgtctgaattcgaatc

SEQ ID NO: 373746 - DNA, 20 bp, Artificial Sequence
  Description of Artificial Sequence: Synthetic oligonucleotide
  Target: LAMA2; (+) strand; PAM type: YTN; PAM sequence: CTG
aattcgaatcaagtctaatc

SEQ ID NO: 373747 - DNA, 20 bp, Artificial Sequence
  Description of Artificial Sequence: Synthetic oligonucleotide
  Target: LAMA2; (+) strand; PAM type: YTN; PAM sequence: TTC
gaatcaagtctaatcacccc

SEQ ID NO: 373748 - DNA, 20 bp, Artificial Sequence
  Description of Artificial Sequence: Synthetic oligonucleotide
  Target: LAMA2; (+) strand; PAM type: YTN; PAM sequence: CTA
atcacccctctgcttactat

SEQ ID NO: 373749 - DNA, 20 bp, Artificial Sequence
  Description of Artificial Sequence: Synthetic oligonucleotide
  Target: LAMA2; (+) strand; PAM type: YTN; PAM sequence: CTC
tgcttactatgctcatggga

SEQ ID NO: 373750 - DNA, 20 bp, Artificial Sequence
  Description of Artificial Sequence: Synthetic oligonucleotide
  Target: LAMA2; (+) strand; PAM type: YTN; PAM sequence: CTG
cttactatgctcatgggacc

SEQ ID NO: 373751 - DNA, 20 bp, Artificial Sequence
  Description of Artificial Sequence: Synthetic oligonucleotide
  Target: LAMA2; (+) strand; PAM type: YTN; PAM sequence: CTT
actatgctcatgggaccttc

SEQ ID NO: 373752 - DNA, 20 bp, Artificial Sequence
  Description of Artificial Sequence: Synthetic oligonucleotide
  Target: LAMA2; (+) strand; PAM type: YTN; PAM sequence: TTA
ctatgctcatgggaccttct

SEQ ID NO: 373753 - DNA, 20 bp, Artificial Sequence
  Description of Artificial Sequence: Synthetic oligonucleotide
  Target: LAMA2; (+) strand; PAM type: YTN; PAM sequence: CTA
tgctcatgggaccttctatt

SEQ ID NO: 373754 - DNA, 20 bp, Artificial Sequence
  Description of Artificial Sequence: Synthetic oligonucleotide
  Target: LAMA2; (+) strand; PAM type: YTN; PAM sequence: CTC
atgggaccttctattcactt

SEQ ID NO: 373755 - DNA, 20 bp, Artificial Sequence
  Description of Artificial Sequence: Synthetic oligonucleotide
  Target: LAMA2; (+) strand; PAM type: YTN; PAM sequence: CTT
ctattcacttgtgagtctcc

SEQ ID NO: 373756 - DNA, 20 bp, Artificial Sequence
  Description of Artificial Sequence: Synthetic oligonucleotide
  Target: LAMA2; (+) strand; PAM type: YTN; PAM sequence: TTC
tattcacttgtgagtctcct

SEQ ID NO: 373757 - DNA, 20 bp, Artificial Sequence
  Description of Artificial Sequence: Synthetic oligonucleotide
  Target: LAMA2; (+) strand; PAM type: YTN; PAM sequence: CTA
ttcacttgtgagtctccttg

SEQ ID NO: 373758 - DNA, 20 bp, Artificial Sequence
  Description of Artificial Sequence: Synthetic oligonucleotide
  Target: LAMA2; (+) strand; PAM type: YTN; PAM sequence: TTC
acttgtgagtctccttgtgc

SEQ ID NO: 373759 - DNA, 20 bp, Artificial Sequence
  Description of Artificial Sequence: Synthetic oligonucleotide
  Target: LAMA2; (+) strand; PAM type: YTN; PAM sequence: CTT
gtgagtctccttgtgccttt

SEQ ID NO: 373760 - DNA, 20 bp, Artificial Sequence
  Description of Artificial Sequence: Synthetic oligonucleotide
  Target: LAMA2; (+) strand; PAM type: YTN; PAM sequence: TTG
tgagtctccttgtgcctttg

SEQ ID NO: 373761 - DNA, 20 bp, Artificial Sequence
  Description of Artificial Sequence: Synthetic oligonucleotide
  Target: LAMA2; (+) strand; PAM type: YTN; PAM sequence: CTC
cttgtgcctttgggtcctga

SEQ ID NO: 373762 - DNA, 20 bp, Artificial Sequence
  Description of Artificial Sequence: Synthetic oligonucleotide
  Target: LAMA2; (+) strand; PAM type: YTN; PAM sequence: CTT
gtgcctttgggtcctgaatg

SEQ ID NO: 373763 - DNA, 20 bp, Artificial Sequence
  Description of Artificial Sequence: Synthetic oligonucleotide
  Target: LAMA2; (+) strand; PAM type: YTN; PAM sequence: TTG
tgcctttgggtcctgaatgc

SEQ ID NO: 373764 - DNA, 20 bp, Artificial Sequence
  Description of Artificial Sequence: Synthetic oligonucleotide
  Target: LAMA2; (+) strand; PAM type: YTN; PAM sequence: CTT
tgggtcctgaatgcagagca

SEQ ID NO: 373765 - DNA, 20 bp, Artificial Sequence
  Description of Artificial Sequence: Synthetic oligonucleotide
  Target: LAMA2; (+) strand; PAM type: YTN; PAM sequence: TTT
gggtcctgaatgcagagcat

SEQ ID NO: 373766 - DNA, 20 bp, Artificial Sequence
  Description of Artificial Sequence: Synthetic oligonucleotide
  Target: LAMA2; (+) strand; PAM type: YTN; PAM sequence: TTG
ggtcctgaatgcagagcatg

SEQ ID NO: 373767 - DNA, 20 bp, Artificial Sequence
  Description of Artificial Sequence: Synthetic oligonucleotide
  Target: LAMA2; (+) strand; PAM type: YTN; PAM sequence: CTG
aatgcagagcatgggctaca

SEQ ID NO: 373768 - DNA, 20 bp, Artificial Sequence
  Description of Artificial Sequence: Synthetic oligonucleotide
  Target: LAMA2; (+) strand; PAM type: YTN; PAM sequence: CTA
cagaaataacagaggagggg

SEQ ID NO: 373769 - DNA, 20 bp, Artificial Sequence
  Description of Artificial Sequence: Synthetic oligonucleotide
  Target: LAMA2; (+) strand; PAM type: YTN; PAM sequence: TTA
tacctacctgtagtactgtt

SEQ ID NO: 373770 - DNA, 20 bp, Artificial Sequence
  Description of Artificial Sequence: Synthetic oligonucleotide
  Target: LAMA2; (+) strand; PAM type: YTN; PAM sequence: CTA
cctgtagtactgttagcaaa

SEQ ID NO: 373771 - DNA, 20 bp, Artificial Sequence
  Description of Artificial Sequence: Synthetic oligonucleotide
  Target: LAMA2; (+) strand; PAM type: YTN; PAM sequence: CTG
tagtactgttagcaaaattg

SEQ ID NO: 373772 - DNA, 20 bp, Artificial Sequence
  Description of Artificial Sequence: Synthetic oligonucleotide
  Target: LAMA2; (+) strand; PAM type: YTN; PAM sequence: CTG
ttagcaaaattgtgactcca

SEQ ID NO: 373773 - DNA, 20 bp, Artificial Sequence
  Description of Artificial Sequence: Synthetic oligonucleotide
  Target: LAMA2; (+) strand; PAM type: YTN; PAM sequence: TTA
gcaaaattgtgactccagtt

SEQ ID NO: 373774 - DNA, 20 bp, Artificial Sequence
  Description of Artificial Sequence: Synthetic oligonucleotide
  Target: LAMA2; (+) strand; PAM type: YTN; PAM sequence: TTG
tgactccagttgaggtgtca

SEQ ID NO: 373775 - DNA, 20 bp, Artificial Sequence
  Description of Artificial Sequence: Synthetic oligonucleotide
  Target: LAMA2; (+) strand; PAM type: YTN; PAM sequence: CTC
cagttgaggtgtcaagaggc

SEQ ID NO: 373776 - DNA, 20 bp, Artificial Sequence
  Description of Artificial Sequence: Synthetic oligonucleotide
  Target: LAMA2; (+) strand; PAM type: YTN; PAM sequence: TTG
aggtgtcaagaggccactca

SEQ ID NO: 373777 - DNA, 20 bp, Artificial Sequence
  Description of Artificial Sequence: Synthetic oligonucleotide
  Target: LAMA2; (+) strand; PAM type: YTN; PAM sequence: CTC
atatgtggttgtgcagtttg

SEQ ID NO: 373778 - DNA, 20 bp, Artificial Sequence
  Description of Artificial Sequence: Synthetic oligonucleotide
  Target: LAMA2; (+) strand; PAM type: YTN; PAM sequence: TTG
tgcagtttgtacactgcaca

SEQ ID NO: 373779 - DNA, 20 bp, Artificial Sequence
  Description of Artificial Sequence: Synthetic oligonucleotide
  Target: LAMA2; (+) strand; PAM type: YTN; PAM sequence: TTT
gtacactgcacaaaggcact

SEQ ID NO: 373780 - DNA, 20 bp, Artificial Sequence
  Description of Artificial Sequence: Synthetic oligonucleotide
  Target: LAMA2; (+) strand; PAM type: YTN; PAM sequence: TTG
tacactgcacaaaggcactc

SEQ ID NO: 373781 - DNA, 20 bp, Artificial Sequence
  Description of Artificial Sequence: Synthetic oligonucleotide
  Target: LAMA2; (+) strand; PAM type: YTN; PAM sequence: CTG
cacaaaggcactcagggaag

SEQ ID NO: 373782 - DNA, 20 bp, Artificial Sequence
  Description of Artificial Sequence: Synthetic oligonucleotide
  Target: LAMA2; (+) strand; PAM type: YTN; PAM sequence: CTC
agggaaggggaagattgagg

SEQ ID NO: 373783 - DNA, 20 bp, Artificial Sequence
  Description of Artificial Sequence: Synthetic oligonucleotide
  Target: LAMA2; (+) strand; PAM type: YTN; PAM sequence: TTG
agggcttgaatccagtttac

SEQ ID NO: 373784 - DNA, 20 bp, Artificial Sequence
  Description of Artificial Sequence: Synthetic oligonucleotide
  Target: LAMA2; (+) strand; PAM type: YTN; PAM sequence: CTT
gaatccagtttaccctcttc

SEQ ID NO: 373785 - DNA, 20 bp, Artificial Sequence
  Description of Artificial Sequence: Synthetic oligonucleotide
  Target: LAMA2; (+) strand; PAM type: YTN; PAM sequence: TTG
aatccagtttaccctcttct

SEQ ID NO: 373786 - DNA, 20 bp, Artificial Sequence
  Description of Artificial Sequence: Synthetic oligonucleotide
  Target: LAMA2; (+) strand; PAM type: YTN; PAM sequence: TTT
accctcttcttttccatgaa

SEQ ID NO: 373787 - DNA, 20 bp, Artificial Sequence
  Description of Artificial Sequence: Synthetic oligonucleotide
  Target: LAMA2; (+) strand; PAM type: YTN; PAM sequence: TTA
ccctcttcttttccatgaag

SEQ ID NO: 373788 - DNA, 20 bp, Artificial Sequence
  Description of Artificial Sequence: Synthetic oligonucleotide
  Target: LAMA2; (+) strand; PAM type: YTN; PAM sequence: CTC
ttcttttccatgaagtccct

SEQ ID NO: 373789 - DNA, 20 bp, Artificial Sequence
  Description of Artificial Sequence: Synthetic oligonucleotide
  Target: LAMA2; (+) strand; PAM type: YTN; PAM sequence: CTT
cttttccatgaagtccctgg

SEQ ID NO: 373790 - DNA, 20 bp, Artificial Sequence
  Description of Artificial Sequence: Synthetic oligonucleotide
  Target: LAMA2; (+) strand; PAM type: YTN; PAM sequence: TTC
ttttccatgaagtccctggg

SEQ ID NO: 373791 - DNA, 20 bp, Artificial Sequence
  Description of Artificial Sequence: Synthetic oligonucleotide
  Target: LAMA2; (+) strand; PAM type: YTN; PAM sequence: CTT
ttccatgaagtccctgggtg

SEQ ID NO: 373792 - DNA, 20 bp, Artificial Sequence
  Description of Artificial Sequence: Synthetic oligonucleotide
  Target: LAMA2; (+) strand; PAM type: YTN; PAM sequence: TTT
tccatgaagtccctgggtgt

SEQ ID NO: 373793 - DNA, 20 bp, Artificial Sequence
  Description of Artificial Sequence: Synthetic oligonucleotide
  Target: LAMA2; (+) strand; PAM type: YTN; PAM sequence: TTT
ccatgaagtccctgggtgtc

SEQ ID NO: 373794 - DNA, 20 bp, Artificial Sequence
  Description of Artificial Sequence: Synthetic oligonucleotide
  Target: LAMA2; (+) strand; PAM type: YTN; PAM sequence: TTC
catgaagtccctgggtgtct

SEQ ID NO: 373795 - DNA, 20 bp, Artificial Sequence
  Description of Artificial Sequence: Synthetic oligonucleotide
  Target: LAMA2; (+) strand; PAM type: YTN; PAM sequence: CTG
ggtgtctagtctgtttactt

SEQ ID NO: 373796 - DNA, 20 bp, Artificial Sequence
  Description of Artificial Sequence: Synthetic oligonucleotide
  Target: LAMA2; (+) strand; PAM type: YTN; PAM sequence: CTA
gtctgtttactttttctgca

SEQ ID NO: 373797 - DNA, 20 bp, Artificial Sequence
  Description of Artificial Sequence: Synthetic oligonucleotide
  Target: LAMA2; (+) strand; PAM type: YTN; PAM sequence: CTG
tttactttttctgcatatgt

SEQ ID NO: 373798 - DNA, 20 bp, Artificial Sequence
  Description of Artificial Sequence: Synthetic oligonucleotide
  Target: LAMA2; (+) strand; PAM type: YTN; PAM sequence: TTT
actttttctgcatatgtcta

SEQ ID NO: 373799 - DNA, 20 bp, Artificial Sequence
  Description of Artificial Sequence: Synthetic oligonucleotide
  Target: LAMA2; (+) strand; PAM type: YTN; PAM sequence: TTA
ctttttctgcatatgtctag

SEQ ID NO: 373800 - DNA, 20 bp, Artificial Sequence
  Description of Artificial Sequence: Synthetic oligonucleotide
  Target: LAMA2; (+) strand; PAM type: YTN; PAM sequence: CTT
tttctgcatatgtctagaaa

SEQ ID NO: 373801 - DNA, 20 bp, Artificial Sequence
  Description of Artificial Sequence: Synthetic oligonucleotide
  Target: LAMA2; (+) strand; PAM type: YTN; PAM sequence: TTT
ttctgcatatgtctagaaag

SEQ ID NO: 373802 - DNA, 20 bp, Artificial Sequence
  Description of Artificial Sequence: Synthetic oligonucleotide
  Target: LAMA2; (+) strand; PAM type: YTN; PAM sequence: TTT
tctgcatatgtctagaaagg

SEQ ID NO: 373803 - DNA, 20 bp, Artificial Sequence
  Description of Artificial Sequence: Synthetic oligonucleotide
  Target: LAMA2; (+) strand; PAM type: YTN; PAM sequence: TTT
ctgcatatgtctagaaagga

SEQ ID NO: 373804 - DNA, 20 bp, Artificial Sequence
  Description of Artificial Sequence: Synthetic oligonucleotide
  Target: LAMA2; (+) strand; PAM type: YTN; PAM sequence: TTC
tgcatatgtctagaaaggac

SEQ ID NO: 373805 - DNA, 20 bp, Artificial Sequence
  Description of Artificial Sequence: Synthetic oligonucleotide
  Target: LAMA2; (+) strand; PAM type: YTN; PAM sequence: CTG
catatgtctagaaaggacaa

SEQ ID NO: 373806 - DNA, 20 bp, Artificial Sequence
  Description of Artificial Sequence: Synthetic oligonucleotide
  Target: LAMA2; (+) strand; PAM type: YTN; PAM sequence: CTA
gaaaggacaatttcttccaa

SEQ ID NO: 373807 - DNA, 20 bp, Artificial Sequence
  Description of Artificial Sequence: Synthetic oligonucleotide
  Target: LAMA2; (+) strand; PAM type: YTN; PAM sequence: TTT
cttccaacttgtaaaaggca

SEQ ID NO: 373808 - DNA, 20 bp, Artificial Sequence
  Description of Artificial Sequence: Synthetic oligonucleotide
  Target: LAMA2; (+) strand; PAM type: YTN; PAM sequence: TTC
ttccaacttgtaaaaggcac

SEQ ID NO: 373809 - DNA, 20 bp, Artificial Sequence
  Description of Artificial Sequence: Synthetic oligonucleotide
  Target: LAMA2; (+) strand; PAM type: YTN; PAM sequence: CTT
ccaacttgtaaaaggcacca

SEQ ID NO: 373810 - DNA, 20 bp, Artificial Sequence
  Description of Artificial Sequence: Synthetic oligonucleotide
  Target: LAMA2; (+) strand; PAM type: YTN; PAM sequence: TTC
caacttgtaaaaggcaccat

SEQ ID NO: 373811 - DNA, 20 bp, Artificial Sequence
  Description of Artificial Sequence: Synthetic oligonucleotide
  Target: LAMA2; (+) strand; PAM type: YTN; PAM sequence: CTT
gtaaaaggcaccatgtgagc

SEQ ID NO: 373812 - DNA, 20 bp, Artificial Sequence
  Description of Artificial Sequence: Synthetic oligonucleotide
  Target: LAMA2; (+) strand; PAM type: YTN; PAM sequence: TTG
taaaaggcaccatgtgagca

SEQ ID NO: 373813 - DNA, 20 bp, Artificial Sequence
  Description of Artificial Sequence: Synthetic oligonucleotide
  Target: LAMA2; (+) strand; PAM type: YTN; PAM sequence: CTC
agtcttttgctgattatgtc

SEQ ID NO: 373814 - DNA, 20 bp, Artificial Sequence
  Description of Artificial Sequence: Synthetic oligonucleotide
  Target: LAMA2; (+) strand; PAM type: YTN; PAM sequence: CTT
ttgctgattatgtcaaatgg

SEQ ID NO: 373815 - DNA, 20 bp, Artificial Sequence
  Description of Artificial Sequence: Synthetic oligonucleotide
  Target: LAMA2; (+) strand; PAM type: YTN; PAM sequence: TTT
tgctgattatgtcaaatggg

SEQ ID NO: 373816 - DNA, 20 bp, Artificial Sequence
  Description of Artificial Sequence: Synthetic oligonucleotide
  Target: LAMA2; (+) strand; PAM type: YTN; PAM sequence: TTT
gctgattatgtcaaatggga

SEQ ID NO: 373817 - DNA, 20 bp, Artificial Sequence
  Description of Artificial Sequence: Synthetic oligonucleotide
  Target: LAMA2; (+) strand; PAM type: YTN; PAM sequence: TTG
ctgattatgtcaaatgggag

SEQ ID NO: 373818 - DNA, 20 bp, Artificial Sequence
  Description of Artificial Sequence: Synthetic oligonucleotide
  Target: LAMA2; (+) strand; PAM type: YTN; PAM sequence: CTG
attatgtcaaatgggaggaa

SEQ ID NO: 373819 - DNA, 20 bp, Artificial Sequence
  Description of Artificial Sequence: Synthetic oligonucleotide
  Target: LAMA2; (+) strand; PAM type: YTN; PAM sequence: TTA
tgtcaaatgggaggaagtaa

SEQ ID NO: 373820 - DNA, 20 bp, Artificial Sequence
  Description of Artificial Sequence: Synthetic oligonucleotide
  Target: LAMA2; (+) strand; PAM type: YTN; PAM sequence: TTA
cagccacgcctctttataca

SEQ ID NO: 373821 - DNA, 20 bp, Artificial Sequence
  Description of Artificial Sequence: Synthetic oligonucleotide
  Target: LAMA2; (+) strand; PAM type: YTN; PAM sequence: CTC
tttatacagcagccaccctc

SEQ ID NO: 373822 - DNA, 20 bp, Artificial Sequence
  Description of Artificial Sequence: Synthetic oligonucleotide
  Target: LAMA2; (+) strand; PAM type: YTN; PAM sequence: CTT
tatacagcagccaccctctt

SEQ ID NO: 373823 - DNA, 20 bp, Artificial Sequence
  Description of Artificial Sequence: Synthetic oligonucleotide
  Target: LAMA2; (+) strand; PAM type: YTN; PAM sequence: TTT
atacagcagccaccctcttc

SEQ ID NO: 373824 - DNA, 20 bp, Artificial Sequence
  Description of Artificial Sequence: Synthetic oligonucleotide
  Target: LAMA2; (+) strand; PAM type: YTN; PAM sequence: TTA
tacagcagccaccctcttct

SEQ ID NO: 373825 - DNA, 20 bp, Artificial Sequence
  Description of Artificial Sequence: Synthetic oligonucleotide
  Target: LAMA2; (+) strand; PAM type: YTN; PAM sequence: CTC
ttctgtgcctttgccaatac

SEQ ID NO: 373826 - DNA, 20 bp, Artificial Sequence
  Description of Artificial Sequence: Synthetic oligonucleotide
  Target: LAMA2; (+) strand; PAM type: YTN; PAM sequence: CTT
ctgtgcctttgccaatactg

SEQ ID NO: 373827 - DNA, 20 bp, Artificial Sequence
  Description of Artificial Sequence: Synthetic oligonucleotide
  Target: LAMA2; (+) strand; PAM type: YTN; PAM sequence: TTC
tgtgcctttgccaatactgt

SEQ ID NO: 373828 - DNA, 20 bp, Artificial Sequence
  Description of Artificial Sequence: Synthetic oligonucleotide
  Target: LAMA2; (+) strand; PAM type: YTN; PAM sequence: CTG
tgcctttgccaatactgttc

SEQ ID NO: 373829 - DNA, 20 bp, Artificial Sequence
  Description of Artificial Sequence: Synthetic oligonucleotide
  Target: LAMA2; (+) strand; PAM type: YTN; PAM sequence: CTT
tgccaatactgttccctctg

SEQ ID NO: 373830 - DNA, 20 bp, Artificial Sequence
  Description of Artificial Sequence: Synthetic oligonucleotide
  Target: LAMA2; (+) strand; PAM type: YTN; PAM sequence: TTT
gccaatactgttccctctgc

SEQ ID NO: 373831 - DNA, 20 bp, Artificial Sequence
  Description of Artificial Sequence: Synthetic oligonucleotide
  Target: LAMA2; (+) strand; PAM type: YTN; PAM sequence: TTG
ccaatactgttccctctgcc

SEQ ID NO: 373832 - DNA, 20 bp, Artificial Sequence
  Description of Artificial Sequence: Synthetic oligonucleotide
  Target: LAMA2; (+) strand; PAM type: YTN; PAM sequence: CTG
ttccctctgcctggaagatt

SEQ ID NO: 373833 - DNA, 20 bp, Artificial Sequence
  Description of Artificial Sequence: Synthetic oligonucleotide
  Target: LAMA2; (+) strand; PAM type: YTN; PAM sequence: TTC
cctctgcctggaagattgca

SEQ ID NO: 373834 - DNA, 20 bp, Artificial Sequence
  Description of Artificial Sequence: Synthetic oligonucleotide
  Target: LAMA2; (+) strand; PAM type: YTN; PAM sequence: CTC
tgcctggaagattgcagccc

SEQ ID NO: 373835 - DNA, 20 bp, Artificial Sequence
  Description of Artificial Sequence: Synthetic oligonucleotide
  Target: LAMA2; (+) strand; PAM type: YTN; PAM sequence: CTG
cctggaagattgcagccctt

SEQ ID NO: 373836 - DNA, 20 bp, Artificial Sequence
  Description of Artificial Sequence: Synthetic oligonucleotide
  Target: LAMA2; (+) strand; PAM type: YTN; PAM sequence: CTG
gaagattgcagccctttcac

SEQ ID NO: 373837 - DNA, 20 bp, Artificial Sequence
  Description of Artificial Sequence: Synthetic oligonucleotide
  Target: LAMA2; (+) strand; PAM type: YTN; PAM sequence: TTG
cagccctttcactcctccat

SEQ ID NO: 373838 - DNA, 20 bp, Artificial Sequence
  Description of Artificial Sequence: Synthetic oligonucleotide
  Target: LAMA2; (+) strand; PAM type: YTN; PAM sequence: CTT
tcactcctccatccgagact

SEQ ID NO: 373839 - DNA, 20 bp, Artificial Sequence
  Description of Artificial Sequence: Synthetic oligonucleotide
  Target: LAMA2; (+) strand; PAM type: YTN; PAM sequence: TTT
cactcctccatccgagacta

SEQ ID NO: 373840 - DNA, 20 bp, Artificial Sequence
  Description of Artificial Sequence: Synthetic oligonucleotide
  Target: LAMA2; (+) strand; PAM type: YTN; PAM sequence: TTC
actcctccatccgagactaa

SEQ ID NO: 373841 - DNA, 20 bp, Artificial Sequence
  Description of Artificial Sequence: Synthetic oligonucleotide
  Target: LAMA2; (+) strand; PAM type: YTN; PAM sequence: CTC
ctccatccgagactaactaa

SEQ ID NO: 373842 - DNA, 20 bp, Artificial Sequence
  Description of Artificial Sequence: Synthetic oligonucleotide
  Target: LAMA2; (+) strand; PAM type: YTN; PAM sequence: CTC
catccgagactaactaatcc

SEQ ID NO: 373843 - DNA, 20 bp, Artificial Sequence
  Description of Artificial Sequence: Synthetic oligonucleotide
  Target: LAMA2; (+) strand; PAM type: YTN; PAM sequence: CTA
actaatccctgttcagctcc

SEQ ID NO: 373844 - DNA, 20 bp, Artificial Sequence
  Description of Artificial Sequence: Synthetic oligonucleotide
  Target: LAMA2; (+) strand; PAM type: YTN; PAM sequence: CTA
atccctgttcagctcccaaa

SEQ ID NO: 373845 - DNA, 20 bp, Artificial Sequence
  Description of Artificial Sequence: Synthetic oligonucleotide
  Target: LAMA2; (+) strand; PAM type: YTN; PAM sequence: CTG
ttcagctcccaaaagtcagc

SEQ ID NO: 373846 - DNA, 20 bp, Artificial Sequence
  Description of Artificial Sequence: Synthetic oligonucleotide
  Target: LAMA2; (+) strand; PAM type: YTN; PAM sequence: TTC
agctcccaaaagtcagcact

SEQ ID NO: 373847 - DNA, 20 bp, Artificial Sequence
  Description of Artificial Sequence: Synthetic oligonucleotide
  Target: LAMA2; (+) strand; PAM type: YTN; PAM sequence: CTC
ccaaaagtcagcactatcat

SEQ ID NO: 373848 - DNA, 20 bp, Artificial Sequence
  Description of Artificial Sequence: Synthetic oligonucleotide
  Target: LAMA2; (+) strand; PAM type: YTN; PAM sequence: CTA
tcatcctgaaaatgtccttg

SEQ ID NO: 373849 - DNA, 20 bp, Artificial Sequence
  Description of Artificial Sequence: Synthetic oligonucleotide
  Target: LAMA2; (+) strand; PAM type: YTN; PAM sequence: CTG
aaaatgtccttgattgggcc

SEQ ID NO: 373850 - DNA, 20 bp, Artificial Sequence
  Description of Artificial Sequence: Synthetic oligonucleotide
  Target: LAMA2; (+) strand; PAM type: YTN; PAM sequence: CTT
gattgggcctaatctgagtt

SEQ ID NO: 373851 - DNA, 20 bp, Artificial Sequence
  Description of Artificial Sequence: Synthetic oligonucleotide
  Target: LAMA2; (+) strand; PAM type: YTN; PAM sequence: TTG
attgggcctaatctgagttg

SEQ ID NO: 373852 - DNA, 20 bp, Artificial Sequence
  Description of Artificial Sequence: Synthetic oligonucleotide
  Target: LAMA2; (+) strand; PAM type: YTN; PAM sequence: TTG
ggcctaatctgagttggttg

SEQ ID NO: 373853 - DNA, 20 bp, Artificial Sequence
  Description of Artificial Sequence: Synthetic oligonucleotide
  Target: LAMA2; (+) strand; PAM type: YTN; PAM sequence: CTA
atctgagttggttgcccttt

SEQ ID NO: 373854 - DNA, 20 bp, Artificial Sequence
  Description of Artificial Sequence: Synthetic oligonucleotide
  Target: LAMA2; (+) strand; PAM type: YTN; PAM sequence: CTG
agttggttgcccttttgtgt

SEQ ID NO: 373855 - DNA, 20 bp, Artificial Sequence
  Description of Artificial Sequence: Synthetic oligonucleotide
  Target: LAMA2; (+) strand; PAM type: YTN; PAM sequence: TTG
gttgcccttttgtgtgctgc

SEQ ID NO: 373856 - DNA, 20 bp, Artificial Sequence
  Description of Artificial Sequence: Synthetic oligonucleotide
  Target: LAMA2; (+) strand; PAM type: YTN; PAM sequence: TTG
cccttttgtgtgctgccata

SEQ ID NO: 373857 - DNA, 20 bp, Artificial Sequence
  Description of Artificial Sequence: Synthetic oligonucleotide
  Target: LAMA2; (+) strand; PAM type: YTN; PAM sequence: CTT
ttgtgtgctgccataatagc

SEQ ID NO: 373858 - DNA, 20 bp, Artificial Sequence
  Description of Artificial Sequence: Synthetic oligonucleotide
  Target: LAMA2; (+) strand; PAM type: YTN; PAM sequence: TTT
tgtgtgctgccataatagca

SEQ ID NO: 373859 - DNA, 20 bp, Artificial Sequence
  Description of Artificial Sequence: Synthetic oligonucleotide
  Target: LAMA2; (+) strand; PAM type: YTN; PAM sequence: TTT
gtgtgctgccataatagcat

SEQ ID NO: 373860 - DNA, 20 bp, Artificial Sequence
  Description of Artificial Sequence: Synthetic oligonucleotide
  Target: LAMA2; (+) strand; PAM type: YTN; PAM sequence: TTG
tgtgctgccataatagcatt

SEQ ID NO: 373861 - DNA, 20 bp, Artificial Sequence
  Description of Artificial Sequence: Synthetic oligonucleotide
  Target: LAMA2; (+) strand; PAM type: YTN; PAM sequence: CTG
ccataatagcatttgcatat

SEQ ID NO: 373862 - DNA, 20 bp, Artificial Sequence
  Description of Artificial Sequence: Synthetic oligonucleotide
  Target: LAMA2; (+) strand; PAM type: YTN; PAM sequence: TTT
gcatatctccagttgttcta

SEQ ID NO: 373863 - DNA, 20 bp, Artificial Sequence
  Description of Artificial Sequence: Synthetic oligonucleotide
  Target: LAMA2; (+) strand; PAM type: YTN; PAM sequence: TTG
catatctccagttgttctac

SEQ ID NO: 373864 - DNA, 20 bp, Artificial Sequence
  Description of Artificial Sequence: Synthetic oligonucleotide
  Target: LAMA2; (+) strand; PAM type: YTN; PAM sequence: CTC
cagttgttctactgctacgt

SEQ ID NO: 373865 - DNA, 20 bp, Artificial Sequence
  Description of Artificial Sequence: Synthetic oligonucleotide
  Target: LAMA2; (+) strand; PAM type: YTN; PAM sequence: TTG
ttctactgctacgttttaaa

SEQ ID NO: 373866 - DNA, 20 bp, Artificial Sequence
  Description of Artificial Sequence: Synthetic oligonucleotide
  Target: LAMA2; (+) strand; PAM type: YTN; PAM sequence: TTC
tactgctacgttttaaaatg

SEQ ID NO: 373867 - DNA, 20 bp, Artificial Sequence
  Description of Artificial Sequence: Synthetic oligonucleotide
  Target: LAMA2; (+) strand; PAM type: YTN; PAM sequence: CTA
ctgctacgttttaaaatgtg

SEQ ID NO: 373868 - DNA, 20 bp, Artificial Sequence
  Description of Artificial Sequence: Synthetic oligonucleotide
  Target: LAMA2; (+) strand; PAM type: YTN; PAM sequence: CTG
ctacgttttaaaatgtgtgt

SEQ ID NO: 373869 - DNA, 20 bp, Artificial Sequence
  Description of Artificial Sequence: Synthetic oligonucleotide
  Target: LAMA2; (+) strand; PAM type: YTN; PAM sequence: CTA
cgttttaaaatgtgtgttca

SEQ ID NO: 373870 - DNA, 20 bp, Artificial Sequence
  Description of Artificial Sequence: Synthetic oligonucleotide
  Target: LAMA2; (+) strand; PAM type: YTN; PAM sequence: TTT
taaaatgtgtgttcattctc

SEQ ID NO: 373871 - DNA, 20 bp, Artificial Sequence
  Description of Artificial Sequence: Synthetic oligonucleotide
  Target: LAMA2; (+) strand; PAM type: YTN; PAM sequence: TTT
aaaatgtgtgttcattctcc

SEQ ID NO: 373872 - DNA, 20 bp, Artificial Sequence
  Description of Artificial Sequence: Synthetic oligonucleotide
  Target: LAMA2; (+) strand; PAM type: YTN; PAM sequence: TTA
aaatgtgtgttcattctcca

SEQ ID NO: 373873 - DNA, 20 bp, Artificial Sequence
  Description of Artificial Sequence: Synthetic oligonucleotide
  Target: LAMA2; (+) strand; PAM type: YTN; PAM sequence: TTC
attctccatggactgtagtg

SEQ ID NO: 373874 - DNA, 20 bp, Artificial Sequence
  Description of Artificial Sequence: Synthetic oligonucleotide
  Target: LAMA2; (+) strand; PAM type: YTN; PAM sequence: TTC
tccatggactgtagtgtgaa

SEQ ID NO: 373875 - DNA, 20 bp, Artificial Sequence
  Description of Artificial Sequence: Synthetic oligonucleotide
  Target: LAMA2; (+) strand; PAM type: YTN; PAM sequence: CTC
catggactgtagtgtgaaga

SEQ ID NO: 373876 - DNA, 20 bp, Artificial Sequence
  Description of Artificial Sequence: Synthetic oligonucleotide
  Target: LAMA2; (+) strand; PAM type: YTN; PAM sequence: CTG
tagtgtgaagactgtacctt

SEQ ID NO: 373877 - DNA, 20 bp, Artificial Sequence
  Description of Artificial Sequence: Synthetic oligonucleotide
  Target: LAMA2; (+) strand; PAM type: YTN; PAM sequence: CTG
taccttatttgtattagtac

SEQ ID NO: 373878 - DNA, 20 bp, Artificial Sequence
  Description of Artificial Sequence: Synthetic oligonucleotide
  Target: LAMA2; (+) strand; PAM type: YTN; PAM sequence: CTT
atttgtattagtaccgtgta

SEQ ID NO: 373879 - DNA, 20 bp, Artificial Sequence
  Description of Artificial Sequence: Synthetic oligonucleotide
  Target: LAMA2; (+) strand; PAM type: YTN; PAM sequence: TTA
tttgtattagtaccgtgtaa

SEQ ID NO: 373880 - DNA, 20 bp, Artificial Sequence
  Description of Artificial Sequence: Synthetic oligonucleotide
  Target: LAMA2; (+) strand; PAM type: YTN; PAM sequence: TTT
gtattagtaccgtgtaaaag

SEQ ID NO: 373881 - DNA, 20 bp, Artificial Sequence
  Description of Artificial Sequence: Synthetic oligonucleotide
  Target: LAMA2; (+) strand; PAM type: YTN; PAM sequence: TTG
tattagtaccgtgtaaaagt

SEQ ID NO: 373882 - DNA, 20 bp, Artificial Sequence
  Description of Artificial Sequence: Synthetic oligonucleotide
  Target: LAMA2; (+) strand; PAM type: YTN; PAM sequence: TTA
gtaccgtgtaaaagtgctca

SEQ ID NO: 373883 - DNA, 20 bp, Artificial Sequence
  Description of Artificial Sequence: Synthetic oligonucleotide
  Target: LAMA2; (+) strand; PAM type: YTN; PAM sequence: CTC
agctgattttttttaatggg

SEQ ID NO: 373884 - DNA, 20 bp, Artificial Sequence
  Description of Artificial Sequence: Synthetic oligonucleotide
  Target: LAMA2; (+) strand; PAM type: YTN; PAM sequence: CTG
attttttttaatgggttggg

SEQ ID NO: 373885 - DNA, 20 bp, Artificial Sequence
  Description of Artificial Sequence: Synthetic oligonucleotide
  Target: LAMA2; (+) strand; PAM type: YTN; PAM sequence: TTT
tttttaatgggttgggagaa

SEQ ID NO: 373886 - DNA, 20 bp, Artificial Sequence
  Description of Artificial Sequence: Synthetic oligonucleotide
  Target: LAMA2; (+) strand; PAM type: YTN; PAM sequence: TTT
ttttaatgggttgggagaaa

SEQ ID NO: 373887 - DNA, 20 bp, Artificial Sequence
  Description of Artificial Sequence: Synthetic oligonucleotide
  Target: LAMA2; (+) strand; PAM type: YTN; PAM sequence: TTT
tttaatgggttgggagaaac

SEQ ID NO: 373888 - DNA, 20 bp, Artificial Sequence
  Description of Artificial Sequence: Synthetic oligonucleotide
  Target: LAMA2; (+) strand; PAM type: YTN; PAM sequence: TTT
ttaatgggttgggagaaacc

SEQ ID NO: 373889 - DNA, 20 bp, Artificial Sequence
  Description of Artificial Sequence: Synthetic oligonucleotide
  Target: LAMA2; (+) strand; PAM type: YTN; PAM sequence: TTT
taatgggttgggagaaacca

SEQ ID NO: 373890 - DNA, 20 bp, Artificial Sequence
  Description of Artificial Sequence: Synthetic oligonucleotide
  Target: LAMA2; (+) strand; PAM type: YTN; PAM sequence: TTT
aatgggttgggagaaaccag

SEQ ID NO: 373891 - DNA, 20 bp, Artificial Sequence
  Description of Artificial Sequence: Synthetic oligonucleotide
  Target: LAMA2; (+) strand; PAM type: YTN; PAM sequence: TTA
atgggttgggagaaaccaga

SEQ ID NO: 373892 - DNA, 20 bp, Artificial Sequence
  Description of Artificial Sequence: Synthetic oligonucleotide
  Target: LAMA2; (+) strand; PAM type: YTN; PAM sequence: TTG
ggagaaaccagagcttttct

SEQ ID NO: 373893 - DNA, 20 bp, Artificial Sequence
  Description of Artificial Sequence: Synthetic oligonucleotide
  Target: LAMA2; (+) strand; PAM type: YTN; PAM sequence: CTT
ttctaatttgcttggctaga

SEQ ID NO: 373894 - DNA, 20 bp, Artificial Sequence
  Description of Artificial Sequence: Synthetic oligonucleotide
  Target: LAMA2; (+) strand; PAM type: YTN; PAM sequence: TTT
tctaatttgcttggctagat

SEQ ID NO: 373895 - DNA, 20 bp, Artificial Sequence
  Description of Artificial Sequence: Synthetic oligonucleotide
  Target: LAMA2; (+) strand; PAM type: YTN; PAM sequence: TTT
ctaatttgcttggctagatt

SEQ ID NO: 373896 - DNA, 20 bp, Artificial Sequence
  Description of Artificial Sequence: Synthetic oligonucleotide
  Target: LAMA2; (+) strand; PAM type: YTN; PAM sequence: TTC
taatttgcttggctagatta

SEQ ID NO: 373897 - DNA, 20 bp, Artificial Sequence
  Description of Artificial Sequence: Synthetic oligonucleotide
  Target: LAMA2; (+) strand; PAM type: YTN; PAM sequence: CTA
atttgcttggctagattaag

SEQ ID NO: 373898 - DNA, 20 bp, Artificial Sequence
  Description of Artificial Sequence: Synthetic oligonucleotide
  Target: LAMA2; (+) strand; PAM type: YTN; PAM sequence: TTT
gcttggctagattaagccag

SEQ ID NO: 373899 - DNA, 20 bp, Artificial Sequence
  Description of Artificial Sequence: Synthetic oligonucleotide
  Target: LAMA2; (+) strand; PAM type: YTN; PAM sequence: TTG
cttggctagattaagccagc

SEQ ID NO: 373900 - DNA, 20 bp, Artificial Sequence
  Description of Artificial Sequence: Synthetic oligonucleotide
  Target: LAMA2; (+) strand; PAM type: YTN; PAM sequence: CTT
ggctagattaagccagcatt

SEQ ID NO: 373901 - DNA, 20 bp, Artificial Sequence
  Description of Artificial Sequence: Synthetic oligonucleotide
  Target: LAMA2; (+) strand; PAM type: YTN; PAM sequence: TTG
gctagattaagccagcatta

SEQ ID NO: 373902 - DNA, 20 bp, Artificial Sequence
  Description of Artificial Sequence: Synthetic oligonucleotide
  Target: LAMA2; (+) strand; PAM type: YTN; PAM sequence: CTA
gattaagccagcattatatt

SEQ ID NO: 373903 - DNA, 20 bp, Artificial Sequence
  Description of Artificial Sequence: Synthetic oligonucleotide
  Target: LAMA2; (+) strand; PAM type: YTN; PAM sequence: TTA
agccagcattatattgtttc

SEQ ID NO: 373904 - DNA, 20 bp, Artificial Sequence
  Description of Artificial Sequence: Synthetic oligonucleotide
  Target: LAMA2; (+) strand; PAM type: YTN; PAM sequence: TTA
tattgtttcattgttttcag

SEQ ID NO: 373905 - DNA, 20 bp, Artificial Sequence
  Description of Artificial Sequence: Synthetic oligonucleotide
  Target: LAMA2; (+) strand; PAM type: YTN; PAM sequence: TTG
tttcattgttttcagtgtat

SEQ ID NO: 373906 - DNA, 20 bp, Artificial Sequence
  Description of Artificial Sequence: Synthetic oligonucleotide
  Target: LAMA2; (+) strand; PAM type: YTN; PAM sequence: TTT
cattgttttcagtgtataga

SEQ ID NO: 373907 - DNA, 20 bp, Artificial Sequence
  Description of Artificial Sequence: Synthetic oligonucleotide
  Target: LAMA2; (+) strand; PAM type: YTN; PAM sequence: TTC
attgttttcagtgtatagat

SEQ ID NO: 373908 - DNA, 20 bp, Artificial Sequence
  Description of Artificial Sequence: Synthetic oligonucleotide
  Target: LAMA2; (+) strand; PAM type: YTN; PAM sequence: TTG
ttttcagtgtatagataata

SEQ ID NO: 373909 - DNA, 20 bp, Artificial Sequence
  Description of Artificial Sequence: Synthetic oligonucleotide
  Target: LAMA2; (+) strand; PAM type: YTN; PAM sequence: TTT
tcagtgtatagataatagaa

SEQ ID NO: 373910 - DNA, 20 bp, Artificial Sequence
  Description of Artificial Sequence: Synthetic oligonucleotide
  Target: LAMA2; (+) strand; PAM type: YTN; PAM sequence: TTT
cagtgtatagataatagaaa

SEQ ID NO: 373911 - DNA, 20 bp, Artificial Sequence
  Description of Artificial Sequence: Synthetic oligonucleotide
  Target: LAMA2; (+) strand; PAM type: YTN; PAM sequence: TTC
agtgtatagataatagaaat

SEQ ID NO: 373912 - DNA, 20 bp, Artificial Sequence
  Description of Artificial Sequence: Synthetic oligonucleotide
  Target: LAMA2; (+) strand; PAM type: YTN; PAM sequence: TTT
tagccaaaagttgctgaaaa

SEQ ID NO: 373913 - DNA, 20 bp, Artificial Sequence
  Description of Artificial Sequence: Synthetic oligonucleotide
  Target: LAMA2; (+) strand; PAM type: YTN; PAM sequence: TTT
agccaaaagttgctgaaaaa

SEQ ID NO: 373914 - DNA, 20 bp, Artificial Sequence
  Description of Artificial Sequence: Synthetic oligonucleotide
  Target: LAMA2; (+) strand; PAM type: YTN; PAM sequence: TTA
gccaaaagttgctgaaaaaa

SEQ ID NO: 373915 - DNA, 20 bp, Artificial Sequence
  Description of Artificial Sequence: Synthetic oligonucleotide
  Target: LAMA2; (+) strand; PAM type: YTN; PAM sequence: TTG
ctgaaaaaatgatggggcag

SEQ ID NO: 373916 - DNA, 20 bp, Artificial Sequence
  Description of Artificial Sequence: Synthetic oligonucleotide
  Target: LAMA2; (+) strand; PAM type: YTN; PAM sequence: CTG
aaaaaatgatggggcagaat

SEQ ID NO: 373917 - DNA, 20 bp, Artificial Sequence
  Description of Artificial Sequence: Synthetic oligonucleotide
  Target: LAMA2; (+) strand; PAM type: YTN; PAM sequence: CTC
atcagtgtggttgctttctt

SEQ ID NO: 373918 - DNA, 20 bp, Artificial Sequence
  Description of Artificial Sequence: Synthetic oligonucleotide
  Target: LAMA2; (+) strand; PAM type: YTN; PAM sequence: TTG
ctttcttctcattgttgctt

SEQ ID NO: 373919 - DNA, 20 bp, Artificial Sequence
  Description of Artificial Sequence: Synthetic oligonucleotide
  Target: LAMA2; (+) strand; PAM type: YTN; PAM sequence: CTT
tcttctcattgttgcttgtc

SEQ ID NO: 373920 - DNA, 20 bp, Artificial Sequence
  Description of Artificial Sequence: Synthetic oligonucleotide
  Target: LAMA2; (+) strand; PAM type: YTN; PAM sequence: TTT
cttctcattgttgcttgtct

SEQ ID NO: 373921 - DNA, 20 bp, Artificial Sequence
  Description of Artificial Sequence: Synthetic oligonucleotide
  Target: LAMA2; (+) strand; PAM type: YTN; PAM sequence: TTC
ttctcattgttgcttgtctg

SEQ ID NO: 373922 - DNA, 20 bp, Artificial Sequence
  Description of Artificial Sequence: Synthetic oligonucleotide
  Target: LAMA2; (+) strand; PAM type: YTN; PAM sequence: CTT
ctcattgttgcttgtctgca

SEQ ID NO: 373923 - DNA, 20 bp, Artificial Sequence
  Description of Artificial Sequence: Synthetic oligonucleotide
  Target: LAMA2; (+) strand; PAM type: YTN; PAM sequence: TTC
tcattgttgcttgtctgcac

SEQ ID NO: 373924 - DNA, 20 bp, Artificial Sequence
  Description of Artificial Sequence: Synthetic oligonucleotide
  Target: LAMA2; (+) strand; PAM type: YTN; PAM sequence: CTC
attgttgcttgtctgcacgt

SEQ ID NO: 373925 - DNA, 20 bp, Artificial Sequence
  Description of Artificial Sequence: Synthetic oligonucleotide
  Target: LAMA2; (+) strand; PAM type: YTN; PAM sequence: TTG
ttgcttgtctgcacgtccgc

SEQ ID NO: 373926 - DNA, 20 bp, Artificial Sequence
  Description of Artificial Sequence: Synthetic oligonucleotide
  Target: LAMA2; (+) strand; PAM type: YTN; PAM sequence: TTG
cttgtctgcacgtccgctct

SEQ ID NO: 373927 - DNA, 20 bp, Artificial Sequence
  Description of Artificial Sequence: Synthetic oligonucleotide
  Target: LAMA2; (+) strand; PAM type: YTN; PAM sequence: CTT
gtctgcacgtccgctctttt

SEQ ID NO: 373928 - DNA, 20 bp, Artificial Sequence
  Description of Artificial Sequence: Synthetic oligonucleotide
  Target: LAMA2; (+) strand; PAM type: YTN; PAM sequence: TTG
tctgcacgtccgctcttttt

SEQ ID NO: 373929 - DNA, 20 bp, Artificial Sequence
  Description of Artificial Sequence: Synthetic oligonucleotide
  Target: LAMA2; (+) strand; PAM type: YTN; PAM sequence: CTG
cacgtccgctctttttctac

SEQ ID NO: 373930 - DNA, 20 bp, Artificial Sequence
  Description of Artificial Sequence: Synthetic oligonucleotide
  Target: LAMA2; (+) strand; PAM type: YTN; PAM sequence: CTC
tttttctacctctccctctc

SEQ ID NO: 373931 - DNA, 20 bp, Artificial Sequence
  Description of Artificial Sequence: Synthetic oligonucleotide
  Target: LAMA2; (+) strand; PAM type: YTN; PAM sequence: CTT
tttctacctctccctctctc

SEQ ID NO: 373932 - DNA, 20 bp, Artificial Sequence
  Description of Artificial Sequence: Synthetic oligonucleotide
  Target: LAMA2; (+) strand; PAM type: YTN; PAM sequence: TTT
ttctacctctccctctctct

SEQ ID NO: 373933 - DNA, 20 bp, Artificial Sequence
  Description of Artificial Sequence: Synthetic oligonucleotide
  Target: LAMA2; (+) strand; PAM type: YTN; PAM sequence: TTT
tctacctctccctctctctc

SEQ ID NO: 373934 - DNA, 20 bp, Artificial Sequence
  Description of Artificial Sequence: Synthetic oligonucleotide
  Target: LAMA2; (+) strand; PAM type: YTN; PAM sequence: TTT
ctacctctccctctctctct

SEQ ID NO: 373935 - DNA, 20 bp, Artificial Sequence
  Description of Artificial Sequence: Synthetic oligonucleotide
  Target: LAMA2; (+) strand; PAM type: YTN; PAM sequence: TTC
tacctctccctctctctctt

SEQ ID NO: 373936 - DNA, 20 bp, Artificial Sequence
  Description of Artificial Sequence: Synthetic oligonucleotide
  Target: LAMA2; (+) strand; PAM type: YTN; PAM sequence: CTA
cctctccctctctctcttcc

SEQ ID NO: 373937 - DNA, 20 bp, Artificial Sequence
  Description of Artificial Sequence: Synthetic oligonucleotide
  Target: LAMA2; (+) strand; PAM type: YTN; PAM sequence: CTC
tccctctctctcttcctctc

SEQ ID NO: 373938 - DNA, 20 bp, Artificial Sequence
  Description of Artificial Sequence: Synthetic oligonucleotide
  Target: LAMA2; (+) strand; PAM type: YTN; PAM sequence: CTC
cctctctctcttcctctctc

SEQ ID NO: 373939 - DNA, 20 bp, Artificial Sequence
  Description of Artificial Sequence: Synthetic oligonucleotide
  Target: LAMA2; (+) strand; PAM type: YTN; PAM sequence: CTC
tctctcttcctctctccctc

SEQ ID NO: 373940 - DNA, 20 bp, Artificial Sequence
  Description of Artificial Sequence: Synthetic oligonucleotide
  Target: LAMA2; (+) strand; PAM type: YTN; PAM sequence: CTC
tctcttcctctctccctccc

SEQ ID NO: 373941 - DNA, 20 bp, Artificial Sequence
  Description of Artificial Sequence: Synthetic oligonucleotide
  Target: LAMA2; (+) strand; PAM type: YTN; PAM sequence: CTC
tcttcctctctccctccctc

SEQ ID NO: 373942 - DNA, 20 bp, Artificial Sequence
  Description of Artificial Sequence: Synthetic oligonucleotide
  Target: LAMA2; (+) strand; PAM type: YTN; PAM sequence: CTC
ttcctctctccctccctccc

SEQ ID NO: 373943 - DNA, 20 bp, Artificial Sequence
  Description of Artificial Sequence: Synthetic oligonucleotide
  Target: LAMA2; (+) strand; PAM type: YTN; PAM sequence: CTT
cctctctccctccctccctc

SEQ ID NO: 373944 - DNA, 20 bp, Artificial Sequence
  Description of Artificial Sequence: Synthetic oligonucleotide
  Target: LAMA2; (+) strand; PAM type: YTN; PAM sequence: TTC
ctctctccctccctccctct

SEQ ID NO: 373945 - DNA, 20 bp, Artificial Sequence
  Description of Artificial Sequence: Synthetic oligonucleotide
  Target: LAMA2; (+) strand; PAM type: YTN; PAM sequence: CTC
tctccctccctccctctaac

SEQ ID NO: 373946 - DNA, 20 bp, Artificial Sequence
  Description of Artificial Sequence: Synthetic oligonucleotide
  Target: LAMA2; (+) strand; PAM type: YTN; PAM sequence: CTC
tccctccctccctctaacat

SEQ ID NO: 373947 - DNA, 20 bp, Artificial Sequence
  Description of Artificial Sequence: Synthetic oligonucleotide
  Target: LAMA2; (+) strand; PAM type: YTN; PAM sequence: CTC
cctccctccctctaacattg

SEQ ID NO: 373948 - DNA, 20 bp, Artificial Sequence
  Description of Artificial Sequence: Synthetic oligonucleotide
  Target: LAMA2; (+) strand; PAM type: YTN; PAM sequence: CTC
cctccctctaacattgttcc

SEQ ID NO: 373949 - DNA, 20 bp, Artificial Sequence
  Description of Artificial Sequence: Synthetic oligonucleotide
  Target: LAMA2; (+) strand; PAM type: YTN; PAM sequence: CTC
cctctaacattgttcctaaa

SEQ ID NO: 373950 - DNA, 20 bp, Artificial Sequence
  Description of Artificial Sequence: Synthetic oligonucleotide
  Target: LAMA2; (+) strand; PAM type: YTN; PAM sequence: CTC
taacattgttcctaaattat

SEQ ID NO: 373951 - DNA, 20 bp, Artificial Sequence
  Description of Artificial Sequence: Synthetic oligonucleotide
  Target: LAMA2; (+) strand; PAM type: YTN; PAM sequence: CTA
acattgttcctaaattatca

SEQ ID NO: 373952 - DNA, 20 bp, Artificial Sequence
  Description of Artificial Sequence: Synthetic oligonucleotide
  Target: LAMA2; (+) strand; PAM type: YTN; PAM sequence: TTG
ttcctaaattatcaatagca

SEQ ID NO: 373953 - DNA, 20 bp, Artificial Sequence
  Description of Artificial Sequence: Synthetic oligonucleotide
  Target: LAMA2; (+) strand; PAM type: YTN; PAM sequence: TTC
ctaaattatcaatagcagca

SEQ ID NO: 373954 - DNA, 20 bp, Artificial Sequence
  Description of Artificial Sequence: Synthetic oligonucleotide
  Target: LAMA2; (+) strand; PAM type: YTN; PAM sequence: CTA
aattatcaatagcagcaagt

SEQ ID NO: 373955 - DNA, 20 bp, Artificial Sequence
  Description of Artificial Sequence: Synthetic oligonucleotide
  Target: LAMA2; (+) strand; PAM type: YTN; PAM sequence: TTA
tcaatagcagcaagtgtaac

SEQ ID NO: 373956 - DNA, 20 bp, Artificial Sequence
  Description of Artificial Sequence: Synthetic oligonucleotide
  Target: LAMA2; (+) strand; PAM type: YTN; PAM sequence: CTG
catgtgttatctggagtctt

SEQ ID NO: 373957 - DNA, 20 bp, Artificial Sequence
  Description of Artificial Sequence: Synthetic oligonucleotide
  Target: LAMA2; (+) strand; PAM type: YTN; PAM sequence: TTA
tctggagtcttatttacatt

SEQ ID NO: 373958 - DNA, 20 bp, Artificial Sequence
  Description of Artificial Sequence: Synthetic oligonucleotide
  Target: LAMA2; (+) strand; PAM type: YTN; PAM sequence: CTG
gagtcttatttacatttaaa

SEQ ID NO: 373959 - DNA, 20 bp, Artificial Sequence
  Description of Artificial Sequence: Synthetic oligonucleotide
  Target: LAMA2; (+) strand; PAM type: YTN; PAM sequence: CTT
atttacatttaaacggccct

SEQ ID NO: 373960 - DNA, 20 bp, Artificial Sequence
  Description of Artificial Sequence: Synthetic oligonucleotide
  Target: LAMA2; (+) strand; PAM type: YTN; PAM sequence: TTA
tttacatttaaacggccctt

SEQ ID NO: 373961 - DNA, 20 bp, Artificial Sequence
  Description of Artificial Sequence: Synthetic oligonucleotide
  Target: LAMA2; (+) strand; PAM type: YTN; PAM sequence: TTT
acatttaaacggcccttttt

SEQ ID NO: 373962 - DNA, 20 bp, Artificial Sequence
  Description of Artificial Sequence: Synthetic oligonucleotide
  Target: LAMA2; (+) strand; PAM type: YTN; PAM sequence: TTA
catttaaacggccctttttc

SEQ ID NO: 373963 - DNA, 20 bp, Artificial Sequence
  Description of Artificial Sequence: Synthetic oligonucleotide
  Target: LAMA2; (+) strand; PAM type: YTN; PAM sequence: TTT
aaacggccctttttcaaaat

SEQ ID NO: 373964 - DNA, 20 bp, Artificial Sequence
  Description of Artificial Sequence: Synthetic oligonucleotide
  Target: LAMA2; (+) strand; PAM type: YTN; PAM sequence: TTA
aacggccctttttcaaaata

SEQ ID NO: 373965 - DNA, 20 bp, Artificial Sequence
  Description of Artificial Sequence: Synthetic oligonucleotide
  Target: LAMA2; (+) strand; PAM type: YTN; PAM sequence: CTT
tttcaaaatattgcaatttg

SEQ ID NO: 373966 - DNA, 20 bp, Artificial Sequence
  Description of Artificial Sequence: Synthetic oligonucleotide
  Target: LAMA2; (+) strand; PAM type: YTN; PAM sequence: TTT
ttcaaaatattgcaatttga

SEQ ID NO: 373967 - DNA, 20 bp, Artificial Sequence
  Description of Artificial Sequence: Synthetic oligonucleotide
  Target: LAMA2; (+) strand; PAM type: YTN; PAM sequence: TTT
tcaaaatattgcaatttgat

SEQ ID NO: 373968 - DNA, 20 bp, Artificial Sequence
  Description of Artificial Sequence: Synthetic oligonucleotide
  Target: LAMA2; (+) strand; PAM type: YTN; PAM sequence: TTT
caaaatattgcaatttgatt

SEQ ID NO: 373969 - DNA, 20 bp, Artificial Sequence
  Description of Artificial Sequence: Synthetic oligonucleotide
  Target: LAMA2; (+) strand; PAM type: YTN; PAM sequence: TTC
aaaatattgcaatttgattt

SEQ ID NO: 373970 - DNA, 20 bp, Artificial Sequence
  Description of Artificial Sequence: Synthetic oligonucleotide
  Target: LAMA2; (+) strand; PAM type: YTN; PAM sequence: TTG
caatttgatttgaaaaagtt

SEQ ID NO: 373971 - DNA, 20 bp, Artificial Sequence
  Description of Artificial Sequence: Synthetic oligonucleotide
  Target: LAMA2; (+) strand; PAM type: YTN; PAM sequence: TTT
gatttgaaaaagttaacaga

SEQ ID NO: 373972 - DNA, 20 bp, Artificial Sequence
  Description of Artificial Sequence: Synthetic oligonucleotide
  Target: LAMA2; (+) strand; PAM type: YTN; PAM sequence: TTG
atttgaaaaagttaacagat

SEQ ID NO: 373973 - DNA, 20 bp, Artificial Sequence
  Description of Artificial Sequence: Synthetic oligonucleotide
  Target: LAMA2; (+) strand; PAM type: YTN; PAM sequence: TTT
gaaaaagttaacagatgtgg

SEQ ID NO: 373974 - DNA, 20 bp, Artificial Sequence
  Description of Artificial Sequence: Synthetic oligonucleotide
  Target: LAMA2; (+) strand; PAM type: YTN; PAM sequence: TTG
aaaaagttaacagatgtgga

SEQ ID NO: 373975 - DNA, 20 bp, Artificial Sequence
  Description of Artificial Sequence: Synthetic oligonucleotide
  Target: LAMA2; (+) strand; PAM type: YTN; PAM sequence: TTA
acagatgtggaaaggaacaa

SEQ ID NO: 373976 - DNA, 20 bp, Artificial Sequence
  Description of Artificial Sequence: Synthetic oligonucleotide
  Target: LAMA2; (+) strand; PAM type: YTN; PAM sequence: CTT
tgttatgtcaagatatccgt

SEQ ID NO: 373977 - DNA, 20 bp, Artificial Sequence
  Description of Artificial Sequence: Synthetic oligonucleotide
  Target: LAMA2; (+) strand; PAM type: YTN; PAM sequence: TTT
gttatgtcaagatatccgtt

SEQ ID NO: 373978 - DNA, 20 bp, Artificial Sequence
  Description of Artificial Sequence: Synthetic oligonucleotide
  Target: LAMA2; (+) strand; PAM type: YTN; PAM sequence: TTG
ttatgtcaagatatccgttt

SEQ ID NO: 373979 - DNA, 20 bp, Artificial Sequence
  Description of Artificial Sequence: Synthetic oligonucleotide
  Target: LAMA2; (+) strand; PAM type: YTN; PAM sequence: TTA
tgtcaagatatccgtttcta

SEQ ID NO: 373980 - DNA, 20 bp, Artificial Sequence
  Description of Artificial Sequence: Synthetic oligonucleotide
  Target: LAMA2; (+) strand; PAM type: YTN; PAM sequence: TTT
ctagcaaggcattcattcga

SEQ ID NO: 373981 - DNA, 20 bp, Artificial Sequence
  Description of Artificial Sequence: Synthetic oligonucleotide
  Target: LAMA2; (+) strand; PAM type: YTN; PAM sequence: TTC
tagcaaggcattcattcgat

SEQ ID NO: 373982 - DNA, 20 bp, Artificial Sequence
  Description of Artificial Sequence: Synthetic oligonucleotide
  Target: LAMA2; (+) strand; PAM type: YTN; PAM sequence: CTA
gcaaggcattcattcgataa

SEQ ID NO: 373983 - DNA, 20 bp, Artificial Sequence
  Description of Artificial Sequence: Synthetic oligonucleotide
  Target: LAMA2; (+) strand; PAM type: YTN; PAM sequence: TTC
attcgataaactatttttaa

SEQ ID NO: 373984 - DNA, 20 bp, Artificial Sequence
  Description of Artificial Sequence: Synthetic oligonucleotide
  Target: LAMA2; (+) strand; PAM type: YTN; PAM sequence: TTC
gataaactatttttaaaaat

SEQ ID NO: 373985 - DNA, 20 bp, Artificial Sequence
  Description of Artificial Sequence: Synthetic oligonucleotide
  Target: LAMA2; (+) strand; PAM type: YTN; PAM sequence: CTA
tttttaaaaatgcactcatt

SEQ ID NO: 373986 - DNA, 20 bp, Artificial Sequence
  Description of Artificial Sequence: Synthetic oligonucleotide
  Target: LAMA2; (+) strand; PAM type: YTN; PAM sequence: TTT
ttaaaaatgcactcattctg

SEQ ID NO: 373987 - DNA, 20 bp, Artificial Sequence
  Description of Artificial Sequence: Synthetic oligonucleotide
  Target: LAMA2; (+) strand; PAM type: YTN; PAM sequence: TTT
taaaaatgcactcattctgc

SEQ ID NO: 373988 - DNA, 20 bp, Artificial Sequence
  Description of Artificial Sequence: Synthetic oligonucleotide
  Target: LAMA2; (+) strand; PAM type: YTN; PAM sequence: TTT
aaaaatgcactcattctgcc

SEQ ID NO: 373989 - DNA, 20 bp, Artificial Sequence
  Description of Artificial Sequence: Synthetic oligonucleotide
  Target: LAMA2; (+) strand; PAM type: YTN; PAM sequence: TTA
aaaatgcactcattctgcct

SEQ ID NO: 373990 - DNA, 20 bp, Artificial Sequence
  Description of Artificial Sequence: Synthetic oligonucleotide
  Target: LAMA2; (+) strand; PAM type: YTN; PAM sequence: CTC
attctgccttgcatatgaaa

SEQ ID NO: 373991 - DNA, 20 bp, Artificial Sequence
  Description of Artificial Sequence: Synthetic oligonucleotide
  Target: LAMA2; (+) strand; PAM type: YTN; PAM sequence: TTC
tgccttgcatatgaaaatga

SEQ ID NO: 373992 - DNA, 20 bp, Artificial Sequence
  Description of Artificial Sequence: Synthetic oligonucleotide
  Target: LAMA2; (+) strand; PAM type: YTN; PAM sequence: CTG
ccttgcatatgaaaatgaga

SEQ ID NO: 373993 - DNA, 20 bp, Artificial Sequence
  Description of Artificial Sequence: Synthetic oligonucleotide
  Target: LAMA2; (+) strand; PAM type: YTN; PAM sequence: CTT
gcatatgaaaatgagagggc

SEQ ID NO: 373994 - DNA, 20 bp, Artificial Sequence
  Description of Artificial Sequence: Synthetic oligonucleotide
  Target: LAMA2; (+) strand; PAM type: YTN; PAM sequence: TTG
catatgaaaatgagagggct

SEQ ID NO: 373995 - DNA, 20 bp, Artificial Sequence
  Description of Artificial Sequence: Synthetic oligonucleotide
  Target: LAMA2; (+) strand; PAM type: YTN; PAM sequence: CTT
gacatttcacattacaatta

SEQ ID NO: 373996 - DNA, 20 bp, Artificial Sequence
  Description of Artificial Sequence: Synthetic oligonucleotide
  Target: LAMA2; (+) strand; PAM type: YTN; PAM sequence: TTG
acatttcacattacaattat

SEQ ID NO: 373997 - DNA, 20 bp, Artificial Sequence
  Description of Artificial Sequence: Synthetic oligonucleotide
  Target: LAMA2; (+) strand; PAM type: YTN; PAM sequence: TTT
cacattacaattatttttgg

SEQ ID NO: 373998 - DNA, 20 bp, Artificial Sequence
  Description of Artificial Sequence: Synthetic oligonucleotide
  Target: LAMA2; (+) strand; PAM type: YTN; PAM sequence: TTC
acattacaattatttttggt

SEQ ID NO: 373999 - DNA, 20 bp, Artificial Sequence
  Description of Artificial Sequence: Synthetic oligonucleotide
  Target: LAMA2; (+) strand; PAM type: YTN; PAM sequence: TTA
caattatttttggtggagtg

SEQ ID NO: 374000 - DNA, 20 bp, Artificial Sequence
  Description of Artificial Sequence: Synthetic oligonucleotide
  Target: LAMA2; (+) strand; PAM type: YTN; PAM sequence: TTA
tttttggtggagtgaaaaac

SEQ ID NO: 374001 - DNA, 20 bp, Artificial Sequence
  Description of Artificial Sequence: Synthetic oligonucleotide
  Target: LAMA2; (+) strand; PAM type: YTN; PAM sequence: TTT
ttggtggagtgaaaaaccaa

SEQ ID NO: 374002 - DNA, 20 bp, Artificial Sequence
  Description of Artificial Sequence: Synthetic oligonucleotide
  Target: LAMA2; (+) strand; PAM type: YTN; PAM sequence: TTT
tggtggagtgaaaaaccaaa

SEQ ID NO: 374003 - DNA, 20 bp, Artificial Sequence
  Description of Artificial Sequence: Synthetic oligonucleotide
  Target: LAMA2; (+) strand; PAM type: YTN; PAM sequence: TTT
ggtggagtgaaaaaccaaag

SEQ ID NO: 374004 - DNA, 20 bp, Artificial Sequence
  Description of Artificial Sequence: Synthetic oligonucleotide
  Target: LAMA2; (+) strand; PAM type: YTN; PAM sequence: TTG
gtggagtgaaaaaccaaagg

SEQ ID NO: 374005 - DNA, 20 bp, Artificial Sequence
  Description of Artificial Sequence: Synthetic oligonucleotide
  Target: LAMA2; (+) strand; PAM type: YTN; PAM sequence: CTG
tgatttaaactaattttaat

SEQ ID NO: 374006 - DNA, 20 bp, Artificial Sequence
  Description of Artificial Sequence: Synthetic oligonucleotide
  Target: LAMA2; (+) strand; PAM type: YTN; PAM sequence: TTT
aaactaattttaattaggtg

SEQ ID NO: 374007 - DNA, 20 bp, Artificial Sequence
  Description of Artificial Sequence: Synthetic oligonucleotide
  Target: LAMA2; (+) strand; PAM type: YTN; PAM sequence: TTA
aactaattttaattaggtga

SEQ ID NO: 374008 - DNA, 20 bp, Artificial Sequence
  Description of Artificial Sequence: Synthetic oligonucleotide
  Target: LAMA2; (+) strand; PAM type: YTN; PAM sequence: CTA
attttaattaggtgaatcca

SEQ ID NO: 374009 - DNA, 20 bp, Artificial Sequence
  Description of Artificial Sequence: Synthetic oligonucleotide
  Target: LAMA2; (+) strand; PAM type: YTN; PAM sequence: TTT
taattaggtgaatccaactt

SEQ ID NO: 374010 - DNA, 20 bp, Artificial Sequence
  Description of Artificial Sequence: Synthetic oligonucleotide
  Target: LAMA2; (+) strand; PAM type: YTN; PAM sequence: TTT
aattaggtgaatccaacttg

SEQ ID NO: 374011 - DNA, 20 bp, Artificial Sequence
  Description of Artificial Sequence: Synthetic oligonucleotide
  Target: LAMA2; (+) strand; PAM type: YTN; PAM sequence: TTA
attaggtgaatccaacttga

SEQ ID NO: 374012 - DNA, 20 bp, Artificial Sequence
  Description of Artificial Sequence: Synthetic oligonucleotide
  Target: LAMA2; (+) strand; PAM type: YTN; PAM sequence: TTA
ggtgaatccaacttgatcag

SEQ ID NO: 374013 - DNA, 20 bp, Artificial Sequence
  Description of Artificial Sequence: Synthetic oligonucleotide
  Target: LAMA2; (+) strand; PAM type: YTN; PAM sequence: CTT
gatcagactctaacacacta

SEQ ID NO: 374014 - DNA, 20 bp, Artificial Sequence
  Description of Artificial Sequence: Synthetic oligonucleotide
  Target: LAMA2; (+) strand; PAM type: YTN; PAM sequence: TTG
atcagactctaacacactat

SEQ ID NO: 374015 - DNA, 20 bp, Artificial Sequence
  Description of Artificial Sequence: Synthetic oligonucleotide
  Target: LAMA2; (+) strand; PAM type: YTN; PAM sequence: CTC
taacacactatttttattaa

SEQ ID NO: 374016 - DNA, 20 bp, Artificial Sequence
  Description of Artificial Sequence: Synthetic oligonucleotide
  Target: LAMA2; (+) strand; PAM type: YTN; PAM sequence: CTA
acacactatttttattaata

SEQ ID NO: 374017 - DNA, 20 bp, Artificial Sequence
  Description of Artificial Sequence: Synthetic oligonucleotide
  Target: LAMA2; (+) strand; PAM type: YTN; PAM sequence: CTA
tttttattaataaaagttat

SEQ ID NO: 374018 - DNA, 20 bp, Artificial Sequence
  Description of Artificial Sequence: Synthetic oligonucleotide
  Target: LAMA2; (+) strand; PAM type: YTN; PAM sequence: TTT
ttattaataaaagttatatg

SEQ ID NO: 374019 - DNA, 20 bp, Artificial Sequence
  Description of Artificial Sequence: Synthetic oligonucleotide
  Target: LAMA2; (+) strand; PAM type: YTN; PAM sequence: TTT
tattaataaaagttatatga

SEQ ID NO: 374020 - DNA, 20 bp, Artificial Sequence
  Description of Artificial Sequence: Synthetic oligonucleotide
  Target: LAMA2; (+) strand; PAM type: YTN; PAM sequence: TTT
attaataaaagttatatgat

SEQ ID NO: 374021 - DNA, 20 bp, Artificial Sequence
  Description of Artificial Sequence: Synthetic oligonucleotide
  Target: LAMA2; (+) strand; PAM type: YTN; PAM sequence: TTA
ttaataaaagttatatgatt

SEQ ID NO: 374022 - DNA, 20 bp, Artificial Sequence
  Description of Artificial Sequence: Synthetic oligonucleotide
  Target: LAMA2; (+) strand; PAM type: YTN; PAM sequence: TTA
ataaaagttatatgattagc

SEQ ID NO: 374023 - DNA, 20 bp, Artificial Sequence
  Description of Artificial Sequence: Synthetic oligonucleotide
  Target: LAMA2; (+) strand; PAM type: YTN; PAM sequence: TTA
tatgattagcagtattatat

SEQ ID NO: 374024 - DNA, 20 bp, Artificial Sequence
  Description of Artificial Sequence: Synthetic oligonucleotide
  Target: LAMA2; (+) strand; PAM type: YTN; PAM sequence: TTA
gcagtattatattctctgac

SEQ ID NO: 374025 - DNA, 20 bp, Artificial Sequence
  Description of Artificial Sequence: Synthetic oligonucleotide
  Target: LAMA2; (+) strand; PAM type: YTN; PAM sequence: TTA
tattctctgaccctcaaatt

SEQ ID NO: 374026 - DNA, 20 bp, Artificial Sequence
  Description of Artificial Sequence: Synthetic oligonucleotide
  Target: LAMA2; (+) strand; PAM type: YTN; PAM sequence: TTC
tctgaccctcaaattacttt

SEQ ID NO: 374027 - DNA, 20 bp, Artificial Sequence
  Description of Artificial Sequence: Synthetic oligonucleotide
  Target: LAMA2; (+) strand; PAM type: YTN; PAM sequence: CTC
tgaccctcaaattacttttt

SEQ ID NO: 374028 - DNA, 20 bp, Artificial Sequence
  Description of Artificial Sequence: Synthetic oligonucleotide
  Target: LAMA2; (+) strand; PAM type: YTN; PAM sequence: CTG
accctcaaattactttttaa

SEQ ID NO: 374029 - DNA, 20 bp, Artificial Sequence
  Description of Artificial Sequence: Synthetic oligonucleotide
  Target: LAMA2; (+) strand; PAM type: YTN; PAM sequence: CTC
aaattactttttaattccta

SEQ ID NO: 374030 - DNA, 20 bp, Artificial Sequence
  Description of Artificial Sequence: Synthetic oligonucleotide
  Target: LAMA2; (+) strand; PAM type: YTN; PAM sequence: TTA
ctttttaattcctaacggaa

SEQ ID NO: 374031 - DNA, 20 bp, Artificial Sequence
  Description of Artificial Sequence: Synthetic oligonucleotide
  Target: LAMA2; (+) strand; PAM type: YTN; PAM sequence: CTT
tttaattcctaacggaacac

SEQ ID NO: 374032 - DNA, 20 bp, Artificial Sequence
  Description of Artificial Sequence: Synthetic oligonucleotide
  Target: LAMA2; (+) strand; PAM type: YTN; PAM sequence: TTT
ttaattcctaacggaacacc

SEQ ID NO: 374033 - DNA, 20 bp, Artificial Sequence
  Description of Artificial Sequence: Synthetic oligonucleotide
  Target: LAMA2; (+) strand; PAM type: YTN; PAM sequence: TTT
taattcctaacggaacacct

SEQ ID NO: 374034 - DNA, 20 bp, Artificial Sequence
  Description of Artificial Sequence: Synthetic oligonucleotide
  Target: LAMA2; (+) strand; PAM type: YTN; PAM sequence: TTT
aattcctaacggaacacctt

SEQ ID NO: 374035 - DNA, 20 bp, Artificial Sequence
  Description of Artificial Sequence: Synthetic oligonucleotide
  Target: LAMA2; (+) strand; PAM type: YTN; PAM sequence: TTA
attcctaacggaacaccttc

SEQ ID NO: 374036 - DNA, 20 bp, Artificial Sequence
  Description of Artificial Sequence: Synthetic oligonucleotide
  Target: LAMA2; (+) strand; PAM type: YTN; PAM sequence: TTC
ctaacggaacaccttcagaa

SEQ ID NO: 374037 - DNA, 20 bp, Artificial Sequence
  Description of Artificial Sequence: Synthetic oligonucleotide
  Target: LAMA2; (+) strand; PAM type: YTN; PAM sequence: CTA
acggaacaccttcagaaatc

SEQ ID NO: 374038 - DNA, 20 bp, Artificial Sequence
  Description of Artificial Sequence: Synthetic oligonucleotide
  Target: LAMA2; (+) strand; PAM type: YTN; PAM sequence: CTT
cagaaatctctaatactgtt

SEQ ID NO: 374039 - DNA, 20 bp, Artificial Sequence
  Description of Artificial Sequence: Synthetic oligonucleotide
  Target: LAMA2; (+) strand; PAM type: YTN; PAM sequence: TTC
agaaatctctaatactgttc

SEQ ID NO: 374040 - DNA, 20 bp, Artificial Sequence
  Description of Artificial Sequence: Synthetic oligonucleotide
  Target: LAMA2; (+) strand; PAM type: YTN; PAM sequence: CTC
taatactgttctctgtatag

SEQ ID NO: 374041 - DNA, 20 bp, Artificial Sequence
  Description of Artificial Sequence: Synthetic oligonucleotide
  Target: LAMA2; (+) strand; PAM type: YTN; PAM sequence: CTA
atactgttctctgtatagaa

SEQ ID NO: 374042 - DNA, 20 bp, Artificial Sequence
  Description of Artificial Sequence: Synthetic oligonucleotide
  Target: LAMA2; (+) strand; PAM type: YTN; PAM sequence: CTG
ttctctgtatagaaacacac

SEQ ID NO: 374043 - DNA, 20 bp, Artificial Sequence
  Description of Artificial Sequence: Synthetic oligonucleotide
  Target: LAMA2; (+) strand; PAM type: YTN; PAM sequence: TTC
tctgtatagaaacacacacc

SEQ ID NO: 374044 - DNA, 20 bp, Artificial Sequence
  Description of Artificial Sequence: Synthetic oligonucleotide
  Target: LAMA2; (+) strand; PAM type: YTN; PAM sequence: CTC
tgtatagaaacacacaccca

SEQ ID NO: 374045 - DNA, 20 bp, Artificial Sequence
  Description of Artificial Sequence: Synthetic oligonucleotide
  Target: LAMA2; (+) strand; PAM type: YTN; PAM sequence: CTG
tatagaaacacacacccata

SEQ ID NO: 374046 - DNA, 20 bp, Artificial Sequence
  Description of Artificial Sequence: Synthetic oligonucleotide
  Target: LAMA2; (+) strand; PAM type: YTN; PAM sequence: CTG
aagtgttgcagaaaatagtc

SEQ ID NO: 374047 - DNA, 20 bp, Artificial Sequence
  Description of Artificial Sequence: Synthetic oligonucleotide
  Target: LAMA2; (+) strand; PAM type: YTN; PAM sequence: TTG
cagaaaatagtcccactttc

SEQ ID NO: 374048 - DNA, 20 bp, Artificial Sequence
  Description of Artificial Sequence: Synthetic oligonucleotide
  Target: LAMA2; (+) strand; PAM type: YTN; PAM sequence: CTT
tcagtaacatggcatatgaa

SEQ ID NO: 374049 - DNA, 20 bp, Artificial Sequence
  Description of Artificial Sequence: Synthetic oligonucleotide
  Target: LAMA2; (+) strand; PAM type: YTN; PAM sequence: TTT
cagtaacatggcatatgaat

SEQ ID NO: 374050 - DNA, 20 bp, Artificial Sequence
  Description of Artificial Sequence: Synthetic oligonucleotide
  Target: LAMA2; (+) strand; PAM type: YTN; PAM sequence: TTC
agtaacatggcatatgaatt

SEQ ID NO: 374051 - DNA, 20 bp, Artificial Sequence
  Description of Artificial Sequence: Synthetic oligonucleotide
  Target: LAMA2; (+) strand; PAM type: YTN; PAM sequence: TTT
tctatcacgtatattcacaa

SEQ ID NO: 374052 - DNA, 20 bp, Artificial Sequence
  Description of Artificial Sequence: Synthetic oligonucleotide
  Target: LAMA2; (+) strand; PAM type: YTN; PAM sequence: TTT
ctatcacgtatattcacaaa

SEQ ID NO: 374053 - DNA, 20 bp, Artificial Sequence
  Description of Artificial Sequence: Synthetic oligonucleotide
  Target: LAMA2; (+) strand; PAM type: YTN; PAM sequence: TTC
tatcacgtatattcacaaat

SEQ ID NO: 374054 - DNA, 20 bp, Artificial Sequence
  Description of Artificial Sequence: Synthetic oligonucleotide
  Target: LAMA2; (+) strand; PAM type: YTN; PAM sequence: CTA
tcacgtatattcacaaattt

SEQ ID NO: 374055 - DNA, 20 bp, Artificial Sequence
  Description of Artificial Sequence: Synthetic oligonucleotide
  Target: LAMA2; (+) strand; PAM type: YTN; PAM sequence: TTC
acaaattttccttacacgtc

SEQ ID NO: 374056 - DNA, 20 bp, Artificial Sequence
  Description of Artificial Sequence: Synthetic oligonucleotide
  Target: LAMA2; (+) strand; PAM type: YTN; PAM sequence: TTT
tccttacacgtcctgcaaga

SEQ ID NO: 374057 - DNA, 20 bp, Artificial Sequence
  Description of Artificial Sequence: Synthetic oligonucleotide
  Target: LAMA2; (+) strand; PAM type: YTN; PAM sequence: TTT
ccttacacgtcctgcaagaa

SEQ ID NO: 374058 - DNA, 20 bp, Artificial Sequence
  Description of Artificial Sequence: Synthetic oligonucleotide
  Target: LAMA2; (+) strand; PAM type: YTN; PAM sequence: TTC
cttacacgtcctgcaagaaa

SEQ ID NO: 374059 - DNA, 20 bp, Artificial Sequence
  Description of Artificial Sequence: Synthetic oligonucleotide
  Target: LAMA2; (+) strand; PAM type: YTN; PAM sequence: CTT
acacgtcctgcaagaaaaaa

SEQ ID NO: 374060 - DNA, 20 bp, Artificial Sequence
  Description of Artificial Sequence: Synthetic oligonucleotide
  Target: LAMA2; (+) strand; PAM type: YTN; PAM sequence: TTA
cacgtcctgcaagaaaaaat

SEQ ID NO: 374061 - DNA, 20 bp, Artificial Sequence
  Description of Artificial Sequence: Synthetic oligonucleotide
  Target: LAMA2; (+) strand; PAM type: YTN; PAM sequence: CTG
caagaaaaaataaataaaag

SEQ ID NO: 374062 - DNA, 20 bp, Artificial Sequence
  Description of Artificial Sequence: Synthetic oligonucleotide
  Target: LAMA2; (+) strand; PAM type: YTN; PAM sequence: CTT
ctttagttattctatttaat

SEQ ID NO: 374063 - DNA, 20 bp, Artificial Sequence
  Description of Artificial Sequence: Synthetic oligonucleotide
  Target: LAMA2; (+) strand; PAM type: YTN; PAM sequence: TTC
tttagttattctatttaatt

SEQ ID NO: 374064 - DNA, 20 bp, Artificial Sequence
  Description of Artificial Sequence: Synthetic oligonucleotide
  Target: LAMA2; (+) strand; PAM type: YTN; PAM sequence: CTT
tagttattctatttaattat

SEQ ID NO: 374065 - DNA, 20 bp, Artificial Sequence
  Description of Artificial Sequence: Synthetic oligonucleotide
  Target: LAMA2; (+) strand; PAM type: YTN; PAM sequence: TTT
agttattctatttaattata

SEQ ID NO: 374066 - DNA, 20 bp, Artificial Sequence
  Description of Artificial Sequence: Synthetic oligonucleotide
  Target: LAMA2; (+) strand; PAM type: YTN; PAM sequence: TTA
gttattctatttaattatag

SEQ ID NO: 374067 - DNA, 20 bp, Artificial Sequence
  Description of Artificial Sequence: Synthetic oligonucleotide
  Target: LAMA2; (+) strand; PAM type: YTN; PAM sequence: TTA
ttctatttaattatagttat

SEQ ID NO: 374068 - DNA, 20 bp, Artificial Sequence
  Description of Artificial Sequence: Synthetic oligonucleotide
  Target: LAMA2; (+) strand; PAM type: YTN; PAM sequence: TTC
tatttaattatagttatttt

SEQ ID NO: 374069 - DNA, 20 bp, Artificial Sequence
  Description of Artificial Sequence: Synthetic oligonucleotide
  Target: LAMA2; (+) strand; PAM type: YTN; PAM sequence: CTA
tttaattatagttattttcc

SEQ ID NO: 374070 - DNA, 20 bp, Artificial Sequence
  Description of Artificial Sequence: Synthetic oligonucleotide
  Target: LAMA2; (+) strand; PAM type: YTN; PAM sequence: TTT
aattatagttattttcctcc

SEQ ID NO: 374071 - DNA, 20 bp, Artificial Sequence
  Description of Artificial Sequence: Synthetic oligonucleotide
  Target: LAMA2; (+) strand; PAM type: YTN; PAM sequence: TTA
attatagttattttcctcct

SEQ ID NO: 374072 - DNA, 20 bp, Artificial Sequence
  Description of Artificial Sequence: Synthetic oligonucleotide
  Target: LAMA2; (+) strand; PAM type: YTN; PAM sequence: TTA
tagttattttcctcctgaaa

SEQ ID NO: 374073 - DNA, 20 bp, Artificial Sequence
  Description of Artificial Sequence: Synthetic oligonucleotide
  Target: LAMA2; (+) strand; PAM type: YTN; PAM sequence: TTA
ttttcctcctgaaatgagtt

SEQ ID NO: 374074 - DNA, 20 bp, Artificial Sequence
  Description of Artificial Sequence: Synthetic oligonucleotide
  Target: LAMA2; (+) strand; PAM type: YTN; PAM sequence: TTT
tcctcctgaaatgagttttt

SEQ ID NO: 374075 - DNA, 20 bp, Artificial Sequence
  Description of Artificial Sequence: Synthetic oligonucleotide
  Target: LAMA2; (+) strand; PAM type: YTN; PAM sequence: TTT
cctcctgaaatgagtttttt

SEQ ID NO: 374076 - DNA, 20 bp, Artificial Sequence
  Description of Artificial Sequence: Synthetic oligonucleotide
  Target: LAMA2; (+) strand; PAM type: YTN; PAM sequence: TTC
ctcctgaaatgagttttttt

SEQ ID NO: 374077 - DNA, 20 bp, Artificial Sequence
  Description of Artificial Sequence: Synthetic oligonucleotide
  Target: LAMA2; (+) strand; PAM type: YTN; PAM sequence: CTC
ctgaaatgagtttttttatt

SEQ ID NO: 374078 - DNA, 20 bp, Artificial Sequence
  Description of Artificial Sequence: Synthetic oligonucleotide
  Target: LAMA2; (+) strand; PAM type: YTN; PAM sequence: CTG
aaatgagtttttttattatg

SEQ ID NO: 374079 - DNA, 20 bp, Artificial Sequence
  Description of Artificial Sequence: Synthetic oligonucleotide
  Target: LAMA2; (+) strand; PAM type: YTN; PAM sequence: TTT
ttttattatggagaatttca

SEQ ID NO: 374080 - DNA, 20 bp, Artificial Sequence
  Description of Artificial Sequence: Synthetic oligonucleotide
  Target: LAMA2; (+) strand; PAM type: YTN; PAM sequence: TTT
tttattatggagaatttcag

SEQ ID NO: 374081 - DNA, 20 bp, Artificial Sequence
  Description of Artificial Sequence: Synthetic oligonucleotide
  Target: LAMA2; (+) strand; PAM type: YTN; PAM sequence: TTT
ttattatggagaatttcagt

SEQ ID NO: 374082 - DNA, 20 bp, Artificial Sequence
  Description of Artificial Sequence: Synthetic oligonucleotide
  Target: LAMA2; (+) strand; PAM type: YTN; PAM sequence: TTT
tattatggagaatttcagtc

SEQ ID NO: 374083 - DNA, 20 bp, Artificial Sequence
  Description of Artificial Sequence: Synthetic oligonucleotide
  Target: LAMA2; (+) strand; PAM type: YTN; PAM sequence: TTT
attatggagaatttcagtct

SEQ ID NO: 374084 - DNA, 20 bp, Artificial Sequence
  Description of Artificial Sequence: Synthetic oligonucleotide
  Target: LAMA2; (+) strand; PAM type: YTN; PAM sequence: TTA
ttatggagaatttcagtctt

SEQ ID NO: 374085 - DNA, 20 bp, Artificial Sequence
  Description of Artificial Sequence: Synthetic oligonucleotide
  Target: LAMA2; (+) strand; PAM type: YTN; PAM sequence: TTA
tggagaatttcagtcttatt

SEQ ID NO: 374086 - DNA, 20 bp, Artificial Sequence
  Description of Artificial Sequence: Synthetic oligonucleotide
  Target: LAMA2; (+) strand; PAM type: YTN; PAM sequence: TTT
cagtcttattaattgctatc

SEQ ID NO: 374087 - DNA, 20 bp, Artificial Sequence
  Description of Artificial Sequence: Synthetic oligonucleotide
  Target: LAMA2; (+) strand; PAM type: YTN; PAM sequence: TTC
agtcttattaattgctatct

SEQ ID NO: 374088 - DNA, 20 bp, Artificial Sequence
  Description of Artificial Sequence: Synthetic oligonucleotide
  Target: LAMA2; (+) strand; PAM type: YTN; PAM sequence: CTT
attaattgctatctaagtta

SEQ ID NO: 374089 - DNA, 20 bp, Artificial Sequence
  Description of Artificial Sequence: Synthetic oligonucleotide
  Target: LAMA2; (+) strand; PAM type: YTN; PAM sequence: TTA
ttaattgctatctaagttaa

SEQ ID NO: 374090 - DNA, 20 bp, Artificial Sequence
  Description of Artificial Sequence: Synthetic oligonucleotide
  Target: LAMA2; (+) strand; PAM type: YTN; PAM sequence: TTA
attgctatctaagttaagaa

SEQ ID NO: 374091 - DNA, 20 bp, Artificial Sequence
  Description of Artificial Sequence: Synthetic oligonucleotide
  Target: LAMA2; (+) strand; PAM type: YTN; PAM sequence: TTG
ctatctaagttaagaaaaat

SEQ ID NO: 374092 - DNA, 20 bp, Artificial Sequence
  Description of Artificial Sequence: Synthetic oligonucleotide
  Target: LAMA2; (+) strand; PAM type: YTN; PAM sequence: CTA
tctaagttaagaaaaattcc

SEQ ID NO: 374093 - DNA, 20 bp, Artificial Sequence
  Description of Artificial Sequence: Synthetic oligonucleotide
  Target: LAMA2; (+) strand; PAM type: YTN; PAM sequence: CTA
agttaagaaaaattcccaga

SEQ ID NO: 374094 - DNA, 20 bp, Artificial Sequence
  Description of Artificial Sequence: Synthetic oligonucleotide
  Target: LAMA2; (+) strand; PAM type: YTN; PAM sequence: TTA
agaaaaattcccagatctcg

SEQ ID NO: 374095 - DNA, 20 bp, Artificial Sequence
  Description of Artificial Sequence: Synthetic oligonucleotide
  Target: LAMA2; (+) strand; PAM type: YTN; PAM sequence: TTC
ccagatctcgttatataaag

SEQ ID NO: 374096 - DNA, 20 bp, Artificial Sequence
  Description of Artificial Sequence: Synthetic oligonucleotide
  Target: LAMA2; (+) strand; PAM type: YTN; PAM sequence: CTC
gttatataaagctatctctc

SEQ ID NO: 374097 - DNA, 20 bp, Artificial Sequence
  Description of Artificial Sequence: Synthetic oligonucleotide
  Target: LAMA2; (+) strand; PAM type: YTN; PAM sequence: TTA
tataaagctatctctccaaa

SEQ ID NO: 374098 - DNA, 20 bp, Artificial Sequence
  Description of Artificial Sequence: Synthetic oligonucleotide
  Target: LAMA2; (+) strand; PAM type: YTN; PAM sequence: CTA
tctctccaaagggcagtaac

SEQ ID NO: 374099 - DNA, 20 bp, Artificial Sequence
  Description of Artificial Sequence: Synthetic oligonucleotide
  Target: LAMA2; (+) strand; PAM type: YTN; PAM sequence: CTC
tccaaagggcagtaactcat

SEQ ID NO: 374100 - DNA, 20 bp, Artificial Sequence
  Description of Artificial Sequence: Synthetic oligonucleotide
  Target: LAMA2; (+) strand; PAM type: YTN; PAM sequence: CTC
caaagggcagtaactcatct

SEQ ID NO: 374101 - DNA, 20 bp, Artificial Sequence
  Description of Artificial Sequence: Synthetic oligonucleotide
  Target: LAMA2; (+) strand; PAM type: YTN; PAM sequence: CTC
atcttgaggaaagtgagctg

SEQ ID NO: 374102 - DNA, 20 bp, Artificial Sequence
  Description of Artificial Sequence: Synthetic oligonucleotide
  Target: LAMA2; (+) strand; PAM type: YTN; PAM sequence: CTT
gaggaaagtgagctgaaaat

SEQ ID NO: 374103 - DNA, 20 bp, Artificial Sequence
  Description of Artificial Sequence: Synthetic oligonucleotide
  Target: LAMA2; (+) strand; PAM type: YTN; PAM sequence: TTG
aggaaagtgagctgaaaata

SEQ ID NO: 374104 - DNA, 20 bp, Artificial Sequence
  Description of Artificial Sequence: Synthetic oligonucleotide
  Target: LAMA2; (+) strand; PAM type: YTN; PAM sequence: CTG
aaaataataggttttcgttt

SEQ ID NO: 374105 - DNA, 20 bp, Artificial Sequence
  Description of Artificial Sequence: Synthetic oligonucleotide
  Target: LAMA2; (+) strand; PAM type: YTN; PAM sequence: TTT
tcgtttgctgtgataatgat

SEQ ID NO: 374106 - DNA, 20 bp, Artificial Sequence
  Description of Artificial Sequence: Synthetic oligonucleotide
  Target: LAMA2; (+) strand; PAM type: YTN; PAM sequence: TTT
cgtttgctgtgataatgatc

SEQ ID NO: 374107 - DNA, 20 bp, Artificial Sequence
  Description of Artificial Sequence: Synthetic oligonucleotide
  Target: LAMA2; (+) strand; PAM type: YTN; PAM sequence: TTC
gtttgctgtgataatgatca

SEQ ID NO: 374108 - DNA, 20 bp, Artificial Sequence
  Description of Artificial Sequence: Synthetic oligonucleotide
  Target: LAMA2; (+) strand; PAM type: YTN; PAM sequence: TTT
gctgtgataatgatcattgt

SEQ ID NO: 374109 - DNA, 20 bp, Artificial Sequence
  Description of Artificial Sequence: Synthetic oligonucleotide
  Target: LAMA2; (+) strand; PAM type: YTN; PAM sequence: TTG
ctgtgataatgatcattgta

SEQ ID NO: 374110 - DNA, 20 bp, Artificial Sequence
  Description of Artificial Sequence: Synthetic oligonucleotide
  Target: LAMA2; (+) strand; PAM type: YTN; PAM sequence: CTG
tgataatgatcattgtatat

SEQ ID NO: 374111 - DNA, 20 bp, Artificial Sequence
  Description of Artificial Sequence: Synthetic oligonucleotide
  Target: LAMA2; (+) strand; PAM type: YTN; PAM sequence: TTG
tatatccttattccagtggc

SEQ ID NO: 374112 - DNA, 20 bp, Artificial Sequence
  Description of Artificial Sequence: Synthetic oligonucleotide
  Target: LAMA2; (+) strand; PAM type: YTN; PAM sequence: CTT
attccagtggcacaaagtca

SEQ ID NO: 374113 - DNA, 20 bp, Artificial Sequence
  Description of Artificial Sequence: Synthetic oligonucleotide
  Target: LAMA2; (+) strand; PAM type: YTN; PAM sequence: TTA
ttccagtggcacaaagtcac

SEQ ID NO: 374114 - DNA, 20 bp, Artificial Sequence
  Description of Artificial Sequence: Synthetic oligonucleotide
  Target: LAMA2; (+) strand; PAM type: YTN; PAM sequence: TTC
cagtggcacaaagtcactct

SEQ ID NO: 374115 - DNA, 20 bp, Artificial Sequence
  Description of Artificial Sequence: Synthetic oligonucleotide
  Target: LAMA2; (+) strand; PAM type: YTN; PAM sequence: CTC
tcttagtggtaaacaaaatg

SEQ ID NO: 374116 - DNA, 20 bp, Artificial Sequence
  Description of Artificial Sequence: Synthetic oligonucleotide
  Target: LAMA2; (+) strand; PAM type: YTN; PAM sequence: CTC
ttagtggtaaacaaaatgag

SEQ ID NO: 374117 - DNA, 20 bp, Artificial Sequence
  Description of Artificial Sequence: Synthetic oligonucleotide
  Target: LAMA2; (+) strand; PAM type: YTN; PAM sequence: CTT
agtggtaaacaaaatgagat

SEQ ID NO: 374118 - DNA, 20 bp, Artificial Sequence
  Description of Artificial Sequence: Synthetic oligonucleotide
  Target: LAMA2; (+) strand; PAM type: YTN; PAM sequence: TTA
gtggtaaacaaaatgagatg

SEQ ID NO: 374119 - DNA, 20 bp, Artificial Sequence
  Description of Artificial Sequence: Synthetic oligonucleotide
  Target: LAMA2; (+) strand; PAM type: YTN; PAM sequence: CTC
tgaatattaaataagacaag

SEQ ID NO: 374120 - DNA, 20 bp, Artificial Sequence
  Description of Artificial Sequence: Synthetic oligonucleotide
  Target: LAMA2; (+) strand; PAM type: YTN; PAM sequence: CTG
aatattaaataagacaagaa

SEQ ID NO: 374121 - DNA, 20 bp, Artificial Sequence
  Description of Artificial Sequence: Synthetic oligonucleotide
  Target: LAMA2; (+) strand; PAM type: YTN; PAM sequence: TTA
aataagacaagaagaatcag

SEQ ID NO: 374122 - DNA, 20 bp, Artificial Sequence
  Description of Artificial Sequence: Synthetic oligonucleotide
  Target: LAMA2; (+) strand; PAM type: YTN; PAM sequence: TTA
aaattcaaaagaatctcctt

SEQ ID NO: 374123 - DNA, 20 bp, Artificial Sequence
  Description of Artificial Sequence: Synthetic oligonucleotide
  Target: LAMA2; (+) strand; PAM type: YTN; PAM sequence: TTC
aaaagaatctccttcttatc

SEQ ID NO: 374124 - DNA, 20 bp, Artificial Sequence
  Description of Artificial Sequence: Synthetic oligonucleotide
  Target: LAMA2; (+) strand; PAM type: YTN; PAM sequence: CTC
cttcttatctttatcaaatg

SEQ ID NO: 374125 - DNA, 20 bp, Artificial Sequence
  Description of Artificial Sequence: Synthetic oligonucleotide
  Target: LAMA2; (+) strand; PAM type: YTN; PAM sequence: CTT
cttatctttatcaaatgcct

SEQ ID NO: 374126 - DNA, 20 bp, Artificial Sequence
  Description of Artificial Sequence: Synthetic oligonucleotide
  Target: LAMA2; (+) strand; PAM type: YTN; PAM sequence: TTC
ttatctttatcaaatgcctc

SEQ ID NO: 374127 - DNA, 20 bp, Artificial Sequence
  Description of Artificial Sequence: Synthetic oligonucleotide
  Target: LAMA2; (+) strand; PAM type: YTN; PAM sequence: CTT
atctttatcaaatgcctctc

SEQ ID NO: 374128 - DNA, 20 bp, Artificial Sequence
  Description of Artificial Sequence: Synthetic oligonucleotide
  Target: LAMA2; (+) strand; PAM type: YTN; PAM sequence: TTA
tctttatcaaatgcctctct

SEQ ID NO: 374129 - DNA, 20 bp, Artificial Sequence
  Description of Artificial Sequence: Synthetic oligonucleotide
  Target: LAMA2; (+) strand; PAM type: YTN; PAM sequence: CTT
tatcaaatgcctctcttgaa

SEQ ID NO: 374130 - DNA, 20 bp, Artificial Sequence
  Description of Artificial Sequence: Synthetic oligonucleotide
  Target: LAMA2; (+) strand; PAM type: YTN; PAM sequence: TTT
atcaaatgcctctcttgaag

SEQ ID NO: 374131 - DNA, 20 bp, Artificial Sequence
  Description of Artificial Sequence: Synthetic oligonucleotide
  Target: LAMA2; (+) strand; PAM type: YTN; PAM sequence: TTA
tcaaatgcctctcttgaagg

SEQ ID NO: 374132 - DNA, 20 bp, Artificial Sequence
  Description of Artificial Sequence: Synthetic oligonucleotide
  Target: LAMA2; (+) strand; PAM type: YTN; PAM sequence: CTC
tcttgaagggattttggggg

SEQ ID NO: 374133 - DNA, 20 bp, Artificial Sequence
  Description of Artificial Sequence: Synthetic oligonucleotide
  Target: LAMA2; (+) strand; PAM type: YTN; PAM sequence: CTC
ttgaagggattttgggggaa

SEQ ID NO: 374134 - DNA, 20 bp, Artificial Sequence
  Description of Artificial Sequence: Synthetic oligonucleotide
  Target: LAMA2; (+) strand; PAM type: YTN; PAM sequence: CTT
gaagggattttgggggaatt

SEQ ID NO: 374135 - DNA, 20 bp, Artificial Sequence
  Description of Artificial Sequence: Synthetic oligonucleotide
  Target: LAMA2; (+) strand; PAM type: YTN; PAM sequence: TTG
aagggattttgggggaattt

SEQ ID NO: 374136 - DNA, 20 bp, Artificial Sequence
  Description of Artificial Sequence: Synthetic oligonucleotide
  Target: LAMA2; (+) strand; PAM type: YTN; PAM sequence: TTT
tgggggaattttgtgcactc

SEQ ID NO: 374137 - DNA, 20 bp, Artificial Sequence
  Description of Artificial Sequence: Synthetic oligonucleotide
  Target: LAMA2; (+) strand; PAM type: YTN; PAM sequence: TTT
gggggaattttgtgcactca

SEQ ID NO: 374138 - DNA, 20 bp, Artificial Sequence
  Description of Artificial Sequence: Synthetic oligonucleotide
  Target: LAMA2; (+) strand; PAM type: YTN; PAM sequence: TTG
ggggaattttgtgcactcaa

SEQ ID NO: 374139 - DNA, 20 bp, Artificial Sequence
  Description of Artificial Sequence: Synthetic oligonucleotide
  Target: LAMA2; (+) strand; PAM type: YTN; PAM sequence: TTT
tgtgcactcaaattttattg

SEQ ID NO: 374140 - DNA, 20 bp, Artificial Sequence
  Description of Artificial Sequence: Synthetic oligonucleotide
  Target: LAMA2; (+) strand; PAM type: YTN; PAM sequence: TTT
gtgcactcaaattttattgc

SEQ ID NO: 374141 - DNA, 20 bp, Artificial Sequence
  Description of Artificial Sequence: Synthetic oligonucleotide
  Target: LAMA2; (+) strand; PAM type: YTN; PAM sequence: TTG
tgcactcaaattttattgca

SEQ ID NO: 374142 - DNA, 20 bp, Artificial Sequence
  Description of Artificial Sequence: Synthetic oligonucleotide
  Target: LAMA2; (+) strand; PAM type: YTN; PAM sequence: CTC
aaattttattgcatatttta

SEQ ID NO: 374143 - DNA, 20 bp, Artificial Sequence
  Description of Artificial Sequence: Synthetic oligonucleotide
  Target: LAMA2; (+) strand; PAM type: YTN; PAM sequence: TTT
tattgcatattttataatac

SEQ ID NO: 374144 - DNA, 20 bp, Artificial Sequence
  Description of Artificial Sequence: Synthetic oligonucleotide
  Target: LAMA2; (+) strand; PAM type: YTN; PAM sequence: TTT
attgcatattttataataca

SEQ ID NO: 374145 - DNA, 20 bp, Artificial Sequence
  Description of Artificial Sequence: Synthetic oligonucleotide
  Target: LAMA2; (+) strand; PAM type: YTN; PAM sequence: TTA
ttgcatattttataatacag

SEQ ID NO: 374146 - DNA, 20 bp, Artificial Sequence
  Description of Artificial Sequence: Synthetic oligonucleotide
  Target: LAMA2; (+) strand; PAM type: YTN; PAM sequence: TTG
catattttataatacagaat

SEQ ID NO: 374147 - DNA, 20 bp, Artificial Sequence
  Description of Artificial Sequence: Synthetic oligonucleotide
  Target: LAMA2; (+) strand; PAM type: YTN; PAM sequence: TTT
tataatacagaattaacaaa

SEQ ID NO: 374148 - DNA, 20 bp, Artificial Sequence
  Description of Artificial Sequence: Synthetic oligonucleotide
  Target: LAMA2; (+) strand; PAM type: YTN; PAM sequence: TTT
ataatacagaattaacaaac

SEQ ID NO: 374149 - DNA, 20 bp, Artificial Sequence
  Description of Artificial Sequence: Synthetic oligonucleotide
  Target: LAMA2; (+) strand; PAM type: YTN; PAM sequence: TTA
taatacagaattaacaaaca

SEQ ID NO: 374150 - DNA, 20 bp, Artificial Sequence
  Description of Artificial Sequence: Synthetic oligonucleotide
  Target: LAMA2; (+) strand; PAM type: YTN; PAM sequence: TTA
acaaacaattatatctgtgg

SEQ ID NO: 374151 - DNA, 20 bp, Artificial Sequence
  Description of Artificial Sequence: Synthetic oligonucleotide
  Target: LAMA2; (+) strand; PAM type: YTN; PAM sequence: TTA
tatctgtggttggcaatatt

SEQ ID NO: 374152 - DNA, 20 bp, Artificial Sequence
  Description of Artificial Sequence: Synthetic oligonucleotide
  Target: LAMA2; (+) strand; PAM type: YTN; PAM sequence: CTG
tggttggcaatattcttcta

SEQ ID NO: 374153 - DNA, 20 bp, Artificial Sequence
  Description of Artificial Sequence: Synthetic oligonucleotide
  Target: LAMA2; (+) strand; PAM type: YTN; PAM sequence: TTG
gcaatattcttctaagcagt

SEQ ID NO: 374154 - DNA, 20 bp, Artificial Sequence
  Description of Artificial Sequence: Synthetic oligonucleotide
  Target: LAMA2; (+) strand; PAM type: YTN; PAM sequence: TTC
ttctaagcagtatttataca

SEQ ID NO: 374155 - DNA, 20 bp, Artificial Sequence
  Description of Artificial Sequence: Synthetic oligonucleotide
  Target: LAMA2; (+) strand; PAM type: YTN; PAM sequence: CTT
ctaagcagtatttatacaac

SEQ ID NO: 374156 - DNA, 20 bp, Artificial Sequence
  Description of Artificial Sequence: Synthetic oligonucleotide
  Target: LAMA2; (+) strand; PAM type: YTN; PAM sequence: TTC
taagcagtatttatacaact

SEQ ID NO: 374157 - DNA, 20 bp, Artificial Sequence
  Description of Artificial Sequence: Synthetic oligonucleotide
  Target: LAMA2; (+) strand; PAM type: YTN; PAM sequence: CTA
agcagtatttatacaactca

SEQ ID NO: 374158 - DNA, 20 bp, Artificial Sequence
  Description of Artificial Sequence: Synthetic oligonucleotide
  Target: LAMA2; (+) strand; PAM type: YTN; PAM sequence: TTT
atacaactcataagtgtata

SEQ ID NO: 374159 - DNA, 20 bp, Artificial Sequence
  Description of Artificial Sequence: Synthetic oligonucleotide
  Target: LAMA2; (+) strand; PAM type: YTN; PAM sequence: TTA
tacaactcataagtgtataa

SEQ ID NO: 374160 - DNA, 20 bp, Artificial Sequence
  Description of Artificial Sequence: Synthetic oligonucleotide
  Target: LAMA2; (+) strand; PAM type: YTN; PAM sequence: CTC
ataagtgtataaaatctttt

SEQ ID NO: 374161 - DNA, 20 bp, Artificial Sequence
  Description of Artificial Sequence: Synthetic oligonucleotide
  Target: LAMA2; (+) strand; PAM type: YTN; PAM sequence: CTT
ttgtgaatataagtaatttc

SEQ ID NO: 374162 - DNA, 20 bp, Artificial Sequence
  Description of Artificial Sequence: Synthetic oligonucleotide
  Target: LAMA2; (+) strand; PAM type: YTN; PAM sequence: TTT
tgtgaatataagtaatttca

SEQ ID NO: 374163 - DNA, 20 bp, Artificial Sequence
  Description of Artificial Sequence: Synthetic oligonucleotide
  Target: LAMA2; (+) strand; PAM type: YTN; PAM sequence: TTT
gtgaatataagtaatttcat

SEQ ID NO: 374164 - DNA, 20 bp, Artificial Sequence
  Description of Artificial Sequence: Synthetic oligonucleotide
  Target: LAMA2; (+) strand; PAM type: YTN; PAM sequence: TTG
tgaatataagtaatttcatt

SEQ ID NO: 374165 - DNA, 20 bp, Artificial Sequence
  Description of Artificial Sequence: Synthetic oligonucleotide
  Target: LAMA2; (+) strand; PAM type: YTN; PAM sequence: TTT
cattttaaaaattatgataa

SEQ ID NO: 374166 - DNA, 20 bp, Artificial Sequence
  Description of Artificial Sequence: Synthetic oligonucleotide
  Target: LAMA2; (+) strand; PAM type: YTN; PAM sequence: TTC
attttaaaaattatgataaa

SEQ ID NO: 374167 - DNA, 20 bp, Artificial Sequence
  Description of Artificial Sequence: Synthetic oligonucleotide
  Target: LAMA2; (+) strand; PAM type: YTN; PAM sequence: TTT
taaaaattatgataaaacat

SEQ ID NO: 374168 - DNA, 20 bp, Artificial Sequence
  Description of Artificial Sequence: Synthetic oligonucleotide
  Target: LAMA2; (+) strand; PAM type: YTN; PAM sequence: TTT
aaaaattatgataaaacatc

SEQ ID NO: 374169 - DNA, 20 bp, Artificial Sequence
  Description of Artificial Sequence: Synthetic oligonucleotide
  Target: LAMA2; (+) strand; PAM type: YTN; PAM sequence: TTA
aaaattatgataaaacatca

SEQ ID NO: 374170 - DNA, 20 bp, Artificial Sequence
  Description of Artificial Sequence: Synthetic oligonucleotide
  Target: LAMA2; (+) strand; PAM type: YTN; PAM sequence: TTA
tgataaaacatcaaatctat

SEQ ID NO: 374171 - DNA, 20 bp, Artificial Sequence
  Description of Artificial Sequence: Synthetic oligonucleotide
  Target: LAMA2; (+) strand; PAM type: YTN; PAM sequence: CTA
tgaattatagtacctaagta

SEQ ID NO: 374172 - DNA, 20 bp, Artificial Sequence
  Description of Artificial Sequence: Synthetic oligonucleotide
  Target: LAMA2; (+) strand; PAM type: YTN; PAM sequence: TTA
tagtacctaagtacctatac

SEQ ID NO: 374173 - DNA, 20 bp, Artificial Sequence
  Description of Artificial Sequence: Synthetic oligonucleotide
  Target: LAMA2; (+) strand; PAM type: YTN; PAM sequence: CTA
agtacctatacattttctag

SEQ ID NO: 374174 - DNA, 20 bp, Artificial Sequence
  Description of Artificial Sequence: Synthetic oligonucleotide
  Target: LAMA2; (+) strand; PAM type: YTN; PAM sequence: CTA
tacattttctagaaaactta

SEQ ID NO: 374175 - DNA, 20 bp, Artificial Sequence
  Description of Artificial Sequence: Synthetic oligonucleotide
  Target: LAMA2; (+) strand; PAM type: YTN; PAM sequence: TTT
tctagaaaacttagaatcat

SEQ ID NO: 374176 - DNA, 20 bp, Artificial Sequence
  Description of Artificial Sequence: Synthetic oligonucleotide
  Target: LAMA2; (+) strand; PAM type: YTN; PAM sequence: TTT
ctagaaaacttagaatcatc

SEQ ID NO: 374177 - DNA, 20 bp, Artificial Sequence
  Description of Artificial Sequence: Synthetic oligonucleotide
  Target: LAMA2; (+) strand; PAM type: YTN; PAM sequence: TTC
tagaaaacttagaatcatca

SEQ ID NO: 374178 - DNA, 20 bp, Artificial Sequence
  Description of Artificial Sequence: Synthetic oligonucleotide
  Target: LAMA2; (+) strand; PAM type: YTN; PAM sequence: CTA
gaaaacttagaatcatcaat

SEQ ID NO: 374179 - DNA, 20 bp, Artificial Sequence
  Description of Artificial Sequence: Synthetic oligonucleotide
  Target: LAMA2; (+) strand; PAM type: YTN; PAM sequence: CTT
agaatcatcaatgtatctgc

SEQ ID NO: 374180 - DNA, 20 bp, Artificial Sequence
  Description of Artificial Sequence: Synthetic oligonucleotide
  Target: LAMA2; (+) strand; PAM type: YTN; PAM sequence: TTA
gaatcatcaatgtatctgca

SEQ ID NO: 374181 - DNA, 20 bp, Artificial Sequence
  Description of Artificial Sequence: Synthetic oligonucleotide
  Target: LAMA2; (+) strand; PAM type: YTN; PAM sequence: CTG
caccaaattaatggctctgc

SEQ ID NO: 374182 - DNA, 20 bp, Artificial Sequence
  Description of Artificial Sequence: Synthetic oligonucleotide
  Target: LAMA2; (+) strand; PAM type: YTN; PAM sequence: TTA
atggctctgccccagaattg

SEQ ID NO: 374183 - DNA, 20 bp, Artificial Sequence
  Description of Artificial Sequence: Synthetic oligonucleotide
  Target: LAMA2; (+) strand; PAM type: YTN; PAM sequence: CTC
tgccccagaattgggatttg

SEQ ID NO: 374184 - DNA, 20 bp, Artificial Sequence
  Description of Artificial Sequence: Synthetic oligonucleotide
  Target: LAMA2; (+) strand; PAM type: YTN; PAM sequence: CTG
ccccagaattgggatttgtt

SEQ ID NO: 374185 - DNA, 20 bp, Artificial Sequence
  Description of Artificial Sequence: Synthetic oligonucleotide
  Target: LAMA2; (+) strand; PAM type: YTN; PAM sequence: TTG
ggatttgttaaagtactctc

SEQ ID NO: 374186 - DNA, 20 bp, Artificial Sequence
  Description of Artificial Sequence: Synthetic oligonucleotide
  Target: LAMA2; (+) strand; PAM type: YTN; PAM sequence: TTT
gttaaagtactctcaatata

SEQ ID NO: 374187 - DNA, 20 bp, Artificial Sequence
  Description of Artificial Sequence: Synthetic oligonucleotide
  Target: LAMA2; (+) strand; PAM type: YTN; PAM sequence: TTG
ttaaagtactctcaatataa

SEQ ID NO: 374188 - DNA, 20 bp, Artificial Sequence
  Description of Artificial Sequence: Synthetic oligonucleotide
  Target: LAMA2; (+) strand; PAM type: YTN; PAM sequence: TTA
aagtactctcaatataatgt

SEQ ID NO: 374189 - DNA, 20 bp, Artificial Sequence
  Description of Artificial Sequence: Synthetic oligonucleotide
  Target: LAMA2; (+) strand; PAM type: YTN; PAM sequence: CTC
tcaatataatgtactggatt

SEQ ID NO: 374190 - DNA, 20 bp, Artificial Sequence
  Description of Artificial Sequence: Synthetic oligonucleotide
  Target: LAMA2; (+) strand; PAM type: YTN; PAM sequence: CTC
aatataatgtactggattta

SEQ ID NO: 374191 - DNA, 20 bp, Artificial Sequence
  Description of Artificial Sequence: Synthetic oligonucleotide
  Target: LAMA2; (+) strand; PAM type: YTN; PAM sequence: CTG
gatttaaaccatttttattt

SEQ ID NO: 374192 - DNA, 20 bp, Artificial Sequence
  Description of Artificial Sequence: Synthetic oligonucleotide
  Target: LAMA2; (+) strand; PAM type: YTN; PAM sequence: TTT
aaaccatttttatttcaaat

SEQ ID NO: 374193 - DNA, 20 bp, Artificial Sequence
  Description of Artificial Sequence: Synthetic oligonucleotide
  Target: LAMA2; (+) strand; PAM type: YTN; PAM sequence: TTA
aaccatttttatttcaaatg

SEQ ID NO: 374194 - DNA, 20 bp, Artificial Sequence
  Description of Artificial Sequence: Synthetic oligonucleotide
  Target: LAMA2; (+) strand; PAM type: YTN; PAM sequence: TTT
ttatttcaaatggtagagag

SEQ ID NO: 374195 - DNA, 20 bp, Artificial Sequence
  Description of Artificial Sequence: Synthetic oligonucleotide
  Target: LAMA2; (+) strand; PAM type: YTN; PAM sequence: TTT
tatttcaaatggtagagagc

SEQ ID NO: 374196 - DNA, 20 bp, Artificial Sequence
  Description of Artificial Sequence: Synthetic oligonucleotide
  Target: LAMA2; (+) strand; PAM type: YTN; PAM sequence: TTT
atttcaaatggtagagagcc

SEQ ID NO: 374197 - DNA, 20 bp, Artificial Sequence
  Description of Artificial Sequence: Synthetic oligonucleotide
  Target: LAMA2; (+) strand; PAM type: YTN; PAM sequence: TTA
tttcaaatggtagagagcct

SEQ ID NO: 374198 - DNA, 20 bp, Artificial Sequence
  Description of Artificial Sequence: Synthetic oligonucleotide
  Target: LAMA2; (+) strand; PAM type: YTN; PAM sequence: TTT
caaatggtagagagcctttc

SEQ ID NO: 374199 - DNA, 20 bp, Artificial Sequence
  Description of Artificial Sequence: Synthetic oligonucleotide
  Target: LAMA2; (+) strand; PAM type: YTN; PAM sequence: TTC
aaatggtagagagcctttct

SEQ ID NO: 374200 - DNA, 20 bp, Artificial Sequence
  Description of Artificial Sequence: Synthetic oligonucleotide
  Target: LAMA2; (+) strand; PAM type: YTN; PAM sequence: CTT
tctctaaataatgactgcat

SEQ ID NO: 374201 - DNA, 20 bp, Artificial Sequence
  Description of Artificial Sequence: Synthetic oligonucleotide
  Target: LAMA2; (+) strand; PAM type: YTN; PAM sequence: TTT
ctctaaataatgactgcata

SEQ ID NO: 374202 - DNA, 20 bp, Artificial Sequence
  Description of Artificial Sequence: Synthetic oligonucleotide
  Target: LAMA2; (+) strand; PAM type: YTN; PAM sequence: TTC
tctaaataatgactgcatat

SEQ ID NO: 374203 - DNA, 20 bp, Artificial Sequence
  Description of Artificial Sequence: Synthetic oligonucleotide
  Target: LAMA2; (+) strand; PAM type: YTN; PAM sequence: CTC
taaataatgactgcatatct

SEQ ID NO: 374204 - DNA, 20 bp, Artificial Sequence
  Description of Artificial Sequence: Synthetic oligonucleotide
  Target: LAMA2; (+) strand; PAM type: YTN; PAM sequence: CTA
aataatgactgcatatctgt

SEQ ID NO: 374205 - DNA, 20 bp, Artificial Sequence
  Description of Artificial Sequence: Synthetic oligonucleotide
  Target: LAMA2; (+) strand; PAM type: YTN; PAM sequence: CTG
catatctgtgagtagatgag

SEQ ID NO: 374206 - DNA, 20 bp, Artificial Sequence
  Description of Artificial Sequence: Synthetic oligonucleotide
  Target: LAMA2; (+) strand; PAM type: YTN; PAM sequence: CTG
tgagtagatgagcataaaag

SEQ ID NO: 374207 - DNA, 20 bp, Artificial Sequence
  Description of Artificial Sequence: Synthetic oligonucleotide
  Target: LAMA2; (+) strand; PAM type: YTN; PAM sequence: CTA
ctgaggaaattatattctcc

SEQ ID NO: 374208 - DNA, 20 bp, Artificial Sequence
  Description of Artificial Sequence: Synthetic oligonucleotide
  Target: LAMA2; (+) strand; PAM type: YTN; PAM sequence: CTG
aggaaattatattctcccac

SEQ ID NO: 374209 - DNA, 20 bp, Artificial Sequence
  Description of Artificial Sequence: Synthetic oligonucleotide
  Target: LAMA2; (+) strand; PAM type: YTN; PAM sequence: TTA
tattctcccacattgttttt

SEQ ID NO: 374210 - DNA, 20 bp, Artificial Sequence
  Description of Artificial Sequence: Synthetic oligonucleotide
  Target: LAMA2; (+) strand; PAM type: YTN; PAM sequence: TTC
tcccacattgtttttgatcc

SEQ ID NO: 374211 - DNA, 20 bp, Artificial Sequence
  Description of Artificial Sequence: Synthetic oligonucleotide
  Target: LAMA2; (+) strand; PAM type: YTN; PAM sequence: CTC
ccacattgtttttgatcccc

SEQ ID NO: 374212 - DNA, 20 bp, Artificial Sequence
  Description of Artificial Sequence: Synthetic oligonucleotide
  Target: LAMA2; (+) strand; PAM type: YTN; PAM sequence: TTG
tttttgatccccttcaattt

SEQ ID NO: 374213 - DNA, 20 bp, Artificial Sequence
  Description of Artificial Sequence: Synthetic oligonucleotide
  Target: LAMA2; (+) strand; PAM type: YTN; PAM sequence: TTT
ttgatccccttcaattttga

SEQ ID NO: 374214 - DNA, 20 bp, Artificial Sequence
  Description of Artificial Sequence: Synthetic oligonucleotide
  Target: LAMA2; (+) strand; PAM type: YTN; PAM sequence: TTT
tgatccccttcaattttgac

SEQ ID NO: 374215 - DNA, 20 bp, Artificial Sequence
  Description of Artificial Sequence: Synthetic oligonucleotide
  Target: LAMA2; (+) strand; PAM type: YTN; PAM sequence: TTT
gatccccttcaattttgaca

SEQ ID NO: 374216 - DNA, 20 bp, Artificial Sequence
  Description of Artificial Sequence: Synthetic oligonucleotide
  Target: LAMA2; (+) strand; PAM type: YTN; PAM sequence: TTG
atccccttcaattttgacac

SEQ ID NO: 374217 - DNA, 20 bp, Artificial Sequence
  Description of Artificial Sequence: Synthetic oligonucleotide
  Target: LAMA2; (+) strand; PAM type: YTN; PAM sequence: CTT
caattttgacacttgctgca

SEQ ID NO: 374218 - DNA, 20 bp, Artificial Sequence
  Description of Artificial Sequence: Synthetic oligonucleotide
  Target: LAMA2; (+) strand; PAM type: YTN; PAM sequence: TTC
aattttgacacttgctgcaa

SEQ ID NO: 374219 - DNA, 20 bp, Artificial Sequence
  Description of Artificial Sequence: Synthetic oligonucleotide
  Target: LAMA2; (+) strand; PAM type: YTN; PAM sequence: TTT
tgacacttgctgcaaaagac

SEQ ID NO: 374220 - DNA, 20 bp, Artificial Sequence
  Description of Artificial Sequence: Synthetic oligonucleotide
  Target: LAMA2; (+) strand; PAM type: YTN; PAM sequence: TTT
gacacttgctgcaaaagact

SEQ ID NO: 374221 - DNA, 20 bp, Artificial Sequence
  Description of Artificial Sequence: Synthetic oligonucleotide
  Target: LAMA2; (+) strand; PAM type: YTN; PAM sequence: TTG
acacttgctgcaaaagactt

SEQ ID NO: 374222 - DNA, 20 bp, Artificial Sequence
  Description of Artificial Sequence: Synthetic oligonucleotide
  Target: LAMA2; (+) strand; PAM type: YTN; PAM sequence: CTT
gctgcaaaagactttatctt

SEQ ID NO: 374223 - DNA, 20 bp, Artificial Sequence
  Description of Artificial Sequence: Synthetic oligonucleotide
  Target: LAMA2; (+) strand; PAM type: YTN; PAM sequence: TTG
ctgcaaaagactttatcttg

SEQ ID NO: 374224 - DNA, 20 bp, Artificial Sequence
  Description of Artificial Sequence: Synthetic oligonucleotide
  Target: LAMA2; (+) strand; PAM type: YTN; PAM sequence: CTG
caaaagactttatcttggta

SEQ ID NO: 374225 - DNA, 20 bp, Artificial Sequence
  Description of Artificial Sequence: Synthetic oligonucleotide
  Target: LAMA2; (+) strand; PAM type: YTN; PAM sequence: CTT
tatcttggtaagatggcaaa

SEQ ID NO: 374226 - DNA, 20 bp, Artificial Sequence
  Description of Artificial Sequence: Synthetic oligonucleotide
  Target: LAMA2; (+) strand; PAM type: YTN; PAM sequence: TTT
atcttggtaagatggcaaag

SEQ ID NO: 374227 - DNA, 20 bp, Artificial Sequence
  Description of Artificial Sequence: Synthetic oligonucleotide
  Target: LAMA2; (+) strand; PAM type: YTN; PAM sequence: TTA
tcttggtaagatggcaaaga

SEQ ID NO: 374228 - DNA, 20 bp, Artificial Sequence
  Description of Artificial Sequence: Synthetic oligonucleotide
  Target: LAMA2; (+) strand; PAM type: YTN; PAM sequence: CTT
ggtaagatggcaaagataac

SEQ ID NO: 374229 - DNA, 20 bp, Artificial Sequence
  Description of Artificial Sequence: Synthetic oligonucleotide
  Target: LAMA2; (+) strand; PAM type: YTN; PAM sequence: TTG
gtaagatggcaaagataaca

SEQ ID NO: 374230 - DNA, 20 bp, Artificial Sequence
  Description of Artificial Sequence: Synthetic oligonucleotide
  Target: LAMA2; (+) strand; PAM type: YTN; PAM sequence: CTA
gcctgaccataagattcaga

SEQ ID NO: 374231 - DNA, 20 bp, Artificial Sequence
  Description of Artificial Sequence: Synthetic oligonucleotide
  Target: LAMA2; (+) strand; PAM type: YTN; PAM sequence: CTG
accataagattcagatgccc

SEQ ID NO: 374232 - DNA, 20 bp, Artificial Sequence
  Description of Artificial Sequence: Synthetic oligonucleotide
  Target: LAMA2; (+) strand; PAM type: YTN; PAM sequence: TTC
agatgccctgttctgtttct

SEQ ID NO: 374233 - DNA, 20 bp, Artificial Sequence
  Description of Artificial Sequence: Synthetic oligonucleotide
  Target: LAMA2; (+) strand; PAM type: YTN; PAM sequence: CTG
ttctgtttctcctttggcaa

SEQ ID NO: 374234 - DNA, 20 bp, Artificial Sequence
  Description of Artificial Sequence: Synthetic oligonucleotide
  Target: LAMA2; (+) strand; PAM type: YTN; PAM sequence: TTC
tgtttctcctttggcaaatg

SEQ ID NO: 374235 - DNA, 20 bp, Artificial Sequence
  Description of Artificial Sequence: Synthetic oligonucleotide
  Target: LAMA2; (+) strand; PAM type: YTN; PAM sequence: CTG
tttctcctttggcaaatgtg

SEQ ID NO: 374236 - DNA, 20 bp, Artificial Sequence
  Description of Artificial Sequence: Synthetic oligonucleotide
  Target: LAMA2; (+) strand; PAM type: YTN; PAM sequence: TTT
ctcctttggcaaatgtggct

SEQ ID NO: 374237 - DNA, 20 bp, Artificial Sequence
  Description of Artificial Sequence: Synthetic oligonucleotide
  Target: LAMA2; (+) strand; PAM type: YTN; PAM sequence: TTC
tcctttggcaaatgtggctt

SEQ ID NO: 374238 - DNA, 20 bp, Artificial Sequence
  Description of Artificial Sequence: Synthetic oligonucleotide
  Target: LAMA2; (+) strand; PAM type: YTN; PAM sequence: CTC
ctttggcaaatgtggcttag

SEQ ID NO: 374239 - DNA, 20 bp, Artificial Sequence
  Description of Artificial Sequence: Synthetic oligonucleotide
  Target: LAMA2; (+) strand; PAM type: YTN; PAM sequence: CTT
tggcaaatgtggcttagtat

SEQ ID NO: 374240 - DNA, 20 bp, Artificial Sequence
  Description of Artificial Sequence: Synthetic oligonucleotide
  Target: LAMA2; (+) strand; PAM type: YTN; PAM sequence: TTT
ggcaaatgtggcttagtata

SEQ ID NO: 374241 - DNA, 20 bp, Artificial Sequence
  Description of Artificial Sequence: Synthetic oligonucleotide
  Target: LAMA2; (+) strand; PAM type: YTN; PAM sequence: TTG
gcaaatgtggcttagtataa

SEQ ID NO: 374242 - DNA, 20 bp, Artificial Sequence
  Description of Artificial Sequence: Synthetic oligonucleotide
  Target: LAMA2; (+) strand; PAM type: YTN; PAM sequence: CTT
agtataaagtgtgagcaaat

SEQ ID NO: 374243 - DNA, 20 bp, Artificial Sequence
  Description of Artificial Sequence: Synthetic oligonucleotide
  Target: LAMA2; (+) strand; PAM type: YTN; PAM sequence: TTA
gtataaagtgtgagcaaatg

SEQ ID NO: 374244 - DNA, 20 bp, Artificial Sequence
  Description of Artificial Sequence: Synthetic oligonucleotide
  Target: LAMA2; (+) strand; PAM type: YTN; PAM sequence: TTG
aaagagaagacagagcagaa

SEQ ID NO: 374245 - DNA, 20 bp, Artificial Sequence
  Description of Artificial Sequence: Synthetic oligonucleotide
  Target: LAMA2; (+) strand; PAM type: YTN; PAM sequence: CTG
cctataaggacgtttctgca

SEQ ID NO: 374246 - DNA, 20 bp, Artificial Sequence
  Description of Artificial Sequence: Synthetic oligonucleotide
  Target: LAMA2; (+) strand; PAM type: YTN; PAM sequence: CTA
taaggacgtttctgcacacc

SEQ ID NO: 374247 - DNA, 20 bp, Artificial Sequence
  Description of Artificial Sequence: Synthetic oligonucleotide
  Target: LAMA2; (+) strand; PAM type: YTN; PAM sequence: TTT
ctgcacacctgtagcagtaa

SEQ ID NO: 374248 - DNA, 20 bp, Artificial Sequence
  Description of Artificial Sequence: Synthetic oligonucleotide
  Target: LAMA2; (+) strand; PAM type: YTN; PAM sequence: TTC
tgcacacctgtagcagtaag

SEQ ID NO: 374249 - DNA, 20 bp, Artificial Sequence
  Description of Artificial Sequence: Synthetic oligonucleotide
  Target: LAMA2; (+) strand; PAM type: YTN; PAM sequence: CTG
cacacctgtagcagtaagtt

SEQ ID NO: 374250 - DNA, 20 bp, Artificial Sequence
  Description of Artificial Sequence: Synthetic oligonucleotide
  Target: LAMA2; (+) strand; PAM type: YTN; PAM sequence: CTG
tagcagtaagttgcatttta

SEQ ID NO: 374251 - DNA, 20 bp, Artificial Sequence
  Description of Artificial Sequence: Synthetic oligonucleotide
  Target: LAMA2; (+) strand; PAM type: YTN; PAM sequence: TTG
cattttaaaacataacattt

SEQ ID NO: 374252 - DNA, 20 bp, Artificial Sequence
  Description of Artificial Sequence: Synthetic oligonucleotide
  Target: LAMA2; (+) strand; PAM type: YTN; PAM sequence: TTT
taaaacataacatttaggtc

SEQ ID NO: 374253 - DNA, 20 bp, Artificial Sequence
  Description of Artificial Sequence: Synthetic oligonucleotide
  Target: LAMA2; (+) strand; PAM type: YTN; PAM sequence: TTT
aaaacataacatttaggtca

SEQ ID NO: 374254 - DNA, 20 bp, Artificial Sequence
  Description of Artificial Sequence: Synthetic oligonucleotide
  Target: LAMA2; (+) strand; PAM type: YTN; PAM sequence: TTA
aaacataacatttaggtcag

SEQ ID NO: 374255 - DNA, 20 bp, Artificial Sequence
  Description of Artificial Sequence: Synthetic oligonucleotide
  Target: LAMA2; (+) strand; PAM type: YTN; PAM sequence: TTT
aggtcagagaaaatttgctg

SEQ ID NO: 374256 - DNA, 20 bp, Artificial Sequence
  Description of Artificial Sequence: Synthetic oligonucleotide
  Target: LAMA2; (+) strand; PAM type: YTN; PAM sequence: TTA
ggtcagagaaaatttgctgc

SEQ ID NO: 374257 - DNA, 20 bp, Artificial Sequence
  Description of Artificial Sequence: Synthetic oligonucleotide
  Target: LAMA2; (+) strand; PAM type: YTN; PAM sequence: TTT
gctgctatcgtttttaaaaa

SEQ ID NO: 374258 - DNA, 20 bp, Artificial Sequence
  Description of Artificial Sequence: Synthetic oligonucleotide
  Target: LAMA2; (+) strand; PAM type: YTN; PAM sequence: TTG
ctgctatcgtttttaaaaat

SEQ ID NO: 374259 - DNA, 20 bp, Artificial Sequence
  Description of Artificial Sequence: Synthetic oligonucleotide
  Target: LAMA2; (+) strand; PAM type: YTN; PAM sequence: CTG
ctatcgtttttaaaaatctt

SEQ ID NO: 374260 - DNA, 20 bp, Artificial Sequence
  Description of Artificial Sequence: Synthetic oligonucleotide
  Target: LAMA2; (+) strand; PAM type: YTN; PAM sequence: CTA
tcgtttttaaaaatcttctt

SEQ ID NO: 374261 - DNA, 20 bp, Artificial Sequence
  Description of Artificial Sequence: Synthetic oligonucleotide
  Target: LAMA2; (+) strand; PAM type: YTN; PAM sequence: TTT
ttaaaaatcttctttgccat

SEQ ID NO: 374262 - DNA, 20 bp, Artificial Sequence
  Description of Artificial Sequence: Synthetic oligonucleotide
  Target: LAMA2; (+) strand; PAM type: YTN; PAM sequence: TTT
taaaaatcttctttgccatg

SEQ ID NO: 374263 - DNA, 20 bp, Artificial Sequence
  Description of Artificial Sequence: Synthetic oligonucleotide
  Target: LAMA2; (+) strand; PAM type: YTN; PAM sequence: TTT
aaaaatcttctttgccatgc

SEQ ID NO: 374264 - DNA, 20 bp, Artificial Sequence
  Description of Artificial Sequence: Synthetic oligonucleotide
  Target: LAMA2; (+) strand; PAM type: YTN; PAM sequence: TTA
aaaatcttctttgccatgcc

SEQ ID NO: 374265 - DNA, 20 bp, Artificial Sequence
  Description of Artificial Sequence: Synthetic oligonucleotide
  Target: LAMA2; (+) strand; PAM type: YTN; PAM sequence: CTT
ctttgccatgccctataaac

SEQ ID NO: 374266 - DNA, 20 bp, Artificial Sequence
  Description of Artificial Sequence: Synthetic oligonucleotide
  Target: LAMA2; (+) strand; PAM type: YTN; PAM sequence: TTC
tttgccatgccctataaaca

SEQ ID NO: 374267 - DNA, 20 bp, Artificial Sequence
  Description of Artificial Sequence: Synthetic oligonucleotide
  Target: LAMA2; (+) strand; PAM type: YTN; PAM sequence: CTT
tgccatgccctataaacaaa

SEQ ID NO: 374268 - DNA, 20 bp, Artificial Sequence
  Description of Artificial Sequence: Synthetic oligonucleotide
  Target: LAMA2; (+) strand; PAM type: YTN; PAM sequence: TTT
gccatgccctataaacaaac

SEQ ID NO: 374269 - DNA, 20 bp, Artificial Sequence
  Description of Artificial Sequence: Synthetic oligonucleotide
  Target: LAMA2; (+) strand; PAM type: YTN; PAM sequence: TTG
ccatgccctataaacaaact

SEQ ID NO: 374270 - DNA, 20 bp, Artificial Sequence
  Description of Artificial Sequence: Synthetic oligonucleotide
  Target: LAMA2; (+) strand; PAM type: YTN; PAM sequence: CTA
taaacaaacttttgtttttc

SEQ ID NO: 374271 - DNA, 20 bp, Artificial Sequence
  Description of Artificial Sequence: Synthetic oligonucleotide
  Target: LAMA2; (+) strand; PAM type: YTN; PAM sequence: CTT
ttgtttttccaataatataa

SEQ ID NO: 374272 - DNA, 20 bp, Artificial Sequence
  Description of Artificial Sequence: Synthetic oligonucleotide
  Target: LAMA2; (+) strand; PAM type: YTN; PAM sequence: TTT
tgtttttccaataatataat

SEQ ID NO: 374273 - DNA, 20 bp, Artificial Sequence
  Description of Artificial Sequence: Synthetic oligonucleotide
  Target: LAMA2; (+) strand; PAM type: YTN; PAM sequence: TTT
gtttttccaataatataata

SEQ ID NO: 374274 - DNA, 20 bp, Artificial Sequence
  Description of Artificial Sequence: Synthetic oligonucleotide
  Target: LAMA2; (+) strand; PAM type: YTN; PAM sequence: TTG
tttttccaataatataatat

SEQ ID NO: 374275 - DNA, 20 bp, Artificial Sequence
  Description of Artificial Sequence: Synthetic oligonucleotide
  Target: LAMA2; (+) strand; PAM type: YTN; PAM sequence: TTT
ttccaataatataatatatt

SEQ ID NO: 374276 - DNA, 20 bp, Artificial Sequence
  Description of Artificial Sequence: Synthetic oligonucleotide
  Target: LAMA2; (+) strand; PAM type: YTN; PAM sequence: TTT
tccaataatataatatatta

SEQ ID NO: 374277 - DNA, 20 bp, Artificial Sequence
  Description of Artificial Sequence: Synthetic oligonucleotide
  Target: LAMA2; (+) strand; PAM type: YTN; PAM sequence: TTT
ccaataatataatatattat

SEQ ID NO: 374278 - DNA, 20 bp, Artificial Sequence
  Description of Artificial Sequence: Synthetic oligonucleotide
  Target: LAMA2; (+) strand; PAM type: YTN; PAM sequence: TTC
caataatataatatattata

SEQ ID NO: 374279 - DNA, 20 bp, Artificial Sequence
  Description of Artificial Sequence: Synthetic oligonucleotide
  Target: LAMA2; (+) strand; PAM type: YTN; PAM sequence: TTA
tataaatagttttatattat

SEQ ID NO: 374280 - DNA, 20 bp, Artificial Sequence
  Description of Artificial Sequence: Synthetic oligonucleotide
  Target: LAMA2; (+) strand; PAM type: YTN; PAM sequence: TTT
tatattatattatatttata

SEQ ID NO: 374281 - DNA, 20 bp, Artificial Sequence
  Description of Artificial Sequence: Synthetic oligonucleotide
  Target: LAMA2; (+) strand; PAM type: YTN; PAM sequence: TTT
atattatattatatttatat

SEQ ID NO: 374282 - DNA, 20 bp, Artificial Sequence
  Description of Artificial Sequence: Synthetic oligonucleotide
  Target: LAMA2; (+) strand; PAM type: YTN; PAM sequence: TTA
tattatattatatttatata

SEQ ID NO: 374283 - DNA, 20 bp, Artificial Sequence
  Description of Artificial Sequence: Synthetic oligonucleotide
  Target: LAMA2; (+) strand; PAM type: YTN; PAM sequence: TTA
tattatatttatataatata

SEQ ID NO: 374284 - DNA, 20 bp, Artificial Sequence
  Description of Artificial Sequence: Synthetic oligonucleotide
  Target: LAMA2; (+) strand; PAM type: YTN; PAM sequence: TTA
tatttatataatatatataa

SEQ ID NO: 374285 - DNA, 20 bp, Artificial Sequence
  Description of Artificial Sequence: Synthetic oligonucleotide
  Target: LAMA2; (+) strand; PAM type: YTN; PAM sequence: TTT
atataatatatataataata

SEQ ID NO: 374286 - DNA, 20 bp, Artificial Sequence
  Description of Artificial Sequence: Synthetic oligonucleotide
  Target: LAMA2; (+) strand; PAM type: YTN; PAM sequence: TTA
tataatatatataataatat

SEQ ID NO: 374287 - DNA, 20 bp, Artificial Sequence
  Description of Artificial Sequence: Synthetic oligonucleotide
  Target: LAMA2; (+) strand; PAM type: YTN; PAM sequence: TTA
tatttatataatatatataa

SEQ ID NO: 374288 - DNA, 20 bp, Artificial Sequence
  Description of Artificial Sequence: Synthetic oligonucleotide
  Target: LAMA2; (+) strand; PAM type: YTN; PAM sequence: TTT
atataatatatataataata

SEQ ID NO: 374289 - DNA, 20 bp, Artificial Sequence
  Description of Artificial Sequence: Synthetic oligonucleotide
  Target: LAMA2; (+) strand; PAM type: YTN; PAM sequence: TTA
tataatatatataataatat

SEQ ID NO: 374290 - DNA, 20 bp, Artificial Sequence
  Description of Artificial Sequence: Synthetic oligonucleotide
  Target: LAMA2; (+) strand; PAM type: YTN; PAM sequence: TTA
tatttatataatatatataa

SEQ ID NO: 374291 - DNA, 20 bp, Artificial Sequence
  Description of Artificial Sequence: Synthetic oligonucleotide
  Target: LAMA2; (+) strand; PAM type: YTN; PAM sequence: TTT
atataatatatataataata

SEQ ID NO: 374292 - DNA, 20 bp, Artificial Sequence
  Description of Artificial Sequence: Synthetic oligonucleotide
  Target: LAMA2; (+) strand; PAM type: YTN; PAM sequence: TTA
tataatatatataataatat

SEQ ID NO: 374293 - DNA, 20 bp, Artificial Sequence
  Description of Artificial Sequence: Synthetic oligonucleotide
  Target: LAMA2; (+) strand; PAM type: YTN; PAM sequence: TTA
tatttatataatatatataa

SEQ ID NO: 374294 - DNA, 20 bp, Artificial Sequence
  Description of Artificial Sequence: Synthetic oligonucleotide
  Target: LAMA2; (+) strand; PAM type: YTN; PAM sequence: TTT
atataatatatataataata

SEQ ID NO: 374295 - DNA, 20 bp, Artificial Sequence
  Description of Artificial Sequence: Synthetic oligonucleotide
  Target: LAMA2; (+) strand; PAM type: YTN; PAM sequence: TTA
tataatatatataataatat

SEQ ID NO: 374296 - DNA, 20 bp, Artificial Sequence
  Description of Artificial Sequence: Synthetic oligonucleotide
  Target: LAMA2; (+) strand; PAM type: YTN; PAM sequence: TTA
tataatatattatataatat

SEQ ID NO: 374297 - DNA, 20 bp, Artificial Sequence
  Description of Artificial Sequence: Synthetic oligonucleotide
  Target: LAMA2; (+) strand; PAM type: YTN; PAM sequence: TTA
tataatatataataatatat

SEQ ID NO: 374298 - DNA, 20 bp, Artificial Sequence
  Description of Artificial Sequence: Synthetic oligonucleotide
  Target: LAMA2; (+) strand; PAM type: YTN; PAM sequence: TTA
tataatatataataatatat

SEQ ID NO: 374299 - DNA, 20 bp, Artificial Sequence
  Description of Artificial Sequence: Synthetic oligonucleotide
  Target: LAMA2; (+) strand; PAM type: YTN; PAM sequence: TTA
tataatatataataatatat

SEQ ID NO: 374300 - DNA, 20 bp, Artificial Sequence
  Description of Artificial Sequence: Synthetic oligonucleotide
  Target: LAMA2; (+) strand; PAM type: YTN; PAM sequence: TTA
tataatatataataatatat

SEQ ID NO: 374301 - DNA, 20 bp, Artificial Sequence
  Description of Artificial Sequence: Synthetic oligonucleotide
  Target: LAMA2; (+) strand; PAM type: YTN; PAM sequence: TTA
tataatatataataatatat

SEQ ID NO: 374302 - DNA, 20 bp, Artificial Sequence
  Description of Artificial Sequence: Synthetic oligonucleotide
  Target: LAMA2; (+) strand; PAM type: YTN; PAM sequence: TTA
tataatatataataatatat

SEQ ID NO: 374303 - DNA, 20 bp, Artificial Sequence
  Description of Artificial Sequence: Synthetic oligonucleotide
  Target: LAMA2; (+) strand; PAM type: YTN; PAM sequence: TTA
tataatatataatataaata

SEQ ID NO: 374304 - DNA, 20 bp, Artificial Sequence
  Description of Artificial Sequence: Synthetic oligonucleotide
  Target: LAMA2; (+) strand; PAM type: YTN; PAM sequence: TTT
ttggtaagaaagaaagagca

SEQ ID NO: 374305 - DNA, 20 bp, Artificial Sequence
  Description of Artificial Sequence: Synthetic oligonucleotide
  Target: LAMA2; (+) strand; PAM type: YTN; PAM sequence: TTT
tggtaagaaagaaagagcag

SEQ ID NO: 374306 - DNA, 20 bp, Artificial Sequence
  Description of Artificial Sequence: Synthetic oligonucleotide
  Target: LAMA2; (+) strand; PAM type: YTN; PAM sequence: TTT
ggtaagaaagaaagagcagg

SEQ ID NO: 374307 - DNA, 20 bp, Artificial Sequence
  Description of Artificial Sequence: Synthetic oligonucleotide
  Target: LAMA2; (+) strand; PAM type: YTN; PAM sequence: TTG
gtaagaaagaaagagcagga

SEQ ID NO: 374308 - DNA, 20 bp, Artificial Sequence
  Description of Artificial Sequence: Synthetic oligonucleotide
  Target: LAMA2; (+) strand; PAM type: YTN; PAM sequence: CTG
gagtttgctaatagagttgg

SEQ ID NO: 374309 - DNA, 20 bp, Artificial Sequence
  Description of Artificial Sequence: Synthetic oligonucleotide
  Target: LAMA2; (+) strand; PAM type: YTN; PAM sequence: TTT
gctaatagagttggcaggca

SEQ ID NO: 374310 - DNA, 20 bp, Artificial Sequence
  Description of Artificial Sequence: Synthetic oligonucleotide
  Target: LAMA2; (+) strand; PAM type: YTN; PAM sequence: TTG
ctaatagagttggcaggcac

SEQ ID NO: 374311 - DNA, 20 bp, Artificial Sequence
  Description of Artificial Sequence: Synthetic oligonucleotide
  Target: LAMA2; (+) strand; PAM type: YTN; PAM sequence: CTA
atagagttggcaggcacagt

SEQ ID NO: 374312 - DNA, 20 bp, Artificial Sequence
  Description of Artificial Sequence: Synthetic oligonucleotide
  Target: LAMA2; (+) strand; PAM type: YTN; PAM sequence: TTG
gcaggcacagttcagtatca

SEQ ID NO: 374313 - DNA, 20 bp, Artificial Sequence
  Description of Artificial Sequence: Synthetic oligonucleotide
  Target: LAMA2; (+) strand; PAM type: YTN; PAM sequence: TTC
agtatcaccttatggcatat

SEQ ID NO: 374314 - DNA, 20 bp, Artificial Sequence
  Description of Artificial Sequence: Synthetic oligonucleotide
  Target: LAMA2; (+) strand; PAM type: YTN; PAM sequence: CTT
atggcatattcctataatat

SEQ ID NO: 374315 - DNA, 20 bp, Artificial Sequence
  Description of Artificial Sequence: Synthetic oligonucleotide
  Target: LAMA2; (+) strand; PAM type: YTN; PAM sequence: TTA
tggcatattcctataatatg

SEQ ID NO: 374316 - DNA, 20 bp, Artificial Sequence
  Description of Artificial Sequence: Synthetic oligonucleotide
  Target: LAMA2; (+) strand; PAM type: YTN; PAM sequence: TTC
ctataatatgcaggcatgct

SEQ ID NO: 374317 - DNA, 20 bp, Artificial Sequence
  Description of Artificial Sequence: Synthetic oligonucleotide
  Target: LAMA2; (+) strand; PAM type: YTN; PAM sequence: CTA
taatatgcaggcatgctttc

SEQ ID NO: 374318 - DNA, 20 bp, Artificial Sequence
  Description of Artificial Sequence: Synthetic oligonucleotide
  Target: LAMA2; (+) strand; PAM type: YTN; PAM sequence: CTT
tctcagacttccctttagta

SEQ ID NO: 374319 - DNA, 20 bp, Artificial Sequence
  Description of Artificial Sequence: Synthetic oligonucleotide
  Target: LAMA2; (+) strand; PAM type: YTN; PAM sequence: TTT
ctcagacttccctttagtaa

SEQ ID NO: 374320 - DNA, 20 bp, Artificial Sequence
  Description of Artificial Sequence: Synthetic oligonucleotide
  Target: LAMA2; (+) strand; PAM type: YTN; PAM sequence: TTC
tcagacttccctttagtaaa

SEQ ID NO: 374321 - DNA, 20 bp, Artificial Sequence
  Description of Artificial Sequence: Synthetic oligonucleotide
  Target: LAMA2; (+) strand; PAM type: YTN; PAM sequence: CTC
agacttccctttagtaaagc

SEQ ID NO: 374322 - DNA, 20 bp, Artificial Sequence
  Description of Artificial Sequence: Synthetic oligonucleotide
  Target: LAMA2; (+) strand; PAM type: YTN; PAM sequence: CTT
ccctttagtaaagccttcaa

SEQ ID NO: 374323 - DNA, 20 bp, Artificial Sequence
  Description of Artificial Sequence: Synthetic oligonucleotide
  Target: LAMA2; (+) strand; PAM type: YTN; PAM sequence: TTC
cctttagtaaagccttcaat

SEQ ID NO: 374324 - DNA, 20 bp, Artificial Sequence
  Description of Artificial Sequence: Synthetic oligonucleotide
  Target: LAMA2; (+) strand; PAM type: YTN; PAM sequence: CTT
tagtaaagccttcaatgaaa

SEQ ID NO: 374325 - DNA, 20 bp, Artificial Sequence
  Description of Artificial Sequence: Synthetic oligonucleotide
  Target: LAMA2; (+) strand; PAM type: YTN; PAM sequence: TTT
agtaaagccttcaatgaaaa

SEQ ID NO: 374326 - DNA, 20 bp, Artificial Sequence
  Description of Artificial Sequence: Synthetic oligonucleotide
  Target: LAMA2; (+) strand; PAM type: YTN; PAM sequence: TTA
gtaaagccttcaatgaaaat

SEQ ID NO: 374327 - DNA, 20 bp, Artificial Sequence
  Description of Artificial Sequence: Synthetic oligonucleotide
  Target: LAMA2; (+) strand; PAM type: YTN; PAM sequence: CTT
caatgaaaatttgcctctga

SEQ ID NO: 374328 - DNA, 20 bp, Artificial Sequence
  Description of Artificial Sequence: Synthetic oligonucleotide
  Target: LAMA2; (+) strand; PAM type: YTN; PAM sequence: TTC
aatgaaaatttgcctctgaa

SEQ ID NO: 374329 - DNA, 20 bp, Artificial Sequence
  Description of Artificial Sequence: Synthetic oligonucleotide
  Target: LAMA2; (+) strand; PAM type: YTN; PAM sequence: TTT
gcctctgaattcatatgcaa

SEQ ID NO: 374330 - DNA, 20 bp, Artificial Sequence
  Description of Artificial Sequence: Synthetic oligonucleotide
  Target: LAMA2; (+) strand; PAM type: YTN; PAM sequence: TTG
cctctgaattcatatgcaaa

SEQ ID NO: 374331 - DNA, 20 bp, Artificial Sequence
  Description of Artificial Sequence: Synthetic oligonucleotide
  Target: LAMA2; (+) strand; PAM type: YTN; PAM sequence: CTC
tgaattcatatgcaaataca

SEQ ID NO: 374332 - DNA, 20 bp, Artificial Sequence
  Description of Artificial Sequence: Synthetic oligonucleotide
  Target: LAMA2; (+) strand; PAM type: YTN; PAM sequence: CTG
aattcatatgcaaatacata

SEQ ID NO: 374333 - DNA, 20 bp, Artificial Sequence
  Description of Artificial Sequence: Synthetic oligonucleotide
  Target: LAMA2; (+) strand; PAM type: YTN; PAM sequence: TTC
atatgcaaatacatacaaat

SEQ ID NO: 374334 - DNA, 20 bp, Artificial Sequence
  Description of Artificial Sequence: Synthetic oligonucleotide
  Target: LAMA2; (+) strand; PAM type: YTN; PAM sequence: TTA
ttaattcagatatacccaca

SEQ ID NO: 374335 - DNA, 20 bp, Artificial Sequence
  Description of Artificial Sequence: Synthetic oligonucleotide
  Target: LAMA2; (+) strand; PAM type: YTN; PAM sequence: TTA
attcagatatacccacagct

SEQ ID NO: 374336 - DNA, 20 bp, Artificial Sequence
  Description of Artificial Sequence: Synthetic oligonucleotide
  Target: LAMA2; (+) strand; PAM type: YTN; PAM sequence: TTC
agatatacccacagctccca

SEQ ID NO: 374337 - DNA, 20 bp, Artificial Sequence
  Description of Artificial Sequence: Synthetic oligonucleotide
  Target: LAMA2; (+) strand; PAM type: YTN; PAM sequence: CTC
ccatccaattaataagaatc

SEQ ID NO: 374338 - DNA, 20 bp, Artificial Sequence
  Description of Artificial Sequence: Synthetic oligonucleotide
  Target: LAMA2; (+) strand; PAM type: YTN; PAM sequence: TTA
ataagaatcttctgagtcac

SEQ ID NO: 374339 - DNA, 20 bp, Artificial Sequence
  Description of Artificial Sequence: Synthetic oligonucleotide
  Target: LAMA2; (+) strand; PAM type: YTN; PAM sequence: CTT
ctgagtcacagtttctagtt

SEQ ID NO: 374340 - DNA, 20 bp, Artificial Sequence
  Description of Artificial Sequence: Synthetic oligonucleotide
  Target: LAMA2; (+) strand; PAM type: YTN; PAM sequence: TTC
tgagtcacagtttctagtta

SEQ ID NO: 374341 - DNA, 20 bp, Artificial Sequence
  Description of Artificial Sequence: Synthetic oligonucleotide
  Target: LAMA2; (+) strand; PAM type: YTN; PAM sequence: CTG
agtcacagtttctagttaat

SEQ ID NO: 374342 - DNA, 20 bp, Artificial Sequence
  Description of Artificial Sequence: Synthetic oligonucleotide
  Target: LAMA2; (+) strand; PAM type: YTN; PAM sequence: TTT
ctagttaataaattctgaac

SEQ ID NO: 374343 - DNA, 20 bp, Artificial Sequence
  Description of Artificial Sequence: Synthetic oligonucleotide
  Target: LAMA2; (+) strand; PAM type: YTN; PAM sequence: TTC
tagttaataaattctgaact

SEQ ID NO: 374344 - DNA, 20 bp, Artificial Sequence
  Description of Artificial Sequence: Synthetic oligonucleotide
  Target: LAMA2; (+) strand; PAM type: YTN; PAM sequence: CTA
gttaataaattctgaactct

SEQ ID NO: 374345 - DNA, 20 bp, Artificial Sequence
  Description of Artificial Sequence: Synthetic oligonucleotide
  Target: LAMA2; (+) strand; PAM type: YTN; PAM sequence: TTA
ataaattctgaactcttatt

SEQ ID NO: 374346 - DNA, 20 bp, Artificial Sequence
  Description of Artificial Sequence: Synthetic oligonucleotide
  Target: LAMA2; (+) strand; PAM type: YTN; PAM sequence: TTC
tgaactcttattactgaatt

SEQ ID NO: 374347 - DNA, 20 bp, Artificial Sequence
  Description of Artificial Sequence: Synthetic oligonucleotide
  Target: LAMA2; (+) strand; PAM type: YTN; PAM sequence: CTG
aactcttattactgaatttc

SEQ ID NO: 374348 - DNA, 20 bp, Artificial Sequence
  Description of Artificial Sequence: Synthetic oligonucleotide
  Target: LAMA2; (+) strand; PAM type: YTN; PAM sequence: CTC
ttattactgaatttccttgc

SEQ ID NO: 374349 - DNA, 20 bp, Artificial Sequence
  Description of Artificial Sequence: Synthetic oligonucleotide
  Target: LAMA2; (+) strand; PAM type: YTN; PAM sequence: CTT
attactgaatttccttgcga

SEQ ID NO: 374350 - DNA, 20 bp, Artificial Sequence
  Description of Artificial Sequence: Synthetic oligonucleotide
  Target: LAMA2; (+) strand; PAM type: YTN; PAM sequence: TTA
ttactgaatttccttgcgag

SEQ ID NO: 374351 - DNA, 20 bp, Artificial Sequence
  Description of Artificial Sequence: Synthetic oligonucleotide
  Target: LAMA2; (+) strand; PAM type: YTN; PAM sequence: TTA
ctgaatttccttgcgagcct

SEQ ID NO: 374352 - DNA, 20 bp, Artificial Sequence
  Description of Artificial Sequence: Synthetic oligonucleotide
  Target: LAMA2; (+) strand; PAM type: YTN; PAM sequence: CTG
aatttccttgcgagcctgtt

SEQ ID NO: 374353 - DNA, 20 bp, Artificial Sequence
  Description of Artificial Sequence: Synthetic oligonucleotide
  Target: LAMA2; (+) strand; PAM type: YTN; PAM sequence: TTT
ccttgcgagcctgtttcctc

SEQ ID NO: 374354 - DNA, 20 bp, Artificial Sequence
  Description of Artificial Sequence: Synthetic oligonucleotide
  Target: LAMA2; (+) strand; PAM type: YTN; PAM sequence: TTC
cttgcgagcctgtttcctca

SEQ ID NO: 374355 - DNA, 20 bp, Artificial Sequence
  Description of Artificial Sequence: Synthetic oligonucleotide
  Target: LAMA2; (+) strand; PAM type: YTN; PAM sequence: CTT
gcgagcctgtttcctcataa

SEQ ID NO: 374356 - DNA, 20 bp, Artificial Sequence
  Description of Artificial Sequence: Synthetic oligonucleotide
  Target: LAMA2; (+) strand; PAM type: YTN; PAM sequence: TTG
cgagcctgtttcctcataac

SEQ ID NO: 374357 - DNA, 20 bp, Artificial Sequence
  Description of Artificial Sequence: Synthetic oligonucleotide
  Target: LAMA2; (+) strand; PAM type: YTN; PAM sequence: CTG
tttcctcataacaagttctg

SEQ ID NO: 374358 - DNA, 20 bp, Artificial Sequence
  Description of Artificial Sequence: Synthetic oligonucleotide
  Target: LAMA2; (+) strand; PAM type: YTN; PAM sequence: TTT
cctcataacaagttctggct

SEQ ID NO: 374359 - DNA, 20 bp, Artificial Sequence
  Description of Artificial Sequence: Synthetic oligonucleotide
  Target: LAMA2; (+) strand; PAM type: YTN; PAM sequence: TTC
ctcataacaagttctggctg

SEQ ID NO: 374360 - DNA, 20 bp, Artificial Sequence
  Description of Artificial Sequence: Synthetic oligonucleotide
  Target: LAMA2; (+) strand; PAM type: YTN; PAM sequence: CTC
ataacaagttctggctgcaa

SEQ ID NO: 374361 - DNA, 20 bp, Artificial Sequence
  Description of Artificial Sequence: Synthetic oligonucleotide
  Target: LAMA2; (+) strand; PAM type: YTN; PAM sequence: TTC
tggctgcaacaacaacaaaa

SEQ ID NO: 374362 - DNA, 20 bp, Artificial Sequence
  Description of Artificial Sequence: Synthetic oligonucleotide
  Target: LAMA2; (+) strand; PAM type: YTN; PAM sequence: CTG
gctgcaacaacaacaaaaaa

SEQ ID NO: 374363 - DNA, 20 bp, Artificial Sequence
  Description of Artificial Sequence: Synthetic oligonucleotide
  Target: LAMA2; (+) strand; PAM type: YTN; PAM sequence: CTG
caacaacaacaaaaaatgtg

SEQ ID NO: 374364 - DNA, 20 bp, Artificial Sequence
  Description of Artificial Sequence: Synthetic oligonucleotide
  Target: LAMA2; (+) strand; PAM type: YTN; PAM sequence: CTT
acatatttgtagagaaaata

SEQ ID NO: 374365 - DNA, 20 bp, Artificial Sequence
  Description of Artificial Sequence: Synthetic oligonucleotide
  Target: LAMA2; (+) strand; PAM type: YTN; PAM sequence: TTA
catatttgtagagaaaataa

SEQ ID NO: 374366 - DNA, 20 bp, Artificial Sequence
  Description of Artificial Sequence: Synthetic oligonucleotide
  Target: LAMA2; (+) strand; PAM type: YTN; PAM sequence: TTT
gtagagaaaataaccaattg

SEQ ID NO: 374367 - DNA, 20 bp, Artificial Sequence
  Description of Artificial Sequence: Synthetic oligonucleotide
  Target: LAMA2; (+) strand; PAM type: YTN; PAM sequence: TTG
tagagaaaataaccaattgg

SEQ ID NO: 374368 - DNA, 20 bp, Artificial Sequence
  Description of Artificial Sequence: Synthetic oligonucleotide
  Target: LAMA2; (+) strand; PAM type: YTN; PAM sequence: TTG
gagtagagacatatgatgtg

SEQ ID NO: 374369 - DNA, 20 bp, Artificial Sequence
  Description of Artificial Sequence: Synthetic oligonucleotide
  Target: LAMA2; (+) strand; PAM type: YTN; PAM sequence: TTG
tactacaaaggctttccaac

SEQ ID NO: 374370 - DNA, 20 bp, Artificial Sequence
  Description of Artificial Sequence: Synthetic oligonucleotide
  Target: LAMA2; (+) strand; PAM type: YTN; PAM sequence: CTA
caaaggctttccaacatgga

SEQ ID NO: 374371 - DNA, 20 bp, Artificial Sequence
  Description of Artificial Sequence: Synthetic oligonucleotide
  Target: LAMA2; (+) strand; PAM type: YTN; PAM sequence: CTT
tccaacatggacctggattc

SEQ ID NO: 374372 - DNA, 20 bp, Artificial Sequence
  Description of Artificial Sequence: Synthetic oligonucleotide
  Target: LAMA2; (+) strand; PAM type: YTN; PAM sequence: TTT
ccaacatggacctggattcc

SEQ ID NO: 374373 - DNA, 20 bp, Artificial Sequence
  Description of Artificial Sequence: Synthetic oligonucleotide
  Target: LAMA2; (+) strand; PAM type: YTN; PAM sequence: TTC
caacatggacctggattcct

SEQ ID NO: 374374 - DNA, 20 bp, Artificial Sequence
  Description of Artificial Sequence: Synthetic oligonucleotide
  Target: LAMA2; (+) strand; PAM type: YTN; PAM sequence: CTG
gattcctccagagtgccagc

SEQ ID NO: 374375 - DNA, 20 bp, Artificial Sequence
  Description of Artificial Sequence: Synthetic oligonucleotide
  Target: LAMA2; (+) strand; PAM type: YTN; PAM sequence: TTC
ctccagagtgccagcagcag

SEQ ID NO: 374376 - DNA, 20 bp, Artificial Sequence
  Description of Artificial Sequence: Synthetic oligonucleotide
  Target: LAMA2; (+) strand; PAM type: YTN; PAM sequence: CTC
cagagtgccagcagcagatt

SEQ ID NO: 374377 - DNA, 20 bp, Artificial Sequence
  Description of Artificial Sequence: Synthetic oligonucleotide
  Target: LAMA2; (+) strand; PAM type: YTN; PAM sequence: TTC
ttattatgctttggtctcat

SEQ ID NO: 374378 - DNA, 20 bp, Artificial Sequence
  Description of Artificial Sequence: Synthetic oligonucleotide
  Target: LAMA2; (+) strand; PAM type: YTN; PAM sequence: CTT
attatgctttggtctcattt

SEQ ID NO: 374379 - DNA, 20 bp, Artificial Sequence
  Description of Artificial Sequence: Synthetic oligonucleotide
  Target: LAMA2; (+) strand; PAM type: YTN; PAM sequence: TTA
ttatgctttggtctcatttt

SEQ ID NO: 374380 - DNA, 20 bp, Artificial Sequence
  Description of Artificial Sequence: Synthetic oligonucleotide
  Target: LAMA2; (+) strand; PAM type: YTN; PAM sequence: TTA
tgctttggtctcattttcag

SEQ ID NO: 374381 - DNA, 20 bp, Artificial Sequence
  Description of Artificial Sequence: Synthetic oligonucleotide
  Target: LAMA2; (+) strand; PAM type: YTN; PAM sequence: CTT
tggtctcattttcagtgcca

SEQ ID NO: 374382 - DNA, 20 bp, Artificial Sequence
  Description of Artificial Sequence: Synthetic oligonucleotide
  Target: LAMA2; (+) strand; PAM type: YTN; PAM sequence: TTT
ggtctcattttcagtgccag

SEQ ID NO: 374383 - DNA, 20 bp, Artificial Sequence
  Description of Artificial Sequence: Synthetic oligonucleotide
  Target: LAMA2; (+) strand; PAM type: YTN; PAM sequence: TTG
gtctcattttcagtgccagt

SEQ ID NO: 374384 - DNA, 20 bp, Artificial Sequence
  Description of Artificial Sequence: Synthetic oligonucleotide
  Target: LAMA2; (+) strand; PAM type: YTN; PAM sequence: CTC
attttcagtgccagtgacaa

SEQ ID NO: 374385 - DNA, 20 bp, Artificial Sequence
  Description of Artificial Sequence: Synthetic oligonucleotide
  Target: LAMA2; (+) strand; PAM type: YTN; PAM sequence: TTT
tcagtgccagtgacaagatt

SEQ ID NO: 374386 - DNA, 20 bp, Artificial Sequence
  Description of Artificial Sequence: Synthetic oligonucleotide
  Target: LAMA2; (+) strand; PAM type: YTN; PAM sequence: TTT
cagtgccagtgacaagatta

SEQ ID NO: 374387 - DNA, 20 bp, Artificial Sequence
  Description of Artificial Sequence: Synthetic oligonucleotide
  Target: LAMA2; (+) strand; PAM type: YTN; PAM sequence: TTC
agtgccagtgacaagattat

SEQ ID NO: 374388 - DNA, 20 bp, Artificial Sequence
  Description of Artificial Sequence: Synthetic oligonucleotide
  Target: LAMA2; (+) strand; PAM type: YTN; PAM sequence: TTA
tatatttttttcgggctgaa

SEQ ID NO: 374389 - DNA, 20 bp, Artificial Sequence
  Description of Artificial Sequence: Synthetic oligonucleotide
  Target: LAMA2; (+) strand; PAM type: YTN; PAM sequence: TTT
ttttcgggctgaaatctaat

SEQ ID NO: 374390 - DNA, 20 bp, Artificial Sequence
  Description of Artificial Sequence: Synthetic oligonucleotide
  Target: LAMA2; (+) strand; PAM type: YTN; PAM sequence: TTT
tttcgggctgaaatctaatt

SEQ ID NO: 374391 - DNA, 20 bp, Artificial Sequence
  Description of Artificial Sequence: Synthetic oligonucleotide
  Target: LAMA2; (+) strand; PAM type: YTN; PAM sequence: TTT
ttcgggctgaaatctaatta

SEQ ID NO: 374392 - DNA, 20 bp, Artificial Sequence
  Description of Artificial Sequence: Synthetic oligonucleotide
  Target: LAMA2; (+) strand; PAM type: YTN; PAM sequence: TTT
tcgggctgaaatctaattac

SEQ ID NO: 374393 - DNA, 20 bp, Artificial Sequence
  Description of Artificial Sequence: Synthetic oligonucleotide
  Target: LAMA2; (+) strand; PAM type: YTN; PAM sequence: TTT
cgggctgaaatctaattact

SEQ ID NO: 374394 - DNA, 20 bp, Artificial Sequence
  Description of Artificial Sequence: Synthetic oligonucleotide
  Target: LAMA2; (+) strand; PAM type: YTN; PAM sequence: TTC
gggctgaaatctaattacta

SEQ ID NO: 374395 - DNA, 20 bp, Artificial Sequence
  Description of Artificial Sequence: Synthetic oligonucleotide
  Target: LAMA2; (+) strand; PAM type: YTN; PAM sequence: CTG
aaatctaattactagtgggc

SEQ ID NO: 374396 - DNA, 20 bp, Artificial Sequence
  Description of Artificial Sequence: Synthetic oligonucleotide
  Target: LAMA2; (+) strand; PAM type: YTN; PAM sequence: CTA
attactagtgggctggcagg

SEQ ID NO: 374397 - DNA, 20 bp, Artificial Sequence
  Description of Artificial Sequence: Synthetic oligonucleotide
  Target: LAMA2; (+) strand; PAM type: YTN; PAM sequence: TTA
ctagtgggctggcaggatat

SEQ ID NO: 374398 - DNA, 20 bp, Artificial Sequence
  Description of Artificial Sequence: Synthetic oligonucleotide
  Target: LAMA2; (+) strand; PAM type: YTN; PAM sequence: CTA
gtgggctggcaggatatcat

SEQ ID NO: 374399 - DNA, 20 bp, Artificial Sequence
  Description of Artificial Sequence: Synthetic oligonucleotide
  Target: LAMA2; (+) strand; PAM type: YTN; PAM sequence: CTG
gcaggatatcatcttgtatc

SEQ ID NO: 374400 - DNA, 20 bp, Artificial Sequence
  Description of Artificial Sequence: Synthetic oligonucleotide
  Target: LAMA2; (+) strand; PAM type: YTN; PAM sequence: CTT
gtatctacactgcagttgta

SEQ ID NO: 374401 - DNA, 20 bp, Artificial Sequence
  Description of Artificial Sequence: Synthetic oligonucleotide
  Target: LAMA2; (+) strand; PAM type: YTN; PAM sequence: TTG
tatctacactgcagttgtag

SEQ ID NO: 374402 - DNA, 20 bp, Artificial Sequence
  Description of Artificial Sequence: Synthetic oligonucleotide
  Target: LAMA2; (+) strand; PAM type: YTN; PAM sequence: CTA
cactgcagttgtagaaaaac

SEQ ID NO: 374403 - DNA, 20 bp, Artificial Sequence
  Description of Artificial Sequence: Synthetic oligonucleotide
  Target: LAMA2; (+) strand; PAM type: YTN; PAM sequence: CTG
cagttgtagaaaaacatttt

SEQ ID NO: 374404 - DNA, 20 bp, Artificial Sequence
  Description of Artificial Sequence: Synthetic oligonucleotide
  Target: LAMA2; (+) strand; PAM type: YTN; PAM sequence: TTG
tagaaaaacatttttttaat

SEQ ID NO: 374405 - DNA, 20 bp, Artificial Sequence
  Description of Artificial Sequence: Synthetic oligonucleotide
  Target: LAMA2; (+) strand; PAM type: YTN; PAM sequence: TTT
ttttaatcacgttgcgtttg

SEQ ID NO: 374406 - DNA, 20 bp, Artificial Sequence
  Description of Artificial Sequence: Synthetic oligonucleotide
  Target: LAMA2; (+) strand; PAM type: YTN; PAM sequence: TTT
tttaatcacgttgcgtttga

SEQ ID NO: 374407 - DNA, 20 bp, Artificial Sequence
  Description of Artificial Sequence: Synthetic oligonucleotide
  Target: LAMA2; (+) strand; PAM type: YTN; PAM sequence: TTT
ttaatcacgttgcgtttgag

SEQ ID NO: 374408 - DNA, 20 bp, Artificial Sequence
  Description of Artificial Sequence: Synthetic oligonucleotide
  Target: LAMA2; (+) strand; PAM type: YTN; PAM sequence: TTT
taatcacgttgcgtttgaga

SEQ ID NO: 374409 - DNA, 20 bp, Artificial Sequence
  Description of Artificial Sequence: Synthetic oligonucleotide
  Target: LAMA2; (+) strand; PAM type: YTN; PAM sequence: TTT
aatcacgttgcgtttgagaa

SEQ ID NO: 374410 - DNA, 20 bp, Artificial Sequence
  Description of Artificial Sequence: Synthetic oligonucleotide
  Target: LAMA2; (+) strand; PAM type: YTN; PAM sequence: TTA
atcacgttgcgtttgagaaa

SEQ ID NO: 374411 - DNA, 20 bp, Artificial Sequence
  Description of Artificial Sequence: Synthetic oligonucleotide
  Target: LAMA2; (+) strand; PAM type: YTN; PAM sequence: TTG
cgtttgagaaaaggaacact

SEQ ID NO: 374412 - DNA, 20 bp, Artificial Sequence
  Description of Artificial Sequence: Synthetic oligonucleotide
  Target: LAMA2; (+) strand; PAM type: YTN; PAM sequence: TTT
gagaaaaggaacacttaaaa

SEQ ID NO: 374413 - DNA, 20 bp, Artificial Sequence
  Description of Artificial Sequence: Synthetic oligonucleotide
  Target: LAMA2; (+) strand; PAM type: YTN; PAM sequence: TTG
agaaaaggaacacttaaaag

SEQ ID NO: 374414 - DNA, 20 bp, Artificial Sequence
  Description of Artificial Sequence: Synthetic oligonucleotide
  Target: LAMA2; (+) strand; PAM type: YTN; PAM sequence: CTT
aaaaggaaaatccatcatcc

SEQ ID NO: 374415 - DNA, 20 bp, Artificial Sequence
  Description of Artificial Sequence: Synthetic oligonucleotide
  Target: LAMA2; (+) strand; PAM type: YTN; PAM sequence: TTA
aaaggaaaatccatcatcct

SEQ ID NO: 374416 - DNA, 20 bp, Artificial Sequence
  Description of Artificial Sequence: Synthetic oligonucleotide
  Target: LAMA2; (+) strand; PAM type: YTN; PAM sequence: CTG
ggagaaggggagaatgaaaa

SEQ ID NO: 374417 - DNA, 20 bp, Artificial Sequence
  Description of Artificial Sequence: Synthetic oligonucleotide
  Target: LAMA2; (+) strand; PAM type: YTN; PAM sequence: TTG
ccccaactgaggtcccccca

SEQ ID NO: 374418 - DNA, 20 bp, Artificial Sequence
  Description of Artificial Sequence: Synthetic oligonucleotide
  Target: LAMA2; (+) strand; PAM type: YTN; PAM sequence: CTG
aggtccccccaaaggctcac

SEQ ID NO: 374419 - DNA, 20 bp, Artificial Sequence
  Description of Artificial Sequence: Synthetic oligonucleotide
  Target: LAMA2; (+) strand; PAM type: YTN; PAM sequence: CTC
actgatgaaatttcttgcct

SEQ ID NO: 374420 - DNA, 20 bp, Artificial Sequence
  Description of Artificial Sequence: Synthetic oligonucleotide
  Target: LAMA2; (+) strand; PAM type: YTN; PAM sequence: CTG
atgaaatttcttgccttagg

SEQ ID NO: 374421 - DNA, 20 bp, Artificial Sequence
  Description of Artificial Sequence: Synthetic oligonucleotide
  Target: LAMA2; (+) strand; PAM type: YTN; PAM sequence: TTT
cttgccttaggtgtgcagaa

SEQ ID NO: 374422 - DNA, 20 bp, Artificial Sequence
  Description of Artificial Sequence: Synthetic oligonucleotide
  Target: LAMA2; (+) strand; PAM type: YTN; PAM sequence: TTC
ttgccttaggtgtgcagaag

SEQ ID NO: 374423 - DNA, 20 bp, Artificial Sequence
  Description of Artificial Sequence: Synthetic oligonucleotide
  Target: LAMA2; (+) strand; PAM type: YTN; PAM sequence: CTT
gccttaggtgtgcagaaggc

SEQ ID NO: 374424 - DNA, 20 bp, Artificial Sequence
  Description of Artificial Sequence: Synthetic oligonucleotide
  Target: LAMA2; (+) strand; PAM type: YTN; PAM sequence: TTG
ccttaggtgtgcagaaggct

SEQ ID NO: 374425 - DNA, 20 bp, Artificial Sequence
  Description of Artificial Sequence: Synthetic oligonucleotide
  Target: LAMA2; (+) strand; PAM type: YTN; PAM sequence: CTT
aggtgtgcagaaggctattt

SEQ ID NO: 374426 - DNA, 20 bp, Artificial Sequence
  Description of Artificial Sequence: Synthetic oligonucleotide
  Target: LAMA2; (+) strand; PAM type: YTN; PAM sequence: TTA
ggtgtgcagaaggctatttt

SEQ ID NO: 374427 - DNA, 20 bp, Artificial Sequence
  Description of Artificial Sequence: Synthetic oligonucleotide
  Target: LAMA2; (+) strand; PAM type: YTN; PAM sequence: CTA
ttttggacaaccctctgtac

SEQ ID NO: 374428 - DNA, 20 bp, Artificial Sequence
  Description of Artificial Sequence: Synthetic oligonucleotide
  Target: LAMA2; (+) strand; PAM type: YTN; PAM sequence: TTT
tggacaaccctctgtacctg

SEQ ID NO: 374429 - DNA, 20 bp, Artificial Sequence
  Description of Artificial Sequence: Synthetic oligonucleotide
  Target: LAMA2; (+) strand; PAM type: YTN; PAM sequence: TTT
ggacaaccctctgtacctgg

SEQ ID NO: 374430 - DNA, 20 bp, Artificial Sequence
  Description of Artificial Sequence: Synthetic oligonucleotide
  Target: LAMA2; (+) strand; PAM type: YTN; PAM sequence: TTG
gacaaccctctgtacctgga

SEQ ID NO: 374431 - DNA, 20 bp, Artificial Sequence
  Description of Artificial Sequence: Synthetic oligonucleotide
  Target: LAMA2; (+) strand; PAM type: YTN; PAM sequence: CTC
tgtacctggaggatcatgtc

SEQ ID NO: 374432 - DNA, 20 bp, Artificial Sequence
  Description of Artificial Sequence: Synthetic oligonucleotide
  Target: LAMA2; (+) strand; PAM type: YTN; PAM sequence: CTG
tacctggaggatcatgtcag

SEQ ID NO: 374433 - DNA, 20 bp, Artificial Sequence
  Description of Artificial Sequence: Synthetic oligonucleotide
  Target: LAMA2; (+) strand; PAM type: YTN; PAM sequence: CTG
gaggatcatgtcagccatgc

SEQ ID NO: 374434 - DNA, 20 bp, Artificial Sequence
  Description of Artificial Sequence: Synthetic oligonucleotide
  Target: LAMA2; (+) strand; PAM type: YTN; PAM sequence: CTT
gacttctccatccctggcag

SEQ ID NO: 374435 - DNA, 20 bp, Artificial Sequence
  Description of Artificial Sequence: Synthetic oligonucleotide
  Target: LAMA2; (+) strand; PAM type: YTN; PAM sequence: TTG
acttctccatccctggcagc

SEQ ID NO: 374436 - DNA, 20 bp, Artificial Sequence
  Description of Artificial Sequence: Synthetic oligonucleotide
  Target: LAMA2; (+) strand; PAM type: YTN; PAM sequence: CTT
ctccatccctggcagctgtg

SEQ ID NO: 374437 - DNA, 20 bp, Artificial Sequence
  Description of Artificial Sequence: Synthetic oligonucleotide
  Target: LAMA2; (+) strand; PAM type: YTN; PAM sequence: TTC
tccatccctggcagctgtga

SEQ ID NO: 374438 - DNA, 20 bp, Artificial Sequence
  Description of Artificial Sequence: Synthetic oligonucleotide
  Target: LAMA2; (+) strand; PAM type: YTN; PAM sequence: CTC
catccctggcagctgtgaca

SEQ ID NO: 374439 - DNA, 20 bp, Artificial Sequence
  Description of Artificial Sequence: Synthetic oligonucleotide
  Target: LAMA2; (+) strand; PAM type: YTN; PAM sequence: CTG
gcagctgtgacagcttgtct

SEQ ID NO: 374440 - DNA, 20 bp, Artificial Sequence
  Description of Artificial Sequence: Synthetic oligonucleotide
  Target: LAMA2; (+) strand; PAM type: YTN; PAM sequence: CTG
tgacagcttgtctggctcct

SEQ ID NO: 374441 - DNA, 20 bp, Artificial Sequence
  Description of Artificial Sequence: Synthetic oligonucleotide
  Target: LAMA2; (+) strand; PAM type: YTN; PAM sequence: CTT
gtctggctcctgtctgatat

SEQ ID NO: 374442 - DNA, 20 bp, Artificial Sequence
  Description of Artificial Sequence: Synthetic oligonucleotide
  Target: LAMA2; (+) strand; PAM type: YTN; PAM sequence: TTG
tctggctcctgtctgatatg

SEQ ID NO: 374443 - DNA, 20 bp, Artificial Sequence
  Description of Artificial Sequence: Synthetic oligonucleotide
  Target: LAMA2; (+) strand; PAM type: YTN; PAM sequence: CTG
gctcctgtctgatatgtaaa

SEQ ID NO: 374444 - DNA, 20 bp, Artificial Sequence
  Description of Artificial Sequence: Synthetic oligonucleotide
  Target: LAMA2; (+) strand; PAM type: YTN; PAM sequence: CTC
ctgtctgatatgtaaaccag

SEQ ID NO: 374445 - DNA, 20 bp, Artificial Sequence
  Description of Artificial Sequence: Synthetic oligonucleotide
  Target: LAMA2; (+) strand; PAM type: YTN; PAM sequence: CTG
tctgatatgtaaaccaggta

SEQ ID NO: 374446 - DNA, 20 bp, Artificial Sequence
  Description of Artificial Sequence: Synthetic oligonucleotide
  Target: LAMA2; (+) strand; PAM type: YTN; PAM sequence: CTG
atatgtaaaccaggtacaac

SEQ ID NO: 374447 - DNA, 20 bp, Artificial Sequence
  Description of Artificial Sequence: Synthetic oligonucleotide
  Target: LAMA2; (+) strand; PAM type: YTN; PAM sequence: CTG
tgagctctgtgctgatggat

SEQ ID NO: 374448 - DNA, 20 bp, Artificial Sequence
  Description of Artificial Sequence: Synthetic oligonucleotide
  Target: LAMA2; (+) strand; PAM type: YTN; PAM sequence: CTC
tgtgctgatggatattttgg

SEQ ID NO: 374449 - DNA, 20 bp, Artificial Sequence
  Description of Artificial Sequence: Synthetic oligonucleotide
  Target: LAMA2; (+) strand; PAM type: YTN; PAM sequence: CTG
tgctgatggatattttggag

SEQ ID NO: 374450 - DNA, 20 bp, Artificial Sequence
  Description of Artificial Sequence: Synthetic oligonucleotide
  Target: LAMA2; (+) strand; PAM type: YTN; PAM sequence: CTG
atggatattttggagatgca

SEQ ID NO: 374451 - DNA, 20 bp, Artificial Sequence
  Description of Artificial Sequence: Synthetic oligonucleotide
  Target: LAMA2; (+) strand; PAM type: YTN; PAM sequence: TTT
tggagatgcagttgatgcga

SEQ ID NO: 374452 - DNA, 20 bp, Artificial Sequence
  Description of Artificial Sequence: Synthetic oligonucleotide
  Target: LAMA2; (+) strand; PAM type: YTN; PAM sequence: TTT
ggagatgcagttgatgcgaa

SEQ ID NO: 374453 - DNA, 20 bp, Artificial Sequence
  Description of Artificial Sequence: Synthetic oligonucleotide
  Target: LAMA2; (+) strand; PAM type: YTN; PAM sequence: TTG
gagatgcagttgatgcgaag

SEQ ID NO: 374454 - DNA, 20 bp, Artificial Sequence
  Description of Artificial Sequence: Synthetic oligonucleotide
  Target: LAMA2; (+) strand; PAM type: YTN; PAM sequence: TTG
atgcgaagaactgtcagcgt

SEQ ID NO: 374455 - DNA, 20 bp, Artificial Sequence
  Description of Artificial Sequence: Synthetic oligonucleotide
  Target: LAMA2; (+) strand; PAM type: YTN; PAM sequence: CTG
tcagcgtaagtcctgaacta

SEQ ID NO: 374456 - DNA, 20 bp, Artificial Sequence
  Description of Artificial Sequence: Synthetic oligonucleotide
  Target: LAMA2; (+) strand; PAM type: YTN; PAM sequence: CTG
aactattgatgcccctgaca

SEQ ID NO: 374457 - DNA, 20 bp, Artificial Sequence
  Description of Artificial Sequence: Synthetic oligonucleotide
  Target: LAMA2; (+) strand; PAM type: YTN; PAM sequence: CTA
ttgatgcccctgacagaatt

SEQ ID NO: 374458 - DNA, 20 bp, Artificial Sequence
  Description of Artificial Sequence: Synthetic oligonucleotide
  Target: LAMA2; (+) strand; PAM type: YTN; PAM sequence: TTG
atgcccctgacagaattgat

SEQ ID NO: 374459 - DNA, 20 bp, Artificial Sequence
  Description of Artificial Sequence: Synthetic oligonucleotide
  Target: LAMA2; (+) strand; PAM type: YTN; PAM sequence: CTG
acagaattgatgtattgtac

SEQ ID NO: 374460 - DNA, 20 bp, Artificial Sequence
  Description of Artificial Sequence: Synthetic oligonucleotide
  Target: LAMA2; (+) strand; PAM type: YTN; PAM sequence: TTG
atgtattgtacctcaaagta

SEQ ID NO: 374461 - DNA, 20 bp, Artificial Sequence
  Description of Artificial Sequence: Synthetic oligonucleotide
  Target: LAMA2; (+) strand; PAM type: YTN; PAM sequence: TTG
tacctcaaagtagctgatga

SEQ ID NO: 374462 - DNA, 20 bp, Artificial Sequence
  Description of Artificial Sequence: Synthetic oligonucleotide
  Target: LAMA2; (+) strand; PAM type: YTN; PAM sequence: CTC
aaagtagctgatgagttctt

SEQ ID NO: 374463 - DNA, 20 bp, Artificial Sequence
  Description of Artificial Sequence: Synthetic oligonucleotide
  Target: LAMA2; (+) strand; PAM type: YTN; PAM sequence: CTG
atgagttcttgagtgtggat

SEQ ID NO: 374464 - DNA, 20 bp, Artificial Sequence
  Description of Artificial Sequence: Synthetic oligonucleotide
  Target: LAMA2; (+) strand; PAM type: YTN; PAM sequence: TTC
ttgagtgtggattgaagagt

SEQ ID NO: 374465 - DNA, 20 bp, Artificial Sequence
  Description of Artificial Sequence: Synthetic oligonucleotide
  Target: LAMA2; (+) strand; PAM type: YTN; PAM sequence: CTT
gagtgtggattgaagagtag

SEQ ID NO: 374466 - DNA, 20 bp, Artificial Sequence
  Description of Artificial Sequence: Synthetic oligonucleotide
  Target: LAMA2; (+) strand; PAM type: YTN; PAM sequence: TTG
agtgtggattgaagagtagg

SEQ ID NO: 374467 - DNA, 20 bp, Artificial Sequence
  Description of Artificial Sequence: Synthetic oligonucleotide
  Target: LAMA2; (+) strand; PAM type: YTN; PAM sequence: TTG
aagagtaggaaattatgtgg

SEQ ID NO: 374468 - DNA, 20 bp, Artificial Sequence
  Description of Artificial Sequence: Synthetic oligonucleotide
  Target: LAMA2; (+) strand; PAM type: YTN; PAM sequence: TTA
tgtggaatacatggttgata

SEQ ID NO: 374469 - DNA, 20 bp, Artificial Sequence
  Description of Artificial Sequence: Synthetic oligonucleotide
  Target: LAMA2; (+) strand; PAM type: YTN; PAM sequence: TTG
atagatgcatagaatataca

SEQ ID NO: 374470 - DNA, 20 bp, Artificial Sequence
  Description of Artificial Sequence: Synthetic oligonucleotide
  Target: LAMA2; (+) strand; PAM type: YTN; PAM sequence: CTG
catattccagaacatttcct

SEQ ID NO: 374471 - DNA, 20 bp, Artificial Sequence
  Description of Artificial Sequence: Synthetic oligonucleotide
  Target: LAMA2; (+) strand; PAM type: YTN; PAM sequence: TTC
cagaacatttccttgtacta

SEQ ID NO: 374472 - DNA, 20 bp, Artificial Sequence
  Description of Artificial Sequence: Synthetic oligonucleotide
  Target: LAMA2; (+) strand; PAM type: YTN; PAM sequence: TTT
ccttgtactaactaatagag

SEQ ID NO: 374473 - DNA, 20 bp, Artificial Sequence
  Description of Artificial Sequence: Synthetic oligonucleotide
  Target: LAMA2; (+) strand; PAM type: YTN; PAM sequence: TTC
cttgtactaactaatagagt

SEQ ID NO: 374474 - DNA, 20 bp, Artificial Sequence
  Description of Artificial Sequence: Synthetic oligonucleotide
  Target: LAMA2; (+) strand; PAM type: YTN; PAM sequence: CTT
gtactaactaatagagtaaa

SEQ ID NO: 374475 - DNA, 20 bp, Artificial Sequence
  Description of Artificial Sequence: Synthetic oligonucleotide
  Target: LAMA2; (+) strand; PAM type: YTN; PAM sequence: TTG
tactaactaatagagtaaat

SEQ ID NO: 374476 - DNA, 20 bp, Artificial Sequence
  Description of Artificial Sequence: Synthetic oligonucleotide
  Target: LAMA2; (+) strand; PAM type: YTN; PAM sequence: CTA
actaatagagtaaatacctt

SEQ ID NO: 374477 - DNA, 20 bp, Artificial Sequence
  Description of Artificial Sequence: Synthetic oligonucleotide
  Target: LAMA2; (+) strand; PAM type: YTN; PAM sequence: CTA
atagagtaaatacctttaaa

SEQ ID NO: 374478 - DNA, 20 bp, Artificial Sequence
  Description of Artificial Sequence: Synthetic oligonucleotide
  Target: LAMA2; (+) strand; PAM type: YTN; PAM sequence: CTT
taaaattgctgtggtattga

SEQ ID NO: 374479 - DNA, 20 bp, Artificial Sequence
  Description of Artificial Sequence: Synthetic oligonucleotide
  Target: LAMA2; (+) strand; PAM type: YTN; PAM sequence: TTT
aaaattgctgtggtattgaa

SEQ ID NO: 374480 - DNA, 20 bp, Artificial Sequence
  Description of Artificial Sequence: Synthetic oligonucleotide
  Target: LAMA2; (+) strand; PAM type: YTN; PAM sequence: TTA
aaattgctgtggtattgaag

SEQ ID NO: 374481 - DNA, 20 bp, Artificial Sequence
  Description of Artificial Sequence: Synthetic oligonucleotide
  Target: LAMA2; (+) strand; PAM type: YTN; PAM sequence: TTG
ctgtggtattgaagcatcac

SEQ ID NO: 374482 - DNA, 20 bp, Artificial Sequence
  Description of Artificial Sequence: Synthetic oligonucleotide
  Target: LAMA2; (+) strand; PAM type: YTN; PAM sequence: CTG
tggtattgaagcatcactgt

SEQ ID NO: 374483 - DNA, 20 bp, Artificial Sequence
  Description of Artificial Sequence: Synthetic oligonucleotide
  Target: LAMA2; (+) strand; PAM type: YTN; PAM sequence: TTG
aagcatcactgttttccaaa

SEQ ID NO: 374484 - DNA, 20 bp, Artificial Sequence
  Description of Artificial Sequence: Synthetic oligonucleotide
  Target: LAMA2; (+) strand; PAM type: YTN; PAM sequence: CTG
ttttccaaatgataaacatg

SEQ ID NO: 374485 - DNA, 20 bp, Artificial Sequence
  Description of Artificial Sequence: Synthetic oligonucleotide
  Target: LAMA2; (+) strand; PAM type: YTN; PAM sequence: TTT
tccaaatgataaacatgttt

SEQ ID NO: 374486 - DNA, 20 bp, Artificial Sequence
  Description of Artificial Sequence: Synthetic oligonucleotide
  Target: LAMA2; (+) strand; PAM type: YTN; PAM sequence: TTT
ccaaatgataaacatgtttt

SEQ ID NO: 374487 - DNA, 20 bp, Artificial Sequence
  Description of Artificial Sequence: Synthetic oligonucleotide
  Target: LAMA2; (+) strand; PAM type: YTN; PAM sequence: TTC
caaatgataaacatgttttt

SEQ ID NO: 374488 - DNA, 20 bp, Artificial Sequence
  Description of Artificial Sequence: Synthetic oligonucleotide
  Target: LAMA2; (+) strand; PAM type: YTN; PAM sequence: TTT
ttatttacatgcggaaggaa

SEQ ID NO: 374489 - DNA, 20 bp, Artificial Sequence
  Description of Artificial Sequence: Synthetic oligonucleotide
  Target: LAMA2; (+) strand; PAM type: YTN; PAM sequence: TTT
tatttacatgcggaaggaag

SEQ ID NO: 374490 - DNA, 20 bp, Artificial Sequence
  Description of Artificial Sequence: Synthetic oligonucleotide
  Target: LAMA2; (+) strand; PAM type: YTN; PAM sequence: TTT
atttacatgcggaaggaaga

SEQ ID NO: 374491 - DNA, 20 bp, Artificial Sequence
  Description of Artificial Sequence: Synthetic oligonucleotide
  Target: LAMA2; (+) strand; PAM type: YTN; PAM sequence: TTA
tttacatgcggaaggaagat

SEQ ID NO: 374492 - DNA, 20 bp, Artificial Sequence
  Description of Artificial Sequence: Synthetic oligonucleotide
  Target: LAMA2; (+) strand; PAM type: YTN; PAM sequence: TTT
acatgcggaaggaagatttt

SEQ ID NO: 374493 - DNA, 20 bp, Artificial Sequence
  Description of Artificial Sequence: Synthetic oligonucleotide
  Target: LAMA2; (+) strand; PAM type: YTN; PAM sequence: TTA
catgcggaaggaagattttt

SEQ ID NO: 374494 - DNA, 20 bp, Artificial Sequence
  Description of Artificial Sequence: Synthetic oligonucleotide
  Target: LAMA2; (+) strand; PAM type: YTN; PAM sequence: TTT
ttttaatgaacttatgtcca

SEQ ID NO: 374495 - DNA, 20 bp, Artificial Sequence
  Description of Artificial Sequence: Synthetic oligonucleotide
  Target: LAMA2; (+) strand; PAM type: YTN; PAM sequence: TTT
tttaatgaacttatgtccac

SEQ ID NO: 374496 - DNA, 20 bp, Artificial Sequence
  Description of Artificial Sequence: Synthetic oligonucleotide
  Target: LAMA2; (+) strand; PAM type: YTN; PAM sequence: TTT
ttaatgaacttatgtccaca

SEQ ID NO: 374497 - DNA, 20 bp, Artificial Sequence
  Description of Artificial Sequence: Synthetic oligonucleotide
  Target: LAMA2; (+) strand; PAM type: YTN; PAM sequence: TTT
taatgaacttatgtccacag

SEQ ID NO: 374498 - DNA, 20 bp, Artificial Sequence
  Description of Artificial Sequence: Synthetic oligonucleotide
  Target: LAMA2; (+) strand; PAM type: YTN; PAM sequence: TTT
aatgaacttatgtccacagc

SEQ ID NO: 374499 - DNA, 20 bp, Artificial Sequence
  Description of Artificial Sequence: Synthetic oligonucleotide
  Target: LAMA2; (+) strand; PAM type: YTN; PAM sequence: TTA
atgaacttatgtccacagca

SEQ ID NO: 374500 - DNA, 20 bp, Artificial Sequence
  Description of Artificial Sequence: Synthetic oligonucleotide
  Target: LAMA2; (+) strand; PAM type: YTN; PAM sequence: CTT
atgtccacagcaggaaagaa

SEQ ID NO: 374501 - DNA, 20 bp, Artificial Sequence
  Description of Artificial Sequence: Synthetic oligonucleotide
  Target: LAMA2; (+) strand; PAM type: YTN; PAM sequence: TTA
tgtccacagcaggaaagaag

SEQ ID NO: 374502 - DNA, 20 bp, Artificial Sequence
  Description of Artificial Sequence: Synthetic oligonucleotide
  Target: LAMA2; (+) strand; PAM type: YTN; PAM sequence: TTT
gcatattagatagacaccat

SEQ ID NO: 374503 - DNA, 20 bp, Artificial Sequence
  Description of Artificial Sequence: Synthetic oligonucleotide
  Target: LAMA2; (+) strand; PAM type: YTN; PAM sequence: TTG
catattagatagacaccatg

SEQ ID NO: 374504 - DNA, 20 bp, Artificial Sequence
  Description of Artificial Sequence: Synthetic oligonucleotide
  Target: LAMA2; (+) strand; PAM type: YTN; PAM sequence: TTA
gatagacaccatgtatccat

SEQ ID NO: 374505 - DNA, 20 bp, Artificial Sequence
  Description of Artificial Sequence: Synthetic oligonucleotide
  Target: LAMA2; (+) strand; PAM type: YTN; PAM sequence: TTT
ttttatctcaattctaatca

SEQ ID NO: 374506 - DNA, 20 bp, Artificial Sequence
  Description of Artificial Sequence: Synthetic oligonucleotide
  Target: LAMA2; (+) strand; PAM type: YTN; PAM sequence: TTT
tttatctcaattctaatcac

SEQ ID NO: 374507 - DNA, 20 bp, Artificial Sequence
  Description of Artificial Sequence: Synthetic oligonucleotide
  Target: LAMA2; (+) strand; PAM type: YTN; PAM sequence: TTT
ttatctcaattctaatcact

SEQ ID NO: 374508 - DNA, 20 bp, Artificial Sequence
  Description of Artificial Sequence: Synthetic oligonucleotide
  Target: LAMA2; (+) strand; PAM type: YTN; PAM sequence: TTT
tatctcaattctaatcactt

SEQ ID NO: 374509 - DNA, 20 bp, Artificial Sequence
  Description of Artificial Sequence: Synthetic oligonucleotide
  Target: LAMA2; (+) strand; PAM type: YTN; PAM sequence: TTT
atctcaattctaatcacttg

SEQ ID NO: 374510 - DNA, 20 bp, Artificial Sequence
  Description of Artificial Sequence: Synthetic oligonucleotide
  Target: LAMA2; (+) strand; PAM type: YTN; PAM sequence: TTA
tctcaattctaatcacttgc

SEQ ID NO: 374511 - DNA, 20 bp, Artificial Sequence
  Description of Artificial Sequence: Synthetic oligonucleotide
  Target: LAMA2; (+) strand; PAM type: YTN; PAM sequence: CTC
aattctaatcacttgcttta

SEQ ID NO: 374512 - DNA, 20 bp, Artificial Sequence
  Description of Artificial Sequence: Synthetic oligonucleotide
  Target: LAMA2; (+) strand; PAM type: YTN; PAM sequence: TTC
taatcacttgctttaaataa

SEQ ID NO: 374513 - DNA, 20 bp, Artificial Sequence
  Description of Artificial Sequence: Synthetic oligonucleotide
  Target: LAMA2; (+) strand; PAM type: YTN; PAM sequence: CTA
atcacttgctttaaataatt

SEQ ID NO: 374514 - DNA, 20 bp, Artificial Sequence
  Description of Artificial Sequence: Synthetic oligonucleotide
  Target: LAMA2; (+) strand; PAM type: YTN; PAM sequence: CTT
gctttaaataattttttctg

SEQ ID NO: 374515 - DNA, 20 bp, Artificial Sequence
  Description of Artificial Sequence: Synthetic oligonucleotide
  Target: LAMA2; (+) strand; PAM type: YTN; PAM sequence: TTG
ctttaaataattttttctgc

SEQ ID NO: 374516 - DNA, 20 bp, Artificial Sequence
  Description of Artificial Sequence: Synthetic oligonucleotide
  Target: LAMA2; (+) strand; PAM type: YTN; PAM sequence: CTT
taaataattttttctgccca

SEQ ID NO: 374517 - DNA, 20 bp, Artificial Sequence
  Description of Artificial Sequence: Synthetic oligonucleotide
  Target: LAMA2; (+) strand; PAM type: YTN; PAM sequence: TTT
aaataattttttctgcccat

SEQ ID NO: 374518 - DNA, 20 bp, Artificial Sequence
  Description of Artificial Sequence: Synthetic oligonucleotide
  Target: LAMA2; (+) strand; PAM type: YTN; PAM sequence: TTA
aataattttttctgcccatg

SEQ ID NO: 374519 - DNA, 20 bp, Artificial Sequence
  Description of Artificial Sequence: Synthetic oligonucleotide
  Target: LAMA2; (+) strand; PAM type: YTN; PAM sequence: TTT
tttctgcccatgatatttca

SEQ ID NO: 374520 - DNA, 20 bp, Artificial Sequence
  Description of Artificial Sequence: Synthetic oligonucleotide
  Target: LAMA2; (+) strand; PAM type: YTN; PAM sequence: TTT
ttctgcccatgatatttcag

SEQ ID NO: 374521 - DNA, 20 bp, Artificial Sequence
  Description of Artificial Sequence: Synthetic oligonucleotide
  Target: LAMA2; (+) strand; PAM type: YTN; PAM sequence: TTT
tctgcccatgatatttcagt

SEQ ID NO: 374522 - DNA, 20 bp, Artificial Sequence
  Description of Artificial Sequence: Synthetic oligonucleotide
  Target: LAMA2; (+) strand; PAM type: YTN; PAM sequence: TTT
ctgcccatgatatttcagta

SEQ ID NO: 374523 - DNA, 20 bp, Artificial Sequence
  Description of Artificial Sequence: Synthetic oligonucleotide
  Target: LAMA2; (+) strand; PAM type: YTN; PAM sequence: TTC
tgcccatgatatttcagtag

SEQ ID NO: 374524 - DNA, 20 bp, Artificial Sequence
  Description of Artificial Sequence: Synthetic oligonucleotide
  Target: LAMA2; (+) strand; PAM type: YTN; PAM sequence: CTG
cccatgatatttcagtagta

SEQ ID NO: 374525 - DNA, 20 bp, Artificial Sequence
  Description of Artificial Sequence: Synthetic oligonucleotide
  Target: LAMA2; (+) strand; PAM type: YTN; PAM sequence: TTT
cagtagtagccatcagaagg

SEQ ID NO: 374526 - DNA, 20 bp, Artificial Sequence
  Description of Artificial Sequence: Synthetic oligonucleotide
  Target: LAMA2; (+) strand; PAM type: YTN; PAM sequence: TTC
agtagtagccatcagaaggt

SEQ ID NO: 374527 - DNA, 20 bp, Artificial Sequence
  Description of Artificial Sequence: Synthetic oligonucleotide
  Target: LAMA2; (+) strand; PAM type: YTN; PAM sequence: TTA
atcagttatgctttcatatg

SEQ ID NO: 374528 - DNA, 20 bp, Artificial Sequence
  Description of Artificial Sequence: Synthetic oligonucleotide
  Target: LAMA2; (+) strand; PAM type: YTN; PAM sequence: TTA
tgctttcatatgttaacttt

SEQ ID NO: 374529 - DNA, 20 bp, Artificial Sequence
  Description of Artificial Sequence: Synthetic oligonucleotide
  Target: LAMA2; (+) strand; PAM type: YTN; PAM sequence: CTT
tcatatgttaactttacagt

SEQ ID NO: 374530 - DNA, 20 bp, Artificial Sequence
  Description of Artificial Sequence: Synthetic oligonucleotide
  Target: LAMA2; (+) strand; PAM type: YTN; PAM sequence: TTT
catatgttaactttacagtg

SEQ ID NO: 374531 - DNA, 20 bp, Artificial Sequence
  Description of Artificial Sequence: Synthetic oligonucleotide
  Target: LAMA2; (+) strand; PAM type: YTN; PAM sequence: TTC
atatgttaactttacagtgt

SEQ ID NO: 374532 - DNA, 20 bp, Artificial Sequence
  Description of Artificial Sequence: Synthetic oligonucleotide
  Target: LAMA2; (+) strand; PAM type: YTN; PAM sequence: TTA
actttacagtgtcgtatttt

SEQ ID NO: 374533 - DNA, 20 bp, Artificial Sequence
  Description of Artificial Sequence: Synthetic oligonucleotide
  Target: LAMA2; (+) strand; PAM type: YTN; PAM sequence: CTT
tacagtgtcgtattttgtaa

SEQ ID NO: 374534 - DNA, 20 bp, Artificial Sequence
  Description of Artificial Sequence: Synthetic oligonucleotide
  Target: LAMA2; (+) strand; PAM type: YTN; PAM sequence: TTT
acagtgtcgtattttgtaat

SEQ ID NO: 374535 - DNA, 20 bp, Artificial Sequence
  Description of Artificial Sequence: Synthetic oligonucleotide
  Target: LAMA2; (+) strand; PAM type: YTN; PAM sequence: TTA
cagtgtcgtattttgtaata

SEQ ID NO: 374536 - DNA, 20 bp, Artificial Sequence
  Description of Artificial Sequence: Synthetic oligonucleotide
  Target: LAMA2; (+) strand; PAM type: YTN; PAM sequence: TTT
tgtaataggtataaaattct

SEQ ID NO: 374537 - DNA, 20 bp, Artificial Sequence
  Description of Artificial Sequence: Synthetic oligonucleotide
  Target: LAMA2; (+) strand; PAM type: YTN; PAM sequence: TTT
gtaataggtataaaattctg

SEQ ID NO: 374538 - DNA, 20 bp, Artificial Sequence
  Description of Artificial Sequence: Synthetic oligonucleotide
  Target: LAMA2; (+) strand; PAM type: YTN; PAM sequence: TTG
taataggtataaaattctgc

SEQ ID NO: 374539 - DNA, 20 bp, Artificial Sequence
  Description of Artificial Sequence: Synthetic oligonucleotide
  Target: LAMA2; (+) strand; PAM type: YTN; PAM sequence: TTC
tgccaatattttcgcacaca

SEQ ID NO: 374540 - DNA, 20 bp, Artificial Sequence
  Description of Artificial Sequence: Synthetic oligonucleotide
  Target: LAMA2; (+) strand; PAM type: YTN; PAM sequence: CTG
ccaatattttcgcacacagg

SEQ ID NO: 374541 - DNA, 20 bp, Artificial Sequence
  Description of Artificial Sequence: Synthetic oligonucleotide
  Target: LAMA2; (+) strand; PAM type: YTN; PAM sequence: TTT
tcgcacacaggcatttgtca

SEQ ID NO: 374542 - DNA, 20 bp, Artificial Sequence
  Description of Artificial Sequence: Synthetic oligonucleotide
  Target: LAMA2; (+) strand; PAM type: YTN; PAM sequence: TTT
cgcacacaggcatttgtcat

SEQ ID NO: 374543 - DNA, 20 bp, Artificial Sequence
  Description of Artificial Sequence: Synthetic oligonucleotide
  Target: LAMA2; (+) strand; PAM type: YTN; PAM sequence: TTC
gcacacaggcatttgtcatt

SEQ ID NO: 374544 - DNA, 20 bp, Artificial Sequence
  Description of Artificial Sequence: Synthetic oligonucleotide
  Target: LAMA2; (+) strand; PAM type: YTN; PAM sequence: TTT
gtcattgttgaatgattaac

SEQ ID NO: 374545 - DNA, 20 bp, Artificial Sequence
  Description of Artificial Sequence: Synthetic oligonucleotide
  Target: LAMA2; (+) strand; PAM type: YTN; PAM sequence: TTG
tcattgttgaatgattaacc

SEQ ID NO: 374546 - DNA, 20 bp, Artificial Sequence
  Description of Artificial Sequence: Synthetic oligonucleotide
  Target: LAMA2; (+) strand; PAM type: YTN; PAM sequence: TTG
ttgaatgattaacctcattt

SEQ ID NO: 374547 - DNA, 20 bp, Artificial Sequence
  Description of Artificial Sequence: Synthetic oligonucleotide
  Target: LAMA2; (+) strand; PAM type: YTN; PAM sequence: TTG
aatgattaacctcattttag

SEQ ID NO: 374548 - DNA, 20 bp, Artificial Sequence
  Description of Artificial Sequence: Synthetic oligonucleotide
  Target: LAMA2; (+) strand; PAM type: YTN; PAM sequence: TTA
acctcattttagtttcataa

SEQ ID NO: 374549 - DNA, 20 bp, Artificial Sequence
  Description of Artificial Sequence: Synthetic oligonucleotide
  Target: LAMA2; (+) strand; PAM type: YTN; PAM sequence: CTC
attttagtttcataatagtc

SEQ ID NO: 374550 - DNA, 20 bp, Artificial Sequence
  Description of Artificial Sequence: Synthetic oligonucleotide
  Target: LAMA2; (+) strand; PAM type: YTN; PAM sequence: TTT
tagtttcataatagtcattt

SEQ ID NO: 374551 - DNA, 20 bp, Artificial Sequence
  Description of Artificial Sequence: Synthetic oligonucleotide
  Target: LAMA2; (+) strand; PAM type: YTN; PAM sequence: TTT
agtttcataatagtcattta

SEQ ID NO: 374552 - DNA, 20 bp, Artificial Sequence
  Description of Artificial Sequence: Synthetic oligonucleotide
  Target: LAMA2; (+) strand; PAM type: YTN; PAM sequence: TTA
gtttcataatagtcatttaa

SEQ ID NO: 374553 - DNA, 20 bp, Artificial Sequence
  Description of Artificial Sequence: Synthetic oligonucleotide
  Target: LAMA2; (+) strand; PAM type: YTN; PAM sequence: TTT
cataatagtcatttaaggac

SEQ ID NO: 374554 - DNA, 20 bp, Artificial Sequence
  Description of Artificial Sequence: Synthetic oligonucleotide
  Target: LAMA2; (+) strand; PAM type: YTN; PAM sequence: TTC
ataatagtcatttaaggact

SEQ ID NO: 374555 - DNA, 20 bp, Artificial Sequence
  Description of Artificial Sequence: Synthetic oligonucleotide
  Target: LAMA2; (+) strand; PAM type: YTN; PAM sequence: TTT
aaggactatttctagaatgc

SEQ ID NO: 374556 - DNA, 20 bp, Artificial Sequence
  Description of Artificial Sequence: Synthetic oligonucleotide
  Target: LAMA2; (+) strand; PAM type: YTN; PAM sequence: TTA
aggactatttctagaatgct

SEQ ID NO: 374557 - DNA, 20 bp, Artificial Sequence
  Description of Artificial Sequence: Synthetic oligonucleotide
  Target: LAMA2; (+) strand; PAM type: YTN; PAM sequence: CTA
tttctagaatgctctttcag

SEQ ID NO: 374558 - DNA, 20 bp, Artificial Sequence
  Description of Artificial Sequence: Synthetic oligonucleotide
  Target: LAMA2; (+) strand; PAM type: YTN; PAM sequence: TTT
ctagaatgctctttcagtgt

SEQ ID NO: 374559 - DNA, 20 bp, Artificial Sequence
  Description of Artificial Sequence: Synthetic oligonucleotide
  Target: LAMA2; (+) strand; PAM type: YTN; PAM sequence: TTC
tagaatgctctttcagtgtt

SEQ ID NO: 374560 - DNA, 20 bp, Artificial Sequence
  Description of Artificial Sequence: Synthetic oligonucleotide
  Target: LAMA2; (+) strand; PAM type: YTN; PAM sequence: CTA
gaatgctctttcagtgtttt

SEQ ID NO: 374561 - DNA, 20 bp, Artificial Sequence
  Description of Artificial Sequence: Synthetic oligonucleotide
  Target: LAMA2; (+) strand; PAM type: YTN; PAM sequence: CTC
tttcagtgttttccttccac

SEQ ID NO: 374562 - DNA, 20 bp, Artificial Sequence
  Description of Artificial Sequence: Synthetic oligonucleotide
  Target: LAMA2; (+) strand; PAM type: YTN; PAM sequence: CTT
tcagtgttttccttccacaa

SEQ ID NO: 374563 - DNA, 20 bp, Artificial Sequence
  Description of Artificial Sequence: Synthetic oligonucleotide
  Target: LAMA2; (+) strand; PAM type: YTN; PAM sequence: TTT
cagtgttttccttccacaaa

SEQ ID NO: 374564 - DNA, 20 bp, Artificial Sequence
  Description of Artificial Sequence: Synthetic oligonucleotide
  Target: LAMA2; (+) strand; PAM type: YTN; PAM sequence: TTC
agtgttttccttccacaaaa

SEQ ID NO: 374565 - DNA, 20 bp, Artificial Sequence
  Description of Artificial Sequence: Synthetic oligonucleotide
  Target: LAMA2; (+) strand; PAM type: YTN; PAM sequence: TTT
tccttccacaaaattagcta

SEQ ID NO: 374566 - DNA, 20 bp, Artificial Sequence
  Description of Artificial Sequence: Synthetic oligonucleotide
  Target: LAMA2; (+) strand; PAM type: YTN; PAM sequence: TTT
ccttccacaaaattagctac

SEQ ID NO: 374567 - DNA, 20 bp, Artificial Sequence
  Description of Artificial Sequence: Synthetic oligonucleotide
  Target: LAMA2; (+) strand; PAM type: YTN; PAM sequence: TTC
cttccacaaaattagctact

SEQ ID NO: 374568 - DNA, 20 bp, Artificial Sequence
  Description of Artificial Sequence: Synthetic oligonucleotide
  Target: LAMA2; (+) strand; PAM type: YTN; PAM sequence: CTT
ccacaaaattagctactcta

SEQ ID NO: 374569 - DNA, 20 bp, Artificial Sequence
  Description of Artificial Sequence: Synthetic oligonucleotide
  Target: LAMA2; (+) strand; PAM type: YTN; PAM sequence: TTC
cacaaaattagctactctag

SEQ ID NO: 374570 - DNA, 20 bp, Artificial Sequence
  Description of Artificial Sequence: Synthetic oligonucleotide
  Target: LAMA2; (+) strand; PAM type: YTN; PAM sequence: TTA
gctactctagggcttcatcc

SEQ ID NO: 374571 - DNA, 20 bp, Artificial Sequence
  Description of Artificial Sequence: Synthetic oligonucleotide
  Target: LAMA2; (+) strand; PAM type: YTN; PAM sequence: CTA
ctctagggcttcatccatat

SEQ ID NO: 374572 - DNA, 20 bp, Artificial Sequence
  Description of Artificial Sequence: Synthetic oligonucleotide
  Target: LAMA2; (+) strand; PAM type: YTN; PAM sequence: CTC
tagggcttcatccatattag

SEQ ID NO: 374573 - DNA, 20 bp, Artificial Sequence
  Description of Artificial Sequence: Synthetic oligonucleotide
  Target: LAMA2; (+) strand; PAM type: YTN; PAM sequence: CTA
gggcttcatccatattagta

SEQ ID NO: 374574 - DNA, 20 bp, Artificial Sequence
  Description of Artificial Sequence: Synthetic oligonucleotide
  Target: LAMA2; (+) strand; PAM type: YTN; PAM sequence: CTT
catccatattagtataatac

SEQ ID NO: 374575 - DNA, 20 bp, Artificial Sequence
  Description of Artificial Sequence: Synthetic oligonucleotide
  Target: LAMA2; (+) strand; PAM type: YTN; PAM sequence: TTC
atccatattagtataataca

SEQ ID NO: 374576 - DNA, 20 bp, Artificial Sequence
  Description of Artificial Sequence: Synthetic oligonucleotide
  Target: LAMA2; (+) strand; PAM type: YTN; PAM sequence: TTA
gtataatacatttctcccct

SEQ ID NO: 374577 - DNA, 20 bp, Artificial Sequence
  Description of Artificial Sequence: Synthetic oligonucleotide
  Target: LAMA2; (+) strand; PAM type: YTN; PAM sequence: TTT
ctcccctctttacctttttt

SEQ ID NO: 374578 - DNA, 20 bp, Artificial Sequence
  Description of Artificial Sequence: Synthetic oligonucleotide
  Target: LAMA2; (+) strand; PAM type: YTN; PAM sequence: TTC
tcccctctttaccttttttg

SEQ ID NO: 374579 - DNA, 20 bp, Artificial Sequence
  Description of Artificial Sequence: Synthetic oligonucleotide
  Target: LAMA2; (+) strand; PAM type: YTN; PAM sequence: CTC
ccctctttaccttttttgct

SEQ ID NO: 374580 - DNA, 20 bp, Artificial Sequence
  Description of Artificial Sequence: Synthetic oligonucleotide
  Target: LAMA2; (+) strand; PAM type: YTN; PAM sequence: CTC
tttaccttttttgctgtatt

SEQ ID NO: 374581 - DNA, 20 bp, Artificial Sequence
  Description of Artificial Sequence: Synthetic oligonucleotide
  Target: LAMA2; (+) strand; PAM type: YTN; PAM sequence: CTT
taccttttttgctgtattaa

SEQ ID NO: 374582 - DNA, 20 bp, Artificial Sequence
  Description of Artificial Sequence: Synthetic oligonucleotide
  Target: LAMA2; (+) strand; PAM type: YTN; PAM sequence: TTT
accttttttgctgtattaat

SEQ ID NO: 374583 - DNA, 20 bp, Artificial Sequence
  Description of Artificial Sequence: Synthetic oligonucleotide
  Target: LAMA2; (+) strand; PAM type: YTN; PAM sequence: TTA
ccttttttgctgtattaata

SEQ ID NO: 374584 - DNA, 20 bp, Artificial Sequence
  Description of Artificial Sequence: Synthetic oligonucleotide
  Target: LAMA2; (+) strand; PAM type: YTN; PAM sequence: CTT
ttttgctgtattaatactac

SEQ ID NO: 374585 - DNA, 20 bp, Artificial Sequence
  Description of Artificial Sequence: Synthetic oligonucleotide
  Target: LAMA2; (+) strand; PAM type: YTN; PAM sequence: TTT
tttgctgtattaatactaca

SEQ ID NO: 374586 - DNA, 20 bp, Artificial Sequence
  Description of Artificial Sequence: Synthetic oligonucleotide
  Target: LAMA2; (+) strand; PAM type: YTN; PAM sequence: TTT
ttgctgtattaatactacat

SEQ ID NO: 374587 - DNA, 20 bp, Artificial Sequence
  Description of Artificial Sequence: Synthetic oligonucleotide
  Target: LAMA2; (+) strand; PAM type: YTN; PAM sequence: TTT
tgctgtattaatactacata

SEQ ID NO: 374588 - DNA, 20 bp, Artificial Sequence
  Description of Artificial Sequence: Synthetic oligonucleotide
  Target: LAMA2; (+) strand; PAM type: YTN; PAM sequence: TTT
gctgtattaatactacatag

SEQ ID NO: 374589 - DNA, 20 bp, Artificial Sequence
  Description of Artificial Sequence: Synthetic oligonucleotide
  Target: LAMA2; (+) strand; PAM type: YTN; PAM sequence: TTG
ctgtattaatactacataga

SEQ ID NO: 374590 - DNA, 20 bp, Artificial Sequence
  Description of Artificial Sequence: Synthetic oligonucleotide
  Target: LAMA2; (+) strand; PAM type: YTN; PAM sequence: CTG
tattaatactacatagaatt

SEQ ID NO: 374591 - DNA, 20 bp, Artificial Sequence
  Description of Artificial Sequence: Synthetic oligonucleotide
  Target: LAMA2; (+) strand; PAM type: YTN; PAM sequence: TTA
atactacatagaatttccaa

SEQ ID NO: 374592 - DNA, 20 bp, Artificial Sequence
  Description of Artificial Sequence: Synthetic oligonucleotide
  Target: LAMA2; (+) strand; PAM type: YTN; PAM sequence: CTA
catagaatttccaaatcctt

SEQ ID NO: 374593 - DNA, 20 bp, Artificial Sequence
  Description of Artificial Sequence: Synthetic oligonucleotide
  Target: LAMA2; (+) strand; PAM type: YTN; PAM sequence: TTT
ccaaatccttaatgtcagtg

SEQ ID NO: 374594 - DNA, 20 bp, Artificial Sequence
  Description of Artificial Sequence: Synthetic oligonucleotide
  Target: LAMA2; (+) strand; PAM type: YTN; PAM sequence: TTC
caaatccttaatgtcagtgg

SEQ ID NO: 374595 - DNA, 20 bp, Artificial Sequence
  Description of Artificial Sequence: Synthetic oligonucleotide
  Target: LAMA2; (+) strand; PAM type: YTN; PAM sequence: CTT
aatgtcagtgggattagaat

SEQ ID NO: 374596 - DNA, 20 bp, Artificial Sequence
  Description of Artificial Sequence: Synthetic oligonucleotide
  Target: LAMA2; (+) strand; PAM type: YTN; PAM sequence: TTA
atgtcagtgggattagaata

SEQ ID NO: 374597 - DNA, 20 bp, Artificial Sequence
  Description of Artificial Sequence: Synthetic oligonucleotide
  Target: LAMA2; (+) strand; PAM type: YTN; PAM sequence: TTA
gaatatgaaggcggatcttg

SEQ ID NO: 374598 - DNA, 20 bp, Artificial Sequence
  Description of Artificial Sequence: Synthetic oligonucleotide
  Target: LAMA2; (+) strand; PAM type: YTN; PAM sequence: CTT
gttgcagaagatcaaatgga

SEQ ID NO: 374599 - DNA, 20 bp, Artificial Sequence
  Description of Artificial Sequence: Synthetic oligonucleotide
  Target: LAMA2; (+) strand; PAM type: YTN; PAM sequence: TTG
ttgcagaagatcaaatggaa

SEQ ID NO: 374600 - DNA, 20 bp, Artificial Sequence
  Description of Artificial Sequence: Synthetic oligonucleotide
  Target: LAMA2; (+) strand; PAM type: YTN; PAM sequence: TTG
cagaagatcaaatggaaagt

SEQ ID NO: 374601 - DNA, 20 bp, Artificial Sequence
  Description of Artificial Sequence: Synthetic oligonucleotide
  Target: LAMA2; (+) strand; PAM type: YTN; PAM sequence: TTA
gcatttggccatcatcagct

SEQ ID NO: 374602 - DNA, 20 bp, Artificial Sequence
  Description of Artificial Sequence: Synthetic oligonucleotide
  Target: LAMA2; (+) strand; PAM type: YTN; PAM sequence: TTT
ggccatcatcagcttcattt

SEQ ID NO: 374603 - DNA, 20 bp, Artificial Sequence
  Description of Artificial Sequence: Synthetic oligonucleotide
  Target: LAMA2; (+) strand; PAM type: YTN; PAM sequence: TTG
gccatcatcagcttcattta

SEQ ID NO: 374604 - DNA, 20 bp, Artificial Sequence
  Description of Artificial Sequence: Synthetic oligonucleotide
  Target: LAMA2; (+) strand; PAM type: YTN; PAM sequence: CTT
catttactatcataatgttt

SEQ ID NO: 374605 - DNA, 20 bp, Artificial Sequence
  Description of Artificial Sequence: Synthetic oligonucleotide
  Target: LAMA2; (+) strand; PAM type: YTN; PAM sequence: TTC
atttactatcataatgttta

SEQ ID NO: 374606 - DNA, 20 bp, Artificial Sequence
  Description of Artificial Sequence: Synthetic oligonucleotide
  Target: LAMA2; (+) strand; PAM type: YTN; PAM sequence: TTT
actatcataatgtttaagca

SEQ ID NO: 374607 - DNA, 20 bp, Artificial Sequence
  Description of Artificial Sequence: Synthetic oligonucleotide
  Target: LAMA2; (+) strand; PAM type: YTN; PAM sequence: TTA
ctatcataatgtttaagcag

SEQ ID NO: 374608 - DNA, 20 bp, Artificial Sequence
  Description of Artificial Sequence: Synthetic oligonucleotide
  Target: LAMA2; (+) strand; PAM type: YTN; PAM sequence: CTA
tcataatgtttaagcagagt

SEQ ID NO: 374609 - DNA, 20 bp, Artificial Sequence
  Description of Artificial Sequence: Synthetic oligonucleotide
  Target: LAMA2; (+) strand; PAM type: YTN; PAM sequence: TTT
aagcagagtaggttatgaga

SEQ ID NO: 374610 - DNA, 20 bp, Artificial Sequence
  Description of Artificial Sequence: Synthetic oligonucleotide
  Target: LAMA2; (+) strand; PAM type: YTN; PAM sequence: TTA
agcagagtaggttatgagac

SEQ ID NO: 374611 - DNA, 20 bp, Artificial Sequence
  Description of Artificial Sequence: Synthetic oligonucleotide
  Target: LAMA2; (+) strand; PAM type: YTN; PAM sequence: TTA
tgagaccagcctatccattc

SEQ ID NO: 374612 - DNA, 20 bp, Artificial Sequence
  Description of Artificial Sequence: Synthetic oligonucleotide
  Target: LAMA2; (+) strand; PAM type: YTN; PAM sequence: CTA
tccattcatttctgtcaaat

SEQ ID NO: 374613 - DNA, 20 bp, Artificial Sequence
  Description of Artificial Sequence: Synthetic oligonucleotide
  Target: LAMA2; (+) strand; PAM type: YTN; PAM sequence: TTC
atttctgtcaaatttatgtg

SEQ ID NO: 374614 - DNA, 20 bp, Artificial Sequence
  Description of Artificial Sequence: Synthetic oligonucleotide
  Target: LAMA2; (+) strand; PAM type: YTN; PAM sequence: TTT
ctgtcaaatttatgtgagag

SEQ ID NO: 374615 - DNA, 20 bp, Artificial Sequence
  Description of Artificial Sequence: Synthetic oligonucleotide
  Target: LAMA2; (+) strand; PAM type: YTN; PAM sequence: TTC
tgtcaaatttatgtgagaga

SEQ ID NO: 374616 - DNA, 20 bp, Artificial Sequence
  Description of Artificial Sequence: Synthetic oligonucleotide
  Target: LAMA2; (+) strand; PAM type: YTN; PAM sequence: CTG
tcaaatttatgtgagagact

SEQ ID NO: 374617 - DNA, 20 bp, Artificial Sequence
  Description of Artificial Sequence: Synthetic oligonucleotide
  Target: LAMA2; (+) strand; PAM type: YTN; PAM sequence: TTT
atgtgagagactcttccaat

SEQ ID NO: 374618 - DNA, 20 bp, Artificial Sequence
  Description of Artificial Sequence: Synthetic oligonucleotide
  Target: LAMA2; (+) strand; PAM type: YTN; PAM sequence: TTA
tgtgagagactcttccaatt

SEQ ID NO: 374619 - DNA, 20 bp, Artificial Sequence
  Description of Artificial Sequence: Synthetic oligonucleotide
  Target: LAMA2; (+) strand; PAM type: YTN; PAM sequence: CTC
ttccaattattcaggtgggt

SEQ ID NO: 374620 - DNA, 20 bp, Artificial Sequence
  Description of Artificial Sequence: Synthetic oligonucleotide
  Target: LAMA2; (+) strand; PAM type: YTN; PAM sequence: CTT
ccaattattcaggtgggtcc

SEQ ID NO: 374621 - DNA, 20 bp, Artificial Sequence
  Description of Artificial Sequence: Synthetic oligonucleotide
  Target: LAMA2; (+) strand; PAM type: YTN; PAM sequence: TTC
caattattcaggtgggtccc

SEQ ID NO: 374622 - DNA, 20 bp, Artificial Sequence
  Description of Artificial Sequence: Synthetic oligonucleotide
  Target: LAMA2; (+) strand; PAM type: YTN; PAM sequence: TTA
ttcaggtgggtcccaggaca

SEQ ID NO: 374623 - DNA, 20 bp, Artificial Sequence
  Description of Artificial Sequence: Synthetic oligonucleotide
  Target: LAMA2; (+) strand; PAM type: YTN; PAM sequence: TTC
aggtgggtcccaggacatgc

SEQ ID NO: 374624 - DNA, 20 bp, Artificial Sequence
  Description of Artificial Sequence: Synthetic oligonucleotide
  Target: LAMA2; (+) strand; PAM type: YTN; PAM sequence: TTA
tagaaaccactgtaaatgta

SEQ ID NO: 374625 - DNA, 20 bp, Artificial Sequence
  Description of Artificial Sequence: Synthetic oligonucleotide
  Target: LAMA2; (+) strand; PAM type: YTN; PAM sequence: CTG
taaatgtagcctattatcaa

SEQ ID NO: 374626 - DNA, 20 bp, Artificial Sequence
  Description of Artificial Sequence: Synthetic oligonucleotide
  Target: LAMA2; (+) strand; PAM type: YTN; PAM sequence: CTA
ttatcaactctactgtaagc

SEQ ID NO: 374627 - DNA, 20 bp, Artificial Sequence
  Description of Artificial Sequence: Synthetic oligonucleotide
  Target: LAMA2; (+) strand; PAM type: YTN; PAM sequence: TTA
tcaactctactgtaagcacc

SEQ ID NO: 374628 - DNA, 20 bp, Artificial Sequence
  Description of Artificial Sequence: Synthetic oligonucleotide
  Target: LAMA2; (+) strand; PAM type: YTN; PAM sequence: CTC
tactgtaagcaccaaagacc

SEQ ID NO: 374629 - DNA, 20 bp, Artificial Sequence
  Description of Artificial Sequence: Synthetic oligonucleotide
  Target: LAMA2; (+) strand; PAM type: YTN; PAM sequence: CTA
ctgtaagcaccaaagaccca

SEQ ID NO: 374630 - DNA, 20 bp, Artificial Sequence
  Description of Artificial Sequence: Synthetic oligonucleotide
  Target: LAMA2; (+) strand; PAM type: YTN; PAM sequence: CTG
taagcaccaaagacccagta

SEQ ID NO: 374631 - DNA, 20 bp, Artificial Sequence
  Description of Artificial Sequence: Synthetic oligonucleotide
  Target: LAMA2; (+) strand; PAM type: YTN; PAM sequence: CTA
tttcattaagaaatgtgtct

SEQ ID NO: 374632 - DNA, 20 bp, Artificial Sequence
  Description of Artificial Sequence: Synthetic oligonucleotide
  Target: LAMA2; (+) strand; PAM type: YTN; PAM sequence: TTT
cattaagaaatgtgtctctc

SEQ ID NO: 374633 - DNA, 20 bp, Artificial Sequence
  Description of Artificial Sequence: Synthetic oligonucleotide
  Target: LAMA2; (+) strand; PAM type: YTN; PAM sequence: TTC
attaagaaatgtgtctctct

SEQ ID NO: 374634 - DNA, 20 bp, Artificial Sequence
  Description of Artificial Sequence: Synthetic oligonucleotide
  Target: LAMA2; (+) strand; PAM type: YTN; PAM sequence: TTA
agaaatgtgtctctctcatc

SEQ ID NO: 374635 - DNA, 20 bp, Artificial Sequence
  Description of Artificial Sequence: Synthetic oligonucleotide
  Target: LAMA2; (+) strand; PAM type: YTN; PAM sequence: CTC
tctcatcacaggtttagaag

SEQ ID NO: 374636 - DNA, 20 bp, Artificial Sequence
  Description of Artificial Sequence: Synthetic oligonucleotide
  Target: LAMA2; (+) strand; PAM type: YTN; PAM sequence: CTC
tcatcacaggtttagaagat

SEQ ID NO: 374637 - DNA, 20 bp, Artificial Sequence
  Description of Artificial Sequence: Synthetic oligonucleotide
  Target: LAMA2; (+) strand; PAM type: YTN; PAM sequence: CTC
atcacaggtttagaagatga

SEQ ID NO: 374638 - DNA, 20 bp, Artificial Sequence
  Description of Artificial Sequence: Synthetic oligonucleotide
  Target: LAMA2; (+) strand; PAM type: YTN; PAM sequence: TTT
agaagatgagttctagcttt

SEQ ID NO: 374639 - DNA, 20 bp, Artificial Sequence
  Description of Artificial Sequence: Synthetic oligonucleotide
  Target: LAMA2; (+) strand; PAM type: YTN; PAM sequence: TTA
gaagatgagttctagctttt

SEQ ID NO: 374640 - DNA, 20 bp, Artificial Sequence
  Description of Artificial Sequence: Synthetic oligonucleotide
  Target: LAMA2; (+) strand; PAM type: YTN; PAM sequence: TTC
tagctttttgttatttaata

SEQ ID NO: 374641 - DNA, 20 bp, Artificial Sequence
  Description of Artificial Sequence: Synthetic oligonucleotide
  Target: LAMA2; (+) strand; PAM type: YTN; PAM sequence: CTA
gctttttgttatttaataat

SEQ ID NO: 374642 - DNA, 20 bp, Artificial Sequence
  Description of Artificial Sequence: Synthetic oligonucleotide
  Target: LAMA2; (+) strand; PAM type: YTN; PAM sequence: CTT
tttgttatttaataatgata

SEQ ID NO: 374643 - DNA, 20 bp, Artificial Sequence
  Description of Artificial Sequence: Synthetic oligonucleotide
  Target: LAMA2; (+) strand; PAM type: YTN; PAM sequence: TTT
ttgttatttaataatgataa

SEQ ID NO: 374644 - DNA, 20 bp, Artificial Sequence
  Description of Artificial Sequence: Synthetic oligonucleotide
  Target: LAMA2; (+) strand; PAM type: YTN; PAM sequence: TTT
tgttatttaataatgataat

SEQ ID NO: 374645 - DNA, 20 bp, Artificial Sequence
  Description of Artificial Sequence: Synthetic oligonucleotide
  Target: LAMA2; (+) strand; PAM type: YTN; PAM sequence: TTT
gttatttaataatgataatt

SEQ ID NO: 374646 - DNA, 20 bp, Artificial Sequence
  Description of Artificial Sequence: Synthetic oligonucleotide
  Target: LAMA2; (+) strand; PAM type: YTN; PAM sequence: TTG
ttatttaataatgataattc

SEQ ID NO: 374647 - DNA, 20 bp, Artificial Sequence
  Description of Artificial Sequence: Synthetic oligonucleotide
  Target: LAMA2; (+) strand; PAM type: YTN; PAM sequence: TTA
tttaataatgataattcatt

SEQ ID NO: 374648 - DNA, 20 bp, Artificial Sequence
  Description of Artificial Sequence: Synthetic oligonucleotide
  Target: LAMA2; (+) strand; PAM type: YTN; PAM sequence: TTT
aataatgataattcattgaa

SEQ ID NO: 374649 - DNA, 20 bp, Artificial Sequence
  Description of Artificial Sequence: Synthetic oligonucleotide
  Target: LAMA2; (+) strand; PAM type: YTN; PAM sequence: TTA
ataatgataattcattgaat

SEQ ID NO: 374650 - DNA, 20 bp, Artificial Sequence
  Description of Artificial Sequence: Synthetic oligonucleotide
  Target: LAMA2; (+) strand; PAM type: YTN; PAM sequence: TTC
attgaatcaaaaccaaatca

SEQ ID NO: 374651 - DNA, 20 bp, Artificial Sequence
  Description of Artificial Sequence: Synthetic oligonucleotide
  Target: LAMA2; (+) strand; PAM type: YTN; PAM sequence: TTG
aatcaaaaccaaatcacttt

SEQ ID NO: 374652 - DNA, 20 bp, Artificial Sequence
  Description of Artificial Sequence: Synthetic oligonucleotide
  Target: LAMA2; (+) strand; PAM type: YTN; PAM sequence: CTT
tctggaccaactggcagctg

SEQ ID NO: 374653 - DNA, 20 bp, Artificial Sequence
  Description of Artificial Sequence: Synthetic oligonucleotide
  Target: LAMA2; (+) strand; PAM type: YTN; PAM sequence: TTT
ctggaccaactggcagctgt

SEQ ID NO: 374654 - DNA, 20 bp, Artificial Sequence
  Description of Artificial Sequence: Synthetic oligonucleotide
  Target: LAMA2; (+) strand; PAM type: YTN; PAM sequence: TTC
tggaccaactggcagctgtt

SEQ ID NO: 374655 - DNA, 20 bp, Artificial Sequence
  Description of Artificial Sequence: Synthetic oligonucleotide
  Target: LAMA2; (+) strand; PAM type: YTN; PAM sequence: CTG
gaccaactggcagctgttaa

SEQ ID NO: 374656 - DNA, 20 bp, Artificial Sequence
  Description of Artificial Sequence: Synthetic oligonucleotide
  Target: LAMA2; (+) strand; PAM type: YTN; PAM sequence: CTG
gcagctgttaatataacctg

SEQ ID NO: 374657 - DNA, 20 bp, Artificial Sequence
  Description of Artificial Sequence: Synthetic oligonucleotide
  Target: LAMA2; (+) strand; PAM type: YTN; PAM sequence: CTG
ttaatataacctgtaaattg

SEQ ID NO: 374658 - DNA, 20 bp, Artificial Sequence
  Description of Artificial Sequence: Synthetic oligonucleotide
  Target: LAMA2; (+) strand; PAM type: YTN; PAM sequence: TTA
atataacctgtaaattgatc

SEQ ID NO: 374659 - DNA, 20 bp, Artificial Sequence
  Description of Artificial Sequence: Synthetic oligonucleotide
  Target: LAMA2; (+) strand; PAM type: YTN; PAM sequence: CTG
taaattgatctttttttaaa

SEQ ID NO: 374660 - DNA, 20 bp, Artificial Sequence
  Description of Artificial Sequence: Synthetic oligonucleotide
  Target: LAMA2; (+) strand; PAM type: YTN; PAM sequence: TTG
atctttttttaaagcaaaat

SEQ ID NO: 374661 - DNA, 20 bp, Artificial Sequence
  Description of Artificial Sequence: Synthetic oligonucleotide
  Target: LAMA2; (+) strand; PAM type: YTN; PAM sequence: CTT
tttttaaagcaaaatttcca

SEQ ID NO: 374662 - DNA, 20 bp, Artificial Sequence
  Description of Artificial Sequence: Synthetic oligonucleotide
  Target: LAMA2; (+) strand; PAM type: YTN; PAM sequence: TTT
ttttaaagcaaaatttccaa

SEQ ID NO: 374663 - DNA, 20 bp, Artificial Sequence
  Description of Artificial Sequence: Synthetic oligonucleotide
  Target: LAMA2; (+) strand; PAM type: YTN; PAM sequence: TTT
tttaaagcaaaatttccaac

SEQ ID NO: 374664 - DNA, 20 bp, Artificial Sequence
  Description of Artificial Sequence: Synthetic oligonucleotide
  Target: LAMA2; (+) strand; PAM type: YTN; PAM sequence: TTT
ttaaagcaaaatttccaaca

SEQ ID NO: 374665 - DNA, 20 bp, Artificial Sequence
  Description of Artificial Sequence: Synthetic oligonucleotide
  Target: LAMA2; (+) strand; PAM type: YTN; PAM sequence: TTT
taaagcaaaatttccaacag

SEQ ID NO: 374666 - DNA, 20 bp, Artificial Sequence
  Description of Artificial Sequence: Synthetic oligonucleotide
  Target: LAMA2; (+) strand; PAM type: YTN; PAM sequence: TTT
aaagcaaaatttccaacagc

SEQ ID NO: 374667 - DNA, 20 bp, Artificial Sequence
  Description of Artificial Sequence: Synthetic oligonucleotide
  Target: LAMA2; (+) strand; PAM type: YTN; PAM sequence: TTA
aagcaaaatttccaacagct

SEQ ID NO: 374668 - DNA, 20 bp, Artificial Sequence
  Description of Artificial Sequence: Synthetic oligonucleotide
  Target: LAMA2; (+) strand; PAM type: YTN; PAM sequence: TTT
ccaacagctcagtgccttta

SEQ ID NO: 374669 - DNA, 20 bp, Artificial Sequence
  Description of Artificial Sequence: Synthetic oligonucleotide
  Target: LAMA2; (+) strand; PAM type: YTN; PAM sequence: TTC
caacagctcagtgcctttaa

SEQ ID NO: 374670 - DNA, 20 bp, Artificial Sequence
  Description of Artificial Sequence: Synthetic oligonucleotide
  Target: LAMA2; (+) strand; PAM type: YTN; PAM sequence: CTC
agtgcctttaaacactggat

SEQ ID NO: 374671 - DNA, 20 bp, Artificial Sequence
  Description of Artificial Sequence: Synthetic oligonucleotide
  Target: LAMA2; (+) strand; PAM type: YTN; PAM sequence: CTT
taaacactggattcctgaca

SEQ ID NO: 374672 - DNA, 20 bp, Artificial Sequence
  Description of Artificial Sequence: Synthetic oligonucleotide
  Target: LAMA2; (+) strand; PAM type: YTN; PAM sequence: TTT
aaacactggattcctgacaa

SEQ ID NO: 374673 - DNA, 20 bp, Artificial Sequence
  Description of Artificial Sequence: Synthetic oligonucleotide
  Target: LAMA2; (+) strand; PAM type: YTN; PAM sequence: TTA
aacactggattcctgacaaa

SEQ ID NO: 374674 - DNA, 20 bp, Artificial Sequence
  Description of Artificial Sequence: Synthetic oligonucleotide
  Target: LAMA2; (+) strand; PAM type: YTN; PAM sequence: CTG
gattcctgacaaatgtataa

SEQ ID NO: 374675 - DNA, 20 bp, Artificial Sequence
  Description of Artificial Sequence: Synthetic oligonucleotide
  Target: LAMA2; (+) strand; PAM type: YTN; PAM sequence: TTC
ctgacaaatgtataaaatca

SEQ ID NO: 374676 - DNA, 20 bp, Artificial Sequence
  Description of Artificial Sequence: Synthetic oligonucleotide
  Target: LAMA2; (+) strand; PAM type: YTN; PAM sequence: CTG
acaaatgtataaaatcatag

SEQ ID NO: 374677 - DNA, 20 bp, Artificial Sequence
  Description of Artificial Sequence: Synthetic oligonucleotide
  Target: LAMA2; (+) strand; PAM type: YTN; PAM sequence: CTA
agaaattcttcctttcccac

SEQ ID NO: 374678 - DNA, 20 bp, Artificial Sequence
  Description of Artificial Sequence: Synthetic oligonucleotide
  Target: LAMA2; (+) strand; PAM type: YTN; PAM sequence: TTC
ttcctttcccacagatcatc

SEQ ID NO: 374679 - DNA, 20 bp, Artificial Sequence
  Description of Artificial Sequence: Synthetic oligonucleotide
  Target: LAMA2; (+) strand; PAM type: YTN; PAM sequence: CTT
cctttcccacagatcatcta

SEQ ID NO: 374680 - DNA, 20 bp, Artificial Sequence
  Description of Artificial Sequence: Synthetic oligonucleotide
  Target: LAMA2; (+) strand; PAM type: YTN; PAM sequence: TTC
ctttcccacagatcatctag

SEQ ID NO: 374681 - DNA, 20 bp, Artificial Sequence
  Description of Artificial Sequence: Synthetic oligonucleotide
  Target: LAMA2; (+) strand; PAM type: YTN; PAM sequence: CTT
tcccacagatcatctaggat

SEQ ID NO: 374682 - DNA, 20 bp, Artificial Sequence
  Description of Artificial Sequence: Synthetic oligonucleotide
  Target: LAMA2; (+) strand; PAM type: YTN; PAM sequence: TTT
cccacagatcatctaggatc

SEQ ID NO: 374683 - DNA, 20 bp, Artificial Sequence
  Description of Artificial Sequence: Synthetic oligonucleotide
  Target: LAMA2; (+) strand; PAM type: YTN; PAM sequence: TTC
ccacagatcatctaggatct

SEQ ID NO: 374684 - DNA, 20 bp, Artificial Sequence
  Description of Artificial Sequence: Synthetic oligonucleotide
  Target: LAMA2; (+) strand; PAM type: YTN; PAM sequence: CTA
ggatctacattttctagctg

SEQ ID NO: 374685 - DNA, 20 bp, Artificial Sequence
  Description of Artificial Sequence: Synthetic oligonucleotide
  Target: LAMA2; (+) strand; PAM type: YTN; PAM sequence: CTA
cattttctagctgtgtgctc

SEQ ID NO: 374686 - DNA, 20 bp, Artificial Sequence
  Description of Artificial Sequence: Synthetic oligonucleotide
  Target: LAMA2; (+) strand; PAM type: YTN; PAM sequence: TTT
tctagctgtgtgctcctgag

SEQ ID NO: 374687 - DNA, 20 bp, Artificial Sequence
  Description of Artificial Sequence: Synthetic oligonucleotide
  Target: LAMA2; (+) strand; PAM type: YTN; PAM sequence: TTT
ctagctgtgtgctcctgagc

SEQ ID NO: 374688 - DNA, 20 bp, Artificial Sequence
  Description of Artificial Sequence: Synthetic oligonucleotide
  Target: LAMA2; (+) strand; PAM type: YTN; PAM sequence: TTC
tagctgtgtgctcctgagca

SEQ ID NO: 374689 - DNA, 20 bp, Artificial Sequence
  Description of Artificial Sequence: Synthetic oligonucleotide
  Target: LAMA2; (+) strand; PAM type: YTN; PAM sequence: CTA
gctgtgtgctcctgagcaag

SEQ ID NO: 374690 - DNA, 20 bp, Artificial Sequence
  Description of Artificial Sequence: Synthetic oligonucleotide
  Target: LAMA2; (+) strand; PAM type: YTN; PAM sequence: CTG
tgtgctcctgagcaagatat

SEQ ID NO: 374691 - DNA, 20 bp, Artificial Sequence
  Description of Artificial Sequence: Synthetic oligonucleotide
  Target: LAMA2; (+) strand; PAM type: YTN; PAM sequence: CTC
ctgagcaagatatttgacct

SEQ ID NO: 374692 - DNA, 20 bp, Artificial Sequence
  Description of Artificial Sequence: Synthetic oligonucleotide
  Target: LAMA2; (+) strand; PAM type: YTN; PAM sequence: CTG
agcaagatatttgacctcct

SEQ ID NO: 374693 - DNA, 20 bp, Artificial Sequence
  Description of Artificial Sequence: Synthetic oligonucleotide
  Target: LAMA2; (+) strand; PAM type: YTN; PAM sequence: TTT
gacctccttgagacacagtt

SEQ ID NO: 374694 - DNA, 20 bp, Artificial Sequence
  Description of Artificial Sequence: Synthetic oligonucleotide
  Target: LAMA2; (+) strand; PAM type: YTN; PAM sequence: TTG
acctccttgagacacagttt

SEQ ID NO: 374695 - DNA, 20 bp, Artificial Sequence
  Description of Artificial Sequence: Synthetic oligonucleotide
  Target: LAMA2; (+) strand; PAM type: YTN; PAM sequence: CTC
cttgagacacagttttctag

SEQ ID NO: 374696 - DNA, 20 bp, Artificial Sequence
  Description of Artificial Sequence: Synthetic oligonucleotide
  Target: LAMA2; (+) strand; PAM type: YTN; PAM sequence: CTT
gagacacagttttctagtct

SEQ ID NO: 374697 - DNA, 20 bp, Artificial Sequence
  Description of Artificial Sequence: Synthetic oligonucleotide
  Target: LAMA2; (+) strand; PAM type: YTN; PAM sequence: TTG
agacacagttttctagtcta

SEQ ID NO: 374698 - DNA, 20 bp, Artificial Sequence
  Description of Artificial Sequence: Synthetic oligonucleotide
  Target: LAMA2; (+) strand; PAM type: YTN; PAM sequence: TTT
tctagtctacaaagagagtc

SEQ ID NO: 374699 - DNA, 20 bp, Artificial Sequence
  Description of Artificial Sequence: Synthetic oligonucleotide
  Target: LAMA2; (+) strand; PAM type: YTN; PAM sequence: TTT
ctagtctacaaagagagtca

SEQ ID NO: 374700 - DNA, 20 bp, Artificial Sequence
  Description of Artificial Sequence: Synthetic oligonucleotide
  Target: LAMA2; (+) strand; PAM type: YTN; PAM sequence: TTC
tagtctacaaagagagtcat

SEQ ID NO: 374701 - DNA, 20 bp, Artificial Sequence
  Description of Artificial Sequence: Synthetic oligonucleotide
  Target: LAMA2; (+) strand; PAM type: YTN; PAM sequence: CTA
gtctacaaagagagtcatga

SEQ ID NO: 374702 - DNA, 20 bp, Artificial Sequence
  Description of Artificial Sequence: Synthetic oligonucleotide
  Target: LAMA2; (+) strand; PAM type: YTN; PAM sequence: CTA
caaagagagtcatgaatttt

SEQ ID NO: 374703 - DNA, 20 bp, Artificial Sequence
  Description of Artificial Sequence: Synthetic oligonucleotide
  Target: LAMA2; (+) strand; PAM type: YTN; PAM sequence: TTT
tctgtggggactaaaggatt

SEQ ID NO: 374704 - DNA, 20 bp, Artificial Sequence
  Description of Artificial Sequence: Synthetic oligonucleotide
  Target: LAMA2; (+) strand; PAM type: YTN; PAM sequence: TTT
ctgtggggactaaaggattt

SEQ ID NO: 374705 - DNA, 20 bp, Artificial Sequence
  Description of Artificial Sequence: Synthetic oligonucleotide
  Target: LAMA2; (+) strand; PAM type: YTN; PAM sequence: TTC
tgtggggactaaaggatttg

SEQ ID NO: 374706 - DNA, 20 bp, Artificial Sequence
  Description of Artificial Sequence: Synthetic oligonucleotide
  Target: LAMA2; (+) strand; PAM type: YTN; PAM sequence: CTG
tggggactaaaggatttggc

SEQ ID NO: 374707 - DNA, 20 bp, Artificial Sequence
  Description of Artificial Sequence: Synthetic oligonucleotide
  Target: LAMA2; (+) strand; PAM type: YTN; PAM sequence: CTA
aaggatttggcacatagagg

SEQ ID NO: 374708 - DNA, 20 bp, Artificial Sequence
  Description of Artificial Sequence: Synthetic oligonucleotide
  Target: LAMA2; (+) strand; PAM type: YTN; PAM sequence: TTT
ggcacatagagggtatccag

SEQ ID NO: 374709 - DNA, 20 bp, Artificial Sequence
  Description of Artificial Sequence: Synthetic oligonucleotide
  Target: LAMA2; (+) strand; PAM type: YTN; PAM sequence: TTG
gcacatagagggtatccagt

SEQ ID NO: 374710 - DNA, 20 bp, Artificial Sequence
  Description of Artificial Sequence: Synthetic oligonucleotide
  Target: LAMA2; (+) strand; PAM type: YTN; PAM sequence: TTC
ccaagtcctggagatgctca

SEQ ID NO: 374711 - DNA, 20 bp, Artificial Sequence
  Description of Artificial Sequence: Synthetic oligonucleotide
  Target: LAMA2; (+) strand; PAM type: YTN; PAM sequence: CTG
gagatgctcacacatggtag

SEQ ID NO: 374712 - DNA, 20 bp, Artificial Sequence
  Description of Artificial Sequence: Synthetic oligonucleotide
  Target: LAMA2; (+) strand; PAM type: YTN; PAM sequence: CTC
acacatggtagctgtctttg

SEQ ID NO: 374713 - DNA, 20 bp, Artificial Sequence
  Description of Artificial Sequence: Synthetic oligonucleotide
  Target: LAMA2; (+) strand; PAM type: YTN; PAM sequence: CTG
tctttggtagcagtgctcat

SEQ ID NO: 374714 - DNA, 20 bp, Artificial Sequence
  Description of Artificial Sequence: Synthetic oligonucleotide
  Target: LAMA2; (+) strand; PAM type: YTN; PAM sequence: CTT
tggtagcagtgctcatagta

SEQ ID NO: 374715 - DNA, 20 bp, Artificial Sequence
  Description of Artificial Sequence: Synthetic oligonucleotide
  Target: LAMA2; (+) strand; PAM type: YTN; PAM sequence: TTT
ggtagcagtgctcatagtag

SEQ ID NO: 374716 - DNA, 20 bp, Artificial Sequence
  Description of Artificial Sequence: Synthetic oligonucleotide
  Target: LAMA2; (+) strand; PAM type: YTN; PAM sequence: TTG
gtagcagtgctcatagtagc

SEQ ID NO: 374717 - DNA, 20 bp, Artificial Sequence
  Description of Artificial Sequence: Synthetic oligonucleotide
  Target: LAMA2; (+) strand; PAM type: YTN; PAM sequence: CTC
atagtagctgtgcatatcag

SEQ ID NO: 374718 - DNA, 20 bp, Artificial Sequence
  Description of Artificial Sequence: Synthetic oligonucleotide
  Target: LAMA2; (+) strand; PAM type: YTN; PAM sequence: CTG
tgcatatcagttgttcacca

SEQ ID NO: 374719 - DNA, 20 bp, Artificial Sequence
  Description of Artificial Sequence: Synthetic oligonucleotide
  Target: LAMA2; (+) strand; PAM type: YTN; PAM sequence: TTG
ttcaccagtgaattctaagg

SEQ ID NO: 374720 - DNA, 20 bp, Artificial Sequence
  Description of Artificial Sequence: Synthetic oligonucleotide
  Target: LAMA2; (+) strand; PAM type: YTN; PAM sequence: TTC
accagtgaattctaaggcta

SEQ ID NO: 374721 - DNA, 20 bp, Artificial Sequence
  Description of Artificial Sequence: Synthetic oligonucleotide
  Target: LAMA2; (+) strand; PAM type: YTN; PAM sequence: TTC
taaggctaagttagtcattt

SEQ ID NO: 374722 - DNA, 20 bp, Artificial Sequence
  Description of Artificial Sequence: Synthetic oligonucleotide
  Target: LAMA2; (+) strand; PAM type: YTN; PAM sequence: CTA
aggctaagttagtcatttac

SEQ ID NO: 374723 - DNA, 20 bp, Artificial Sequence
  Description of Artificial Sequence: Synthetic oligonucleotide
  Target: LAMA2; (+) strand; PAM type: YTN; PAM sequence: CTA
agttagtcatttactgacat

SEQ ID NO: 374724 - DNA, 20 bp, Artificial Sequence
  Description of Artificial Sequence: Synthetic oligonucleotide
  Target: LAMA2; (+) strand; PAM type: YTN; PAM sequence: TTA
gtcatttactgacattttat

SEQ ID NO: 374725 - DNA, 20 bp, Artificial Sequence
  Description of Artificial Sequence: Synthetic oligonucleotide
  Target: LAMA2; (+) strand; PAM type: YTN; PAM sequence: TTT
actgacattttatcctgtct

SEQ ID NO: 374726 - DNA, 20 bp, Artificial Sequence
  Description of Artificial Sequence: Synthetic oligonucleotide
  Target: LAMA2; (+) strand; PAM type: YTN; PAM sequence: TTA
ctgacattttatcctgtctt

SEQ ID NO: 374727 - DNA, 20 bp, Artificial Sequence
  Description of Artificial Sequence: Synthetic oligonucleotide
  Target: LAMA2; (+) strand; PAM type: YTN; PAM sequence: CTG
acattttatcctgtcttcca

SEQ ID NO: 374728 - DNA, 20 bp, Artificial Sequence
  Description of Artificial Sequence: Synthetic oligonucleotide
  Target: LAMA2; (+) strand; PAM type: YTN; PAM sequence: TTT
tatcctgtcttccaataacc

SEQ ID NO: 374729 - DNA, 20 bp, Artificial Sequence
  Description of Artificial Sequence: Synthetic oligonucleotide
  Target: LAMA2; (+) strand; PAM type: YTN; PAM sequence: TTT
atcctgtcttccaataaccc

SEQ ID NO: 374730 - DNA, 20 bp, Artificial Sequence
  Description of Artificial Sequence: Synthetic oligonucleotide
  Target: LAMA2; (+) strand; PAM type: YTN; PAM sequence: TTA
tcctgtcttccaataacccc

SEQ ID NO: 374731 - DNA, 20 bp, Artificial Sequence
  Description of Artificial Sequence: Synthetic oligonucleotide
  Target: LAMA2; (+) strand; PAM type: YTN; PAM sequence: CTG
tcttccaataacccccaccc

SEQ ID NO: 374732 - DNA, 20 bp, Artificial Sequence
  Description of Artificial Sequence: Synthetic oligonucleotide
  Target: LAMA2; (+) strand; PAM type: YTN; PAM sequence: CTT
ccaataacccccacccccat

SEQ ID NO: 374733 - DNA, 20 bp, Artificial Sequence
  Description of Artificial Sequence: Synthetic oligonucleotide
  Target: LAMA2; (+) strand; PAM type: YTN; PAM sequence: TTC
caataacccccacccccata

SEQ ID NO: 374734 - DNA, 20 bp, Artificial Sequence
  Description of Artificial Sequence: Synthetic oligonucleotide
  Target: LAMA2; (+) strand; PAM type: YTN; PAM sequence: TTA
gggatattattccactaatt

SEQ ID NO: 374735 - DNA, 20 bp, Artificial Sequence
  Description of Artificial Sequence: Synthetic oligonucleotide
  Target: LAMA2; (+) strand; PAM type: YTN; PAM sequence: TTA
ttccactaattttattatgg

SEQ ID NO: 374736 - DNA, 20 bp, Artificial Sequence
  Description of Artificial Sequence: Synthetic oligonucleotide
  Target: LAMA2; (+) strand; PAM type: YTN; PAM sequence: TTC
cactaattttattatggtaa

SEQ ID NO: 374737 - DNA, 20 bp, Artificial Sequence
  Description of Artificial Sequence: Synthetic oligonucleotide
  Target: LAMA2; (+) strand; PAM type: YTN; PAM sequence: CTA
attttattatggtaatttat

SEQ ID NO: 374738 - DNA, 20 bp, Artificial Sequence
  Description of Artificial Sequence: Synthetic oligonucleotide
  Target: LAMA2; (+) strand; PAM type: YTN; PAM sequence: TTT
tattatggtaatttattgtg

SEQ ID NO: 374739 - DNA, 20 bp, Artificial Sequence
  Description of Artificial Sequence: Synthetic oligonucleotide
  Target: LAMA2; (+) strand; PAM type: YTN; PAM sequence: TTT
attatggtaatttattgtgg

SEQ ID NO: 374740 - DNA, 20 bp, Artificial Sequence
  Description of Artificial Sequence: Synthetic oligonucleotide
  Target: LAMA2; (+) strand; PAM type: YTN; PAM sequence: TTA
ttatggtaatttattgtggg

SEQ ID NO: 374741 - DNA, 20 bp, Artificial Sequence
  Description of Artificial Sequence: Synthetic oligonucleotide
  Target: LAMA2; (+) strand; PAM type: YTN; PAM sequence: TTA
tggtaatttattgtgggatt

SEQ ID NO: 374742 - DNA, 20 bp, Artificial Sequence
  Description of Artificial Sequence: Synthetic oligonucleotide
  Target: LAMA2; (+) strand; PAM type: YTN; PAM sequence: TTT
attgtgggattattttatta

SEQ ID NO: 374743 - DNA, 20 bp, Artificial Sequence
  Description of Artificial Sequence: Synthetic oligonucleotide
  Target: LAMA2; (+) strand; PAM type: YTN; PAM sequence: TTA
ttgtgggattattttattat

SEQ ID NO: 374744 - DNA, 20 bp, Artificial Sequence
  Description of Artificial Sequence: Synthetic oligonucleotide
  Target: LAMA2; (+) strand; PAM type: YTN; PAM sequence: TTG
tgggattattttattatggt

SEQ ID NO: 374745 - DNA, 20 bp, Artificial Sequence
  Description of Artificial Sequence: Synthetic oligonucleotide
  Target: LAMA2; (+) strand; PAM type: YTN; PAM sequence: TTA
ttttattatggtaattaatt

SEQ ID NO: 374746 - DNA, 20 bp, Artificial Sequence
  Description of Artificial Sequence: Synthetic oligonucleotide
  Target: LAMA2; (+) strand; PAM type: YTN; PAM sequence: TTT
tattatggtaattaattatt

SEQ ID NO: 374747 - DNA, 20 bp, Artificial Sequence
  Description of Artificial Sequence: Synthetic oligonucleotide
  Target: LAMA2; (+) strand; PAM type: YTN; PAM sequence: TTT
attatggtaattaattatta

SEQ ID NO: 374748 - DNA, 20 bp, Artificial Sequence
  Description of Artificial Sequence: Synthetic oligonucleotide
  Target: LAMA2; (+) strand; PAM type: YTN; PAM sequence: TTA
ttatggtaattaattattat

SEQ ID NO: 374749 - DNA, 20 bp, Artificial Sequence
  Description of Artificial Sequence: Synthetic oligonucleotide
  Target: LAMA2; (+) strand; PAM type: YTN; PAM sequence: TTA
tggtaattaattattatttt

SEQ ID NO: 374750 - DNA, 20 bp, Artificial Sequence
  Description of Artificial Sequence: Synthetic oligonucleotide
  Target: LAMA2; (+) strand; PAM type: YTN; PAM sequence: TTA
attattattttattatggta

SEQ ID NO: 374751 - DNA, 20 bp, Artificial Sequence
  Description of Artificial Sequence: Synthetic oligonucleotide
  Target: LAMA2; (+) strand; PAM type: YTN; PAM sequence: TTA
ttattttattatggtaatta

SEQ ID NO: 374752 - DNA, 20 bp, Artificial Sequence
  Description of Artificial Sequence: Synthetic oligonucleotide
  Target: LAMA2; (+) strand; PAM type: YTN; PAM sequence: TTA
ttttattatggtaattaatt

SEQ ID NO: 374753 - DNA, 20 bp, Artificial Sequence
  Description of Artificial Sequence: Synthetic oligonucleotide
  Target: LAMA2; (+) strand; PAM type: YTN; PAM sequence: TTT
tattatggtaattaattatt

SEQ ID NO: 374754 - DNA, 20 bp, Artificial Sequence
  Description of Artificial Sequence: Synthetic oligonucleotide
  Target: LAMA2; (+) strand; PAM type: YTN; PAM sequence: TTT
attatggtaattaattattg

SEQ ID NO: 374755 - DNA, 20 bp, Artificial Sequence
  Description of Artificial Sequence: Synthetic oligonucleotide
  Target: LAMA2; (+) strand; PAM type: YTN; PAM sequence: TTA
ttatggtaattaattattgt

SEQ ID NO: 374756 - DNA, 20 bp, Artificial Sequence
  Description of Artificial Sequence: Synthetic oligonucleotide
  Target: LAMA2; (+) strand; PAM type: YTN; PAM sequence: TTA
tggtaattaattattgtaga

SEQ ID NO: 374757 - DNA, 20 bp, Artificial Sequence
  Description of Artificial Sequence: Synthetic oligonucleotide
  Target: LAMA2; (+) strand; PAM type: YTN; PAM sequence: TTA
attattgtagaaaattatta

SEQ ID NO: 374758 - DNA, 20 bp, Artificial Sequence
  Description of Artificial Sequence: Synthetic oligonucleotide
  Target: LAMA2; (+) strand; PAM type: YTN; PAM sequence: TTA
ttgtagaaaattattatggg

SEQ ID NO: 374759 - DNA, 20 bp, Artificial Sequence
  Description of Artificial Sequence: Synthetic oligonucleotide
  Target: LAMA2; (+) strand; PAM type: YTN; PAM sequence: TTG
tagaaaattattatgggatt

SEQ ID NO: 374760 - DNA, 20 bp, Artificial Sequence
  Description of Artificial Sequence: Synthetic oligonucleotide
  Target: LAMA2; (+) strand; PAM type: YTN; PAM sequence: TTA
ttatgggattattttattat

SEQ ID NO: 374761 - DNA, 20 bp, Artificial Sequence
  Description of Artificial Sequence: Synthetic oligonucleotide
  Target: LAMA2; (+) strand; PAM type: YTN; PAM sequence: TTA
tgggattattttattatggt

SEQ ID NO: 374762 - DNA, 20 bp, Artificial Sequence
  Description of Artificial Sequence: Synthetic oligonucleotide
  Target: LAMA2; (+) strand; PAM type: YTN; PAM sequence: TTA
ttttattatggtaatttatt

SEQ ID NO: 374763 - DNA, 20 bp, Artificial Sequence
  Description of Artificial Sequence: Synthetic oligonucleotide
  Target: LAMA2; (+) strand; PAM type: YTN; PAM sequence: TTT
tattatggtaatttattatg

SEQ ID NO: 374764 - DNA, 20 bp, Artificial Sequence
  Description of Artificial Sequence: Synthetic oligonucleotide
  Target: LAMA2; (+) strand; PAM type: YTN; PAM sequence: TTT
attatggtaatttattatgg

SEQ ID NO: 374765 - DNA, 20 bp, Artificial Sequence
  Description of Artificial Sequence: Synthetic oligonucleotide
  Target: LAMA2; (+) strand; PAM type: YTN; PAM sequence: TTA
ttatggtaatttattatggg

SEQ ID NO: 374766 - DNA, 20 bp, Artificial Sequence
  Description of Artificial Sequence: Synthetic oligonucleotide
  Target: LAMA2; (+) strand; PAM type: YTN; PAM sequence: TTA
tggtaatttattatgggatc

SEQ ID NO: 374767 - DNA, 20 bp, Artificial Sequence
  Description of Artificial Sequence: Synthetic oligonucleotide
  Target: LAMA2; (+) strand; PAM type: YTN; PAM sequence: TTT
attatgggatccatggcatg

SEQ ID NO: 374768 - DNA, 20 bp, Artificial Sequence
  Description of Artificial Sequence: Synthetic oligonucleotide
  Target: LAMA2; (+) strand; PAM type: YTN; PAM sequence: TTA
ttatgggatccatggcatga

SEQ ID NO: 374769 - DNA, 20 bp, Artificial Sequence
  Description of Artificial Sequence: Synthetic oligonucleotide
  Target: LAMA2; (+) strand; PAM type: YTN; PAM sequence: TTA
tgggatccatggcatgaagt

SEQ ID NO: 374770 - DNA, 20 bp, Artificial Sequence
  Description of Artificial Sequence: Synthetic oligonucleotide
  Target: LAMA2; (+) strand; PAM type: YTN; PAM sequence: CTT
aagaacataaaaaagaatgt

SEQ ID NO: 374771 - DNA, 20 bp, Artificial Sequence
  Description of Artificial Sequence: Synthetic oligonucleotide
  Target: LAMA2; (+) strand; PAM type: YTN; PAM sequence: TTA
agaacataaaaaagaatgtg

SEQ ID NO: 374772 - DNA, 20 bp, Artificial Sequence
  Description of Artificial Sequence: Synthetic oligonucleotide
  Target: LAMA2; (+) strand; PAM type: YTN; PAM sequence: TTT
tgaccattaccagttttcat

SEQ ID NO: 374773 - DNA, 20 bp, Artificial Sequence
  Description of Artificial Sequence: Synthetic oligonucleotide
  Target: LAMA2; (+) strand; PAM type: YTN; PAM sequence: TTT
gaccattaccagttttcata

SEQ ID NO: 374774 - DNA, 20 bp, Artificial Sequence
  Description of Artificial Sequence: Synthetic oligonucleotide
  Target: LAMA2; (+) strand; PAM type: YTN; PAM sequence: TTG
accattaccagttttcatac

SEQ ID NO: 374775 - DNA, 20 bp, Artificial Sequence
  Description of Artificial Sequence: Synthetic oligonucleotide
  Target: LAMA2; (+) strand; PAM type: YTN; PAM sequence: TTA
ccagttttcatactacttgc

SEQ ID NO: 374776 - DNA, 20 bp, Artificial Sequence
  Description of Artificial Sequence: Synthetic oligonucleotide
  Target: LAMA2; (+) strand; PAM type: YTN; PAM sequence: TTT
tcatactacttgccgtgagt

SEQ ID NO: 374777 - DNA, 20 bp, Artificial Sequence
  Description of Artificial Sequence: Synthetic oligonucleotide
  Target: LAMA2; (+) strand; PAM type: YTN; PAM sequence: TTT
catactacttgccgtgagta

SEQ ID NO: 374778 - DNA, 20 bp, Artificial Sequence
  Description of Artificial Sequence: Synthetic oligonucleotide
  Target: LAMA2; (+) strand; PAM type: YTN; PAM sequence: TTC
atactacttgccgtgagtat

SEQ ID NO: 374779 - DNA, 20 bp, Artificial Sequence
  Description of Artificial Sequence: Synthetic oligonucleotide
  Target: LAMA2; (+) strand; PAM type: YTN; PAM sequence: CTA
cttgccgtgagtatagatgt

SEQ ID NO: 374780 - DNA, 20 bp, Artificial Sequence
  Description of Artificial Sequence: Synthetic oligonucleotide
  Target: LAMA2; (+) strand; PAM type: YTN; PAM sequence: CTT
gccgtgagtatagatgtgat

SEQ ID NO: 374781 - DNA, 20 bp, Artificial Sequence
  Description of Artificial Sequence: Synthetic oligonucleotide
  Target: LAMA2; (+) strand; PAM type: YTN; PAM sequence: TTG
ccgtgagtatagatgtgatt

SEQ ID NO: 374782 - DNA, 20 bp, Artificial Sequence
  Description of Artificial Sequence: Synthetic oligonucleotide
  Target: LAMA2; (+) strand; PAM type: YTN; PAM sequence: TTA
taatttttaatgctctttgc

SEQ ID NO: 374783 - DNA, 20 bp, Artificial Sequence
  Description of Artificial Sequence: Synthetic oligonucleotide
  Target: LAMA2; (+) strand; PAM type: YTN; PAM sequence: TTT
ttaatgctctttgccatata

SEQ ID NO: 374784 - DNA, 20 bp, Artificial Sequence
  Description of Artificial Sequence: Synthetic oligonucleotide
  Target: LAMA2; (+) strand; PAM type: YTN; PAM sequence: TTT
taatgctctttgccatataa

SEQ ID NO: 374785 - DNA, 20 bp, Artificial Sequence
  Description of Artificial Sequence: Synthetic oligonucleotide
  Target: LAMA2; (+) strand; PAM type: YTN; PAM sequence: TTT
aatgctctttgccatataat

SEQ ID NO: 374786 - DNA, 20 bp, Artificial Sequence
  Description of Artificial Sequence: Synthetic oligonucleotide
  Target: LAMA2; (+) strand; PAM type: YTN; PAM sequence: TTA
atgctctttgccatataatc

SEQ ID NO: 374787 - DNA, 20 bp, Artificial Sequence
  Description of Artificial Sequence: Synthetic oligonucleotide
  Target: LAMA2; (+) strand; PAM type: YTN; PAM sequence: CTC
tttgccatataatcacaatt

SEQ ID NO: 374788 - DNA, 20 bp, Artificial Sequence
  Description of Artificial Sequence: Synthetic oligonucleotide
  Target: LAMA2; (+) strand; PAM type: YTN; PAM sequence: CTT
tgccatataatcacaattaa

SEQ ID NO: 374789 - DNA, 20 bp, Artificial Sequence
  Description of Artificial Sequence: Synthetic oligonucleotide
  Target: LAMA2; (+) strand; PAM type: YTN; PAM sequence: TTT
gccatataatcacaattaaa

SEQ ID NO: 374790 - DNA, 20 bp, Artificial Sequence
  Description of Artificial Sequence: Synthetic oligonucleotide
  Target: LAMA2; (+) strand; PAM type: YTN; PAM sequence: TTG
ccatataatcacaattaaaa

SEQ ID NO: 374791 - DNA, 20 bp, Artificial Sequence
  Description of Artificial Sequence: Synthetic oligonucleotide
  Target: LAMA2; (+) strand; PAM type: YTN; PAM sequence: TTA
aaagtataagaagcacattt

SEQ ID NO: 374792 - DNA, 20 bp, Artificial Sequence
  Description of Artificial Sequence: Synthetic oligonucleotide
  Target: LAMA2; (+) strand; PAM type: YTN; PAM sequence: TTT
attacttatttttataattt

SEQ ID NO: 374793 - DNA, 20 bp, Artificial Sequence
  Description of Artificial Sequence: Synthetic oligonucleotide
  Target: LAMA2; (+) strand; PAM type: YTN; PAM sequence: TTA
ttacttatttttataatttt

SEQ ID NO: 374794 - DNA, 20 bp, Artificial Sequence
  Description of Artificial Sequence: Synthetic oligonucleotide
  Target: LAMA2; (+) strand; PAM type: YTN; PAM sequence: TTA
cttatttttataatttttca

SEQ ID NO: 374795 - DNA, 20 bp, Artificial Sequence
  Description of Artificial Sequence: Synthetic oligonucleotide
  Target: LAMA2; (+) strand; PAM type: YTN; PAM sequence: CTT
atttttataatttttcatgg

SEQ ID NO: 374796 - DNA, 20 bp, Artificial Sequence
  Description of Artificial Sequence: Synthetic oligonucleotide
  Target: LAMA2; (+) strand; PAM type: YTN; PAM sequence: TTA
tttttataatttttcatgga

SEQ ID NO: 374797 - DNA, 20 bp, Artificial Sequence
  Description of Artificial Sequence: Synthetic oligonucleotide
  Target: LAMA2; (+) strand; PAM type: YTN; PAM sequence: TTT
ttataatttttcatggatac

SEQ ID NO: 374798 - DNA, 20 bp, Artificial Sequence
  Description of Artificial Sequence: Synthetic oligonucleotide
  Target: LAMA2; (+) strand; PAM type: YTN; PAM sequence: TTT
tataatttttcatggataca

SEQ ID NO: 374799 - DNA, 20 bp, Artificial Sequence
  Description of Artificial Sequence: Synthetic oligonucleotide
  Target: LAMA2; (+) strand; PAM type: YTN; PAM sequence: TTT
ataatttttcatggatacaa

SEQ ID NO: 374800 - DNA, 20 bp, Artificial Sequence
  Description of Artificial Sequence: Synthetic oligonucleotide
  Target: LAMA2; (+) strand; PAM type: YTN; PAM sequence: TTA
taatttttcatggatacaat

SEQ ID NO: 374801 - DNA, 20 bp, Artificial Sequence
  Description of Artificial Sequence: Synthetic oligonucleotide
  Target: LAMA2; (+) strand; PAM type: YTN; PAM sequence: TTT
ttcatggatacaatatcact

SEQ ID NO: 374802 - DNA, 20 bp, Artificial Sequence
  Description of Artificial Sequence: Synthetic oligonucleotide
  Target: LAMA2; (+) strand; PAM type: YTN; PAM sequence: TTT
tcatggatacaatatcactt

SEQ ID NO: 374803 - DNA, 20 bp, Artificial Sequence
  Description of Artificial Sequence: Synthetic oligonucleotide
  Target: LAMA2; (+) strand; PAM type: YTN; PAM sequence: TTT
catggatacaatatcacttc

SEQ ID NO: 374804 - DNA, 20 bp, Artificial Sequence
  Description of Artificial Sequence: Synthetic oligonucleotide
  Target: LAMA2; (+) strand; PAM type: YTN; PAM sequence: TTC
atggatacaatatcacttct

SEQ ID NO: 374805 - DNA, 20 bp, Artificial Sequence
  Description of Artificial Sequence: Synthetic oligonucleotide
  Target: LAMA2; (+) strand; PAM type: YTN; PAM sequence: CTT
ctatgcataagtggtaaaac

SEQ ID NO: 374806 - DNA, 20 bp, Artificial Sequence
  Description of Artificial Sequence: Synthetic oligonucleotide
  Target: LAMA2; (+) strand; PAM type: YTN; PAM sequence: TTC
tatgcataagtggtaaaacc

SEQ ID NO: 374807 - DNA, 20 bp, Artificial Sequence
  Description of Artificial Sequence: Synthetic oligonucleotide
  Target: LAMA2; (+) strand; PAM type: YTN; PAM sequence: CTA
tgcataagtggtaaaacctc

SEQ ID NO: 374808 - DNA, 20 bp, Artificial Sequence
  Description of Artificial Sequence: Synthetic oligonucleotide
  Target: LAMA2; (+) strand; PAM type: YTN; PAM sequence: CTC
aaggaaagaaagttcctgga

SEQ ID NO: 374809 - DNA, 20 bp, Artificial Sequence
  Description of Artificial Sequence: Synthetic oligonucleotide
  Target: LAMA2; (+) strand; PAM type: YTN; PAM sequence: TTC
ctggaaatacattattttgg

SEQ ID NO: 374810 - DNA, 20 bp, Artificial Sequence
  Description of Artificial Sequence: Synthetic oligonucleotide
  Target: LAMA2; (+) strand; PAM type: YTN; PAM sequence: CTG
gaaatacattattttggtta

SEQ ID NO: 374811 - DNA, 20 bp, Artificial Sequence
  Description of Artificial Sequence: Synthetic oligonucleotide
  Target: LAMA2; (+) strand; PAM type: YTN; PAM sequence: TTA
ttttggttacctatagattt

SEQ ID NO: 374812 - DNA, 20 bp, Artificial Sequence
  Description of Artificial Sequence: Synthetic oligonucleotide
  Target: LAMA2; (+) strand; PAM type: YTN; PAM sequence: TTT
tggttacctatagatttgtt

SEQ ID NO: 374813 - DNA, 20 bp, Artificial Sequence
  Description of Artificial Sequence: Synthetic oligonucleotide
  Target: LAMA2; (+) strand; PAM type: YTN; PAM sequence: TTT
ggttacctatagatttgttc

SEQ ID NO: 374814 - DNA, 20 bp, Artificial Sequence
  Description of Artificial Sequence: Synthetic oligonucleotide
  Target: LAMA2; (+) strand; PAM type: YTN; PAM sequence: TTG
gttacctatagatttgttca

SEQ ID NO: 374815 - DNA, 20 bp, Artificial Sequence
  Description of Artificial Sequence: Synthetic oligonucleotide
  Target: LAMA2; (+) strand; PAM type: YTN; PAM sequence: TTA
cctatagatttgttcaagaa

SEQ ID NO: 374816 - DNA, 20 bp, Artificial Sequence
  Description of Artificial Sequence: Synthetic oligonucleotide
  Target: LAMA2; (+) strand; PAM type: YTN; PAM sequence: CTA
tagatttgttcaagaaaagt

SEQ ID NO: 374817 - DNA, 20 bp, Artificial Sequence
  Description of Artificial Sequence: Synthetic oligonucleotide
  Target: LAMA2; (+) strand; PAM type: YTN; PAM sequence: TTT
gttcaagaaaagtacaccac

SEQ ID NO: 374818 - DNA, 20 bp, Artificial Sequence
  Description of Artificial Sequence: Synthetic oligonucleotide
  Target: LAMA2; (+) strand; PAM type: YTN; PAM sequence: TTG
ttcaagaaaagtacaccact

SEQ ID NO: 374819 - DNA, 20 bp, Artificial Sequence
  Description of Artificial Sequence: Synthetic oligonucleotide
  Target: LAMA2; (+) strand; PAM type: YTN; PAM sequence: TTC
aagaaaagtacaccactaca

SEQ ID NO: 374820 - DNA, 20 bp, Artificial Sequence
  Description of Artificial Sequence: Synthetic oligonucleotide
  Target: LAMA2; (+) strand; PAM type: YTN; PAM sequence: CTA
caaagaaatatattttgcat

SEQ ID NO: 374821 - DNA, 20 bp, Artificial Sequence
  Description of Artificial Sequence: Synthetic oligonucleotide
  Target: LAMA2; (+) strand; PAM type: YTN; PAM sequence: TTT
tgcattttaaatttgtgtat

SEQ ID NO: 374822 - DNA, 20 bp, Artificial Sequence
  Description of Artificial Sequence: Synthetic oligonucleotide
  Target: LAMA2; (+) strand; PAM type: YTN; PAM sequence: TTT
gcattttaaatttgtgtata

SEQ ID NO: 374823 - DNA, 20 bp, Artificial Sequence
  Description of Artificial Sequence: Synthetic oligonucleotide
  Target: LAMA2; (+) strand; PAM type: YTN; PAM sequence: TTG
cattttaaatttgtgtatat

SEQ ID NO: 374824 - DNA, 20 bp, Artificial Sequence
  Description of Artificial Sequence: Synthetic oligonucleotide
  Target: LAMA2; (+) strand; PAM type: YTN; PAM sequence: TTT
taaatttgtgtatatcgttg

SEQ ID NO: 374825 - DNA, 20 bp, Artificial Sequence
  Description of Artificial Sequence: Synthetic oligonucleotide
  Target: LAMA2; (+) strand; PAM type: YTN; PAM sequence: TTT
aaatttgtgtatatcgttgg

SEQ ID NO: 374826 - DNA, 20 bp, Artificial Sequence
  Description of Artificial Sequence: Synthetic oligonucleotide
  Target: LAMA2; (+) strand; PAM type: YTN; PAM sequence: TTA
aatttgtgtatatcgttggt

SEQ ID NO: 374827 - DNA, 20 bp, Artificial Sequence
  Description of Artificial Sequence: Synthetic oligonucleotide
  Target: LAMA2; (+) strand; PAM type: YTN; PAM sequence: TTT
gtgtatatcgttggtgtcat

SEQ ID NO: 374828 - DNA, 20 bp, Artificial Sequence
  Description of Artificial Sequence: Synthetic oligonucleotide
  Target: LAMA2; (+) strand; PAM type: YTN; PAM sequence: TTG
tgtatatcgttggtgtcata

SEQ ID NO: 374829 - DNA, 20 bp, Artificial Sequence
  Description of Artificial Sequence: Synthetic oligonucleotide
  Target: LAMA2; (+) strand; PAM type: YTN; PAM sequence: TTG
gtgtcatatttttccattaa

SEQ ID NO: 374830 - DNA, 20 bp, Artificial Sequence
  Description of Artificial Sequence: Synthetic oligonucleotide
  Target: LAMA2; (+) strand; PAM type: YTN; PAM sequence: TTT
ttccattaaaatgacacttt

SEQ ID NO: 374831 - DNA, 20 bp, Artificial Sequence
  Description of Artificial Sequence: Synthetic oligonucleotide
  Target: LAMA2; (+) strand; PAM type: YTN; PAM sequence: TTT
tccattaaaatgacacttta

SEQ ID NO: 374832 - DNA, 20 bp, Artificial Sequence
  Description of Artificial Sequence: Synthetic oligonucleotide
  Target: LAMA2; (+) strand; PAM type: YTN; PAM sequence: TTT
ccattaaaatgacactttag

SEQ ID NO: 374833 - DNA, 20 bp, Artificial Sequence
  Description of Artificial Sequence: Synthetic oligonucleotide
  Target: LAMA2; (+) strand; PAM type: YTN; PAM sequence: TTC
cattaaaatgacactttagc

SEQ ID NO: 374834 - DNA, 20 bp, Artificial Sequence
  Description of Artificial Sequence: Synthetic oligonucleotide
  Target: LAMA2; (+) strand; PAM type: YTN; PAM sequence: TTA
aaatgacactttagcaaaac

SEQ ID NO: 374835 - DNA, 20 bp, Artificial Sequence
  Description of Artificial Sequence: Synthetic oligonucleotide
  Target: LAMA2; (+) strand; PAM type: YTN; PAM sequence: CTT
tagcaaaactttatactgct

SEQ ID NO: 374836 - DNA, 20 bp, Artificial Sequence
  Description of Artificial Sequence: Synthetic oligonucleotide
  Target: LAMA2; (+) strand; PAM type: YTN; PAM sequence: TTT
agcaaaactttatactgctt

SEQ ID NO: 374837 - DNA, 20 bp, Artificial Sequence
  Description of Artificial Sequence: Synthetic oligonucleotide
  Target: LAMA2; (+) strand; PAM type: YTN; PAM sequence: TTA
gcaaaactttatactgcttt

SEQ ID NO: 374838 - DNA, 20 bp, Artificial Sequence
  Description of Artificial Sequence: Synthetic oligonucleotide
  Target: LAMA2; (+) strand; PAM type: YTN; PAM sequence: CTT
tatactgctttgttgttttt

SEQ ID NO: 374839 - DNA, 20 bp, Artificial Sequence
  Description of Artificial Sequence: Synthetic oligonucleotide
  Target: LAMA2; (+) strand; PAM type: YTN; PAM sequence: TTT
atactgctttgttgttttta

SEQ ID NO: 374840 - DNA, 20 bp, Artificial Sequence
  Description of Artificial Sequence: Synthetic oligonucleotide
  Target: LAMA2; (+) strand; PAM type: YTN; PAM sequence: TTA
tactgctttgttgtttttac

SEQ ID NO: 374841 - DNA, 20 bp, Artificial Sequence
  Description of Artificial Sequence: Synthetic oligonucleotide
  Target: LAMA2; (+) strand; PAM type: YTN; PAM sequence: CTG
ctttgttgtttttacgataa

SEQ ID NO: 374842 - DNA, 20 bp, Artificial Sequence
  Description of Artificial Sequence: Synthetic oligonucleotide
  Target: LAMA2; (+) strand; PAM type: YTN; PAM sequence: CTT
tgttgtttttacgataacat

SEQ ID NO: 374843 - DNA, 20 bp, Artificial Sequence
  Description of Artificial Sequence: Synthetic oligonucleotide
  Target: LAMA2; (+) strand; PAM type: YTN; PAM sequence: TTT
gttgtttttacgataacatt

SEQ ID NO: 374844 - DNA, 20 bp, Artificial Sequence
  Description of Artificial Sequence: Synthetic oligonucleotide
  Target: LAMA2; (+) strand; PAM type: YTN; PAM sequence: TTG
ttgtttttacgataacatta

SEQ ID NO: 374845 - DNA, 20 bp, Artificial Sequence
  Description of Artificial Sequence: Synthetic oligonucleotide
  Target: LAMA2; (+) strand; PAM type: YTN; PAM sequence: TTG
tttttacgataacattaatt

SEQ ID NO: 374846 - DNA, 20 bp, Artificial Sequence
  Description of Artificial Sequence: Synthetic oligonucleotide
  Target: LAMA2; (+) strand; PAM type: YTN; PAM sequence: TTT
ttacgataacattaattaat

SEQ ID NO: 374847 - DNA, 20 bp, Artificial Sequence
  Description of Artificial Sequence: Synthetic oligonucleotide
  Target: LAMA2; (+) strand; PAM type: YTN; PAM sequence: TTT
tacgataacattaattaatt

SEQ ID NO: 374848 - DNA, 20 bp, Artificial Sequence
  Description of Artificial Sequence: Synthetic oligonucleotide
  Target: LAMA2; (+) strand; PAM type: YTN; PAM sequence: TTT
acgataacattaattaatta

SEQ ID NO: 374849 - DNA, 20 bp, Artificial Sequence
  Description of Artificial Sequence: Synthetic oligonucleotide
  Target: LAMA2; (+) strand; PAM type: YTN; PAM sequence: TTA
cgataacattaattaattac

SEQ ID NO: 374850 - DNA, 20 bp, Artificial Sequence
  Description of Artificial Sequence: Synthetic oligonucleotide
  Target: LAMA2; (+) strand; PAM type: YTN; PAM sequence: TTA
attaattaccatcatattta

SEQ ID NO: 374851 - DNA, 20 bp, Artificial Sequence
  Description of Artificial Sequence: Synthetic oligonucleotide
  Target: LAMA2; (+) strand; PAM type: YTN; PAM sequence: TTA
attaccatcatatttatggt

SEQ ID NO: 374852 - DNA, 20 bp, Artificial Sequence
  Description of Artificial Sequence: Synthetic oligonucleotide
  Target: LAMA2; (+) strand; PAM type: YTN; PAM sequence: TTA
ccatcatatttatggtaaat

SEQ ID NO: 374853 - DNA, 20 bp, Artificial Sequence
  Description of Artificial Sequence: Synthetic oligonucleotide
  Target: LAMA2; (+) strand; PAM type: YTN; PAM sequence: TTT
atggtaaatttaattttgta

SEQ ID NO: 374854 - DNA, 20 bp, Artificial Sequence
  Description of Artificial Sequence: Synthetic oligonucleotide
  Target: LAMA2; (+) strand; PAM type: YTN; PAM sequence: TTA
tggtaaatttaattttgtag

SEQ ID NO: 374855 - DNA, 20 bp, Artificial Sequence
  Description of Artificial Sequence: Synthetic oligonucleotide
  Target: LAMA2; (+) strand; PAM type: YTN; PAM sequence: TTT
aattttgtagtttacactcc

SEQ ID NO: 374856 - DNA, 20 bp, Artificial Sequence
  Description of Artificial Sequence: Synthetic oligonucleotide
  Target: LAMA2; (+) strand; PAM type: YTN; PAM sequence: TTA
attttgtagtttacactcca

SEQ ID NO: 374857 - DNA, 20 bp, Artificial Sequence
  Description of Artificial Sequence: Synthetic oligonucleotide
  Target: LAMA2; (+) strand; PAM type: YTN; PAM sequence: TTT
tgtagtttacactccaagaa

SEQ ID NO: 374858 - DNA, 20 bp, Artificial Sequence
  Description of Artificial Sequence: Synthetic oligonucleotide
  Target: LAMA2; (+) strand; PAM type: YTN; PAM sequence: TTT
gtagtttacactccaagaaa

SEQ ID NO: 374859 - DNA, 20 bp, Artificial Sequence
  Description of Artificial Sequence: Synthetic oligonucleotide
  Target: LAMA2; (+) strand; PAM type: YTN; PAM sequence: TTG
tagtttacactccaagaaaa

SEQ ID NO: 374860 - DNA, 20 bp, Artificial Sequence
  Description of Artificial Sequence: Synthetic oligonucleotide
  Target: LAMA2; (+) strand; PAM type: YTN; PAM sequence: TTT
acactccaagaaaaagtgac

SEQ ID NO: 374861 - DNA, 20 bp, Artificial Sequence
  Description of Artificial Sequence: Synthetic oligonucleotide
  Target: LAMA2; (+) strand; PAM type: YTN; PAM sequence: TTA
cactccaagaaaaagtgact

SEQ ID NO: 374862 - DNA, 20 bp, Artificial Sequence
  Description of Artificial Sequence: Synthetic oligonucleotide
  Target: LAMA2; (+) strand; PAM type: YTN; PAM sequence: CTC
caagaaaaagtgactcctaa

SEQ ID NO: 374863 - DNA, 20 bp, Artificial Sequence
  Description of Artificial Sequence: Synthetic oligonucleotide
  Target: LAMA2; (+) strand; PAM type: YTN; PAM sequence: CTC
ctaaagtctaaataatttga

SEQ ID NO: 374864 - DNA, 20 bp, Artificial Sequence
  Description of Artificial Sequence: Synthetic oligonucleotide
  Target: LAMA2; (+) strand; PAM type: YTN; PAM sequence: CTA
aagtctaaataatttgatat

SEQ ID NO: 374865 - DNA, 20 bp, Artificial Sequence
  Description of Artificial Sequence: Synthetic oligonucleotide
  Target: LAMA2; (+) strand; PAM type: YTN; PAM sequence: CTA
aataatttgatattttaaaa

SEQ ID NO: 374866 - DNA, 20 bp, Artificial Sequence
  Description of Artificial Sequence: Synthetic oligonucleotide
  Target: LAMA2; (+) strand; PAM type: YTN; PAM sequence: TTT
gatattttaaaaatgtatga

SEQ ID NO: 374867 - DNA, 20 bp, Artificial Sequence
  Description of Artificial Sequence: Synthetic oligonucleotide
  Target: LAMA2; (+) strand; PAM type: YTN; PAM sequence: TTG
atattttaaaaatgtatgat

SEQ ID NO: 374868 - DNA, 20 bp, Artificial Sequence
  Description of Artificial Sequence: Synthetic oligonucleotide
  Target: LAMA2; (+) strand; PAM type: YTN; PAM sequence: TTT
taaaaatgtatgatatgcat

SEQ ID NO: 374869 - DNA, 20 bp, Artificial Sequence
  Description of Artificial Sequence: Synthetic oligonucleotide
  Target: LAMA2; (+) strand; PAM type: YTN; PAM sequence: TTT
aaaaatgtatgatatgcata

SEQ ID NO: 374870 - DNA, 20 bp, Artificial Sequence
  Description of Artificial Sequence: Synthetic oligonucleotide
  Target: LAMA2; (+) strand; PAM type: YTN; PAM sequence: TTA
aaaatgtatgatatgcataa

SEQ ID NO: 374871 - DNA, 20 bp, Artificial Sequence
  Description of Artificial Sequence: Synthetic oligonucleotide
  Target: LAMA2; (+) strand; PAM type: YTN; PAM sequence: CTT
tcataaaataataaaagtat

SEQ ID NO: 374872 - DNA, 20 bp, Artificial Sequence
  Description of Artificial Sequence: Synthetic oligonucleotide
  Target: LAMA2; (+) strand; PAM type: YTN; PAM sequence: TTT
cataaaataataaaagtata

SEQ ID NO: 374873 - DNA, 20 bp, Artificial Sequence
  Description of Artificial Sequence: Synthetic oligonucleotide
  Target: LAMA2; (+) strand; PAM type: YTN; PAM sequence: TTC
ataaaataataaaagtatat

SEQ ID NO: 374874 - DNA, 20 bp, Artificial Sequence
  Description of Artificial Sequence: Synthetic oligonucleotide
  Target: LAMA2; (+) strand; PAM type: YTN; PAM sequence: TTC
gataaatcagatgaaaatgg

SEQ ID NO: 374875 - DNA, 20 bp, Artificial Sequence
  Description of Artificial Sequence: Synthetic oligonucleotide
  Target: LAMA2; (+) strand; PAM type: YTN; PAM sequence: TTT
aaaggaaaaattttcagcct

SEQ ID NO: 374876 - DNA, 20 bp, Artificial Sequence
  Description of Artificial Sequence: Synthetic oligonucleotide
  Target: LAMA2; (+) strand; PAM type: YTN; PAM sequence: TTA
aaggaaaaattttcagcctt

SEQ ID NO: 374877 - DNA, 20 bp, Artificial Sequence
  Description of Artificial Sequence: Synthetic oligonucleotide
  Target: LAMA2; (+) strand; PAM type: YTN; PAM sequence: TTT
tcagcctttccttgtatttc

SEQ ID NO: 374878 - DNA, 20 bp, Artificial Sequence
  Description of Artificial Sequence: Synthetic oligonucleotide
  Target: LAMA2; (+) strand; PAM type: YTN; PAM sequence: TTT
cagcctttccttgtatttca

SEQ ID NO: 374879 - DNA, 20 bp, Artificial Sequence
  Description of Artificial Sequence: Synthetic oligonucleotide
  Target: LAMA2; (+) strand; PAM type: YTN; PAM sequence: TTC
agcctttccttgtatttcag

SEQ ID NO: 374880 - DNA, 20 bp, Artificial Sequence
  Description of Artificial Sequence: Synthetic oligonucleotide
  Target: LAMA2; (+) strand; PAM type: YTN; PAM sequence: CTT
tccttgtatttcagctatag

SEQ ID NO: 374881 - DNA, 20 bp, Artificial Sequence
  Description of Artificial Sequence: Synthetic oligonucleotide
  Target: LAMA2; (+) strand; PAM type: YTN; PAM sequence: TTT
ccttgtatttcagctataga

SEQ ID NO: 374882 - DNA, 20 bp, Artificial Sequence
  Description of Artificial Sequence: Synthetic oligonucleotide
  Target: LAMA2; (+) strand; PAM type: YTN; PAM sequence: TTC
cttgtatttcagctatagac

SEQ ID NO: 374883 - DNA, 20 bp, Artificial Sequence
  Description of Artificial Sequence: Synthetic oligonucleotide
  Target: LAMA2; (+) strand; PAM type: YTN; PAM sequence: CTT
gtatttcagctatagactat

SEQ ID NO: 374884 - DNA, 20 bp, Artificial Sequence
  Description of Artificial Sequence: Synthetic oligonucleotide
  Target: LAMA2; (+) strand; PAM type: YTN; PAM sequence: TTG
tatttcagctatagactatc

SEQ ID NO: 374885 - DNA, 20 bp, Artificial Sequence
  Description of Artificial Sequence: Synthetic oligonucleotide
  Target: LAMA2; (+) strand; PAM type: YTN; PAM sequence: TTT
cagctatagactatccgtag

SEQ ID NO: 374886 - DNA, 20 bp, Artificial Sequence
  Description of Artificial Sequence: Synthetic oligonucleotide
  Target: LAMA2; (+) strand; PAM type: YTN; PAM sequence: TTC
agctatagactatccgtagg

SEQ ID NO: 374887 - DNA, 20 bp, Artificial Sequence
  Description of Artificial Sequence: Synthetic oligonucleotide
  Target: LAMA2; (+) strand; PAM type: YTN; PAM sequence: CTA
tagactatccgtaggctctt

SEQ ID NO: 374888 - DNA, 20 bp, Artificial Sequence
  Description of Artificial Sequence: Synthetic oligonucleotide
  Target: LAMA2; (+) strand; PAM type: YTN; PAM sequence: CTA
tccgtaggctctttcagttt

SEQ ID NO: 374889 - DNA, 20 bp, Artificial Sequence
  Description of Artificial Sequence: Synthetic oligonucleotide
  Target: LAMA2; (+) strand; PAM type: YTN; PAM sequence: CTC
tttcagtttctcaatggccc

SEQ ID NO: 374890 - DNA, 20 bp, Artificial Sequence
  Description of Artificial Sequence: Synthetic oligonucleotide
  Target: LAMA2; (+) strand; PAM type: YTN; PAM sequence: CTT
tcagtttctcaatggccctt

SEQ ID NO: 374891 - DNA, 20 bp, Artificial Sequence
  Description of Artificial Sequence: Synthetic oligonucleotide
  Target: LAMA2; (+) strand; PAM type: YTN; PAM sequence: TTT
cagtttctcaatggccctta

SEQ ID NO: 374892 - DNA, 20 bp, Artificial Sequence
  Description of Artificial Sequence: Synthetic oligonucleotide
  Target: LAMA2; (+) strand; PAM type: YTN; PAM sequence: TTC
agtttctcaatggcccttac

SEQ ID NO: 374893 - DNA, 20 bp, Artificial Sequence
  Description of Artificial Sequence: Synthetic oligonucleotide
  Target: LAMA2; (+) strand; PAM type: YTN; PAM sequence: TTT
ctcaatggcccttactctag

SEQ ID NO: 374894 - DNA, 20 bp, Artificial Sequence
  Description of Artificial Sequence: Synthetic oligonucleotide
  Target: LAMA2; (+) strand; PAM type: YTN; PAM sequence: TTC
tcaatggcccttactctagt

SEQ ID NO: 374895 - DNA, 20 bp, Artificial Sequence
  Description of Artificial Sequence: Synthetic oligonucleotide
  Target: LAMA2; (+) strand; PAM type: YTN; PAM sequence: CTC
aatggcccttactctagtat

SEQ ID NO: 374896 - DNA, 20 bp, Artificial Sequence
  Description of Artificial Sequence: Synthetic oligonucleotide
  Target: LAMA2; (+) strand; PAM type: YTN; PAM sequence: CTT
actctagtatccccttggca

SEQ ID NO: 374897 - DNA, 20 bp, Artificial Sequence
  Description of Artificial Sequence: Synthetic oligonucleotide
  Target: LAMA2; (+) strand; PAM type: YTN; PAM sequence: TTA
ctctagtatccccttggcag

SEQ ID NO: 374898 - DNA, 20 bp, Artificial Sequence
  Description of Artificial Sequence: Synthetic oligonucleotide
  Target: LAMA2; (+) strand; PAM type: YTN; PAM sequence: CTC
tagtatccccttggcagaca

SEQ ID NO: 374899 - DNA, 20 bp, Artificial Sequence
  Description of Artificial Sequence: Synthetic oligonucleotide
  Target: LAMA2; (+) strand; PAM type: YTN; PAM sequence: CTA
gtatccccttggcagacact

SEQ ID NO: 374900 - DNA, 20 bp, Artificial Sequence
  Description of Artificial Sequence: Synthetic oligonucleotide
  Target: LAMA2; (+) strand; PAM type: YTN; PAM sequence: CTT
ggcagacactgaagacaaac

SEQ ID NO: 374901 - DNA, 20 bp, Artificial Sequence
  Description of Artificial Sequence: Synthetic oligonucleotide
  Target: LAMA2; (+) strand; PAM type: YTN; PAM sequence: TTG
gcagacactgaagacaaact

SEQ ID NO: 374902 - DNA, 20 bp, Artificial Sequence
  Description of Artificial Sequence: Synthetic oligonucleotide
  Target: LAMA2; (+) strand; PAM type: YTN; PAM sequence: CTG
aagacaaactttgctggaag

SEQ ID NO: 374903 - DNA, 20 bp, Artificial Sequence
  Description of Artificial Sequence: Synthetic oligonucleotide
  Target: LAMA2; (+) strand; PAM type: YTN; PAM sequence: CTT
tgctggaagataaattaagc

SEQ ID NO: 374904 - DNA, 20 bp, Artificial Sequence
  Description of Artificial Sequence: Synthetic oligonucleotide
  Target: LAMA2; (+) strand; PAM type: YTN; PAM sequence: TTT
gctggaagataaattaagca

SEQ ID NO: 374905 - DNA, 20 bp, Artificial Sequence
  Description of Artificial Sequence: Synthetic oligonucleotide
  Target: LAMA2; (+) strand; PAM type: YTN; PAM sequence: TTG
ctggaagataaattaagcag

SEQ ID NO: 374906 - DNA, 20 bp, Artificial Sequence
  Description of Artificial Sequence: Synthetic oligonucleotide
  Target: LAMA2; (+) strand; PAM type: YTN; PAM sequence: CTG
gaagataaattaagcagttt

SEQ ID NO: 374907 - DNA, 20 bp, Artificial Sequence
  Description of Artificial Sequence: Synthetic oligonucleotide
  Target: LAMA2; (+) strand; PAM type: YTN; PAM sequence: TTA
agcagtttttagaaaagcag

SEQ ID NO: 374908 - DNA, 20 bp, Artificial Sequence
  Description of Artificial Sequence: Synthetic oligonucleotide
  Target: LAMA2; (+) strand; PAM type: YTN; PAM sequence: TTT
ttagaaaagcagttcttttg

SEQ ID NO: 374909 - DNA, 20 bp, Artificial Sequence
  Description of Artificial Sequence: Synthetic oligonucleotide
  Target: LAMA2; (+) strand; PAM type: YTN; PAM sequence: TTT
tagaaaagcagttcttttgt

SEQ ID NO: 374910 - DNA, 20 bp, Artificial Sequence
  Description of Artificial Sequence: Synthetic oligonucleotide
  Target: LAMA2; (+) strand; PAM type: YTN; PAM sequence: TTT
agaaaagcagttcttttgtt

SEQ ID NO: 374911 - DNA, 20 bp, Artificial Sequence
  Description of Artificial Sequence: Synthetic oligonucleotide
  Target: LAMA2; (+) strand; PAM type: YTN; PAM sequence: TTA
gaaaagcagttcttttgttt

SEQ ID NO: 374912 - DNA, 20 bp, Artificial Sequence
  Description of Artificial Sequence: Synthetic oligonucleotide
  Target: LAMA2; (+) strand; PAM type: YTN; PAM sequence: TTC
ttttgtttgtttatttgttt

SEQ ID NO: 374913 - DNA, 20 bp, Artificial Sequence
  Description of Artificial Sequence: Synthetic oligonucleotide
  Target: LAMA2; (+) strand; PAM type: YTN; PAM sequence: CTT
ttgtttgtttatttgtttgt

SEQ ID NO: 374914 - DNA, 20 bp, Artificial Sequence
  Description of Artificial Sequence: Synthetic oligonucleotide
  Target: LAMA2; (+) strand; PAM type: YTN; PAM sequence: TTT
tgtttgtttatttgtttgtt

SEQ ID NO: 374915 - DNA, 20 bp, Artificial Sequence
  Description of Artificial Sequence: Synthetic oligonucleotide
  Target: LAMA2; (+) strand; PAM type: YTN; PAM sequence: TTT
gtttgtttatttgtttgttt

SEQ ID NO: 374916 - DNA, 20 bp, Artificial Sequence
  Description of Artificial Sequence: Synthetic oligonucleotide
  Target: LAMA2; (+) strand; PAM type: YTN; PAM sequence: TTG
tttgtttatttgtttgtttt

SEQ ID NO: 374917 - DNA, 20 bp, Artificial Sequence
  Description of Artificial Sequence: Synthetic oligonucleotide
  Target: LAMA2; (+) strand; PAM type: YTN; PAM sequence: TTT
gtttatttgtttgtttttta

SEQ ID NO: 374918 - DNA, 20 bp, Artificial Sequence
  Description of Artificial Sequence: Synthetic oligonucleotide
  Target: LAMA2; (+) strand; PAM type: YTN; PAM sequence: TTG
tttatttgtttgttttttaa

SEQ ID NO: 374919 - DNA, 20 bp, Artificial Sequence
  Description of Artificial Sequence: Synthetic oligonucleotide
  Target: LAMA2; (+) strand; PAM type: YTN; PAM sequence: TTT
atttgtttgttttttaaaag

SEQ ID NO: 374920 - DNA, 20 bp, Artificial Sequence
  Description of Artificial Sequence: Synthetic oligonucleotide
  Target: LAMA2; (+) strand; PAM type: YTN; PAM sequence: TTA
tttgtttgttttttaaaagg

SEQ ID NO: 374921 - DNA, 20 bp, Artificial Sequence
  Description of Artificial Sequence: Synthetic oligonucleotide
  Target: LAMA2; (+) strand; PAM type: YTN; PAM sequence: TTT
gtttgttttttaaaaggaga

SEQ ID NO: 374922 - DNA, 20 bp, Artificial Sequence
  Description of Artificial Sequence: Synthetic oligonucleotide
  Target: LAMA2; (+) strand; PAM type: YTN; PAM sequence: TTG
tttgttttttaaaaggagaa

SEQ ID NO: 374923 - DNA, 20 bp, Artificial Sequence
  Description of Artificial Sequence: Synthetic oligonucleotide
  Target: LAMA2; (+) strand; PAM type: YTN; PAM sequence: TTT
gttttttaaaaggagaacct

SEQ ID NO: 374924 - DNA, 20 bp, Artificial Sequence
  Description of Artificial Sequence: Synthetic oligonucleotide
  Target: LAMA2; (+) strand; PAM type: YTN; PAM sequence: TTG
ttttttaaaaggagaaccta

SEQ ID NO: 374925 - DNA, 20 bp, Artificial Sequence
  Description of Artificial Sequence: Synthetic oligonucleotide
  Target: LAMA2; (+) strand; PAM type: YTN; PAM sequence: TTT
tttaaaaggagaacctagag

SEQ ID NO: 374926 - DNA, 20 bp, Artificial Sequence
  Description of Artificial Sequence: Synthetic oligonucleotide
  Target: LAMA2; (+) strand; PAM type: YTN; PAM sequence: TTT
ttaaaaggagaacctagagc

SEQ ID NO: 374927 - DNA, 20 bp, Artificial Sequence
  Description of Artificial Sequence: Synthetic oligonucleotide
  Target: LAMA2; (+) strand; PAM type: YTN; PAM sequence: TTT
taaaaggagaacctagagcc

SEQ ID NO: 374928 - DNA, 20 bp, Artificial Sequence
  Description of Artificial Sequence: Synthetic oligonucleotide
  Target: LAMA2; (+) strand; PAM type: YTN; PAM sequence: TTT
aaaaggagaacctagagcca

SEQ ID NO: 374929 - DNA, 20 bp, Artificial Sequence
  Description of Artificial Sequence: Synthetic oligonucleotide
  Target: LAMA2; (+) strand; PAM type: YTN; PAM sequence: TTA
aaaggagaacctagagccag

SEQ ID NO: 374930 - DNA, 20 bp, Artificial Sequence
  Description of Artificial Sequence: Synthetic oligonucleotide
  Target: LAMA2; (+) strand; PAM type: YTN; PAM sequence: CTA
gagccaggagaataaaatat

SEQ ID NO: 374931 - DNA, 20 bp, Artificial Sequence
  Description of Artificial Sequence: Synthetic oligonucleotide
  Target: LAMA2; (+) strand; PAM type: YTN; PAM sequence: TTA
gcataggctgatagagtacc

SEQ ID NO: 374932 - DNA, 20 bp, Artificial Sequence
  Description of Artificial Sequence: Synthetic oligonucleotide
  Target: LAMA2; (+) strand; PAM type: YTN; PAM sequence: CTG
atagagtacctgtttatagc

SEQ ID NO: 374933 - DNA, 20 bp, Artificial Sequence
  Description of Artificial Sequence: Synthetic oligonucleotide
  Target: LAMA2; (+) strand; PAM type: YTN; PAM sequence: CTG
tttatagcttaattttaggt

SEQ ID NO: 374934 - DNA, 20 bp, Artificial Sequence
  Description of Artificial Sequence: Synthetic oligonucleotide
  Target: LAMA2; (+) strand; PAM type: YTN; PAM sequence: TTT
atagcttaattttaggttgt

SEQ ID NO: 374935 - DNA, 20 bp, Artificial Sequence
  Description of Artificial Sequence: Synthetic oligonucleotide
  Target: LAMA2; (+) strand; PAM type: YTN; PAM sequence: TTA
tagcttaattttaggttgtg

SEQ ID NO: 374936 - DNA, 20 bp, Artificial Sequence
  Description of Artificial Sequence: Synthetic oligonucleotide
  Target: LAMA2; (+) strand; PAM type: YTN; PAM sequence: CTT
aattttaggttgtgttcaaa

SEQ ID NO: 374937 - DNA, 20 bp, Artificial Sequence
  Description of Artificial Sequence: Synthetic oligonucleotide
  Target: LAMA2; (+) strand; PAM type: YTN; PAM sequence: TTA
attttaggttgtgttcaaat

SEQ ID NO: 374938 - DNA, 20 bp, Artificial Sequence
  Description of Artificial Sequence: Synthetic oligonucleotide
  Target: LAMA2; (+) strand; PAM type: YTN; PAM sequence: TTT
taggttgtgttcaaatcaaa

SEQ ID NO: 374939 - DNA, 20 bp, Artificial Sequence
  Description of Artificial Sequence: Synthetic oligonucleotide
  Target: LAMA2; (+) strand; PAM type: YTN; PAM sequence: TTT
aggttgtgttcaaatcaaaa

SEQ ID NO: 374940 - DNA, 20 bp, Artificial Sequence
  Description of Artificial Sequence: Synthetic oligonucleotide
  Target: LAMA2; (+) strand; PAM type: YTN; PAM sequence: TTA
ggttgtgttcaaatcaaaat

SEQ ID NO: 374941 - DNA, 20 bp, Artificial Sequence
  Description of Artificial Sequence: Synthetic oligonucleotide
  Target: LAMA2; (+) strand; PAM type: YTN; PAM sequence: TTG
tgttcaaatcaaaatattca

SEQ ID NO: 374942 - DNA, 20 bp, Artificial Sequence
  Description of Artificial Sequence: Synthetic oligonucleotide
  Target: LAMA2; (+) strand; PAM type: YTN; PAM sequence: TTC
aaatcaaaatattcagaaat

SEQ ID NO: 374943 - DNA, 20 bp, Artificial Sequence
  Description of Artificial Sequence: Synthetic oligonucleotide
  Target: LAMA2; (+) strand; PAM type: YTN; PAM sequence: TTC
agaaatttaacaaaatcatc

SEQ ID NO: 374944 - DNA, 20 bp, Artificial Sequence
  Description of Artificial Sequence: Synthetic oligonucleotide
  Target: LAMA2; (+) strand; PAM type: YTN; PAM sequence: TTT
aacaaaatcatctatgagta

SEQ ID NO: 374945 - DNA, 20 bp, Artificial Sequence
  Description of Artificial Sequence: Synthetic oligonucleotide
  Target: LAMA2; (+) strand; PAM type: YTN; PAM sequence: TTA
acaaaatcatctatgagtag

SEQ ID NO: 374946 - DNA, 20 bp, Artificial Sequence
  Description of Artificial Sequence: Synthetic oligonucleotide
  Target: LAMA2; (+) strand; PAM type: YTN; PAM sequence: CTA
tgagtagcctaaattcccat

SEQ ID NO: 374947 - DNA, 20 bp, Artificial Sequence
  Description of Artificial Sequence: Synthetic oligonucleotide
  Target: LAMA2; (+) strand; PAM type: YTN; PAM sequence: CTA
aattcccatgtcatctcctc

SEQ ID NO: 374948 - DNA, 20 bp, Artificial Sequence
  Description of Artificial Sequence: Synthetic oligonucleotide
  Target: LAMA2; (+) strand; PAM type: YTN; PAM sequence: TTC
ccatgtcatctcctccttgt

SEQ ID NO: 374949 - DNA, 20 bp, Artificial Sequence
  Description of Artificial Sequence: Synthetic oligonucleotide
  Target: LAMA2; (+) strand; PAM type: YTN; PAM sequence: CTC
ctccttgtatttttattctg

SEQ ID NO: 374950 - DNA, 20 bp, Artificial Sequence
  Description of Artificial Sequence: Synthetic oligonucleotide
  Target: LAMA2; (+) strand; PAM type: YTN; PAM sequence: CTC
cttgtatttttattctgata

SEQ ID NO: 374951 - DNA, 20 bp, Artificial Sequence
  Description of Artificial Sequence: Synthetic oligonucleotide
  Target: LAMA2; (+) strand; PAM type: YTN; PAM sequence: CTT
gtatttttattctgatataa

SEQ ID NO: 374952 - DNA, 20 bp, Artificial Sequence
  Description of Artificial Sequence: Synthetic oligonucleotide
  Target: LAMA2; (+) strand; PAM type: YTN; PAM sequence: TTG
tatttttattctgatataaa

SEQ ID NO: 374953 - DNA, 20 bp, Artificial Sequence
  Description of Artificial Sequence: Synthetic oligonucleotide
  Target: LAMA2; (+) strand; PAM type: YTN; PAM sequence: TTT
ttattctgatataaatgcaa

SEQ ID NO: 374954 - DNA, 20 bp, Artificial Sequence
  Description of Artificial Sequence: Synthetic oligonucleotide
  Target: LAMA2; (+) strand; PAM type: YTN; PAM sequence: TTT
tattctgatataaatgcaat

SEQ ID NO: 374955 - DNA, 20 bp, Artificial Sequence
  Description of Artificial Sequence: Synthetic oligonucleotide
  Target: LAMA2; (+) strand; PAM type: YTN; PAM sequence: TTT
attctgatataaatgcaatt

SEQ ID NO: 374956 - DNA, 20 bp, Artificial Sequence
  Description of Artificial Sequence: Synthetic oligonucleotide
  Target: LAMA2; (+) strand; PAM type: YTN; PAM sequence: TTA
ttctgatataaatgcaatta

SEQ ID NO: 374957 - DNA, 20 bp, Artificial Sequence
  Description of Artificial Sequence: Synthetic oligonucleotide
  Target: LAMA2; (+) strand; PAM type: YTN; PAM sequence: TTC
tgatataaatgcaattatat

SEQ ID NO: 374958 - DNA, 20 bp, Artificial Sequence
  Description of Artificial Sequence: Synthetic oligonucleotide
  Target: LAMA2; (+) strand; PAM type: YTN; PAM sequence: CTG
atataaatgcaattatatgt

SEQ ID NO: 374959 - DNA, 20 bp, Artificial Sequence
  Description of Artificial Sequence: Synthetic oligonucleotide
  Target: LAMA2; (+) strand; PAM type: YTN; PAM sequence: TTA
tatgtaccattaaaaatata

SEQ ID NO: 374960 - DNA, 20 bp, Artificial Sequence
  Description of Artificial Sequence: Synthetic oligonucleotide
  Target: LAMA2; (+) strand; PAM type: YTN; PAM sequence: TTA
aaaatatagggtacatagta

SEQ ID NO: 374961 - DNA, 20 bp, Artificial Sequence
  Description of Artificial Sequence: Synthetic oligonucleotide
  Target: LAMA2; (+) strand; PAM type: YTN; PAM sequence: TTA
attactattctatttgtgaa

SEQ ID NO: 374962 - DNA, 20 bp, Artificial Sequence
  Description of Artificial Sequence: Synthetic oligonucleotide
  Target: LAMA2; (+) strand; PAM type: YTN; PAM sequence: TTA
ctattctatttgtgaaaagg

SEQ ID NO: 374963 - DNA, 20 bp, Artificial Sequence
  Description of Artificial Sequence: Synthetic oligonucleotide
  Target: LAMA2; (+) strand; PAM type: YTN; PAM sequence: CTA
ttctatttgtgaaaaggtca

SEQ ID NO: 374964 - DNA, 20 bp, Artificial Sequence
  Description of Artificial Sequence: Synthetic oligonucleotide
  Target: LAMA2; (+) strand; PAM type: YTN; PAM sequence: TTC
tatttgtgaaaaggtcactt

SEQ ID NO: 374965 - DNA, 20 bp, Artificial Sequence
  Description of Artificial Sequence: Synthetic oligonucleotide
  Target: LAMA2; (+) strand; PAM type: YTN; PAM sequence: CTA
tttgtgaaaaggtcacttaa

SEQ ID NO: 374966 - DNA, 20 bp, Artificial Sequence
  Description of Artificial Sequence: Synthetic oligonucleotide
  Target: LAMA2; (+) strand; PAM type: YTN; PAM sequence: TTT
gtgaaaaggtcacttaagct

SEQ ID NO: 374967 - DNA, 20 bp, Artificial Sequence
  Description of Artificial Sequence: Synthetic oligonucleotide
  Target: LAMA2; (+) strand; PAM type: YTN; PAM sequence: TTG
tgaaaaggtcacttaagctt

SEQ ID NO: 374968 - DNA, 20 bp, Artificial Sequence
  Description of Artificial Sequence: Synthetic oligonucleotide
  Target: LAMA2; (+) strand; PAM type: YTN; PAM sequence: CTT
aagctttagactgatttact

SEQ ID NO: 374969 - DNA, 20 bp, Artificial Sequence
  Description of Artificial Sequence: Synthetic oligonucleotide
  Target: LAMA2; (+) strand; PAM type: YTN; PAM sequence: TTA
agctttagactgatttactc

SEQ ID NO: 374970 - DNA, 20 bp, Artificial Sequence
  Description of Artificial Sequence: Synthetic oligonucleotide
  Target: LAMA2; (+) strand; PAM type: YTN; PAM sequence: CTT
tagactgatttactctacgt

SEQ ID NO: 374971 - DNA, 20 bp, Artificial Sequence
  Description of Artificial Sequence: Synthetic oligonucleotide
  Target: LAMA2; (+) strand; PAM type: YTN; PAM sequence: TTT
agactgatttactctacgtt

SEQ ID NO: 374972 - DNA, 20 bp, Artificial Sequence
  Description of Artificial Sequence: Synthetic oligonucleotide
  Target: LAMA2; (+) strand; PAM type: YTN; PAM sequence: TTA
gactgatttactctacgttt

SEQ ID NO: 374973 - DNA, 20 bp, Artificial Sequence
  Description of Artificial Sequence: Synthetic oligonucleotide
  Target: LAMA2; (+) strand; PAM type: YTN; PAM sequence: CTG
atttactctacgttttagaa

SEQ ID NO: 374974 - DNA, 20 bp, Artificial Sequence
  Description of Artificial Sequence: Synthetic oligonucleotide
  Target: LAMA2; (+) strand; PAM type: YTN; PAM sequence: TTT
actctacgttttagaataac

SEQ ID NO: 374975 - DNA, 20 bp, Artificial Sequence
  Description of Artificial Sequence: Synthetic oligonucleotide
  Target: LAMA2; (+) strand; PAM type: YTN; PAM sequence: TTA
ctctacgttttagaataacc

SEQ ID NO: 374976 - DNA, 20 bp, Artificial Sequence
  Description of Artificial Sequence: Synthetic oligonucleotide
  Target: LAMA2; (+) strand; PAM type: YTN; PAM sequence: CTC
tacgttttagaataacctca

SEQ ID NO: 374977 - DNA, 20 bp, Artificial Sequence
  Description of Artificial Sequence: Synthetic oligonucleotide
  Target: LAMA2; (+) strand; PAM type: YTN; PAM sequence: CTA
cgttttagaataacctcaga

SEQ ID NO: 374978 - DNA, 20 bp, Artificial Sequence
  Description of Artificial Sequence: Synthetic oligonucleotide
  Target: LAMA2; (+) strand; PAM type: YTN; PAM sequence: TTT
tagaataacctcagacagct

SEQ ID NO: 374979 - DNA, 20 bp, Artificial Sequence
  Description of Artificial Sequence: Synthetic oligonucleotide
  Target: LAMA2; (+) strand; PAM type: YTN; PAM sequence: TTT
agaataacctcagacagctt

SEQ ID NO: 374980 - DNA, 20 bp, Artificial Sequence
  Description of Artificial Sequence: Synthetic oligonucleotide
  Target: LAMA2; (+) strand; PAM type: YTN; PAM sequence: TTA
gaataacctcagacagcttt

SEQ ID NO: 374981 - DNA, 20 bp, Artificial Sequence
  Description of Artificial Sequence: Synthetic oligonucleotide
  Target: LAMA2; (+) strand; PAM type: YTN; PAM sequence: CTC
agacagctttataacaaagc

SEQ ID NO: 374982 - DNA, 20 bp, Artificial Sequence
  Description of Artificial Sequence: Synthetic oligonucleotide
  Target: LAMA2; (+) strand; PAM type: YTN; PAM sequence: CTT
tataacaaagcaaaaaagac

SEQ ID NO: 374983 - DNA, 20 bp, Artificial Sequence
  Description of Artificial Sequence: Synthetic oligonucleotide
  Target: LAMA2; (+) strand; PAM type: YTN; PAM sequence: TTT
ataacaaagcaaaaaagaca

SEQ ID NO: 374984 - DNA, 20 bp, Artificial Sequence
  Description of Artificial Sequence: Synthetic oligonucleotide
  Target: LAMA2; (+) strand; PAM type: YTN; PAM sequence: TTA
taacaaagcaaaaaagacaa

SEQ ID NO: 374985 - DNA, 20 bp, Artificial Sequence
  Description of Artificial Sequence: Synthetic oligonucleotide
  Target: LAMA2; (+) strand; PAM type: YTN; PAM sequence: TTA
cttaaatgaaatatgttttg

SEQ ID NO: 374986 - DNA, 20 bp, Artificial Sequence
  Description of Artificial Sequence: Synthetic oligonucleotide
  Target: LAMA2; (+) strand; PAM type: YTN; PAM sequence: CTT
aaatgaaatatgttttgtat

SEQ ID NO: 374987 - DNA, 20 bp, Artificial Sequence
  Description of Artificial Sequence: Synthetic oligonucleotide
  Target: LAMA2; (+) strand; PAM type: YTN; PAM sequence: TTA
aatgaaatatgttttgtatg

SEQ ID NO: 374988 - DNA, 20 bp, Artificial Sequence
  Description of Artificial Sequence: Synthetic oligonucleotide
  Target: LAMA2; (+) strand; PAM type: YTN; PAM sequence: TTT
tgtatgtttggagatagcat

SEQ ID NO: 374989 - DNA, 20 bp, Artificial Sequence
  Description of Artificial Sequence: Synthetic oligonucleotide
  Target: LAMA2; (+) strand; PAM type: YTN; PAM sequence: TTT
gtatgtttggagatagcata

SEQ ID NO: 374990 - DNA, 20 bp, Artificial Sequence
  Description of Artificial Sequence: Synthetic oligonucleotide
  Target: LAMA2; (+) strand; PAM type: YTN; PAM sequence: TTG
tatgtttggagatagcatat

SEQ ID NO: 374991 - DNA, 20 bp, Artificial Sequence
  Description of Artificial Sequence: Synthetic oligonucleotide
  Target: LAMA2; (+) strand; PAM type: YTN; PAM sequence: TTT
ggagatagcatataaactgt

SEQ ID NO: 374992 - DNA, 20 bp, Artificial Sequence
  Description of Artificial Sequence: Synthetic oligonucleotide
  Target: LAMA2; (+) strand; PAM type: YTN; PAM sequence: TTG
gagatagcatataaactgta

SEQ ID NO: 374993 - DNA, 20 bp, Artificial Sequence
  Description of Artificial Sequence: Synthetic oligonucleotide
  Target: LAMA2; (+) strand; PAM type: YTN; PAM sequence: CTG
taaaataaaagtgattctta

SEQ ID NO: 374994 - DNA, 20 bp, Artificial Sequence
  Description of Artificial Sequence: Synthetic oligonucleotide
  Target: LAMA2; (+) strand; PAM type: YTN; PAM sequence: TTC
ttaaatgttataatgctata

SEQ ID NO: 374995 - DNA, 20 bp, Artificial Sequence
  Description of Artificial Sequence: Synthetic oligonucleotide
  Target: LAMA2; (+) strand; PAM type: YTN; PAM sequence: CTT
aaatgttataatgctatagt

SEQ ID NO: 374996 - DNA, 20 bp, Artificial Sequence
  Description of Artificial Sequence: Synthetic oligonucleotide
  Target: LAMA2; (+) strand; PAM type: YTN; PAM sequence: TTA
aatgttataatgctatagtc

SEQ ID NO: 374997 - DNA, 20 bp, Artificial Sequence
  Description of Artificial Sequence: Synthetic oligonucleotide
  Target: LAMA2; (+) strand; PAM type: YTN; PAM sequence: TTA
taatgctatagtcttaagat

SEQ ID NO: 374998 - DNA, 20 bp, Artificial Sequence
  Description of Artificial Sequence: Synthetic oligonucleotide
  Target: LAMA2; (+) strand; PAM type: YTN; PAM sequence: CTA
tagtcttaagatacttgaaa

SEQ ID NO: 374999 - DNA, 20 bp, Artificial Sequence
  Description of Artificial Sequence: Synthetic oligonucleotide
  Target: LAMA2; (+) strand; PAM type: YTN; PAM sequence: CTT
aagatacttgaaatgatgtt

SEQ ID NO: 375000 - DNA, 20 bp, Artificial Sequence
  Description of Artificial Sequence: Synthetic oligonucleotide
  Target: LAMA2; (+) strand; PAM type: YTN; PAM sequence: TTA
agatacttgaaatgatgttt

SEQ ID NO: 375001 - DNA, 20 bp, Artificial Sequence
  Description of Artificial Sequence: Synthetic oligonucleotide
  Target: LAMA2; (+) strand; PAM type: YTN; PAM sequence: CTT
gaaatgatgtttttgttgtc

SEQ ID NO: 375002 - DNA, 20 bp, Artificial Sequence
  Description of Artificial Sequence: Synthetic oligonucleotide
  Target: LAMA2; (+) strand; PAM type: YTN; PAM sequence: TTG
aaatgatgtttttgttgtct

SEQ ID NO: 375003 - DNA, 20 bp, Artificial Sequence
  Description of Artificial Sequence: Synthetic oligonucleotide
  Target: LAMA2; (+) strand; PAM type: YTN; PAM sequence: TTT
ttgttgtcttttaaacttct

SEQ ID NO: 375004 - DNA, 20 bp, Artificial Sequence
  Description of Artificial Sequence: Synthetic oligonucleotide
  Target: LAMA2; (+) strand; PAM type: YTN; PAM sequence: TTT
tgttgtcttttaaacttctg

SEQ ID NO: 375005 - DNA, 20 bp, Artificial Sequence
  Description of Artificial Sequence: Synthetic oligonucleotide
  Target: LAMA2; (+) strand; PAM type: YTN; PAM sequence: TTT
gttgtcttttaaacttctga

SEQ ID NO: 375006 - DNA, 20 bp, Artificial Sequence
  Description of Artificial Sequence: Synthetic oligonucleotide
  Target: LAMA2; (+) strand; PAM type: YTN; PAM sequence: TTG
ttgtcttttaaacttctgaa

SEQ ID NO: 375007 - DNA, 20 bp, Artificial Sequence
  Description of Artificial Sequence: Synthetic oligonucleotide
  Target: LAMA2; (+) strand; PAM type: YTN; PAM sequence: TTG
tcttttaaacttctgaatct

SEQ ID NO: 375008 - DNA, 20 bp, Artificial Sequence
  Description of Artificial Sequence: Synthetic oligonucleotide
  Target: LAMA2; (+) strand; PAM type: YTN; PAM sequence: CTT
ttaaacttctgaatcttaaa

SEQ ID NO: 375009 - DNA, 20 bp, Artificial Sequence
  Description of Artificial Sequence: Synthetic oligonucleotide
  Target: LAMA2; (+) strand; PAM type: YTN; PAM sequence: TTT
taaacttctgaatcttaaaa

SEQ ID NO: 375010 - DNA, 20 bp, Artificial Sequence
  Description of Artificial Sequence: Synthetic oligonucleotide
  Target: LAMA2; (+) strand; PAM type: YTN; PAM sequence: TTT
aaacttctgaatcttaaaaa

SEQ ID NO: 375011 - DNA, 20 bp, Artificial Sequence
  Description of Artificial Sequence: Synthetic oligonucleotide
  Target: LAMA2; (+) strand; PAM type: YTN; PAM sequence: TTA
aacttctgaatcttaaaaaa

SEQ ID NO: 375012 - DNA, 20 bp, Artificial Sequence
  Description of Artificial Sequence: Synthetic oligonucleotide
  Target: LAMA2; (+) strand; PAM type: YTN; PAM sequence: CTT
ctgaatcttaaaaaaggcat

SEQ ID NO: 375013 - DNA, 20 bp, Artificial Sequence
  Description of Artificial Sequence: Synthetic oligonucleotide
  Target: LAMA2; (+) strand; PAM type: YTN; PAM sequence: TTC
tgaatcttaaaaaaggcata

SEQ ID NO: 375014 - DNA, 20 bp, Artificial Sequence
  Description of Artificial Sequence: Synthetic oligonucleotide
  Target: LAMA2; (+) strand; PAM type: YTN; PAM sequence: CTG
aatcttaaaaaaggcataaa

SEQ ID NO: 375015 - DNA, 20 bp, Artificial Sequence
  Description of Artificial Sequence: Synthetic oligonucleotide
  Target: LAMA2; (+) strand; PAM type: YTN; PAM sequence: CTT
aaaaaaggcataaatatttc

SEQ ID NO: 375016 - DNA, 20 bp, Artificial Sequence
  Description of Artificial Sequence: Synthetic oligonucleotide
  Target: LAMA2; (+) strand; PAM type: YTN; PAM sequence: TTA
aaaaaggcataaatatttca

SEQ ID NO: 375017 - DNA, 20 bp, Artificial Sequence
  Description of Artificial Sequence: Synthetic oligonucleotide
  Target: LAMA2; (+) strand; PAM type: YTN; PAM sequence: TTT
cacctcaaaccattttttaa

SEQ ID NO: 375018 - DNA, 20 bp, Artificial Sequence
  Description of Artificial Sequence: Synthetic oligonucleotide
  Target: LAMA2; (+) strand; PAM type: YTN; PAM sequence: TTC
acctcaaaccattttttaaa

SEQ ID NO: 375019 - DNA, 20 bp, Artificial Sequence
  Description of Artificial Sequence: Synthetic oligonucleotide
  Target: LAMA2; (+) strand; PAM type: YTN; PAM sequence: CTC
aaaccattttttaaacttaa

SEQ ID NO: 375020 - DNA, 20 bp, Artificial Sequence
  Description of Artificial Sequence: Synthetic oligonucleotide
  Target: LAMA2; (+) strand; PAM type: YTN; PAM sequence: TTT
tttaaacttaacacaaaacc

SEQ ID NO: 375021 - DNA, 20 bp, Artificial Sequence
  Description of Artificial Sequence: Synthetic oligonucleotide
  Target: LAMA2; (+) strand; PAM type: YTN; PAM sequence: TTT
ttaaacttaacacaaaaccg

SEQ ID NO: 375022 - DNA, 20 bp, Artificial Sequence
  Description of Artificial Sequence: Synthetic oligonucleotide
  Target: LAMA2; (+) strand; PAM type: YTN; PAM sequence: TTT
taaacttaacacaaaaccgg

SEQ ID NO: 375023 - DNA, 20 bp, Artificial Sequence
  Description of Artificial Sequence: Synthetic oligonucleotide
  Target: LAMA2; (+) strand; PAM type: YTN; PAM sequence: TTT
aaacttaacacaaaaccggc

SEQ ID NO: 375024 - DNA, 20 bp, Artificial Sequence
  Description of Artificial Sequence: Synthetic oligonucleotide
  Target: LAMA2; (+) strand; PAM type: YTN; PAM sequence: TTA
aacttaacacaaaaccggca

SEQ ID NO: 375025 - DNA, 20 bp, Artificial Sequence
  Description of Artificial Sequence: Synthetic oligonucleotide
  Target: LAMA2; (+) strand; PAM type: YTN; PAM sequence: CTT
aacacaaaaccggcacacag

SEQ ID NO: 375026 - DNA, 20 bp, Artificial Sequence
  Description of Artificial Sequence: Synthetic oligonucleotide
  Target: LAMA2; (+) strand; PAM type: YTN; PAM sequence: TTA
acacaaaaccggcacacagt

SEQ ID NO: 375027 - DNA, 20 bp, Artificial Sequence
  Description of Artificial Sequence: Synthetic oligonucleotide
  Target: LAMA2; (+) strand; PAM type: YTN; PAM sequence: TTA
aatcaaaaaaactaactaaa

SEQ ID NO: 375028 - DNA, 20 bp, Artificial Sequence
  Description of Artificial Sequence: Synthetic oligonucleotide
  Target: LAMA2; (+) strand; PAM type: YTN; PAM sequence: CTA
actaaatttttctagattaa

SEQ ID NO: 375029 - DNA, 20 bp, Artificial Sequence
  Description of Artificial Sequence: Synthetic oligonucleotide
  Target: LAMA2; (+) strand; PAM type: YTN; PAM sequence: CTA
aatttttctagattaatagt

SEQ ID NO: 375030 - DNA, 20 bp, Artificial Sequence
  Description of Artificial Sequence: Synthetic oligonucleotide
  Target: LAMA2; (+) strand; PAM type: YTN; PAM sequence: TTT
ttctagattaatagtaacat

SEQ ID NO: 375031 - DNA, 20 bp, Artificial Sequence
  Description of Artificial Sequence: Synthetic oligonucleotide
  Target: LAMA2; (+) strand; PAM type: YTN; PAM sequence: TTT
tctagattaatagtaacatt

SEQ ID NO: 375032 - DNA, 20 bp, Artificial Sequence
  Description of Artificial Sequence: Synthetic oligonucleotide
  Target: LAMA2; (+) strand; PAM type: YTN; PAM sequence: TTT
ctagattaatagtaacatta

SEQ ID NO: 375033 - DNA, 20 bp, Artificial Sequence
  Description of Artificial Sequence: Synthetic oligonucleotide
  Target: LAMA2; (+) strand; PAM type: YTN; PAM sequence: TTC
tagattaatagtaacattaa

SEQ ID NO: 375034 - DNA, 20 bp, Artificial Sequence
  Description of Artificial Sequence: Synthetic oligonucleotide
  Target: LAMA2; (+) strand; PAM type: YTN; PAM sequence: CTA
gattaatagtaacattaaaa

SEQ ID NO: 375035 - DNA, 20 bp, Artificial Sequence
  Description of Artificial Sequence: Synthetic oligonucleotide
  Target: LAMA2; (+) strand; PAM type: YTN; PAM sequence: TTA
atagtaacattaaaattttg

SEQ ID NO: 375036 - DNA, 20 bp, Artificial Sequence
  Description of Artificial Sequence: Synthetic oligonucleotide
  Target: LAMA2; (+) strand; PAM type: YTN; PAM sequence: TTA
aaattttgccaggggtgcta

SEQ ID NO: 375037 - DNA, 20 bp, Artificial Sequence
  Description of Artificial Sequence: Synthetic oligonucleotide
  Target: LAMA2; (+) strand; PAM type: YTN; PAM sequence: TTT
tgccaggggtgctattaatt

SEQ ID NO: 375038 - DNA, 20 bp, Artificial Sequence
  Description of Artificial Sequence: Synthetic oligonucleotide
  Target: LAMA2; (+) strand; PAM type: YTN; PAM sequence: TTT
gccaggggtgctattaattt

SEQ ID NO: 375039 - DNA, 20 bp, Artificial Sequence
  Description of Artificial Sequence: Synthetic oligonucleotide
  Target: LAMA2; (+) strand; PAM type: YTN; PAM sequence: TTG
ccaggggtgctattaatttt

SEQ ID NO: 375040 - DNA, 20 bp, Artificial Sequence
  Description of Artificial Sequence: Synthetic oligonucleotide
  Target: LAMA2; (+) strand; PAM type: YTN; PAM sequence: CTA
ttaattttgaaaattcctca

SEQ ID NO: 375041 - DNA, 20 bp, Artificial Sequence
  Description of Artificial Sequence: Synthetic oligonucleotide
  Target: LAMA2; (+) strand; PAM type: YTN; PAM sequence: TTA
attttgaaaattcctcaaaa

SEQ ID NO: 375042 - DNA, 20 bp, Artificial Sequence
  Description of Artificial Sequence: Synthetic oligonucleotide
  Target: LAMA2; (+) strand; PAM type: YTN; PAM sequence: TTT
tgaaaattcctcaaaattat

SEQ ID NO: 375043 - DNA, 20 bp, Artificial Sequence
  Description of Artificial Sequence: Synthetic oligonucleotide
  Target: LAMA2; (+) strand; PAM type: YTN; PAM sequence: TTT
gaaaattcctcaaaattatt

SEQ ID NO: 375044 - DNA, 20 bp, Artificial Sequence
  Description of Artificial Sequence: Synthetic oligonucleotide
  Target: LAMA2; (+) strand; PAM type: YTN; PAM sequence: TTG
aaaattcctcaaaattattt

SEQ ID NO: 375045 - DNA, 20 bp, Artificial Sequence
  Description of Artificial Sequence: Synthetic oligonucleotide
  Target: LAMA2; (+) strand; PAM type: YTN; PAM sequence: TTC
ctcaaaattattttagttct

SEQ ID NO: 375046 - DNA, 20 bp, Artificial Sequence
  Description of Artificial Sequence: Synthetic oligonucleotide
  Target: LAMA2; (+) strand; PAM type: YTN; PAM sequence: CTC
aaaattattttagttctaaa

SEQ ID NO: 375047 - DNA, 20 bp, Artificial Sequence
  Description of Artificial Sequence: Synthetic oligonucleotide
  Target: LAMA2; (+) strand; PAM type: YTN; PAM sequence: TTA
ttttagttctaaagtcagta

SEQ ID NO: 375048 - DNA, 20 bp, Artificial Sequence
  Description of Artificial Sequence: Synthetic oligonucleotide
  Target: LAMA2; (+) strand; PAM type: YTN; PAM sequence: TTT
tagttctaaagtcagtatgc

SEQ ID NO: 375049 - DNA, 20 bp, Artificial Sequence
  Description of Artificial Sequence: Synthetic oligonucleotide
  Target: LAMA2; (+) strand; PAM type: YTN; PAM sequence: TTT
agttctaaagtcagtatgca

SEQ ID NO: 375050 - DNA, 20 bp, Artificial Sequence
  Description of Artificial Sequence: Synthetic oligonucleotide
  Target: LAMA2; (+) strand; PAM type: YTN; PAM sequence: TTA
gttctaaagtcagtatgcat

SEQ ID NO: 375051 - DNA, 20 bp, Artificial Sequence
  Description of Artificial Sequence: Synthetic oligonucleotide
  Target: LAMA2; (+) strand; PAM type: YTN; PAM sequence: TTC
taaagtcagtatgcattact

SEQ ID NO: 375052 - DNA, 20 bp, Artificial Sequence
  Description of Artificial Sequence: Synthetic oligonucleotide
  Target: LAMA2; (+) strand; PAM type: YTN; PAM sequence: CTA
aagtcagtatgcattactta

SEQ ID NO: 375053 - DNA, 20 bp, Artificial Sequence
  Description of Artificial Sequence: Synthetic oligonucleotide
  Target: LAMA2; (+) strand; PAM type: YTN; PAM sequence: TTA
cttacaatgggataatagta

SEQ ID NO: 375054 - DNA, 20 bp, Artificial Sequence
  Description of Artificial Sequence: Synthetic oligonucleotide
  Target: LAMA2; (+) strand; PAM type: YTN; PAM sequence: CTT
acaatgggataatagtattt

SEQ ID NO: 375055 - DNA, 20 bp, Artificial Sequence
  Description of Artificial Sequence: Synthetic oligonucleotide
  Target: LAMA2; (+) strand; PAM type: YTN; PAM sequence: TTA
caatgggataatagtatttt

SEQ ID NO: 375056 - DNA, 20 bp, Artificial Sequence
  Description of Artificial Sequence: Synthetic oligonucleotide
  Target: LAMA2; (+) strand; PAM type: YTN; PAM sequence: TTT
taagtgttaccctgatgtat

SEQ ID NO: 375057 - DNA, 20 bp, Artificial Sequence
  Description of Artificial Sequence: Synthetic oligonucleotide
  Target: LAMA2; (+) strand; PAM type: YTN; PAM sequence: TTT
aagtgttaccctgatgtatc

SEQ ID NO: 375058 - DNA, 20 bp, Artificial Sequence
  Description of Artificial Sequence: Synthetic oligonucleotide
  Target: LAMA2; (+) strand; PAM type: YTN; PAM sequence: TTA
agtgttaccctgatgtatct

SEQ ID NO: 375059 - DNA, 20 bp, Artificial Sequence
  Description of Artificial Sequence: Synthetic oligonucleotide
  Target: LAMA2; (+) strand; PAM type: YTN; PAM sequence: TTA
ccctgatgtatctgtaaaga

SEQ ID NO: 375060 - DNA, 20 bp, Artificial Sequence
  Description of Artificial Sequence: Synthetic oligonucleotide
  Target: LAMA2; (+) strand; PAM type: YTN; PAM sequence: CTG
atgtatctgtaaagaactaa

SEQ ID NO: 375061 - DNA, 20 bp, Artificial Sequence
  Description of Artificial Sequence: Synthetic oligonucleotide
  Target: LAMA2; (+) strand; PAM type: YTN; PAM sequence: CTG
taaagaactaaaacagcgtt

SEQ ID NO: 375062 - DNA, 20 bp, Artificial Sequence
  Description of Artificial Sequence: Synthetic oligonucleotide
  Target: LAMA2; (+) strand; PAM type: YTN; PAM sequence: CTA
aaacagcgttacaccttgag

SEQ ID NO: 375063 - DNA, 20 bp, Artificial Sequence
  Description of Artificial Sequence: Synthetic oligonucleotide
  Target: LAMA2; (+) strand; PAM type: YTN; PAM sequence: TTA
caccttgagtcaagaactcc

SEQ ID NO: 375064 - DNA, 20 bp, Artificial Sequence
  Description of Artificial Sequence: Synthetic oligonucleotide
  Target: LAMA2; (+) strand; PAM type: YTN; PAM sequence: CTT
gagtcaagaactccaagttc

SEQ ID NO: 375065 - DNA, 20 bp, Artificial Sequence
  Description of Artificial Sequence: Synthetic oligonucleotide
  Target: LAMA2; (+) strand; PAM type: YTN; PAM sequence: TTG
agtcaagaactccaagttcc

SEQ ID NO: 375066 - DNA, 20 bp, Artificial Sequence
  Description of Artificial Sequence: Synthetic oligonucleotide
  Target: LAMA2; (+) strand; PAM type: YTN; PAM sequence: CTC
caagttcctgtcacgttctg

SEQ ID NO: 375067 - DNA, 20 bp, Artificial Sequence
  Description of Artificial Sequence: Synthetic oligonucleotide
  Target: LAMA2; (+) strand; PAM type: YTN; PAM sequence: TTC
ctgtcacgttctggactcac

SEQ ID NO: 375068 - DNA, 20 bp, Artificial Sequence
  Description of Artificial Sequence: Synthetic oligonucleotide
  Target: LAMA2; (+) strand; PAM type: YTN; PAM sequence: CTG
tcacgttctggactcaccta

SEQ ID NO: 375069 - DNA, 20 bp, Artificial Sequence
  Description of Artificial Sequence: Synthetic oligonucleotide
  Target: LAMA2; (+) strand; PAM type: YTN; PAM sequence: TTC
tggactcacctatatgacac

SEQ ID NO: 375070 - DNA, 20 bp, Artificial Sequence
  Description of Artificial Sequence: Synthetic oligonucleotide
  Target: LAMA2; (+) strand; PAM type: YTN; PAM sequence: CTG
gactcacctatatgacacag

SEQ ID NO: 375071 - DNA, 20 bp, Artificial Sequence
  Description of Artificial Sequence: Synthetic oligonucleotide
  Target: LAMA2; (+) strand; PAM type: YTN; PAM sequence: CTC
acctatatgacacagcaggc

SEQ ID NO: 375072 - DNA, 20 bp, Artificial Sequence
  Description of Artificial Sequence: Synthetic oligonucleotide
  Target: LAMA2; (+) strand; PAM type: YTN; PAM sequence: CTA
tatgacacagcaggcatgtg

SEQ ID NO: 375073 - DNA, 20 bp, Artificial Sequence
  Description of Artificial Sequence: Synthetic oligonucleotide
  Target: LAMA2; (+) strand; PAM type: YTN; PAM sequence: CTT
gtataagctatggcttcttt

SEQ ID NO: 375074 - DNA, 20 bp, Artificial Sequence
  Description of Artificial Sequence: Synthetic oligonucleotide
  Target: LAMA2; (+) strand; PAM type: YTN; PAM sequence: TTG
tataagctatggcttctttg

SEQ ID NO: 375075 - DNA, 20 bp, Artificial Sequence
  Description of Artificial Sequence: Synthetic oligonucleotide
  Target: LAMA2; (+) strand; PAM type: YTN; PAM sequence: CTA
tggcttctttgaatttcagt

SEQ ID NO: 375076 - DNA, 20 bp, Artificial Sequence
  Description of Artificial Sequence: Synthetic oligonucleotide
  Target: LAMA2; (+) strand; PAM type: YTN; PAM sequence: CTT
ctttgaatttcagtgtcttc

SEQ ID NO: 375077 - DNA, 20 bp, Artificial Sequence
  Description of Artificial Sequence: Synthetic oligonucleotide
  Target: LAMA2; (+) strand; PAM type: YTN; PAM sequence: TTC
tttgaatttcagtgtcttca

SEQ ID NO: 375078 - DNA, 20 bp, Artificial Sequence
  Description of Artificial Sequence: Synthetic oligonucleotide
  Target: LAMA2; (+) strand; PAM type: YTN; PAM sequence: CTT
tgaatttcagtgtcttcatg

SEQ ID NO: 375079 - DNA, 20 bp, Artificial Sequence
  Description of Artificial Sequence: Synthetic oligonucleotide
  Target: LAMA2; (+) strand; PAM type: YTN; PAM sequence: TTT
gaatttcagtgtcttcatgc

SEQ ID NO: 375080 - DNA, 20 bp, Artificial Sequence
  Description of Artificial Sequence: Synthetic oligonucleotide
  Target: LAMA2; (+) strand; PAM type: YTN; PAM sequence: TTG
aatttcagtgtcttcatgct

SEQ ID NO: 375081 - DNA, 20 bp, Artificial Sequence
  Description of Artificial Sequence: Synthetic oligonucleotide
  Target: LAMA2; (+) strand; PAM type: YTN; PAM sequence: TTT
cagtgtcttcatgctcaaaa

SEQ ID NO: 375082 - DNA, 20 bp, Artificial Sequence
  Description of Artificial Sequence: Synthetic oligonucleotide
  Target: LAMA2; (+) strand; PAM type: YTN; PAM sequence: TTC
agtgtcttcatgctcaaaat

SEQ ID NO: 375083 - DNA, 20 bp, Artificial Sequence
  Description of Artificial Sequence: Synthetic oligonucleotide
  Target: LAMA2; (+) strand; PAM type: YTN; PAM sequence: CTT
catgctcaaaattggaatga

SEQ ID NO: 375084 - DNA, 20 bp, Artificial Sequence
  Description of Artificial Sequence: Synthetic oligonucleotide
  Target: LAMA2; (+) strand; PAM type: YTN; PAM sequence: TTC
atgctcaaaattggaatgat

SEQ ID NO: 375085 - DNA, 20 bp, Artificial Sequence
  Description of Artificial Sequence: Synthetic oligonucleotide
  Target: LAMA2; (+) strand; PAM type: YTN; PAM sequence: CTC
aaaattggaatgatgatgat

SEQ ID NO: 375086 - DNA, 20 bp, Artificial Sequence
  Description of Artificial Sequence: Synthetic oligonucleotide
  Target: LAMA2; (+) strand; PAM type: YTN; PAM sequence: TTG
gaatgatgatgatgacatta

SEQ ID NO: 375087 - DNA, 20 bp, Artificial Sequence
  Description of Artificial Sequence: Synthetic oligonucleotide
  Target: LAMA2; (+) strand; PAM type: YTN; PAM sequence: TTA
atattttaatggcatatgat

SEQ ID NO: 375088 - DNA, 20 bp, Artificial Sequence
  Description of Artificial Sequence: Synthetic oligonucleotide
  Target: LAMA2; (+) strand; PAM type: YTN; PAM sequence: TTT
taatggcatatgatgggcca

SEQ ID NO: 375089 - DNA, 20 bp, Artificial Sequence
  Description of Artificial Sequence: Synthetic oligonucleotide
  Target: LAMA2; (+) strand; PAM type: YTN; PAM sequence: TTT
aatggcatatgatgggccag

SEQ ID NO: 375090 - DNA, 20 bp, Artificial Sequence
  Description of Artificial Sequence: Synthetic oligonucleotide
  Target: LAMA2; (+) strand; PAM type: YTN; PAM sequence: TTA
atggcatatgatgggccaga

SEQ ID NO: 375091 - DNA, 20 bp, Artificial Sequence
  Description of Artificial Sequence: Synthetic oligonucleotide
  Target: LAMA2; (+) strand; PAM type: YTN; PAM sequence: CTA
aagcctttatgtgaattatc

SEQ ID NO: 375092 - DNA, 20 bp, Artificial Sequence
  Description of Artificial Sequence: Synthetic oligonucleotide
  Target: LAMA2; (+) strand; PAM type: YTN; PAM sequence: CTT
tatgtgaattatccctacag

SEQ ID NO: 375093 - DNA, 20 bp, Artificial Sequence
  Description of Artificial Sequence: Synthetic oligonucleotide
  Target: LAMA2; (+) strand; PAM type: YTN; PAM sequence: TTT
atgtgaattatccctacagc

SEQ ID NO: 375094 - DNA, 20 bp, Artificial Sequence
  Description of Artificial Sequence: Synthetic oligonucleotide
  Target: LAMA2; (+) strand; PAM type: YTN; PAM sequence: TTA
tgtgaattatccctacagct

SEQ ID NO: 375095 - DNA, 20 bp, Artificial Sequence
  Description of Artificial Sequence: Synthetic oligonucleotide
  Target: LAMA2; (+) strand; PAM type: YTN; PAM sequence: TTA
tccctacagcttgtagagtt

SEQ ID NO: 375096 - DNA, 20 bp, Artificial Sequence
  Description of Artificial Sequence: Synthetic oligonucleotide
  Target: LAMA2; (+) strand; PAM type: YTN; PAM sequence: CTA
cagcttgtagagttgttata

SEQ ID NO: 375097 - DNA, 20 bp, Artificial Sequence
  Description of Artificial Sequence: Synthetic oligonucleotide
  Target: LAMA2; (+) strand; PAM type: YTN; PAM sequence: CTT
gtagagttgttatagggatt

SEQ ID NO: 375098 - DNA, 20 bp, Artificial Sequence
  Description of Artificial Sequence: Synthetic oligonucleotide
  Target: LAMA2; (+) strand; PAM type: YTN; PAM sequence: TTG
tagagttgttatagggatta

SEQ ID NO: 375099 - DNA, 20 bp, Artificial Sequence
  Description of Artificial Sequence: Synthetic oligonucleotide
  Target: LAMA2; (+) strand; PAM type: YTN; PAM sequence: TTG
ttatagggattaaatgatag

SEQ ID NO: 375100 - DNA, 20 bp, Artificial Sequence
  Description of Artificial Sequence: Synthetic oligonucleotide
  Target: LAMA2; (+) strand; PAM type: YTN; PAM sequence: TTA
tagggattaaatgatagaat

SEQ ID NO: 375101 - DNA, 20 bp, Artificial Sequence
  Description of Artificial Sequence: Synthetic oligonucleotide
  Target: LAMA2; (+) strand; PAM type: YTN; PAM sequence: TTA
aatgatagaatgcctaacag

SEQ ID NO: 375102 - DNA, 20 bp, Artificial Sequence
  Description of Artificial Sequence: Synthetic oligonucleotide
  Target: LAMA2; (+) strand; PAM type: YTN; PAM sequence: CTA
acagggcacttaacaaatca

SEQ ID NO: 375103 - DNA, 20 bp, Artificial Sequence
  Description of Artificial Sequence: Synthetic oligonucleotide
  Target: LAMA2; (+) strand; PAM type: YTN; PAM sequence: CTT
aacaaatcagaaaacattct

SEQ ID NO: 375104 - DNA, 20 bp, Artificial Sequence
  Description of Artificial Sequence: Synthetic oligonucleotide
  Target: LAMA2; (+) strand; PAM type: YTN; PAM sequence: TTA
acaaatcagaaaacattctg

SEQ ID NO: 375105 - DNA, 20 bp, Artificial Sequence
  Description of Artificial Sequence: Synthetic oligonucleotide
  Target: LAMA2; (+) strand; PAM type: YTN; PAM sequence: TTC
tgttactgaacttaggcgtc

SEQ ID NO: 375106 - DNA, 20 bp, Artificial Sequence
  Description of Artificial Sequence: Synthetic oligonucleotide
  Target: LAMA2; (+) strand; PAM type: YTN; PAM sequence: CTG
ttactgaacttaggcgtcca

SEQ ID NO: 375107 - DNA, 20 bp, Artificial Sequence
  Description of Artificial Sequence: Synthetic oligonucleotide
  Target: LAMA2; (+) strand; PAM type: YTN; PAM sequence: TTA
ctgaacttaggcgtccatgt

SEQ ID NO: 375108 - DNA, 20 bp, Artificial Sequence
  Description of Artificial Sequence: Synthetic oligonucleotide
  Target: LAMA2; (+) strand; PAM type: YTN; PAM sequence: CTG
aacttaggcgtccatgttac

SEQ ID NO: 375109 - DNA, 20 bp, Artificial Sequence
  Description of Artificial Sequence: Synthetic oligonucleotide
  Target: LAMA2; (+) strand; PAM type: YTN; PAM sequence: CTT
aggcgtccatgttaccatgt

SEQ ID NO: 375110 - DNA, 20 bp, Artificial Sequence
  Description of Artificial Sequence: Synthetic oligonucleotide
  Target: LAMA2; (+) strand; PAM type: YTN; PAM sequence: TTA
ggcgtccatgttaccatgtg

SEQ ID NO: 375111 - DNA, 20 bp, Artificial Sequence
  Description of Artificial Sequence: Synthetic oligonucleotide
  Target: LAMA2; (+) strand; PAM type: YTN; PAM sequence: TTA
ccatgtggggtatattatta

SEQ ID NO: 375112 - DNA, 20 bp, Artificial Sequence
  Description of Artificial Sequence: Synthetic oligonucleotide
  Target: LAMA2; (+) strand; PAM type: YTN; PAM sequence: TTA
ttatttaacaagcctattaa

SEQ ID NO: 375113 - DNA, 20 bp, Artificial Sequence
  Description of Artificial Sequence: Synthetic oligonucleotide
  Target: LAMA2; (+) strand; PAM type: YTN; PAM sequence: TTA
tttaacaagcctattaagac

SEQ ID NO: 375114 - DNA, 20 bp, Artificial Sequence
  Description of Artificial Sequence: Synthetic oligonucleotide
  Target: LAMA2; (+) strand; PAM type: YTN; PAM sequence: TTT
aacaagcctattaagactat

SEQ ID NO: 375115 - DNA, 20 bp, Artificial Sequence
  Description of Artificial Sequence: Synthetic oligonucleotide
  Target: LAMA2; (+) strand; PAM type: YTN; PAM sequence: TTA
acaagcctattaagactatt

SEQ ID NO: 375116 - DNA, 20 bp, Artificial Sequence
  Description of Artificial Sequence: Synthetic oligonucleotide
  Target: LAMA2; (+) strand; PAM type: YTN; PAM sequence: CTA
ttaagactattagaaagttt

SEQ ID NO: 375117 - DNA, 20 bp, Artificial Sequence
  Description of Artificial Sequence: Synthetic oligonucleotide
  Target: LAMA2; (+) strand; PAM type: YTN; PAM sequence: TTA
agactattagaaagttttcc

SEQ ID NO: 375118 - DNA, 20 bp, Artificial Sequence
  Description of Artificial Sequence: Synthetic oligonucleotide
  Target: LAMA2; (+) strand; PAM type: YTN; PAM sequence: CTA
ttagaaagttttcctgatca

SEQ ID NO: 375119 - DNA, 20 bp, Artificial Sequence
  Description of Artificial Sequence: Synthetic oligonucleotide
  Target: LAMA2; (+) strand; PAM type: YTN; PAM sequence: TTA
gaaagttttcctgatcacag

SEQ ID NO: 375120 - DNA, 20 bp, Artificial Sequence
  Description of Artificial Sequence: Synthetic oligonucleotide
  Target: LAMA2; (+) strand; PAM type: YTN; PAM sequence: TTT
tcctgatcacaggtctctct

SEQ ID NO: 375121 - DNA, 20 bp, Artificial Sequence
  Description of Artificial Sequence: Synthetic oligonucleotide
  Target: LAMA2; (+) strand; PAM type: YTN; PAM sequence: TTT
cctgatcacaggtctctctt

SEQ ID NO: 375122 - DNA, 20 bp, Artificial Sequence
  Description of Artificial Sequence: Synthetic oligonucleotide
  Target: LAMA2; (+) strand; PAM type: YTN; PAM sequence: TTC
ctgatcacaggtctctcttc

SEQ ID NO: 375123 - DNA, 20 bp, Artificial Sequence
  Description of Artificial Sequence: Synthetic oligonucleotide
  Target: LAMA2; (+) strand; PAM type: YTN; PAM sequence: CTG
atcacaggtctctcttctct

SEQ ID NO: 375124 - DNA, 20 bp, Artificial Sequence
  Description of Artificial Sequence: Synthetic oligonucleotide
  Target: LAMA2; (+) strand; PAM type: YTN; PAM sequence: CTC
tcttctctttgcagcctgtc

SEQ ID NO: 375125 - DNA, 20 bp, Artificial Sequence
  Description of Artificial Sequence: Synthetic oligonucleotide
  Target: LAMA2; (+) strand; PAM type: YTN; PAM sequence: CTC
ttctctttgcagcctgtcgc

SEQ ID NO: 375126 - DNA, 20 bp, Artificial Sequence
  Description of Artificial Sequence: Synthetic oligonucleotide
  Target: LAMA2; (+) strand; PAM type: YTN; PAM sequence: CTT
ctctttgcagcctgtcgctg

SEQ ID NO: 375127 - DNA, 20 bp, Artificial Sequence
  Description of Artificial Sequence: Synthetic oligonucleotide
  Target: LAMA2; (+) strand; PAM type: YTN; PAM sequence: TTC
tctttgcagcctgtcgctgt

SEQ ID NO: 375128 - DNA, 20 bp, Artificial Sequence
  Description of Artificial Sequence: Synthetic oligonucleotide
  Target: LAMA2; (+) strand; PAM type: YTN; PAM sequence: CTC
tttgcagcctgtcgctgtaa

SEQ ID NO: 375129 - DNA, 20 bp, Artificial Sequence
  Description of Artificial Sequence: Synthetic oligonucleotide
  Target: LAMA2; (+) strand; PAM type: YTN; PAM sequence: CTT
tgcagcctgtcgctgtaatg

SEQ ID NO: 375130 - DNA, 20 bp, Artificial Sequence
  Description of Artificial Sequence: Synthetic oligonucleotide
  Target: LAMA2; (+) strand; PAM type: YTN; PAM sequence: TTT
gcagcctgtcgctgtaatgc

SEQ ID NO: 375131 - DNA, 20 bp, Artificial Sequence
  Description of Artificial Sequence: Synthetic oligonucleotide
  Target: LAMA2; (+) strand; PAM type: YTN; PAM sequence: TTG
cagcctgtcgctgtaatgcc

SEQ ID NO: 375132 - DNA, 20 bp, Artificial Sequence
  Description of Artificial Sequence: Synthetic oligonucleotide
  Target: LAMA2; (+) strand; PAM type: YTN; PAM sequence: CTG
tcgctgtaatgccggtggct

SEQ ID NO: 375133 - DNA, 20 bp, Artificial Sequence
  Description of Artificial Sequence: Synthetic oligonucleotide
  Target: LAMA2; (+) strand; PAM type: YTN; PAM sequence: CTG
taatgccggtggctctttct

SEQ ID NO: 375134 - DNA, 20 bp, Artificial Sequence
  Description of Artificial Sequence: Synthetic oligonucleotide
  Target: LAMA2; (+) strand; PAM type: YTN; PAM sequence: CTC
tttctctgaggtttgccaca

SEQ ID NO: 375135 - DNA, 20 bp, Artificial Sequence
  Description of Artificial Sequence: Synthetic oligonucleotide
  Target: LAMA2; (+) strand; PAM type: YTN; PAM sequence: CTT
tctctgaggtttgccacagt

SEQ ID NO: 375136 - DNA, 20 bp, Artificial Sequence
  Description of Artificial Sequence: Synthetic oligonucleotide
  Target: LAMA2; (+) strand; PAM type: YTN; PAM sequence: TTT
ctctgaggtttgccacagtc

SEQ ID NO: 375137 - DNA, 20 bp, Artificial Sequence
  Description of Artificial Sequence: Synthetic oligonucleotide
  Target: LAMA2; (+) strand; PAM type: YTN; PAM sequence: TTC
tctgaggtttgccacagtca

SEQ ID NO: 375138 - DNA, 20 bp, Artificial Sequence
  Description of Artificial Sequence: Synthetic oligonucleotide
  Target: LAMA2; (+) strand; PAM type: YTN; PAM sequence: CTC
tgaggtttgccacagtcaaa

SEQ ID NO: 375139 - DNA, 20 bp, Artificial Sequence
  Description of Artificial Sequence: Synthetic oligonucleotide
  Target: LAMA2; (+) strand; PAM type: YTN; PAM sequence: CTG
aggtttgccacagtcaaact

SEQ ID NO: 375140 - DNA, 20 bp, Artificial Sequence
  Description of Artificial Sequence: Synthetic oligonucleotide
  Target: LAMA2; (+) strand; PAM type: YTN; PAM sequence: TTT
gccacagtcaaactggacag

SEQ ID NO: 375141 - DNA, 20 bp, Artificial Sequence
  Description of Artificial Sequence: Synthetic oligonucleotide
  Target: LAMA2; (+) strand; PAM type: YTN; PAM sequence: TTG
ccacagtcaaactggacagt

SEQ ID NO: 375142 - DNA, 20 bp, Artificial Sequence
  Description of Artificial Sequence: Synthetic oligonucleotide
  Target: LAMA2; (+) strand; PAM type: YTN; PAM sequence: CTG
gacagtgtgagtgcagagcc

SEQ ID NO: 375143 - DNA, 20 bp, Artificial Sequence
  Description of Artificial Sequence: Synthetic oligonucleotide
  Target: LAMA2; (+) strand; PAM type: YTN; PAM sequence: TTC
agggtcagagatgtgacaaa

SEQ ID NO: 375144 - DNA, 20 bp, Artificial Sequence
  Description of Artificial Sequence: Synthetic oligonucleotide
  Target: LAMA2; (+) strand; PAM type: YTN; PAM sequence: CTG
acccataaattactttctcc

SEQ ID NO: 375145 - DNA, 20 bp, Artificial Sequence
  Description of Artificial Sequence: Synthetic oligonucleotide
  Target: LAMA2; (+) strand; PAM type: YTN; PAM sequence: TTA
ctttctccttacagattttc

SEQ ID NO: 375146 - DNA, 20 bp, Artificial Sequence
  Description of Artificial Sequence: Synthetic oligonucleotide
  Target: LAMA2; (+) strand; PAM type: YTN; PAM sequence: CTT
tctccttacagattttcact

SEQ ID NO: 375147 - DNA, 20 bp, Artificial Sequence
  Description of Artificial Sequence: Synthetic oligonucleotide
  Target: LAMA2; (+) strand; PAM type: YTN; PAM sequence: TTT
ctccttacagattttcactg

SEQ ID NO: 375148 - DNA, 20 bp, Artificial Sequence
  Description of Artificial Sequence: Synthetic oligonucleotide
  Target: LAMA2; (+) strand; PAM type: YTN; PAM sequence: TTC
tccttacagattttcactgg

SEQ ID NO: 375149 - DNA, 20 bp, Artificial Sequence
  Description of Artificial Sequence: Synthetic oligonucleotide
  Target: LAMA2; (+) strand; PAM type: YTN; PAM sequence: CTC
cttacagattttcactggct

SEQ ID NO: 375150 - DNA, 20 bp, Artificial Sequence
  Description of Artificial Sequence: Synthetic oligonucleotide
  Target: LAMA2; (+) strand; PAM type: YTN; PAM sequence: CTT
acagattttcactggctttt

SEQ ID NO: 375151 - DNA, 20 bp, Artificial Sequence
  Description of Artificial Sequence: Synthetic oligonucleotide
  Target: LAMA2; (+) strand; PAM type: YTN; PAM sequence: TTA
cagattttcactggcttttc

SEQ ID NO: 375152 - DNA, 20 bp, Artificial Sequence
  Description of Artificial Sequence: Synthetic oligonucleotide
  Target: LAMA2; (+) strand; PAM type: YTN; PAM sequence: TTT
tcactggcttttcatgacat

SEQ ID NO: 375153 - DNA, 20 bp, Artificial Sequence
  Description of Artificial Sequence: Synthetic oligonucleotide
  Target: LAMA2; (+) strand; PAM type: YTN; PAM sequence: TTT
cactggcttttcatgacatg

SEQ ID NO: 375154 - DNA, 20 bp, Artificial Sequence
  Description of Artificial Sequence: Synthetic oligonucleotide
  Target: LAMA2; (+) strand; PAM type: YTN; PAM sequence: TTC
actggcttttcatgacatgt

SEQ ID NO: 375155 - DNA, 20 bp, Artificial Sequence
  Description of Artificial Sequence: Synthetic oligonucleotide
  Target: LAMA2; (+) strand; PAM type: YTN; PAM sequence: CTG
gcttttcatgacatgttttg

SEQ ID NO: 375156 - DNA, 20 bp, Artificial Sequence
  Description of Artificial Sequence: Synthetic oligonucleotide
  Target: LAMA2; (+) strand; PAM type: YTN; PAM sequence: CTT
ttcatgacatgttttgtata

SEQ ID NO: 375157 - DNA, 20 bp, Artificial Sequence
  Description of Artificial Sequence: Synthetic oligonucleotide
  Target: LAMA2; (+) strand; PAM type: YTN; PAM sequence: TTT
tcatgacatgttttgtatac

SEQ ID NO: 375158 - DNA, 20 bp, Artificial Sequence
  Description of Artificial Sequence: Synthetic oligonucleotide
  Target: LAMA2; (+) strand; PAM type: YTN; PAM sequence: TTT
catgacatgttttgtatacc

SEQ ID NO: 375159 - DNA, 20 bp, Artificial Sequence
  Description of Artificial Sequence: Synthetic oligonucleotide
  Target: LAMA2; (+) strand; PAM type: YTN; PAM sequence: TTC
atgacatgttttgtatacct

SEQ ID NO: 375160 - DNA, 20 bp, Artificial Sequence
  Description of Artificial Sequence: Synthetic oligonucleotide
  Target: LAMA2; (+) strand; PAM type: YTN; PAM sequence: TTT
tgtataccttcgtatattaa

SEQ ID NO: 375161 - DNA, 20 bp, Artificial Sequence
  Description of Artificial Sequence: Synthetic oligonucleotide
  Target: LAMA2; (+) strand; PAM type: YTN; PAM sequence: TTT
gtataccttcgtatattaaa

SEQ ID NO: 375162 - DNA, 20 bp, Artificial Sequence
  Description of Artificial Sequence: Synthetic oligonucleotide
  Target: LAMA2; (+) strand; PAM type: YTN; PAM sequence: TTG
tataccttcgtatattaaaa

SEQ ID NO: 375163 - DNA, 20 bp, Artificial Sequence
  Description of Artificial Sequence: Synthetic oligonucleotide
  Target: LAMA2; (+) strand; PAM type: YTN; PAM sequence: CTT
cgtatattaaaaggaaggtt

SEQ ID NO: 375164 - DNA, 20 bp, Artificial Sequence
  Description of Artificial Sequence: Synthetic oligonucleotide
  Target: LAMA2; (+) strand; PAM type: YTN; PAM sequence: TTC
gtatattaaaaggaaggttt

SEQ ID NO: 375165 - DNA, 20 bp, Artificial Sequence
  Description of Artificial Sequence: Synthetic oligonucleotide
  Target: LAMA2; (+) strand; PAM type: YTN; PAM sequence: TTA
aaaggaaggtttgggattat

SEQ ID NO: 375166 - DNA, 20 bp, Artificial Sequence
  Description of Artificial Sequence: Synthetic oligonucleotide
  Target: LAMA2; (+) strand; PAM type: YTN; PAM sequence: TTT
gggattatctaattctacaa

SEQ ID NO: 375167 - DNA, 20 bp, Artificial Sequence
  Description of Artificial Sequence: Synthetic oligonucleotide
  Target: LAMA2; (+) strand; PAM type: YTN; PAM sequence: TTG
ggattatctaattctacaat

SEQ ID NO: 375168 - DNA, 20 bp, Artificial Sequence
  Description of Artificial Sequence: Synthetic oligonucleotide
  Target: LAMA2; (+) strand; PAM type: YTN; PAM sequence: TTA
tctaattctacaattgaaat

SEQ ID NO: 375169 - DNA, 20 bp, Artificial Sequence
  Description of Artificial Sequence: Synthetic oligonucleotide
  Target: LAMA2; (+) strand; PAM type: YTN; PAM sequence: CTA
attctacaattgaaatgact

SEQ ID NO: 375170 - DNA, 20 bp, Artificial Sequence
  Description of Artificial Sequence: Synthetic oligonucleotide
  Target: LAMA2; (+) strand; PAM type: YTN; PAM sequence: TTC
tacaattgaaatgactgtga

SEQ ID NO: 375171 - DNA, 20 bp, Artificial Sequence
  Description of Artificial Sequence: Synthetic oligonucleotide
  Target: LAMA2; (+) strand; PAM type: YTN; PAM sequence: CTA
caattgaaatgactgtgatc

SEQ ID NO: 375172 - DNA, 20 bp, Artificial Sequence
  Description of Artificial Sequence: Synthetic oligonucleotide
  Target: LAMA2; (+) strand; PAM type: YTN; PAM sequence: TTG
aaatgactgtgatcagtgaa

SEQ ID NO: 375173 - DNA, 20 bp, Artificial Sequence
  Description of Artificial Sequence: Synthetic oligonucleotide
  Target: LAMA2; (+) strand; PAM type: YTN; PAM sequence: CTG
tgatcagtgaaaagtttttt

SEQ ID NO: 375174 - DNA, 20 bp, Artificial Sequence
  Description of Artificial Sequence: Synthetic oligonucleotide
  Target: LAMA2; (+) strand; PAM type: YTN; PAM sequence: TTT
ttttcaaactagaacaaaat

SEQ ID NO: 375175 - DNA, 20 bp, Artificial Sequence
  Description of Artificial Sequence: Synthetic oligonucleotide
  Target: LAMA2; (+) strand; PAM type: YTN; PAM sequence: TTT
tttcaaactagaacaaaatt

SEQ ID NO: 375176 - DNA, 20 bp, Artificial Sequence
  Description of Artificial Sequence: Synthetic oligonucleotide
  Target: LAMA2; (+) strand; PAM type: YTN; PAM sequence: TTT
ttcaaactagaacaaaattc

SEQ ID NO: 375177 - DNA, 20 bp, Artificial Sequence
  Description of Artificial Sequence: Synthetic oligonucleotide
  Target: LAMA2; (+) strand; PAM type: YTN; PAM sequence: TTT
tcaaactagaacaaaattca

SEQ ID NO: 375178 - DNA, 20 bp, Artificial Sequence
  Description of Artificial Sequence: Synthetic oligonucleotide
  Target: LAMA2; (+) strand; PAM type: YTN; PAM sequence: TTT
caaactagaacaaaattcat

SEQ ID NO: 375179 - DNA, 20 bp, Artificial Sequence
  Description of Artificial Sequence: Synthetic oligonucleotide
  Target: LAMA2; (+) strand; PAM type: YTN; PAM sequence: TTC
aaactagaacaaaattcatt

SEQ ID NO: 375180 - DNA, 20 bp, Artificial Sequence
  Description of Artificial Sequence: Synthetic oligonucleotide
  Target: LAMA2; (+) strand; PAM type: YTN; PAM sequence: CTA
gaacaaaattcattgtacat

SEQ ID NO: 375181 - DNA, 20 bp, Artificial Sequence
  Description of Artificial Sequence: Synthetic oligonucleotide
  Target: LAMA2; (+) strand; PAM type: YTN; PAM sequence: TTC
attgtacattaccatttgac

SEQ ID NO: 375182 - DNA, 20 bp, Artificial Sequence
  Description of Artificial Sequence: Synthetic oligonucleotide
  Target: LAMA2; (+) strand; PAM type: YTN; PAM sequence: TTG
tacattaccatttgacctta

SEQ ID NO: 375183 - DNA, 20 bp, Artificial Sequence
  Description of Artificial Sequence: Synthetic oligonucleotide
  Target: LAMA2; (+) strand; PAM type: YTN; PAM sequence: TTA
ccatttgaccttaaacattt

SEQ ID NO: 375184 - DNA, 20 bp, Artificial Sequence
  Description of Artificial Sequence: Synthetic oligonucleotide
  Target: LAMA2; (+) strand; PAM type: YTN; PAM sequence: TTT
gaccttaaacattttttttt

SEQ ID NO: 375185 - DNA, 20 bp, Artificial Sequence
  Description of Artificial Sequence: Synthetic oligonucleotide
  Target: LAMA2; (+) strand; PAM type: YTN; PAM sequence: TTG
accttaaacatttttttttg

SEQ ID NO: 375186 - DNA, 20 bp, Artificial Sequence
  Description of Artificial Sequence: Synthetic oligonucleotide
  Target: LAMA2; (+) strand; PAM type: YTN; PAM sequence: CTT
aaacatttttttttggcagt

SEQ ID NO: 375187 - DNA, 20 bp, Artificial Sequence
  Description of Artificial Sequence: Synthetic oligonucleotide
  Target: LAMA2; (+) strand; PAM type: YTN; PAM sequence: TTA
aacatttttttttggcagtg

SEQ ID NO: 375188 - DNA, 20 bp, Artificial Sequence
  Description of Artificial Sequence: Synthetic oligonucleotide
  Target: LAMA2; (+) strand; PAM type: YTN; PAM sequence: TTT
ttttttggcagtgaatgtgt

SEQ ID NO: 375189 - DNA, 20 bp, Artificial Sequence
  Description of Artificial Sequence: Synthetic oligonucleotide
  Target: LAMA2; (+) strand; PAM type: YTN; PAM sequence: TTT
tttttggcagtgaatgtgta

SEQ ID NO: 375190 - DNA, 20 bp, Artificial Sequence
  Description of Artificial Sequence: Synthetic oligonucleotide
  Target: LAMA2; (+) strand; PAM type: YTN; PAM sequence: TTT
ttttggcagtgaatgtgtat

SEQ ID NO: 375191 - DNA, 20 bp, Artificial Sequence
  Description of Artificial Sequence: Synthetic oligonucleotide
  Target: LAMA2; (+) strand; PAM type: YTN; PAM sequence: TTT
tttggcagtgaatgtgtatt

SEQ ID NO: 375192 - DNA, 20 bp, Artificial Sequence
  Description of Artificial Sequence: Synthetic oligonucleotide
  Target: LAMA2; (+) strand; PAM type: YTN; PAM sequence: TTT
ttggcagtgaatgtgtatta

SEQ ID NO: 375193 - DNA, 20 bp, Artificial Sequence
  Description of Artificial Sequence: Synthetic oligonucleotide
  Target: LAMA2; (+) strand; PAM type: YTN; PAM sequence: TTT
tggcagtgaatgtgtattat

SEQ ID NO: 375194 - DNA, 20 bp, Artificial Sequence
  Description of Artificial Sequence: Synthetic oligonucleotide
  Target: LAMA2; (+) strand; PAM type: YTN; PAM sequence: TTT
ggcagtgaatgtgtattata

SEQ ID NO: 375195 - DNA, 20 bp, Artificial Sequence
  Description of Artificial Sequence: Synthetic oligonucleotide
  Target: LAMA2; (+) strand; PAM type: YTN; PAM sequence: TTG
gcagtgaatgtgtattatat

SEQ ID NO: 375196 - DNA, 20 bp, Artificial Sequence
  Description of Artificial Sequence: Synthetic oligonucleotide
  Target: LAMA2; (+) strand; PAM type: YTN; PAM sequence: TTA
tattcgctttaattcagaca

SEQ ID NO: 375197 - DNA, 20 bp, Artificial Sequence
  Description of Artificial Sequence: Synthetic oligonucleotide
  Target: LAMA2; (+) strand; PAM type: YTN; PAM sequence: TTC
gctttaattcagacatttct

SEQ ID NO: 375198 - DNA, 20 bp, Artificial Sequence
  Description of Artificial Sequence: Synthetic oligonucleotide
  Target: LAMA2; (+) strand; PAM type: YTN; PAM sequence: CTT
taattcagacatttctgaaa

SEQ ID NO: 375199 - DNA, 20 bp, Artificial Sequence
  Description of Artificial Sequence: Synthetic oligonucleotide
  Target: LAMA2; (+) strand; PAM type: YTN; PAM sequence: TTT
aattcagacatttctgaaac

SEQ ID NO: 375200 - DNA, 20 bp, Artificial Sequence
  Description of Artificial Sequence: Synthetic oligonucleotide
  Target: LAMA2; (+) strand; PAM type: YTN; PAM sequence: TTA
attcagacatttctgaaaca

SEQ ID NO: 375201 - DNA, 20 bp, Artificial Sequence
  Description of Artificial Sequence: Synthetic oligonucleotide
  Target: LAMA2; (+) strand; PAM type: YTN; PAM sequence: TTC
agacatttctgaaacaaata

SEQ ID NO: 375202 - DNA, 20 bp, Artificial Sequence
  Description of Artificial Sequence: Synthetic oligonucleotide
  Target: LAMA2; (+) strand; PAM type: YTN; PAM sequence: TTT
ctgaaacaaatagcaggcga

SEQ ID NO: 375203 - DNA, 20 bp, Artificial Sequence
  Description of Artificial Sequence: Synthetic oligonucleotide
  Target: LAMA2; (+) strand; PAM type: YTN; PAM sequence: TTC
tgaaacaaatagcaggcgaa

SEQ ID NO: 375204 - DNA, 20 bp, Artificial Sequence
  Description of Artificial Sequence: Synthetic oligonucleotide
  Target: LAMA2; (+) strand; PAM type: YTN; PAM sequence: CTG
aaacaaatagcaggcgaatt

SEQ ID NO: 375205 - DNA, 20 bp, Artificial Sequence
  Description of Artificial Sequence: Synthetic oligonucleotide
  Target: LAMA2; (+) strand; PAM type: YTN; PAM sequence: TTT
aatcttaatctgtggagata

SEQ ID NO: 375206 - DNA, 20 bp, Artificial Sequence
  Description of Artificial Sequence: Synthetic oligonucleotide
  Target: LAMA2; (+) strand; PAM type: YTN; PAM sequence: TTA
atcttaatctgtggagatac

SEQ ID NO: 375207 - DNA, 20 bp, Artificial Sequence
  Description of Artificial Sequence: Synthetic oligonucleotide
  Target: LAMA2; (+) strand; PAM type: YTN; PAM sequence: CTT
aatctgtggagatactcttt

SEQ ID NO: 375208 - DNA, 20 bp, Artificial Sequence
  Description of Artificial Sequence: Synthetic oligonucleotide
  Target: LAMA2; (+) strand; PAM type: YTN; PAM sequence: TTA
atctgtggagatactctttc

SEQ ID NO: 375209 - DNA, 20 bp, Artificial Sequence
  Description of Artificial Sequence: Synthetic oligonucleotide
  Target: LAMA2; (+) strand; PAM type: YTN; PAM sequence: CTG
tggagatactctttcctttg

SEQ ID NO: 375210 - DNA, 20 bp, Artificial Sequence
  Description of Artificial Sequence: Synthetic oligonucleotide
  Target: LAMA2; (+) strand; PAM type: YTN; PAM sequence: CTC
tttcctttgcctttacattt

SEQ ID NO: 375211 - DNA, 20 bp, Artificial Sequence
  Description of Artificial Sequence: Synthetic oligonucleotide
  Target: LAMA2; (+) strand; PAM type: YTN; PAM sequence: CTT
tcctttgcctttacattttt

SEQ ID NO: 375212 - DNA, 20 bp, Artificial Sequence
  Description of Artificial Sequence: Synthetic oligonucleotide
  Target: LAMA2; (+) strand; PAM type: YTN; PAM sequence: TTT
cctttgcctttacatttttg

SEQ ID NO: 375213 - DNA, 20 bp, Artificial Sequence
  Description of Artificial Sequence: Synthetic oligonucleotide
  Target: LAMA2; (+) strand; PAM type: YTN; PAM sequence: TTC
ctttgcctttacatttttgg

SEQ ID NO: 375214 - DNA, 20 bp, Artificial Sequence
  Description of Artificial Sequence: Synthetic oligonucleotide
  Target: LAMA2; (+) strand; PAM type: YTN; PAM sequence: CTT
tgcctttacatttttggcag

SEQ ID NO: 375215 - DNA, 20 bp, Artificial Sequence
  Description of Artificial Sequence: Synthetic oligonucleotide
  Target: LAMA2; (+) strand; PAM type: YTN; PAM sequence: TTT
gcctttacatttttggcaga

SEQ ID NO: 375216 - DNA, 20 bp, Artificial Sequence
  Description of Artificial Sequence: Synthetic oligonucleotide
  Target: LAMA2; (+) strand; PAM type: YTN; PAM sequence: TTG
cctttacatttttggcagaa

SEQ ID NO: 375217 - DNA, 20 bp, Artificial Sequence
  Description of Artificial Sequence: Synthetic oligonucleotide
  Target: LAMA2; (+) strand; PAM type: YTN; PAM sequence: CTT
tacatttttggcagaataaa

SEQ ID NO: 375218 - DNA, 20 bp, Artificial Sequence
  Description of Artificial Sequence: Synthetic oligonucleotide
  Target: LAMA2; (+) strand; PAM type: YTN; PAM sequence: TTT
acatttttggcagaataaaa

SEQ ID NO: 375219 - DNA, 20 bp, Artificial Sequence
  Description of Artificial Sequence: Synthetic oligonucleotide
  Target: LAMA2; (+) strand; PAM type: YTN; PAM sequence: TTA
catttttggcagaataaaat

SEQ ID NO: 375220 - DNA, 20 bp, Artificial Sequence
  Description of Artificial Sequence: Synthetic oligonucleotide
  Target: LAMA2; (+) strand; PAM type: YTN; PAM sequence: TTT
ttggcagaataaaatgttac

SEQ ID NO: 375221 - DNA, 20 bp, Artificial Sequence
  Description of Artificial Sequence: Synthetic oligonucleotide
  Target: LAMA2; (+) strand; PAM type: YTN; PAM sequence: TTT
tggcagaataaaatgttact

SEQ ID NO: 375222 - DNA, 20 bp, Artificial Sequence
  Description of Artificial Sequence: Synthetic oligonucleotide
  Target: LAMA2; (+) strand; PAM type: YTN; PAM sequence: TTT
ggcagaataaaatgttactc

SEQ ID NO: 375223 - DNA, 20 bp, Artificial Sequence
  Description of Artificial Sequence: Synthetic oligonucleotide
  Target: LAMA2; (+) strand; PAM type: YTN; PAM sequence: TTG
gcagaataaaatgttactct

SEQ ID NO: 375224 - DNA, 20 bp, Artificial Sequence
  Description of Artificial Sequence: Synthetic oligonucleotide
  Target: LAMA2; (+) strand; PAM type: YTN; PAM sequence: TTA
ctcttggggctgggcgcggt

SEQ ID NO: 375225 - DNA, 20 bp, Artificial Sequence
  Description of Artificial Sequence: Synthetic oligonucleotide
  Target: LAMA2; (+) strand; PAM type: YTN; PAM sequence: CTC
ttggggctgggcgcggtggc

SEQ ID NO: 375226 - DNA, 20 bp, Artificial Sequence
  Description of Artificial Sequence: Synthetic oligonucleotide
  Target: LAMA2; (+) strand; PAM type: YTN; PAM sequence: CTT
ggggctgggcgcggtggctc

SEQ ID NO: 375227 - DNA, 20 bp, Artificial Sequence
  Description of Artificial Sequence: Synthetic oligonucleotide
  Target: LAMA2; (+) strand; PAM type: YTN; PAM sequence: TTG
gggctgggcgcggtggctca

SEQ ID NO: 375228 - DNA, 20 bp, Artificial Sequence
  Description of Artificial Sequence: Synthetic oligonucleotide
  Target: LAMA2; (+) strand; PAM type: YTN; PAM sequence: CTG
ggcgcggtggctcatgcctg

SEQ ID NO: 375229 - DNA, 20 bp, Artificial Sequence
  Description of Artificial Sequence: Synthetic oligonucleotide
  Target: LAMA2; (+) strand; PAM type: YTN; PAM sequence: CTC
atgcctgtaatcccagcact

SEQ ID NO: 375230 - DNA, 20 bp, Artificial Sequence
  Description of Artificial Sequence: Synthetic oligonucleotide
  Target: LAMA2; (+) strand; PAM type: YTN; PAM sequence: CTG
taatcccagcactttgggag

SEQ ID NO: 375231 - DNA, 20 bp, Artificial Sequence
  Description of Artificial Sequence: Synthetic oligonucleotide
  Target: LAMA2; (+) strand; PAM type: YTN; PAM sequence: CTT
tgggaggccaaggcaggtgg

SEQ ID NO: 375232 - DNA, 20 bp, Artificial Sequence
  Description of Artificial Sequence: Synthetic oligonucleotide
  Target: LAMA2; (+) strand; PAM type: YTN; PAM sequence: TTT
gggaggccaaggcaggtgga

SEQ ID NO: 375233 - DNA, 20 bp, Artificial Sequence
  Description of Artificial Sequence: Synthetic oligonucleotide
  Target: LAMA2; (+) strand; PAM type: YTN; PAM sequence: TTG
ggaggccaaggcaggtggat

SEQ ID NO: 375234 - DNA, 20 bp, Artificial Sequence
  Description of Artificial Sequence: Synthetic oligonucleotide
  Target: LAMA2; (+) strand; PAM type: YTN; PAM sequence: TTC
aagaacagcctggccaagat

SEQ ID NO: 375235 - DNA, 20 bp, Artificial Sequence
  Description of Artificial Sequence: Synthetic oligonucleotide
  Target: LAMA2; (+) strand; PAM type: YTN; PAM sequence: CTG
gccaagatggtgaaacacca

SEQ ID NO: 375236 - DNA, 20 bp, Artificial Sequence
  Description of Artificial Sequence: Synthetic oligonucleotide
  Target: LAMA2; (+) strand; PAM type: YTN; PAM sequence: CTC
tgctaaaaactacaaaaatc

SEQ ID NO: 375237 - DNA, 20 bp, Artificial Sequence
  Description of Artificial Sequence: Synthetic oligonucleotide
  Target: LAMA2; (+) strand; PAM type: YTN; PAM sequence: CTG
ctaaaaactacaaaaatcag

SEQ ID NO: 375238 - DNA, 20 bp, Artificial Sequence
  Description of Artificial Sequence: Synthetic oligonucleotide
  Target: LAMA2; (+) strand; PAM type: YTN; PAM sequence: CTA
aaaactacaaaaatcagcca

SEQ ID NO: 375239 - DNA, 20 bp, Artificial Sequence
  Description of Artificial Sequence: Synthetic oligonucleotide
  Target: LAMA2; (+) strand; PAM type: YTN; PAM sequence: CTA
caaaaatcagccaggcacgg

SEQ ID NO: 375240 - DNA, 20 bp, Artificial Sequence
  Description of Artificial Sequence: Synthetic oligonucleotide
  Target: LAMA2; (+) strand; PAM type: YTN; PAM sequence: CTG
taatcccagctactcaggag

SEQ ID NO: 375241 - DNA, 20 bp, Artificial Sequence
  Description of Artificial Sequence: Synthetic oligonucleotide
  Target: LAMA2; (+) strand; PAM type: YTN; PAM sequence: CTA
ctcaggaggctgaggcggga

SEQ ID NO: 375242 - DNA, 20 bp, Artificial Sequence
  Description of Artificial Sequence: Synthetic oligonucleotide
  Target: LAMA2; (+) strand; PAM type: YTN; PAM sequence: CTC
aggaggctgaggcgggagaa

SEQ ID NO: 375243 - DNA, 20 bp, Artificial Sequence
  Description of Artificial Sequence: Synthetic oligonucleotide
  Target: LAMA2; (+) strand; PAM type: YTN; PAM sequence: CTG
aggcgggagaatcgcttgaa

SEQ ID NO: 375244 - DNA, 20 bp, Artificial Sequence
  Description of Artificial Sequence: Synthetic oligonucleotide
  Target: LAMA2; (+) strand; PAM type: YTN; PAM sequence: CTT
gaacctgggtggcagaggtt

SEQ ID NO: 375245 - DNA, 20 bp, Artificial Sequence
  Description of Artificial Sequence: Synthetic oligonucleotide
  Target: LAMA2; (+) strand; PAM type: YTN; PAM sequence: TTG
aacctgggtggcagaggttg

SEQ ID NO: 375246 - DNA, 20 bp, Artificial Sequence
  Description of Artificial Sequence: Synthetic oligonucleotide
  Target: LAMA2; (+) strand; PAM type: YTN; PAM sequence: CTG
ggtggcagaggttgcagtga

SEQ ID NO: 375247 - DNA, 20 bp, Artificial Sequence
  Description of Artificial Sequence: Synthetic oligonucleotide
  Target: LAMA2; (+) strand; PAM type: YTN; PAM sequence: TTG
cagtgagccgagatagtgcc

SEQ ID NO: 375248 - DNA, 20 bp, Artificial Sequence
  Description of Artificial Sequence: Synthetic oligonucleotide
  Target: LAMA2; (+) strand; PAM type: YTN; PAM sequence: CTG
cactccagcctgggcgaccg

SEQ ID NO: 375249 - DNA, 20 bp, Artificial Sequence
  Description of Artificial Sequence: Synthetic oligonucleotide
  Target: LAMA2; (+) strand; PAM type: YTN; PAM sequence: CTC
cagcctgggcgaccgagtga

SEQ ID NO: 375250 - DNA, 20 bp, Artificial Sequence
  Description of Artificial Sequence: Synthetic oligonucleotide
  Target: LAMA2; (+) strand; PAM type: YTN; PAM sequence: CTG
ggcgaccgagtgagactcca

SEQ ID NO: 375251 - DNA, 20 bp, Artificial Sequence
  Description of Artificial Sequence: Synthetic oligonucleotide
  Target: LAMA2; (+) strand; PAM type: YTN; PAM sequence: CTC
catctcaaaaaacaaaacaa

SEQ ID NO: 375252 - DNA, 20 bp, Artificial Sequence
  Description of Artificial Sequence: Synthetic oligonucleotide
  Target: LAMA2; (+) strand; PAM type: YTN; PAM sequence: CTC
aaaaaacaaaacaaaccaaa

SEQ ID NO: 375253 - DNA, 20 bp, Artificial Sequence
  Description of Artificial Sequence: Synthetic oligonucleotide
  Target: LAMA2; (+) strand; PAM type: YTN; PAM sequence: TTA
ctccctttgctttttagcaa

SEQ ID NO: 375254 - DNA, 20 bp, Artificial Sequence
  Description of Artificial Sequence: Synthetic oligonucleotide
  Target: LAMA2; (+) strand; PAM type: YTN; PAM sequence: CTC
cctttgctttttagcaaaca

SEQ ID NO: 375255 - DNA, 20 bp, Artificial Sequence
  Description of Artificial Sequence: Synthetic oligonucleotide
  Target: LAMA2; (+) strand; PAM type: YTN; PAM sequence: CTT
tgctttttagcaaacacctt

SEQ ID NO: 375256 - DNA, 20 bp, Artificial Sequence
  Description of Artificial Sequence: Synthetic oligonucleotide
  Target: LAMA2; (+) strand; PAM type: YTN; PAM sequence: TTT
gctttttagcaaacaccttc

SEQ ID NO: 375257 - DNA, 20 bp, Artificial Sequence
  Description of Artificial Sequence: Synthetic oligonucleotide
  Target: LAMA2; (+) strand; PAM type: YTN; PAM sequence: TTG
ctttttagcaaacaccttct

SEQ ID NO: 375258 - DNA, 20 bp, Artificial Sequence
  Description of Artificial Sequence: Synthetic oligonucleotide
  Target: LAMA2; (+) strand; PAM type: YTN; PAM sequence: CTT
tttagcaaacaccttcttct

SEQ ID NO: 375259 - DNA, 20 bp, Artificial Sequence
  Description of Artificial Sequence: Synthetic oligonucleotide
  Target: LAMA2; (+) strand; PAM type: YTN; PAM sequence: TTT
ttagcaaacaccttcttcta

SEQ ID NO: 375260 - DNA, 20 bp, Artificial Sequence
  Description of Artificial Sequence: Synthetic oligonucleotide
  Target: LAMA2; (+) strand; PAM type: YTN; PAM sequence: TTT
tagcaaacaccttcttctag

SEQ ID NO: 375261 - DNA, 20 bp, Artificial Sequence
  Description of Artificial Sequence: Synthetic oligonucleotide
  Target: LAMA2; (+) strand; PAM type: YTN; PAM sequence: TTT
agcaaacaccttcttctagt

SEQ ID NO: 375262 - DNA, 20 bp, Artificial Sequence
  Description of Artificial Sequence: Synthetic oligonucleotide
  Target: LAMA2; (+) strand; PAM type: YTN; PAM sequence: TTA
gcaaacaccttcttctagtt

SEQ ID NO: 375263 - DNA, 20 bp, Artificial Sequence
  Description of Artificial Sequence: Synthetic oligonucleotide
  Target: LAMA2; (+) strand; PAM type: YTN; PAM sequence: CTT
cttctagttccatcatttaa

SEQ ID NO: 375264 - DNA, 20 bp, Artificial Sequence
  Description of Artificial Sequence: Synthetic oligonucleotide
  Target: LAMA2; (+) strand; PAM type: YTN; PAM sequence: TTC
ttctagttccatcatttaaa

SEQ ID NO: 375265 - DNA, 20 bp, Artificial Sequence
  Description of Artificial Sequence: Synthetic oligonucleotide
  Target: LAMA2; (+) strand; PAM type: YTN; PAM sequence: CTT
ctagttccatcatttaaaag

SEQ ID NO: 375266 - DNA, 20 bp, Artificial Sequence
  Description of Artificial Sequence: Synthetic oligonucleotide
  Target: LAMA2; (+) strand; PAM type: YTN; PAM sequence: TTC
tagttccatcatttaaaagc

SEQ ID NO: 375267 - DNA, 20 bp, Artificial Sequence
  Description of Artificial Sequence: Synthetic oligonucleotide
  Target: LAMA2; (+) strand; PAM type: YTN; PAM sequence: CTA
gttccatcatttaaaagcta

SEQ ID NO: 375268 - DNA, 20 bp, Artificial Sequence
  Description of Artificial Sequence: Synthetic oligonucleotide
  Target: LAMA2; (+) strand; PAM type: YTN; PAM sequence: TTC
catcatttaaaagctacttc

SEQ ID NO: 375269 - DNA, 20 bp, Artificial Sequence
  Description of Artificial Sequence: Synthetic oligonucleotide
  Target: LAMA2; (+) strand; PAM type: YTN; PAM sequence: TTT
aaaagctacttcctgtgagc

SEQ ID NO: 375270 - DNA, 20 bp, Artificial Sequence
  Description of Artificial Sequence: Synthetic oligonucleotide
  Target: LAMA2; (+) strand; PAM type: YTN; PAM sequence: TTA
aaagctacttcctgtgagca

SEQ ID NO: 375271 - DNA, 20 bp, Artificial Sequence
  Description of Artificial Sequence: Synthetic oligonucleotide
  Target: LAMA2; (+) strand; PAM type: YTN; PAM sequence: CTA
cttcctgtgagcagtctacc

SEQ ID NO: 375272 - DNA, 20 bp, Artificial Sequence
  Description of Artificial Sequence: Synthetic oligonucleotide
  Target: LAMA2; (+) strand; PAM type: YTN; PAM sequence: CTT
cctgtgagcagtctacctaa

SEQ ID NO: 375273 - DNA, 20 bp, Artificial Sequence
  Description of Artificial Sequence: Synthetic oligonucleotide
  Target: LAMA2; (+) strand; PAM type: YTN; PAM sequence: TTC
ctgtgagcagtctacctaat

SEQ ID NO: 375274 - DNA, 20 bp, Artificial Sequence
  Description of Artificial Sequence: Synthetic oligonucleotide
  Target: LAMA2; (+) strand; PAM type: YTN; PAM sequence: CTG
tgagcagtctacctaatgga

SEQ ID NO: 375275 - DNA, 20 bp, Artificial Sequence
  Description of Artificial Sequence: Synthetic oligonucleotide
  Target: LAMA2; (+) strand; PAM type: YTN; PAM sequence: CTA
cctaatggaagtttcagtag

SEQ ID NO: 375276 - DNA, 20 bp, Artificial Sequence
  Description of Artificial Sequence: Synthetic oligonucleotide
  Target: LAMA2; (+) strand; PAM type: YTN; PAM sequence: CTA
atggaagtttcagtagagaa

SEQ ID NO: 375277 - DNA, 20 bp, Artificial Sequence
  Description of Artificial Sequence: Synthetic oligonucleotide
  Target: LAMA2; (+) strand; PAM type: YTN; PAM sequence: TTT
cagtagagaagttaatcaag

SEQ ID NO: 375278 - DNA, 20 bp, Artificial Sequence
  Description of Artificial Sequence: Synthetic oligonucleotide
  Target: LAMA2; (+) strand; PAM type: YTN; PAM sequence: TTC
agtagagaagttaatcaaga

SEQ ID NO: 375279 - DNA, 20 bp, Artificial Sequence
  Description of Artificial Sequence: Synthetic oligonucleotide
  Target: LAMA2; (+) strand; PAM type: YTN; PAM sequence: TTA
atcaagatatttttaaagat

SEQ ID NO: 375280 - DNA, 20 bp, Artificial Sequence
  Description of Artificial Sequence: Synthetic oligonucleotide
  Target: LAMA2; (+) strand; PAM type: YTN; PAM sequence: TTT
ttaaagatgcattattttgc

SEQ ID NO: 375281 - DNA, 20 bp, Artificial Sequence
  Description of Artificial Sequence: Synthetic oligonucleotide
  Target: LAMA2; (+) strand; PAM type: YTN; PAM sequence: TTT
taaagatgcattattttgct

SEQ ID NO: 375282 - DNA, 20 bp, Artificial Sequence
  Description of Artificial Sequence: Synthetic oligonucleotide
  Target: LAMA2; (+) strand; PAM type: YTN; PAM sequence: TTT
aaagatgcattattttgcta

SEQ ID NO: 375283 - DNA, 20 bp, Artificial Sequence
  Description of Artificial Sequence: Synthetic oligonucleotide
  Target: LAMA2; (+) strand; PAM type: YTN; PAM sequence: TTA
aagatgcattattttgctaa

SEQ ID NO: 375284 - DNA, 20 bp, Artificial Sequence
  Description of Artificial Sequence: Synthetic oligonucleotide
  Target: LAMA2; (+) strand; PAM type: YTN; PAM sequence: TTA
ttttgctaaaacaaaatatt

SEQ ID NO: 375285 - DNA, 20 bp, Artificial Sequence
  Description of Artificial Sequence: Synthetic oligonucleotide
  Target: LAMA2; (+) strand; PAM type: YTN; PAM sequence: TTT
tgctaaaacaaaatattcaa

SEQ ID NO: 375286 - DNA, 20 bp, Artificial Sequence
  Description of Artificial Sequence: Synthetic oligonucleotide
  Target: LAMA2; (+) strand; PAM type: YTN; PAM sequence: TTT
gctaaaacaaaatattcaat

SEQ ID NO: 375287 - DNA, 20 bp, Artificial Sequence
  Description of Artificial Sequence: Synthetic oligonucleotide
  Target: LAMA2; (+) strand; PAM type: YTN; PAM sequence: TTG
ctaaaacaaaatattcaatt

SEQ ID NO: 375288 - DNA, 20 bp, Artificial Sequence
  Description of Artificial Sequence: Synthetic oligonucleotide
  Target: LAMA2; (+) strand; PAM type: YTN; PAM sequence: CTA
aaacaaaatattcaattaaa

SEQ ID NO: 375289 - DNA, 20 bp, Artificial Sequence
  Description of Artificial Sequence: Synthetic oligonucleotide
  Target: LAMA2; (+) strand; PAM type: YTN; PAM sequence: TTC
aattaaaatacagcatgttg

SEQ ID NO: 375290 - DNA, 20 bp, Artificial Sequence
  Description of Artificial Sequence: Synthetic oligonucleotide
  Target: LAMA2; (+) strand; PAM type: YTN; PAM sequence: TTA
aaatacagcatgttgttctc

SEQ ID NO: 375291 - DNA, 20 bp, Artificial Sequence
  Description of Artificial Sequence: Synthetic oligonucleotide
  Target: LAMA2; (+) strand; PAM type: YTN; PAM sequence: TTG
ttctcagtccctgaacatac

SEQ ID NO: 375292 - DNA, 20 bp, Artificial Sequence
  Description of Artificial Sequence: Synthetic oligonucleotide
  Target: LAMA2; (+) strand; PAM type: YTN; PAM sequence: TTC
tcagtccctgaacataccga

SEQ ID NO: 375293 - DNA, 20 bp, Artificial Sequence
  Description of Artificial Sequence: Synthetic oligonucleotide
  Target: LAMA2; (+) strand; PAM type: YTN; PAM sequence: CTC
agtccctgaacataccgatt

SEQ ID NO: 375294 - DNA, 20 bp, Artificial Sequence
  Description of Artificial Sequence: Synthetic oligonucleotide
  Target: LAMA2; (+) strand; PAM type: YTN; PAM sequence: CTG
aacataccgattgccctgct

SEQ ID NO: 375295 - DNA, 20 bp, Artificial Sequence
  Description of Artificial Sequence: Synthetic oligonucleotide
  Target: LAMA2; (+) strand; PAM type: YTN; PAM sequence: TTG
ccctgctttcagtatggcaa

SEQ ID NO: 375296 - DNA, 20 bp, Artificial Sequence
  Description of Artificial Sequence: Synthetic oligonucleotide
  Target: LAMA2; (+) strand; PAM type: YTN; PAM sequence: CTG
ctttcagtatggcaagcaac

SEQ ID NO: 375297 - DNA, 20 bp, Artificial Sequence
  Description of Artificial Sequence: Synthetic oligonucleotide
  Target: LAMA2; (+) strand; PAM type: YTN; PAM sequence: CTT
tcagtatggcaagcaacttc

SEQ ID NO: 375298 - DNA, 20 bp, Artificial Sequence
  Description of Artificial Sequence: Synthetic oligonucleotide
  Target: LAMA2; (+) strand; PAM type: YTN; PAM sequence: TTT
cagtatggcaagcaacttca

SEQ ID NO: 375299 - DNA, 20 bp, Artificial Sequence
  Description of Artificial Sequence: Synthetic oligonucleotide
  Target: LAMA2; (+) strand; PAM type: YTN; PAM sequence: TTC
agtatggcaagcaacttcag

SEQ ID NO: 375300 - DNA, 20 bp, Artificial Sequence
  Description of Artificial Sequence: Synthetic oligonucleotide
  Target: LAMA2; (+) strand; PAM type: YTN; PAM sequence: CTT
cagattcctccatgagggtg

SEQ ID NO: 375301 - DNA, 20 bp, Artificial Sequence
  Description of Artificial Sequence: Synthetic oligonucleotide
  Target: LAMA2; (+) strand; PAM type: YTN; PAM sequence: TTC
agattcctccatgagggtgg

SEQ ID NO: 375302 - DNA, 20 bp, Artificial Sequence
  Description of Artificial Sequence: Synthetic oligonucleotide
  Target: LAMA2; (+) strand; PAM type: YTN; PAM sequence: TTC
ctccatgagggtggacagat

SEQ ID NO: 375303 - DNA, 20 bp, Artificial Sequence
  Description of Artificial Sequence: Synthetic oligonucleotide
  Target: LAMA2; (+) strand; PAM type: YTN; PAM sequence: CTC
catgagggtggacagatttg

SEQ ID NO: 375304 - DNA, 20 bp, Artificial Sequence
  Description of Artificial Sequence: Synthetic oligonucleotide
  Target: LAMA2; (+) strand; PAM type: YTN; PAM sequence: TTT
gctctagcgctttcacaaaa

SEQ ID NO: 375305 - DNA, 20 bp, Artificial Sequence
  Description of Artificial Sequence: Synthetic oligonucleotide
  Target: LAMA2; (+) strand; PAM type: YTN; PAM sequence: TTG
ctctagcgctttcacaaaaa

SEQ ID NO: 375306 - DNA, 20 bp, Artificial Sequence
  Description of Artificial Sequence: Synthetic oligonucleotide
  Target: LAMA2; (+) strand; PAM type: YTN; PAM sequence: CTC
tagcgctttcacaaaaatac

SEQ ID NO: 375307 - DNA, 20 bp, Artificial Sequence
  Description of Artificial Sequence: Synthetic oligonucleotide
  Target: LAMA2; (+) strand; PAM type: YTN; PAM sequence: CTA
gcgctttcacaaaaatacat

SEQ ID NO: 375308 - DNA, 20 bp, Artificial Sequence
  Description of Artificial Sequence: Synthetic oligonucleotide
  Target: LAMA2; (+) strand; PAM type: YTN; PAM sequence: CTT
tcacaaaaatacattgtatt

SEQ ID NO: 375309 - DNA, 20 bp, Artificial Sequence
  Description of Artificial Sequence: Synthetic oligonucleotide
  Target: LAMA2; (+) strand; PAM type: YTN; PAM sequence: TTT
cacaaaaatacattgtattt

SEQ ID NO: 375310 - DNA, 20 bp, Artificial Sequence
  Description of Artificial Sequence: Synthetic oligonucleotide
  Target: LAMA2; (+) strand; PAM type: YTN; PAM sequence: TTC
acaaaaatacattgtatttg

SEQ ID NO: 375311 - DNA, 20 bp, Artificial Sequence
  Description of Artificial Sequence: Synthetic oligonucleotide
  Target: LAMA2; (+) strand; PAM type: YTN; PAM sequence: TTG
tatttgtgataaagacagct

SEQ ID NO: 375312 - DNA, 20 bp, Artificial Sequence
  Description of Artificial Sequence: Synthetic oligonucleotide
  Target: LAMA2; (+) strand; PAM type: YTN; PAM sequence: TTT
gtgataaagacagctaagca

SEQ ID NO: 375313 - DNA, 20 bp, Artificial Sequence
  Description of Artificial Sequence: Synthetic oligonucleotide
  Target: LAMA2; (+) strand; PAM type: YTN; PAM sequence: TTG
tgataaagacagctaagcag

SEQ ID NO: 375314 - DNA, 20 bp, Artificial Sequence
  Description of Artificial Sequence: Synthetic oligonucleotide
  Target: LAMA2; (+) strand; PAM type: YTN; PAM sequence: CTA
agcagaagcaagcatttctc

SEQ ID NO: 375315 - DNA, 20 bp, Artificial Sequence
  Description of Artificial Sequence: Synthetic oligonucleotide
  Target: LAMA2; (+) strand; PAM type: YTN; PAM sequence: TTT
ctccgatgtcaaactggcct

SEQ ID NO: 375316 - DNA, 20 bp, Artificial Sequence
  Description of Artificial Sequence: Synthetic oligonucleotide
  Target: LAMA2; (+) strand; PAM type: YTN; PAM sequence: TTC
tccgatgtcaaactggcctt

SEQ ID NO: 375317 - DNA, 20 bp, Artificial Sequence
  Description of Artificial Sequence: Synthetic oligonucleotide
  Target: LAMA2; (+) strand; PAM type: YTN; PAM sequence: CTC
cgatgtcaaactggccttac

SEQ ID NO: 375318 - DNA, 20 bp, Artificial Sequence
  Description of Artificial Sequence: Synthetic oligonucleotide
  Target: LAMA2; (+) strand; PAM type: YTN; PAM sequence: CTG
gccttactgtaggaagtttg

SEQ ID NO: 375319 - DNA, 20 bp, Artificial Sequence
  Description of Artificial Sequence: Synthetic oligonucleotide
  Target: LAMA2; (+) strand; PAM type: YTN; PAM sequence: CTT
actgtaggaagtttgaaaat

SEQ ID NO: 375320 - DNA, 20 bp, Artificial Sequence
  Description of Artificial Sequence: Synthetic oligonucleotide
  Target: LAMA2; (+) strand; PAM type: YTN; PAM sequence: TTA
ctgtaggaagtttgaaaata

SEQ ID NO: 375321 - DNA, 20 bp, Artificial Sequence
  Description of Artificial Sequence: Synthetic oligonucleotide
  Target: LAMA2; (+) strand; PAM type: YTN; PAM sequence: CTG
taggaagtttgaaaatatca

SEQ ID NO: 375322 - DNA, 20 bp, Artificial Sequence
  Description of Artificial Sequence: Synthetic oligonucleotide
  Target: LAMA2; (+) strand; PAM type: YTN; PAM sequence: TTT
gaaaatatcatctgcttctg

SEQ ID NO: 375323 - DNA, 20 bp, Artificial Sequence
  Description of Artificial Sequence: Synthetic oligonucleotide
  Target: LAMA2; (+) strand; PAM type: YTN; PAM sequence: TTG
aaaatatcatctgcttctgt

SEQ ID NO: 375324 - DNA, 20 bp, Artificial Sequence
  Description of Artificial Sequence: Synthetic oligonucleotide
  Target: LAMA2; (+) strand; PAM type: YTN; PAM sequence: CTG
cttctgtctcttgaataata

SEQ ID NO: 375325 - DNA, 20 bp, Artificial Sequence
  Description of Artificial Sequence: Synthetic oligonucleotide
  Target: LAMA2; (+) strand; PAM type: YTN; PAM sequence: CTT
ctgtctcttgaataatatca

SEQ ID NO: 375326 - DNA, 20 bp, Artificial Sequence
  Description of Artificial Sequence: Synthetic oligonucleotide
  Target: LAMA2; (+) strand; PAM type: YTN; PAM sequence: TTC
tgtctcttgaataatatcat

SEQ ID NO: 375327 - DNA, 20 bp, Artificial Sequence
  Description of Artificial Sequence: Synthetic oligonucleotide
  Target: LAMA2; (+) strand; PAM type: YTN; PAM sequence: CTG
tctcttgaataatatcattg

SEQ ID NO: 375328 - DNA, 20 bp, Artificial Sequence
  Description of Artificial Sequence: Synthetic oligonucleotide
  Target: LAMA2; (+) strand; PAM type: YTN; PAM sequence: CTC
ttgaataatatcattgctct

SEQ ID NO: 375329 - DNA, 20 bp, Artificial Sequence
  Description of Artificial Sequence: Synthetic oligonucleotide
  Target: LAMA2; (+) strand; PAM type: YTN; PAM sequence: CTT
gaataatatcattgctctgt

SEQ ID NO: 375330 - DNA, 20 bp, Artificial Sequence
  Description of Artificial Sequence: Synthetic oligonucleotide
  Target: LAMA2; (+) strand; PAM type: YTN; PAM sequence: TTG
aataatatcattgctctgtt

SEQ ID NO: 375331 - DNA, 20 bp, Artificial Sequence
  Description of Artificial Sequence: Synthetic oligonucleotide
  Target: LAMA2; (+) strand; PAM type: YTN; PAM sequence: TTG
ctctgttttgtttttatttt

SEQ ID NO: 375332 - DNA, 20 bp, Artificial Sequence
  Description of Artificial Sequence: Synthetic oligonucleotide
  Target: LAMA2; (+) strand; PAM type: YTN; PAM sequence: CTC
tgttttgtttttattttatt

SEQ ID NO: 375333 - DNA, 20 bp, Artificial Sequence
  Description of Artificial Sequence: Synthetic oligonucleotide
  Target: LAMA2; (+) strand; PAM type: YTN; PAM sequence: CTG
ttttgtttttattttatttt

SEQ ID NO: 375334 - DNA, 20 bp, Artificial Sequence
  Description of Artificial Sequence: Synthetic oligonucleotide
  Target: LAMA2; (+) strand; PAM type: YTN; PAM sequence: TTT
tgtttttattttattttatg

SEQ ID NO: 375335 - DNA, 20 bp, Artificial Sequence
  Description of Artificial Sequence: Synthetic oligonucleotide
  Target: LAMA2; (+) strand; PAM type: YTN; PAM sequence: TTT
gtttttattttattttatgg

SEQ ID NO: 375336 - DNA, 20 bp, Artificial Sequence
  Description of Artificial Sequence: Synthetic oligonucleotide
  Target: LAMA2; (+) strand; PAM type: YTN; PAM sequence: TTG
tttttattttattttatggt

SEQ ID NO: 375337 - DNA, 20 bp, Artificial Sequence
  Description of Artificial Sequence: Synthetic oligonucleotide
  Target: LAMA2; (+) strand; PAM type: YTN; PAM sequence: TTT
ttattttattttatggttgg

SEQ ID NO: 375338 - DNA, 20 bp, Artificial Sequence
  Description of Artificial Sequence: Synthetic oligonucleotide
  Target: LAMA2; (+) strand; PAM type: YTN; PAM sequence: TTT
tattttattttatggttggt

SEQ ID NO: 375339 - DNA, 20 bp, Artificial Sequence
  Description of Artificial Sequence: Synthetic oligonucleotide
  Target: LAMA2; (+) strand; PAM type: YTN; PAM sequence: TTT
attttattttatggttggtt

SEQ ID NO: 375340 - DNA, 20 bp, Artificial Sequence
  Description of Artificial Sequence: Synthetic oligonucleotide
  Target: LAMA2; (+) strand; PAM type: YTN; PAM sequence: TTA
ttttattttatggttggttt

SEQ ID NO: 375341 - DNA, 20 bp, Artificial Sequence
  Description of Artificial Sequence: Synthetic oligonucleotide
  Target: LAMA2; (+) strand; PAM type: YTN; PAM sequence: TTT
tattttatggttggttttta

SEQ ID NO: 375342 - DNA, 20 bp, Artificial Sequence
  Description of Artificial Sequence: Synthetic oligonucleotide
  Target: LAMA2; (+) strand; PAM type: YTN; PAM sequence: TTT
attttatggttggtttttaa

SEQ ID NO: 375343 - DNA, 20 bp, Artificial Sequence
  Description of Artificial Sequence: Synthetic oligonucleotide
  Target: LAMA2; (+) strand; PAM type: YTN; PAM sequence: TTA
ttttatggttggtttttaaa

SEQ ID NO: 375344 - DNA, 20 bp, Artificial Sequence
  Description of Artificial Sequence: Synthetic oligonucleotide
  Target: LAMA2; (+) strand; PAM type: YTN; PAM sequence: TTT
tatggttggtttttaaagcc

SEQ ID NO: 375345 - DNA, 20 bp, Artificial Sequence
  Description of Artificial Sequence: Synthetic oligonucleotide
  Target: LAMA2; (+) strand; PAM type: YTN; PAM sequence: TTT
atggttggtttttaaagccc

SEQ ID NO: 375346 - DNA, 20 bp, Artificial Sequence
  Description of Artificial Sequence: Synthetic oligonucleotide
  Target: LAMA2; (+) strand; PAM type: YTN; PAM sequence: TTA
tggttggtttttaaagccca

SEQ ID NO: 375347 - DNA, 20 bp, Artificial Sequence
  Description of Artificial Sequence: Synthetic oligonucleotide
  Target: LAMA2; (+) strand; PAM type: YTN; PAM sequence: TTG
gtttttaaagcccaatatgt

SEQ ID NO: 375348 - DNA, 20 bp, Artificial Sequence
  Description of Artificial Sequence: Synthetic oligonucleotide
  Target: LAMA2; (+) strand; PAM type: YTN; PAM sequence: TTT
ttaaagcccaatatgtggcg

SEQ ID NO: 375349 - DNA, 20 bp, Artificial Sequence
  Description of Artificial Sequence: Synthetic oligonucleotide
  Target: LAMA2; (+) strand; PAM type: YTN; PAM sequence: TTT
taaagcccaatatgtggcgg

SEQ ID NO: 375350 - DNA, 20 bp, Artificial Sequence
  Description of Artificial Sequence: Synthetic oligonucleotide
  Target: LAMA2; (+) strand; PAM type: YTN; PAM sequence: TTT
aaagcccaatatgtggcggg

SEQ ID NO: 375351 - DNA, 20 bp, Artificial Sequence
  Description of Artificial Sequence: Synthetic oligonucleotide
  Target: LAMA2; (+) strand; PAM type: YTN; PAM sequence: TTA
aagcccaatatgtggcggga

SEQ ID NO: 375352 - DNA, 20 bp, Artificial Sequence
  Description of Artificial Sequence: Synthetic oligonucleotide
  Target: LAMA2; (+) strand; PAM type: YTN; PAM sequence: TTC
tgtgtgctatgtgactgcga

SEQ ID NO: 375353 - DNA, 20 bp, Artificial Sequence
  Description of Artificial Sequence: Synthetic oligonucleotide
  Target: LAMA2; (+) strand; PAM type: YTN; PAM sequence: CTG
tgtgctatgtgactgcgatc

SEQ ID NO: 375354 - DNA, 20 bp, Artificial Sequence
  Description of Artificial Sequence: Synthetic oligonucleotide
  Target: LAMA2; (+) strand; PAM type: YTN; PAM sequence: CTA
tgtgactgcgatcccgttgg

SEQ ID NO: 375355 - DNA, 20 bp, Artificial Sequence
  Description of Artificial Sequence: Synthetic oligonucleotide
  Target: LAMA2; (+) strand; PAM type: YTN; PAM sequence: CTG
cgatcccgttggctctgtgt

SEQ ID NO: 375356 - DNA, 20 bp, Artificial Sequence
  Description of Artificial Sequence: Synthetic oligonucleotide
  Target: LAMA2; (+) strand; PAM type: YTN; PAM sequence: TTG
gctctgtgtcaccgcaatgt

SEQ ID NO: 375357 - DNA, 20 bp, Artificial Sequence
  Description of Artificial Sequence: Synthetic oligonucleotide
  Target: LAMA2; (+) strand; PAM type: YTN; PAM sequence: CTC
tgtgtcaccgcaatgtgata

SEQ ID NO: 375358 - DNA, 20 bp, Artificial Sequence
  Description of Artificial Sequence: Synthetic oligonucleotide
  Target: LAMA2; (+) strand; PAM type: YTN; PAM sequence: CTG
tgtcaccgcaatgtgatatt

SEQ ID NO: 375359 - DNA, 20 bp, Artificial Sequence
  Description of Artificial Sequence: Synthetic oligonucleotide
  Target: LAMA2; (+) strand; PAM type: YTN; PAM sequence: TTA
caggaagatgtgtctgtaaa

SEQ ID NO: 375360 - DNA, 20 bp, Artificial Sequence
  Description of Artificial Sequence: Synthetic oligonucleotide
  Target: LAMA2; (+) strand; PAM type: YTN; PAM sequence: CTG
taaatcaggcttcgtaggga

SEQ ID NO: 375361 - DNA, 20 bp, Artificial Sequence
  Description of Artificial Sequence: Synthetic oligonucleotide
  Target: LAMA2; (+) strand; PAM type: YTN; PAM sequence: CTT
cgtagggaaacagtgcaacc

SEQ ID NO: 375362 - DNA, 20 bp, Artificial Sequence
  Description of Artificial Sequence: Synthetic oligonucleotide
  Target: LAMA2; (+) strand; PAM type: YTN; PAM sequence: TTC
gtagggaaacagtgcaacct

SEQ ID NO: 375363 - DNA, 20 bp, Artificial Sequence
  Description of Artificial Sequence: Synthetic oligonucleotide
  Target: LAMA2; (+) strand; PAM type: YTN; PAM sequence: CTC
ggcaggcaggtgcaccaaca

SEQ ID NO: 375364 - DNA, 20 bp, Artificial Sequence
  Description of Artificial Sequence: Synthetic oligonucleotide
  Target: LAMA2; (+) strand; PAM type: YTN; PAM sequence: CTG
ggttctcctcagaggtgggc

SEQ ID NO: 375365 - DNA, 20 bp, Artificial Sequence
  Description of Artificial Sequence: Synthetic oligonucleotide
  Target: LAMA2; (+) strand; PAM type: YTN; PAM sequence: TTC
tcctcagaggtgggctatcg

SEQ ID NO: 375366 - DNA, 20 bp, Artificial Sequence
  Description of Artificial Sequence: Synthetic oligonucleotide
  Target: LAMA2; (+) strand; PAM type: YTN; PAM sequence: CTC
ctcagaggtgggctatcggc

SEQ ID NO: 375367 - DNA, 20 bp, Artificial Sequence
  Description of Artificial Sequence: Synthetic oligonucleotide
  Target: LAMA2; (+) strand; PAM type: YTN; PAM sequence: CTC
agaggtgggctatcggcagc

SEQ ID NO: 375368 - DNA, 20 bp, Artificial Sequence
  Description of Artificial Sequence: Synthetic oligonucleotide
  Target: LAMA2; (+) strand; PAM type: YTN; PAM sequence: CTA
tcggcagctccagcgggtgc

SEQ ID NO: 375369 - DNA, 20 bp, Artificial Sequence
  Description of Artificial Sequence: Synthetic oligonucleotide
  Target: LAMA2; (+) strand; PAM type: YTN; PAM sequence: CTC
cagcgggtgccctcggggag

SEQ ID NO: 375370 - DNA, 20 bp, Artificial Sequence
  Description of Artificial Sequence: Synthetic oligonucleotide
  Target: LAMA2; (+) strand; PAM type: YTN; PAM sequence: CTC
ggggagcctatcgggcccca

SEQ ID NO: 375371 - DNA, 20 bp, Artificial Sequence
  Description of Artificial Sequence: Synthetic oligonucleotide
  Target: LAMA2; (+) strand; PAM type: YTN; PAM sequence: CTA
tcgggccccagctccggtaa

SEQ ID NO: 375372 - DNA, 20 bp, Artificial Sequence
  Description of Artificial Sequence: Synthetic oligonucleotide
  Target: LAMA2; (+) strand; PAM type: YTN; PAM sequence: CTC
cggtaatcccagaggcgctg

SEQ ID NO: 375373 - DNA, 20 bp, Artificial Sequence
  Description of Artificial Sequence: Synthetic oligonucleotide
  Target: LAMA2; (+) strand; PAM type: YTN; PAM sequence: CTG
catggctcatgcctctgcat

SEQ ID NO: 375374 - DNA, 20 bp, Artificial Sequence
  Description of Artificial Sequence: Synthetic oligonucleotide
  Target: LAMA2; (+) strand; PAM type: YTN; PAM sequence: CTC
atgcctctgcatgttgtgtt

SEQ ID NO: 375375 - DNA, 20 bp, Artificial Sequence
  Description of Artificial Sequence: Synthetic oligonucleotide
  Target: LAMA2; (+) strand; PAM type: YTN; PAM sequence: CTC
tgcatgttgtgttctgtgtg

SEQ ID NO: 375376 - DNA, 20 bp, Artificial Sequence
  Description of Artificial Sequence: Synthetic oligonucleotide
  Target: LAMA2; (+) strand; PAM type: YTN; PAM sequence: CTG
catgttgtgttctgtgtgct

SEQ ID NO: 375377 - DNA, 20 bp, Artificial Sequence
  Description of Artificial Sequence: Synthetic oligonucleotide
  Target: LAMA2; (+) strand; PAM type: YTN; PAM sequence: TTG
tgttctgtgtgctgtggctg

SEQ ID NO: 375378 - DNA, 20 bp, Artificial Sequence
  Description of Artificial Sequence: Synthetic oligonucleotide
  Target: LAMA2; (+) strand; PAM type: YTN; PAM sequence: TTC
tgtgtgctgtggctgaagtt

SEQ ID NO: 375379 - DNA, 20 bp, Artificial Sequence
  Description of Artificial Sequence: Synthetic oligonucleotide
  Target: LAMA2; (+) strand; PAM type: YTN; PAM sequence: CTG
tgtgctgtggctgaagttcc

SEQ ID NO: 375380 - DNA, 20 bp, Artificial Sequence
  Description of Artificial Sequence: Synthetic oligonucleotide
  Target: LAMA2; (+) strand; PAM type: YTN; PAM sequence: CTG
tggctgaagttccctggtgg

SEQ ID NO: 375381 - DNA, 20 bp, Artificial Sequence
  Description of Artificial Sequence: Synthetic oligonucleotide
  Target: LAMA2; (+) strand; PAM type: YTN; PAM sequence: CTG
aagttccctggtggcatttt

SEQ ID NO: 375382 - DNA, 20 bp, Artificial Sequence
  Description of Artificial Sequence: Synthetic oligonucleotide
  Target: LAMA2; (+) strand; PAM type: YTN; PAM sequence: TTC
cctggtggcattttaccaaa

SEQ ID NO: 375383 - DNA, 20 bp, Artificial Sequence
  Description of Artificial Sequence: Synthetic oligonucleotide
  Target: LAMA2; (+) strand; PAM type: YTN; PAM sequence: CTG
gtggcattttaccaaataac

SEQ ID NO: 375384 - DNA, 20 bp, Artificial Sequence
  Description of Artificial Sequence: Synthetic oligonucleotide
  Target: LAMA2; (+) strand; PAM type: YTN; PAM sequence: TTT
taccaaataacagttgctaa

SEQ ID NO: 375385 - DNA, 20 bp, Artificial Sequence
  Description of Artificial Sequence: Synthetic oligonucleotide
  Target: LAMA2; (+) strand; PAM type: YTN; PAM sequence: TTT
accaaataacagttgctaag

SEQ ID NO: 375386 - DNA, 20 bp, Artificial Sequence
  Description of Artificial Sequence: Synthetic oligonucleotide
  Target: LAMA2; (+) strand; PAM type: YTN; PAM sequence: TTA
ccaaataacagttgctaagt

SEQ ID NO: 375387 - DNA, 20 bp, Artificial Sequence
  Description of Artificial Sequence: Synthetic oligonucleotide
  Target: LAMA2; (+) strand; PAM type: YTN; PAM sequence: TTG
ctaagtgtgcaaattgcaaa

SEQ ID NO: 375388 - DNA, 20 bp, Artificial Sequence
  Description of Artificial Sequence: Synthetic oligonucleotide
  Target: LAMA2; (+) strand; PAM type: YTN; PAM sequence: CTA
agtgtgcaaattgcaaatgc

SEQ ID NO: 375389 - DNA, 20 bp, Artificial Sequence
  Description of Artificial Sequence: Synthetic oligonucleotide
  Target: LAMA2; (+) strand; PAM type: YTN; PAM sequence: TTG
caaatgcaaagattagacaa

SEQ ID NO: 375390 - DNA, 20 bp, Artificial Sequence
  Description of Artificial Sequence: Synthetic oligonucleotide
  Target: LAMA2; (+) strand; PAM type: YTN; PAM sequence: TTA
gacaattcctaattgaaccc

SEQ ID NO: 375391 - DNA, 20 bp, Artificial Sequence
  Description of Artificial Sequence: Synthetic oligonucleotide
  Target: LAMA2; (+) strand; PAM type: YTN; PAM sequence: TTC
ctaattgaacccttgccctt

SEQ ID NO: 375392 - DNA, 20 bp, Artificial Sequence
  Description of Artificial Sequence: Synthetic oligonucleotide
  Target: LAMA2; (+) strand; PAM type: YTN; PAM sequence: CTA
attgaacccttgccctttta

SEQ ID NO: 375393 - DNA, 20 bp, Artificial Sequence
  Description of Artificial Sequence: Synthetic oligonucleotide
  Target: LAMA2; (+) strand; PAM type: YTN; PAM sequence: TTG
aacccttgcccttttaaaaa

SEQ ID NO: 375394 - DNA, 20 bp, Artificial Sequence
  Description of Artificial Sequence: Synthetic oligonucleotide
  Target: LAMA2; (+) strand; PAM type: YTN; PAM sequence: CTT
gcccttttaaaaataaccat

SEQ ID NO: 375395 - DNA, 20 bp, Artificial Sequence
  Description of Artificial Sequence: Synthetic oligonucleotide
  Target: LAMA2; (+) strand; PAM type: YTN; PAM sequence: TTG
cccttttaaaaataaccatc

SEQ ID NO: 375396 - DNA, 20 bp, Artificial Sequence
  Description of Artificial Sequence: Synthetic oligonucleotide
  Target: LAMA2; (+) strand; PAM type: YTN; PAM sequence: CTT
ttaaaaataaccatccgtat

SEQ ID NO: 375397 - DNA, 20 bp, Artificial Sequence
  Description of Artificial Sequence: Synthetic oligonucleotide
  Target: LAMA2; (+) strand; PAM type: YTN; PAM sequence: TTT
taaaaataaccatccgtatg

SEQ ID NO: 375398 - DNA, 20 bp, Artificial Sequence
  Description of Artificial Sequence: Synthetic oligonucleotide
  Target: LAMA2; (+) strand; PAM type: YTN; PAM sequence: TTT
aaaaataaccatccgtatgc

SEQ ID NO: 375399 - DNA, 20 bp, Artificial Sequence
  Description of Artificial Sequence: Synthetic oligonucleotide
  Target: LAMA2; (+) strand; PAM type: YTN; PAM sequence: TTA
aaaataaccatccgtatgct

SEQ ID NO: 375400 - DNA, 20 bp, Artificial Sequence
  Description of Artificial Sequence: Synthetic oligonucleotide
  Target: LAMA2; (+) strand; PAM type: YTN; PAM sequence: CTT
taaaaagcatattcaagttc

SEQ ID NO: 375401 - DNA, 20 bp, Artificial Sequence
  Description of Artificial Sequence: Synthetic oligonucleotide
  Target: LAMA2; (+) strand; PAM type: YTN; PAM sequence: TTT
aaaaagcatattcaagttca

SEQ ID NO: 375402 - DNA, 20 bp, Artificial Sequence
  Description of Artificial Sequence: Synthetic oligonucleotide
  Target: LAMA2; (+) strand; PAM type: YTN; PAM sequence: TTA
aaaagcatattcaagttcat

SEQ ID NO: 375403 - DNA, 20 bp, Artificial Sequence
  Description of Artificial Sequence: Synthetic oligonucleotide
  Target: LAMA2; (+) strand; PAM type: YTN; PAM sequence: TTC
aagttcatagggtcataaaa

SEQ ID NO: 375404 - DNA, 20 bp, Artificial Sequence
  Description of Artificial Sequence: Synthetic oligonucleotide
  Target: LAMA2; (+) strand; PAM type: YTN; PAM sequence: TTC
atagggtcataaaactttca

SEQ ID NO: 375405 - DNA, 20 bp, Artificial Sequence
  Description of Artificial Sequence: Synthetic oligonucleotide
  Target: LAMA2; (+) strand; PAM type: YTN; PAM sequence: CTT
tcaattaaccaaactttcaa

SEQ ID NO: 375406 - DNA, 20 bp, Artificial Sequence
  Description of Artificial Sequence: Synthetic oligonucleotide
  Target: LAMA2; (+) strand; PAM type: YTN; PAM sequence: TTT
caattaaccaaactttcaat

SEQ ID NO: 375407 - DNA, 20 bp, Artificial Sequence
  Description of Artificial Sequence: Synthetic oligonucleotide
  Target: LAMA2; (+) strand; PAM type: YTN; PAM sequence: TTC
aattaaccaaactttcaatt

SEQ ID NO: 375408 - DNA, 20 bp, Artificial Sequence
  Description of Artificial Sequence: Synthetic oligonucleotide
  Target: LAMA2; (+) strand; PAM type: YTN; PAM sequence: TTA
accaaactttcaattaacca

SEQ ID NO: 375409 - DNA, 20 bp, Artificial Sequence
  Description of Artificial Sequence: Synthetic oligonucleotide
  Target: LAMA2; (+) strand; PAM type: YTN; PAM sequence: CTT
tcaattaaccatgaatatgt

SEQ ID NO: 375410 - DNA, 20 bp, Artificial Sequence
  Description of Artificial Sequence: Synthetic oligonucleotide
  Target: LAMA2; (+) strand; PAM type: YTN; PAM sequence: TTT
caattaaccatgaatatgtg

SEQ ID NO: 375411 - DNA, 20 bp, Artificial Sequence
  Description of Artificial Sequence: Synthetic oligonucleotide
  Target: LAMA2; (+) strand; PAM type: YTN; PAM sequence: TTC
aattaaccatgaatatgtgg

SEQ ID NO: 375412 - DNA, 20 bp, Artificial Sequence
  Description of Artificial Sequence: Synthetic oligonucleotide
  Target: LAMA2; (+) strand; PAM type: YTN; PAM sequence: TTA
accatgaatatgtggaaatc

SEQ ID NO: 375413 - DNA, 20 bp, Artificial Sequence
  Description of Artificial Sequence: Synthetic oligonucleotide
  Target: LAMA2; (+) strand; PAM type: YTN; PAM sequence: CTA
cttgagagaacctataatct

SEQ ID NO: 375414 - DNA, 20 bp, Artificial Sequence
  Description of Artificial Sequence: Synthetic oligonucleotide
  Target: LAMA2; (+) strand; PAM type: YTN; PAM sequence: CTT
gagagaacctataatcttag

SEQ ID NO: 375415 - DNA, 20 bp, Artificial Sequence
  Description of Artificial Sequence: Synthetic oligonucleotide
  Target: LAMA2; (+) strand; PAM type: YTN; PAM sequence: TTG
agagaacctataatcttaga

SEQ ID NO: 375416 - DNA, 20 bp, Artificial Sequence
  Description of Artificial Sequence: Synthetic oligonucleotide
  Target: LAMA2; (+) strand; PAM type: YTN; PAM sequence: CTA
taatcttagaaatggaagag

SEQ ID NO: 375417 - DNA, 20 bp, Artificial Sequence
  Description of Artificial Sequence: Synthetic oligonucleotide
  Target: LAMA2; (+) strand; PAM type: YTN; PAM sequence: CTT
agaaatggaagagacttcag

SEQ ID NO: 375418 - DNA, 20 bp, Artificial Sequence
  Description of Artificial Sequence: Synthetic oligonucleotide
  Target: LAMA2; (+) strand; PAM type: YTN; PAM sequence: TTA
gaaatggaagagacttcagg

SEQ ID NO: 375419 - DNA, 20 bp, Artificial Sequence
  Description of Artificial Sequence: Synthetic oligonucleotide
  Target: LAMA2; (+) strand; PAM type: YTN; PAM sequence: CTT
caggcaacctttggggaaag

SEQ ID NO: 375420 - DNA, 20 bp, Artificial Sequence
  Description of Artificial Sequence: Synthetic oligonucleotide
  Target: LAMA2; (+) strand; PAM type: YTN; PAM sequence: TTC
aggcaacctttggggaaagc

SEQ ID NO: 375421 - DNA, 20 bp, Artificial Sequence
  Description of Artificial Sequence: Synthetic oligonucleotide
  Target: LAMA2; (+) strand; PAM type: YTN; PAM sequence: CTT
tggggaaagctaactttaat

SEQ ID NO: 375422 - DNA, 20 bp, Artificial Sequence
  Description of Artificial Sequence: Synthetic oligonucleotide
  Target: LAMA2; (+) strand; PAM type: YTN; PAM sequence: TTT
ggggaaagctaactttaata

SEQ ID NO: 375423 - DNA, 20 bp, Artificial Sequence
  Description of Artificial Sequence: Synthetic oligonucleotide
  Target: LAMA2; (+) strand; PAM type: YTN; PAM sequence: TTG
gggaaagctaactttaataa

SEQ ID NO: 375424 - DNA, 20 bp, Artificial Sequence
  Description of Artificial Sequence: Synthetic oligonucleotide
  Target: LAMA2; (+) strand; PAM type: YTN; PAM sequence: CTA
actttaataaatgaacaaat

SEQ ID NO: 375425 - DNA, 20 bp, Artificial Sequence
  Description of Artificial Sequence: Synthetic oligonucleotide
  Target: LAMA2; (+) strand; PAM type: YTN; PAM sequence: CTT
taataaatgaacaaatgaag

SEQ ID NO: 375426 - DNA, 20 bp, Artificial Sequence
  Description of Artificial Sequence: Synthetic oligonucleotide
  Target: LAMA2; (+) strand; PAM type: YTN; PAM sequence: TTT
aataaatgaacaaatgaagg

SEQ ID NO: 375427 - DNA, 20 bp, Artificial Sequence
  Description of Artificial Sequence: Synthetic oligonucleotide
  Target: LAMA2; (+) strand; PAM type: YTN; PAM sequence: TTA
ataaatgaacaaatgaagga

SEQ ID NO: 375428 - DNA, 20 bp, Artificial Sequence
  Description of Artificial Sequence: Synthetic oligonucleotide
  Target: LAMA2; (+) strand; PAM type: YTN; PAM sequence: CTA
gcagagaaattgatttgtcc

SEQ ID NO: 375429 - DNA, 20 bp, Artificial Sequence
  Description of Artificial Sequence: Synthetic oligonucleotide
  Target: LAMA2; (+) strand; PAM type: YTN; PAM sequence: TTG
atttgtccaagaaaactcag

SEQ ID NO: 375430 - DNA, 20 bp, Artificial Sequence
  Description of Artificial Sequence: Synthetic oligonucleotide
  Target: LAMA2; (+) strand; PAM type: YTN; PAM sequence: TTT
gtccaagaaaactcagccca

SEQ ID NO: 375431 - DNA, 20 bp, Artificial Sequence
  Description of Artificial Sequence: Synthetic oligonucleotide
  Target: LAMA2; (+) strand; PAM type: YTN; PAM sequence: TTG
tccaagaaaactcagcccat

SEQ ID NO: 375432 - DNA, 20 bp, Artificial Sequence
  Description of Artificial Sequence: Synthetic oligonucleotide
  Target: LAMA2; (+) strand; PAM type: YTN; PAM sequence: CTC
agcccatttatcaggcattt

SEQ ID NO: 375433 - DNA, 20 bp, Artificial Sequence
  Description of Artificial Sequence: Synthetic oligonucleotide
  Target: LAMA2; (+) strand; PAM type: YTN; PAM sequence: TTT
atcaggcatttcatcataat

SEQ ID NO: 375434 - DNA, 20 bp, Artificial Sequence
  Description of Artificial Sequence: Synthetic oligonucleotide
  Target: LAMA2; (+) strand; PAM type: YTN; PAM sequence: TTA
tcaggcatttcatcataatt

SEQ ID NO: 375435 - DNA, 20 bp, Artificial Sequence
  Description of Artificial Sequence: Synthetic oligonucleotide
  Target: LAMA2; (+) strand; PAM type: YTN; PAM sequence: TTT
catcataattaagaattttg

SEQ ID NO: 375436 - DNA, 20 bp, Artificial Sequence
  Description of Artificial Sequence: Synthetic oligonucleotide
  Target: LAMA2; (+) strand; PAM type: YTN; PAM sequence: TTC
atcataattaagaattttgt

SEQ ID NO: 375437 - DNA, 20 bp, Artificial Sequence
  Description of Artificial Sequence: Synthetic oligonucleotide
  Target: LAMA2; (+) strand; PAM type: YTN; PAM sequence: TTA
agaattttgttaatttccac

SEQ ID NO: 375438 - DNA, 20 bp, Artificial Sequence
  Description of Artificial Sequence: Synthetic oligonucleotide
  Target: LAMA2; (+) strand; PAM type: YTN; PAM sequence: TTT
tgttaatttccacatcaatt

SEQ ID NO: 375439 - DNA, 20 bp, Artificial Sequence
  Description of Artificial Sequence: Synthetic oligonucleotide
  Target: LAMA2; (+) strand; PAM type: YTN; PAM sequence: TTT
gttaatttccacatcaattg

SEQ ID NO: 375440 - DNA, 20 bp, Artificial Sequence
  Description of Artificial Sequence: Synthetic oligonucleotide
  Target: LAMA2; (+) strand; PAM type: YTN; PAM sequence: TTG
ttaatttccacatcaattgt

SEQ ID NO: 375441 - DNA, 20 bp, Artificial Sequence
  Description of Artificial Sequence: Synthetic oligonucleotide
  Target: LAMA2; (+) strand; PAM type: YTN; PAM sequence: TTA
atttccacatcaattgtgct

SEQ ID NO: 375442 - DNA, 20 bp, Artificial Sequence
  Description of Artificial Sequence: Synthetic oligonucleotide
  Target: LAMA2; (+) strand; PAM type: YTN; PAM sequence: TTT
ccacatcaattgtgcttatg

SEQ ID NO: 375443 - DNA, 20 bp, Artificial Sequence
  Description of Artificial Sequence: Synthetic oligonucleotide
  Target: LAMA2; (+) strand; PAM type: YTN; PAM sequence: TTC
cacatcaattgtgcttatgt

SEQ ID NO: 375444 - DNA, 20 bp, Artificial Sequence
  Description of Artificial Sequence: Synthetic oligonucleotide
  Target: LAMA2; (+) strand; PAM type: YTN; PAM sequence: TTG
tgcttatgtgtacaacaaat

SEQ ID NO: 375445 - DNA, 20 bp, Artificial Sequence
  Description of Artificial Sequence: Synthetic oligonucleotide
  Target: LAMA2; (+) strand; PAM type: YTN; PAM sequence: CTT
atgtgtacaacaaatgcaag

SEQ ID NO: 375446 - DNA, 20 bp, Artificial Sequence
  Description of Artificial Sequence: Synthetic oligonucleotide
  Target: LAMA2; (+) strand; PAM type: YTN; PAM sequence: TTA
tgtgtacaacaaatgcaaga

SEQ ID NO: 375447 - DNA, 20 bp, Artificial Sequence
  Description of Artificial Sequence: Synthetic oligonucleotide
  Target: LAMA2; (+) strand; PAM type: YTN; PAM sequence: TTT
tcacacactataaatggaca

SEQ ID NO: 375448 - DNA, 20 bp, Artificial Sequence
  Description of Artificial Sequence: Synthetic oligonucleotide
  Target: LAMA2; (+) strand; PAM type: YTN; PAM sequence: TTT
cacacactataaatggacaa

SEQ ID NO: 375449 - DNA, 20 bp, Artificial Sequence
  Description of Artificial Sequence: Synthetic oligonucleotide
  Target: LAMA2; (+) strand; PAM type: YTN; PAM sequence: TTC
acacactataaatggacaaa

SEQ ID NO: 375450 - DNA, 20 bp, Artificial Sequence
  Description of Artificial Sequence: Synthetic oligonucleotide
  Target: LAMA2; (+) strand; PAM type: YTN; PAM sequence: CTA
taaatggacaaatacccaaa

SEQ ID NO: 375451 - DNA, 20 bp, Artificial Sequence
  Description of Artificial Sequence: Synthetic oligonucleotide
  Target: LAMA2; (+) strand; PAM type: YTN; PAM sequence: TTG
tttctaattacaaaagtgtg

SEQ ID NO: 375452 - DNA, 20 bp, Artificial Sequence
  Description of Artificial Sequence: Synthetic oligonucleotide
  Target: LAMA2; (+) strand; PAM type: YTN; PAM sequence: TTT
ctaattacaaaagtgtggtt

SEQ ID NO: 375453 - DNA, 20 bp, Artificial Sequence
  Description of Artificial Sequence: Synthetic oligonucleotide
  Target: LAMA2; (+) strand; PAM type: YTN; PAM sequence: TTC
taattacaaaagtgtggttc

SEQ ID NO: 375454 - DNA, 20 bp, Artificial Sequence
  Description of Artificial Sequence: Synthetic oligonucleotide
  Target: LAMA2; (+) strand; PAM type: YTN; PAM sequence: CTA
attacaaaagtgtggttctc

SEQ ID NO: 375455 - DNA, 20 bp, Artificial Sequence
  Description of Artificial Sequence: Synthetic oligonucleotide
  Target: LAMA2; (+) strand; PAM type: YTN; PAM sequence: TTA
caaaagtgtggttctcatat

SEQ ID NO: 375456 - DNA, 20 bp, Artificial Sequence
  Description of Artificial Sequence: Synthetic oligonucleotide
  Target: LAMA2; (+) strand; PAM type: YTN; PAM sequence: TTC
tcatatcacaggacaaaaca

SEQ ID NO: 375457 - DNA, 20 bp, Artificial Sequence
  Description of Artificial Sequence: Synthetic oligonucleotide
  Target: LAMA2; (+) strand; PAM type: YTN; PAM sequence: CTC
atatcacaggacaaaacaaa

SEQ ID NO: 375458 - DNA, 20 bp, Artificial Sequence
  Description of Artificial Sequence: Synthetic oligonucleotide
  Target: LAMA2; (+) strand; PAM type: YTN; PAM sequence: CTG
gggaagaaggaagagaggga

SEQ ID NO: 375459 - DNA, 20 bp, Artificial Sequence
  Description of Artificial Sequence: Synthetic oligonucleotide
  Target: LAMA2; (+) strand; PAM type: YTN; PAM sequence: CTG
agctgcagaagagtaggaga

SEQ ID NO: 375460 - DNA, 20 bp, Artificial Sequence
  Description of Artificial Sequence: Synthetic oligonucleotide
  Target: LAMA2; (+) strand; PAM type: YTN; PAM sequence: CTG
cagaagagtaggagacaaga

SEQ ID NO: 375461 - DNA, 20 bp, Artificial Sequence
  Description of Artificial Sequence: Synthetic oligonucleotide
  Target: LAMA2; (+) strand; PAM type: YTN; PAM sequence: CTT
accagtatagagtcaggacc

SEQ ID NO: 375462 - DNA, 20 bp, Artificial Sequence
  Description of Artificial Sequence: Synthetic oligonucleotide
  Target: LAMA2; (+) strand; PAM type: YTN; PAM sequence: TTA
ccagtatagagtcaggacct

SEQ ID NO: 375463 - DNA, 20 bp, Artificial Sequence
  Description of Artificial Sequence: Synthetic oligonucleotide
  Target: LAMA2; (+) strand; PAM type: YTN; PAM sequence: CTG
tagagaattgaggatagggc

SEQ ID NO: 375464 - DNA, 20 bp, Artificial Sequence
  Description of Artificial Sequence: Synthetic oligonucleotide
  Target: LAMA2; (+) strand; PAM type: YTN; PAM sequence: TTG
aggatagggcatagaagaag

SEQ ID NO: 375465 - DNA, 20 bp, Artificial Sequence
  Description of Artificial Sequence: Synthetic oligonucleotide
  Target: LAMA2; (+) strand; PAM type: YTN; PAM sequence: TTC
atggttttatttcttggctc

SEQ ID NO: 375466 - DNA, 20 bp, Artificial Sequence
  Description of Artificial Sequence: Synthetic oligonucleotide
  Target: LAMA2; (+) strand; PAM type: YTN; PAM sequence: TTT
tatttcttggctcattatca

SEQ ID NO: 375467 - DNA, 20 bp, Artificial Sequence
  Description of Artificial Sequence: Synthetic oligonucleotide
  Target: LAMA2; (+) strand; PAM type: YTN; PAM sequence: TTT
atttcttggctcattatcac

SEQ ID NO: 375468 - DNA, 20 bp, Artificial Sequence
  Description of Artificial Sequence: Synthetic oligonucleotide
  Target: LAMA2; (+) strand; PAM type: YTN; PAM sequence: TTA
tttcttggctcattatcaca

SEQ ID NO: 375469 - DNA, 20 bp, Artificial Sequence
  Description of Artificial Sequence: Synthetic oligonucleotide
  Target: LAMA2; (+) strand; PAM type: YTN; PAM sequence: TTT
cttggctcattatcacacat

SEQ ID NO: 375470 - DNA, 20 bp, Artificial Sequence
  Description of Artificial Sequence: Synthetic oligonucleotide
  Target: LAMA2; (+) strand; PAM type: YTN; PAM sequence: TTC
ttggctcattatcacacatt

SEQ ID NO: 375471 - DNA, 20 bp, Artificial Sequence
  Description of Artificial Sequence: Synthetic oligonucleotide
  Target: LAMA2; (+) strand; PAM type: YTN; PAM sequence: CTT
ggctcattatcacacatttt

SEQ ID NO: 375472 - DNA, 20 bp, Artificial Sequence
  Description of Artificial Sequence: Synthetic oligonucleotide
  Target: LAMA2; (+) strand; PAM type: YTN; PAM sequence: TTG
gctcattatcacacattttt

SEQ ID NO: 375473 - DNA, 20 bp, Artificial Sequence
  Description of Artificial Sequence: Synthetic oligonucleotide
  Target: LAMA2; (+) strand; PAM type: YTN; PAM sequence: CTC
attatcacacattttttaaa

SEQ ID NO: 375474 - DNA, 20 bp, Artificial Sequence
  Description of Artificial Sequence: Synthetic oligonucleotide
  Target: LAMA2; (+) strand; PAM type: YTN; PAM sequence: TTA
tcacacattttttaaaaaac

SEQ ID NO: 375475 - DNA, 20 bp, Artificial Sequence
  Description of Artificial Sequence: Synthetic oligonucleotide
  Target: LAMA2; (+) strand; PAM type: YTN; PAM sequence: TTT
tttaaaaaacaaattttgat

SEQ ID NO: 375476 - DNA, 20 bp, Artificial Sequence
  Description of Artificial Sequence: Synthetic oligonucleotide
  Target: LAMA2; (+) strand; PAM type: YTN; PAM sequence: TTT
ttaaaaaacaaattttgatg

SEQ ID NO: 375477 - DNA, 20 bp, Artificial Sequence
  Description of Artificial Sequence: Synthetic oligonucleotide
  Target: LAMA2; (+) strand; PAM type: YTN; PAM sequence: TTT
taaaaaacaaattttgatgt

SEQ ID NO: 375478 - DNA, 20 bp, Artificial Sequence
  Description of Artificial Sequence: Synthetic oligonucleotide
  Target: LAMA2; (+) strand; PAM type: YTN; PAM sequence: TTT
aaaaaacaaattttgatgtc

SEQ ID NO: 375479 - DNA, 20 bp, Artificial Sequence
  Description of Artificial Sequence: Synthetic oligonucleotide
  Target: LAMA2; (+) strand; PAM type: YTN; PAM sequence: TTA
aaaaacaaattttgatgtca

SEQ ID NO: 375480 - DNA, 20 bp, Artificial Sequence
  Description of Artificial Sequence: Synthetic oligonucleotide
  Target: LAMA2; (+) strand; PAM type: YTN; PAM sequence: TTT
tgatgtcagactgccttaga

SEQ ID NO: 375481 - DNA, 20 bp, Artificial Sequence
  Description of Artificial Sequence: Synthetic oligonucleotide
  Target: LAMA2; (+) strand; PAM type: YTN; PAM sequence: TTT
gatgtcagactgccttagat

SEQ ID NO: 375482 - DNA, 20 bp, Artificial Sequence
  Description of Artificial Sequence: Synthetic oligonucleotide
  Target: LAMA2; (+) strand; PAM type: YTN; PAM sequence: TTG
atgtcagactgccttagatc

SEQ ID NO: 375483 - DNA, 20 bp, Artificial Sequence
  Description of Artificial Sequence: Synthetic oligonucleotide
  Target: LAMA2; (+) strand; PAM type: YTN; PAM sequence: CTG
ccttagatcaaatcctggcc

SEQ ID NO: 375484 - DNA, 20 bp, Artificial Sequence
  Description of Artificial Sequence: Synthetic oligonucleotide
  Target: LAMA2; (+) strand; PAM type: YTN; PAM sequence: CTT
agatcaaatcctggcctcat

SEQ ID NO: 375485 - DNA, 20 bp, Artificial Sequence
  Description of Artificial Sequence: Synthetic oligonucleotide
  Target: LAMA2; (+) strand; PAM type: YTN; PAM sequence: TTA
gatcaaatcctggcctcatt

SEQ ID NO: 375486 - DNA, 20 bp, Artificial Sequence
  Description of Artificial Sequence: Synthetic oligonucleotide
  Target: LAMA2; (+) strand; PAM type: YTN; PAM sequence: CTG
gcctcattacttcctagcta

SEQ ID NO: 375487 - DNA, 20 bp, Artificial Sequence
  Description of Artificial Sequence: Synthetic oligonucleotide
  Target: LAMA2; (+) strand; PAM type: YTN; PAM sequence: CTC
attacttcctagctataaat

SEQ ID NO: 375488 - DNA, 20 bp, Artificial Sequence
  Description of Artificial Sequence: Synthetic oligonucleotide
  Target: LAMA2; (+) strand; PAM type: YTN; PAM sequence: TTA
cttcctagctataaattcct

SEQ ID NO: 375489 - DNA, 20 bp, Artificial Sequence
  Description of Artificial Sequence: Synthetic oligonucleotide
  Target: LAMA2; (+) strand; PAM type: YTN; PAM sequence: CTT
cctagctataaattccttga

SEQ ID NO: 375490 - DNA, 20 bp, Artificial Sequence
  Description of Artificial Sequence: Synthetic oligonucleotide
  Target: LAMA2; (+) strand; PAM type: YTN; PAM sequence: TTC
ctagctataaattccttgaa

SEQ ID NO: 375491 - DNA, 20 bp, Artificial Sequence
  Description of Artificial Sequence: Synthetic oligonucleotide
  Target: LAMA2; (+) strand; PAM type: YTN; PAM sequence: CTA
gctataaattccttgaatct

SEQ ID NO: 375492 - DNA, 20 bp, Artificial Sequence
  Description of Artificial Sequence: Synthetic oligonucleotide
  Target: LAMA2; (+) strand; PAM type: YTN; PAM sequence: CTA
taaattccttgaatctttct

SEQ ID NO: 375493 - DNA, 20 bp, Artificial Sequence
  Description of Artificial Sequence: Synthetic oligonucleotide
  Target: LAMA2; (+) strand; PAM type: YTN; PAM sequence: TTC
cttgaatctttctgtaattc

SEQ ID NO: 375494 - DNA, 20 bp, Artificial Sequence
  Description of Artificial Sequence: Synthetic oligonucleotide
  Target: LAMA2; (+) strand; PAM type: YTN; PAM sequence: CTT
gaatctttctgtaattcagc

SEQ ID NO: 375495 - DNA, 20 bp, Artificial Sequence
  Description of Artificial Sequence: Synthetic oligonucleotide
  Target: LAMA2; (+) strand; PAM type: YTN; PAM sequence: TTG
aatctttctgtaattcagct

SEQ ID NO: 375496 - DNA, 20 bp, Artificial Sequence
  Description of Artificial Sequence: Synthetic oligonucleotide
  Target: LAMA2; (+) strand; PAM type: YTN; PAM sequence: CTT
tctgtaattcagcttcttca

SEQ ID NO: 375497 - DNA, 20 bp, Artificial Sequence
  Description of Artificial Sequence: Synthetic oligonucleotide
  Target: LAMA2; (+) strand; PAM type: YTN; PAM sequence: TTT
ctgtaattcagcttcttcat

SEQ ID NO: 375498 - DNA, 20 bp, Artificial Sequence
  Description of Artificial Sequence: Synthetic oligonucleotide
  Target: LAMA2; (+) strand; PAM type: YTN; PAM sequence: TTC
tgtaattcagcttcttcatc

SEQ ID NO: 375499 - DNA, 20 bp, Artificial Sequence
  Description of Artificial Sequence: Synthetic oligonucleotide
  Target: LAMA2; (+) strand; PAM type: YTN; PAM sequence: CTG
taattcagcttcttcatctg

SEQ ID NO: 375500 - DNA, 20 bp, Artificial Sequence
  Description of Artificial Sequence: Synthetic oligonucleotide
  Target: LAMA2; (+) strand; PAM type: YTN; PAM sequence: TTC
agcttcttcatctgtagtaa

SEQ ID NO: 375501 - DNA, 20 bp, Artificial Sequence
  Description of Artificial Sequence: Synthetic oligonucleotide
  Target: LAMA2; (+) strand; PAM type: YTN; PAM sequence: CTT
cttcatctgtagtaagatcc

SEQ ID NO: 375502 - DNA, 20 bp, Artificial Sequence
  Description of Artificial Sequence: Synthetic oligonucleotide
  Target: LAMA2; (+) strand; PAM type: YTN; PAM sequence: TTC
ttcatctgtagtaagatcca

SEQ ID NO: 375503 - DNA, 20 bp, Artificial Sequence
  Description of Artificial Sequence: Synthetic oligonucleotide
  Target: LAMA2; (+) strand; PAM type: YTN; PAM sequence: CTT
catctgtagtaagatccact

SEQ ID NO: 375504 - DNA, 20 bp, Artificial Sequence
  Description of Artificial Sequence: Synthetic oligonucleotide
  Target: LAMA2; (+) strand; PAM type: YTN; PAM sequence: TTC
atctgtagtaagatccactt

SEQ ID NO: 375505 - DNA, 20 bp, Artificial Sequence
  Description of Artificial Sequence: Synthetic oligonucleotide
  Target: LAMA2; (+) strand; PAM type: YTN; PAM sequence: CTG
tagtaagatccacttcagag

SEQ ID NO: 375506 - DNA, 20 bp, Artificial Sequence
  Description of Artificial Sequence: Synthetic oligonucleotide
  Target: LAMA2; (+) strand; PAM type: YTN; PAM sequence: CTT
cagagggtttatgtctgctt

SEQ ID NO: 375507 - DNA, 20 bp, Artificial Sequence
  Description of Artificial Sequence: Synthetic oligonucleotide
  Target: LAMA2; (+) strand; PAM type: YTN; PAM sequence: TTC
agagggtttatgtctgctta

SEQ ID NO: 375508 - DNA, 20 bp, Artificial Sequence
  Description of Artificial Sequence: Synthetic oligonucleotide
  Target: LAMA2; (+) strand; PAM type: YTN; PAM sequence: TTT
atgtctgcttacgtactcca

SEQ ID NO: 375509 - DNA, 20 bp, Artificial Sequence
  Description of Artificial Sequence: Synthetic oligonucleotide
  Target: LAMA2; (+) strand; PAM type: YTN; PAM sequence: TTA
tgtctgcttacgtactccaa

SEQ ID NO: 375510 - DNA, 20 bp, Artificial Sequence
  Description of Artificial Sequence: Synthetic oligonucleotide
  Target: LAMA2; (+) strand; PAM type: YTN; PAM sequence: CTG
cttacgtactccaagaagca

SEQ ID NO: 375511 - DNA, 20 bp, Artificial Sequence
  Description of Artificial Sequence: Synthetic oligonucleotide
  Target: LAMA2; (+) strand; PAM type: YTN; PAM sequence: CTT
acgtactccaagaagcaaat

SEQ ID NO: 375512 - DNA, 20 bp, Artificial Sequence
  Description of Artificial Sequence: Synthetic oligonucleotide
  Target: LAMA2; (+) strand; PAM type: YTN; PAM sequence: TTA
cgtactccaagaagcaaatg

SEQ ID NO: 375513 - DNA, 20 bp, Artificial Sequence
  Description of Artificial Sequence: Synthetic oligonucleotide
  Target: LAMA2; (+) strand; PAM type: YTN; PAM sequence: CTC
caagaagcaaatgccaagag

SEQ ID NO: 375514 - DNA, 20 bp, Artificial Sequence
  Description of Artificial Sequence: Synthetic oligonucleotide
  Target: LAMA2; (+) strand; PAM type: YTN; PAM sequence: TTT
cctgggggaaaggccaacga

SEQ ID NO: 375515 - DNA, 20 bp, Artificial Sequence
  Description of Artificial Sequence: Synthetic oligonucleotide
  Target: LAMA2; (+) strand; PAM type: YTN; PAM sequence: TTC
ctgggggaaaggccaacgaa

SEQ ID NO: 375516 - DNA, 20 bp, Artificial Sequence
  Description of Artificial Sequence: Synthetic oligonucleotide
  Target: LAMA2; (+) strand; PAM type: YTN; PAM sequence: CTG
ggggaaaggccaacgaagca

SEQ ID NO: 375517 - DNA, 20 bp, Artificial Sequence
  Description of Artificial Sequence: Synthetic oligonucleotide
  Target: LAMA2; (+) strand; PAM type: YTN; PAM sequence: CTT
ctgctgcaatggggttctga

SEQ ID NO: 375518 - DNA, 20 bp, Artificial Sequence
  Description of Artificial Sequence: Synthetic oligonucleotide
  Target: LAMA2; (+) strand; PAM type: YTN; PAM sequence: TTC
tgctgcaatggggttctgac

SEQ ID NO: 375519 - DNA, 20 bp, Artificial Sequence
  Description of Artificial Sequence: Synthetic oligonucleotide
  Target: LAMA2; (+) strand; PAM type: YTN; PAM sequence: CTG
ctgcaatggggttctgactc

SEQ ID NO: 375520 - DNA, 20 bp, Artificial Sequence
  Description of Artificial Sequence: Synthetic oligonucleotide
  Target: LAMA2; (+) strand; PAM type: YTN; PAM sequence: CTG
caatggggttctgactcccg

SEQ ID NO: 375521 - DNA, 20 bp, Artificial Sequence
  Description of Artificial Sequence: Synthetic oligonucleotide
  Target: LAMA2; (+) strand; PAM type: YTN; PAM sequence: TTC
tgactcccgggaaaacacag

SEQ ID NO: 375522 - DNA, 20 bp, Artificial Sequence
  Description of Artificial Sequence: Synthetic oligonucleotide
  Target: LAMA2; (+) strand; PAM type: YTN; PAM sequence: CTG
actcccgggaaaacacagaa

SEQ ID NO: 375523 - DNA, 20 bp, Artificial Sequence
  Description of Artificial Sequence: Synthetic oligonucleotide
  Target: LAMA2; (+) strand; PAM type: YTN; PAM sequence: CTC
ccgggaaaacacagaaagaa

SEQ ID NO: 375524 - DNA, 20 bp, Artificial Sequence
  Description of Artificial Sequence: Synthetic oligonucleotide
  Target: LAMA2; (+) strand; PAM type: YTN; PAM sequence: CTG
ggtaggaaaagccttgtttg

SEQ ID NO: 375525 - DNA, 20 bp, Artificial Sequence
  Description of Artificial Sequence: Synthetic oligonucleotide
  Target: LAMA2; (+) strand; PAM type: YTN; PAM sequence: CTT
gtttggtgcattttgtcaaa

SEQ ID NO: 375526 - DNA, 20 bp, Artificial Sequence
  Description of Artificial Sequence: Synthetic oligonucleotide
  Target: LAMA2; (+) strand; PAM type: YTN; PAM sequence: TTG
tttggtgcattttgtcaaat

SEQ ID NO: 375527 - DNA, 20 bp, Artificial Sequence
  Description of Artificial Sequence: Synthetic oligonucleotide
  Target: LAMA2; (+) strand; PAM type: YTN; PAM sequence: TTT
ggtgcattttgtcaaatctt

SEQ ID NO: 375528 - DNA, 20 bp, Artificial Sequence
  Description of Artificial Sequence: Synthetic oligonucleotide
  Target: LAMA2; (+) strand; PAM type: YTN; PAM sequence: TTG
gtgcattttgtcaaatctta

SEQ ID NO: 375529 - DNA, 20 bp, Artificial Sequence
  Description of Artificial Sequence: Synthetic oligonucleotide
  Target: LAMA2; (+) strand; PAM type: YTN; PAM sequence: TTT
tgtcaaatcttaaattcttg

SEQ ID NO: 375530 - DNA, 20 bp, Artificial Sequence
  Description of Artificial Sequence: Synthetic oligonucleotide
  Target: LAMA2; (+) strand; PAM type: YTN; PAM sequence: TTT
gtcaaatcttaaattcttgg

SEQ ID NO: 375531 - DNA, 20 bp, Artificial Sequence
  Description of Artificial Sequence: Synthetic oligonucleotide
  Target: LAMA2; (+) strand; PAM type: YTN; PAM sequence: TTG
tcaaatcttaaattcttggc

SEQ ID NO: 375532 - DNA, 20 bp, Artificial Sequence
  Description of Artificial Sequence: Synthetic oligonucleotide
  Target: LAMA2; (+) strand; PAM type: YTN; PAM sequence: CTT
aaattcttggccaagccaat

SEQ ID NO: 375533 - DNA, 20 bp, Artificial Sequence
  Description of Artificial Sequence: Synthetic oligonucleotide
  Target: LAMA2; (+) strand; PAM type: YTN; PAM sequence: TTA
aattcttggccaagccaatg

SEQ ID NO: 375534 - DNA, 20 bp, Artificial Sequence
  Description of Artificial Sequence: Synthetic oligonucleotide
  Target: LAMA2; (+) strand; PAM type: YTN; PAM sequence: TTC
ttggccaagccaatgggata

SEQ ID NO: 375535 - DNA, 20 bp, Artificial Sequence
  Description of Artificial Sequence: Synthetic oligonucleotide
  Target: LAMA2; (+) strand; PAM type: YTN; PAM sequence: CTT
ggccaagccaatgggatata

SEQ ID NO: 375536 - DNA, 20 bp, Artificial Sequence
  Description of Artificial Sequence: Synthetic oligonucleotide
  Target: LAMA2; (+) strand; PAM type: YTN; PAM sequence: TTG
gccaagccaatgggatatac

SEQ ID NO: 375537 - DNA, 20 bp, Artificial Sequence
  Description of Artificial Sequence: Synthetic oligonucleotide
  Target: LAMA2; (+) strand; PAM type: YTN; PAM sequence: TTT
tacccactaaaggaatcctg

SEQ ID NO: 375538 - DNA, 20 bp, Artificial Sequence
  Description of Artificial Sequence: Synthetic oligonucleotide
  Target: LAMA2; (+) strand; PAM type: YTN; PAM sequence: TTT
acccactaaaggaatcctga

SEQ ID NO: 375539 - DNA, 20 bp, Artificial Sequence
  Description of Artificial Sequence: Synthetic oligonucleotide
  Target: LAMA2; (+) strand; PAM type: YTN; PAM sequence: TTA
cccactaaaggaatcctgaa

SEQ ID NO: 375540 - DNA, 20 bp, Artificial Sequence
  Description of Artificial Sequence: Synthetic oligonucleotide
  Target: LAMA2; (+) strand; PAM type: YTN; PAM sequence: CTA
aaggaatcctgaattggtca

SEQ ID NO: 375541 - DNA, 20 bp, Artificial Sequence
  Description of Artificial Sequence: Synthetic oligonucleotide
  Target: LAMA2; (+) strand; PAM type: YTN; PAM sequence: CTG
aattggtcagggaggttcta

SEQ ID NO: 375542 - DNA, 20 bp, Artificial Sequence
  Description of Artificial Sequence: Synthetic oligonucleotide
  Target: LAMA2; (+) strand; PAM type: YTN; PAM sequence: TTG
gtcagggaggttctagtatc

SEQ ID NO: 375543 - DNA, 20 bp, Artificial Sequence
  Description of Artificial Sequence: Synthetic oligonucleotide
  Target: LAMA2; (+) strand; PAM type: YTN; PAM sequence: TTC
tagtatcttacagtaatcag

SEQ ID NO: 375544 - DNA, 20 bp, Artificial Sequence
  Description of Artificial Sequence: Synthetic oligonucleotide
  Target: LAMA2; (+) strand; PAM type: YTN; PAM sequence: CTA
gtatcttacagtaatcagcc

SEQ ID NO: 375545 - DNA, 20 bp, Artificial Sequence
  Description of Artificial Sequence: Synthetic oligonucleotide
  Target: LAMA2; (+) strand; PAM type: YTN; PAM sequence: CTT
acagtaatcagcctgagaga

SEQ ID NO: 375546 - DNA, 20 bp, Artificial Sequence
  Description of Artificial Sequence: Synthetic oligonucleotide
  Target: LAMA2; (+) strand; PAM type: YTN; PAM sequence: TTA
cagtaatcagcctgagagaa

SEQ ID NO: 375547 - DNA, 20 bp, Artificial Sequence
  Description of Artificial Sequence: Synthetic oligonucleotide
  Target: LAMA2; (+) strand; PAM type: YTN; PAM sequence: CTG
agagaaggatactcttgtgg

SEQ ID NO: 375548 - DNA, 20 bp, Artificial Sequence
  Description of Artificial Sequence: Synthetic oligonucleotide
  Target: LAMA2; (+) strand; PAM type: YTN; PAM sequence: CTC
ttgtggaagctcatcttaat

SEQ ID NO: 375549 - DNA, 20 bp, Artificial Sequence
  Description of Artificial Sequence: Synthetic oligonucleotide
  Target: LAMA2; (+) strand; PAM type: YTN; PAM sequence: CTT
gtggaagctcatcttaattc

SEQ ID NO: 375550 - DNA, 20 bp, Artificial Sequence
  Description of Artificial Sequence: Synthetic oligonucleotide
  Target: LAMA2; (+) strand; PAM type: YTN; PAM sequence: TTG
tggaagctcatcttaattca

SEQ ID NO: 375551 - DNA, 20 bp, Artificial Sequence
  Description of Artificial Sequence: Synthetic oligonucleotide
  Target: LAMA2; (+) strand; PAM type: YTN; PAM sequence: CTC
atcttaattcattcagagtg

SEQ ID NO: 375552 - DNA, 20 bp, Artificial Sequence
  Description of Artificial Sequence: Synthetic oligonucleotide
  Target: LAMA2; (+) strand; PAM type: YTN; PAM sequence: CTT
aattcattcagagtgctata

SEQ ID NO: 375553 - DNA, 20 bp, Artificial Sequence
  Description of Artificial Sequence: Synthetic oligonucleotide
  Target: LAMA2; (+) strand; PAM type: YTN; PAM sequence: TTA
attcattcagagtgctataa

SEQ ID NO: 375554 - DNA, 20 bp, Artificial Sequence
  Description of Artificial Sequence: Synthetic oligonucleotide
  Target: LAMA2; (+) strand; PAM type: YTN; PAM sequence: TTC
attcagagtgctataagagc

SEQ ID NO: 375555 - DNA, 20 bp, Artificial Sequence
  Description of Artificial Sequence: Synthetic oligonucleotide
  Target: LAMA2; (+) strand; PAM type: YTN; PAM sequence: TTC
agagtgctataagagcataa

SEQ ID NO: 375556 - DNA, 20 bp, Artificial Sequence
  Description of Artificial Sequence: Synthetic oligonucleotide
  Target: LAMA2; (+) strand; PAM type: YTN; PAM sequence: CTA
taagagcataacatagacta

SEQ ID NO: 375557 - DNA, 20 bp, Artificial Sequence
  Description of Artificial Sequence: Synthetic oligonucleotide
  Target: LAMA2; (+) strand; PAM type: YTN; PAM sequence: CTA
agtggcatgtaaacaatgga

SEQ ID NO: 375558 - DNA, 20 bp, Artificial Sequence
  Description of Artificial Sequence: Synthetic oligonucleotide
  Target: LAMA2; (+) strand; PAM type: YTN; PAM sequence: TTC
atttctcacgattctagagg

SEQ ID NO: 375559 - DNA, 20 bp, Artificial Sequence
  Description of Artificial Sequence: Synthetic oligonucleotide
  Target: LAMA2; (+) strand; PAM type: YTN; PAM sequence: TTT
ctcacgattctagaggctgg

SEQ ID NO: 375560 - DNA, 20 bp, Artificial Sequence
  Description of Artificial Sequence: Synthetic oligonucleotide
  Target: LAMA2; (+) strand; PAM type: YTN; PAM sequence: TTC
tcacgattctagaggctggg

SEQ ID NO: 375561 - DNA, 20 bp, Artificial Sequence
  Description of Artificial Sequence: Synthetic oligonucleotide
  Target: LAMA2; (+) strand; PAM type: YTN; PAM sequence: CTC
acgattctagaggctgggaa

SEQ ID NO: 375562 - DNA, 20 bp, Artificial Sequence
  Description of Artificial Sequence: Synthetic oligonucleotide
  Target: LAMA2; (+) strand; PAM type: YTN; PAM sequence: TTC
tagaggctgggaagtacaag

SEQ ID NO: 375563 - DNA, 20 bp, Artificial Sequence
  Description of Artificial Sequence: Synthetic oligonucleotide
  Target: LAMA2; (+) strand; PAM type: YTN; PAM sequence: CTA
gaggctgggaagtacaagat

SEQ ID NO: 375564 - DNA, 20 bp, Artificial Sequence
  Description of Artificial Sequence: Synthetic oligonucleotide
  Target: LAMA2; (+) strand; PAM type: YTN; PAM sequence: CTG
ggaagtacaagatccaggtg

SEQ ID NO: 375565 - DNA, 20 bp, Artificial Sequence
  Description of Artificial Sequence: Synthetic oligonucleotide
  Target: LAMA2; (+) strand; PAM type: YTN; PAM sequence: CTG
gcagatttcctatctagtga

SEQ ID NO: 375566 - DNA, 20 bp, Artificial Sequence
  Description of Artificial Sequence: Synthetic oligonucleotide
  Target: LAMA2; (+) strand; PAM type: YTN; PAM sequence: TTT
cctatctagtgagggccctc

SEQ ID NO: 375567 - DNA, 20 bp, Artificial Sequence
  Description of Artificial Sequence: Synthetic oligonucleotide
  Target: LAMA2; (+) strand; PAM type: YTN; PAM sequence: TTC
ctatctagtgagggccctct

SEQ ID NO: 375568 - DNA, 20 bp, Artificial Sequence
  Description of Artificial Sequence: Synthetic oligonucleotide
  Target: LAMA2; (+) strand; PAM type: YTN; PAM sequence: CTA
tctagtgagggccctctttc

SEQ ID NO: 375569 - DNA, 20 bp, Artificial Sequence
  Description of Artificial Sequence: Synthetic oligonucleotide
  Target: LAMA2; (+) strand; PAM type: YTN; PAM sequence: CTA
gtgagggccctctttctcta

SEQ ID NO: 375570 - DNA, 20 bp, Artificial Sequence
  Description of Artificial Sequence: Synthetic oligonucleotide
  Target: LAMA2; (+) strand; PAM type: YTN; PAM sequence: CTC
tttctctagacagtcattta

SEQ ID NO: 375571 - DNA, 20 bp, Artificial Sequence
  Description of Artificial Sequence: Synthetic oligonucleotide
  Target: LAMA2; (+) strand; PAM type: YTN; PAM sequence: CTT
tctctagacagtcatttacc

SEQ ID NO: 375572 - DNA, 20 bp, Artificial Sequence
  Description of Artificial Sequence: Synthetic oligonucleotide
  Target: LAMA2; (+) strand; PAM type: YTN; PAM sequence: TTT
ctctagacagtcatttaccc

SEQ ID NO: 375573 - DNA, 20 bp, Artificial Sequence
  Description of Artificial Sequence: Synthetic oligonucleotide
  Target: LAMA2; (+) strand; PAM type: YTN; PAM sequence: TTC
tctagacagtcatttaccca

SEQ ID NO: 375574 - DNA, 20 bp, Artificial Sequence
  Description of Artificial Sequence: Synthetic oligonucleotide
  Target: LAMA2; (+) strand; PAM type: YTN; PAM sequence: CTC
tagacagtcatttacccact

SEQ ID NO: 375575 - DNA, 20 bp, Artificial Sequence
  Description of Artificial Sequence: Synthetic oligonucleotide
  Target: LAMA2; (+) strand; PAM type: YTN; PAM sequence: CTA
gacagtcatttacccactgg

SEQ ID NO: 375576 - DNA, 20 bp, Artificial Sequence
  Description of Artificial Sequence: Synthetic oligonucleotide
  Target: LAMA2; (+) strand; PAM type: YTN; PAM sequence: TTT
acccactggaacctcacttg

SEQ ID NO: 375577 - DNA, 20 bp, Artificial Sequence
  Description of Artificial Sequence: Synthetic oligonucleotide
  Target: LAMA2; (+) strand; PAM type: YTN; PAM sequence: TTA
cccactggaacctcacttgg

SEQ ID NO: 375578 - DNA, 20 bp, Artificial Sequence
  Description of Artificial Sequence: Synthetic oligonucleotide
  Target: LAMA2; (+) strand; PAM type: YTN; PAM sequence: CTG
gaacctcacttgggggagga

SEQ ID NO: 375579 - DNA, 20 bp, Artificial Sequence
  Description of Artificial Sequence: Synthetic oligonucleotide
  Target: LAMA2; (+) strand; PAM type: YTN; PAM sequence: CTC
acttgggggaggaaactctc

SEQ ID NO: 375580 - DNA, 20 bp, Artificial Sequence
  Description of Artificial Sequence: Synthetic oligonucleotide
  Target: LAMA2; (+) strand; PAM type: YTN; PAM sequence: CTT
gggggaggaaactctctgag

SEQ ID NO: 375581 - DNA, 20 bp, Artificial Sequence
  Description of Artificial Sequence: Synthetic oligonucleotide
  Target: LAMA2; (+) strand; PAM type: YTN; PAM sequence: TTG
ggggaggaaactctctgagg

SEQ ID NO: 375582 - DNA, 20 bp, Artificial Sequence
  Description of Artificial Sequence: Synthetic oligonucleotide
  Target: LAMA2; (+) strand; PAM type: YTN; PAM sequence: CTC
tctgaggcctcttttataag

SEQ ID NO: 375583 - DNA, 20 bp, Artificial Sequence
  Description of Artificial Sequence: Synthetic oligonucleotide
  Target: LAMA2; (+) strand; PAM type: YTN; PAM sequence: CTC
tgaggcctcttttataagtg

SEQ ID NO: 375584 - DNA, 20 bp, Artificial Sequence
  Description of Artificial Sequence: Synthetic oligonucleotide
  Target: LAMA2; (+) strand; PAM type: YTN; PAM sequence: CTG
aggcctcttttataagtgca

SEQ ID NO: 375585 - DNA, 20 bp, Artificial Sequence
  Description of Artificial Sequence: Synthetic oligonucleotide
  Target: LAMA2; (+) strand; PAM type: YTN; PAM sequence: CTC
ttttataagtgcagtgatcc

SEQ ID NO: 375586 - DNA, 20 bp, Artificial Sequence
  Description of Artificial Sequence: Synthetic oligonucleotide
  Target: LAMA2; (+) strand; PAM type: YTN; PAM sequence: CTT
ttataagtgcagtgatccca

SEQ ID NO: 375587 - DNA, 20 bp, Artificial Sequence
  Description of Artificial Sequence: Synthetic oligonucleotide
  Target: LAMA2; (+) strand; PAM type: YTN; PAM sequence: TTT
tataagtgcagtgatcccat

SEQ ID NO: 375588 - DNA, 20 bp, Artificial Sequence
  Description of Artificial Sequence: Synthetic oligonucleotide
  Target: LAMA2; (+) strand; PAM type: YTN; PAM sequence: TTT
ataagtgcagtgatcccatt

SEQ ID NO: 375589 - DNA, 20 bp, Artificial Sequence
  Description of Artificial Sequence: Synthetic oligonucleotide
  Target: LAMA2; (+) strand; PAM type: YTN; PAM sequence: TTA
taagtgcagtgatcccattc

SEQ ID NO: 375590 - DNA, 20 bp, Artificial Sequence
  Description of Artificial Sequence: Synthetic oligonucleotide
  Target: LAMA2; (+) strand; PAM type: YTN; PAM sequence: TTC
atgagagctccattctcatg

SEQ ID NO: 375591 - DNA, 20 bp, Artificial Sequence
  Description of Artificial Sequence: Synthetic oligonucleotide
  Target: LAMA2; (+) strand; PAM type: YTN; PAM sequence: CTC
cattctcatgacctaatcac

SEQ ID NO: 375592 - DNA, 20 bp, Artificial Sequence
  Description of Artificial Sequence: Synthetic oligonucleotide
  Target: LAMA2; (+) strand; PAM type: YTN; PAM sequence: TTC
tcatgacctaatcacctccc

SEQ ID NO: 375593 - DNA, 20 bp, Artificial Sequence
  Description of Artificial Sequence: Synthetic oligonucleotide
  Target: LAMA2; (+) strand; PAM type: YTN; PAM sequence: CTC
atgacctaatcacctcccaa

SEQ ID NO: 375594 - DNA, 20 bp, Artificial Sequence
  Description of Artificial Sequence: Synthetic oligonucleotide
  Target: LAMA2; (+) strand; PAM type: YTN; PAM sequence: CTA
atcacctcccaaaggcccca

SEQ ID NO: 375595 - DNA, 20 bp, Artificial Sequence
  Description of Artificial Sequence: Synthetic oligonucleotide
  Target: LAMA2; (+) strand; PAM type: YTN; PAM sequence: CTC
ccaaaggccccacctcctgt

SEQ ID NO: 375596 - DNA, 20 bp, Artificial Sequence
  Description of Artificial Sequence: Synthetic oligonucleotide
  Target: LAMA2; (+) strand; PAM type: YTN; PAM sequence: CTC
ctgtctataccaccaccttg

SEQ ID NO: 375597 - DNA, 20 bp, Artificial Sequence
  Description of Artificial Sequence: Synthetic oligonucleotide
  Target: LAMA2; (+) strand; PAM type: YTN; PAM sequence: CTG
tctataccaccaccttgagg

SEQ ID NO: 375598 - DNA, 20 bp, Artificial Sequence
  Description of Artificial Sequence: Synthetic oligonucleotide
  Target: LAMA2; (+) strand; PAM type: YTN; PAM sequence: CTA
taccaccaccttgagggtta

SEQ ID NO: 375599 - DNA, 20 bp, Artificial Sequence
  Description of Artificial Sequence: Synthetic oligonucleotide
  Target: LAMA2; (+) strand; PAM type: YTN; PAM sequence: CTT
gagggttaagatttctacat

SEQ ID NO: 375600 - DNA, 20 bp, Artificial Sequence
  Description of Artificial Sequence: Synthetic oligonucleotide
  Target: LAMA2; (+) strand; PAM type: YTN; PAM sequence: TTG
agggttaagatttctacata

SEQ ID NO: 375601 - DNA, 20 bp, Artificial Sequence
  Description of Artificial Sequence: Synthetic oligonucleotide
  Target: LAMA2; (+) strand; PAM type: YTN; PAM sequence: TTA
agatttctacatatgaattt

SEQ ID NO: 375602 - DNA, 20 bp, Artificial Sequence
  Description of Artificial Sequence: Synthetic oligonucleotide
  Target: LAMA2; (+) strand; PAM type: YTN; PAM sequence: TTT
ctacatatgaattttggggg

SEQ ID NO: 375603 - DNA, 20 bp, Artificial Sequence
  Description of Artificial Sequence: Synthetic oligonucleotide
  Target: LAMA2; (+) strand; PAM type: YTN; PAM sequence: TTC
tacatatgaattttggggga

SEQ ID NO: 375604 - DNA, 20 bp, Artificial Sequence
  Description of Artificial Sequence: Synthetic oligonucleotide
  Target: LAMA2; (+) strand; PAM type: YTN; PAM sequence: CTA
catatgaattttgggggaca

SEQ ID NO: 375605 - DNA, 20 bp, Artificial Sequence
  Description of Artificial Sequence: Synthetic oligonucleotide
  Target: LAMA2; (+) strand; PAM type: YTN; PAM sequence: TTT
tgggggacataaacattcag

SEQ ID NO: 375606 - DNA, 20 bp, Artificial Sequence
  Description of Artificial Sequence: Synthetic oligonucleotide
  Target: LAMA2; (+) strand; PAM type: YTN; PAM sequence: TTT
gggggacataaacattcagt

SEQ ID NO: 375607 - DNA, 20 bp, Artificial Sequence
  Description of Artificial Sequence: Synthetic oligonucleotide
  Target: LAMA2; (+) strand; PAM type: YTN; PAM sequence: TTG
ggggacataaacattcagtc

SEQ ID NO: 375608 - DNA, 20 bp, Artificial Sequence
  Description of Artificial Sequence: Synthetic oligonucleotide
  Target: LAMA2; (+) strand; PAM type: YTN; PAM sequence: TTC
agtccattacagagcacctc

SEQ ID NO: 375609 - DNA, 20 bp, Artificial Sequence
  Description of Artificial Sequence: Synthetic oligonucleotide
  Target: LAMA2; (+) strand; PAM type: YTN; PAM sequence: TTA
cagagcacctctgatgggtc

SEQ ID NO: 375610 - DNA, 20 bp, Artificial Sequence
  Description of Artificial Sequence: Synthetic oligonucleotide
  Target: LAMA2; (+) strand; PAM type: YTN; PAM sequence: CTC
tgatgggtccaaaagacaag

SEQ ID NO: 375611 - DNA, 20 bp, Artificial Sequence
  Description of Artificial Sequence: Synthetic oligonucleotide
  Target: LAMA2; (+) strand; PAM type: YTN; PAM sequence: CTG
atgggtccaaaagacaagaa

SEQ ID NO: 375612 - DNA, 20 bp, Artificial Sequence
  Description of Artificial Sequence: Synthetic oligonucleotide
  Target: LAMA2; (+) strand; PAM type: YTN; PAM sequence: CTG
gaggctttcagtcagtaaaa

SEQ ID NO: 375613 - DNA, 20 bp, Artificial Sequence
  Description of Artificial Sequence: Synthetic oligonucleotide
  Target: LAMA2; (+) strand; PAM type: YTN; PAM sequence: CTT
tcagtcagtaaaattccaca

SEQ ID NO: 375614 - DNA, 20 bp, Artificial Sequence
  Description of Artificial Sequence: Synthetic oligonucleotide
  Target: LAMA2; (+) strand; PAM type: YTN; PAM sequence: TTT
cagtcagtaaaattccacac

SEQ ID NO: 375615 - DNA, 20 bp, Artificial Sequence
  Description of Artificial Sequence: Synthetic oligonucleotide
  Target: LAMA2; (+) strand; PAM type: YTN; PAM sequence: TTC
agtcagtaaaattccacact

SEQ ID NO: 375616 - DNA, 20 bp, Artificial Sequence
  Description of Artificial Sequence: Synthetic oligonucleotide
  Target: LAMA2; (+) strand; PAM type: YTN; PAM sequence: TTC
cacactgtaggttgtcttgc

SEQ ID NO: 375617 - DNA, 20 bp, Artificial Sequence
  Description of Artificial Sequence: Synthetic oligonucleotide
  Target: LAMA2; (+) strand; PAM type: YTN; PAM sequence: CTG
taggttgtcttgcaggtaga

SEQ ID NO: 375618 - DNA, 20 bp, Artificial Sequence
  Description of Artificial Sequence: Synthetic oligonucleotide
  Target: LAMA2; (+) strand; PAM type: YTN; PAM sequence: TTG
tcttgcaggtagatcggatg

SEQ ID NO: 375619 - DNA, 20 bp, Artificial Sequence
  Description of Artificial Sequence: Synthetic oligonucleotide
  Target: LAMA2; (+) strand; PAM type: YTN; PAM sequence: CTT
gcaggtagatcggatgaggc

SEQ ID NO: 375620 - DNA, 20 bp, Artificial Sequence
  Description of Artificial Sequence: Synthetic oligonucleotide
  Target: LAMA2; (+) strand; PAM type: YTN; PAM sequence: TTG
caggtagatcggatgaggcg

SEQ ID NO: 375621 - DNA, 20 bp, Artificial Sequence
  Description of Artificial Sequence: Synthetic oligonucleotide
  Target: LAMA2; (+) strand; PAM type: YTN; PAM sequence: CTC
caaggctgtctcagggtagc

SEQ ID NO: 375622 - DNA, 20 bp, Artificial Sequence
  Description of Artificial Sequence: Synthetic oligonucleotide
  Target: LAMA2; (+) strand; PAM type: YTN; PAM sequence: CTG
tctcagggtagcagtgagaa

SEQ ID NO: 375623 - DNA, 20 bp, Artificial Sequence
  Description of Artificial Sequence: Synthetic oligonucleotide
  Target: LAMA2; (+) strand; PAM type: YTN; PAM sequence: CTC
agggtagcagtgagaacagt

SEQ ID NO: 375624 - DNA, 20 bp, Artificial Sequence
  Description of Artificial Sequence: Synthetic oligonucleotide
  Target: LAMA2; (+) strand; PAM type: YTN; PAM sequence: TTT
ttagtaaatgttaggcctga

SEQ ID NO: 375625 - DNA, 20 bp, Artificial Sequence
  Description of Artificial Sequence: Synthetic oligonucleotide
  Target: LAMA2; (+) strand; PAM type: YTN; PAM sequence: TTT
tagtaaatgttaggcctgat

SEQ ID NO: 375626 - DNA, 20 bp, Artificial Sequence
  Description of Artificial Sequence: Synthetic oligonucleotide
  Target: LAMA2; (+) strand; PAM type: YTN; PAM sequence: TTT
agtaaatgttaggcctgatt

SEQ ID NO: 375627 - DNA, 20 bp, Artificial Sequence
  Description of Artificial Sequence: Synthetic oligonucleotide
  Target: LAMA2; (+) strand; PAM type: YTN; PAM sequence: TTA
gtaaatgttaggcctgatta

SEQ ID NO: 375628 - DNA, 20 bp, Artificial Sequence
  Description of Artificial Sequence: Synthetic oligonucleotide
  Target: LAMA2; (+) strand; PAM type: YTN; PAM sequence: TTA
ggcctgattactattattat

SEQ ID NO: 375629 - DNA, 20 bp, Artificial Sequence
  Description of Artificial Sequence: Synthetic oligonucleotide
  Target: LAMA2; (+) strand; PAM type: YTN; PAM sequence: CTG
attactattattattaccaa

SEQ ID NO: 375630 - DNA, 20 bp, Artificial Sequence
  Description of Artificial Sequence: Synthetic oligonucleotide
  Target: LAMA2; (+) strand; PAM type: YTN; PAM sequence: TTA
ctattattattaccaatgtt

SEQ ID NO: 375631 - DNA, 20 bp, Artificial Sequence
  Description of Artificial Sequence: Synthetic oligonucleotide
  Target: LAMA2; (+) strand; PAM type: YTN; PAM sequence: CTA
ttattattaccaatgttgtt

SEQ ID NO: 375632 - DNA, 20 bp, Artificial Sequence
  Description of Artificial Sequence: Synthetic oligonucleotide
  Target: LAMA2; (+) strand; PAM type: YTN; PAM sequence: TTA
ttattaccaatgttgttaaa

SEQ ID NO: 375633 - DNA, 20 bp, Artificial Sequence
  Description of Artificial Sequence: Synthetic oligonucleotide
  Target: LAMA2; (+) strand; PAM type: YTN; PAM sequence: TTA
ttaccaatgttgttaaatga

SEQ ID NO: 375634 - DNA, 20 bp, Artificial Sequence
  Description of Artificial Sequence: Synthetic oligonucleotide
  Target: LAMA2; (+) strand; PAM type: YTN; PAM sequence: TTA
ccaatgttgttaaatgaaga

SEQ ID NO: 375635 - DNA, 20 bp, Artificial Sequence
  Description of Artificial Sequence: Synthetic oligonucleotide
  Target: LAMA2; (+) strand; PAM type: YTN; PAM sequence: TTG
ttaaatgaagaaatgtttaa

SEQ ID NO: 375636 - DNA, 20 bp, Artificial Sequence
  Description of Artificial Sequence: Synthetic oligonucleotide
  Target: LAMA2; (+) strand; PAM type: YTN; PAM sequence: TTA
aatgaagaaatgtttaaaat

SEQ ID NO: 375637 - DNA, 20 bp, Artificial Sequence
  Description of Artificial Sequence: Synthetic oligonucleotide
  Target: LAMA2; (+) strand; PAM type: YTN; PAM sequence: TTT
aaaataattttttttcaaaa

SEQ ID NO: 375638 - DNA, 20 bp, Artificial Sequence
  Description of Artificial Sequence: Synthetic oligonucleotide
  Target: LAMA2; (+) strand; PAM type: YTN; PAM sequence: TTA
aaataattttttttcaaaaa

SEQ ID NO: 375639 - DNA, 20 bp, Artificial Sequence
  Description of Artificial Sequence: Synthetic oligonucleotide
  Target: LAMA2; (+) strand; PAM type: YTN; PAM sequence: TTT
tttttcaaaaacaaatgcat

SEQ ID NO: 375640 - DNA, 20 bp, Artificial Sequence
  Description of Artificial Sequence: Synthetic oligonucleotide
  Target: LAMA2; (+) strand; PAM type: YTN; PAM sequence: TTT
ttttcaaaaacaaatgcata

SEQ ID NO: 375641 - DNA, 20 bp, Artificial Sequence
  Description of Artificial Sequence: Synthetic oligonucleotide
  Target: LAMA2; (+) strand; PAM type: YTN; PAM sequence: TTT
tttcaaaaacaaatgcatac

SEQ ID NO: 375642 - DNA, 20 bp, Artificial Sequence
  Description of Artificial Sequence: Synthetic oligonucleotide
  Target: LAMA2; (+) strand; PAM type: YTN; PAM sequence: TTT
ttcaaaaacaaatgcataca

SEQ ID NO: 375643 - DNA, 20 bp, Artificial Sequence
  Description of Artificial Sequence: Synthetic oligonucleotide
  Target: LAMA2; (+) strand; PAM type: YTN; PAM sequence: TTT
tcaaaaacaaatgcatacat

SEQ ID NO: 375644 - DNA, 20 bp, Artificial Sequence
  Description of Artificial Sequence: Synthetic oligonucleotide
  Target: LAMA2; (+) strand; PAM type: YTN; PAM sequence: TTT
caaaaacaaatgcatacatt

SEQ ID NO: 375645 - DNA, 20 bp, Artificial Sequence
  Description of Artificial Sequence: Synthetic oligonucleotide
  Target: LAMA2; (+) strand; PAM type: YTN; PAM sequence: TTC
aaaaacaaatgcatacattt

SEQ ID NO: 375646 - DNA, 20 bp, Artificial Sequence
  Description of Artificial Sequence: Synthetic oligonucleotide
  Target: LAMA2; (+) strand; PAM type: YTN; PAM sequence: TTT
acaataaaagaaaaagataa

SEQ ID NO: 375647 - DNA, 20 bp, Artificial Sequence
  Description of Artificial Sequence: Synthetic oligonucleotide
  Target: LAMA2; (+) strand; PAM type: YTN; PAM sequence: TTA
caataaaagaaaaagataat

SEQ ID NO: 375648 - DNA, 20 bp, Artificial Sequence
  Description of Artificial Sequence: Synthetic oligonucleotide
  Target: LAMA2; (+) strand; PAM type: YTN; PAM sequence: CTG
attaaaatgtctcctaaata

SEQ ID NO: 375649 - DNA, 20 bp, Artificial Sequence
  Description of Artificial Sequence: Synthetic oligonucleotide
  Target: LAMA2; (+) strand; PAM type: YTN; PAM sequence: TTA
aaatgtctcctaaatataaa

SEQ ID NO: 375650 - DNA, 20 bp, Artificial Sequence
  Description of Artificial Sequence: Synthetic oligonucleotide
  Target: LAMA2; (+) strand; PAM type: YTN; PAM sequence: CTC
ctaaatataaatttagcaga

SEQ ID NO: 375651 - DNA, 20 bp, Artificial Sequence
  Description of Artificial Sequence: Synthetic oligonucleotide
  Target: LAMA2; (+) strand; PAM type: YTN; PAM sequence: CTA
aatataaatttagcagaaag

SEQ ID NO: 375652 - DNA, 20 bp, Artificial Sequence
  Description of Artificial Sequence: Synthetic oligonucleotide
  Target: LAMA2; (+) strand; PAM type: YTN; PAM sequence: TTT
agcagaaagtcaacgttcat

SEQ ID NO: 375653 - DNA, 20 bp, Artificial Sequence
  Description of Artificial Sequence: Synthetic oligonucleotide
  Target: LAMA2; (+) strand; PAM type: YTN; PAM sequence: TTA
gcagaaagtcaacgttcatt

SEQ ID NO: 375654 - DNA, 20 bp, Artificial Sequence
  Description of Artificial Sequence: Synthetic oligonucleotide
  Target: LAMA2; (+) strand; PAM type: YTN; PAM sequence: TTC
attcaagccctacatatctt

SEQ ID NO: 375655 - DNA, 20 bp, Artificial Sequence
  Description of Artificial Sequence: Synthetic oligonucleotide
  Target: LAMA2; (+) strand; PAM type: YTN; PAM sequence: TTC
aagccctacatatcttacag

SEQ ID NO: 375656 - DNA, 20 bp, Artificial Sequence
  Description of Artificial Sequence: Synthetic oligonucleotide
  Target: LAMA2; (+) strand; PAM type: YTN; PAM sequence: CTA
catatcttacagtactattg

SEQ ID NO: 375657 - DNA, 20 bp, Artificial Sequence
  Description of Artificial Sequence: Synthetic oligonucleotide
  Target: LAMA2; (+) strand; PAM type: YTN; PAM sequence: CTT
acagtactattgtatgaagc

SEQ ID NO: 375658 - DNA, 20 bp, Artificial Sequence
  Description of Artificial Sequence: Synthetic oligonucleotide
  Target: LAMA2; (+) strand; PAM type: YTN; PAM sequence: TTA
cagtactattgtatgaagca

SEQ ID NO: 375659 - DNA, 20 bp, Artificial Sequence
  Description of Artificial Sequence: Synthetic oligonucleotide
  Target: LAMA2; (+) strand; PAM type: YTN; PAM sequence: CTA
ttgtatgaagcagggttttg

SEQ ID NO: 375660 - DNA, 20 bp, Artificial Sequence
  Description of Artificial Sequence: Synthetic oligonucleotide
  Target: LAMA2; (+) strand; PAM type: YTN; PAM sequence: TTG
tatgaagcagggttttgtcc

SEQ ID NO: 375661 - DNA, 20 bp, Artificial Sequence
  Description of Artificial Sequence: Synthetic oligonucleotide
  Target: LAMA2; (+) strand; PAM type: YTN; PAM sequence: TTT
tgtcccgagactattttttc

SEQ ID NO: 375662 - DNA, 20 bp, Artificial Sequence
  Description of Artificial Sequence: Synthetic oligonucleotide
  Target: LAMA2; (+) strand; PAM type: YTN; PAM sequence: TTT
gtcccgagactattttttcc

SEQ ID NO: 375663 - DNA, 20 bp, Artificial Sequence
  Description of Artificial Sequence: Synthetic oligonucleotide
  Target: LAMA2; (+) strand; PAM type: YTN; PAM sequence: TTG
tcccgagactattttttcct

SEQ ID NO: 375664 - DNA, 20 bp, Artificial Sequence
  Description of Artificial Sequence: Synthetic oligonucleotide
  Target: LAMA2; (+) strand; PAM type: YTN; PAM sequence: CTA
ttttttcctctgcagcagta

SEQ ID NO: 375665 - DNA, 20 bp, Artificial Sequence
  Description of Artificial Sequence: Synthetic oligonucleotide
  Target: LAMA2; (+) strand; PAM type: YTN; PAM sequence: TTT
tttcctctgcagcagtatgt

SEQ ID NO: 375666 - DNA, 20 bp, Artificial Sequence
  Description of Artificial Sequence: Synthetic oligonucleotide
  Target: LAMA2; (+) strand; PAM type: YTN; PAM sequence: TTT
ttcctctgcagcagtatgtg

SEQ ID NO: 375667 - DNA, 20 bp, Artificial Sequence
  Description of Artificial Sequence: Synthetic oligonucleotide
  Target: LAMA2; (+) strand; PAM type: YTN; PAM sequence: TTT
tcctctgcagcagtatgtgt

SEQ ID NO: 375668 - DNA, 20 bp, Artificial Sequence
  Description of Artificial Sequence: Synthetic oligonucleotide
  Target: LAMA2; (+) strand; PAM type: YTN; PAM sequence: TTT
cctctgcagcagtatgtgtg

SEQ ID NO: 375669 - DNA, 20 bp, Artificial Sequence
  Description of Artificial Sequence: Synthetic oligonucleotide
  Target: LAMA2; (+) strand; PAM type: YTN; PAM sequence: TTC
ctctgcagcagtatgtgtga

SEQ ID NO: 375670 - DNA, 20 bp, Artificial Sequence
  Description of Artificial Sequence: Synthetic oligonucleotide
  Target: LAMA2; (+) strand; PAM type: YTN; PAM sequence: CTC
tgcagcagtatgtgtgagag

SEQ ID NO: 375671 - DNA, 20 bp, Artificial Sequence
  Description of Artificial Sequence: Synthetic oligonucleotide
  Target: LAMA2; (+) strand; PAM type: YTN; PAM sequence: CTG
cagcagtatgtgtgagagct

SEQ ID NO: 375672 - DNA, 20 bp, Artificial Sequence
  Description of Artificial Sequence: Synthetic oligonucleotide
  Target: LAMA2; (+) strand; PAM type: YTN; PAM sequence: CTG
agagctcagactctggagcc

SEQ ID NO: 375673 - DNA, 20 bp, Artificial Sequence
  Description of Artificial Sequence: Synthetic oligonucleotide
  Target: LAMA2; (+) strand; PAM type: YTN; PAM sequence: CTC
agactctggagccaacctag

SEQ ID NO: 375674 - DNA, 20 bp, Artificial Sequence
  Description of Artificial Sequence: Synthetic oligonucleotide
  Target: LAMA2; (+) strand; PAM type: YTN; PAM sequence: CTC
tggagccaacctagctgatc

SEQ ID NO: 375675 - DNA, 20 bp, Artificial Sequence
  Description of Artificial Sequence: Synthetic oligonucleotide
  Target: LAMA2; (+) strand; PAM type: YTN; PAM sequence: CTG
gagccaacctagctgatctg

SEQ ID NO: 375676 - DNA, 20 bp, Artificial Sequence
  Description of Artificial Sequence: Synthetic oligonucleotide
  Target: LAMA2; (+) strand; PAM type: YTN; PAM sequence: CTA
gctgatctggaatcttgact

SEQ ID NO: 375677 - DNA, 20 bp, Artificial Sequence
  Description of Artificial Sequence: Synthetic oligonucleotide
  Target: LAMA2; (+) strand; PAM type: YTN; PAM sequence: CTG
atctggaatcttgactccac

SEQ ID NO: 375678 - DNA, 20 bp, Artificial Sequence
  Description of Artificial Sequence: Synthetic oligonucleotide
  Target: LAMA2; (+) strand; PAM type: YTN; PAM sequence: CTG
gaatcttgactccacaattg

SEQ ID NO: 375679 - DNA, 20 bp, Artificial Sequence
  Description of Artificial Sequence: Synthetic oligonucleotide
  Target: LAMA2; (+) strand; PAM type: YTN; PAM sequence: CTT
gactccacaattggttagct

SEQ ID NO: 375680 - DNA, 20 bp, Artificial Sequence
  Description of Artificial Sequence: Synthetic oligonucleotide
  Target: LAMA2; (+) strand; PAM type: YTN; PAM sequence: TTG
actccacaattggttagctc

SEQ ID NO: 375681 - DNA, 20 bp, Artificial Sequence
  Description of Artificial Sequence: Synthetic oligonucleotide
  Target: LAMA2; (+) strand; PAM type: YTN; PAM sequence: CTC
cacaattggttagctcatga

SEQ ID NO: 375682 - DNA, 20 bp, Artificial Sequence
  Description of Artificial Sequence: Synthetic oligonucleotide
  Target: LAMA2; (+) strand; PAM type: YTN; PAM sequence: TTG
gttagctcatgaccttaggc

SEQ ID NO: 375683 - DNA, 20 bp, Artificial Sequence
  Description of Artificial Sequence: Synthetic oligonucleotide
  Target: LAMA2; (+) strand; PAM type: YTN; PAM sequence: TTA
gctcatgaccttaggcaact

SEQ ID NO: 375684 - DNA, 20 bp, Artificial Sequence
  Description of Artificial Sequence: Synthetic oligonucleotide
  Target: LAMA2; (+) strand; PAM type: YTN; PAM sequence: CTC
atgaccttaggcaacttact

SEQ ID NO: 375685 - DNA, 20 bp, Artificial Sequence
  Description of Artificial Sequence: Synthetic oligonucleotide
  Target: LAMA2; (+) strand; PAM type: YTN; PAM sequence: CTT
aggcaacttacttaaccttt

SEQ ID NO: 375686 - DNA, 20 bp, Artificial Sequence
  Description of Artificial Sequence: Synthetic oligonucleotide
  Target: LAMA2; (+) strand; PAM type: YTN; PAM sequence: TTA
ggcaacttacttaacctttc

SEQ ID NO: 375687 - DNA, 20 bp, Artificial Sequence
  Description of Artificial Sequence: Synthetic oligonucleotide
  Target: LAMA2; (+) strand; PAM type: YTN; PAM sequence: CTT
acttaacctttctgtgcctc

SEQ ID NO: 375688 - DNA, 20 bp, Artificial Sequence
  Description of Artificial Sequence: Synthetic oligonucleotide
  Target: LAMA2; (+) strand; PAM type: YTN; PAM sequence: TTA
cttaacctttctgtgcctca

SEQ ID NO: 375689 - DNA, 20 bp, Artificial Sequence
  Description of Artificial Sequence: Synthetic oligonucleotide
  Target: LAMA2; (+) strand; PAM type: YTN; PAM sequence: CTT
aacctttctgtgcctcagtt

SEQ ID NO: 375690 - DNA, 20 bp, Artificial Sequence
  Description of Artificial Sequence: Synthetic oligonucleotide
  Target: LAMA2; (+) strand; PAM type: YTN; PAM sequence: TTA
acctttctgtgcctcagttt

SEQ ID NO: 375691 - DNA, 20 bp, Artificial Sequence
  Description of Artificial Sequence: Synthetic oligonucleotide
  Target: LAMA2; (+) strand; PAM type: YTN; PAM sequence: CTT
tctgtgcctcagtttcacca

SEQ ID NO: 375692 - DNA, 20 bp, Artificial Sequence
  Description of Artificial Sequence: Synthetic oligonucleotide
  Target: LAMA2; (+) strand; PAM type: YTN; PAM sequence: TTT
ctgtgcctcagtttcaccac

SEQ ID NO: 375693 - DNA, 20 bp, Artificial Sequence
  Description of Artificial Sequence: Synthetic oligonucleotide
  Target: LAMA2; (+) strand; PAM type: YTN; PAM sequence: TTC
tgtgcctcagtttcaccact

SEQ ID NO: 375694 - DNA, 20 bp, Artificial Sequence
  Description of Artificial Sequence: Synthetic oligonucleotide
  Target: LAMA2; (+) strand; PAM type: YTN; PAM sequence: CTG
tgcctcagtttcaccactca

SEQ ID NO: 375695 - DNA, 20 bp, Artificial Sequence
  Description of Artificial Sequence: Synthetic oligonucleotide
  Target: LAMA2; (+) strand; PAM type: YTN; PAM sequence: CTC
agtttcaccactcaataaaa

SEQ ID NO: 375696 - DNA, 20 bp, Artificial Sequence
  Description of Artificial Sequence: Synthetic oligonucleotide
  Target: LAMA2; (+) strand; PAM type: YTN; PAM sequence: TTT
caccactcaataaaaaagtg

SEQ ID NO: 375697 - DNA, 20 bp, Artificial Sequence
  Description of Artificial Sequence: Synthetic oligonucleotide
  Target: LAMA2; (+) strand; PAM type: YTN; PAM sequence: TTC
accactcaataaaaaagtgg

SEQ ID NO: 375698 - DNA, 20 bp, Artificial Sequence
  Description of Artificial Sequence: Synthetic oligonucleotide
  Target: LAMA2; (+) strand; PAM type: YTN; PAM sequence: CTC
aataaaaaagtggtgagaat

SEQ ID NO: 375699 - DNA, 20 bp, Artificial Sequence
  Description of Artificial Sequence: Synthetic oligonucleotide
  Target: LAMA2; (+) strand; PAM type: YTN; PAM sequence: CTC
tctgccagggttgtcctgag

SEQ ID NO: 375700 - DNA, 20 bp, Artificial Sequence
  Description of Artificial Sequence: Synthetic oligonucleotide
  Target: LAMA2; (+) strand; PAM type: YTN; PAM sequence: CTC
tgccagggttgtcctgagga

SEQ ID NO: 375701 - DNA, 20 bp, Artificial Sequence
  Description of Artificial Sequence: Synthetic oligonucleotide
  Target: LAMA2; (+) strand; PAM type: YTN; PAM sequence: CTG
ccagggttgtcctgaggagt

SEQ ID NO: 375702 - DNA, 20 bp, Artificial Sequence
  Description of Artificial Sequence: Synthetic oligonucleotide
  Target: LAMA2; (+) strand; PAM type: YTN; PAM sequence: TTG
tcctgaggagtaaatgagta

SEQ ID NO: 375703 - DNA, 20 bp, Artificial Sequence
  Description of Artificial Sequence: Synthetic oligonucleotide
  Target: LAMA2; (+) strand; PAM type: YTN; PAM sequence: CTG
aggagtaaatgagtacatat

SEQ ID NO: 375704 - DNA, 20 bp, Artificial Sequence
  Description of Artificial Sequence: Synthetic oligonucleotide
  Target: LAMA2; (+) strand; PAM type: YTN; PAM sequence: TTT
gtaaagagtttagatttgta

SEQ ID NO: 375705 - DNA, 20 bp, Artificial Sequence
  Description of Artificial Sequence: Synthetic oligonucleotide
  Target: LAMA2; (+) strand; PAM type: YTN; PAM sequence: TTG
taaagagtttagatttgtaa

SEQ ID NO: 375706 - DNA, 20 bp, Artificial Sequence
  Description of Artificial Sequence: Synthetic oligonucleotide
  Target: LAMA2; (+) strand; PAM type: YTN; PAM sequence: TTT
agatttgtaaagggtttaga

SEQ ID NO: 375707 - DNA, 20 bp, Artificial Sequence
  Description of Artificial Sequence: Synthetic oligonucleotide
  Target: LAMA2; (+) strand; PAM type: YTN; PAM sequence: TTA
gatttgtaaagggtttagaa

SEQ ID NO: 375708 - DNA, 20 bp, Artificial Sequence
  Description of Artificial Sequence: Synthetic oligonucleotide
  Target: LAMA2; (+) strand; PAM type: YTN; PAM sequence: TTT
gtaaagggtttagaattgtg

SEQ ID NO: 375709 - DNA, 20 bp, Artificial Sequence
  Description of Artificial Sequence: Synthetic oligonucleotide
  Target: LAMA2; (+) strand; PAM type: YTN; PAM sequence: TTG
taaagggtttagaattgtgc

SEQ ID NO: 375710 - DNA, 20 bp, Artificial Sequence
  Description of Artificial Sequence: Synthetic oligonucleotide
  Target: LAMA2; (+) strand; PAM type: YTN; PAM sequence: TTT
agaattgtgctttgcaaaaa

SEQ ID NO: 375711 - DNA, 20 bp, Artificial Sequence
  Description of Artificial Sequence: Synthetic oligonucleotide
  Target: LAMA2; (+) strand; PAM type: YTN; PAM sequence: TTA
gaattgtgctttgcaaaaag

SEQ ID NO: 375712 - DNA, 20 bp, Artificial Sequence
  Description of Artificial Sequence: Synthetic oligonucleotide
  Target: LAMA2; (+) strand; PAM type: YTN; PAM sequence: TTG
tgctttgcaaaaaggaagca

SEQ ID NO: 375713 - DNA, 20 bp, Artificial Sequence
  Description of Artificial Sequence: Synthetic oligonucleotide
  Target: LAMA2; (+) strand; PAM type: YTN; PAM sequence: CTT
tgcaaaaaggaagcacaata

SEQ ID NO: 375714 - DNA, 20 bp, Artificial Sequence
  Description of Artificial Sequence: Synthetic oligonucleotide
  Target: LAMA2; (+) strand; PAM type: YTN; PAM sequence: TTT
gcaaaaaggaagcacaatat

SEQ ID NO: 375715 - DNA, 20 bp, Artificial Sequence
  Description of Artificial Sequence: Synthetic oligonucleotide
  Target: LAMA2; (+) strand; PAM type: YTN; PAM sequence: TTG
caaaaaggaagcacaatata

SEQ ID NO: 375716 - DNA, 20 bp, Artificial Sequence
  Description of Artificial Sequence: Synthetic oligonucleotide
  Target: LAMA2; (+) strand; PAM type: YTN; PAM sequence: CTA
gttcttattaccccgagaga

SEQ ID NO: 375717 - DNA, 20 bp, Artificial Sequence
  Description of Artificial Sequence: Synthetic oligonucleotide
  Target: LAMA2; (+) strand; PAM type: YTN; PAM sequence: TTC
ttattaccccgagagagaca

SEQ ID NO: 375718 - DNA, 20 bp, Artificial Sequence
  Description of Artificial Sequence: Synthetic oligonucleotide
  Target: LAMA2; (+) strand; PAM type: YTN; PAM sequence: CTT
attaccccgagagagacaca

SEQ ID NO: 375719 - DNA, 20 bp, Artificial Sequence
  Description of Artificial Sequence: Synthetic oligonucleotide
  Target: LAMA2; (+) strand; PAM type: YTN; PAM sequence: TTA
ttaccccgagagagacacat

SEQ ID NO: 375720 - DNA, 20 bp, Artificial Sequence
  Description of Artificial Sequence: Synthetic oligonucleotide
  Target: LAMA2; (+) strand; PAM type: YTN; PAM sequence: TTA
ccccgagagagacacattta

SEQ ID NO: 375721 - DNA, 20 bp, Artificial Sequence
  Description of Artificial Sequence: Synthetic oligonucleotide
  Target: LAMA2; (+) strand; PAM type: YTN; PAM sequence: TTT
atgggaacctatacagtttc

SEQ ID NO: 375722 - DNA, 20 bp, Artificial Sequence
  Description of Artificial Sequence: Synthetic oligonucleotide
  Target: LAMA2; (+) strand; PAM type: YTN; PAM sequence: TTA
tgggaacctatacagtttct

SEQ ID NO: 375723 - DNA, 20 bp, Artificial Sequence
  Description of Artificial Sequence: Synthetic oligonucleotide
  Target: LAMA2; (+) strand; PAM type: YTN; PAM sequence: CTA
tacagtttctcactgggtct

SEQ ID NO: 375724 - DNA, 20 bp, Artificial Sequence
  Description of Artificial Sequence: Synthetic oligonucleotide
  Target: LAMA2; (+) strand; PAM type: YTN; PAM sequence: TTT
ctcactgggtctggatagcc

SEQ ID NO: 375725 - DNA, 20 bp, Artificial Sequence
  Description of Artificial Sequence: Synthetic oligonucleotide
  Target: LAMA2; (+) strand; PAM type: YTN; PAM sequence: TTC
tcactgggtctggatagcca

SEQ ID NO: 375726 - DNA, 20 bp, Artificial Sequence
  Description of Artificial Sequence: Synthetic oligonucleotide
  Target: LAMA2; (+) strand; PAM type: YTN; PAM sequence: CTC
actgggtctggatagccact

SEQ ID NO: 375727 - DNA, 20 bp, Artificial Sequence
  Description of Artificial Sequence: Synthetic oligonucleotide
  Target: LAMA2; (+) strand; PAM type: YTN; PAM sequence: CTG
ggtctggatagccactctct

SEQ ID NO: 375728 - DNA, 20 bp, Artificial Sequence
  Description of Artificial Sequence: Synthetic oligonucleotide
  Target: LAMA2; (+) strand; PAM type: YTN; PAM sequence: CTG
gatagccactctctcccata

SEQ ID NO: 375729 - DNA, 20 bp, Artificial Sequence
  Description of Artificial Sequence: Synthetic oligonucleotide
  Target: LAMA2; (+) strand; PAM type: YTN; PAM sequence: CTC
tctcccatatttattttacc

SEQ ID NO: 375730 - DNA, 20 bp, Artificial Sequence
  Description of Artificial Sequence: Synthetic oligonucleotide
  Target: LAMA2; (+) strand; PAM type: YTN; PAM sequence: CTC
tcccatatttattttacctc

SEQ ID NO: 375731 - DNA, 20 bp, Artificial Sequence
  Description of Artificial Sequence: Synthetic oligonucleotide
  Target: LAMA2; (+) strand; PAM type: YTN; PAM sequence: CTC
ccatatttattttacctcat

SEQ ID NO: 375732 - DNA, 20 bp, Artificial Sequence
  Description of Artificial Sequence: Synthetic oligonucleotide
  Target: LAMA2; (+) strand; PAM type: YTN; PAM sequence: TTT
attttacctcattaatctca

SEQ ID NO: 375733 - DNA, 20 bp, Artificial Sequence
  Description of Artificial Sequence: Synthetic oligonucleotide
  Target: LAMA2; (+) strand; PAM type: YTN; PAM sequence: TTA
ttttacctcattaatctcaa

SEQ ID NO: 375734 - DNA, 20 bp, Artificial Sequence
  Description of Artificial Sequence: Synthetic oligonucleotide
  Target: LAMA2; (+) strand; PAM type: YTN; PAM sequence: TTT
tacctcattaatctcaatta

SEQ ID NO: 375735 - DNA, 20 bp, Artificial Sequence
  Description of Artificial Sequence: Synthetic oligonucleotide
  Target: LAMA2; (+) strand; PAM type: YTN; PAM sequence: TTT
acctcattaatctcaattac

SEQ ID NO: 375736 - DNA, 20 bp, Artificial Sequence
  Description of Artificial Sequence: Synthetic oligonucleotide
  Target: LAMA2; (+) strand; PAM type: YTN; PAM sequence: TTA
cctcattaatctcaattact

SEQ ID NO: 375737 - DNA, 20 bp, Artificial Sequence
  Description of Artificial Sequence: Synthetic oligonucleotide
  Target: LAMA2; (+) strand; PAM type: YTN; PAM sequence: CTC
attaatctcaattactgacc

SEQ ID NO: 375738 - DNA, 20 bp, Artificial Sequence
  Description of Artificial Sequence: Synthetic oligonucleotide
  Target: LAMA2; (+) strand; PAM type: YTN; PAM sequence: TTA
atctcaattactgaccatga

SEQ ID NO: 375739 - DNA, 20 bp, Artificial Sequence
  Description of Artificial Sequence: Synthetic oligonucleotide
  Target: LAMA2; (+) strand; PAM type: YTN; PAM sequence: CTC
aattactgaccatgaatgtc

SEQ ID NO: 375740 - DNA, 20 bp, Artificial Sequence
  Description of Artificial Sequence: Synthetic oligonucleotide
  Target: LAMA2; (+) strand; PAM type: YTN; PAM sequence: TTA
ctgaccatgaatgtctgctc

SEQ ID NO: 375741 - DNA, 20 bp, Artificial Sequence
  Description of Artificial Sequence: Synthetic oligonucleotide
  Target: LAMA2; (+) strand; PAM type: YTN; PAM sequence: CTG
accatgaatgtctgctcctt

SEQ ID NO: 375742 - DNA, 20 bp, Artificial Sequence
  Description of Artificial Sequence: Synthetic oligonucleotide
  Target: LAMA2; (+) strand; PAM type: YTN; PAM sequence: CTG
ctccttaagtttgtttacta

SEQ ID NO: 375743 - DNA, 20 bp, Artificial Sequence
  Description of Artificial Sequence: Synthetic oligonucleotide
  Target: LAMA2; (+) strand; PAM type: YTN; PAM sequence: CTC
cttaagtttgtttactagtg

SEQ ID NO: 375744 - DNA, 20 bp, Artificial Sequence
  Description of Artificial Sequence: Synthetic oligonucleotide
  Target: LAMA2; (+) strand; PAM type: YTN; PAM sequence: CTT
aagtttgtttactagtgggg

SEQ ID NO: 375745 - DNA, 20 bp, Artificial Sequence
  Description of Artificial Sequence: Synthetic oligonucleotide
  Target: LAMA2; (+) strand; PAM type: YTN; PAM sequence: TTA
agtttgtttactagtggggt

SEQ ID NO: 375746 - DNA, 20 bp, Artificial Sequence
  Description of Artificial Sequence: Synthetic oligonucleotide
  Target: LAMA2; (+) strand; PAM type: YTN; PAM sequence: TTT
gtttactagtggggttttct

SEQ ID NO: 375747 - DNA, 20 bp, Artificial Sequence
  Description of Artificial Sequence: Synthetic oligonucleotide
  Target: LAMA2; (+) strand; PAM type: YTN; PAM sequence: TTG
tttactagtggggttttctt

SEQ ID NO: 375748 - DNA, 20 bp, Artificial Sequence
  Description of Artificial Sequence: Synthetic oligonucleotide
  Target: LAMA2; (+) strand; PAM type: YTN; PAM sequence: TTT
actagtggggttttctttag

SEQ ID NO: 375749 - DNA, 20 bp, Artificial Sequence
  Description of Artificial Sequence: Synthetic oligonucleotide
  Target: LAMA2; (+) strand; PAM type: YTN; PAM sequence: TTA
ctagtggggttttctttagc

SEQ ID NO: 375750 - DNA, 20 bp, Artificial Sequence
  Description of Artificial Sequence: Synthetic oligonucleotide
  Target: LAMA2; (+) strand; PAM type: YTN; PAM sequence: CTA
gtggggttttctttagcctt

SEQ ID NO: 375751 - DNA, 20 bp, Artificial Sequence
  Description of Artificial Sequence: Synthetic oligonucleotide
  Target: LAMA2; (+) strand; PAM type: YTN; PAM sequence: TTT
tctttagcctttgaaacaaa

SEQ ID NO: 375752 - DNA, 20 bp, Artificial Sequence
  Description of Artificial Sequence: Synthetic oligonucleotide
  Target: LAMA2; (+) strand; PAM type: YTN; PAM sequence: TTT
ctttagcctttgaaacaaat

SEQ ID NO: 375753 - DNA, 20 bp, Artificial Sequence
  Description of Artificial Sequence: Synthetic oligonucleotide
  Target: LAMA2; (+) strand; PAM type: YTN; PAM sequence: TTC
tttagcctttgaaacaaatt

SEQ ID NO: 375754 - DNA, 20 bp, Artificial Sequence
  Description of Artificial Sequence: Synthetic oligonucleotide
  Target: LAMA2; (+) strand; PAM type: YTN; PAM sequence: CTT
tagcctttgaaacaaatttt

SEQ ID NO: 375755 - DNA, 20 bp, Artificial Sequence
  Description of Artificial Sequence: Synthetic oligonucleotide
  Target: LAMA2; (+) strand; PAM type: YTN; PAM sequence: TTT
agcctttgaaacaaattttt

SEQ ID NO: 375756 - DNA, 20 bp, Artificial Sequence
  Description of Artificial Sequence: Synthetic oligonucleotide
  Target: LAMA2; (+) strand; PAM type: YTN; PAM sequence: TTA
gcctttgaaacaaatttttg

SEQ ID NO: 375757 - DNA, 20 bp, Artificial Sequence
  Description of Artificial Sequence: Synthetic oligonucleotide
  Target: LAMA2; (+) strand; PAM type: YTN; PAM sequence: CTT
tgaaacaaatttttgaacaa

SEQ ID NO: 375758 - DNA, 20 bp, Artificial Sequence
  Description of Artificial Sequence: Synthetic oligonucleotide
  Target: LAMA2; (+) strand; PAM type: YTN; PAM sequence: TTT
gaaacaaatttttgaacaaa

SEQ ID NO: 375759 - DNA, 20 bp, Artificial Sequence
  Description of Artificial Sequence: Synthetic oligonucleotide
  Target: LAMA2; (+) strand; PAM type: YTN; PAM sequence: TTG
aaacaaatttttgaacaaat

SEQ ID NO: 375760 - DNA, 20 bp, Artificial Sequence
  Description of Artificial Sequence: Synthetic oligonucleotide
  Target: LAMA2; (+) strand; PAM type: YTN; PAM sequence: TTT
ttgaacaaatttgtaaacat

SEQ ID NO: 375761 - DNA, 20 bp, Artificial Sequence
  Description of Artificial Sequence: Synthetic oligonucleotide
  Target: LAMA2; (+) strand; PAM type: YTN; PAM sequence: TTT
tgaacaaatttgtaaacatt

SEQ ID NO: 375762 - DNA, 20 bp, Artificial Sequence
  Description of Artificial Sequence: Synthetic oligonucleotide
  Target: LAMA2; (+) strand; PAM type: YTN; PAM sequence: TTT
gaacaaatttgtaaacattt

SEQ ID NO: 375763 - DNA, 20 bp, Artificial Sequence
  Description of Artificial Sequence: Synthetic oligonucleotide
  Target: LAMA2; (+) strand; PAM type: YTN; PAM sequence: TTG
aacaaatttgtaaacatttt

SEQ ID NO: 375764 - DNA, 20 bp, Artificial Sequence
  Description of Artificial Sequence: Synthetic oligonucleotide
  Target: LAMA2; (+) strand; PAM type: YTN; PAM sequence: TTT
gtaaacattttattactgaa

SEQ ID NO: 375765 - DNA, 20 bp, Artificial Sequence
  Description of Artificial Sequence: Synthetic oligonucleotide
  Target: LAMA2; (+) strand; PAM type: YTN; PAM sequence: TTG
taaacattttattactgaaa

SEQ ID NO: 375766 - DNA, 20 bp, Artificial Sequence
  Description of Artificial Sequence: Synthetic oligonucleotide
  Target: LAMA2; (+) strand; PAM type: YTN; PAM sequence: TTT
tattactgaaatttggtagt

SEQ ID NO: 375767 - DNA, 20 bp, Artificial Sequence
  Description of Artificial Sequence: Synthetic oligonucleotide
  Target: LAMA2; (+) strand; PAM type: YTN; PAM sequence: TTT
attactgaaatttggtagta

SEQ ID NO: 375768 - DNA, 20 bp, Artificial Sequence
  Description of Artificial Sequence: Synthetic oligonucleotide
  Target: LAMA2; (+) strand; PAM type: YTN; PAM sequence: TTA
ttactgaaatttggtagtat

SEQ ID NO: 375769 - DNA, 20 bp, Artificial Sequence
  Description of Artificial Sequence: Synthetic oligonucleotide
  Target: LAMA2; (+) strand; PAM type: YTN; PAM sequence: TTA
ctgaaatttggtagtattta

SEQ ID NO: 375770 - DNA, 20 bp, Artificial Sequence
  Description of Artificial Sequence: Synthetic oligonucleotide
  Target: LAMA2; (+) strand; PAM type: YTN; PAM sequence: CTG
aaatttggtagtatttattt

SEQ ID NO: 375771 - DNA, 20 bp, Artificial Sequence
  Description of Artificial Sequence: Synthetic oligonucleotide
  Target: LAMA2; (+) strand; PAM type: YTN; PAM sequence: TTT
ggtagtatttattttgctac

SEQ ID NO: 375772 - DNA, 20 bp, Artificial Sequence
  Description of Artificial Sequence: Synthetic oligonucleotide
  Target: LAMA2; (+) strand; PAM type: YTN; PAM sequence: TTG
gtagtatttattttgctaca

SEQ ID NO: 375773 - DNA, 20 bp, Artificial Sequence
  Description of Artificial Sequence: Synthetic oligonucleotide
  Target: LAMA2; (+) strand; PAM type: YTN; PAM sequence: TTT
attttgctacaacttagcct

SEQ ID NO: 375774 - DNA, 20 bp, Artificial Sequence
  Description of Artificial Sequence: Synthetic oligonucleotide
  Target: LAMA2; (+) strand; PAM type: YTN; PAM sequence: TTA
ttttgctacaacttagcctt

SEQ ID NO: 375775 - DNA, 20 bp, Artificial Sequence
  Description of Artificial Sequence: Synthetic oligonucleotide
  Target: LAMA2; (+) strand; PAM type: YTN; PAM sequence: TTT
tgctacaacttagcctttaa

SEQ ID NO: 375776 - DNA, 20 bp, Artificial Sequence
  Description of Artificial Sequence: Synthetic oligonucleotide
  Target: LAMA2; (+) strand; PAM type: YTN; PAM sequence: TTT
gctacaacttagcctttaaa

SEQ ID NO: 375777 - DNA, 20 bp, Artificial Sequence
  Description of Artificial Sequence: Synthetic oligonucleotide
  Target: LAMA2; (+) strand; PAM type: YTN; PAM sequence: TTG
ctacaacttagcctttaaag

SEQ ID NO: 375778 - DNA, 20 bp, Artificial Sequence
  Description of Artificial Sequence: Synthetic oligonucleotide
  Target: LAMA2; (+) strand; PAM type: YTN; PAM sequence: CTA
caacttagcctttaaagcta

SEQ ID NO: 375779 - DNA, 20 bp, Artificial Sequence
  Description of Artificial Sequence: Synthetic oligonucleotide
  Target: LAMA2; (+) strand; PAM type: YTN; PAM sequence: CTT
agcctttaaagctacattat

SEQ ID NO: 375780 - DNA, 20 bp, Artificial Sequence
  Description of Artificial Sequence: Synthetic oligonucleotide
  Target: LAMA2; (+) strand; PAM type: YTN; PAM sequence: TTA
gcctttaaagctacattatt

SEQ ID NO: 375781 - DNA, 20 bp, Artificial Sequence
  Description of Artificial Sequence: Synthetic oligonucleotide
  Target: LAMA2; (+) strand; PAM type: YTN; PAM sequence: CTT
taaagctacattatttaaat

SEQ ID NO: 375782 - DNA, 20 bp, Artificial Sequence
  Description of Artificial Sequence: Synthetic oligonucleotide
  Target: LAMA2; (+) strand; PAM type: YTN; PAM sequence: TTT
aaagctacattatttaaata

SEQ ID NO: 375783 - DNA, 20 bp, Artificial Sequence
  Description of Artificial Sequence: Synthetic oligonucleotide
  Target: LAMA2; (+) strand; PAM type: YTN; PAM sequence: TTA
aagctacattatttaaatat

SEQ ID NO: 375784 - DNA, 20 bp, Artificial Sequence
  Description of Artificial Sequence: Synthetic oligonucleotide
  Target: LAMA2; (+) strand; PAM type: YTN; PAM sequence: CTA
cattatttaaatatttgaaa

SEQ ID NO: 375785 - DNA, 20 bp, Artificial Sequence
  Description of Artificial Sequence: Synthetic oligonucleotide
  Target: LAMA2; (+) strand; PAM type: YTN; PAM sequence: TTA
tttaaatatttgaaaagtga

SEQ ID NO: 375786 - DNA, 20 bp, Artificial Sequence
  Description of Artificial Sequence: Synthetic oligonucleotide
  Target: LAMA2; (+) strand; PAM type: YTN; PAM sequence: TTT
aaatatttgaaaagtgaggt

SEQ ID NO: 375787 - DNA, 20 bp, Artificial Sequence
  Description of Artificial Sequence: Synthetic oligonucleotide
  Target: LAMA2; (+) strand; PAM type: YTN; PAM sequence: TTA
aatatttgaaaagtgaggta

SEQ ID NO: 375788 - DNA, 20 bp, Artificial Sequence
  Description of Artificial Sequence: Synthetic oligonucleotide
  Target: LAMA2; (+) strand; PAM type: YTN; PAM sequence: TTT
gaaaagtgaggtagaaccgt

SEQ ID NO: 375789 - DNA, 20 bp, Artificial Sequence
  Description of Artificial Sequence: Synthetic oligonucleotide
  Target: LAMA2; (+) strand; PAM type: YTN; PAM sequence: TTG
aaaagtgaggtagaaccgtt

SEQ ID NO: 375790 - DNA, 20 bp, Artificial Sequence
  Description of Artificial Sequence: Synthetic oligonucleotide
  Target: LAMA2; (+) strand; PAM type: YTN; PAM sequence: TTT
cttcttgtatatttccttac

SEQ ID NO: 375791 - DNA, 20 bp, Artificial Sequence
  Description of Artificial Sequence: Synthetic oligonucleotide
  Target: LAMA2; (+) strand; PAM type: YTN; PAM sequence: TTC
ttcttgtatatttccttaca

SEQ ID NO: 375792 - DNA, 20 bp, Artificial Sequence
  Description of Artificial Sequence: Synthetic oligonucleotide
  Target: LAMA2; (+) strand; PAM type: YTN; PAM sequence: CTT
cttgtatatttccttacata

SEQ ID NO: 375793 - DNA, 20 bp, Artificial Sequence
  Description of Artificial Sequence: Synthetic oligonucleotide
  Target: LAMA2; (+) strand; PAM type: YTN; PAM sequence: TTC
ttgtatatttccttacataa

SEQ ID NO: 375794 - DNA, 20 bp, Artificial Sequence
  Description of Artificial Sequence: Synthetic oligonucleotide
  Target: LAMA2; (+) strand; PAM type: YTN; PAM sequence: CTT
gtatatttccttacataatc

SEQ ID NO: 375795 - DNA, 20 bp, Artificial Sequence
  Description of Artificial Sequence: Synthetic oligonucleotide
  Target: LAMA2; (+) strand; PAM type: YTN; PAM sequence: TTG
tatatttccttacataatcg

SEQ ID NO: 375796 - DNA, 20 bp, Artificial Sequence
  Description of Artificial Sequence: Synthetic oligonucleotide
  Target: LAMA2; (+) strand; PAM type: YTN; PAM sequence: TTT
ccttacataatcgactttgg

SEQ ID NO: 375797 - DNA, 20 bp, Artificial Sequence
  Description of Artificial Sequence: Synthetic oligonucleotide
  Target: LAMA2; (+) strand; PAM type: YTN; PAM sequence: TTC
cttacataatcgactttgga

SEQ ID NO: 375798 - DNA, 20 bp, Artificial Sequence
  Description of Artificial Sequence: Synthetic oligonucleotide
  Target: LAMA2; (+) strand; PAM type: YTN; PAM sequence: CTT
acataatcgactttggaatt

SEQ ID NO: 375799 - DNA, 20 bp, Artificial Sequence
  Description of Artificial Sequence: Synthetic oligonucleotide
  Target: LAMA2; (+) strand; PAM type: YTN; PAM sequence: TTA
cataatcgactttggaattt

SEQ ID NO: 375800 - DNA, 20 bp, Artificial Sequence
  Description of Artificial Sequence: Synthetic oligonucleotide
  Target: LAMA2; (+) strand; PAM type: YTN; PAM sequence: CTT
tggaatttttaaaatgatag

SEQ ID NO: 375801 - DNA, 20 bp, Artificial Sequence
  Description of Artificial Sequence: Synthetic oligonucleotide
  Target: LAMA2; (+) strand; PAM type: YTN; PAM sequence: TTT
ggaatttttaaaatgatagc

SEQ ID NO: 375802 - DNA, 20 bp, Artificial Sequence
  Description of Artificial Sequence: Synthetic oligonucleotide
  Target: LAMA2; (+) strand; PAM type: YTN; PAM sequence: TTG
gaatttttaaaatgatagct

SEQ ID NO: 375803 - DNA, 20 bp, Artificial Sequence
  Description of Artificial Sequence: Synthetic oligonucleotide
  Target: LAMA2; (+) strand; PAM type: YTN; PAM sequence: TTT
ttaaaatgatagctataatt

SEQ ID NO: 375804 - DNA, 20 bp, Artificial Sequence
  Description of Artificial Sequence: Synthetic oligonucleotide
  Target: LAMA2; (+) strand; PAM type: YTN; PAM sequence: TTT
taaaatgatagctataattt

SEQ ID NO: 375805 - DNA, 20 bp, Artificial Sequence
  Description of Artificial Sequence: Synthetic oligonucleotide
  Target: LAMA2; (+) strand; PAM type: YTN; PAM sequence: TTT
aaaatgatagctataatttg

SEQ ID NO: 375806 - DNA, 20 bp, Artificial Sequence
  Description of Artificial Sequence: Synthetic oligonucleotide
  Target: LAMA2; (+) strand; PAM type: YTN; PAM sequence: TTA
aaatgatagctataatttgg

SEQ ID NO: 375807 - DNA, 20 bp, Artificial Sequence
  Description of Artificial Sequence: Synthetic oligonucleotide
  Target: LAMA2; (+) strand; PAM type: YTN; PAM sequence: CTA
taatttggaatctcatttga

SEQ ID NO: 375808 - DNA, 20 bp, Artificial Sequence
  Description of Artificial Sequence: Synthetic oligonucleotide
  Target: LAMA2; (+) strand; PAM type: YTN; PAM sequence: TTT
ggaatctcatttgatatttg

SEQ ID NO: 375809 - DNA, 20 bp, Artificial Sequence
  Description of Artificial Sequence: Synthetic oligonucleotide
  Target: LAMA2; (+) strand; PAM type: YTN; PAM sequence: TTG
gaatctcatttgatatttga

SEQ ID NO: 375810 - DNA, 20 bp, Artificial Sequence
  Description of Artificial Sequence: Synthetic oligonucleotide
  Target: LAMA2; (+) strand; PAM type: YTN; PAM sequence: CTC
atttgatatttgattgattt

SEQ ID NO: 375811 - DNA, 20 bp, Artificial Sequence
  Description of Artificial Sequence: Synthetic oligonucleotide
  Target: LAMA2; (+) strand; PAM type: YTN; PAM sequence: TTT
gatatttgattgatttaaag

SEQ ID NO: 375812 - DNA, 20 bp, Artificial Sequence
  Description of Artificial Sequence: Synthetic oligonucleotide
  Target: LAMA2; (+) strand; PAM type: YTN; PAM sequence: TTG
atatttgattgatttaaagg

SEQ ID NO: 375813 - DNA, 20 bp, Artificial Sequence
  Description of Artificial Sequence: Synthetic oligonucleotide
  Target: LAMA2; (+) strand; PAM type: YTN; PAM sequence: TTT
gattgatttaaaggggtgta

SEQ ID NO: 375814 - DNA, 20 bp, Artificial Sequence
  Description of Artificial Sequence: Synthetic oligonucleotide
  Target: LAMA2; (+) strand; PAM type: YTN; PAM sequence: TTG
attgatttaaaggggtgtac

SEQ ID NO: 375815 - DNA, 20 bp, Artificial Sequence
  Description of Artificial Sequence: Synthetic oligonucleotide
  Target: LAMA2; (+) strand; PAM type: YTN; PAM sequence: TTG
atttaaaggggtgtacacac

SEQ ID NO: 375816 - DNA, 20 bp, Artificial Sequence
  Description of Artificial Sequence: Synthetic oligonucleotide
  Target: LAMA2; (+) strand; PAM type: YTN; PAM sequence: TTT
aaaggggtgtacacacaccc

SEQ ID NO: 375817 - DNA, 20 bp, Artificial Sequence
  Description of Artificial Sequence: Synthetic oligonucleotide
  Target: LAMA2; (+) strand; PAM type: YTN; PAM sequence: TTA
aaggggtgtacacacacccc

SEQ ID NO: 375818 - DNA, 20 bp, Artificial Sequence
  Description of Artificial Sequence: Synthetic oligonucleotide
  Target: LAMA2; (+) strand; PAM type: YTN; PAM sequence: CTT
taatgagtaaatcaatatga

SEQ ID NO: 375819 - DNA, 20 bp, Artificial Sequence
  Description of Artificial Sequence: Synthetic oligonucleotide
  Target: LAMA2; (+) strand; PAM type: YTN; PAM sequence: TTT
aatgagtaaatcaatatgag

SEQ ID NO: 375820 - DNA, 20 bp, Artificial Sequence
  Description of Artificial Sequence: Synthetic oligonucleotide
  Target: LAMA2; (+) strand; PAM type: YTN; PAM sequence: TTA
atgagtaaatcaatatgaga

SEQ ID NO: 375821 - DNA, 20 bp, Artificial Sequence
  Description of Artificial Sequence: Synthetic oligonucleotide
  Target: LAMA2; (+) strand; PAM type: YTN; PAM sequence: TTT
atacatatatcggcatagat

SEQ ID NO: 375822 - DNA, 20 bp, Artificial Sequence
  Description of Artificial Sequence: Synthetic oligonucleotide
  Target: LAMA2; (+) strand; PAM type: YTN; PAM sequence: TTA
tacatatatcggcatagata

SEQ ID NO: 375823 - DNA, 20 bp, Artificial Sequence
  Description of Artificial Sequence: Synthetic oligonucleotide
  Target: LAMA2; (+) strand; PAM type: YTN; PAM sequence: TTT
ctgaaataaagatgaataca

SEQ ID NO: 375824 - DNA, 20 bp, Artificial Sequence
  Description of Artificial Sequence: Synthetic oligonucleotide
  Target: LAMA2; (+) strand; PAM type: YTN; PAM sequence: TTC
tgaaataaagatgaatacaa

SEQ ID NO: 375825 - DNA, 20 bp, Artificial Sequence
  Description of Artificial Sequence: Synthetic oligonucleotide
  Target: LAMA2; (+) strand; PAM type: YTN; PAM sequence: CTG
aaataaagatgaatacaaag

SEQ ID NO: 375826 - DNA, 20 bp, Artificial Sequence
  Description of Artificial Sequence: Synthetic oligonucleotide
  Target: LAMA2; (+) strand; PAM type: YTN; PAM sequence: TTA
tttctatgactcagatattt

SEQ ID NO: 375827 - DNA, 20 bp, Artificial Sequence
  Description of Artificial Sequence: Synthetic oligonucleotide
  Target: LAMA2; (+) strand; PAM type: YTN; PAM sequence: TTT
ctatgactcagatatttttc

SEQ ID NO: 375828 - DNA, 20 bp, Artificial Sequence
  Description of Artificial Sequence: Synthetic oligonucleotide
  Target: LAMA2; (+) strand; PAM type: YTN; PAM sequence: TTC
tatgactcagatatttttca

SEQ ID NO: 375829 - DNA, 20 bp, Artificial Sequence
  Description of Artificial Sequence: Synthetic oligonucleotide
  Target: LAMA2; (+) strand; PAM type: YTN; PAM sequence: CTA
tgactcagatatttttcaat

SEQ ID NO: 375830 - DNA, 20 bp, Artificial Sequence
  Description of Artificial Sequence: Synthetic oligonucleotide
  Target: LAMA2; (+) strand; PAM type: YTN; PAM sequence: CTC
agatatttttcaataccgtt

SEQ ID NO: 375831 - DNA, 20 bp, Artificial Sequence
  Description of Artificial Sequence: Synthetic oligonucleotide
  Target: LAMA2; (+) strand; PAM type: YTN; PAM sequence: TTT
ttcaataccgttttaatata

SEQ ID NO: 375832 - DNA, 20 bp, Artificial Sequence
  Description of Artificial Sequence: Synthetic oligonucleotide
  Target: LAMA2; (+) strand; PAM type: YTN; PAM sequence: TTT
tcaataccgttttaatatat

SEQ ID NO: 375833 - DNA, 20 bp, Artificial Sequence
  Description of Artificial Sequence: Synthetic oligonucleotide
  Target: LAMA2; (+) strand; PAM type: YTN; PAM sequence: TTT
caataccgttttaatatatt

SEQ ID NO: 375834 - DNA, 20 bp, Artificial Sequence
  Description of Artificial Sequence: Synthetic oligonucleotide
  Target: LAMA2; (+) strand; PAM type: YTN; PAM sequence: TTC
aataccgttttaatatatta

SEQ ID NO: 375835 - DNA, 20 bp, Artificial Sequence
  Description of Artificial Sequence: Synthetic oligonucleotide
  Target: LAMA2; (+) strand; PAM type: YTN; PAM sequence: TTT
taatatattatgtttagtct

SEQ ID NO: 375836 - DNA, 20 bp, Artificial Sequence
  Description of Artificial Sequence: Synthetic oligonucleotide
  Target: LAMA2; (+) strand; PAM type: YTN; PAM sequence: TTT
aatatattatgtttagtctt

SEQ ID NO: 375837 - DNA, 20 bp, Artificial Sequence
  Description of Artificial Sequence: Synthetic oligonucleotide
  Target: LAMA2; (+) strand; PAM type: YTN; PAM sequence: TTA
atatattatgtttagtcttt

SEQ ID NO: 375838 - DNA, 20 bp, Artificial Sequence
  Description of Artificial Sequence: Synthetic oligonucleotide
  Target: LAMA2; (+) strand; PAM type: YTN; PAM sequence: TTA
tgtttagtctttttgtctat

SEQ ID NO: 375839 - DNA, 20 bp, Artificial Sequence
  Description of Artificial Sequence: Synthetic oligonucleotide
  Target: LAMA2; (+) strand; PAM type: YTN; PAM sequence: TTT
agtctttttgtctatgtatt

SEQ ID NO: 375840 - DNA, 20 bp, Artificial Sequence
  Description of Artificial Sequence: Synthetic oligonucleotide
  Target: LAMA2; (+) strand; PAM type: YTN; PAM sequence: TTA
gtctttttgtctatgtattt

SEQ ID NO: 375841 - DNA, 20 bp, Artificial Sequence
  Description of Artificial Sequence: Synthetic oligonucleotide
  Target: LAMA2; (+) strand; PAM type: YTN; PAM sequence: CTT
tttgtctatgtatttctgtt

SEQ ID NO: 375842 - DNA, 20 bp, Artificial Sequence
  Description of Artificial Sequence: Synthetic oligonucleotide
  Target: LAMA2; (+) strand; PAM type: YTN; PAM sequence: TTT
ttgtctatgtatttctgttt

SEQ ID NO: 375843 - DNA, 20 bp, Artificial Sequence
  Description of Artificial Sequence: Synthetic oligonucleotide
  Target: LAMA2; (+) strand; PAM type: YTN; PAM sequence: TTT
tgtctatgtatttctgtttc

SEQ ID NO: 375844 - DNA, 20 bp, Artificial Sequence
  Description of Artificial Sequence: Synthetic oligonucleotide
  Target: LAMA2; (+) strand; PAM type: YTN; PAM sequence: TTT
gtctatgtatttctgtttct

SEQ ID NO: 375845 - DNA, 20 bp, Artificial Sequence
  Description of Artificial Sequence: Synthetic oligonucleotide
  Target: LAMA2; (+) strand; PAM type: YTN; PAM sequence: TTG
tctatgtatttctgtttctg

SEQ ID NO: 375846 - DNA, 20 bp, Artificial Sequence
  Description of Artificial Sequence: Synthetic oligonucleotide
  Target: LAMA2; (+) strand; PAM type: YTN; PAM sequence: CTA
tgtatttctgtttctgtttg

SEQ ID NO: 375847 - DNA, 20 bp, Artificial Sequence
  Description of Artificial Sequence: Synthetic oligonucleotide
  Target: LAMA2; (+) strand; PAM type: YTN; PAM sequence: TTT
ctgtttctgtttgtgtgtct

SEQ ID NO: 375848 - DNA, 20 bp, Artificial Sequence
  Description of Artificial Sequence: Synthetic oligonucleotide
  Target: LAMA2; (+) strand; PAM type: YTN; PAM sequence: TTC
tgtttctgtttgtgtgtctg

SEQ ID NO: 375849 - DNA, 20 bp, Artificial Sequence
  Description of Artificial Sequence: Synthetic oligonucleotide
  Target: LAMA2; (+) strand; PAM type: YTN; PAM sequence: CTG
tttctgtttgtgtgtctggt

SEQ ID NO: 375850 - DNA, 20 bp, Artificial Sequence
  Description of Artificial Sequence: Synthetic oligonucleotide
  Target: LAMA2; (+) strand; PAM type: YTN; PAM sequence: TTT
ctgtttgtgtgtctggtggt

SEQ ID NO: 375851 - DNA, 20 bp, Artificial Sequence
  Description of Artificial Sequence: Synthetic oligonucleotide
  Target: LAMA2; (+) strand; PAM type: YTN; PAM sequence: TTC
tgtttgtgtgtctggtggta

SEQ ID NO: 375852 - DNA, 20 bp, Artificial Sequence
  Description of Artificial Sequence: Synthetic oligonucleotide
  Target: LAMA2; (+) strand; PAM type: YTN; PAM sequence: CTG
tttgtgtgtctggtggtatg

SEQ ID NO: 375853 - DNA, 20 bp, Artificial Sequence
  Description of Artificial Sequence: Synthetic oligonucleotide
  Target: LAMA2; (+) strand; PAM type: YTN; PAM sequence: TTT
gtgtgtctggtggtatgggt

SEQ ID NO: 375854 - DNA, 20 bp, Artificial Sequence
  Description of Artificial Sequence: Synthetic oligonucleotide
  Target: LAMA2; (+) strand; PAM type: YTN; PAM sequence: TTG
tgtgtctggtggtatgggta

SEQ ID NO: 375855 - DNA, 20 bp, Artificial Sequence
  Description of Artificial Sequence: Synthetic oligonucleotide
  Target: LAMA2; (+) strand; PAM type: YTN; PAM sequence: CTG
gtggtatgggtatgtaattg

SEQ ID NO: 375856 - DNA, 20 bp, Artificial Sequence
  Description of Artificial Sequence: Synthetic oligonucleotide
  Target: LAMA2; (+) strand; PAM type: YTN; PAM sequence: TTG
aaatttacatagtatttata

SEQ ID NO: 375857 - DNA, 20 bp, Artificial Sequence
  Description of Artificial Sequence: Synthetic oligonucleotide
  Target: LAMA2; (+) strand; PAM type: YTN; PAM sequence: TTT
acatagtatttatatagttt

SEQ ID NO: 375858 - DNA, 20 bp, Artificial Sequence
  Description of Artificial Sequence: Synthetic oligonucleotide
  Target: LAMA2; (+) strand; PAM type: YTN; PAM sequence: TTA
catagtatttatatagtttc

SEQ ID NO: 375859 - DNA, 20 bp, Artificial Sequence
  Description of Artificial Sequence: Synthetic oligonucleotide
  Target: LAMA2; (+) strand; PAM type: YTN; PAM sequence: TTT
atatagtttcatatttttgt

SEQ ID NO: 375860 - DNA, 20 bp, Artificial Sequence
  Description of Artificial Sequence: Synthetic oligonucleotide
  Target: LAMA2; (+) strand; PAM type: YTN; PAM sequence: TTA
tatagtttcatatttttgtt

SEQ ID NO: 375861 - DNA, 20 bp, Artificial Sequence
  Description of Artificial Sequence: Synthetic oligonucleotide
  Target: LAMA2; (+) strand; PAM type: YTN; PAM sequence: TTT
catatttttgtttaatttct

SEQ ID NO: 375862 - DNA, 20 bp, Artificial Sequence
  Description of Artificial Sequence: Synthetic oligonucleotide
  Target: LAMA2; (+) strand; PAM type: YTN; PAM sequence: TTC
atatttttgtttaatttcta

SEQ ID NO: 375863 - DNA, 20 bp, Artificial Sequence
  Description of Artificial Sequence: Synthetic oligonucleotide
  Target: LAMA2; (+) strand; PAM type: YTN; PAM sequence: TTT
ttgtttaatttctatttcat

SEQ ID NO: 375864 - DNA, 20 bp, Artificial Sequence
  Description of Artificial Sequence: Synthetic oligonucleotide
  Target: LAMA2; (+) strand; PAM type: YTN; PAM sequence: TTT
tgtttaatttctatttcatg

SEQ ID NO: 375865 - DNA, 20 bp, Artificial Sequence
  Description of Artificial Sequence: Synthetic oligonucleotide
  Target: LAMA2; (+) strand; PAM type: YTN; PAM sequence: TTT
gtttaatttctatttcatgc

SEQ ID NO: 375866 - DNA, 20 bp, Artificial Sequence
  Description of Artificial Sequence: Synthetic oligonucleotide
  Target: LAMA2; (+) strand; PAM type: YTN; PAM sequence: TTG
tttaatttctatttcatgct

SEQ ID NO: 375867 - DNA, 20 bp, Artificial Sequence
  Description of Artificial Sequence: Synthetic oligonucleotide
  Target: LAMA2; (+) strand; PAM type: YTN; PAM sequence: TTT
aatttctatttcatgctata

SEQ ID NO: 375868 - DNA, 20 bp, Artificial Sequence
  Description of Artificial Sequence: Synthetic oligonucleotide
  Target: LAMA2; (+) strand; PAM type: YTN; PAM sequence: TTA
atttctatttcatgctatat

SEQ ID NO: 375869 - DNA, 20 bp, Artificial Sequence
  Description of Artificial Sequence: Synthetic oligonucleotide
  Target: LAMA2; (+) strand; PAM type: YTN; PAM sequence: TTT
ctatttcatgctatatccta

SEQ ID NO: 375870 - DNA, 20 bp, Artificial Sequence
  Description of Artificial Sequence: Synthetic oligonucleotide
  Target: LAMA2; (+) strand; PAM type: YTN; PAM sequence: TTC
tatttcatgctatatcctaa

SEQ ID NO: 375871 - DNA, 20 bp, Artificial Sequence
  Description of Artificial Sequence: Synthetic oligonucleotide
  Target: LAMA2; (+) strand; PAM type: YTN; PAM sequence: CTA
tttcatgctatatcctaagc

SEQ ID NO: 375872 - DNA, 20 bp, Artificial Sequence
  Description of Artificial Sequence: Synthetic oligonucleotide
  Target: LAMA2; (+) strand; PAM type: YTN; PAM sequence: TTT
catgctatatcctaagcata

SEQ ID NO: 375873 - DNA, 20 bp, Artificial Sequence
  Description of Artificial Sequence: Synthetic oligonucleotide
  Target: LAMA2; (+) strand; PAM type: YTN; PAM sequence: TTC
atgctatatcctaagcatat

SEQ ID NO: 375874 - DNA, 20 bp, Artificial Sequence
  Description of Artificial Sequence: Synthetic oligonucleotide
  Target: LAMA2; (+) strand; PAM type: YTN; PAM sequence: CTA
tatcctaagcatatttatat

SEQ ID NO: 375875 - DNA, 20 bp, Artificial Sequence
  Description of Artificial Sequence: Synthetic oligonucleotide
  Target: LAMA2; (+) strand; PAM type: YTN; PAM sequence: CTA
agcatatttatatcattaaa

SEQ ID NO: 375876 - DNA, 20 bp, Artificial Sequence
  Description of Artificial Sequence: Synthetic oligonucleotide
  Target: LAMA2; (+) strand; PAM type: YTN; PAM sequence: TTT
atatcattaaaactgcttca

SEQ ID NO: 375877 - DNA, 20 bp, Artificial Sequence
  Description of Artificial Sequence: Synthetic oligonucleotide
  Target: LAMA2; (+) strand; PAM type: YTN; PAM sequence: TTA
tatcattaaaactgcttcaa

SEQ ID NO: 375878 - DNA, 20 bp, Artificial Sequence
  Description of Artificial Sequence: Synthetic oligonucleotide
  Target: LAMA2; (+) strand; PAM type: YTN; PAM sequence: TTA
aaactgcttcaaaacaggat

SEQ ID NO: 375879 - DNA, 20 bp, Artificial Sequence
  Description of Artificial Sequence: Synthetic oligonucleotide
  Target: LAMA2; (+) strand; PAM type: YTN; PAM sequence: CTG
cttcaaaacaggattttaat

SEQ ID NO: 375880 - DNA, 20 bp, Artificial Sequence
  Description of Artificial Sequence: Synthetic oligonucleotide
  Target: LAMA2; (+) strand; PAM type: YTN; PAM sequence: CTT
caaaacaggattttaattct

SEQ ID NO: 375881 - DNA, 20 bp, Artificial Sequence
  Description of Artificial Sequence: Synthetic oligonucleotide
  Target: LAMA2; (+) strand; PAM type: YTN; PAM sequence: TTC
aaaacaggattttaattctt

SEQ ID NO: 375882 - DNA, 20 bp, Artificial Sequence
  Description of Artificial Sequence: Synthetic oligonucleotide
  Target: LAMA2; (+) strand; PAM type: YTN; PAM sequence: TTT
taattcttgcatattatttc

SEQ ID NO: 375883 - DNA, 20 bp, Artificial Sequence
  Description of Artificial Sequence: Synthetic oligonucleotide
  Target: LAMA2; (+) strand; PAM type: YTN; PAM sequence: TTT
aattcttgcatattatttca

SEQ ID NO: 375884 - DNA, 20 bp, Artificial Sequence
  Description of Artificial Sequence: Synthetic oligonucleotide
  Target: LAMA2; (+) strand; PAM type: YTN; PAM sequence: TTA
attcttgcatattatttcat

SEQ ID NO: 375885 - DNA, 20 bp, Artificial Sequence
  Description of Artificial Sequence: Synthetic oligonucleotide
  Target: LAMA2; (+) strand; PAM type: YTN; PAM sequence: TTC
ttgcatattatttcataatg

SEQ ID NO: 375886 - DNA, 20 bp, Artificial Sequence
  Description of Artificial Sequence: Synthetic oligonucleotide
  Target: LAMA2; (+) strand; PAM type: YTN; PAM sequence: CTT
gcatattatttcataatgtg

SEQ ID NO: 375887 - DNA, 20 bp, Artificial Sequence
  Description of Artificial Sequence: Synthetic oligonucleotide
  Target: LAMA2; (+) strand; PAM type: YTN; PAM sequence: TTG
catattatttcataatgtgg

SEQ ID NO: 375888 - DNA, 20 bp, Artificial Sequence
  Description of Artificial Sequence: Synthetic oligonucleotide
  Target: LAMA2; (+) strand; PAM type: YTN; PAM sequence: TTA
tttcataatgtggatgtcat

SEQ ID NO: 375889 - DNA, 20 bp, Artificial Sequence
  Description of Artificial Sequence: Synthetic oligonucleotide
  Target: LAMA2; (+) strand; PAM type: YTN; PAM sequence: TTT
cataatgtggatgtcatcat

SEQ ID NO: 375890 - DNA, 20 bp, Artificial Sequence
  Description of Artificial Sequence: Synthetic oligonucleotide
  Target: LAMA2; (+) strand; PAM type: YTN; PAM sequence: TTC
ataatgtggatgtcatcatt

SEQ ID NO: 375891 - DNA, 20 bp, Artificial Sequence
  Description of Artificial Sequence: Synthetic oligonucleotide
  Target: LAMA2; (+) strand; PAM type: YTN; PAM sequence: TTT
aatttattcaacaattttta

SEQ ID NO: 375892 - DNA, 20 bp, Artificial Sequence
  Description of Artificial Sequence: Synthetic oligonucleotide
  Target: LAMA2; (+) strand; PAM type: YTN; PAM sequence: TTA
atttattcaacaatttttat

SEQ ID NO: 375893 - DNA, 20 bp, Artificial Sequence
  Description of Artificial Sequence: Synthetic oligonucleotide
  Target: LAMA2; (+) strand; PAM type: YTN; PAM sequence: TTT
attcaacaatttttataaca

SEQ ID NO: 375894 - DNA, 20 bp, Artificial Sequence
  Description of Artificial Sequence: Synthetic oligonucleotide
  Target: LAMA2; (+) strand; PAM type: YTN; PAM sequence: TTA
ttcaacaatttttataacat

SEQ ID NO: 375895 - DNA, 20 bp, Artificial Sequence
  Description of Artificial Sequence: Synthetic oligonucleotide
  Target: LAMA2; (+) strand; PAM type: YTN; PAM sequence: TTC
aacaatttttataacattgt

SEQ ID NO: 375896 - DNA, 20 bp, Artificial Sequence
  Description of Artificial Sequence: Synthetic oligonucleotide
  Target: LAMA2; (+) strand; PAM type: YTN; PAM sequence: TTT
ttataacattgtacagttaa

SEQ ID NO: 375897 - DNA, 20 bp, Artificial Sequence
  Description of Artificial Sequence: Synthetic oligonucleotide
  Target: LAMA2; (+) strand; PAM type: YTN; PAM sequence: TTT
tataacattgtacagttaag

SEQ ID NO: 375898 - DNA, 20 bp, Artificial Sequence
  Description of Artificial Sequence: Synthetic oligonucleotide
  Target: LAMA2; (+) strand; PAM type: YTN; PAM sequence: TTT
ataacattgtacagttaagt

SEQ ID NO: 375899 - DNA, 20 bp, Artificial Sequence
  Description of Artificial Sequence: Synthetic oligonucleotide
  Target: LAMA2; (+) strand; PAM type: YTN; PAM sequence: TTA
taacattgtacagttaagtg

SEQ ID NO: 375900 - DNA, 20 bp, Artificial Sequence
  Description of Artificial Sequence: Synthetic oligonucleotide
  Target: LAMA2; (+) strand; PAM type: YTN; PAM sequence: TTG
tacagttaagtgcctgcata

SEQ ID NO: 375901 - DNA, 20 bp, Artificial Sequence
  Description of Artificial Sequence: Synthetic oligonucleotide
  Target: LAMA2; (+) strand; PAM type: YTN; PAM sequence: TTA
agtgcctgcatagttattca

SEQ ID NO: 375902 - DNA, 20 bp, Artificial Sequence
  Description of Artificial Sequence: Synthetic oligonucleotide
  Target: LAMA2; (+) strand; PAM type: YTN; PAM sequence: CTG
catagttattcaccatgata

SEQ ID NO: 375903 - DNA, 20 bp, Artificial Sequence
  Description of Artificial Sequence: Synthetic oligonucleotide
  Target: LAMA2; (+) strand; PAM type: YTN; PAM sequence: TTA
ttcaccatgataaataatat

SEQ ID NO: 375904 - DNA, 20 bp, Artificial Sequence
  Description of Artificial Sequence: Synthetic oligonucleotide
  Target: LAMA2; (+) strand; PAM type: YTN; PAM sequence: TTC
accatgataaataatattgt

SEQ ID NO: 375905 - DNA, 20 bp, Artificial Sequence
  Description of Artificial Sequence: Synthetic oligonucleotide
  Target: LAMA2; (+) strand; PAM type: YTN; PAM sequence: TTG
taataggcatgcttttgctt

SEQ ID NO: 375906 - DNA, 20 bp, Artificial Sequence
  Description of Artificial Sequence: Synthetic oligonucleotide
  Target: LAMA2; (+) strand; PAM type: YTN; PAM sequence: CTT
ttgctttaataatattccaa

SEQ ID NO: 375907 - DNA, 20 bp, Artificial Sequence
  Description of Artificial Sequence: Synthetic oligonucleotide
  Target: LAMA2; (+) strand; PAM type: YTN; PAM sequence: TTT
tgctttaataatattccaat

SEQ ID NO: 375908 - DNA, 20 bp, Artificial Sequence
  Description of Artificial Sequence: Synthetic oligonucleotide
  Target: LAMA2; (+) strand; PAM type: YTN; PAM sequence: TTT
gctttaataatattccaatt

SEQ ID NO: 375909 - DNA, 20 bp, Artificial Sequence
  Description of Artificial Sequence: Synthetic oligonucleotide
  Target: LAMA2; (+) strand; PAM type: YTN; PAM sequence: TTG
ctttaataatattccaattt

SEQ ID NO: 375910 - DNA, 20 bp, Artificial Sequence
  Description of Artificial Sequence: Synthetic oligonucleotide
  Target: LAMA2; (+) strand; PAM type: YTN; PAM sequence: CTT
taataatattccaatttctg

SEQ ID NO: 375911 - DNA, 20 bp, Artificial Sequence
  Description of Artificial Sequence: Synthetic oligonucleotide
  Target: LAMA2; (+) strand; PAM type: YTN; PAM sequence: TTT
aataatattccaatttctga

SEQ ID NO: 375912 - DNA, 20 bp, Artificial Sequence
  Description of Artificial Sequence: Synthetic oligonucleotide
  Target: LAMA2; (+) strand; PAM type: YTN; PAM sequence: TTA
ataatattccaatttctgat

SEQ ID NO: 375913 - DNA, 20 bp, Artificial Sequence
  Description of Artificial Sequence: Synthetic oligonucleotide
  Target: LAMA2; (+) strand; PAM type: YTN; PAM sequence: TTC
caatttctgattatttctct

SEQ ID NO: 375914 - DNA, 20 bp, Artificial Sequence
  Description of Artificial Sequence: Synthetic oligonucleotide
  Target: LAMA2; (+) strand; PAM type: YTN; PAM sequence: TTT
ctgattatttctctaagcca

SEQ ID NO: 375915 - DNA, 20 bp, Artificial Sequence
  Description of Artificial Sequence: Synthetic oligonucleotide
  Target: LAMA2; (+) strand; PAM type: YTN; PAM sequence: TTC
tgattatttctctaagccag

SEQ ID NO: 375916 - DNA, 20 bp, Artificial Sequence
  Description of Artificial Sequence: Synthetic oligonucleotide
  Target: LAMA2; (+) strand; PAM type: YTN; PAM sequence: CTG
attatttctctaagccaggt

SEQ ID NO: 375917 - DNA, 20 bp, Artificial Sequence
  Description of Artificial Sequence: Synthetic oligonucleotide
  Target: LAMA2; (+) strand; PAM type: YTN; PAM sequence: TTA
tttctctaagccaggtatct

SEQ ID NO: 375918 - DNA, 20 bp, Artificial Sequence
  Description of Artificial Sequence: Synthetic oligonucleotide
  Target: LAMA2; (+) strand; PAM type: YTN; PAM sequence: TTT
ctctaagccaggtatctaaa

SEQ ID NO: 375919 - DNA, 20 bp, Artificial Sequence
  Description of Artificial Sequence: Synthetic oligonucleotide
  Target: LAMA2; (+) strand; PAM type: YTN; PAM sequence: TTC
tctaagccaggtatctaaaa

SEQ ID NO: 375920 - DNA, 20 bp, Artificial Sequence
  Description of Artificial Sequence: Synthetic oligonucleotide
  Target: LAMA2; (+) strand; PAM type: YTN; PAM sequence: CTC
taagccaggtatctaaaatt

SEQ ID NO: 375921 - DNA, 20 bp, Artificial Sequence
  Description of Artificial Sequence: Synthetic oligonucleotide
  Target: LAMA2; (+) strand; PAM type: YTN; PAM sequence: CTA
agccaggtatctaaaatttt

SEQ ID NO: 375922 - DNA, 20 bp, Artificial Sequence
  Description of Artificial Sequence: Synthetic oligonucleotide
  Target: LAMA2; (+) strand; PAM type: YTN; PAM sequence: CTA
aaattttacatgaatttctt

SEQ ID NO: 375923 - DNA, 20 bp, Artificial Sequence
  Description of Artificial Sequence: Synthetic oligonucleotide
  Target: LAMA2; (+) strand; PAM type: YTN; PAM sequence: TTT
tacatgaatttcttttacta

SEQ ID NO: 375924 - DNA, 20 bp, Artificial Sequence
  Description of Artificial Sequence: Synthetic oligonucleotide
  Target: LAMA2; (+) strand; PAM type: YTN; PAM sequence: TTT
acatgaatttcttttactaa

SEQ ID NO: 375925 - DNA, 20 bp, Artificial Sequence
  Description of Artificial Sequence: Synthetic oligonucleotide
  Target: LAMA2; (+) strand; PAM type: YTN; PAM sequence: TTA
catgaatttcttttactaat

SEQ ID NO: 375926 - DNA, 20 bp, Artificial Sequence
  Description of Artificial Sequence: Synthetic oligonucleotide
  Target: LAMA2; (+) strand; PAM type: YTN; PAM sequence: TTT
cttttactaataatgatatt

SEQ ID NO: 375927 - DNA, 20 bp, Artificial Sequence
  Description of Artificial Sequence: Synthetic oligonucleotide
  Target: LAMA2; (+) strand; PAM type: YTN; PAM sequence: TTC
ttttactaataatgatatta

SEQ ID NO: 375928 - DNA, 20 bp, Artificial Sequence
  Description of Artificial Sequence: Synthetic oligonucleotide
  Target: LAMA2; (+) strand; PAM type: YTN; PAM sequence: CTT
ttactaataatgatattata

SEQ ID NO: 375929 - DNA, 20 bp, Artificial Sequence
  Description of Artificial Sequence: Synthetic oligonucleotide
  Target: LAMA2; (+) strand; PAM type: YTN; PAM sequence: TTT
tactaataatgatattatat

SEQ ID NO: 375930 - DNA, 20 bp, Artificial Sequence
  Description of Artificial Sequence: Synthetic oligonucleotide
  Target: LAMA2; (+) strand; PAM type: YTN; PAM sequence: TTT
actaataatgatattatatg

SEQ ID NO: 375931 - DNA, 20 bp, Artificial Sequence
  Description of Artificial Sequence: Synthetic oligonucleotide
  Target: LAMA2; (+) strand; PAM type: YTN; PAM sequence: TTA
ctaataatgatattatatgg

SEQ ID NO: 375932 - DNA, 20 bp, Artificial Sequence
  Description of Artificial Sequence: Synthetic oligonucleotide
  Target: LAMA2; (+) strand; PAM type: YTN; PAM sequence: CTA
ataatgatattatatggtta

SEQ ID NO: 375933 - DNA, 20 bp, Artificial Sequence
  Description of Artificial Sequence: Synthetic oligonucleotide
  Target: LAMA2; (+) strand; PAM type: YTN; PAM sequence: TTA
tatggttagttttttttata

SEQ ID NO: 375934 - DNA, 20 bp, Artificial Sequence
  Description of Artificial Sequence: Synthetic oligonucleotide
  Target: LAMA2; (+) strand; PAM type: YTN; PAM sequence: TTA
gttttttttatataggtgaa

SEQ ID NO: 375935 - DNA, 20 bp, Artificial Sequence
  Description of Artificial Sequence: Synthetic oligonucleotide
  Target: LAMA2; (+) strand; PAM type: YTN; PAM sequence: TTT
tttttatataggtgaattta

SEQ ID NO: 375936 - DNA, 20 bp, Artificial Sequence
  Description of Artificial Sequence: Synthetic oligonucleotide
  Target: LAMA2; (+) strand; PAM type: YTN; PAM sequence: TTT
ttttatataggtgaatttaa

SEQ ID NO: 375937 - DNA, 20 bp, Artificial Sequence
  Description of Artificial Sequence: Synthetic oligonucleotide
  Target: LAMA2; (+) strand; PAM type: YTN; PAM sequence: TTT
tttatataggtgaatttaat

SEQ ID NO: 375938 - DNA, 20 bp, Artificial Sequence
  Description of Artificial Sequence: Synthetic oligonucleotide
  Target: LAMA2; (+) strand; PAM type: YTN; PAM sequence: TTT
ttatataggtgaatttaatt

SEQ ID NO: 375939 - DNA, 20 bp, Artificial Sequence
  Description of Artificial Sequence: Synthetic oligonucleotide
  Target: LAMA2; (+) strand; PAM type: YTN; PAM sequence: TTT
tatataggtgaatttaattt

SEQ ID NO: 375940 - DNA, 20 bp, Artificial Sequence
  Description of Artificial Sequence: Synthetic oligonucleotide
  Target: LAMA2; (+) strand; PAM type: YTN; PAM sequence: TTT
atataggtgaatttaatttc

SEQ ID NO: 375941 - DNA, 20 bp, Artificial Sequence
  Description of Artificial Sequence: Synthetic oligonucleotide
  Target: LAMA2; (+) strand; PAM type: YTN; PAM sequence: TTA
tataggtgaatttaatttca

SEQ ID NO: 375942 - DNA, 20 bp, Artificial Sequence
  Description of Artificial Sequence: Synthetic oligonucleotide
  Target: LAMA2; (+) strand; PAM type: YTN; PAM sequence: TTT
aatttcaaagtcatgtcatc

SEQ ID NO: 375943 - DNA, 20 bp, Artificial Sequence
  Description of Artificial Sequence: Synthetic oligonucleotide
  Target: LAMA2; (+) strand; PAM type: YTN; PAM sequence: TTA
atttcaaagtcatgtcatct

SEQ ID NO: 375944 - DNA, 20 bp, Artificial Sequence
  Description of Artificial Sequence: Synthetic oligonucleotide
  Target: LAMA2; (+) strand; PAM type: YTN; PAM sequence: TTT
caaagtcatgtcatctgttg

SEQ ID NO: 375945 - DNA, 20 bp, Artificial Sequence
  Description of Artificial Sequence: Synthetic oligonucleotide
  Target: LAMA2; (+) strand; PAM type: YTN; PAM sequence: TTC
aaagtcatgtcatctgttgg

SEQ ID NO: 375946 - DNA, 20 bp, Artificial Sequence
  Description of Artificial Sequence: Synthetic oligonucleotide
  Target: LAMA2; (+) strand; PAM type: YTN; PAM sequence: CTG
ttggaactgttacatgcttt

SEQ ID NO: 375947 - DNA, 20 bp, Artificial Sequence
  Description of Artificial Sequence: Synthetic oligonucleotide
  Target: LAMA2; (+) strand; PAM type: YTN; PAM sequence: TTG
gaactgttacatgctttttt

SEQ ID NO: 375948 - DNA, 20 bp, Artificial Sequence
  Description of Artificial Sequence: Synthetic oligonucleotide
  Target: LAMA2; (+) strand; PAM type: YTN; PAM sequence: CTG
ttacatgcttttttctttaa

SEQ ID NO: 375949 - DNA, 20 bp, Artificial Sequence
  Description of Artificial Sequence: Synthetic oligonucleotide
  Target: LAMA2; (+) strand; PAM type: YTN; PAM sequence: TTA
catgcttttttctttaatca

SEQ ID NO: 375950 - DNA, 20 bp, Artificial Sequence
  Description of Artificial Sequence: Synthetic oligonucleotide
  Target: LAMA2; (+) strand; PAM type: YTN; PAM sequence: CTT
ttttctttaatcatatacca

SEQ ID NO: 375951 - DNA, 20 bp, Artificial Sequence
  Description of Artificial Sequence: Synthetic oligonucleotide
  Target: LAMA2; (+) strand; PAM type: YTN; PAM sequence: TTT
tttctttaatcatataccac

SEQ ID NO: 375952 - DNA, 20 bp, Artificial Sequence
  Description of Artificial Sequence: Synthetic oligonucleotide
  Target: LAMA2; (+) strand; PAM type: YTN; PAM sequence: TTT
ttctttaatcatataccaca

SEQ ID NO: 375953 - DNA, 20 bp, Artificial Sequence
  Description of Artificial Sequence: Synthetic oligonucleotide
  Target: LAMA2; (+) strand; PAM type: YTN; PAM sequence: TTT
tctttaatcatataccacaa

SEQ ID NO: 375954 - DNA, 20 bp, Artificial Sequence
  Description of Artificial Sequence: Synthetic oligonucleotide
  Target: LAMA2; (+) strand; PAM type: YTN; PAM sequence: TTT
ctttaatcatataccacaat

SEQ ID NO: 375955 - DNA, 20 bp, Artificial Sequence
  Description of Artificial Sequence: Synthetic oligonucleotide
  Target: LAMA2; (+) strand; PAM type: YTN; PAM sequence: TTC
tttaatcatataccacaatc

SEQ ID NO: 375956 - DNA, 20 bp, Artificial Sequence
  Description of Artificial Sequence: Synthetic oligonucleotide
  Target: LAMA2; (+) strand; PAM type: YTN; PAM sequence: CTT
taatcatataccacaatctg

SEQ ID NO: 375957 - DNA, 20 bp, Artificial Sequence
  Description of Artificial Sequence: Synthetic oligonucleotide
  Target: LAMA2; (+) strand; PAM type: YTN; PAM sequence: TTT
aatcatataccacaatctga

SEQ ID NO: 375958 - DNA, 20 bp, Artificial Sequence
  Description of Artificial Sequence: Synthetic oligonucleotide
  Target: LAMA2; (+) strand; PAM type: YTN; PAM sequence: TTA
atcatataccacaatctgaa

SEQ ID NO: 375959 - DNA, 20 bp, Artificial Sequence
  Description of Artificial Sequence: Synthetic oligonucleotide
  Target: LAMA2; (+) strand; PAM type: YTN; PAM sequence: CTG
aattagaactagaaataaaa

SEQ ID NO: 375960 - DNA, 20 bp, Artificial Sequence
  Description of Artificial Sequence: Synthetic oligonucleotide
  Target: LAMA2; (+) strand; PAM type: YTN; PAM sequence: TTA
gaactagaaataaaaataaa

SEQ ID NO: 375961 - DNA, 20 bp, Artificial Sequence
  Description of Artificial Sequence: Synthetic oligonucleotide
  Target: LAMA2; (+) strand; PAM type: YTN; PAM sequence: CTA
gaaataaaaataaaaccaac

SEQ ID NO: 375962 - DNA, 20 bp, Artificial Sequence
  Description of Artificial Sequence: Synthetic oligonucleotide
  Target: LAMA2; (+) strand; PAM type: YTN; PAM sequence: CTC
agtcaacccattttacattt

SEQ ID NO: 375963 - DNA, 20 bp, Artificial Sequence
  Description of Artificial Sequence: Synthetic oligonucleotide
  Target: LAMA2; (+) strand; PAM type: YTN; PAM sequence: TTT
tacattttaaaaataaaact

SEQ ID NO: 375964 - DNA, 20 bp, Artificial Sequence
  Description of Artificial Sequence: Synthetic oligonucleotide
  Target: LAMA2; (+) strand; PAM type: YTN; PAM sequence: TTT
acattttaaaaataaaacta

SEQ ID NO: 375965 - DNA, 20 bp, Artificial Sequence
  Description of Artificial Sequence: Synthetic oligonucleotide
  Target: LAMA2; (+) strand; PAM type: YTN; PAM sequence: TTA
cattttaaaaataaaactat

SEQ ID NO: 375966 - DNA, 20 bp, Artificial Sequence
  Description of Artificial Sequence: Synthetic oligonucleotide
  Target: LAMA2; (+) strand; PAM type: YTN; PAM sequence: TTT
taaaaataaaactattctta

SEQ ID NO: 375967 - DNA, 20 bp, Artificial Sequence
  Description of Artificial Sequence: Synthetic oligonucleotide
  Target: LAMA2; (+) strand; PAM type: YTN; PAM sequence: TTT
aaaaataaaactattcttag

SEQ ID NO: 375968 - DNA, 20 bp, Artificial Sequence
  Description of Artificial Sequence: Synthetic oligonucleotide
  Target: LAMA2; (+) strand; PAM type: YTN; PAM sequence: TTA
aaaataaaactattcttagc

SEQ ID NO: 375969 - DNA, 20 bp, Artificial Sequence
  Description of Artificial Sequence: Synthetic oligonucleotide
  Target: LAMA2; (+) strand; PAM type: YTN; PAM sequence: CTA
ttcttagctacggtcatttt

SEQ ID NO: 375970 - DNA, 20 bp, Artificial Sequence
  Description of Artificial Sequence: Synthetic oligonucleotide
  Target: LAMA2; (+) strand; PAM type: YTN; PAM sequence: TTC
ttagctacggtcattttaaa

SEQ ID NO: 375971 - DNA, 20 bp, Artificial Sequence
  Description of Artificial Sequence: Synthetic oligonucleotide
  Target: LAMA2; (+) strand; PAM type: YTN; PAM sequence: CTT
agctacggtcattttaaaaa

SEQ ID NO: 375972 - DNA, 20 bp, Artificial Sequence
  Description of Artificial Sequence: Synthetic oligonucleotide
  Target: LAMA2; (+) strand; PAM type: YTN; PAM sequence: TTA
gctacggtcattttaaaaat

SEQ ID NO: 375973 - DNA, 20 bp, Artificial Sequence
  Description of Artificial Sequence: Synthetic oligonucleotide
  Target: LAMA2; (+) strand; PAM type: YTN; PAM sequence: CTA
cggtcattttaaaaatctaa

SEQ ID NO: 375974 - DNA, 20 bp, Artificial Sequence
  Description of Artificial Sequence: Synthetic oligonucleotide
  Target: LAMA2; (+) strand; PAM type: YTN; PAM sequence: TTT
taaaaatctaattttcagtg

SEQ ID NO: 375975 - DNA, 20 bp, Artificial Sequence
  Description of Artificial Sequence: Synthetic oligonucleotide
  Target: LAMA2; (+) strand; PAM type: YTN; PAM sequence: TTT
aaaaatctaattttcagtgt

SEQ ID NO: 375976 - DNA, 20 bp, Artificial Sequence
  Description of Artificial Sequence: Synthetic oligonucleotide
  Target: LAMA2; (+) strand; PAM type: YTN; PAM sequence: TTA
aaaatctaattttcagtgtg

SEQ ID NO: 375977 - DNA, 20 bp, Artificial Sequence
  Description of Artificial Sequence: Synthetic oligonucleotide
  Target: LAMA2; (+) strand; PAM type: YTN; PAM sequence: CTA
attttcagtgtgatttcact

SEQ ID NO: 375978 - DNA, 20 bp, Artificial Sequence
  Description of Artificial Sequence: Synthetic oligonucleotide
  Target: LAMA2; (+) strand; PAM type: YTN; PAM sequence: TTT
tcagtgtgatttcactttta

SEQ ID NO: 375979 - DNA, 20 bp, Artificial Sequence
  Description of Artificial Sequence: Synthetic oligonucleotide
  Target: LAMA2; (+) strand; PAM type: YTN; PAM sequence: TTT
cagtgtgatttcacttttat

SEQ ID NO: 375980 - DNA, 20 bp, Artificial Sequence
  Description of Artificial Sequence: Synthetic oligonucleotide
  Target: LAMA2; (+) strand; PAM type: YTN; PAM sequence: TTC
agtgtgatttcacttttata

SEQ ID NO: 375981 - DNA, 20 bp, Artificial Sequence
  Description of Artificial Sequence: Synthetic oligonucleotide
  Target: LAMA2; (+) strand; PAM type: YTN; PAM sequence: TTT
cacttttataacttattttt

SEQ ID NO: 375982 - DNA, 20 bp, Artificial Sequence
  Description of Artificial Sequence: Synthetic oligonucleotide
  Target: LAMA2; (+) strand; PAM type: YTN; PAM sequence: TTC
acttttataacttattttta

SEQ ID NO: 375983 - DNA, 20 bp, Artificial Sequence
  Description of Artificial Sequence: Synthetic oligonucleotide
  Target: LAMA2; (+) strand; PAM type: YTN; PAM sequence: CTT
ttataacttatttttaaaac

SEQ ID NO: 375984 - DNA, 20 bp, Artificial Sequence
  Description of Artificial Sequence: Synthetic oligonucleotide
  Target: LAMA2; (+) strand; PAM type: YTN; PAM sequence: TTT
tataacttatttttaaaact

SEQ ID NO: 375985 - DNA, 20 bp, Artificial Sequence
  Description of Artificial Sequence: Synthetic oligonucleotide
  Target: LAMA2; (+) strand; PAM type: YTN; PAM sequence: TTT
ataacttatttttaaaacta

SEQ ID NO: 375986 - DNA, 20 bp, Artificial Sequence
  Description of Artificial Sequence: Synthetic oligonucleotide
  Target: LAMA2; (+) strand; PAM type: YTN; PAM sequence: TTA
taacttatttttaaaactac

SEQ ID NO: 375987 - DNA, 20 bp, Artificial Sequence
  Description of Artificial Sequence: Synthetic oligonucleotide
  Target: LAMA2; (+) strand; PAM type: YTN; PAM sequence: CTT
atttttaaaactactaacaa

SEQ ID NO: 375988 - DNA, 20 bp, Artificial Sequence
  Description of Artificial Sequence: Synthetic oligonucleotide
  Target: LAMA2; (+) strand; PAM type: YTN; PAM sequence: TTA
tttttaaaactactaacaat

SEQ ID NO: 375989 - DNA, 20 bp, Artificial Sequence
  Description of Artificial Sequence: Synthetic oligonucleotide
  Target: LAMA2; (+) strand; PAM type: YTN; PAM sequence: TTT
ttaaaactactaacaataat

SEQ ID NO: 375990 - DNA, 20 bp, Artificial Sequence
  Description of Artificial Sequence: Synthetic oligonucleotide
  Target: LAMA2; (+) strand; PAM type: YTN; PAM sequence: TTT
taaaactactaacaataata

SEQ ID NO: 375991 - DNA, 20 bp, Artificial Sequence
  Description of Artificial Sequence: Synthetic oligonucleotide
  Target: LAMA2; (+) strand; PAM type: YTN; PAM sequence: TTT
aaaactactaacaataatat

SEQ ID NO: 375992 - DNA, 20 bp, Artificial Sequence
  Description of Artificial Sequence: Synthetic oligonucleotide
  Target: LAMA2; (+) strand; PAM type: YTN; PAM sequence: TTA
aaactactaacaataatatc

SEQ ID NO: 375993 - DNA, 20 bp, Artificial Sequence
  Description of Artificial Sequence: Synthetic oligonucleotide
  Target: LAMA2; (+) strand; PAM type: YTN; PAM sequence: CTA
ctaacaataatatctaaaat

SEQ ID NO: 375994 - DNA, 20 bp, Artificial Sequence
  Description of Artificial Sequence: Synthetic oligonucleotide
  Target: LAMA2; (+) strand; PAM type: YTN; PAM sequence: CTA
acaataatatctaaaatata

SEQ ID NO: 375995 - DNA, 20 bp, Artificial Sequence
  Description of Artificial Sequence: Synthetic oligonucleotide
  Target: LAMA2; (+) strand; PAM type: YTN; PAM sequence: CTA
aaatatataatgaggcttat

SEQ ID NO: 375996 - DNA, 20 bp, Artificial Sequence
  Description of Artificial Sequence: Synthetic oligonucleotide
  Target: LAMA2; (+) strand; PAM type: YTN; PAM sequence: CTT
attaatttctctttgggtgg

SEQ ID NO: 375997 - DNA, 20 bp, Artificial Sequence
  Description of Artificial Sequence: Synthetic oligonucleotide
  Target: LAMA2; (+) strand; PAM type: YTN; PAM sequence: TTA
ttaatttctctttgggtggc

SEQ ID NO: 375998 - DNA, 20 bp, Artificial Sequence
  Description of Artificial Sequence: Synthetic oligonucleotide
  Target: LAMA2; (+) strand; PAM type: YTN; PAM sequence: TTA
atttctctttgggtggctca

SEQ ID NO: 375999 - DNA, 20 bp, Artificial Sequence
  Description of Artificial Sequence: Synthetic oligonucleotide
  Target: LAMA2; (+) strand; PAM type: YTN; PAM sequence: TTT
ctctttgggtggctcacgtt

SEQ ID NO: 376000 - DNA, 20 bp, Artificial Sequence
  Description of Artificial Sequence: Synthetic oligonucleotide
  Target: LAMA2; (+) strand; PAM type: YTN; PAM sequence: TTC
tctttgggtggctcacgtta

SEQ ID NO: 376001 - DNA, 20 bp, Artificial Sequence
  Description of Artificial Sequence: Synthetic oligonucleotide
  Target: LAMA2; (+) strand; PAM type: YTN; PAM sequence: CTC
tttgggtggctcacgttaag

SEQ ID NO: 376002 - DNA, 20 bp, Artificial Sequence
  Description of Artificial Sequence: Synthetic oligonucleotide
  Target: LAMA2; (+) strand; PAM type: YTN; PAM sequence: CTT
tgggtggctcacgttaagtg

SEQ ID NO: 376003 - DNA, 20 bp, Artificial Sequence
  Description of Artificial Sequence: Synthetic oligonucleotide
  Target: LAMA2; (+) strand; PAM type: YTN; PAM sequence: TTT
gggtggctcacgttaagtgg

SEQ ID NO: 376004 - DNA, 20 bp, Artificial Sequence
  Description of Artificial Sequence: Synthetic oligonucleotide
  Target: LAMA2; (+) strand; PAM type: YTN; PAM sequence: TTG
ggtggctcacgttaagtggc

SEQ ID NO: 376005 - DNA, 20 bp, Artificial Sequence
  Description of Artificial Sequence: Synthetic oligonucleotide
  Target: LAMA2; (+) strand; PAM type: YTN; PAM sequence: CTC
acgttaagtggcaagatttt

SEQ ID NO: 376006 - DNA, 20 bp, Artificial Sequence
  Description of Artificial Sequence: Synthetic oligonucleotide
  Target: LAMA2; (+) strand; PAM type: YTN; PAM sequence: TTA
agtggcaagattttttttta

SEQ ID NO: 376007 - DNA, 20 bp, Artificial Sequence
  Description of Artificial Sequence: Synthetic oligonucleotide
  Target: LAMA2; (+) strand; PAM type: YTN; PAM sequence: TTT
ttttttaccaagaagcaatt

SEQ ID NO: 376008 - DNA, 20 bp, Artificial Sequence
  Description of Artificial Sequence: Synthetic oligonucleotide
  Target: LAMA2; (+) strand; PAM type: YTN; PAM sequence: TTT
tttttaccaagaagcaatta

SEQ ID NO: 376009 - DNA, 20 bp, Artificial Sequence
  Description of Artificial Sequence: Synthetic oligonucleotide
  Target: LAMA2; (+) strand; PAM type: YTN; PAM sequence: TTT
ttttaccaagaagcaattat

SEQ ID NO: 376010 - DNA, 20 bp, Artificial Sequence
  Description of Artificial Sequence: Synthetic oligonucleotide
  Target: LAMA2; (+) strand; PAM type: YTN; PAM sequence: TTT
tttaccaagaagcaattatt

SEQ ID NO: 376011 - DNA, 20 bp, Artificial Sequence
  Description of Artificial Sequence: Synthetic oligonucleotide
  Target: LAMA2; (+) strand; PAM type: YTN; PAM sequence: TTT
ttaccaagaagcaattatta

SEQ ID NO: 376012 - DNA, 20 bp, Artificial Sequence
  Description of Artificial Sequence: Synthetic oligonucleotide
  Target: LAMA2; (+) strand; PAM type: YTN; PAM sequence: TTT
taccaagaagcaattattaa

SEQ ID NO: 376013 - DNA, 20 bp, Artificial Sequence
  Description of Artificial Sequence: Synthetic oligonucleotide
  Target: LAMA2; (+) strand; PAM type: YTN; PAM sequence: TTT
accaagaagcaattattaag

SEQ ID NO: 376014 - DNA, 20 bp, Artificial Sequence
  Description of Artificial Sequence: Synthetic oligonucleotide
  Target: LAMA2; (+) strand; PAM type: YTN; PAM sequence: TTA
ccaagaagcaattattaagt

SEQ ID NO: 376015 - DNA, 20 bp, Artificial Sequence
  Description of Artificial Sequence: Synthetic oligonucleotide
  Target: LAMA2; (+) strand; PAM type: YTN; PAM sequence: TTA
ttaagtctaattttccaaaa

SEQ ID NO: 376016 - DNA, 20 bp, Artificial Sequence
  Description of Artificial Sequence: Synthetic oligonucleotide
  Target: LAMA2; (+) strand; PAM type: YTN; PAM sequence: TTA
agtctaattttccaaaataa

SEQ ID NO: 376017 - DNA, 20 bp, Artificial Sequence
  Description of Artificial Sequence: Synthetic oligonucleotide
  Target: LAMA2; (+) strand; PAM type: YTN; PAM sequence: CTA
attttccaaaataagaatta

SEQ ID NO: 376018 - DNA, 20 bp, Artificial Sequence
  Description of Artificial Sequence: Synthetic oligonucleotide
  Target: LAMA2; (+) strand; PAM type: YTN; PAM sequence: TTT
tccaaaataagaattatttt

SEQ ID NO: 376019 - DNA, 20 bp, Artificial Sequence
  Description of Artificial Sequence: Synthetic oligonucleotide
  Target: LAMA2; (+) strand; PAM type: YTN; PAM sequence: TTT
ccaaaataagaattattttt

SEQ ID NO: 376020 - DNA, 20 bp, Artificial Sequence
  Description of Artificial Sequence: Synthetic oligonucleotide
  Target: LAMA2; (+) strand; PAM type: YTN; PAM sequence: TTC
caaaataagaattattttta

SEQ ID NO: 376021 - DNA, 20 bp, Artificial Sequence
  Description of Artificial Sequence: Synthetic oligonucleotide
  Target: LAMA2; (+) strand; PAM type: YTN; PAM sequence: TTA
tttttacaaagaagtaatta

SEQ ID NO: 376022 - DNA, 20 bp, Artificial Sequence
  Description of Artificial Sequence: Synthetic oligonucleotide
  Target: LAMA2; (+) strand; PAM type: YTN; PAM sequence: TTT
ttacaaagaagtaattaccg

SEQ ID NO: 376023 - DNA, 20 bp, Artificial Sequence
  Description of Artificial Sequence: Synthetic oligonucleotide
  Target: LAMA2; (+) strand; PAM type: YTN; PAM sequence: TTT
tacaaagaagtaattaccga

SEQ ID NO: 376024 - DNA, 20 bp, Artificial Sequence
  Description of Artificial Sequence: Synthetic oligonucleotide
  Target: LAMA2; (+) strand; PAM type: YTN; PAM sequence: TTT
acaaagaagtaattaccgag

SEQ ID NO: 376025 - DNA, 20 bp, Artificial Sequence
  Description of Artificial Sequence: Synthetic oligonucleotide
  Target: LAMA2; (+) strand; PAM type: YTN; PAM sequence: TTA
caaagaagtaattaccgaga

SEQ ID NO: 376026 - DNA, 20 bp, Artificial Sequence
  Description of Artificial Sequence: Synthetic oligonucleotide
  Target: LAMA2; (+) strand; PAM type: YTN; PAM sequence: TTA
ccgagaataattttccagat

SEQ ID NO: 376027 - DNA, 20 bp, Artificial Sequence
  Description of Artificial Sequence: Synthetic oligonucleotide
  Target: LAMA2; (+) strand; PAM type: YTN; PAM sequence: TTT
tccagattaaaatatcataa

SEQ ID NO: 376028 - DNA, 20 bp, Artificial Sequence
  Description of Artificial Sequence: Synthetic oligonucleotide
  Target: LAMA2; (+) strand; PAM type: YTN; PAM sequence: TTT
ccagattaaaatatcataat

SEQ ID NO: 376029 - DNA, 20 bp, Artificial Sequence
  Description of Artificial Sequence: Synthetic oligonucleotide
  Target: LAMA2; (+) strand; PAM type: YTN; PAM sequence: TTC
cagattaaaatatcataata

SEQ ID NO: 376030 - DNA, 20 bp, Artificial Sequence
  Description of Artificial Sequence: Synthetic oligonucleotide
  Target: LAMA2; (+) strand; PAM type: YTN; PAM sequence: TTA
aaatatcataataatgtgac

SEQ ID NO: 376031 - DNA, 20 bp, Artificial Sequence
  Description of Artificial Sequence: Synthetic oligonucleotide
  Target: LAMA2; (+) strand; PAM type: YTN; PAM sequence: CTT
tatatttttaaaaaataacc

SEQ ID NO: 376032 - DNA, 20 bp, Artificial Sequence
  Description of Artificial Sequence: Synthetic oligonucleotide
  Target: LAMA2; (+) strand; PAM type: YTN; PAM sequence: TTT
atatttttaaaaaataaccc

SEQ ID NO: 376033 - DNA, 20 bp, Artificial Sequence
  Description of Artificial Sequence: Synthetic oligonucleotide
  Target: LAMA2; (+) strand; PAM type: YTN; PAM sequence: TTA
tatttttaaaaaataaccct

SEQ ID NO: 376034 - DNA, 20 bp, Artificial Sequence
  Description of Artificial Sequence: Synthetic oligonucleotide
  Target: LAMA2; (+) strand; PAM type: YTN; PAM sequence: TTT
ttaaaaaataaccctgaagt

SEQ ID NO: 376035 - DNA, 20 bp, Artificial Sequence
  Description of Artificial Sequence: Synthetic oligonucleotide
  Target: LAMA2; (+) strand; PAM type: YTN; PAM sequence: TTT
taaaaaataaccctgaagta

SEQ ID NO: 376036 - DNA, 20 bp, Artificial Sequence
  Description of Artificial Sequence: Synthetic oligonucleotide
  Target: LAMA2; (+) strand; PAM type: YTN; PAM sequence: TTT
aaaaaataaccctgaagtat

SEQ ID NO: 376037 - DNA, 20 bp, Artificial Sequence
  Description of Artificial Sequence: Synthetic oligonucleotide
  Target: LAMA2; (+) strand; PAM type: YTN; PAM sequence: TTA
aaaaataaccctgaagtatt

SEQ ID NO: 376038 - DNA, 20 bp, Artificial Sequence
  Description of Artificial Sequence: Synthetic oligonucleotide
  Target: LAMA2; (+) strand; PAM type: YTN; PAM sequence: CTG
aagtattttaagcaggatag

SEQ ID NO: 376039 - DNA, 20 bp, Artificial Sequence
  Description of Artificial Sequence: Synthetic oligonucleotide
  Target: LAMA2; (+) strand; PAM type: YTN; PAM sequence: TTT
taagcaggatagatgatttt

SEQ ID NO: 376040 - DNA, 20 bp, Artificial Sequence
  Description of Artificial Sequence: Synthetic oligonucleotide
  Target: LAMA2; (+) strand; PAM type: YTN; PAM sequence: TTT
aagcaggatagatgattttc

SEQ ID NO: 376041 - DNA, 20 bp, Artificial Sequence
  Description of Artificial Sequence: Synthetic oligonucleotide
  Target: LAMA2; (+) strand; PAM type: YTN; PAM sequence: TTA
agcaggatagatgattttca

SEQ ID NO: 376042 - DNA, 20 bp, Artificial Sequence
  Description of Artificial Sequence: Synthetic oligonucleotide
  Target: LAMA2; (+) strand; PAM type: YTN; PAM sequence: TTT
tcatttttctgctcggagtg

SEQ ID NO: 376043 - DNA, 20 bp, Artificial Sequence
  Description of Artificial Sequence: Synthetic oligonucleotide
  Target: LAMA2; (+) strand; PAM type: YTN; PAM sequence: TTT
catttttctgctcggagtga

SEQ ID NO: 376044 - DNA, 20 bp, Artificial Sequence
  Description of Artificial Sequence: Synthetic oligonucleotide
  Target: LAMA2; (+) strand; PAM type: YTN; PAM sequence: TTC
atttttctgctcggagtgat

SEQ ID NO: 376045 - DNA, 20 bp, Artificial Sequence
  Description of Artificial Sequence: Synthetic oligonucleotide
  Target: LAMA2; (+) strand; PAM type: YTN; PAM sequence: TTT
ttctgctcggagtgattttt

SEQ ID NO: 376046 - DNA, 20 bp, Artificial Sequence
  Description of Artificial Sequence: Synthetic oligonucleotide
  Target: LAMA2; (+) strand; PAM type: YTN; PAM sequence: TTT
tctgctcggagtgatttttt

SEQ ID NO: 376047 - DNA, 20 bp, Artificial Sequence
  Description of Artificial Sequence: Synthetic oligonucleotide
  Target: LAMA2; (+) strand; PAM type: YTN; PAM sequence: TTT
ctgctcggagtgatttttta

SEQ ID NO: 376048 - DNA, 20 bp, Artificial Sequence
  Description of Artificial Sequence: Synthetic oligonucleotide
  Target: LAMA2; (+) strand; PAM type: YTN; PAM sequence: TTC
tgctcggagtgattttttaa

SEQ ID NO: 376049 - DNA, 20 bp, Artificial Sequence
  Description of Artificial Sequence: Synthetic oligonucleotide
  Target: LAMA2; (+) strand; PAM type: YTN; PAM sequence: CTG
ctcggagtgattttttaatc

SEQ ID NO: 376050 - DNA, 20 bp, Artificial Sequence
  Description of Artificial Sequence: Synthetic oligonucleotide
  Target: LAMA2; (+) strand; PAM type: YTN; PAM sequence: CTC
ggagtgattttttaatccat

SEQ ID NO: 376051 - DNA, 20 bp, Artificial Sequence
  Description of Artificial Sequence: Synthetic oligonucleotide
  Target: LAMA2; (+) strand; PAM type: YTN; PAM sequence: TTT
tttaatccatcagcattttc

SEQ ID NO: 376052 - DNA, 20 bp, Artificial Sequence
  Description of Artificial Sequence: Synthetic oligonucleotide
  Target: LAMA2; (+) strand; PAM type: YTN; PAM sequence: TTT
ttaatccatcagcattttct

SEQ ID NO: 376053 - DNA, 20 bp, Artificial Sequence
  Description of Artificial Sequence: Synthetic oligonucleotide
  Target: LAMA2; (+) strand; PAM type: YTN; PAM sequence: TTT
taatccatcagcattttcta

SEQ ID NO: 376054 - DNA, 20 bp, Artificial Sequence
  Description of Artificial Sequence: Synthetic oligonucleotide
  Target: LAMA2; (+) strand; PAM type: YTN; PAM sequence: TTT
aatccatcagcattttctaa

SEQ ID NO: 376055 - DNA, 20 bp, Artificial Sequence
  Description of Artificial Sequence: Synthetic oligonucleotide
  Target: LAMA2; (+) strand; PAM type: YTN; PAM sequence: TTA
atccatcagcattttctaac

SEQ ID NO: 376056 - DNA, 20 bp, Artificial Sequence
  Description of Artificial Sequence: Synthetic oligonucleotide
  Target: LAMA2; (+) strand; PAM type: YTN; PAM sequence: TTT
tctaacgtttcattttaagc

SEQ ID NO: 376057 - DNA, 20 bp, Artificial Sequence
  Description of Artificial Sequence: Synthetic oligonucleotide
  Target: LAMA2; (+) strand; PAM type: YTN; PAM sequence: TTT
ctaacgtttcattttaagcc

SEQ ID NO: 376058 - DNA, 20 bp, Artificial Sequence
  Description of Artificial Sequence: Synthetic oligonucleotide
  Target: LAMA2; (+) strand; PAM type: YTN; PAM sequence: TTC
taacgtttcattttaagcct

SEQ ID NO: 376059 - DNA, 20 bp, Artificial Sequence
  Description of Artificial Sequence: Synthetic oligonucleotide
  Target: LAMA2; (+) strand; PAM type: YTN; PAM sequence: CTA
acgtttcattttaagcctga

SEQ ID NO: 376060 - DNA, 20 bp, Artificial Sequence
  Description of Artificial Sequence: Synthetic oligonucleotide
  Target: LAMA2; (+) strand; PAM type: YTN; PAM sequence: TTT
cattttaagcctgataacat

SEQ ID NO: 376061 - DNA, 20 bp, Artificial Sequence
  Description of Artificial Sequence: Synthetic oligonucleotide
  Target: LAMA2; (+) strand; PAM type: YTN; PAM sequence: TTC
attttaagcctgataacatg

SEQ ID NO: 376062 - DNA, 20 bp, Artificial Sequence
  Description of Artificial Sequence: Synthetic oligonucleotide
  Target: LAMA2; (+) strand; PAM type: YTN; PAM sequence: TTT
taagcctgataacatgcatt

SEQ ID NO: 376063 - DNA, 20 bp, Artificial Sequence
  Description of Artificial Sequence: Synthetic oligonucleotide
  Target: LAMA2; (+) strand; PAM type: YTN; PAM sequence: TTT
aagcctgataacatgcattt

SEQ ID NO: 376064 - DNA, 20 bp, Artificial Sequence
  Description of Artificial Sequence: Synthetic oligonucleotide
  Target: LAMA2; (+) strand; PAM type: YTN; PAM sequence: TTA
agcctgataacatgcatttc

SEQ ID NO: 376065 - DNA, 20 bp, Artificial Sequence
  Description of Artificial Sequence: Synthetic oligonucleotide
  Target: LAMA2; (+) strand; PAM type: YTN; PAM sequence: CTG
ataacatgcatttcaagaaa

SEQ ID NO: 376066 - DNA, 20 bp, Artificial Sequence
  Description of Artificial Sequence: Synthetic oligonucleotide
  Target: LAMA2; (+) strand; PAM type: YTN; PAM sequence: TTT
caagaaagtcagccgaagct

SEQ ID NO: 376067 - DNA, 20 bp, Artificial Sequence
  Description of Artificial Sequence: Synthetic oligonucleotide
  Target: LAMA2; (+) strand; PAM type: YTN; PAM sequence: TTC
aagaaagtcagccgaagctg

SEQ ID NO: 376068 - DNA, 20 bp, Artificial Sequence
  Description of Artificial Sequence: Synthetic oligonucleotide
  Target: LAMA2; (+) strand; PAM type: YTN; PAM sequence: CTG
gtaatgcaaacttgaccgta

SEQ ID NO: 376069 - DNA, 20 bp, Artificial Sequence
  Description of Artificial Sequence: Synthetic oligonucleotide
  Target: LAMA2; (+) strand; PAM type: YTN; PAM sequence: CTT
gaccgtaaaagatgatttgt

SEQ ID NO: 376070 - DNA, 20 bp, Artificial Sequence
  Description of Artificial Sequence: Synthetic oligonucleotide
  Target: LAMA2; (+) strand; PAM type: YTN; PAM sequence: TTG
accgtaaaagatgatttgtt

SEQ ID NO: 376071 - DNA, 20 bp, Artificial Sequence
  Description of Artificial Sequence: Synthetic oligonucleotide
  Target: LAMA2; (+) strand; PAM type: YTN; PAM sequence: TTT
gttatagatagataagagat

SEQ ID NO: 376072 - DNA, 20 bp, Artificial Sequence
  Description of Artificial Sequence: Synthetic oligonucleotide
  Target: LAMA2; (+) strand; PAM type: YTN; PAM sequence: TTG
ttatagatagataagagata

SEQ ID NO: 376073 - DNA, 20 bp, Artificial Sequence
  Description of Artificial Sequence: Synthetic oligonucleotide
  Target: LAMA2; (+) strand; PAM type: YTN; PAM sequence: TTA
tagatagataagagatatgc

SEQ ID NO: 376074 - DNA, 20 bp, Artificial Sequence
  Description of Artificial Sequence: Synthetic oligonucleotide
  Target: LAMA2; (+) strand; PAM type: YTN; PAM sequence: CTC
atcagagaatgaaagtttac

SEQ ID NO: 376075 - DNA, 20 bp, Artificial Sequence
  Description of Artificial Sequence: Synthetic oligonucleotide
  Target: LAMA2; (+) strand; PAM type: YTN; PAM sequence: TTT
acttacctgatctggtgctt

SEQ ID NO: 376076 - DNA, 20 bp, Artificial Sequence
  Description of Artificial Sequence: Synthetic oligonucleotide
  Target: LAMA2; (+) strand; PAM type: YTN; PAM sequence: TTA
cttacctgatctggtgcttt

SEQ ID NO: 376077 - DNA, 20 bp, Artificial Sequence
  Description of Artificial Sequence: Synthetic oligonucleotide
  Target: LAMA2; (+) strand; PAM type: YTN; PAM sequence: CTT
acctgatctggtgctttaat

SEQ ID NO: 376078 - DNA, 20 bp, Artificial Sequence
  Description of Artificial Sequence: Synthetic oligonucleotide
  Target: LAMA2; (+) strand; PAM type: YTN; PAM sequence: TTA
cctgatctggtgctttaata

SEQ ID NO: 376079 - DNA, 20 bp, Artificial Sequence
  Description of Artificial Sequence: Synthetic oligonucleotide
  Target: LAMA2; (+) strand; PAM type: YTN; PAM sequence: CTG
atctggtgctttaatacgtg

SEQ ID NO: 376080 - DNA, 20 bp, Artificial Sequence
  Description of Artificial Sequence: Synthetic oligonucleotide
  Target: LAMA2; (+) strand; PAM type: YTN; PAM sequence: CTG
gtgctttaatacgtgttctc

SEQ ID NO: 376081 - DNA, 20 bp, Artificial Sequence
  Description of Artificial Sequence: Synthetic oligonucleotide
  Target: LAMA2; (+) strand; PAM type: YTN; PAM sequence: CTT
taatacgtgttctcactaat

SEQ ID NO: 376082 - DNA, 20 bp, Artificial Sequence
  Description of Artificial Sequence: Synthetic oligonucleotide
  Target: LAMA2; (+) strand; PAM type: YTN; PAM sequence: TTT
aatacgtgttctcactaatc

SEQ ID NO: 376083 - DNA, 20 bp, Artificial Sequence
  Description of Artificial Sequence: Synthetic oligonucleotide
  Target: LAMA2; (+) strand; PAM type: YTN; PAM sequence: TTA
atacgtgttctcactaatca

SEQ ID NO: 376084 - DNA, 20 bp, Artificial Sequence
  Description of Artificial Sequence: Synthetic oligonucleotide
  Target: LAMA2; (+) strand; PAM type: YTN; PAM sequence: TTC
tcactaatcaatttcaattg

SEQ ID NO: 376085 - DNA, 20 bp, Artificial Sequence
  Description of Artificial Sequence: Synthetic oligonucleotide
  Target: LAMA2; (+) strand; PAM type: YTN; PAM sequence: CTC
actaatcaatttcaattgtt

SEQ ID NO: 376086 - DNA, 20 bp, Artificial Sequence
  Description of Artificial Sequence: Synthetic oligonucleotide
  Target: LAMA2; (+) strand; PAM type: YTN; PAM sequence: CTA
atcaatttcaattgttagaa

SEQ ID NO: 376087 - DNA, 20 bp, Artificial Sequence
  Description of Artificial Sequence: Synthetic oligonucleotide
  Target: LAMA2; (+) strand; PAM type: YTN; PAM sequence: TTT
caattgttagaatgaaacct

SEQ ID NO: 376088 - DNA, 20 bp, Artificial Sequence
  Description of Artificial Sequence: Synthetic oligonucleotide
  Target: LAMA2; (+) strand; PAM type: YTN; PAM sequence: TTC
aattgttagaatgaaaccta

SEQ ID NO: 376089 - DNA, 20 bp, Artificial Sequence
  Description of Artificial Sequence: Synthetic oligonucleotide
  Target: LAMA2; (+) strand; PAM type: YTN; PAM sequence: TTG
ttagaatgaaacctaagaaa

SEQ ID NO: 376090 - DNA, 20 bp, Artificial Sequence
  Description of Artificial Sequence: Synthetic oligonucleotide
  Target: LAMA2; (+) strand; PAM type: YTN; PAM sequence: TTA
gaatgaaacctaagaaatca

SEQ ID NO: 376091 - DNA, 20 bp, Artificial Sequence
  Description of Artificial Sequence: Synthetic oligonucleotide
  Target: LAMA2; (+) strand; PAM type: YTN; PAM sequence: CTA
agaaatcaaatgtttgttga

SEQ ID NO: 376092 - DNA, 20 bp, Artificial Sequence
  Description of Artificial Sequence: Synthetic oligonucleotide
  Target: LAMA2; (+) strand; PAM type: YTN; PAM sequence: TTT
gttgaaccaattatttgatc

SEQ ID NO: 376093 - DNA, 20 bp, Artificial Sequence
  Description of Artificial Sequence: Synthetic oligonucleotide
  Target: LAMA2; (+) strand; PAM type: YTN; PAM sequence: TTG
ttgaaccaattatttgatca

SEQ ID NO: 376094 - DNA, 20 bp, Artificial Sequence
  Description of Artificial Sequence: Synthetic oligonucleotide
  Target: LAMA2; (+) strand; PAM type: YTN; PAM sequence: TTG
aaccaattatttgatcagtg

SEQ ID NO: 376095 - DNA, 20 bp, Artificial Sequence
  Description of Artificial Sequence: Synthetic oligonucleotide
  Target: LAMA2; (+) strand; PAM type: YTN; PAM sequence: TTA
tttgatcagtgtaagcataa

SEQ ID NO: 376096 - DNA, 20 bp, Artificial Sequence
  Description of Artificial Sequence: Synthetic oligonucleotide
  Target: LAMA2; (+) strand; PAM type: YTN; PAM sequence: TTT
gatcagtgtaagcataacct

SEQ ID NO: 376097 - DNA, 20 bp, Artificial Sequence
  Description of Artificial Sequence: Synthetic oligonucleotide
  Target: LAMA2; (+) strand; PAM type: YTN; PAM sequence: TTG
atcagtgtaagcataacctg

SEQ ID NO: 376098 - DNA, 20 bp, Artificial Sequence
  Description of Artificial Sequence: Synthetic oligonucleotide
  Target: LAMA2; (+) strand; PAM type: YTN; PAM sequence: CTG
aaaattatatttataatgtg

SEQ ID NO: 376099 - DNA, 20 bp, Artificial Sequence
  Description of Artificial Sequence: Synthetic oligonucleotide
  Target: LAMA2; (+) strand; PAM type: YTN; PAM sequence: TTA
tatttataatgtgaacacta

SEQ ID NO: 376100 - DNA, 20 bp, Artificial Sequence
  Description of Artificial Sequence: Synthetic oligonucleotide
  Target: LAMA2; (+) strand; PAM type: YTN; PAM sequence: TTT
ataatgtgaacactatagca

SEQ ID NO: 376101 - DNA, 20 bp, Artificial Sequence
  Description of Artificial Sequence: Synthetic oligonucleotide
  Target: LAMA2; (+) strand; PAM type: YTN; PAM sequence: TTA
taatgtgaacactatagcaa

SEQ ID NO: 376102 - DNA, 20 bp, Artificial Sequence
  Description of Artificial Sequence: Synthetic oligonucleotide
  Target: LAMA2; (+) strand; PAM type: YTN; PAM sequence: CTA
tagcaatgattaaaagtatt

SEQ ID NO: 376103 - DNA, 20 bp, Artificial Sequence
  Description of Artificial Sequence: Synthetic oligonucleotide
  Target: LAMA2; (+) strand; PAM type: YTN; PAM sequence: TTA
aaagtatttatggatatgtg

SEQ ID NO: 376104 - DNA, 20 bp, Artificial Sequence
  Description of Artificial Sequence: Synthetic oligonucleotide
  Target: LAMA2; (+) strand; PAM type: YTN; PAM sequence: TTT
atggatatgtgacaaaattc

SEQ ID NO: 376105 - DNA, 20 bp, Artificial Sequence
  Description of Artificial Sequence: Synthetic oligonucleotide
  Target: LAMA2; (+) strand; PAM type: YTN; PAM sequence: TTA
tggatatgtgacaaaattct

SEQ ID NO: 376106 - DNA, 20 bp, Artificial Sequence
  Description of Artificial Sequence: Synthetic oligonucleotide
  Target: LAMA2; (+) strand; PAM type: YTN; PAM sequence: TTC
tatcaaatattagggcaaaa

SEQ ID NO: 376107 - DNA, 20 bp, Artificial Sequence
  Description of Artificial Sequence: Synthetic oligonucleotide
  Target: LAMA2; (+) strand; PAM type: YTN; PAM sequence: CTA
tcaaatattagggcaaaaag

SEQ ID NO: 376108 - DNA, 20 bp, Artificial Sequence
  Description of Artificial Sequence: Synthetic oligonucleotide
  Target: LAMA2; (+) strand; PAM type: YTN; PAM sequence: TTA
gggcaaaaaggattatttta

SEQ ID NO: 376109 - DNA, 20 bp, Artificial Sequence
  Description of Artificial Sequence: Synthetic oligonucleotide
  Target: LAMA2; (+) strand; PAM type: YTN; PAM sequence: TTA
ttttaactttaggctgctgg

SEQ ID NO: 376110 - DNA, 20 bp, Artificial Sequence
  Description of Artificial Sequence: Synthetic oligonucleotide
  Target: LAMA2; (+) strand; PAM type: YTN; PAM sequence: TTT
taactttaggctgctggtca

SEQ ID NO: 376111 - DNA, 20 bp, Artificial Sequence
  Description of Artificial Sequence: Synthetic oligonucleotide
  Target: LAMA2; (+) strand; PAM type: YTN; PAM sequence: TTT
aactttaggctgctggtcaa

SEQ ID NO: 376112 - DNA, 20 bp, Artificial Sequence
  Description of Artificial Sequence: Synthetic oligonucleotide
  Target: LAMA2; (+) strand; PAM type: YTN; PAM sequence: TTA
actttaggctgctggtcaat

SEQ ID NO: 376113 - DNA, 20 bp, Artificial Sequence
  Description of Artificial Sequence: Synthetic oligonucleotide
  Target: LAMA2; (+) strand; PAM type: YTN; PAM sequence: CTT
taggctgctggtcaataatg

SEQ ID NO: 376114 - DNA, 20 bp, Artificial Sequence
  Description of Artificial Sequence: Synthetic oligonucleotide
  Target: LAMA2; (+) strand; PAM type: YTN; PAM sequence: TTT
aggctgctggtcaataatgt

SEQ ID NO: 376115 - DNA, 20 bp, Artificial Sequence
  Description of Artificial Sequence: Synthetic oligonucleotide
  Target: LAMA2; (+) strand; PAM type: YTN; PAM sequence: TTA
ggctgctggtcaataatgtt

SEQ ID NO: 376116 - DNA, 20 bp, Artificial Sequence
  Description of Artificial Sequence: Synthetic oligonucleotide
  Target: LAMA2; (+) strand; PAM type: YTN; PAM sequence: CTG
ctggtcaataatgttgaaag

SEQ ID NO: 376117 - DNA, 20 bp, Artificial Sequence
  Description of Artificial Sequence: Synthetic oligonucleotide
  Target: LAMA2; (+) strand; PAM type: YTN; PAM sequence: CTG
gtcaataatgttgaaagtat

SEQ ID NO: 376118 - DNA, 20 bp, Artificial Sequence
  Description of Artificial Sequence: Synthetic oligonucleotide
  Target: LAMA2; (+) strand; PAM type: YTN; PAM sequence: TTG
aaagtatttttaccaagtag

SEQ ID NO: 376119 - DNA, 20 bp, Artificial Sequence
  Description of Artificial Sequence: Synthetic oligonucleotide
  Target: LAMA2; (+) strand; PAM type: YTN; PAM sequence: TTT
ttaccaagtaggagtccata

SEQ ID NO: 376120 - DNA, 20 bp, Artificial Sequence
  Description of Artificial Sequence: Synthetic oligonucleotide
  Target: LAMA2; (+) strand; PAM type: YTN; PAM sequence: TTT
taccaagtaggagtccatag

SEQ ID NO: 376121 - DNA, 20 bp, Artificial Sequence
  Description of Artificial Sequence: Synthetic oligonucleotide
  Target: LAMA2; (+) strand; PAM type: YTN; PAM sequence: TTT
accaagtaggagtccataga

SEQ ID NO: 376122 - DNA, 20 bp, Artificial Sequence
  Description of Artificial Sequence: Synthetic oligonucleotide
  Target: LAMA2; (+) strand; PAM type: YTN; PAM sequence: TTA
ccaagtaggagtccatagat

SEQ ID NO: 376123 - DNA, 20 bp, Artificial Sequence
  Description of Artificial Sequence: Synthetic oligonucleotide
  Target: LAMA2; (+) strand; PAM type: YTN; PAM sequence: CTG
aaagtaatcaattcagatta

SEQ ID NO: 376124 - DNA, 20 bp, Artificial Sequence
  Description of Artificial Sequence: Synthetic oligonucleotide
  Target: LAMA2; (+) strand; PAM type: YTN; PAM sequence: TTC
agattactaaaaatgaagaa

SEQ ID NO: 376125 - DNA, 20 bp, Artificial Sequence
  Description of Artificial Sequence: Synthetic oligonucleotide
  Target: LAMA2; (+) strand; PAM type: YTN; PAM sequence: TTA
ctaaaaatgaagaagtaaaa

SEQ ID NO: 376126 - DNA, 20 bp, Artificial Sequence
  Description of Artificial Sequence: Synthetic oligonucleotide
  Target: LAMA2; (+) strand; PAM type: YTN; PAM sequence: CTA
aaaatgaagaagtaaaattt

SEQ ID NO: 376127 - DNA, 20 bp, Artificial Sequence
  Description of Artificial Sequence: Synthetic oligonucleotide
  Target: LAMA2; (+) strand; PAM type: YTN; PAM sequence: TTT
taaattaagactagaaatac

SEQ ID NO: 376128 - DNA, 20 bp, Artificial Sequence
  Description of Artificial Sequence: Synthetic oligonucleotide
  Target: LAMA2; (+) strand; PAM type: YTN; PAM sequence: TTT
aaattaagactagaaatacc

SEQ ID NO: 376129 - DNA, 20 bp, Artificial Sequence
  Description of Artificial Sequence: Synthetic oligonucleotide
  Target: LAMA2; (+) strand; PAM type: YTN; PAM sequence: TTA
aattaagactagaaatacca

SEQ ID NO: 376130 - DNA, 20 bp, Artificial Sequence
  Description of Artificial Sequence: Synthetic oligonucleotide
  Target: LAMA2; (+) strand; PAM type: YTN; PAM sequence: TTA
agactagaaataccacctat

SEQ ID NO: 376131 - DNA, 20 bp, Artificial Sequence
  Description of Artificial Sequence: Synthetic oligonucleotide
  Target: LAMA2; (+) strand; PAM type: YTN; PAM sequence: CTA
gaaataccacctataggtcc

SEQ ID NO: 376132 - DNA, 20 bp, Artificial Sequence
  Description of Artificial Sequence: Synthetic oligonucleotide
  Target: LAMA2; (+) strand; PAM type: YTN; PAM sequence: CTA
taggtcctttccatattgct

SEQ ID NO: 376133 - DNA, 20 bp, Artificial Sequence
  Description of Artificial Sequence: Synthetic oligonucleotide
  Target: LAMA2; (+) strand; PAM type: YTN; PAM sequence: CTT
tccatattgctattgaaatc

SEQ ID NO: 376134 - DNA, 20 bp, Artificial Sequence
  Description of Artificial Sequence: Synthetic oligonucleotide
  Target: LAMA2; (+) strand; PAM type: YTN; PAM sequence: TTT
ccatattgctattgaaatct

SEQ ID NO: 376135 - DNA, 20 bp, Artificial Sequence
  Description of Artificial Sequence: Synthetic oligonucleotide
  Target: LAMA2; (+) strand; PAM type: YTN; PAM sequence: TTC
catattgctattgaaatctt

SEQ ID NO: 376136 - DNA, 20 bp, Artificial Sequence
  Description of Artificial Sequence: Synthetic oligonucleotide
  Target: LAMA2; (+) strand; PAM type: YTN; PAM sequence: TTG
ctattgaaatcttgagaagt

SEQ ID NO: 376137 - DNA, 20 bp, Artificial Sequence
  Description of Artificial Sequence: Synthetic oligonucleotide
  Target: LAMA2; (+) strand; PAM type: YTN; PAM sequence: CTA
ttgaaatcttgagaagtact

SEQ ID NO: 376138 - DNA, 20 bp, Artificial Sequence
  Description of Artificial Sequence: Synthetic oligonucleotide
  Target: LAMA2; (+) strand; PAM type: YTN; PAM sequence: TTG
aaatcttgagaagtactggg

SEQ ID NO: 376139 - DNA, 20 bp, Artificial Sequence
  Description of Artificial Sequence: Synthetic oligonucleotide
  Target: LAMA2; (+) strand; PAM type: YTN; PAM sequence: CTT
gagaagtactgggacaggct

SEQ ID NO: 376140 - DNA, 20 bp, Artificial Sequence
  Description of Artificial Sequence: Synthetic oligonucleotide
  Target: LAMA2; (+) strand; PAM type: YTN; PAM sequence: TTG
agaagtactgggacaggctg

SEQ ID NO: 376141 - DNA, 20 bp, Artificial Sequence
  Description of Artificial Sequence: Synthetic oligonucleotide
  Target: LAMA2; (+) strand; PAM type: YTN; PAM sequence: CTG
ggacaggctggtgaaaatac

SEQ ID NO: 376142 - DNA, 20 bp, Artificial Sequence
  Description of Artificial Sequence: Synthetic oligonucleotide
  Target: LAMA2; (+) strand; PAM type: YTN; PAM sequence: CTG
gtgaaaatacaacagacagt

SEQ ID NO: 376143 - DNA, 20 bp, Artificial Sequence
  Description of Artificial Sequence: Synthetic oligonucleotide
  Target: LAMA2; (+) strand; PAM type: YTN; PAM sequence: CTA
attctgcagttaattttgat

SEQ ID NO: 376144 - DNA, 20 bp, Artificial Sequence
  Description of Artificial Sequence: Synthetic oligonucleotide
  Target: LAMA2; (+) strand; PAM type: YTN; PAM sequence: TTC
tgcagttaattttgataaaa

SEQ ID NO: 376145 - DNA, 20 bp, Artificial Sequence
  Description of Artificial Sequence: Synthetic oligonucleotide
  Target: LAMA2; (+) strand; PAM type: YTN; PAM sequence: CTG
cagttaattttgataaaatt

SEQ ID NO: 376146 - DNA, 20 bp, Artificial Sequence
  Description of Artificial Sequence: Synthetic oligonucleotide
  Target: LAMA2; (+) strand; PAM type: YTN; PAM sequence: TTA
attttgataaaatttcagaa

SEQ ID NO: 376147 - DNA, 20 bp, Artificial Sequence
  Description of Artificial Sequence: Synthetic oligonucleotide
  Target: LAMA2; (+) strand; PAM type: YTN; PAM sequence: TTT
tgataaaatttcagaataat

SEQ ID NO: 376148 - DNA, 20 bp, Artificial Sequence
  Description of Artificial Sequence: Synthetic oligonucleotide
  Target: LAMA2; (+) strand; PAM type: YTN; PAM sequence: TTT
gataaaatttcagaataatt

SEQ ID NO: 376149 - DNA, 20 bp, Artificial Sequence
  Description of Artificial Sequence: Synthetic oligonucleotide
  Target: LAMA2; (+) strand; PAM type: YTN; PAM sequence: TTG
ataaaatttcagaataattg

SEQ ID NO: 376150 - DNA, 20 bp, Artificial Sequence
  Description of Artificial Sequence: Synthetic oligonucleotide
  Target: LAMA2; (+) strand; PAM type: YTN; PAM sequence: TTT
cagaataattgaacttttct

SEQ ID NO: 376151 - DNA, 20 bp, Artificial Sequence
  Description of Artificial Sequence: Synthetic oligonucleotide
  Target: LAMA2; (+) strand; PAM type: YTN; PAM sequence: TTC
agaataattgaacttttctc

SEQ ID NO: 376152 - DNA, 20 bp, Artificial Sequence
  Description of Artificial Sequence: Synthetic oligonucleotide
  Target: LAMA2; (+) strand; PAM type: YTN; PAM sequence: TTG
aacttttctctttggatatc

SEQ ID NO: 376153 - DNA, 20 bp, Artificial Sequence
  Description of Artificial Sequence: Synthetic oligonucleotide
  Target: LAMA2; (+) strand; PAM type: YTN; PAM sequence: CTT
ttctctttggatatcataga

SEQ ID NO: 376154 - DNA, 20 bp, Artificial Sequence
  Description of Artificial Sequence: Synthetic oligonucleotide
  Target: LAMA2; (+) strand; PAM type: YTN; PAM sequence: TTT
tctctttggatatcatagaa

SEQ ID NO: 376155 - DNA, 20 bp, Artificial Sequence
  Description of Artificial Sequence: Synthetic oligonucleotide
  Target: LAMA2; (+) strand; PAM type: YTN; PAM sequence: TTT
ctctttggatatcatagaaa

SEQ ID NO: 376156 - DNA, 20 bp, Artificial Sequence
  Description of Artificial Sequence: Synthetic oligonucleotide
  Target: LAMA2; (+) strand; PAM type: YTN; PAM sequence: TTC
tctttggatatcatagaaaa

SEQ ID NO: 376157 - DNA, 20 bp, Artificial Sequence
  Description of Artificial Sequence: Synthetic oligonucleotide
  Target: LAMA2; (+) strand; PAM type: YTN; PAM sequence: CTC
tttggatatcatagaaaagg

SEQ ID NO: 376158 - DNA, 20 bp, Artificial Sequence
  Description of Artificial Sequence: Synthetic oligonucleotide
  Target: LAMA2; (+) strand; PAM type: YTN; PAM sequence: CTT
tggatatcatagaaaaggtc

SEQ ID NO: 376159 - DNA, 20 bp, Artificial Sequence
  Description of Artificial Sequence: Synthetic oligonucleotide
  Target: LAMA2; (+) strand; PAM type: YTN; PAM sequence: TTT
ggatatcatagaaaaggtcc

SEQ ID NO: 376160 - DNA, 20 bp, Artificial Sequence
  Description of Artificial Sequence: Synthetic oligonucleotide
  Target: LAMA2; (+) strand; PAM type: YTN; PAM sequence: TTG
gatatcatagaaaaggtcca

SEQ ID NO: 376161 - DNA, 20 bp, Artificial Sequence
  Description of Artificial Sequence: Synthetic oligonucleotide
  Target: LAMA2; (+) strand; PAM type: YTN; PAM sequence: TTT
gattgaatgaaaacccaatt

SEQ ID NO: 376162 - DNA, 20 bp, Artificial Sequence
  Description of Artificial Sequence: Synthetic oligonucleotide
  Target: LAMA2; (+) strand; PAM type: YTN; PAM sequence: TTG
attgaatgaaaacccaattg

SEQ ID NO: 376163 - DNA, 20 bp, Artificial Sequence
  Description of Artificial Sequence: Synthetic oligonucleotide
  Target: LAMA2; (+) strand; PAM type: YTN; PAM sequence: TTG
aatgaaaacccaattgtcat

SEQ ID NO: 376164 - DNA, 20 bp, Artificial Sequence
  Description of Artificial Sequence: Synthetic oligonucleotide
  Target: LAMA2; (+) strand; PAM type: YTN; PAM sequence: TTG
tcataacatcagtgaggaat

SEQ ID NO: 376165 - DNA, 20 bp, Artificial Sequence
  Description of Artificial Sequence: Synthetic oligonucleotide
  Target: LAMA2; (+) strand; PAM type: YTN; PAM sequence: CTG
ataactcctaagttcctctg

SEQ ID NO: 376166 - DNA, 20 bp, Artificial Sequence
  Description of Artificial Sequence: Synthetic oligonucleotide
  Target: LAMA2; (+) strand; PAM type: YTN; PAM sequence: CTC
ctaagttcctctgttcccac

SEQ ID NO: 376167 - DNA, 20 bp, Artificial Sequence
  Description of Artificial Sequence: Synthetic oligonucleotide
  Target: LAMA2; (+) strand; PAM type: YTN; PAM sequence: CTA
agttcctctgttcccacctg

SEQ ID NO: 376168 - DNA, 20 bp, Artificial Sequence
  Description of Artificial Sequence: Synthetic oligonucleotide
  Target: LAMA2; (+) strand; PAM type: YTN; PAM sequence: TTC
ctctgttcccacctgatctt

SEQ ID NO: 376169 - DNA, 20 bp, Artificial Sequence
  Description of Artificial Sequence: Synthetic oligonucleotide
  Target: LAMA2; (+) strand; PAM type: YTN; PAM sequence: CTC
tgttcccacctgatctttgg

SEQ ID NO: 376170 - DNA, 20 bp, Artificial Sequence
  Description of Artificial Sequence: Synthetic oligonucleotide
  Target: LAMA2; (+) strand; PAM type: YTN; PAM sequence: CTG
ttcccacctgatctttggta

SEQ ID NO: 376171 - DNA, 20 bp, Artificial Sequence
  Description of Artificial Sequence: Synthetic oligonucleotide
  Target: LAMA2; (+) strand; PAM type: YTN; PAM sequence: TTC
ccacctgatctttggtattg

SEQ ID NO: 376172 - DNA, 20 bp, Artificial Sequence
  Description of Artificial Sequence: Synthetic oligonucleotide
  Target: LAMA2; (+) strand; PAM type: YTN; PAM sequence: CTG
atctttggtattgtgcatct

SEQ ID NO: 376173 - DNA, 20 bp, Artificial Sequence
  Description of Artificial Sequence: Synthetic oligonucleotide
  Target: LAMA2; (+) strand; PAM type: YTN; PAM sequence: CTT
tggtattgtgcatcttgctt

SEQ ID NO: 376174 - DNA, 20 bp, Artificial Sequence
  Description of Artificial Sequence: Synthetic oligonucleotide
  Target: LAMA2; (+) strand; PAM type: YTN; PAM sequence: TTT
ggtattgtgcatcttgcttc

SEQ ID NO: 376175 - DNA, 20 bp, Artificial Sequence
  Description of Artificial Sequence: Synthetic oligonucleotide
  Target: LAMA2; (+) strand; PAM type: YTN; PAM sequence: TTG
gtattgtgcatcttgcttca

SEQ ID NO: 376176 - DNA, 20 bp, Artificial Sequence
  Description of Artificial Sequence: Synthetic oligonucleotide
  Target: LAMA2; (+) strand; PAM type: YTN; PAM sequence: TTG
tgcatcttgcttcacttcga

SEQ ID NO: 376177 - DNA, 20 bp, Artificial Sequence
  Description of Artificial Sequence: Synthetic oligonucleotide
  Target: LAMA2; (+) strand; PAM type: YTN; PAM sequence: CTT
gcttcacttcgagttaactg

SEQ ID NO: 376178 - DNA, 20 bp, Artificial Sequence
  Description of Artificial Sequence: Synthetic oligonucleotide
  Target: LAMA2; (+) strand; PAM type: YTN; PAM sequence: TTG
cttcacttcgagttaactga

SEQ ID NO: 376179 - DNA, 20 bp, Artificial Sequence
  Description of Artificial Sequence: Synthetic oligonucleotide
  Target: LAMA2; (+) strand; PAM type: YTN; PAM sequence: CTT
cacttcgagttaactgattt

SEQ ID NO: 376180 - DNA, 20 bp, Artificial Sequence
  Description of Artificial Sequence: Synthetic oligonucleotide
  Target: LAMA2; (+) strand; PAM type: YTN; PAM sequence: TTC
acttcgagttaactgattta

SEQ ID NO: 376181 - DNA, 20 bp, Artificial Sequence
  Description of Artificial Sequence: Synthetic oligonucleotide
  Target: LAMA2; (+) strand; PAM type: YTN; PAM sequence: CTT
cgagttaactgatttaaatt

SEQ ID NO: 376182 - DNA, 20 bp, Artificial Sequence
  Description of Artificial Sequence: Synthetic oligonucleotide
  Target: LAMA2; (+) strand; PAM type: YTN; PAM sequence: TTC
gagttaactgatttaaattt

SEQ ID NO: 376183 - DNA, 20 bp, Artificial Sequence
  Description of Artificial Sequence: Synthetic oligonucleotide
  Target: LAMA2; (+) strand; PAM type: YTN; PAM sequence: TTA
actgatttaaatttaatttt

SEQ ID NO: 376184 - DNA, 20 bp, Artificial Sequence
  Description of Artificial Sequence: Synthetic oligonucleotide
  Target: LAMA2; (+) strand; PAM type: YTN; PAM sequence: CTG
atttaaatttaatttttctc

SEQ ID NO: 376185 - DNA, 20 bp, Artificial Sequence
  Description of Artificial Sequence: Synthetic oligonucleotide
  Target: LAMA2; (+) strand; PAM type: YTN; PAM sequence: TTT
aaatttaatttttctctcct

SEQ ID NO: 376186 - DNA, 20 bp, Artificial Sequence
  Description of Artificial Sequence: Synthetic oligonucleotide
  Target: LAMA2; (+) strand; PAM type: YTN; PAM sequence: TTA
aatttaatttttctctcctc

SEQ ID NO: 376187 - DNA, 20 bp, Artificial Sequence
  Description of Artificial Sequence: Synthetic oligonucleotide
  Target: LAMA2; (+) strand; PAM type: YTN; PAM sequence: TTT
aatttttctctcctcttcca

SEQ ID NO: 376188 - DNA, 20 bp, Artificial Sequence
  Description of Artificial Sequence: Synthetic oligonucleotide
  Target: LAMA2; (+) strand; PAM type: YTN; PAM sequence: TTA
atttttctctcctcttccat

SEQ ID NO: 376189 - DNA, 20 bp, Artificial Sequence
  Description of Artificial Sequence: Synthetic oligonucleotide
  Target: LAMA2; (+) strand; PAM type: YTN; PAM sequence: TTT
ttctctcctcttccattgcc

SEQ ID NO: 376190 - DNA, 20 bp, Artificial Sequence
  Description of Artificial Sequence: Synthetic oligonucleotide
  Target: LAMA2; (+) strand; PAM type: YTN; PAM sequence: TTT
tctctcctcttccattgcca

SEQ ID NO: 376191 - DNA, 20 bp, Artificial Sequence
  Description of Artificial Sequence: Synthetic oligonucleotide
  Target: LAMA2; (+) strand; PAM type: YTN; PAM sequence: TTT
ctctcctcttccattgccag

SEQ ID NO: 376192 - DNA, 20 bp, Artificial Sequence
  Description of Artificial Sequence: Synthetic oligonucleotide
  Target: LAMA2; (+) strand; PAM type: YTN; PAM sequence: TTC
tctcctcttccattgccagg

SEQ ID NO: 376193 - DNA, 20 bp, Artificial Sequence
  Description of Artificial Sequence: Synthetic oligonucleotide
  Target: LAMA2; (+) strand; PAM type: YTN; PAM sequence: CTC
tcctcttccattgccaggct

SEQ ID NO: 376194 - DNA, 20 bp, Artificial Sequence
  Description of Artificial Sequence: Synthetic oligonucleotide
  Target: LAMA2; (+) strand; PAM type: YTN; PAM sequence: CTC
ctcttccattgccaggctgg

SEQ ID NO: 376195 - DNA, 20 bp, Artificial Sequence
  Description of Artificial Sequence: Synthetic oligonucleotide
  Target: LAMA2; (+) strand; PAM type: YTN; PAM sequence: CTC
ttccattgccaggctgggac

SEQ ID NO: 376196 - DNA, 20 bp, Artificial Sequence
  Description of Artificial Sequence: Synthetic oligonucleotide
  Target: LAMA2; (+) strand; PAM type: YTN; PAM sequence: CTT
ccattgccaggctgggacct

SEQ ID NO: 376197 - DNA, 20 bp, Artificial Sequence
  Description of Artificial Sequence: Synthetic oligonucleotide
  Target: LAMA2; (+) strand; PAM type: YTN; PAM sequence: TTC
cattgccaggctgggacctt

SEQ ID NO: 376198 - DNA, 20 bp, Artificial Sequence
  Description of Artificial Sequence: Synthetic oligonucleotide
  Target: LAMA2; (+) strand; PAM type: YTN; PAM sequence: TTG
ccaggctgggacctttggcc

SEQ ID NO: 376199 - DNA, 20 bp, Artificial Sequence
  Description of Artificial Sequence: Synthetic oligonucleotide
  Target: LAMA2; (+) strand; PAM type: YTN; PAM sequence: CTG
ggacctttggcctacaatca

SEQ ID NO: 376200 - DNA, 20 bp, Artificial Sequence
  Description of Artificial Sequence: Synthetic oligonucleotide
  Target: LAMA2; (+) strand; PAM type: YTN; PAM sequence: CTT
tggcctacaatcagcaaggg

SEQ ID NO: 376201 - DNA, 20 bp, Artificial Sequence
  Description of Artificial Sequence: Synthetic oligonucleotide
  Target: LAMA2; (+) strand; PAM type: YTN; PAM sequence: TTT
ggcctacaatcagcaagggg

SEQ ID NO: 376202 - DNA, 20 bp, Artificial Sequence
  Description of Artificial Sequence: Synthetic oligonucleotide
  Target: LAMA2; (+) strand; PAM type: YTN; PAM sequence: TTG
gcctacaatcagcaaggggc

SEQ ID NO: 376203 - DNA, 20 bp, Artificial Sequence
  Description of Artificial Sequence: Synthetic oligonucleotide
  Target: LAMA2; (+) strand; PAM type: YTN; PAM sequence: CTA
caatcagcaaggggctgtgt

SEQ ID NO: 376204 - DNA, 20 bp, Artificial Sequence
  Description of Artificial Sequence: Synthetic oligonucleotide
  Target: LAMA2; (+) strand; PAM type: YTN; PAM sequence: CTG
tgttccctgcaactgcaatt

SEQ ID NO: 376205 - DNA, 20 bp, Artificial Sequence
  Description of Artificial Sequence: Synthetic oligonucleotide
  Target: LAMA2; (+) strand; PAM type: YTN; PAM sequence: TTC
cctgcaactgcaattctttt

SEQ ID NO: 376206 - DNA, 20 bp, Artificial Sequence
  Description of Artificial Sequence: Synthetic oligonucleotide
  Target: LAMA2; (+) strand; PAM type: YTN; PAM sequence: CTG
caactgcaattcttttgggt

SEQ ID NO: 376207 - DNA, 20 bp, Artificial Sequence
  Description of Artificial Sequence: Synthetic oligonucleotide
  Target: LAMA2; (+) strand; PAM type: YTN; PAM sequence: CTG
caattcttttgggtctaagt

SEQ ID NO: 376208 - DNA, 20 bp, Artificial Sequence
  Description of Artificial Sequence: Synthetic oligonucleotide
  Target: LAMA2; (+) strand; PAM type: YTN; PAM sequence: TTC
ttttgggtctaagtcattcg

SEQ ID NO: 376209 - DNA, 20 bp, Artificial Sequence
  Description of Artificial Sequence: Synthetic oligonucleotide
  Target: LAMA2; (+) strand; PAM type: YTN; PAM sequence: CTT
ttgggtctaagtcattcgac

SEQ ID NO: 376210 - DNA, 20 bp, Artificial Sequence
  Description of Artificial Sequence: Synthetic oligonucleotide
  Target: LAMA2; (+) strand; PAM type: YTN; PAM sequence: TTT
tgggtctaagtcattcgact

SEQ ID NO: 376211 - DNA, 20 bp, Artificial Sequence
  Description of Artificial Sequence: Synthetic oligonucleotide
  Target: LAMA2; (+) strand; PAM type: YTN; PAM sequence: TTT
gggtctaagtcattcgactg

SEQ ID NO: 376212 - DNA, 20 bp, Artificial Sequence
  Description of Artificial Sequence: Synthetic oligonucleotide
  Target: LAMA2; (+) strand; PAM type: YTN; PAM sequence: TTG
ggtctaagtcattcgactgt

SEQ ID NO: 376213 - DNA, 20 bp, Artificial Sequence
  Description of Artificial Sequence: Synthetic oligonucleotide
  Target: LAMA2; (+) strand; PAM type: YTN; PAM sequence: CTA
agtcattcgactgtgaagag

SEQ ID NO: 376214 - DNA, 20 bp, Artificial Sequence
  Description of Artificial Sequence: Synthetic oligonucleotide
  Target: LAMA2; (+) strand; PAM type: YTN; PAM sequence: TTC
gactgtgaagagagtggaca

SEQ ID NO: 376215 - DNA, 20 bp, Artificial Sequence
  Description of Artificial Sequence: Synthetic oligonucleotide
  Target: LAMA2; (+) strand; PAM type: YTN; PAM sequence: CTG
tgaagagagtggacaatgtt

SEQ ID NO: 376216 - DNA, 20 bp, Artificial Sequence
  Description of Artificial Sequence: Synthetic oligonucleotide
  Target: LAMA2; (+) strand; PAM type: YTN; PAM sequence: TTG
gtgccaacctggagtcacag

SEQ ID NO: 376217 - DNA, 20 bp, Artificial Sequence
  Description of Artificial Sequence: Synthetic oligonucleotide
  Target: LAMA2; (+) strand; PAM type: YTN; PAM sequence: CTG
gagtcacagggaagaaatgt

SEQ ID NO: 376218 - DNA, 20 bp, Artificial Sequence
  Description of Artificial Sequence: Synthetic oligonucleotide
  Target: LAMA2; (+) strand; PAM type: YTN; PAM sequence: CTG
tgcccacggctatttcaact

SEQ ID NO: 376219 - DNA, 20 bp, Artificial Sequence
  Description of Artificial Sequence: Synthetic oligonucleotide
  Target: LAMA2; (+) strand; PAM type: YTN; PAM sequence: CTA
tttcaacttccaagaaggag

SEQ ID NO: 376220 - DNA, 20 bp, Artificial Sequence
  Description of Artificial Sequence: Synthetic oligonucleotide
  Target: LAMA2; (+) strand; PAM type: YTN; PAM sequence: TTT
caacttccaagaaggaggct

SEQ ID NO: 376221 - DNA, 20 bp, Artificial Sequence
  Description of Artificial Sequence: Synthetic oligonucleotide
  Target: LAMA2; (+) strand; PAM type: YTN; PAM sequence: TTC
aacttccaagaaggaggctg

SEQ ID NO: 376222 - DNA, 20 bp, Artificial Sequence
  Description of Artificial Sequence: Synthetic oligonucleotide
  Target: LAMA2; (+) strand; PAM type: YTN; PAM sequence: CTT
ccaagaaggaggctgcacag

SEQ ID NO: 376223 - DNA, 20 bp, Artificial Sequence
  Description of Artificial Sequence: Synthetic oligonucleotide
  Target: LAMA2; (+) strand; PAM type: YTN; PAM sequence: TTC
caagaaggaggctgcacagg

SEQ ID NO: 376224 - DNA, 20 bp, Artificial Sequence
  Description of Artificial Sequence: Synthetic oligonucleotide
  Target: LAMA2; (+) strand; PAM type: YTN; PAM sequence: CTG
cacaggtctgtaaatatgac

SEQ ID NO: 376225 - DNA, 20 bp, Artificial Sequence
  Description of Artificial Sequence: Synthetic oligonucleotide
  Target: LAMA2; (+) strand; PAM type: YTN; PAM sequence: CTG
taaatatgacttaagtccta

SEQ ID NO: 376226 - DNA, 20 bp, Artificial Sequence
  Description of Artificial Sequence: Synthetic oligonucleotide
  Target: LAMA2; (+) strand; PAM type: YTN; PAM sequence: CTT
aagtcctacatattcactct

SEQ ID NO: 376227 - DNA, 20 bp, Artificial Sequence
  Description of Artificial Sequence: Synthetic oligonucleotide
  Target: LAMA2; (+) strand; PAM type: YTN; PAM sequence: TTA
agtcctacatattcactctg

SEQ ID NO: 376228 - DNA, 20 bp, Artificial Sequence
  Description of Artificial Sequence: Synthetic oligonucleotide
  Target: LAMA2; (+) strand; PAM type: YTN; PAM sequence: CTA
catattcactctgatagttt

SEQ ID NO: 376229 - DNA, 20 bp, Artificial Sequence
  Description of Artificial Sequence: Synthetic oligonucleotide
  Target: LAMA2; (+) strand; PAM type: YTN; PAM sequence: TTC
actctgatagttttagggtc

SEQ ID NO: 376230 - DNA, 20 bp, Artificial Sequence
  Description of Artificial Sequence: Synthetic oligonucleotide
  Target: LAMA2; (+) strand; PAM type: YTN; PAM sequence: CTC
tgatagttttagggtctgac

SEQ ID NO: 376231 - DNA, 20 bp, Artificial Sequence
  Description of Artificial Sequence: Synthetic oligonucleotide
  Target: LAMA2; (+) strand; PAM type: YTN; PAM sequence: CTG
atagttttagggtctgactt

SEQ ID NO: 376232 - DNA, 20 bp, Artificial Sequence
  Description of Artificial Sequence: Synthetic oligonucleotide
  Target: LAMA2; (+) strand; PAM type: YTN; PAM sequence: TTT
tagggtctgacttctgtaac

SEQ ID NO: 376233 - DNA, 20 bp, Artificial Sequence
  Description of Artificial Sequence: Synthetic oligonucleotide
  Target: LAMA2; (+) strand; PAM type: YTN; PAM sequence: TTT
agggtctgacttctgtaaca

SEQ ID NO: 376234 - DNA, 20 bp, Artificial Sequence
  Description of Artificial Sequence: Synthetic oligonucleotide
  Target: LAMA2; (+) strand; PAM type: YTN; PAM sequence: TTA
gggtctgacttctgtaacag

SEQ ID NO: 376235 - DNA, 20 bp, Artificial Sequence
  Description of Artificial Sequence: Synthetic oligonucleotide
  Target: LAMA2; (+) strand; PAM type: YTN; PAM sequence: CTG
acttctgtaacagtttgttc

SEQ ID NO: 376236 - DNA, 20 bp, Artificial Sequence
  Description of Artificial Sequence: Synthetic oligonucleotide
  Target: LAMA2; (+) strand; PAM type: YTN; PAM sequence: CTT
ctgtaacagtttgttctttt

SEQ ID NO: 376237 - DNA, 20 bp, Artificial Sequence
  Description of Artificial Sequence: Synthetic oligonucleotide
  Target: LAMA2; (+) strand; PAM type: YTN; PAM sequence: TTC
tgtaacagtttgttctttta

SEQ ID NO: 376238 - DNA, 20 bp, Artificial Sequence
  Description of Artificial Sequence: Synthetic oligonucleotide
  Target: LAMA2; (+) strand; PAM type: YTN; PAM sequence: CTG
taacagtttgttcttttaaa

SEQ ID NO: 376239 - DNA, 20 bp, Artificial Sequence
  Description of Artificial Sequence: Synthetic oligonucleotide
  Target: LAMA2; (+) strand; PAM type: YTN; PAM sequence: TTT
gttcttttaaaggaagcaca

SEQ ID NO: 376240 - DNA, 20 bp, Artificial Sequence
  Description of Artificial Sequence: Synthetic oligonucleotide
  Target: LAMA2; (+) strand; PAM type: YTN; PAM sequence: TTG
ttcttttaaaggaagcacag

SEQ ID NO: 376241 - DNA, 20 bp, Artificial Sequence
  Description of Artificial Sequence: Synthetic oligonucleotide
  Target: LAMA2; (+) strand; PAM type: YTN; PAM sequence: TTC
ttttaaaggaagcacagatt

SEQ ID NO: 376242 - DNA, 20 bp, Artificial Sequence
  Description of Artificial Sequence: Synthetic oligonucleotide
  Target: LAMA2; (+) strand; PAM type: YTN; PAM sequence: CTT
ttaaaggaagcacagattga

SEQ ID NO: 376243 - DNA, 20 bp, Artificial Sequence
  Description of Artificial Sequence: Synthetic oligonucleotide
  Target: LAMA2; (+) strand; PAM type: YTN; PAM sequence: TTT
taaaggaagcacagattgat

SEQ ID NO: 376244 - DNA, 20 bp, Artificial Sequence
  Description of Artificial Sequence: Synthetic oligonucleotide
  Target: LAMA2; (+) strand; PAM type: YTN; PAM sequence: TTT
aaaggaagcacagattgata

SEQ ID NO: 376245 - DNA, 20 bp, Artificial Sequence
  Description of Artificial Sequence: Synthetic oligonucleotide
  Target: LAMA2; (+) strand; PAM type: YTN; PAM sequence: TTA
aaggaagcacagattgatac

SEQ ID NO: 376246 - DNA, 20 bp, Artificial Sequence
  Description of Artificial Sequence: Synthetic oligonucleotide
  Target: LAMA2; (+) strand; PAM type: YTN; PAM sequence: TTG
atacaacgtatttaacataa

SEQ ID NO: 376247 - DNA, 20 bp, Artificial Sequence
  Description of Artificial Sequence: Synthetic oligonucleotide
  Target: LAMA2; (+) strand; PAM type: YTN; PAM sequence: TTT
aacataatgagtaatgtcta

SEQ ID NO: 376248 - DNA, 20 bp, Artificial Sequence
  Description of Artificial Sequence: Synthetic oligonucleotide
  Target: LAMA2; (+) strand; PAM type: YTN; PAM sequence: TTA
acataatgagtaatgtctac

SEQ ID NO: 376249 - DNA, 20 bp, Artificial Sequence
  Description of Artificial Sequence: Synthetic oligonucleotide
  Target: LAMA2; (+) strand; PAM type: YTN; PAM sequence: CTA
cttatttttacgttacttaa

SEQ ID NO: 376250 - DNA, 20 bp, Artificial Sequence
  Description of Artificial Sequence: Synthetic oligonucleotide
  Target: LAMA2; (+) strand; PAM type: YTN; PAM sequence: CTT
atttttacgttacttaaaaa

SEQ ID NO: 376251 - DNA, 20 bp, Artificial Sequence
  Description of Artificial Sequence: Synthetic oligonucleotide
  Target: LAMA2; (+) strand; PAM type: YTN; PAM sequence: TTA
tttttacgttacttaaaaaa

SEQ ID NO: 376252 - DNA, 20 bp, Artificial Sequence
  Description of Artificial Sequence: Synthetic oligonucleotide
  Target: LAMA2; (+) strand; PAM type: YTN; PAM sequence: TTT
ttacgttacttaaaaaatga

SEQ ID NO: 376253 - DNA, 20 bp, Artificial Sequence
  Description of Artificial Sequence: Synthetic oligonucleotide
  Target: LAMA2; (+) strand; PAM type: YTN; PAM sequence: TTT
tacgttacttaaaaaatgaa

SEQ ID NO: 376254 - DNA, 20 bp, Artificial Sequence
  Description of Artificial Sequence: Synthetic oligonucleotide
  Target: LAMA2; (+) strand; PAM type: YTN; PAM sequence: TTT
acgttacttaaaaaatgaaa

SEQ ID NO: 376255 - DNA, 20 bp, Artificial Sequence
  Description of Artificial Sequence: Synthetic oligonucleotide
  Target: LAMA2; (+) strand; PAM type: YTN; PAM sequence: TTA
cgttacttaaaaaatgaaat

SEQ ID NO: 376256 - DNA, 20 bp, Artificial Sequence
  Description of Artificial Sequence: Synthetic oligonucleotide
  Target: LAMA2; (+) strand; PAM type: YTN; PAM sequence: TTA
cttaaaaaatgaaatacatg

SEQ ID NO: 376257 - DNA, 20 bp, Artificial Sequence
  Description of Artificial Sequence: Synthetic oligonucleotide
  Target: LAMA2; (+) strand; PAM type: YTN; PAM sequence: CTT
aaaaaatgaaatacatgtca

SEQ ID NO: 376258 - DNA, 20 bp, Artificial Sequence
  Description of Artificial Sequence: Synthetic oligonucleotide
  Target: LAMA2; (+) strand; PAM type: YTN; PAM sequence: TTA
aaaaatgaaatacatgtcag

SEQ ID NO: 376259 - DNA, 20 bp, Artificial Sequence
  Description of Artificial Sequence: Synthetic oligonucleotide
  Target: LAMA2; (+) strand; PAM type: YTN; PAM sequence: TTT
gaaacactgccttaataact

SEQ ID NO: 376260 - DNA, 20 bp, Artificial Sequence
  Description of Artificial Sequence: Synthetic oligonucleotide
  Target: LAMA2; (+) strand; PAM type: YTN; PAM sequence: TTG
aaacactgccttaataactg

SEQ ID NO: 376261 - DNA, 20 bp, Artificial Sequence
  Description of Artificial Sequence: Synthetic oligonucleotide
  Target: LAMA2; (+) strand; PAM type: YTN; PAM sequence: CTG
ccttaataactgtgtgcaag

SEQ ID NO: 376262 - DNA, 20 bp, Artificial Sequence
  Description of Artificial Sequence: Synthetic oligonucleotide
  Target: LAMA2; (+) strand; PAM type: YTN; PAM sequence: CTT
aataactgtgtgcaagtact

SEQ ID NO: 376263 - DNA, 20 bp, Artificial Sequence
  Description of Artificial Sequence: Synthetic oligonucleotide
  Target: LAMA2; (+) strand; PAM type: YTN; PAM sequence: TTA
ataactgtgtgcaagtactc

SEQ ID NO: 376264 - DNA, 20 bp, Artificial Sequence
  Description of Artificial Sequence: Synthetic oligonucleotide
  Target: LAMA2; (+) strand; PAM type: YTN; PAM sequence: CTG
tgtgcaagtactcagtaaaa

SEQ ID NO: 376265 - DNA, 20 bp, Artificial Sequence
  Description of Artificial Sequence: Synthetic oligonucleotide
  Target: LAMA2; (+) strand; PAM type: YTN; PAM sequence: CTC
agtaaaaatcagcagatgct

SEQ ID NO: 376266 - DNA, 20 bp, Artificial Sequence
  Description of Artificial Sequence: Synthetic oligonucleotide
  Target: LAMA2; (+) strand; PAM type: YTN; PAM sequence: CTC
gtttggttgtgtccctccct

SEQ ID NO: 376267 - DNA, 20 bp, Artificial Sequence
  Description of Artificial Sequence: Synthetic oligonucleotide
  Target: LAMA2; (+) strand; PAM type: YTN; PAM sequence: TTT
ggttgtgtccctccctgtct

SEQ ID NO: 376268 - DNA, 20 bp, Artificial Sequence
  Description of Artificial Sequence: Synthetic oligonucleotide
  Target: LAMA2; (+) strand; PAM type: YTN; PAM sequence: TTG
gttgtgtccctccctgtctg

SEQ ID NO: 376269 - DNA, 20 bp, Artificial Sequence
  Description of Artificial Sequence: Synthetic oligonucleotide
  Target: LAMA2; (+) strand; PAM type: YTN; PAM sequence: TTG
tgtccctccctgtctgtgac

SEQ ID NO: 376270 - DNA, 20 bp, Artificial Sequence
  Description of Artificial Sequence: Synthetic oligonucleotide
  Target: LAMA2; (+) strand; PAM type: YTN; PAM sequence: CTC
cctgtctgtgactttgattc

SEQ ID NO: 376271 - DNA, 20 bp, Artificial Sequence
  Description of Artificial Sequence: Synthetic oligonucleotide
  Target: LAMA2; (+) strand; PAM type: YTN; PAM sequence: CTG
tctgtgactttgattcagcc

SEQ ID NO: 376272 - DNA, 20 bp, Artificial Sequence
  Description of Artificial Sequence: Synthetic oligonucleotide
  Target: LAMA2; (+) strand; PAM type: YTN; PAM sequence: CTG
tgactttgattcagccagtc

SEQ ID NO: 376273 - DNA, 20 bp, Artificial Sequence
  Description of Artificial Sequence: Synthetic oligonucleotide
  Target: LAMA2; (+) strand; PAM type: YTN; PAM sequence: CTT
tgattcagccagtcactcaa

SEQ ID NO: 376274 - DNA, 20 bp, Artificial Sequence
  Description of Artificial Sequence: Synthetic oligonucleotide
  Target: LAMA2; (+) strand; PAM type: YTN; PAM sequence: TTT
gattcagccagtcactcaaa

SEQ ID NO: 376275 - DNA, 20 bp, Artificial Sequence
  Description of Artificial Sequence: Synthetic oligonucleotide
  Target: LAMA2; (+) strand; PAM type: YTN; PAM sequence: TTG
attcagccagtcactcaaac

SEQ ID NO: 376276 - DNA, 20 bp, Artificial Sequence
  Description of Artificial Sequence: Synthetic oligonucleotide
  Target: LAMA2; (+) strand; PAM type: YTN; PAM sequence: TTC
agccagtcactcaaacactg

SEQ ID NO: 376277 - DNA, 20 bp, Artificial Sequence
  Description of Artificial Sequence: Synthetic oligonucleotide
  Target: LAMA2; (+) strand; PAM type: YTN; PAM sequence: CTC
aaacactgctacggcttgaa

SEQ ID NO: 376278 - DNA, 20 bp, Artificial Sequence
  Description of Artificial Sequence: Synthetic oligonucleotide
  Target: LAMA2; (+) strand; PAM type: YTN; PAM sequence: CTG
ctacggcttgaaagttaaat

SEQ ID NO: 376279 - DNA, 20 bp, Artificial Sequence
  Description of Artificial Sequence: Synthetic oligonucleotide
  Target: LAMA2; (+) strand; PAM type: YTN; PAM sequence: CTA
cggcttgaaagttaaatgtt

SEQ ID NO: 376280 - DNA, 20 bp, Artificial Sequence
  Description of Artificial Sequence: Synthetic oligonucleotide
  Target: LAMA2; (+) strand; PAM type: YTN; PAM sequence: CTT
gaaagttaaatgttcgattt

SEQ ID NO: 376281 - DNA, 20 bp, Artificial Sequence
  Description of Artificial Sequence: Synthetic oligonucleotide
  Target: LAMA2; (+) strand; PAM type: YTN; PAM sequence: TTG
aaagttaaatgttcgatttt

SEQ ID NO: 376282 - DNA, 20 bp, Artificial Sequence
  Description of Artificial Sequence: Synthetic oligonucleotide
  Target: LAMA2; (+) strand; PAM type: YTN; PAM sequence: TTA
aatgttcgatttttctggta

SEQ ID NO: 376283 - DNA, 20 bp, Artificial Sequence
  Description of Artificial Sequence: Synthetic oligonucleotide
  Target: LAMA2; (+) strand; PAM type: YTN; PAM sequence: TTC
gatttttctggtaccagtct

SEQ ID NO: 376284 - DNA, 20 bp, Artificial Sequence
  Description of Artificial Sequence: Synthetic oligonucleotide
  Target: LAMA2; (+) strand; PAM type: YTN; PAM sequence: TTT
ttctggtaccagtcttatct

SEQ ID NO: 376285 - DNA, 20 bp, Artificial Sequence
  Description of Artificial Sequence: Synthetic oligonucleotide
  Target: LAMA2; (+) strand; PAM type: YTN; PAM sequence: TTT
tctggtaccagtcttatctt

SEQ ID NO: 376286 - DNA, 20 bp, Artificial Sequence
  Description of Artificial Sequence: Synthetic oligonucleotide
  Target: LAMA2; (+) strand; PAM type: YTN; PAM sequence: TTT
ctggtaccagtcttatctta

SEQ ID NO: 376287 - DNA, 20 bp, Artificial Sequence
  Description of Artificial Sequence: Synthetic oligonucleotide
  Target: LAMA2; (+) strand; PAM type: YTN; PAM sequence: TTC
tggtaccagtcttatcttag

SEQ ID NO: 376288 - DNA, 20 bp, Artificial Sequence
  Description of Artificial Sequence: Synthetic oligonucleotide
  Target: LAMA2; (+) strand; PAM type: YTN; PAM sequence: CTG
gtaccagtcttatcttagtt

SEQ ID NO: 376289 - DNA, 20 bp, Artificial Sequence
  Description of Artificial Sequence: Synthetic oligonucleotide
  Target: LAMA2; (+) strand; PAM type: YTN; PAM sequence: CTT
atcttagtttaagctcaaac

SEQ ID NO: 376290 - DNA, 20 bp, Artificial Sequence
  Description of Artificial Sequence: Synthetic oligonucleotide
  Target: LAMA2; (+) strand; PAM type: YTN; PAM sequence: TTA
tcttagtttaagctcaaacc

SEQ ID NO: 376291 - DNA, 20 bp, Artificial Sequence
  Description of Artificial Sequence: Synthetic oligonucleotide
  Target: LAMA2; (+) strand; PAM type: YTN; PAM sequence: CTT
agtttaagctcaaaccccac

SEQ ID NO: 376292 - DNA, 20 bp, Artificial Sequence
  Description of Artificial Sequence: Synthetic oligonucleotide
  Target: LAMA2; (+) strand; PAM type: YTN; PAM sequence: TTA
gtttaagctcaaaccccacg

SEQ ID NO: 376293 - DNA, 20 bp, Artificial Sequence
  Description of Artificial Sequence: Synthetic oligonucleotide
  Target: LAMA2; (+) strand; PAM type: YTN; PAM sequence: TTT
aagctcaaaccccacgccaa

SEQ ID NO: 376294 - DNA, 20 bp, Artificial Sequence
  Description of Artificial Sequence: Synthetic oligonucleotide
  Target: LAMA2; (+) strand; PAM type: YTN; PAM sequence: TTA
agctcaaaccccacgccaat

SEQ ID NO: 376295 - DNA, 20 bp, Artificial Sequence
  Description of Artificial Sequence: Synthetic oligonucleotide
  Target: LAMA2; (+) strand; PAM type: YTN; PAM sequence: CTC
aaaccccacgccaatgcatt

SEQ ID NO: 376296 - DNA, 20 bp, Artificial Sequence
  Description of Artificial Sequence: Synthetic oligonucleotide
  Target: LAMA2; (+) strand; PAM type: YTN; PAM sequence: TTT
caactttccctttttcctat

SEQ ID NO: 376297 - DNA, 20 bp, Artificial Sequence
  Description of Artificial Sequence: Synthetic oligonucleotide
  Target: LAMA2; (+) strand; PAM type: YTN; PAM sequence: TTC
aactttccctttttcctatt

SEQ ID NO: 376298 - DNA, 20 bp, Artificial Sequence
  Description of Artificial Sequence: Synthetic oligonucleotide
  Target: LAMA2; (+) strand; PAM type: YTN; PAM sequence: CTT
tccctttttcctattgcaaa

SEQ ID NO: 376299 - DNA, 20 bp, Artificial Sequence
  Description of Artificial Sequence: Synthetic oligonucleotide
  Target: LAMA2; (+) strand; PAM type: YTN; PAM sequence: TTT
ccctttttcctattgcaaaa

SEQ ID NO: 376300 - DNA, 20 bp, Artificial Sequence
  Description of Artificial Sequence: Synthetic oligonucleotide
  Target: LAMA2; (+) strand; PAM type: YTN; PAM sequence: TTC
cctttttcctattgcaaaat

SEQ ID NO: 376301 - DNA, 20 bp, Artificial Sequence
  Description of Artificial Sequence: Synthetic oligonucleotide
  Target: LAMA2; (+) strand; PAM type: YTN; PAM sequence: CTT
tttcctattgcaaaattggt

SEQ ID NO: 376302 - DNA, 20 bp, Artificial Sequence
  Description of Artificial Sequence: Synthetic oligonucleotide
  Target: LAMA2; (+) strand; PAM type: YTN; PAM sequence: TTT
ttcctattgcaaaattggta

SEQ ID NO: 376303 - DNA, 20 bp, Artificial Sequence
  Description of Artificial Sequence: Synthetic oligonucleotide
  Target: LAMA2; (+) strand; PAM type: YTN; PAM sequence: TTT
tcctattgcaaaattggtat

SEQ ID NO: 376304 - DNA, 20 bp, Artificial Sequence
  Description of Artificial Sequence: Synthetic oligonucleotide
  Target: LAMA2; (+) strand; PAM type: YTN; PAM sequence: TTT
cctattgcaaaattggtatc

SEQ ID NO: 376305 - DNA, 20 bp, Artificial Sequence
  Description of Artificial Sequence: Synthetic oligonucleotide
  Target: LAMA2; (+) strand; PAM type: YTN; PAM sequence: TTC
ctattgcaaaattggtatcc

SEQ ID NO: 376306 - DNA, 20 bp, Artificial Sequence
  Description of Artificial Sequence: Synthetic oligonucleotide
  Target: LAMA2; (+) strand; PAM type: YTN; PAM sequence: CTA
ttgcaaaattggtatccgga

SEQ ID NO: 376307 - DNA, 20 bp, Artificial Sequence
  Description of Artificial Sequence: Synthetic oligonucleotide
  Target: LAMA2; (+) strand; PAM type: YTN; PAM sequence: TTG
caaaattggtatccggatca

SEQ ID NO: 376308 - DNA, 20 bp, Artificial Sequence
  Description of Artificial Sequence: Synthetic oligonucleotide
  Target: LAMA2; (+) strand; PAM type: YTN; PAM sequence: TTG
gtatccggatcaagaaaagt

SEQ ID NO: 376309 - DNA, 20 bp, Artificial Sequence
  Description of Artificial Sequence: Synthetic oligonucleotide
  Target: LAMA2; (+) strand; PAM type: YTN; PAM sequence: TTT
tttttttcctggtaccccaa

SEQ ID NO: 376310 - DNA, 20 bp, Artificial Sequence
  Description of Artificial Sequence: Synthetic oligonucleotide
  Target: LAMA2; (+) strand; PAM type: YTN; PAM sequence: TTT
ttttttcctggtaccccaaa

SEQ ID NO: 376311 - DNA, 20 bp, Artificial Sequence
  Description of Artificial Sequence: Synthetic oligonucleotide
  Target: LAMA2; (+) strand; PAM type: YTN; PAM sequence: TTT
tttttcctggtaccccaaaa

SEQ ID NO: 376312 - DNA, 20 bp, Artificial Sequence
  Description of Artificial Sequence: Synthetic oligonucleotide
  Target: LAMA2; (+) strand; PAM type: YTN; PAM sequence: TTT
ttttcctggtaccccaaaaa

SEQ ID NO: 376313 - DNA, 20 bp, Artificial Sequence
  Description of Artificial Sequence: Synthetic oligonucleotide
  Target: LAMA2; (+) strand; PAM type: YTN; PAM sequence: TTT
tttcctggtaccccaaaaac

SEQ ID NO: 376314 - DNA, 20 bp, Artificial Sequence
  Description of Artificial Sequence: Synthetic oligonucleotide
  Target: LAMA2; (+) strand; PAM type: YTN; PAM sequence: TTT
ttcctggtaccccaaaaaca

SEQ ID NO: 376315 - DNA, 20 bp, Artificial Sequence
  Description of Artificial Sequence: Synthetic oligonucleotide
  Target: LAMA2; (+) strand; PAM type: YTN; PAM sequence: TTT
tcctggtaccccaaaaacat

SEQ ID NO: 376316 - DNA, 20 bp, Artificial Sequence
  Description of Artificial Sequence: Synthetic oligonucleotide
  Target: LAMA2; (+) strand; PAM type: YTN; PAM sequence: TTT
cctggtaccccaaaaacatc

SEQ ID NO: 376317 - DNA, 20 bp, Artificial Sequence
  Description of Artificial Sequence: Synthetic oligonucleotide
  Target: LAMA2; (+) strand; PAM type: YTN; PAM sequence: TTC
ctggtaccccaaaaacatct

SEQ ID NO: 376318 - DNA, 20 bp, Artificial Sequence
  Description of Artificial Sequence: Synthetic oligonucleotide
  Target: LAMA2; (+) strand; PAM type: YTN; PAM sequence: CTG
gtaccccaaaaacatctttt

SEQ ID NO: 376319 - DNA, 20 bp, Artificial Sequence
  Description of Artificial Sequence: Synthetic oligonucleotide
  Target: LAMA2; (+) strand; PAM type: YTN; PAM sequence: CTT
ttcatctacttttggctgcc

SEQ ID NO: 376320 - DNA, 20 bp, Artificial Sequence
  Description of Artificial Sequence: Synthetic oligonucleotide
  Target: LAMA2; (+) strand; PAM type: YTN; PAM sequence: TTT
tcatctacttttggctgcct

SEQ ID NO: 376321 - DNA, 20 bp, Artificial Sequence
  Description of Artificial Sequence: Synthetic oligonucleotide
  Target: LAMA2; (+) strand; PAM type: YTN; PAM sequence: TTT
catctacttttggctgcctt

SEQ ID NO: 376322 - DNA, 20 bp, Artificial Sequence
  Description of Artificial Sequence: Synthetic oligonucleotide
  Target: LAMA2; (+) strand; PAM type: YTN; PAM sequence: TTC
atctacttttggctgccttg

SEQ ID NO: 376323 - DNA, 20 bp, Artificial Sequence
  Description of Artificial Sequence: Synthetic oligonucleotide
  Target: LAMA2; (+) strand; PAM type: YTN; PAM sequence: CTA
cttttggctgccttgaaaac

SEQ ID NO: 376324 - DNA, 20 bp, Artificial Sequence
  Description of Artificial Sequence: Synthetic oligonucleotide
  Target: LAMA2; (+) strand; PAM type: YTN; PAM sequence: CTT
ttggctgccttgaaaactat

SEQ ID NO: 376325 - DNA, 20 bp, Artificial Sequence
  Description of Artificial Sequence: Synthetic oligonucleotide
  Target: LAMA2; (+) strand; PAM type: YTN; PAM sequence: TTT
tggctgccttgaaaactatg

SEQ ID NO: 376326 - DNA, 20 bp, Artificial Sequence
  Description of Artificial Sequence: Synthetic oligonucleotide
  Target: LAMA2; (+) strand; PAM type: YTN; PAM sequence: TTT
ggctgccttgaaaactatga

SEQ ID NO: 376327 - DNA, 20 bp, Artificial Sequence
  Description of Artificial Sequence: Synthetic oligonucleotide
  Target: LAMA2; (+) strand; PAM type: YTN; PAM sequence: TTG
gctgccttgaaaactatgat

SEQ ID NO: 376328 - DNA, 20 bp, Artificial Sequence
  Description of Artificial Sequence: Synthetic oligonucleotide
  Target: LAMA2; (+) strand; PAM type: YTN; PAM sequence: CTG
ccttgaaaactatgatgttc

SEQ ID NO: 376329 - DNA, 20 bp, Artificial Sequence
  Description of Artificial Sequence: Synthetic oligonucleotide
  Target: LAMA2; (+) strand; PAM type: YTN; PAM sequence: CTT
gaaaactatgatgttctaag

SEQ ID NO: 376330 - DNA, 20 bp, Artificial Sequence
  Description of Artificial Sequence: Synthetic oligonucleotide
  Target: LAMA2; (+) strand; PAM type: YTN; PAM sequence: TTG
aaaactatgatgttctaaga

SEQ ID NO: 376331 - DNA, 20 bp, Artificial Sequence
  Description of Artificial Sequence: Synthetic oligonucleotide
  Target: LAMA2; (+) strand; PAM type: YTN; PAM sequence: CTA
tgatgttctaagagagaaat

SEQ ID NO: 376332 - DNA, 20 bp, Artificial Sequence
  Description of Artificial Sequence: Synthetic oligonucleotide
  Target: LAMA2; (+) strand; PAM type: YTN; PAM sequence: TTC
taagagagaaataggttggc

SEQ ID NO: 376333 - DNA, 20 bp, Artificial Sequence
  Description of Artificial Sequence: Synthetic oligonucleotide
  Target: LAMA2; (+) strand; PAM type: YTN; PAM sequence: CTA
agagagaaataggttggctc

SEQ ID NO: 376334 - DNA, 20 bp, Artificial Sequence
  Description of Artificial Sequence: Synthetic oligonucleotide
  Target: LAMA2; (+) strand; PAM type: YTN; PAM sequence: TTG
gctctagatatttagttcat

SEQ ID NO: 376335 - DNA, 20 bp, Artificial Sequence
  Description of Artificial Sequence: Synthetic oligonucleotide
  Target: LAMA2; (+) strand; PAM type: YTN; PAM sequence: CTC
tagatatttagttcatcaaa

SEQ ID NO: 376336 - DNA, 20 bp, Artificial Sequence
  Description of Artificial Sequence: Synthetic oligonucleotide
  Target: LAMA2; (+) strand; PAM type: YTN; PAM sequence: CTA
gatatttagttcatcaaaaa

SEQ ID NO: 376337 - DNA, 20 bp, Artificial Sequence
  Description of Artificial Sequence: Synthetic oligonucleotide
  Target: LAMA2; (+) strand; PAM type: YTN; PAM sequence: TTT
agttcatcaaaaaatgcagg

SEQ ID NO: 376338 - DNA, 20 bp, Artificial Sequence
  Description of Artificial Sequence: Synthetic oligonucleotide
  Target: LAMA2; (+) strand; PAM type: YTN; PAM sequence: TTA
gttcatcaaaaaatgcaggc

SEQ ID NO: 376339 - DNA, 20 bp, Artificial Sequence
  Description of Artificial Sequence: Synthetic oligonucleotide
  Target: LAMA2; (+) strand; PAM type: YTN; PAM sequence: TTC
atcaaaaaatgcaggcagag

SEQ ID NO: 376340 - DNA, 20 bp, Artificial Sequence
  Description of Artificial Sequence: Synthetic oligonucleotide
  Target: LAMA2; (+) strand; PAM type: YTN; PAM sequence: TTT
ctaaccatgattccctcaag

SEQ ID NO: 376341 - DNA, 20 bp, Artificial Sequence
  Description of Artificial Sequence: Synthetic oligonucleotide
  Target: LAMA2; (+) strand; PAM type: YTN; PAM sequence: TTC
taaccatgattccctcaagc

SEQ ID NO: 376342 - DNA, 20 bp, Artificial Sequence
  Description of Artificial Sequence: Synthetic oligonucleotide
  Target: LAMA2; (+) strand; PAM type: YTN; PAM sequence: CTA
accatgattccctcaagcag

SEQ ID NO: 376343 - DNA, 20 bp, Artificial Sequence
  Description of Artificial Sequence: Synthetic oligonucleotide
  Target: LAMA2; (+) strand; PAM type: YTN; PAM sequence: TTC
cctcaagcagtattcttata

SEQ ID NO: 376344 - DNA, 20 bp, Artificial Sequence
  Description of Artificial Sequence: Synthetic oligonucleotide
  Target: LAMA2; (+) strand; PAM type: YTN; PAM sequence: CTC
aagcagtattcttatacatc

SEQ ID NO: 376345 - DNA, 20 bp, Artificial Sequence
  Description of Artificial Sequence: Synthetic oligonucleotide
  Target: LAMA2; (+) strand; PAM type: YTN; PAM sequence: TTC
ttatacatccagccacagcc

SEQ ID NO: 376346 - DNA, 20 bp, Artificial Sequence
  Description of Artificial Sequence: Synthetic oligonucleotide
  Target: LAMA2; (+) strand; PAM type: YTN; PAM sequence: CTT
atacatccagccacagcctt

SEQ ID NO: 376347 - DNA, 20 bp, Artificial Sequence
  Description of Artificial Sequence: Synthetic oligonucleotide
  Target: LAMA2; (+) strand; PAM type: YTN; PAM sequence: TTA
tacatccagccacagccttc

SEQ ID NO: 376348 - DNA, 20 bp, Artificial Sequence
  Description of Artificial Sequence: Synthetic oligonucleotide
  Target: LAMA2; (+) strand; PAM type: YTN; PAM sequence: CTT
cacccaaatcatgagctaag

SEQ ID NO: 376349 - DNA, 20 bp, Artificial Sequence
  Description of Artificial Sequence: Synthetic oligonucleotide
  Target: LAMA2; (+) strand; PAM type: YTN; PAM sequence: TTC
acccaaatcatgagctaaga

SEQ ID NO: 376350 - DNA, 20 bp, Artificial Sequence
  Description of Artificial Sequence: Synthetic oligonucleotide
  Target: LAMA2; (+) strand; PAM type: YTN; PAM sequence: CTA
agaaaatatcacttagcatt

SEQ ID NO: 376351 - DNA, 20 bp, Artificial Sequence
  Description of Artificial Sequence: Synthetic oligonucleotide
  Target: LAMA2; (+) strand; PAM type: YTN; PAM sequence: CTT
agcattctgcagatgaaagt

SEQ ID NO: 376352 - DNA, 20 bp, Artificial Sequence
  Description of Artificial Sequence: Synthetic oligonucleotide
  Target: LAMA2; (+) strand; PAM type: YTN; PAM sequence: TTA
gcattctgcagatgaaagta

SEQ ID NO: 376353 - DNA, 20 bp, Artificial Sequence
  Description of Artificial Sequence: Synthetic oligonucleotide
  Target: LAMA2; (+) strand; PAM type: YTN; PAM sequence: TTC
tgcagatgaaagtaaagagt

SEQ ID NO: 376354 - DNA, 20 bp, Artificial Sequence
  Description of Artificial Sequence: Synthetic oligonucleotide
  Target: LAMA2; (+) strand; PAM type: YTN; PAM sequence: CTG
cagatgaaagtaaagagtga

SEQ ID NO: 376355 - DNA, 20 bp, Artificial Sequence
  Description of Artificial Sequence: Synthetic oligonucleotide
  Target: LAMA2; (+) strand; PAM type: YTN; PAM sequence: TTA
gccttgatttatatgctgct

SEQ ID NO: 376356 - DNA, 20 bp, Artificial Sequence
  Description of Artificial Sequence: Synthetic oligonucleotide
  Target: LAMA2; (+) strand; PAM type: YTN; PAM sequence: CTT
gatttatatgctgctaattt

SEQ ID NO: 376357 - DNA, 20 bp, Artificial Sequence
  Description of Artificial Sequence: Synthetic oligonucleotide
  Target: LAMA2; (+) strand; PAM type: YTN; PAM sequence: TTG
atttatatgctgctaatttc

SEQ ID NO: 376358 - DNA, 20 bp, Artificial Sequence
  Description of Artificial Sequence: Synthetic oligonucleotide
  Target: LAMA2; (+) strand; PAM type: YTN; PAM sequence: TTT
atatgctgctaatttcgaac

SEQ ID NO: 376359 - DNA, 20 bp, Artificial Sequence
  Description of Artificial Sequence: Synthetic oligonucleotide
  Target: LAMA2; (+) strand; PAM type: YTN; PAM sequence: TTA
tatgctgctaatttcgaact

SEQ ID NO: 376360 - DNA, 20 bp, Artificial Sequence
  Description of Artificial Sequence: Synthetic oligonucleotide
  Target: LAMA2; (+) strand; PAM type: YTN; PAM sequence: CTG
ctaatttcgaactgaccctt

SEQ ID NO: 376361 - DNA, 20 bp, Artificial Sequence
  Description of Artificial Sequence: Synthetic oligonucleotide
  Target: LAMA2; (+) strand; PAM type: YTN; PAM sequence: CTA
atttcgaactgacccttatt

SEQ ID NO: 376362 - DNA, 20 bp, Artificial Sequence
  Description of Artificial Sequence: Synthetic oligonucleotide
  Target: LAMA2; (+) strand; PAM type: YTN; PAM sequence: TTT
cgaactgacccttattccaa

SEQ ID NO: 376363 - DNA, 20 bp, Artificial Sequence
  Description of Artificial Sequence: Synthetic oligonucleotide
  Target: LAMA2; (+) strand; PAM type: YTN; PAM sequence: TTC
gaactgacccttattccaac

SEQ ID NO: 376364 - DNA, 20 bp, Artificial Sequence
  Description of Artificial Sequence: Synthetic oligonucleotide
  Target: LAMA2; (+) strand; PAM type: YTN; PAM sequence: CTG
acccttattccaacaatcac

SEQ ID NO: 376365 - DNA, 20 bp, Artificial Sequence
  Description of Artificial Sequence: Synthetic oligonucleotide
  Target: LAMA2; (+) strand; PAM type: YTN; PAM sequence: CTT
attccaacaatcactagttt

SEQ ID NO: 376366 - DNA, 20 bp, Artificial Sequence
  Description of Artificial Sequence: Synthetic oligonucleotide
  Target: LAMA2; (+) strand; PAM type: YTN; PAM sequence: TTA
ttccaacaatcactagtttg

SEQ ID NO: 376367 - DNA, 20 bp, Artificial Sequence
  Description of Artificial Sequence: Synthetic oligonucleotide
  Target: LAMA2; (+) strand; PAM type: YTN; PAM sequence: TTC
caacaatcactagtttgaat

SEQ ID NO: 376368 - DNA, 20 bp, Artificial Sequence
  Description of Artificial Sequence: Synthetic oligonucleotide
  Target: LAMA2; (+) strand; PAM type: YTN; PAM sequence: CTA
gtttgaatattacctttgtt

SEQ ID NO: 376369 - DNA, 20 bp, Artificial Sequence
  Description of Artificial Sequence: Synthetic oligonucleotide
  Target: LAMA2; (+) strand; PAM type: YTN; PAM sequence: TTT
gaatattacctttgtttact

SEQ ID NO: 376370 - DNA, 20 bp, Artificial Sequence
  Description of Artificial Sequence: Synthetic oligonucleotide
  Target: LAMA2; (+) strand; PAM type: YTN; PAM sequence: TTG
aatattacctttgtttacta

SEQ ID NO: 376371 - DNA, 20 bp, Artificial Sequence
  Description of Artificial Sequence: Synthetic oligonucleotide
  Target: LAMA2; (+) strand; PAM type: YTN; PAM sequence: TTA
cctttgtttactaatgtcat

SEQ ID NO: 376372 - DNA, 20 bp, Artificial Sequence
  Description of Artificial Sequence: Synthetic oligonucleotide
  Target: LAMA2; (+) strand; PAM type: YTN; PAM sequence: CTT
tgtttactaatgtcatggat

SEQ ID NO: 376373 - DNA, 20 bp, Artificial Sequence
  Description of Artificial Sequence: Synthetic oligonucleotide
  Target: LAMA2; (+) strand; PAM type: YTN; PAM sequence: TTT
gtttactaatgtcatggatt

SEQ ID NO: 376374 - DNA, 20 bp, Artificial Sequence
  Description of Artificial Sequence: Synthetic oligonucleotide
  Target: LAMA2; (+) strand; PAM type: YTN; PAM sequence: TTG
tttactaatgtcatggattc

SEQ ID NO: 376375 - DNA, 20 bp, Artificial Sequence
  Description of Artificial Sequence: Synthetic oligonucleotide
  Target: LAMA2; (+) strand; PAM type: YTN; PAM sequence: TTT
actaatgtcatggattcaac

SEQ ID NO: 376376 - DNA, 20 bp, Artificial Sequence
  Description of Artificial Sequence: Synthetic oligonucleotide
  Target: LAMA2; (+) strand; PAM type: YTN; PAM sequence: TTA
ctaatgtcatggattcaacc

SEQ ID NO: 376377 - DNA, 20 bp, Artificial Sequence
  Description of Artificial Sequence: Synthetic oligonucleotide
  Target: LAMA2; (+) strand; PAM type: YTN; PAM sequence: CTA
atgtcatggattcaacctgg

SEQ ID NO: 376378 - DNA, 20 bp, Artificial Sequence
  Description of Artificial Sequence: Synthetic oligonucleotide
  Target: LAMA2; (+) strand; PAM type: YTN; PAM sequence: TTC
aacctggataatgctcacat

SEQ ID NO: 376379 - DNA, 20 bp, Artificial Sequence
  Description of Artificial Sequence: Synthetic oligonucleotide
  Target: LAMA2; (+) strand; PAM type: YTN; PAM sequence: CTG
gataatgctcacatactctc

SEQ ID NO: 376380 - DNA, 20 bp, Artificial Sequence
  Description of Artificial Sequence: Synthetic oligonucleotide
  Target: LAMA2; (+) strand; PAM type: YTN; PAM sequence: CTC
acatactctcagcaccatgg

SEQ ID NO: 376381 - DNA, 20 bp, Artificial Sequence
  Description of Artificial Sequence: Synthetic oligonucleotide
  Target: LAMA2; (+) strand; PAM type: YTN; PAM sequence: CTC
tcagcaccatggtaagattt

SEQ ID NO: 376382 - DNA, 20 bp, Artificial Sequence
  Description of Artificial Sequence: Synthetic oligonucleotide
  Target: LAMA2; (+) strand; PAM type: YTN; PAM sequence: CTC
agcaccatggtaagatttta

SEQ ID NO: 376383 - DNA, 20 bp, Artificial Sequence
  Description of Artificial Sequence: Synthetic oligonucleotide
  Target: LAMA2; (+) strand; PAM type: YTN; PAM sequence: TTT
taaaacattgttattcactg

SEQ ID NO: 376384 - DNA, 20 bp, Artificial Sequence
  Description of Artificial Sequence: Synthetic oligonucleotide
  Target: LAMA2; (+) strand; PAM type: YTN; PAM sequence: TTT
aaaacattgttattcactgt

SEQ ID NO: 376385 - DNA, 20 bp, Artificial Sequence
  Description of Artificial Sequence: Synthetic oligonucleotide
  Target: LAMA2; (+) strand; PAM type: YTN; PAM sequence: TTA
aaacattgttattcactgtt

SEQ ID NO: 376386 - DNA, 20 bp, Artificial Sequence
  Description of Artificial Sequence: Synthetic oligonucleotide
  Target: LAMA2; (+) strand; PAM type: YTN; PAM sequence: TTG
ttattcactgttgtggcaaa

SEQ ID NO: 376387 - DNA, 20 bp, Artificial Sequence
  Description of Artificial Sequence: Synthetic oligonucleotide
  Target: LAMA2; (+) strand; PAM type: YTN; PAM sequence: TTA
ttcactgttgtggcaaattt

SEQ ID NO: 376388 - DNA, 20 bp, Artificial Sequence
  Description of Artificial Sequence: Synthetic oligonucleotide
  Target: LAMA2; (+) strand; PAM type: YTN; PAM sequence: TTC
actgttgtggcaaatttaag

SEQ ID NO: 376389 - DNA, 20 bp, Artificial Sequence
  Description of Artificial Sequence: Synthetic oligonucleotide
  Target: LAMA2; (+) strand; PAM type: YTN; PAM sequence: CTG
ttgtggcaaatttaagtagg

SEQ ID NO: 376390 - DNA, 20 bp, Artificial Sequence
  Description of Artificial Sequence: Synthetic oligonucleotide
  Target: LAMA2; (+) strand; PAM type: YTN; PAM sequence: TTG
tggcaaatttaagtaggaag

SEQ ID NO: 376391 - DNA, 20 bp, Artificial Sequence
  Description of Artificial Sequence: Synthetic oligonucleotide
  Target: LAMA2; (+) strand; PAM type: YTN; PAM sequence: TTT
aagtaggaagcagtaggaat

SEQ ID NO: 376392 - DNA, 20 bp, Artificial Sequence
  Description of Artificial Sequence: Synthetic oligonucleotide
  Target: LAMA2; (+) strand; PAM type: YTN; PAM sequence: TTA
agtaggaagcagtaggaata

SEQ ID NO: 376393 - DNA, 20 bp, Artificial Sequence
  Description of Artificial Sequence: Synthetic oligonucleotide
  Target: LAMA2; (+) strand; PAM type: YTN; PAM sequence: TTT
aaaactatttaaagaaccaa

SEQ ID NO: 376394 - DNA, 20 bp, Artificial Sequence
  Description of Artificial Sequence: Synthetic oligonucleotide
  Target: LAMA2; (+) strand; PAM type: YTN; PAM sequence: TTA
aaactatttaaagaaccaat

SEQ ID NO: 376395 - DNA, 20 bp, Artificial Sequence
  Description of Artificial Sequence: Synthetic oligonucleotide
  Target: LAMA2; (+) strand; PAM type: YTN; PAM sequence: CTA
tttaaagaaccaatatcttt

SEQ ID NO: 376396 - DNA, 20 bp, Artificial Sequence
  Description of Artificial Sequence: Synthetic oligonucleotide
  Target: LAMA2; (+) strand; PAM type: YTN; PAM sequence: TTT
aaagaaccaatatctttcag

SEQ ID NO: 376397 - DNA, 20 bp, Artificial Sequence
  Description of Artificial Sequence: Synthetic oligonucleotide
  Target: LAMA2; (+) strand; PAM type: YTN; PAM sequence: TTA
aagaaccaatatctttcaga

SEQ ID NO: 376398 - DNA, 20 bp, Artificial Sequence
  Description of Artificial Sequence: Synthetic oligonucleotide
  Target: LAMA2; (+) strand; PAM type: YTN; PAM sequence: CTT
tcagacattctccagcactt

SEQ ID NO: 376399 - DNA, 20 bp, Artificial Sequence
  Description of Artificial Sequence: Synthetic oligonucleotide
  Target: LAMA2; (+) strand; PAM type: YTN; PAM sequence: TTT
cagacattctccagcacttt

SEQ ID NO: 376400 - DNA, 20 bp, Artificial Sequence
  Description of Artificial Sequence: Synthetic oligonucleotide
  Target: LAMA2; (+) strand; PAM type: YTN; PAM sequence: TTC
agacattctccagcacttta

SEQ ID NO: 376401 - DNA, 20 bp, Artificial Sequence
  Description of Artificial Sequence: Synthetic oligonucleotide
  Target: LAMA2; (+) strand; PAM type: YTN; PAM sequence: TTC
tccagcactttagatatgtg

SEQ ID NO: 376402 - DNA, 20 bp, Artificial Sequence
  Description of Artificial Sequence: Synthetic oligonucleotide
  Target: LAMA2; (+) strand; PAM type: YTN; PAM sequence: CTC
cagcactttagatatgtgga

SEQ ID NO: 376403 - DNA, 20 bp, Artificial Sequence
  Description of Artificial Sequence: Synthetic oligonucleotide
  Target: LAMA2; (+) strand; PAM type: YTN; PAM sequence: CTT
tagatatgtggattttacca

SEQ ID NO: 376404 - DNA, 20 bp, Artificial Sequence
  Description of Artificial Sequence: Synthetic oligonucleotide
  Target: LAMA2; (+) strand; PAM type: YTN; PAM sequence: TTT
agatatgtggattttaccat

SEQ ID NO: 376405 - DNA, 20 bp, Artificial Sequence
  Description of Artificial Sequence: Synthetic oligonucleotide
  Target: LAMA2; (+) strand; PAM type: YTN; PAM sequence: TTA
gatatgtggattttaccata

SEQ ID NO: 376406 - DNA, 20 bp, Artificial Sequence
  Description of Artificial Sequence: Synthetic oligonucleotide
  Target: LAMA2; (+) strand; PAM type: YTN; PAM sequence: TTT
taccataaattaagccatga

SEQ ID NO: 376407 - DNA, 20 bp, Artificial Sequence
  Description of Artificial Sequence: Synthetic oligonucleotide
  Target: LAMA2; (+) strand; PAM type: YTN; PAM sequence: TTT
accataaattaagccatgat

SEQ ID NO: 376408 - DNA, 20 bp, Artificial Sequence
  Description of Artificial Sequence: Synthetic oligonucleotide
  Target: LAMA2; (+) strand; PAM type: YTN; PAM sequence: TTA
ccataaattaagccatgata

SEQ ID NO: 376409 - DNA, 20 bp, Artificial Sequence
  Description of Artificial Sequence: Synthetic oligonucleotide
  Target: LAMA2; (+) strand; PAM type: YTN; PAM sequence: TTA
agccatgataagttattcta

SEQ ID NO: 376410 - DNA, 20 bp, Artificial Sequence
  Description of Artificial Sequence: Synthetic oligonucleotide
  Target: LAMA2; (+) strand; PAM type: YTN; PAM sequence: TTA
ttctaattgataagttattc

SEQ ID NO: 376411 - DNA, 20 bp, Artificial Sequence
  Description of Artificial Sequence: Synthetic oligonucleotide
  Target: LAMA2; (+) strand; PAM type: YTN; PAM sequence: TTC
taattgataagttattctaa

SEQ ID NO: 376412 - DNA, 20 bp, Artificial Sequence
  Description of Artificial Sequence: Synthetic oligonucleotide
  Target: LAMA2; (+) strand; PAM type: YTN; PAM sequence: CTA
attgataagttattctaatt

SEQ ID NO: 376413 - DNA, 20 bp, Artificial Sequence
  Description of Artificial Sequence: Synthetic oligonucleotide
  Target: LAMA2; (+) strand; PAM type: YTN; PAM sequence: TTG
ataagttattctaattgata

SEQ ID NO: 376414 - DNA, 20 bp, Artificial Sequence
  Description of Artificial Sequence: Synthetic oligonucleotide
  Target: LAMA2; (+) strand; PAM type: YTN; PAM sequence: TTA
ttctaattgataagttattc

SEQ ID NO: 376415 - DNA, 20 bp, Artificial Sequence
  Description of Artificial Sequence: Synthetic oligonucleotide
  Target: LAMA2; (+) strand; PAM type: YTN; PAM sequence: TTC
taattgataagttattctaa

SEQ ID NO: 376416 - DNA, 20 bp, Artificial Sequence
  Description of Artificial Sequence: Synthetic oligonucleotide
  Target: LAMA2; (+) strand; PAM type: YTN; PAM sequence: CTA
attgataagttattctaaat

SEQ ID NO: 376417 - DNA, 20 bp, Artificial Sequence
  Description of Artificial Sequence: Synthetic oligonucleotide
  Target: LAMA2; (+) strand; PAM type: YTN; PAM sequence: TTG
ataagttattctaaatgata

SEQ ID NO: 376418 - DNA, 20 bp, Artificial Sequence
  Description of Artificial Sequence: Synthetic oligonucleotide
  Target: LAMA2; (+) strand; PAM type: YTN; PAM sequence: TTA
ttctaaatgataagtttata

SEQ ID NO: 376419 - DNA, 20 bp, Artificial Sequence
  Description of Artificial Sequence: Synthetic oligonucleotide
  Target: LAMA2; (+) strand; PAM type: YTN; PAM sequence: TTC
taaatgataagtttataatt

SEQ ID NO: 376420 - DNA, 20 bp, Artificial Sequence
  Description of Artificial Sequence: Synthetic oligonucleotide
  Target: LAMA2; (+) strand; PAM type: YTN; PAM sequence: CTA
aatgataagtttataattgt

SEQ ID NO: 376421 - DNA, 20 bp, Artificial Sequence
  Description of Artificial Sequence: Synthetic oligonucleotide
  Target: LAMA2; (+) strand; PAM type: YTN; PAM sequence: TTT
ataattgtagatcctctaag

SEQ ID NO: 376422 - DNA, 20 bp, Artificial Sequence
  Description of Artificial Sequence: Synthetic oligonucleotide
  Target: LAMA2; (+) strand; PAM type: YTN; PAM sequence: TTA
taattgtagatcctctaaga

SEQ ID NO: 376423 - DNA, 20 bp, Artificial Sequence
  Description of Artificial Sequence: Synthetic oligonucleotide
  Target: LAMA2; (+) strand; PAM type: YTN; PAM sequence: TTG
tagatcctctaagaatctgt

SEQ ID NO: 376424 - DNA, 20 bp, Artificial Sequence
  Description of Artificial Sequence: Synthetic oligonucleotide
  Target: LAMA2; (+) strand; PAM type: YTN; PAM sequence: CTC
taagaatctgtatatctcta

SEQ ID NO: 376425 - DNA, 20 bp, Artificial Sequence
  Description of Artificial Sequence: Synthetic oligonucleotide
  Target: LAMA2; (+) strand; PAM type: YTN; PAM sequence: CTA
agaatctgtatatctctaag

SEQ ID NO: 376426 - DNA, 20 bp, Artificial Sequence
  Description of Artificial Sequence: Synthetic oligonucleotide
  Target: LAMA2; (+) strand; PAM type: YTN; PAM sequence: CTG
tatatctctaagccaatatc

SEQ ID NO: 376427 - DNA, 20 bp, Artificial Sequence
  Description of Artificial Sequence: Synthetic oligonucleotide
  Target: LAMA2; (+) strand; PAM type: YTN; PAM sequence: CTC
taagccaatatctgtataac

SEQ ID NO: 376428 - DNA, 20 bp, Artificial Sequence
  Description of Artificial Sequence: Synthetic oligonucleotide
  Target: LAMA2; (+) strand; PAM type: YTN; PAM sequence: CTA
agccaatatctgtataactt

SEQ ID NO: 376429 - DNA, 20 bp, Artificial Sequence
  Description of Artificial Sequence: Synthetic oligonucleotide
  Target: LAMA2; (+) strand; PAM type: YTN; PAM sequence: CTG
tataacttaaaaattataaa

SEQ ID NO: 376430 - DNA, 20 bp, Artificial Sequence
  Description of Artificial Sequence: Synthetic oligonucleotide
  Target: LAMA2; (+) strand; PAM type: YTN; PAM sequence: CTT
aaaaattataaagctgtatt

SEQ ID NO: 376431 - DNA, 20 bp, Artificial Sequence
  Description of Artificial Sequence: Synthetic oligonucleotide
  Target: LAMA2; (+) strand; PAM type: YTN; PAM sequence: TTA
aaaattataaagctgtattt

SEQ ID NO: 376432 - DNA, 20 bp, Artificial Sequence
  Description of Artificial Sequence: Synthetic oligonucleotide
  Target: LAMA2; (+) strand; PAM type: YTN; PAM sequence: TTA
taaagctgtattttaaaata

SEQ ID NO: 376433 - DNA, 20 bp, Artificial Sequence
  Description of Artificial Sequence: Synthetic oligonucleotide
  Target: LAMA2; (+) strand; PAM type: YTN; PAM sequence: CTG
tattttaaaatatactctgt

SEQ ID NO: 376434 - DNA, 20 bp, Artificial Sequence
  Description of Artificial Sequence: Synthetic oligonucleotide
  Target: LAMA2; (+) strand; PAM type: YTN; PAM sequence: TTT
taaaatatactctgttcttt

SEQ ID NO: 376435 - DNA, 20 bp, Artificial Sequence
  Description of Artificial Sequence: Synthetic oligonucleotide
  Target: LAMA2; (+) strand; PAM type: YTN; PAM sequence: TTT
aaaatatactctgttcttta

SEQ ID NO: 376436 - DNA, 20 bp, Artificial Sequence
  Description of Artificial Sequence: Synthetic oligonucleotide
  Target: LAMA2; (+) strand; PAM type: YTN; PAM sequence: TTA
aaatatactctgttctttaa

SEQ ID NO: 376437 - DNA, 20 bp, Artificial Sequence
  Description of Artificial Sequence: Synthetic oligonucleotide
  Target: LAMA2; (+) strand; PAM type: YTN; PAM sequence: CTC
tgttctttaaatccaaagct

SEQ ID NO: 376438 - DNA, 20 bp, Artificial Sequence
  Description of Artificial Sequence: Synthetic oligonucleotide
  Target: LAMA2; (+) strand; PAM type: YTN; PAM sequence: CTG
ttctttaaatccaaagctca

SEQ ID NO: 376439 - DNA, 20 bp, Artificial Sequence
  Description of Artificial Sequence: Synthetic oligonucleotide
  Target: LAMA2; (+) strand; PAM type: YTN; PAM sequence: TTC
tttaaatccaaagctcactg

SEQ ID NO: 376440 - DNA, 20 bp, Artificial Sequence
  Description of Artificial Sequence: Synthetic oligonucleotide
  Target: LAMA2; (+) strand; PAM type: YTN; PAM sequence: CTT
taaatccaaagctcactgac

SEQ ID NO: 376441 - DNA, 20 bp, Artificial Sequence
  Description of Artificial Sequence: Synthetic oligonucleotide
  Target: LAMA2; (+) strand; PAM type: YTN; PAM sequence: TTT
aaatccaaagctcactgaca

SEQ ID NO: 376442 - DNA, 20 bp, Artificial Sequence
  Description of Artificial Sequence: Synthetic oligonucleotide
  Target: LAMA2; (+) strand; PAM type: YTN; PAM sequence: TTA
aatccaaagctcactgacat

SEQ ID NO: 376443 - DNA, 20 bp, Artificial Sequence
  Description of Artificial Sequence: Synthetic oligonucleotide
  Target: LAMA2; (+) strand; PAM type: YTN; PAM sequence: CTC
actgacatttttacttaata

SEQ ID NO: 376444 - DNA, 20 bp, Artificial Sequence
  Description of Artificial Sequence: Synthetic oligonucleotide
  Target: LAMA2; (+) strand; PAM type: YTN; PAM sequence: CTG
acatttttacttaatatgaa

SEQ ID NO: 376445 - DNA, 20 bp, Artificial Sequence
  Description of Artificial Sequence: Synthetic oligonucleotide
  Target: LAMA2; (+) strand; PAM type: YTN; PAM sequence: TTT
ttacttaatatgaattaatg

SEQ ID NO: 376446 - DNA, 20 bp, Artificial Sequence
  Description of Artificial Sequence: Synthetic oligonucleotide
  Target: LAMA2; (+) strand; PAM type: YTN; PAM sequence: TTT
tacttaatatgaattaatga

SEQ ID NO: 376447 - DNA, 20 bp, Artificial Sequence
  Description of Artificial Sequence: Synthetic oligonucleotide
  Target: LAMA2; (+) strand; PAM type: YTN; PAM sequence: TTT
acttaatatgaattaatgag

SEQ ID NO: 376448 - DNA, 20 bp, Artificial Sequence
  Description of Artificial Sequence: Synthetic oligonucleotide
  Target: LAMA2; (+) strand; PAM type: YTN; PAM sequence: TTA
cttaatatgaattaatgagg

SEQ ID NO: 376449 - DNA, 20 bp, Artificial Sequence
  Description of Artificial Sequence: Synthetic oligonucleotide
  Target: LAMA2; (+) strand; PAM type: YTN; PAM sequence: CTT
aatatgaattaatgaggtag

SEQ ID NO: 376450 - DNA, 20 bp, Artificial Sequence
  Description of Artificial Sequence: Synthetic oligonucleotide
  Target: LAMA2; (+) strand; PAM type: YTN; PAM sequence: TTA
atatgaattaatgaggtagt

SEQ ID NO: 376451 - DNA, 20 bp, Artificial Sequence
  Description of Artificial Sequence: Synthetic oligonucleotide
  Target: LAMA2; (+) strand; PAM type: YTN; PAM sequence: TTA
atgaggtagtattatacatt

SEQ ID NO: 376452 - DNA, 20 bp, Artificial Sequence
  Description of Artificial Sequence: Synthetic oligonucleotide
  Target: LAMA2; (+) strand; PAM type: YTN; PAM sequence: TTA
tacatttaaatacatatagt

SEQ ID NO: 376453 - DNA, 20 bp, Artificial Sequence
  Description of Artificial Sequence: Synthetic oligonucleotide
  Target: LAMA2; (+) strand; PAM type: YTN; PAM sequence: TTT
aaatacatatagtaacaaat

SEQ ID NO: 376454 - DNA, 20 bp, Artificial Sequence
  Description of Artificial Sequence: Synthetic oligonucleotide
  Target: LAMA2; (+) strand; PAM type: YTN; PAM sequence: TTA
aatacatatagtaacaaatt

SEQ ID NO: 376455 - DNA, 20 bp, Artificial Sequence
  Description of Artificial Sequence: Synthetic oligonucleotide
  Target: LAMA2; (+) strand; PAM type: YTN; PAM sequence: TTA
taaatgagaccaagaatatt

SEQ ID NO: 376456 - DNA, 20 bp, Artificial Sequence
  Description of Artificial Sequence: Synthetic oligonucleotide
  Target: LAMA2; (+) strand; PAM type: YTN; PAM sequence: TTA
ttttaaattatagaaagatg

SEQ ID NO: 376457 - DNA, 20 bp, Artificial Sequence
  Description of Artificial Sequence: Synthetic oligonucleotide
  Target: LAMA2; (+) strand; PAM type: YTN; PAM sequence: TTT
taaattatagaaagatgaca

SEQ ID NO: 376458 - DNA, 20 bp, Artificial Sequence
  Description of Artificial Sequence: Synthetic oligonucleotide
  Target: LAMA2; (+) strand; PAM type: YTN; PAM sequence: TTT
aaattatagaaagatgacag

SEQ ID NO: 376459 - DNA, 20 bp, Artificial Sequence
  Description of Artificial Sequence: Synthetic oligonucleotide
  Target: LAMA2; (+) strand; PAM type: YTN; PAM sequence: TTA
aattatagaaagatgacagc

SEQ ID NO: 376460 - DNA, 20 bp, Artificial Sequence
  Description of Artificial Sequence: Synthetic oligonucleotide
  Target: LAMA2; (+) strand; PAM type: YTN; PAM sequence: TTA
tagaaagatgacagcattta

SEQ ID NO: 376461 - DNA, 20 bp, Artificial Sequence
  Description of Artificial Sequence: Synthetic oligonucleotide
  Target: LAMA2; (+) strand; PAM type: YTN; PAM sequence: TTT
aataaatgcagacctactag

SEQ ID NO: 376462 - DNA, 20 bp, Artificial Sequence
  Description of Artificial Sequence: Synthetic oligonucleotide
  Target: LAMA2; (+) strand; PAM type: YTN; PAM sequence: TTA
ataaatgcagacctactagc

SEQ ID NO: 376463 - DNA, 20 bp, Artificial Sequence
  Description of Artificial Sequence: Synthetic oligonucleotide
  Target: LAMA2; (+) strand; PAM type: YTN; PAM sequence: CTA
ctagcattctggcccaaaga

SEQ ID NO: 376464 - DNA, 20 bp, Artificial Sequence
  Description of Artificial Sequence: Synthetic oligonucleotide
  Target: LAMA2; (+) strand; PAM type: YTN; PAM sequence: CTA
gcattctggcccaaagaaac

SEQ ID NO: 376465 - DNA, 20 bp, Artificial Sequence
  Description of Artificial Sequence: Synthetic oligonucleotide
  Target: LAMA2; (+) strand; PAM type: YTN; PAM sequence: TTC
tggcccaaagaaacaccata

SEQ ID NO: 376466 - DNA, 20 bp, Artificial Sequence
  Description of Artificial Sequence: Synthetic oligonucleotide
  Target: LAMA2; (+) strand; PAM type: YTN; PAM sequence: CTG
gcccaaagaaacaccataga

SEQ ID NO: 376467 - DNA, 20 bp, Artificial Sequence
  Description of Artificial Sequence: Synthetic oligonucleotide
  Target: LAMA2; (+) strand; PAM type: YTN; PAM sequence: CTG
aggacatgacttgcacaaaa

SEQ ID NO: 376468 - DNA, 20 bp, Artificial Sequence
  Description of Artificial Sequence: Synthetic oligonucleotide
  Target: LAMA2; (+) strand; PAM type: YTN; PAM sequence: CTT
gcacaaaatagcctggattt

SEQ ID NO: 376469 - DNA, 20 bp, Artificial Sequence
  Description of Artificial Sequence: Synthetic oligonucleotide
  Target: LAMA2; (+) strand; PAM type: YTN; PAM sequence: TTG
cacaaaatagcctggatttg

SEQ ID NO: 376470 - DNA, 20 bp, Artificial Sequence
  Description of Artificial Sequence: Synthetic oligonucleotide
  Target: LAMA2; (+) strand; PAM type: YTN; PAM sequence: CTG
gatttgtctaaatggctcct

SEQ ID NO: 376471 - DNA, 20 bp, Artificial Sequence
  Description of Artificial Sequence: Synthetic oligonucleotide
  Target: LAMA2; (+) strand; PAM type: YTN; PAM sequence: TTT
gtctaaatggctccttcagt

SEQ ID NO: 376472 - DNA, 20 bp, Artificial Sequence
  Description of Artificial Sequence: Synthetic oligonucleotide
  Target: LAMA2; (+) strand; PAM type: YTN; PAM sequence: TTG
tctaaatggctccttcagta

SEQ ID NO: 376473 - DNA, 20 bp, Artificial Sequence
  Description of Artificial Sequence: Synthetic oligonucleotide
  Target: LAMA2; (+) strand; PAM type: YTN; PAM sequence: CTA
aatggctccttcagtaacta

SEQ ID NO: 376474 - DNA, 20 bp, Artificial Sequence
  Description of Artificial Sequence: Synthetic oligonucleotide
  Target: LAMA2; (+) strand; PAM type: YTN; PAM sequence: CTC
cttcagtaactagttctggg

SEQ ID NO: 376475 - DNA, 20 bp, Artificial Sequence
  Description of Artificial Sequence: Synthetic oligonucleotide
  Target: LAMA2; (+) strand; PAM type: YTN; PAM sequence: CTT
cagtaactagttctgggacc

SEQ ID NO: 376476 - DNA, 20 bp, Artificial Sequence
  Description of Artificial Sequence: Synthetic oligonucleotide
  Target: LAMA2; (+) strand; PAM type: YTN; PAM sequence: TTC
agtaactagttctgggacct

SEQ ID NO: 376477 - DNA, 20 bp, Artificial Sequence
  Description of Artificial Sequence: Synthetic oligonucleotide
  Target: LAMA2; (+) strand; PAM type: YTN; PAM sequence: CTA
gttctgggaccttgactgag

SEQ ID NO: 376478 - DNA, 20 bp, Artificial Sequence
  Description of Artificial Sequence: Synthetic oligonucleotide
  Target: LAMA2; (+) strand; PAM type: YTN; PAM sequence: TTC
tgggaccttgactgagtaat

SEQ ID NO: 376479 - DNA, 20 bp, Artificial Sequence
  Description of Artificial Sequence: Synthetic oligonucleotide
  Target: LAMA2; (+) strand; PAM type: YTN; PAM sequence: CTG
ggaccttgactgagtaattt

SEQ ID NO: 376480 - DNA, 20 bp, Artificial Sequence
  Description of Artificial Sequence: Synthetic oligonucleotide
  Target: LAMA2; (+) strand; PAM type: YTN; PAM sequence: CTT
gactgagtaattttgtttca

SEQ ID NO: 376481 - DNA, 20 bp, Artificial Sequence
  Description of Artificial Sequence: Synthetic oligonucleotide
  Target: LAMA2; (+) strand; PAM type: YTN; PAM sequence: TTG
actgagtaattttgtttcat

SEQ ID NO: 376482 - DNA, 20 bp, Artificial Sequence
  Description of Artificial Sequence: Synthetic oligonucleotide
  Target: LAMA2; (+) strand; PAM type: YTN; PAM sequence: CTG
agtaattttgtttcattttc

SEQ ID NO: 376483 - DNA, 20 bp, Artificial Sequence
  Description of Artificial Sequence: Synthetic oligonucleotide
  Target: LAMA2; (+) strand; PAM type: YTN; PAM sequence: TTT
tgtttcattttccatctgca

SEQ ID NO: 376484 - DNA, 20 bp, Artificial Sequence
  Description of Artificial Sequence: Synthetic oligonucleotide
  Target: LAMA2; (+) strand; PAM type: YTN; PAM sequence: TTT
gtttcattttccatctgcaa

SEQ ID NO: 376485 - DNA, 20 bp, Artificial Sequence
  Description of Artificial Sequence: Synthetic oligonucleotide
  Target: LAMA2; (+) strand; PAM type: YTN; PAM sequence: TTG
tttcattttccatctgcaaa

SEQ ID NO: 376486 - DNA, 20 bp, Artificial Sequence
  Description of Artificial Sequence: Synthetic oligonucleotide
  Target: LAMA2; (+) strand; PAM type: YTN; PAM sequence: TTT
cattttccatctgcaaaatt

SEQ ID NO: 376487 - DNA, 20 bp, Artificial Sequence
  Description of Artificial Sequence: Synthetic oligonucleotide
  Target: LAMA2; (+) strand; PAM type: YTN; PAM sequence: TTC
attttccatctgcaaaattc

SEQ ID NO: 376488 - DNA, 20 bp, Artificial Sequence
  Description of Artificial Sequence: Synthetic oligonucleotide
  Target: LAMA2; (+) strand; PAM type: YTN; PAM sequence: TTT
tccatctgcaaaattcatct

SEQ ID NO: 376489 - DNA, 20 bp, Artificial Sequence
  Description of Artificial Sequence: Synthetic oligonucleotide
  Target: LAMA2; (+) strand; PAM type: YTN; PAM sequence: TTT
ccatctgcaaaattcatcta

SEQ ID NO: 376490 - DNA, 20 bp, Artificial Sequence
  Description of Artificial Sequence: Synthetic oligonucleotide
  Target: LAMA2; (+) strand; PAM type: YTN; PAM sequence: TTC
catctgcaaaattcatctat

SEQ ID NO: 376491 - DNA, 20 bp, Artificial Sequence
  Description of Artificial Sequence: Synthetic oligonucleotide
  Target: LAMA2; (+) strand; PAM type: YTN; PAM sequence: CTG
caaaattcatctattaaatt

SEQ ID NO: 376492 - DNA, 20 bp, Artificial Sequence
  Description of Artificial Sequence: Synthetic oligonucleotide
  Target: LAMA2; (+) strand; PAM type: YTN; PAM sequence: TTC
atctattaaattaagataat

SEQ ID NO: 376493 - DNA, 20 bp, Artificial Sequence
  Description of Artificial Sequence: Synthetic oligonucleotide
  Target: LAMA2; (+) strand; PAM type: YTN; PAM sequence: CTA
ttaaattaagataataatag

SEQ ID NO: 376494 - DNA, 20 bp, Artificial Sequence
  Description of Artificial Sequence: Synthetic oligonucleotide
  Target: LAMA2; (+) strand; PAM type: YTN; PAM sequence: TTA
aattaagataataatagtat

SEQ ID NO: 376495 - DNA, 20 bp, Artificial Sequence
  Description of Artificial Sequence: Synthetic oligonucleotide
  Target: LAMA2; (+) strand; PAM type: YTN; PAM sequence: TTA
agataataatagtatctacc

SEQ ID NO: 376496 - DNA, 20 bp, Artificial Sequence
  Description of Artificial Sequence: Synthetic oligonucleotide
  Target: LAMA2; (+) strand; PAM type: YTN; PAM sequence: CTA
ccacacatggtttttgttac

SEQ ID NO: 376497 - DNA, 20 bp, Artificial Sequence
  Description of Artificial Sequence: Synthetic oligonucleotide
  Target: LAMA2; (+) strand; PAM type: YTN; PAM sequence: TTT
ttgttacaattagttgagtt

SEQ ID NO: 376498 - DNA, 20 bp, Artificial Sequence
  Description of Artificial Sequence: Synthetic oligonucleotide
  Target: LAMA2; (+) strand; PAM type: YTN; PAM sequence: TTT
tgttacaattagttgagtta

SEQ ID NO: 376499 - DNA, 20 bp, Artificial Sequence
  Description of Artificial Sequence: Synthetic oligonucleotide
  Target: LAMA2; (+) strand; PAM type: YTN; PAM sequence: TTT
gttacaattagttgagttag

SEQ ID NO: 376500 - DNA, 20 bp, Artificial Sequence
  Description of Artificial Sequence: Synthetic oligonucleotide
  Target: LAMA2; (+) strand; PAM type: YTN; PAM sequence: TTG
ttacaattagttgagttagc

SEQ ID NO: 376501 - DNA, 20 bp, Artificial Sequence
  Description of Artificial Sequence: Synthetic oligonucleotide
  Target: LAMA2; (+) strand; PAM type: YTN; PAM sequence: TTA
caattagttgagttagcggc

SEQ ID NO: 376502 - DNA, 20 bp, Artificial Sequence
  Description of Artificial Sequence: Synthetic oligonucleotide
  Target: LAMA2; (+) strand; PAM type: YTN; PAM sequence: TTA
gttgagttagcggctataaa

SEQ ID NO: 376503 - DNA, 20 bp, Artificial Sequence
  Description of Artificial Sequence: Synthetic oligonucleotide
  Target: LAMA2; (+) strand; PAM type: YTN; PAM sequence: TTG
agttagcggctataaaatat

SEQ ID NO: 376504 - DNA, 20 bp, Artificial Sequence
  Description of Artificial Sequence: Synthetic oligonucleotide
  Target: LAMA2; (+) strand; PAM type: YTN; PAM sequence: TTA
gcggctataaaatatttaga

SEQ ID NO: 376505 - DNA, 20 bp, Artificial Sequence
  Description of Artificial Sequence: Synthetic oligonucleotide
  Target: LAMA2; (+) strand; PAM type: YTN; PAM sequence: CTA
taaaatatttagagtaatgc

SEQ ID NO: 376506 - DNA, 20 bp, Artificial Sequence
  Description of Artificial Sequence: Synthetic oligonucleotide
  Target: LAMA2; (+) strand; PAM type: YTN; PAM sequence: TTT
agagtaatgcctagcatgta

SEQ ID NO: 376507 - DNA, 20 bp, Artificial Sequence
  Description of Artificial Sequence: Synthetic oligonucleotide
  Target: LAMA2; (+) strand; PAM type: YTN; PAM sequence: TTA
gagtaatgcctagcatgtaa

SEQ ID NO: 376508 - DNA, 20 bp, Artificial Sequence
  Description of Artificial Sequence: Synthetic oligonucleotide
  Target: LAMA2; (+) strand; PAM type: YTN; PAM sequence: CTA
gcatgtaagtgctatggaag

SEQ ID NO: 376509 - DNA, 20 bp, Artificial Sequence
  Description of Artificial Sequence: Synthetic oligonucleotide
  Target: LAMA2; (+) strand; PAM type: YTN; PAM sequence: CTA
tggaagcatttatcattatt

SEQ ID NO: 376510 - DNA, 20 bp, Artificial Sequence
  Description of Artificial Sequence: Synthetic oligonucleotide
  Target: LAMA2; (+) strand; PAM type: YTN; PAM sequence: TTT
atcattattattattatctt

SEQ ID NO: 376511 - DNA, 20 bp, Artificial Sequence
  Description of Artificial Sequence: Synthetic oligonucleotide
  Target: LAMA2; (+) strand; PAM type: YTN; PAM sequence: TTA
tcattattattattatcttt

SEQ ID NO: 376512 - DNA, 20 bp, Artificial Sequence
  Description of Artificial Sequence: Synthetic oligonucleotide
  Target: LAMA2; (+) strand; PAM type: YTN; PAM sequence: TTA
ttattattatctttattagt

SEQ ID NO: 376513 - DNA, 20 bp, Artificial Sequence
  Description of Artificial Sequence: Synthetic oligonucleotide
  Target: LAMA2; (+) strand; PAM type: YTN; PAM sequence: TTA
ttattatctttattagtttt

SEQ ID NO: 376514 - DNA, 20 bp, Artificial Sequence
  Description of Artificial Sequence: Synthetic oligonucleotide
  Target: LAMA2; (+) strand; PAM type: YTN; PAM sequence: TTA
ttatctttattagttttatt

SEQ ID NO: 376515 - DNA, 20 bp, Artificial Sequence
  Description of Artificial Sequence: Synthetic oligonucleotide
  Target: LAMA2; (+) strand; PAM type: YTN; PAM sequence: TTA
tctttattagttttattaat

SEQ ID NO: 376516 - DNA, 20 bp, Artificial Sequence
  Description of Artificial Sequence: Synthetic oligonucleotide
  Target: LAMA2; (+) strand; PAM type: YTN; PAM sequence: CTT
tattagttttattaattgtg

SEQ ID NO: 376517 - DNA, 20 bp, Artificial Sequence
  Description of Artificial Sequence: Synthetic oligonucleotide
  Target: LAMA2; (+) strand; PAM type: YTN; PAM sequence: TTT
attagttttattaattgtgt

SEQ ID NO: 376518 - DNA, 20 bp, Artificial Sequence
  Description of Artificial Sequence: Synthetic oligonucleotide
  Target: LAMA2; (+) strand; PAM type: YTN; PAM sequence: TTA
ttagttttattaattgtgtt

SEQ ID NO: 376519 - DNA, 20 bp, Artificial Sequence
  Description of Artificial Sequence: Synthetic oligonucleotide
  Target: LAMA2; (+) strand; PAM type: YTN; PAM sequence: TTA
gttttattaattgtgttata

SEQ ID NO: 376520 - DNA, 20 bp, Artificial Sequence
  Description of Artificial Sequence: Synthetic oligonucleotide
  Target: LAMA2; (+) strand; PAM type: YTN; PAM sequence: TTT
tattaattgtgttatacatt

SEQ ID NO: 376521 - DNA, 20 bp, Artificial Sequence
  Description of Artificial Sequence: Synthetic oligonucleotide
  Target: LAMA2; (+) strand; PAM type: YTN; PAM sequence: TTT
attaattgtgttatacattg

SEQ ID NO: 376522 - DNA, 20 bp, Artificial Sequence
  Description of Artificial Sequence: Synthetic oligonucleotide
  Target: LAMA2; (+) strand; PAM type: YTN; PAM sequence: TTA
ttaattgtgttatacattgt

SEQ ID NO: 376523 - DNA, 20 bp, Artificial Sequence
  Description of Artificial Sequence: Synthetic oligonucleotide
  Target: LAMA2; (+) strand; PAM type: YTN; PAM sequence: TTA
attgtgttatacattgtgct

SEQ ID NO: 376524 - DNA, 20 bp, Artificial Sequence
  Description of Artificial Sequence: Synthetic oligonucleotide
  Target: LAMA2; (+) strand; PAM type: YTN; PAM sequence: TTG
tgttatacattgtgctttgg

SEQ ID NO: 376525 - DNA, 20 bp, Artificial Sequence
  Description of Artificial Sequence: Synthetic oligonucleotide
  Target: LAMA2; (+) strand; PAM type: YTN; PAM sequence: TTA
tacattgtgctttggcacag

SEQ ID NO: 376526 - DNA, 20 bp, Artificial Sequence
  Description of Artificial Sequence: Synthetic oligonucleotide
  Target: LAMA2; (+) strand; PAM type: YTN; PAM sequence: TTG
tgctttggcacaggaaaact

SEQ ID NO: 376527 - DNA, 20 bp, Artificial Sequence
  Description of Artificial Sequence: Synthetic oligonucleotide
  Target: LAMA2; (+) strand; PAM type: YTN; PAM sequence: CTT
tggcacaggaaaactagcta

SEQ ID NO: 376528 - DNA, 20 bp, Artificial Sequence
  Description of Artificial Sequence: Synthetic oligonucleotide
  Target: LAMA2; (+) strand; PAM type: YTN; PAM sequence: TTT
ggcacaggaaaactagctaa

SEQ ID NO: 376529 - DNA, 20 bp, Artificial Sequence
  Description of Artificial Sequence: Synthetic oligonucleotide
  Target: LAMA2; (+) strand; PAM type: YTN; PAM sequence: TTG
gcacaggaaaactagctaat

SEQ ID NO: 376530 - DNA, 20 bp, Artificial Sequence
  Description of Artificial Sequence: Synthetic oligonucleotide
  Target: LAMA2; (+) strand; PAM type: YTN; PAM sequence: CTA
gctaattactcaggttttct

SEQ ID NO: 376531 - DNA, 20 bp, Artificial Sequence
  Description of Artificial Sequence: Synthetic oligonucleotide
  Target: LAMA2; (+) strand; PAM type: YTN; PAM sequence: CTA
attactcaggttttctttct

SEQ ID NO: 376532 - DNA, 20 bp, Artificial Sequence
  Description of Artificial Sequence: Synthetic oligonucleotide
  Target: LAMA2; (+) strand; PAM type: YTN; PAM sequence: TTA
ctcaggttttctttctattt

SEQ ID NO: 376533 - DNA, 20 bp, Artificial Sequence
  Description of Artificial Sequence: Synthetic oligonucleotide
  Target: LAMA2; (+) strand; PAM type: YTN; PAM sequence: CTC
aggttttctttctatttagt

SEQ ID NO: 376534 - DNA, 20 bp, Artificial Sequence
  Description of Artificial Sequence: Synthetic oligonucleotide
  Target: LAMA2; (+) strand; PAM type: YTN; PAM sequence: TTT
tctttctatttagtgttatg

SEQ ID NO: 376535 - DNA, 20 bp, Artificial Sequence
  Description of Artificial Sequence: Synthetic oligonucleotide
  Target: LAMA2; (+) strand; PAM type: YTN; PAM sequence: TTT
ctttctatttagtgttatga

SEQ ID NO: 376536 - DNA, 20 bp, Artificial Sequence
  Description of Artificial Sequence: Synthetic oligonucleotide
  Target: LAMA2; (+) strand; PAM type: YTN; PAM sequence: TTC
tttctatttagtgttatgat

SEQ ID NO: 376537 - DNA, 20 bp, Artificial Sequence
  Description of Artificial Sequence: Synthetic oligonucleotide
  Target: LAMA2; (+) strand; PAM type: YTN; PAM sequence: CTT
tctatttagtgttatgattc

SEQ ID NO: 376538 - DNA, 20 bp, Artificial Sequence
  Description of Artificial Sequence: Synthetic oligonucleotide
  Target: LAMA2; (+) strand; PAM type: YTN; PAM sequence: TTT
ctatttagtgttatgattcc

SEQ ID NO: 376539 - DNA, 20 bp, Artificial Sequence
  Description of Artificial Sequence: Synthetic oligonucleotide
  Target: LAMA2; (+) strand; PAM type: YTN; PAM sequence: TTC
tatttagtgttatgattccg

SEQ ID NO: 376540 - DNA, 20 bp, Artificial Sequence
  Description of Artificial Sequence: Synthetic oligonucleotide
  Target: LAMA2; (+) strand; PAM type: YTN; PAM sequence: CTA
tttagtgttatgattccgct

SEQ ID NO: 376541 - DNA, 20 bp, Artificial Sequence
  Description of Artificial Sequence: Synthetic oligonucleotide
  Target: LAMA2; (+) strand; PAM type: YTN; PAM sequence: TTT
agtgttatgattccgctgaa

SEQ ID NO: 376542 - DNA, 20 bp, Artificial Sequence
  Description of Artificial Sequence: Synthetic oligonucleotide
  Target: LAMA2; (+) strand; PAM type: YTN; PAM sequence: TTA
gtgttatgattccgctgaag

SEQ ID NO: 376543 - DNA, 20 bp, Artificial Sequence
  Description of Artificial Sequence: Synthetic oligonucleotide
  Target: LAMA2; (+) strand; PAM type: YTN; PAM sequence: TTA
tgattccgctgaagaactac

SEQ ID NO: 376544 - DNA, 20 bp, Artificial Sequence
  Description of Artificial Sequence: Synthetic oligonucleotide
  Target: LAMA2; (+) strand; PAM type: YTN; PAM sequence: TTC
cgctgaagaactacttaaga

SEQ ID NO: 376545 - DNA, 20 bp, Artificial Sequence
  Description of Artificial Sequence: Synthetic oligonucleotide
  Target: LAMA2; (+) strand; PAM type: YTN; PAM sequence: CTG
aagaactacttaagataatt

SEQ ID NO: 376546 - DNA, 20 bp, Artificial Sequence
  Description of Artificial Sequence: Synthetic oligonucleotide
  Target: LAMA2; (+) strand; PAM type: YTN; PAM sequence: CTA
cttaagataatttctatttg

SEQ ID NO: 376547 - DNA, 20 bp, Artificial Sequence
  Description of Artificial Sequence: Synthetic oligonucleotide
  Target: LAMA2; (+) strand; PAM type: YTN; PAM sequence: CTT
aagataatttctatttgcaa

SEQ ID NO: 376548 - DNA, 20 bp, Artificial Sequence
  Description of Artificial Sequence: Synthetic oligonucleotide
  Target: LAMA2; (+) strand; PAM type: YTN; PAM sequence: TTA
agataatttctatttgcaag

SEQ ID NO: 376549 - DNA, 20 bp, Artificial Sequence
  Description of Artificial Sequence: Synthetic oligonucleotide
  Target: LAMA2; (+) strand; PAM type: YTN; PAM sequence: TTT
ctatttgcaagtaatgattt

SEQ ID NO: 376550 - DNA, 20 bp, Artificial Sequence
  Description of Artificial Sequence: Synthetic oligonucleotide
  Target: LAMA2; (+) strand; PAM type: YTN; PAM sequence: TTC
tatttgcaagtaatgatttg

SEQ ID NO: 376551 - DNA, 20 bp, Artificial Sequence
  Description of Artificial Sequence: Synthetic oligonucleotide
  Target: LAMA2; (+) strand; PAM type: YTN; PAM sequence: CTA
tttgcaagtaatgatttgca

SEQ ID NO: 376552 - DNA, 20 bp, Artificial Sequence
  Description of Artificial Sequence: Synthetic oligonucleotide
  Target: LAMA2; (+) strand; PAM type: YTN; PAM sequence: TTT
gcaagtaatgatttgcactg

SEQ ID NO: 376553 - DNA, 20 bp, Artificial Sequence
  Description of Artificial Sequence: Synthetic oligonucleotide
  Target: LAMA2; (+) strand; PAM type: YTN; PAM sequence: TTG
caagtaatgatttgcactgt

SEQ ID NO: 376554 - DNA, 20 bp, Artificial Sequence
  Description of Artificial Sequence: Synthetic oligonucleotide
  Target: LAMA2; (+) strand; PAM type: YTN; PAM sequence: TTT
gcactgtcccatgacatttt

SEQ ID NO: 376555 - DNA, 20 bp, Artificial Sequence
  Description of Artificial Sequence: Synthetic oligonucleotide
  Target: LAMA2; (+) strand; PAM type: YTN; PAM sequence: TTG
cactgtcccatgacattttt

SEQ ID NO: 376556 - DNA, 20 bp, Artificial Sequence
  Description of Artificial Sequence: Synthetic oligonucleotide
  Target: LAMA2; (+) strand; PAM type: YTN; PAM sequence: CTG
tcccatgacattttttagca

SEQ ID NO: 376557 - DNA, 20 bp, Artificial Sequence
  Description of Artificial Sequence: Synthetic oligonucleotide
  Target: LAMA2; (+) strand; PAM type: YTN; PAM sequence: TTT
tttagcatataaatttaaac

SEQ ID NO: 376558 - DNA, 20 bp, Artificial Sequence
  Description of Artificial Sequence: Synthetic oligonucleotide
  Target: LAMA2; (+) strand; PAM type: YTN; PAM sequence: TTT
ttagcatataaatttaaaca

SEQ ID NO: 376559 - DNA, 20 bp, Artificial Sequence
  Description of Artificial Sequence: Synthetic oligonucleotide
  Target: LAMA2; (+) strand; PAM type: YTN; PAM sequence: TTT
tagcatataaatttaaacat

SEQ ID NO: 376560 - DNA, 20 bp, Artificial Sequence
  Description of Artificial Sequence: Synthetic oligonucleotide
  Target: LAMA2; (+) strand; PAM type: YTN; PAM sequence: TTT
agcatataaatttaaacata

SEQ ID NO: 376561 - DNA, 20 bp, Artificial Sequence
  Description of Artificial Sequence: Synthetic oligonucleotide
  Target: LAMA2; (+) strand; PAM type: YTN; PAM sequence: TTA
gcatataaatttaaacataa

SEQ ID NO: 376562 - DNA, 20 bp, Artificial Sequence
  Description of Artificial Sequence: Synthetic oligonucleotide
  Target: LAMA2; (+) strand; PAM type: YTN; PAM sequence: TTT
aaacataatggtaactattt

SEQ ID NO: 376563 - DNA, 20 bp, Artificial Sequence
  Description of Artificial Sequence: Synthetic oligonucleotide
  Target: LAMA2; (+) strand; PAM type: YTN; PAM sequence: TTA
aacataatggtaactatttt

SEQ ID NO: 376564 - DNA, 20 bp, Artificial Sequence
  Description of Artificial Sequence: Synthetic oligonucleotide
  Target: LAMA2; (+) strand; PAM type: YTN; PAM sequence: CTA
tttttcttcttaatgaagga

SEQ ID NO: 376565 - DNA, 20 bp, Artificial Sequence
  Description of Artificial Sequence: Synthetic oligonucleotide
  Target: LAMA2; (+) strand; PAM type: YTN; PAM sequence: TTT
ttcttcttaatgaaggacac

SEQ ID NO: 376566 - DNA, 20 bp, Artificial Sequence
  Description of Artificial Sequence: Synthetic oligonucleotide
  Target: LAMA2; (+) strand; PAM type: YTN; PAM sequence: TTT
tcttcttaatgaaggacaca

SEQ ID NO: 376567 - DNA, 20 bp, Artificial Sequence
  Description of Artificial Sequence: Synthetic oligonucleotide
  Target: LAMA2; (+) strand; PAM type: YTN; PAM sequence: TTT
cttcttaatgaaggacacat

SEQ ID NO: 376568 - DNA, 20 bp, Artificial Sequence
  Description of Artificial Sequence: Synthetic oligonucleotide
  Target: LAMA2; (+) strand; PAM type: YTN; PAM sequence: TTC
ttcttaatgaaggacacatc

SEQ ID NO: 376569 - DNA, 20 bp, Artificial Sequence
  Description of Artificial Sequence: Synthetic oligonucleotide
  Target: LAMA2; (+) strand; PAM type: YTN; PAM sequence: CTT
cttaatgaaggacacatcta

SEQ ID NO: 376570 - DNA, 20 bp, Artificial Sequence
  Description of Artificial Sequence: Synthetic oligonucleotide
  Target: LAMA2; (+) strand; PAM type: YTN; PAM sequence: TTC
ttaatgaaggacacatctaa

SEQ ID NO: 376571 - DNA, 20 bp, Artificial Sequence
  Description of Artificial Sequence: Synthetic oligonucleotide
  Target: LAMA2; (+) strand; PAM type: YTN; PAM sequence: CTT
aatgaaggacacatctaaaa

SEQ ID NO: 376572 - DNA, 20 bp, Artificial Sequence
  Description of Artificial Sequence: Synthetic oligonucleotide
  Target: LAMA2; (+) strand; PAM type: YTN; PAM sequence: TTA
atgaaggacacatctaaaat

SEQ ID NO: 376573 - DNA, 20 bp, Artificial Sequence
  Description of Artificial Sequence: Synthetic oligonucleotide
  Target: LAMA2; (+) strand; PAM type: YTN; PAM sequence: CTA
aaataaatcatttggcttaa

SEQ ID NO: 376574 - DNA, 20 bp, Artificial Sequence
  Description of Artificial Sequence: Synthetic oligonucleotide
  Target: LAMA2; (+) strand; PAM type: YTN; PAM sequence: TTT
ggcttaaaattagcaacaac

SEQ ID NO: 376575 - DNA, 20 bp, Artificial Sequence
  Description of Artificial Sequence: Synthetic oligonucleotide
  Target: LAMA2; (+) strand; PAM type: YTN; PAM sequence: TTG
gcttaaaattagcaacaaca

SEQ ID NO: 376576 - DNA, 20 bp, Artificial Sequence
  Description of Artificial Sequence: Synthetic oligonucleotide
  Target: LAMA2; (+) strand; PAM type: YTN; PAM sequence: CTT
aaaattagcaacaacagtaa

SEQ ID NO: 376577 - DNA, 20 bp, Artificial Sequence
  Description of Artificial Sequence: Synthetic oligonucleotide
  Target: LAMA2; (+) strand; PAM type: YTN; PAM sequence: TTA
aaattagcaacaacagtaat

SEQ ID NO: 376578 - DNA, 20 bp, Artificial Sequence
  Description of Artificial Sequence: Synthetic oligonucleotide
  Target: LAMA2; (+) strand; PAM type: YTN; PAM sequence: TTA
gcaacaacagtaataaccaa

SEQ ID NO: 376579 - DNA, 20 bp, Artificial Sequence
  Description of Artificial Sequence: Synthetic oligonucleotide
  Target: LAMA2; (+) strand; PAM type: YTN; PAM sequence: CTA
acatttatttagtgtttact

SEQ ID NO: 376580 - DNA, 20 bp, Artificial Sequence
  Description of Artificial Sequence: Synthetic oligonucleotide
  Target: LAMA2; (+) strand; PAM type: YTN; PAM sequence: TTT
atttagtgtttactcggtgt

SEQ ID NO: 376581 - DNA, 20 bp, Artificial Sequence
  Description of Artificial Sequence: Synthetic oligonucleotide
  Target: LAMA2; (+) strand; PAM type: YTN; PAM sequence: TTA
tttagtgtttactcggtgta

SEQ ID NO: 376582 - DNA, 20 bp, Artificial Sequence
  Description of Artificial Sequence: Synthetic oligonucleotide
  Target: LAMA2; (+) strand; PAM type: YTN; PAM sequence: TTT
agtgtttactcggtgtaaag

SEQ ID NO: 376583 - DNA, 20 bp, Artificial Sequence
  Description of Artificial Sequence: Synthetic oligonucleotide
  Target: LAMA2; (+) strand; PAM type: YTN; PAM sequence: TTA
gtgtttactcggtgtaaagt

SEQ ID NO: 376584 - DNA, 20 bp, Artificial Sequence
  Description of Artificial Sequence: Synthetic oligonucleotide
  Target: LAMA2; (+) strand; PAM type: YTN; PAM sequence: TTT
actcggtgtaaagtattttt

SEQ ID NO: 376585 - DNA, 20 bp, Artificial Sequence
  Description of Artificial Sequence: Synthetic oligonucleotide
  Target: LAMA2; (+) strand; PAM type: YTN; PAM sequence: TTA
ctcggtgtaaagtatttttc

SEQ ID NO: 376586 - DNA, 20 bp, Artificial Sequence
  Description of Artificial Sequence: Synthetic oligonucleotide
  Target: LAMA2; (+) strand; PAM type: YTN; PAM sequence: CTC
ggtgtaaagtatttttctaa

SEQ ID NO: 376587 - DNA, 20 bp, Artificial Sequence
  Description of Artificial Sequence: Synthetic oligonucleotide
  Target: LAMA2; (+) strand; PAM type: YTN; PAM sequence: TTT
ttctaaacaccttccacagc

SEQ ID NO: 376588 - DNA, 20 bp, Artificial Sequence
  Description of Artificial Sequence: Synthetic oligonucleotide
  Target: LAMA2; (+) strand; PAM type: YTN; PAM sequence: TTT
tctaaacaccttccacagct

SEQ ID NO: 376589 - DNA, 20 bp, Artificial Sequence
  Description of Artificial Sequence: Synthetic oligonucleotide
  Target: LAMA2; (+) strand; PAM type: YTN; PAM sequence: TTT
ctaaacaccttccacagctg

SEQ ID NO: 376590 - DNA, 20 bp, Artificial Sequence
  Description of Artificial Sequence: Synthetic oligonucleotide
  Target: LAMA2; (+) strand; PAM type: YTN; PAM sequence: TTC
taaacaccttccacagctgg

SEQ ID NO: 376591 - DNA, 20 bp, Artificial Sequence
  Description of Artificial Sequence: Synthetic oligonucleotide
  Target: LAMA2; (+) strand; PAM type: YTN; PAM sequence: CTA
aacaccttccacagctggtg

SEQ ID NO: 376592 - DNA, 20 bp, Artificial Sequence
  Description of Artificial Sequence: Synthetic oligonucleotide
  Target: LAMA2; (+) strand; PAM type: YTN; PAM sequence: CTT
ccacagctggtgtgtaatgc

SEQ ID NO: 376593 - DNA, 20 bp, Artificial Sequence
  Description of Artificial Sequence: Synthetic oligonucleotide
  Target: LAMA2; (+) strand; PAM type: YTN; PAM sequence: TTC
cacagctggtgtgtaatgct

SEQ ID NO: 376594 - DNA, 20 bp, Artificial Sequence
  Description of Artificial Sequence: Synthetic oligonucleotide
  Target: LAMA2; (+) strand; PAM type: YTN; PAM sequence: CTG
gtgtgtaatgctgtgagcaa

SEQ ID NO: 376595 - DNA, 20 bp, Artificial Sequence
  Description of Artificial Sequence: Synthetic oligonucleotide
  Target: LAMA2; (+) strand; PAM type: YTN; PAM sequence: CTG
tgagcaatgaatattgtcat

SEQ ID NO: 376596 - DNA, 20 bp, Artificial Sequence
  Description of Artificial Sequence: Synthetic oligonucleotide
  Target: LAMA2; (+) strand; PAM type: YTN; PAM sequence: TTG
tcatttcataaaaagtgaat

SEQ ID NO: 376597 - DNA, 20 bp, Artificial Sequence
  Description of Artificial Sequence: Synthetic oligonucleotide
  Target: LAMA2; (+) strand; PAM type: YTN; PAM sequence: TTT
cataaaaagtgaatttagtc

SEQ ID NO: 376598 - DNA, 20 bp, Artificial Sequence
  Description of Artificial Sequence: Synthetic oligonucleotide
  Target: LAMA2; (+) strand; PAM type: YTN; PAM sequence: TTC
ataaaaagtgaatttagtca

SEQ ID NO: 376599 - DNA, 20 bp, Artificial Sequence
  Description of Artificial Sequence: Synthetic oligonucleotide
  Target: LAMA2; (+) strand; PAM type: YTN; PAM sequence: TTT
agtcaaatattctaaatata

SEQ ID NO: 376600 - DNA, 20 bp, Artificial Sequence
  Description of Artificial Sequence: Synthetic oligonucleotide
  Target: LAMA2; (+) strand; PAM type: YTN; PAM sequence: TTA
gtcaaatattctaaatatat

SEQ ID NO: 376601 - DNA, 20 bp, Artificial Sequence
  Description of Artificial Sequence: Synthetic oligonucleotide
  Target: LAMA2; (+) strand; PAM type: YTN; PAM sequence: TTC
taaatatattcagtgaaaat

SEQ ID NO: 376602 - DNA, 20 bp, Artificial Sequence
  Description of Artificial Sequence: Synthetic oligonucleotide
  Target: LAMA2; (+) strand; PAM type: YTN; PAM sequence: CTA
aatatattcagtgaaaatga

SEQ ID NO: 376603 - DNA, 20 bp, Artificial Sequence
  Description of Artificial Sequence: Synthetic oligonucleotide
  Target: LAMA2; (+) strand; PAM type: YTN; PAM sequence: TTC
agtgaaaatgatttagtcat

SEQ ID NO: 376604 - DNA, 20 bp, Artificial Sequence
  Description of Artificial Sequence: Synthetic oligonucleotide
  Target: LAMA2; (+) strand; PAM type: YTN; PAM sequence: TTT
agtcatcatataaccaatta

SEQ ID NO: 376605 - DNA, 20 bp, Artificial Sequence
  Description of Artificial Sequence: Synthetic oligonucleotide
  Target: LAMA2; (+) strand; PAM type: YTN; PAM sequence: TTA
gtcatcatataaccaattaa

SEQ ID NO: 376606 - DNA, 20 bp, Artificial Sequence
  Description of Artificial Sequence: Synthetic oligonucleotide
  Target: LAMA2; (+) strand; PAM type: YTN; PAM sequence: TTA
aaagtttactcataacatta

SEQ ID NO: 376607 - DNA, 20 bp, Artificial Sequence
  Description of Artificial Sequence: Synthetic oligonucleotide
  Target: LAMA2; (+) strand; PAM type: YTN; PAM sequence: TTT
actcataacattagtcttcc

SEQ ID NO: 376608 - DNA, 20 bp, Artificial Sequence
  Description of Artificial Sequence: Synthetic oligonucleotide
  Target: LAMA2; (+) strand; PAM type: YTN; PAM sequence: TTA
ctcataacattagtcttcca

SEQ ID NO: 376609 - DNA, 20 bp, Artificial Sequence
  Description of Artificial Sequence: Synthetic oligonucleotide
  Target: LAMA2; (+) strand; PAM type: YTN; PAM sequence: CTC
ataacattagtcttccattt

SEQ ID NO: 376610 - DNA, 20 bp, Artificial Sequence
  Description of Artificial Sequence: Synthetic oligonucleotide
  Target: LAMA2; (+) strand; PAM type: YTN; PAM sequence: TTA
gtcttccatttgaattcaag

SEQ ID NO: 376611 - DNA, 20 bp, Artificial Sequence
  Description of Artificial Sequence: Synthetic oligonucleotide
  Target: LAMA2; (+) strand; PAM type: YTN; PAM sequence: CTT
ccatttgaattcaagtattt

SEQ ID NO: 376612 - DNA, 20 bp, Artificial Sequence
  Description of Artificial Sequence: Synthetic oligonucleotide
  Target: LAMA2; (+) strand; PAM type: YTN; PAM sequence: TTC
catttgaattcaagtatttg

SEQ ID NO: 376613 - DNA, 20 bp, Artificial Sequence
  Description of Artificial Sequence: Synthetic oligonucleotide
  Target: LAMA2; (+) strand; PAM type: YTN; PAM sequence: TTT
gaattcaagtatttgggttt

SEQ ID NO: 376614 - DNA, 20 bp, Artificial Sequence
  Description of Artificial Sequence: Synthetic oligonucleotide
  Target: LAMA2; (+) strand; PAM type: YTN; PAM sequence: TTG
aattcaagtatttgggtttc

SEQ ID NO: 376615 - DNA, 20 bp, Artificial Sequence
  Description of Artificial Sequence: Synthetic oligonucleotide
  Target: LAMA2; (+) strand; PAM type: YTN; PAM sequence: TTC
aagtatttgggtttcttccc

SEQ ID NO: 376616 - DNA, 20 bp, Artificial Sequence
  Description of Artificial Sequence: Synthetic oligonucleotide
  Target: LAMA2; (+) strand; PAM type: YTN; PAM sequence: TTT
gggtttcttccctcacttac

SEQ ID NO: 376617 - DNA, 20 bp, Artificial Sequence
  Description of Artificial Sequence: Synthetic oligonucleotide
  Target: LAMA2; (+) strand; PAM type: YTN; PAM sequence: TTG
ggtttcttccctcacttaca

SEQ ID NO: 376618 - DNA, 20 bp, Artificial Sequence
  Description of Artificial Sequence: Synthetic oligonucleotide
  Target: LAMA2; (+) strand; PAM type: YTN; PAM sequence: TTT
cttccctcacttacatttct

SEQ ID NO: 376619 - DNA, 20 bp, Artificial Sequence
  Description of Artificial Sequence: Synthetic oligonucleotide
  Target: LAMA2; (+) strand; PAM type: YTN; PAM sequence: TTC
ttccctcacttacatttctt

SEQ ID NO: 376620 - DNA, 20 bp, Artificial Sequence
  Description of Artificial Sequence: Synthetic oligonucleotide
  Target: LAMA2; (+) strand; PAM type: YTN; PAM sequence: CTT
ccctcacttacatttctttg

SEQ ID NO: 376621 - DNA, 20 bp, Artificial Sequence
  Description of Artificial Sequence: Synthetic oligonucleotide
  Target: LAMA2; (+) strand; PAM type: YTN; PAM sequence: TTC
cctcacttacatttctttga

SEQ ID NO: 376622 - DNA, 20 bp, Artificial Sequence
  Description of Artificial Sequence: Synthetic oligonucleotide
  Target: LAMA2; (+) strand; PAM type: YTN; PAM sequence: CTC
acttacatttctttgacatg

SEQ ID NO: 376623 - DNA, 20 bp, Artificial Sequence
  Description of Artificial Sequence: Synthetic oligonucleotide
  Target: LAMA2; (+) strand; PAM type: YTN; PAM sequence: CTT
acatttctttgacatgaaac

SEQ ID NO: 376624 - DNA, 20 bp, Artificial Sequence
  Description of Artificial Sequence: Synthetic oligonucleotide
  Target: LAMA2; (+) strand; PAM type: YTN; PAM sequence: TTA
catttctttgacatgaaacg

SEQ ID NO: 376625 - DNA, 20 bp, Artificial Sequence
  Description of Artificial Sequence: Synthetic oligonucleotide
  Target: LAMA2; (+) strand; PAM type: YTN; PAM sequence: TTT
ctttgacatgaaacgctgca

SEQ ID NO: 376626 - DNA, 20 bp, Artificial Sequence
  Description of Artificial Sequence: Synthetic oligonucleotide
  Target: LAMA2; (+) strand; PAM type: YTN; PAM sequence: TTC
tttgacatgaaacgctgcac

SEQ ID NO: 376627 - DNA, 20 bp, Artificial Sequence
  Description of Artificial Sequence: Synthetic oligonucleotide
  Target: LAMA2; (+) strand; PAM type: YTN; PAM sequence: CTT
tgacatgaaacgctgcacta

SEQ ID NO: 376628 - DNA, 20 bp, Artificial Sequence
  Description of Artificial Sequence: Synthetic oligonucleotide
  Target: LAMA2; (+) strand; PAM type: YTN; PAM sequence: TTT
gacatgaaacgctgcactag

SEQ ID NO: 376629 - DNA, 20 bp, Artificial Sequence
  Description of Artificial Sequence: Synthetic oligonucleotide
  Target: LAMA2; (+) strand; PAM type: YTN; PAM sequence: TTG
acatgaaacgctgcactaga

SEQ ID NO: 376630 - DNA, 20 bp, Artificial Sequence
  Description of Artificial Sequence: Synthetic oligonucleotide
  Target: LAMA2; (+) strand; PAM type: YTN; PAM sequence: CTG
cactagaaatattcttagta

SEQ ID NO: 376631 - DNA, 20 bp, Artificial Sequence
  Description of Artificial Sequence: Synthetic oligonucleotide
  Target: LAMA2; (+) strand; PAM type: YTN; PAM sequence: CTA
gaaatattcttagtagctgg

SEQ ID NO: 376632 - DNA, 20 bp, Artificial Sequence
  Description of Artificial Sequence: Synthetic oligonucleotide
  Target: LAMA2; (+) strand; PAM type: YTN; PAM sequence: TTC
ttagtagctgggtcaactgc

SEQ ID NO: 376633 - DNA, 20 bp, Artificial Sequence
  Description of Artificial Sequence: Synthetic oligonucleotide
  Target: LAMA2; (+) strand; PAM type: YTN; PAM sequence: CTT
agtagctgggtcaactgccg

SEQ ID NO: 376634 - DNA, 20 bp, Artificial Sequence
  Description of Artificial Sequence: Synthetic oligonucleotide
  Target: LAMA2; (+) strand; PAM type: YTN; PAM sequence: TTA
gtagctgggtcaactgccgc

SEQ ID NO: 376635 - DNA, 20 bp, Artificial Sequence
  Description of Artificial Sequence: Synthetic oligonucleotide
  Target: LAMA2; (+) strand; PAM type: YTN; PAM sequence: CTG
ggtcaactgccgctatgtgg

SEQ ID NO: 376636 - DNA, 20 bp, Artificial Sequence
  Description of Artificial Sequence: Synthetic oligonucleotide
  Target: LAMA2; (+) strand; PAM type: YTN; PAM sequence: CTG
ccgctatgtggcatgcattc

SEQ ID NO: 376637 - DNA, 20 bp, Artificial Sequence
  Description of Artificial Sequence: Synthetic oligonucleotide
  Target: LAMA2; (+) strand; PAM type: YTN; PAM sequence: CTA
tgtggcatgcattccttgtc

SEQ ID NO: 376638 - DNA, 20 bp, Artificial Sequence
  Description of Artificial Sequence: Synthetic oligonucleotide
  Target: LAMA2; (+) strand; PAM type: YTN; PAM sequence: TTC
cttgtcttggatggctttga

SEQ ID NO: 376639 - DNA, 20 bp, Artificial Sequence
  Description of Artificial Sequence: Synthetic oligonucleotide
  Target: LAMA2; (+) strand; PAM type: YTN; PAM sequence: CTT
gtcttggatggctttgaaga

SEQ ID NO: 376640 - DNA, 20 bp, Artificial Sequence
  Description of Artificial Sequence: Synthetic oligonucleotide
  Target: LAMA2; (+) strand; PAM type: YTN; PAM sequence: TTG
tcttggatggctttgaagat

SEQ ID NO: 376641 - DNA, 20 bp, Artificial Sequence
  Description of Artificial Sequence: Synthetic oligonucleotide
  Target: LAMA2; (+) strand; PAM type: YTN; PAM sequence: CTT
ggatggctttgaagatattc

SEQ ID NO: 376642 - DNA, 20 bp, Artificial Sequence
  Description of Artificial Sequence: Synthetic oligonucleotide
  Target: LAMA2; (+) strand; PAM type: YTN; PAM sequence: TTG
gatggctttgaagatattct

SEQ ID NO: 376643 - DNA, 20 bp, Artificial Sequence
  Description of Artificial Sequence: Synthetic oligonucleotide
  Target: LAMA2; (+) strand; PAM type: YTN; PAM sequence: CTT
tgaagatattctcaaacatt

SEQ ID NO: 376644 - DNA, 20 bp, Artificial Sequence
  Description of Artificial Sequence: Synthetic oligonucleotide
  Target: LAMA2; (+) strand; PAM type: YTN; PAM sequence: TTT
gaagatattctcaaacatta

SEQ ID NO: 376645 - DNA, 20 bp, Artificial Sequence
  Description of Artificial Sequence: Synthetic oligonucleotide
  Target: LAMA2; (+) strand; PAM type: YTN; PAM sequence: TTG
aagatattctcaaacattat

SEQ ID NO: 376646 - DNA, 20 bp, Artificial Sequence
  Description of Artificial Sequence: Synthetic oligonucleotide
  Target: LAMA2; (+) strand; PAM type: YTN; PAM sequence: TTC
tcaaacattatttttgcaat

SEQ ID NO: 376647 - DNA, 20 bp, Artificial Sequence
  Description of Artificial Sequence: Synthetic oligonucleotide
  Target: LAMA2; (+) strand; PAM type: YTN; PAM sequence: CTC
aaacattatttttgcaatct

SEQ ID NO: 376648 - DNA, 20 bp, Artificial Sequence
  Description of Artificial Sequence: Synthetic oligonucleotide
  Target: LAMA2; (+) strand; PAM type: YTN; PAM sequence: TTA
tttttgcaatctttgaaaaa

SEQ ID NO: 376649 - DNA, 20 bp, Artificial Sequence
  Description of Artificial Sequence: Synthetic oligonucleotide
  Target: LAMA2; (+) strand; PAM type: YTN; PAM sequence: TTT
ttgcaatctttgaaaaagta

SEQ ID NO: 376650 - DNA, 20 bp, Artificial Sequence
  Description of Artificial Sequence: Synthetic oligonucleotide
  Target: LAMA2; (+) strand; PAM type: YTN; PAM sequence: TTT
tgcaatctttgaaaaagtac

SEQ ID NO: 376651 - DNA, 20 bp, Artificial Sequence
  Description of Artificial Sequence: Synthetic oligonucleotide
  Target: LAMA2; (+) strand; PAM type: YTN; PAM sequence: TTT
gcaatctttgaaaaagtaca

SEQ ID NO: 376652 - DNA, 20 bp, Artificial Sequence
  Description of Artificial Sequence: Synthetic oligonucleotide
  Target: LAMA2; (+) strand; PAM type: YTN; PAM sequence: TTG
caatctttgaaaaagtacaa

SEQ ID NO: 376653 - DNA, 20 bp, Artificial Sequence
  Description of Artificial Sequence: Synthetic oligonucleotide
  Target: LAMA2; (+) strand; PAM type: YTN; PAM sequence: CTT
tgaaaaagtacaaaaggtag

SEQ ID NO: 376654 - DNA, 20 bp, Artificial Sequence
  Description of Artificial Sequence: Synthetic oligonucleotide
  Target: LAMA2; (+) strand; PAM type: YTN; PAM sequence: TTT
gaaaaagtacaaaaggtaga

SEQ ID NO: 376655 - DNA, 20 bp, Artificial Sequence
  Description of Artificial Sequence: Synthetic oligonucleotide
  Target: LAMA2; (+) strand; PAM type: YTN; PAM sequence: TTG
aaaaagtacaaaaggtagat

SEQ ID NO: 376656 - DNA, 20 bp, Artificial Sequence
  Description of Artificial Sequence: Synthetic oligonucleotide
  Target: LAMA2; (+) strand; PAM type: YTN; PAM sequence: CTT
tgtaccctttgaatattgca

SEQ ID NO: 376657 - DNA, 20 bp, Artificial Sequence
  Description of Artificial Sequence: Synthetic oligonucleotide
  Target: LAMA2; (+) strand; PAM type: YTN; PAM sequence: TTT
gtaccctttgaatattgcat

SEQ ID NO: 376658 - DNA, 20 bp, Artificial Sequence
  Description of Artificial Sequence: Synthetic oligonucleotide
  Target: LAMA2; (+) strand; PAM type: YTN; PAM sequence: TTG
taccctttgaatattgcatg

SEQ ID NO: 376659 - DNA, 20 bp, Artificial Sequence
  Description of Artificial Sequence: Synthetic oligonucleotide
  Target: LAMA2; (+) strand; PAM type: YTN; PAM sequence: CTT
tgaatattgcatgatagcaa

SEQ ID NO: 376660 - DNA, 20 bp, Artificial Sequence
  Description of Artificial Sequence: Synthetic oligonucleotide
  Target: LAMA2; (+) strand; PAM type: YTN; PAM sequence: TTT
gaatattgcatgatagcaac

SEQ ID NO: 376661 - DNA, 20 bp, Artificial Sequence
  Description of Artificial Sequence: Synthetic oligonucleotide
  Target: LAMA2; (+) strand; PAM type: YTN; PAM sequence: TTG
aatattgcatgatagcaaca

SEQ ID NO: 376662 - DNA, 20 bp, Artificial Sequence
  Description of Artificial Sequence: Synthetic oligonucleotide
  Target: LAMA2; (+) strand; PAM type: YTN; PAM sequence: TTG
catgatagcaacaaaaatga

SEQ ID NO: 376663 - DNA, 20 bp, Artificial Sequence
  Description of Artificial Sequence: Synthetic oligonucleotide
  Target: LAMA2; (+) strand; PAM type: YTN; PAM sequence: CTA
tagaaaaaagtcaggtggta

SEQ ID NO: 376664 - DNA, 20 bp, Artificial Sequence
  Description of Artificial Sequence: Synthetic oligonucleotide
  Target: LAMA2; (+) strand; PAM type: YTN; PAM sequence: CTT
tatatataaacagtgtccat

SEQ ID NO: 376665 - DNA, 20 bp, Artificial Sequence
  Description of Artificial Sequence: Synthetic oligonucleotide
  Target: LAMA2; (+) strand; PAM type: YTN; PAM sequence: TTT
atatataaacagtgtccata

SEQ ID NO: 376666 - DNA, 20 bp, Artificial Sequence
  Description of Artificial Sequence: Synthetic oligonucleotide
  Target: LAMA2; (+) strand; PAM type: YTN; PAM sequence: TTA
tatataaacagtgtccataa

SEQ ID NO: 376667 - DNA, 20 bp, Artificial Sequence
  Description of Artificial Sequence: Synthetic oligonucleotide
  Target: LAMA2; (+) strand; PAM type: YTN; PAM sequence: TTC
aaccattttaaagtatttgc

SEQ ID NO: 376668 - DNA, 20 bp, Artificial Sequence
  Description of Artificial Sequence: Synthetic oligonucleotide
  Target: LAMA2; (+) strand; PAM type: YTN; PAM sequence: TTT
taaagtatttgcaaaattgg

SEQ ID NO: 376669 - DNA, 20 bp, Artificial Sequence
  Description of Artificial Sequence: Synthetic oligonucleotide
  Target: LAMA2; (+) strand; PAM type: YTN; PAM sequence: TTT
aaagtatttgcaaaattgga

SEQ ID NO: 376670 - DNA, 20 bp, Artificial Sequence
  Description of Artificial Sequence: Synthetic oligonucleotide
  Target: LAMA2; (+) strand; PAM type: YTN; PAM sequence: TTA
aagtatttgcaaaattggat

SEQ ID NO: 376671 - DNA, 20 bp, Artificial Sequence
  Description of Artificial Sequence: Synthetic oligonucleotide
  Target: LAMA2; (+) strand; PAM type: YTN; PAM sequence: TTT
gcaaaattggattattctgt

SEQ ID NO: 376672 - DNA, 20 bp, Artificial Sequence
  Description of Artificial Sequence: Synthetic oligonucleotide
  Target: LAMA2; (+) strand; PAM type: YTN; PAM sequence: TTG
caaaattggattattctgtt

SEQ ID NO: 376673 - DNA, 20 bp, Artificial Sequence
  Description of Artificial Sequence: Synthetic oligonucleotide
  Target: LAMA2; (+) strand; PAM type: YTN; PAM sequence: TTG
gattattctgttgtgtgcgt

SEQ ID NO: 376674 - DNA, 20 bp, Artificial Sequence
  Description of Artificial Sequence: Synthetic oligonucleotide
  Target: LAMA2; (+) strand; PAM type: YTN; PAM sequence: TTA
ttctgttgtgtgcgtttcta

SEQ ID NO: 376675 - DNA, 20 bp, Artificial Sequence
  Description of Artificial Sequence: Synthetic oligonucleotide
  Target: LAMA2; (+) strand; PAM type: YTN; PAM sequence: TTC
tgttgtgtgcgtttctaact

SEQ ID NO: 376676 - DNA, 20 bp, Artificial Sequence
  Description of Artificial Sequence: Synthetic oligonucleotide
  Target: LAMA2; (+) strand; PAM type: YTN; PAM sequence: CTG
ttgtgtgcgtttctaactat

SEQ ID NO: 376677 - DNA, 20 bp, Artificial Sequence
  Description of Artificial Sequence: Synthetic oligonucleotide
  Target: LAMA2; (+) strand; PAM type: YTN; PAM sequence: TTG
tgtgcgtttctaactatata

SEQ ID NO: 376678 - DNA, 20 bp, Artificial Sequence
  Description of Artificial Sequence: Synthetic oligonucleotide
  Target: LAMA2; (+) strand; PAM type: YTN; PAM sequence: TTT
ctaactatatacatgatgta

SEQ ID NO: 376679 - DNA, 20 bp, Artificial Sequence
  Description of Artificial Sequence: Synthetic oligonucleotide
  Target: LAMA2; (+) strand; PAM type: YTN; PAM sequence: TTC
taactatatacatgatgtac

SEQ ID NO: 376680 - DNA, 20 bp, Artificial Sequence
  Description of Artificial Sequence: Synthetic oligonucleotide
  Target: LAMA2; (+) strand; PAM type: YTN; PAM sequence: CTA
actatatacatgatgtaccg

SEQ ID NO: 376681 - DNA, 20 bp, Artificial Sequence
  Description of Artificial Sequence: Synthetic oligonucleotide
  Target: LAMA2; (+) strand; PAM type: YTN; PAM sequence: CTA
tatacatgatgtaccgaatt

SEQ ID NO: 376682 - DNA, 20 bp, Artificial Sequence
  Description of Artificial Sequence: Synthetic oligonucleotide
  Target: LAMA2; (+) strand; PAM type: YTN; PAM sequence: TTT
aagaagcttattaagcttat

SEQ ID NO: 376683 - DNA, 20 bp, Artificial Sequence
  Description of Artificial Sequence: Synthetic oligonucleotide
  Target: LAMA2; (+) strand; PAM type: YTN; PAM sequence: TTA
agaagcttattaagcttatt

SEQ ID NO: 376684 - DNA, 20 bp, Artificial Sequence
  Description of Artificial Sequence: Synthetic oligonucleotide
  Target: LAMA2; (+) strand; PAM type: YTN; PAM sequence: CTT
attaagcttattggttttta

SEQ ID NO: 376685 - DNA, 20 bp, Artificial Sequence
  Description of Artificial Sequence: Synthetic oligonucleotide
  Target: LAMA2; (+) strand; PAM type: YTN; PAM sequence: TTA
ttaagcttattggtttttac

SEQ ID NO: 376686 - DNA, 20 bp, Artificial Sequence
  Description of Artificial Sequence: Synthetic oligonucleotide
  Target: LAMA2; (+) strand; PAM type: YTN; PAM sequence: TTA
agcttattggtttttactgc

SEQ ID NO: 376687 - DNA, 20 bp, Artificial Sequence
  Description of Artificial Sequence: Synthetic oligonucleotide
  Target: LAMA2; (+) strand; PAM type: YTN; PAM sequence: CTT
attggtttttactgcagatc

SEQ ID NO: 376688 - DNA, 20 bp, Artificial Sequence
  Description of Artificial Sequence: Synthetic oligonucleotide
  Target: LAMA2; (+) strand; PAM type: YTN; PAM sequence: TTA
ttggtttttactgcagatcg

SEQ ID NO: 376689 - DNA, 20 bp, Artificial Sequence
  Description of Artificial Sequence: Synthetic oligonucleotide
  Target: LAMA2; (+) strand; PAM type: YTN; PAM sequence: TTG
gtttttactgcagatcgggc

SEQ ID NO: 376690 - DNA, 20 bp, Artificial Sequence
  Description of Artificial Sequence: Synthetic oligonucleotide
  Target: LAMA2; (+) strand; PAM type: YTN; PAM sequence: TTT
ttactgcagatcgggctcat

SEQ ID NO: 376691 - DNA, 20 bp, Artificial Sequence
  Description of Artificial Sequence: Synthetic oligonucleotide
  Target: LAMA2; (+) strand; PAM type: YTN; PAM sequence: TTT
tactgcagatcgggctcatc

SEQ ID NO: 376692 - DNA, 20 bp, Artificial Sequence
  Description of Artificial Sequence: Synthetic oligonucleotide
  Target: LAMA2; (+) strand; PAM type: YTN; PAM sequence: TTT
actgcagatcgggctcatca

SEQ ID NO: 376693 - DNA, 20 bp, Artificial Sequence
  Description of Artificial Sequence: Synthetic oligonucleotide
  Target: LAMA2; (+) strand; PAM type: YTN; PAM sequence: TTA
ctgcagatcgggctcatcaa

SEQ ID NO: 376694 - DNA, 20 bp, Artificial Sequence
  Description of Artificial Sequence: Synthetic oligonucleotide
  Target: LAMA2; (+) strand; PAM type: YTN; PAM sequence: CTG
cagatcgggctcatcaagga

SEQ ID NO: 376695 - DNA, 20 bp, Artificial Sequence
  Description of Artificial Sequence: Synthetic oligonucleotide
  Target: LAMA2; (+) strand; PAM type: YTN; PAM sequence: CTC
atcaaggaaaaactaatccg

SEQ ID NO: 376696 - DNA, 20 bp, Artificial Sequence
  Description of Artificial Sequence: Synthetic oligonucleotide
  Target: LAMA2; (+) strand; PAM type: YTN; PAM sequence: CTA
atccgtacagcataaacaaa

SEQ ID NO: 376697 - DNA, 20 bp, Artificial Sequence
  Description of Artificial Sequence: Synthetic oligonucleotide
  Target: LAMA2; (+) strand; PAM type: YTN; PAM sequence: TTA
gaaatgaacttaaaataaat

SEQ ID NO: 376698 - DNA, 20 bp, Artificial Sequence
  Description of Artificial Sequence: Synthetic oligonucleotide
  Target: LAMA2; (+) strand; PAM type: YTN; PAM sequence: CTT
aaaataaatatacaaacaaa

SEQ ID NO: 376699 - DNA, 20 bp, Artificial Sequence
  Description of Artificial Sequence: Synthetic oligonucleotide
  Target: LAMA2; (+) strand; PAM type: YTN; PAM sequence: TTA
aaataaatatacaaacaaaa

SEQ ID NO: 376700 - DNA, 20 bp, Artificial Sequence
  Description of Artificial Sequence: Synthetic oligonucleotide
  Target: LAMA2; (+) strand; PAM type: YTN; PAM sequence: CTT
tgtagtacccgaatataagg

SEQ ID NO: 376701 - DNA, 20 bp, Artificial Sequence
  Description of Artificial Sequence: Synthetic oligonucleotide
  Target: LAMA2; (+) strand; PAM type: YTN; PAM sequence: TTT
gtagtacccgaatataaggt

SEQ ID NO: 376702 - DNA, 20 bp, Artificial Sequence
  Description of Artificial Sequence: Synthetic oligonucleotide
  Target: LAMA2; (+) strand; PAM type: YTN; PAM sequence: TTG
tagtacccgaatataaggtg

SEQ ID NO: 376703 - DNA, 20 bp, Artificial Sequence
  Description of Artificial Sequence: Synthetic oligonucleotide
  Target: LAMA2; (+) strand; PAM type: YTN; PAM sequence: TTA
cagttaacatggaatctgat

SEQ ID NO: 376704 - DNA, 20 bp, Artificial Sequence
  Description of Artificial Sequence: Synthetic oligonucleotide
  Target: LAMA2; (+) strand; PAM type: YTN; PAM sequence: TTA
acatggaatctgataacacc

SEQ ID NO: 376705 - DNA, 20 bp, Artificial Sequence
  Description of Artificial Sequence: Synthetic oligonucleotide
  Target: LAMA2; (+) strand; PAM type: YTN; PAM sequence: CTG
ataacaccaattctttcctt

SEQ ID NO: 376706 - DNA, 20 bp, Artificial Sequence
  Description of Artificial Sequence: Synthetic oligonucleotide
  Target: LAMA2; (+) strand; PAM type: YTN; PAM sequence: TTC
tttcctttcttaaacttcat

SEQ ID NO: 376707 - DNA, 20 bp, Artificial Sequence
  Description of Artificial Sequence: Synthetic oligonucleotide
  Target: LAMA2; (+) strand; PAM type: YTN; PAM sequence: CTT
tcctttcttaaacttcatag

SEQ ID NO: 376708 - DNA, 20 bp, Artificial Sequence
  Description of Artificial Sequence: Synthetic oligonucleotide
  Target: LAMA2; (+) strand; PAM type: YTN; PAM sequence: TTT
cctttcttaaacttcatagg

SEQ ID NO: 376709 - DNA, 20 bp, Artificial Sequence
  Description of Artificial Sequence: Synthetic oligonucleotide
  Target: LAMA2; (+) strand; PAM type: YTN; PAM sequence: TTC
ctttcttaaacttcatagga

SEQ ID NO: 376710 - DNA, 20 bp, Artificial Sequence
  Description of Artificial Sequence: Synthetic oligonucleotide
  Target: LAMA2; (+) strand; PAM type: YTN; PAM sequence: CTT
tcttaaacttcataggaaag

SEQ ID NO: 376711 - DNA, 20 bp, Artificial Sequence
  Description of Artificial Sequence: Synthetic oligonucleotide
  Target: LAMA2; (+) strand; PAM type: YTN; PAM sequence: TTT
cttaaacttcataggaaagc

SEQ ID NO: 376712 - DNA, 20 bp, Artificial Sequence
  Description of Artificial Sequence: Synthetic oligonucleotide
  Target: LAMA2; (+) strand; PAM type: YTN; PAM sequence: TTC
ttaaacttcataggaaagct

SEQ ID NO: 376713 - DNA, 20 bp, Artificial Sequence
  Description of Artificial Sequence: Synthetic oligonucleotide
  Target: LAMA2; (+) strand; PAM type: YTN; PAM sequence: CTT
aaacttcataggaaagctaa

SEQ ID NO: 376714 - DNA, 20 bp, Artificial Sequence
  Description of Artificial Sequence: Synthetic oligonucleotide
  Target: LAMA2; (+) strand; PAM type: YTN; PAM sequence: TTA
aacttcataggaaagctaaa

SEQ ID NO: 376715 - DNA, 20 bp, Artificial Sequence
  Description of Artificial Sequence: Synthetic oligonucleotide
  Target: LAMA2; (+) strand; PAM type: YTN; PAM sequence: CTT
cataggaaagctaaaaatac

SEQ ID NO: 376716 - DNA, 20 bp, Artificial Sequence
  Description of Artificial Sequence: Synthetic oligonucleotide
  Target: LAMA2; (+) strand; PAM type: YTN; PAM sequence: TTC
ataggaaagctaaaaatact

SEQ ID NO: 376717 - DNA, 20 bp, Artificial Sequence
  Description of Artificial Sequence: Synthetic oligonucleotide
  Target: LAMA2; (+) strand; PAM type: YTN; PAM sequence: CTA
aaaatactttaacttttgaa

SEQ ID NO: 376718 - DNA, 20 bp, Artificial Sequence
  Description of Artificial Sequence: Synthetic oligonucleotide
  Target: LAMA2; (+) strand; PAM type: YTN; PAM sequence: CTT
taacttttgaaattaataaa

SEQ ID NO: 376719 - DNA, 20 bp, Artificial Sequence
  Description of Artificial Sequence: Synthetic oligonucleotide
  Target: LAMA2; (+) strand; PAM type: YTN; PAM sequence: TTT
aacttttgaaattaataaat

SEQ ID NO: 376720 - DNA, 20 bp, Artificial Sequence
  Description of Artificial Sequence: Synthetic oligonucleotide
  Target: LAMA2; (+) strand; PAM type: YTN; PAM sequence: TTA
acttttgaaattaataaatg

SEQ ID NO: 376721 - DNA, 20 bp, Artificial Sequence
  Description of Artificial Sequence: Synthetic oligonucleotide
  Target: LAMA2; (+) strand; PAM type: YTN; PAM sequence: CTT
ttgaaattaataaatgaaat

SEQ ID NO: 376722 - DNA, 20 bp, Artificial Sequence
  Description of Artificial Sequence: Synthetic oligonucleotide
  Target: LAMA2; (+) strand; PAM type: YTN; PAM sequence: TTT
tgaaattaataaatgaaata

SEQ ID NO: 376723 - DNA, 20 bp, Artificial Sequence
  Description of Artificial Sequence: Synthetic oligonucleotide
  Target: LAMA2; (+) strand; PAM type: YTN; PAM sequence: TTT
gaaattaataaatgaaatac

SEQ ID NO: 376724 - DNA, 20 bp, Artificial Sequence
  Description of Artificial Sequence: Synthetic oligonucleotide
  Target: LAMA2; (+) strand; PAM type: YTN; PAM sequence: TTG
aaattaataaatgaaataca

SEQ ID NO: 376725 - DNA, 20 bp, Artificial Sequence
  Description of Artificial Sequence: Synthetic oligonucleotide
  Target: LAMA2; (+) strand; PAM type: YTN; PAM sequence: TTA
ataaatgaaatacatcttat

SEQ ID NO: 376726 - DNA, 20 bp, Artificial Sequence
  Description of Artificial Sequence: Synthetic oligonucleotide
  Target: LAMA2; (+) strand; PAM type: YTN; PAM sequence: CTT
atatttattgaacagctcct

SEQ ID NO: 376727 - DNA, 20 bp, Artificial Sequence
  Description of Artificial Sequence: Synthetic oligonucleotide
  Target: LAMA2; (+) strand; PAM type: YTN; PAM sequence: TTA
tatttattgaacagctcctt

SEQ ID NO: 376728 - DNA, 20 bp, Artificial Sequence
  Description of Artificial Sequence: Synthetic oligonucleotide
  Target: LAMA2; (+) strand; PAM type: YTN; PAM sequence: TTT
attgaacagctcctttctga

SEQ ID NO: 376729 - DNA, 20 bp, Artificial Sequence
  Description of Artificial Sequence: Synthetic oligonucleotide
  Target: LAMA2; (+) strand; PAM type: YTN; PAM sequence: TTA
ttgaacagctcctttctgaa

SEQ ID NO: 376730 - DNA, 20 bp, Artificial Sequence
  Description of Artificial Sequence: Synthetic oligonucleotide
  Target: LAMA2; (+) strand; PAM type: YTN; PAM sequence: TTG
aacagctcctttctgaaata

SEQ ID NO: 376731 - DNA, 20 bp, Artificial Sequence
  Description of Artificial Sequence: Synthetic oligonucleotide
  Target: LAMA2; (+) strand; PAM type: YTN; PAM sequence: CTC
ctttctgaaatacattgtac

SEQ ID NO: 376732 - DNA, 20 bp, Artificial Sequence
  Description of Artificial Sequence: Synthetic oligonucleotide
  Target: LAMA2; (+) strand; PAM type: YTN; PAM sequence: CTT
tctgaaatacattgtactat

SEQ ID NO: 376733 - DNA, 20 bp, Artificial Sequence
  Description of Artificial Sequence: Synthetic oligonucleotide
  Target: LAMA2; (+) strand; PAM type: YTN; PAM sequence: TTT
ctgaaatacattgtactata

SEQ ID NO: 376734 - DNA, 20 bp, Artificial Sequence
  Description of Artificial Sequence: Synthetic oligonucleotide
  Target: LAMA2; (+) strand; PAM type: YTN; PAM sequence: TTC
tgaaatacattgtactataa

SEQ ID NO: 376735 - DNA, 20 bp, Artificial Sequence
  Description of Artificial Sequence: Synthetic oligonucleotide
  Target: LAMA2; (+) strand; PAM type: YTN; PAM sequence: CTG
aaatacattgtactataata

SEQ ID NO: 376736 - DNA, 20 bp, Artificial Sequence
  Description of Artificial Sequence: Synthetic oligonucleotide
  Target: LAMA2; (+) strand; PAM type: YTN; PAM sequence: TTG
tactataatataaaagatga

SEQ ID NO: 376737 - DNA, 20 bp, Artificial Sequence
  Description of Artificial Sequence: Synthetic oligonucleotide
  Target: LAMA2; (+) strand; PAM type: YTN; PAM sequence: CTA
taatataaaagatgaatgaa

SEQ ID NO: 376738 - DNA, 20 bp, Artificial Sequence
  Description of Artificial Sequence: Synthetic oligonucleotide
  Target: LAMA2; (+) strand; PAM type: YTN; PAM sequence: TTT
ttatttccaaatatccttaa

SEQ ID NO: 376739 - DNA, 20 bp, Artificial Sequence
  Description of Artificial Sequence: Synthetic oligonucleotide
  Target: LAMA2; (+) strand; PAM type: YTN; PAM sequence: TTT
tatttccaaatatccttaag

SEQ ID NO: 376740 - DNA, 20 bp, Artificial Sequence
  Description of Artificial Sequence: Synthetic oligonucleotide
  Target: LAMA2; (+) strand; PAM type: YTN; PAM sequence: TTT
atttccaaatatccttaagt

SEQ ID NO: 376741 - DNA, 20 bp, Artificial Sequence
  Description of Artificial Sequence: Synthetic oligonucleotide
  Target: LAMA2; (+) strand; PAM type: YTN; PAM sequence: TTA
tttccaaatatccttaagtg

SEQ ID NO: 376742 - DNA, 20 bp, Artificial Sequence
  Description of Artificial Sequence: Synthetic oligonucleotide
  Target: LAMA2; (+) strand; PAM type: YTN; PAM sequence: TTT
ccaaatatccttaagtgtag

SEQ ID NO: 376743 - DNA, 20 bp, Artificial Sequence
  Description of Artificial Sequence: Synthetic oligonucleotide
  Target: LAMA2; (+) strand; PAM type: YTN; PAM sequence: TTC
caaatatccttaagtgtaga

SEQ ID NO: 376744 - DNA, 20 bp, Artificial Sequence
  Description of Artificial Sequence: Synthetic oligonucleotide
  Target: LAMA2; (+) strand; PAM type: YTN; PAM sequence: CTT
aagtgtagaactgaaaagaa

SEQ ID NO: 376745 - DNA, 20 bp, Artificial Sequence
  Description of Artificial Sequence: Synthetic oligonucleotide
  Target: LAMA2; (+) strand; PAM type: YTN; PAM sequence: TTA
agtgtagaactgaaaagaaa

SEQ ID NO: 376746 - DNA, 20 bp, Artificial Sequence
  Description of Artificial Sequence: Synthetic oligonucleotide
  Target: LAMA2; (+) strand; PAM type: YTN; PAM sequence: CTG
aaaagaaaataagacaaacc

SEQ ID NO: 376747 - DNA, 20 bp, Artificial Sequence
  Description of Artificial Sequence: Synthetic oligonucleotide
  Target: LAMA2; (+) strand; PAM type: YTN; PAM sequence: CTC
aacactttgtgtcaaatttt

SEQ ID NO: 376748 - DNA, 20 bp, Artificial Sequence
  Description of Artificial Sequence: Synthetic oligonucleotide
  Target: LAMA2; (+) strand; PAM type: YTN; PAM sequence: CTT
tgtgtcaaatttttactatt

SEQ ID NO: 376749 - DNA, 20 bp, Artificial Sequence
  Description of Artificial Sequence: Synthetic oligonucleotide
  Target: LAMA2; (+) strand; PAM type: YTN; PAM sequence: TTT
gtgtcaaatttttactattt

SEQ ID NO: 376750 - DNA, 20 bp, Artificial Sequence
  Description of Artificial Sequence: Synthetic oligonucleotide
  Target: LAMA2; (+) strand; PAM type: YTN; PAM sequence: TTG
tgtcaaatttttactatttt

SEQ ID NO: 376751 - DNA, 20 bp, Artificial Sequence
  Description of Artificial Sequence: Synthetic oligonucleotide
  Target: LAMA2; (+) strand; PAM type: YTN; PAM sequence: TTT
ttactatttttccccttctt

SEQ ID NO: 376752 - DNA, 20 bp, Artificial Sequence
  Description of Artificial Sequence: Synthetic oligonucleotide
  Target: LAMA2; (+) strand; PAM type: YTN; PAM sequence: TTT
tactatttttccccttcttt

SEQ ID NO: 376753 - DNA, 20 bp, Artificial Sequence
  Description of Artificial Sequence: Synthetic oligonucleotide
  Target: LAMA2; (+) strand; PAM type: YTN; PAM sequence: TTT
actatttttccccttctttg

SEQ ID NO: 376754 - DNA, 20 bp, Artificial Sequence
  Description of Artificial Sequence: Synthetic oligonucleotide
  Target: LAMA2; (+) strand; PAM type: YTN; PAM sequence: TTA
ctatttttccccttctttgt

SEQ ID NO: 376755 - DNA, 20 bp, Artificial Sequence
  Description of Artificial Sequence: Synthetic oligonucleotide
  Target: LAMA2; (+) strand; PAM type: YTN; PAM sequence: CTA
tttttccccttctttgtttt

SEQ ID NO: 376756 - DNA, 20 bp, Artificial Sequence
  Description of Artificial Sequence: Synthetic oligonucleotide
  Target: LAMA2; (+) strand; PAM type: YTN; PAM sequence: TTT
ttccccttctttgttttccc

SEQ ID NO: 376757 - DNA, 20 bp, Artificial Sequence
  Description of Artificial Sequence: Synthetic oligonucleotide
  Target: LAMA2; (+) strand; PAM type: YTN; PAM sequence: TTT
tccccttctttgttttccct

SEQ ID NO: 376758 - DNA, 20 bp, Artificial Sequence
  Description of Artificial Sequence: Synthetic oligonucleotide
  Target: LAMA2; (+) strand; PAM type: YTN; PAM sequence: TTT
ccccttctttgttttccctc

SEQ ID NO: 376759 - DNA, 20 bp, Artificial Sequence
  Description of Artificial Sequence: Synthetic oligonucleotide
  Target: LAMA2; (+) strand; PAM type: YTN; PAM sequence: TTC
cccttctttgttttccctct

SEQ ID NO: 376760 - DNA, 20 bp, Artificial Sequence
  Description of Artificial Sequence: Synthetic oligonucleotide
  Target: LAMA2; (+) strand; PAM type: YTN; PAM sequence: CTT
ctttgttttccctcttatac

SEQ ID NO: 376761 - DNA, 20 bp, Artificial Sequence
  Description of Artificial Sequence: Synthetic oligonucleotide
  Target: LAMA2; (+) strand; PAM type: YTN; PAM sequence: TTC
tttgttttccctcttatacc

SEQ ID NO: 376762 - DNA, 20 bp, Artificial Sequence
  Description of Artificial Sequence: Synthetic oligonucleotide
  Target: LAMA2; (+) strand; PAM type: YTN; PAM sequence: CTT
tgttttccctcttataccgg

SEQ ID NO: 376763 - DNA, 20 bp, Artificial Sequence
  Description of Artificial Sequence: Synthetic oligonucleotide
  Target: LAMA2; (+) strand; PAM type: YTN; PAM sequence: TTT
gttttccctcttataccggt

SEQ ID NO: 376764 - DNA, 20 bp, Artificial Sequence
  Description of Artificial Sequence: Synthetic oligonucleotide
  Target: LAMA2; (+) strand; PAM type: YTN; PAM sequence: TTG
ttttccctcttataccggtg

SEQ ID NO: 376765 - DNA, 20 bp, Artificial Sequence
  Description of Artificial Sequence: Synthetic oligonucleotide
  Target: LAMA2; (+) strand; PAM type: YTN; PAM sequence: TTT
tccctcttataccggtgaag

SEQ ID NO: 376766 - DNA, 20 bp, Artificial Sequence
  Description of Artificial Sequence: Synthetic oligonucleotide
  Target: LAMA2; (+) strand; PAM type: YTN; PAM sequence: TTT
ccctcttataccggtgaagc

SEQ ID NO: 376767 - DNA, 20 bp, Artificial Sequence
  Description of Artificial Sequence: Synthetic oligonucleotide
  Target: LAMA2; (+) strand; PAM type: YTN; PAM sequence: TTC
cctcttataccggtgaagct

SEQ ID NO: 376768 - DNA, 20 bp, Artificial Sequence
  Description of Artificial Sequence: Synthetic oligonucleotide
  Target: LAMA2; (+) strand; PAM type: YTN; PAM sequence: CTC
ttataccggtgaagcttgtg

SEQ ID NO: 376769 - DNA, 20 bp, Artificial Sequence
  Description of Artificial Sequence: Synthetic oligonucleotide
  Target: LAMA2; (+) strand; PAM type: YTN; PAM sequence: CTT
ataccggtgaagcttgtgaa

SEQ ID NO: 376770 - DNA, 20 bp, Artificial Sequence
  Description of Artificial Sequence: Synthetic oligonucleotide
  Target: LAMA2; (+) strand; PAM type: YTN; PAM sequence: TTA
taccggtgaagcttgtgaat

SEQ ID NO: 376771 - DNA, 20 bp, Artificial Sequence
  Description of Artificial Sequence: Synthetic oligonucleotide
  Target: LAMA2; (+) strand; PAM type: YTN; PAM sequence: CTT
gtgaatgttctcatctgggt

SEQ ID NO: 376772 - DNA, 20 bp, Artificial Sequence
  Description of Artificial Sequence: Synthetic oligonucleotide
  Target: LAMA2; (+) strand; PAM type: YTN; PAM sequence: TTG
tgaatgttctcatctgggta

SEQ ID NO: 376773 - DNA, 20 bp, Artificial Sequence
  Description of Artificial Sequence: Synthetic oligonucleotide
  Target: LAMA2; (+) strand; PAM type: YTN; PAM sequence: TTC
tcatctgggtaataattgtg

SEQ ID NO: 376774 - DNA, 20 bp, Artificial Sequence
  Description of Artificial Sequence: Synthetic oligonucleotide
  Target: LAMA2; (+) strand; PAM type: YTN; PAM sequence: CTC
atctgggtaataattgtgac

SEQ ID NO: 376775 - DNA, 20 bp, Artificial Sequence
  Description of Artificial Sequence: Synthetic oligonucleotide
  Target: LAMA2; (+) strand; PAM type: YTN; PAM sequence: CTG
ggtaataattgtgacccaaa

SEQ ID NO: 376776 - DNA, 20 bp, Artificial Sequence
  Description of Artificial Sequence: Synthetic oligonucleotide
  Target: LAMA2; (+) strand; PAM type: YTN; PAM sequence: TTG
tgacccaaagactgggcgat

SEQ ID NO: 376777 - DNA, 20 bp, Artificial Sequence
  Description of Artificial Sequence: Synthetic oligonucleotide
  Target: LAMA2; (+) strand; PAM type: YTN; PAM sequence: CTG
ggcgatgcatttgccctccc

SEQ ID NO: 376778 - DNA, 20 bp, Artificial Sequence
  Description of Artificial Sequence: Synthetic oligonucleotide
  Target: LAMA2; (+) strand; PAM type: YTN; PAM sequence: TTT
gccctcccaataccattgga

SEQ ID NO: 376779 - DNA, 20 bp, Artificial Sequence
  Description of Artificial Sequence: Synthetic oligonucleotide
  Target: LAMA2; (+) strand; PAM type: YTN; PAM sequence: TTG
ccctcccaataccattggag

SEQ ID NO: 376780 - DNA, 20 bp, Artificial Sequence
  Description of Artificial Sequence: Synthetic oligonucleotide
  Target: LAMA2; (+) strand; PAM type: YTN; PAM sequence: CTC
ccaataccattggagagaaa

SEQ ID NO: 376781 - DNA, 20 bp, Artificial Sequence
  Description of Artificial Sequence: Synthetic oligonucleotide
  Target: LAMA2; (+) strand; PAM type: YTN; PAM sequence: TTG
gagagaaatgttctaaatgt

SEQ ID NO: 376782 - DNA, 20 bp, Artificial Sequence
  Description of Artificial Sequence: Synthetic oligonucleotide
  Target: LAMA2; (+) strand; PAM type: YTN; PAM sequence: TTC
taaatgtgcacccaatacct

SEQ ID NO: 376783 - DNA, 20 bp, Artificial Sequence
  Description of Artificial Sequence: Synthetic oligonucleotide
  Target: LAMA2; (+) strand; PAM type: YTN; PAM sequence: CTA
aatgtgcacccaatacctgg

SEQ ID NO: 376784 - DNA, 20 bp, Artificial Sequence
  Description of Artificial Sequence: Synthetic oligonucleotide
  Target: LAMA2; (+) strand; PAM type: YTN; PAM sequence: CTG
gggccacagcattaccactg

SEQ ID NO: 376785 - DNA, 20 bp, Artificial Sequence
  Description of Artificial Sequence: Synthetic oligonucleotide
  Target: LAMA2; (+) strand; PAM type: YTN; PAM sequence: TTA
ccactggttgtaaggtgagt

SEQ ID NO: 376786 - DNA, 20 bp, Artificial Sequence
  Description of Artificial Sequence: Synthetic oligonucleotide
  Target: LAMA2; (+) strand; PAM type: YTN; PAM sequence: CTG
gttgtaaggtgagtgaacca

SEQ ID NO: 376787 - DNA, 20 bp, Artificial Sequence
  Description of Artificial Sequence: Synthetic oligonucleotide
  Target: LAMA2; (+) strand; PAM type: YTN; PAM sequence: TTG
taaggtgagtgaaccacttt

SEQ ID NO: 376788 - DNA, 20 bp, Artificial Sequence
  Description of Artificial Sequence: Synthetic oligonucleotide
  Target: LAMA2; (+) strand; PAM type: YTN; PAM sequence: CTT
ttttgctctgataatttttt

SEQ ID NO: 376789 - DNA, 20 bp, Artificial Sequence
  Description of Artificial Sequence: Synthetic oligonucleotide
  Target: LAMA2; (+) strand; PAM type: YTN; PAM sequence: TTT
tttgctctgataattttttg

SEQ ID NO: 376790 - DNA, 20 bp, Artificial Sequence
  Description of Artificial Sequence: Synthetic oligonucleotide
  Target: LAMA2; (+) strand; PAM type: YTN; PAM sequence: TTT
ttgctctgataattttttgg

SEQ ID NO: 376791 - DNA, 20 bp, Artificial Sequence
  Description of Artificial Sequence: Synthetic oligonucleotide
  Target: LAMA2; (+) strand; PAM type: YTN; PAM sequence: TTT
tgctctgataattttttgga

SEQ ID NO: 376792 - DNA, 20 bp, Artificial Sequence
  Description of Artificial Sequence: Synthetic oligonucleotide
  Target: LAMA2; (+) strand; PAM type: YTN; PAM sequence: TTT
gctctgataattttttggag

SEQ ID NO: 376793 - DNA, 20 bp, Artificial Sequence
  Description of Artificial Sequence: Synthetic oligonucleotide
  Target: LAMA2; (+) strand; PAM type: YTN; PAM sequence: TTG
ctctgataattttttggaga

SEQ ID NO: 376794 - DNA, 20 bp, Artificial Sequence
  Description of Artificial Sequence: Synthetic oligonucleotide
  Target: LAMA2; (+) strand; PAM type: YTN; PAM sequence: CTC
tgataattttttggagagat

SEQ ID NO: 376795 - DNA, 20 bp, Artificial Sequence
  Description of Artificial Sequence: Synthetic oligonucleotide
  Target: LAMA2; (+) strand; PAM type: YTN; PAM sequence: CTG
ataattttttggagagattt

SEQ ID NO: 376796 - DNA, 20 bp, Artificial Sequence
  Description of Artificial Sequence: Synthetic oligonucleotide
  Target: LAMA2; (+) strand; PAM type: YTN; PAM sequence: TTT
tttggagagatttttgtttt

SEQ ID NO: 376797 - DNA, 20 bp, Artificial Sequence
  Description of Artificial Sequence: Synthetic oligonucleotide
  Target: LAMA2; (+) strand; PAM type: YTN; PAM sequence: TTT
ttggagagatttttgttttg

SEQ ID NO: 376798 - DNA, 20 bp, Artificial Sequence
  Description of Artificial Sequence: Synthetic oligonucleotide
  Target: LAMA2; (+) strand; PAM type: YTN; PAM sequence: TTT
tggagagatttttgttttgt

SEQ ID NO: 376799 - DNA, 20 bp, Artificial Sequence
  Description of Artificial Sequence: Synthetic oligonucleotide
  Target: LAMA2; (+) strand; PAM type: YTN; PAM sequence: TTT
ggagagatttttgttttgta

SEQ ID NO: 376800 - DNA, 20 bp, Artificial Sequence
  Description of Artificial Sequence: Synthetic oligonucleotide
  Target: LAMA2; (+) strand; PAM type: YTN; PAM sequence: TTG
gagagatttttgttttgtag

SEQ ID NO: 376801 - DNA, 20 bp, Artificial Sequence
  Description of Artificial Sequence: Synthetic oligonucleotide
  Target: LAMA2; (+) strand; PAM type: YTN; PAM sequence: TTT
ttgttttgtagagctctgta

SEQ ID NO: 376802 - DNA, 20 bp, Artificial Sequence
  Description of Artificial Sequence: Synthetic oligonucleotide
  Target: LAMA2; (+) strand; PAM type: YTN; PAM sequence: TTT
tgttttgtagagctctgtaa

SEQ ID NO: 376803 - DNA, 20 bp, Artificial Sequence
  Description of Artificial Sequence: Synthetic oligonucleotide
  Target: LAMA2; (+) strand; PAM type: YTN; PAM sequence: TTT
gttttgtagagctctgtaat

SEQ ID NO: 376804 - DNA, 20 bp, Artificial Sequence
  Description of Artificial Sequence: Synthetic oligonucleotide
  Target: LAMA2; (+) strand; PAM type: YTN; PAM sequence: TTG
ttttgtagagctctgtaatt

SEQ ID NO: 376805 - DNA, 20 bp, Artificial Sequence
  Description of Artificial Sequence: Synthetic oligonucleotide
  Target: LAMA2; (+) strand; PAM type: YTN; PAM sequence: TTT
tgtagagctctgtaattggg

SEQ ID NO: 376806 - DNA, 20 bp, Artificial Sequence
  Description of Artificial Sequence: Synthetic oligonucleotide
  Target: LAMA2; (+) strand; PAM type: YTN; PAM sequence: TTT
gtagagctctgtaattgggc

SEQ ID NO: 376807 - DNA, 20 bp, Artificial Sequence
  Description of Artificial Sequence: Synthetic oligonucleotide
  Target: LAMA2; (+) strand; PAM type: YTN; PAM sequence: TTG
tagagctctgtaattgggca

SEQ ID NO: 376808 - DNA, 20 bp, Artificial Sequence
  Description of Artificial Sequence: Synthetic oligonucleotide
  Target: LAMA2; (+) strand; PAM type: YTN; PAM sequence: CTC
tgtaattgggcatttcaaaa

SEQ ID NO: 376809 - DNA, 20 bp, Artificial Sequence
  Description of Artificial Sequence: Synthetic oligonucleotide
  Target: LAMA2; (+) strand; PAM type: YTN; PAM sequence: CTG
taattgggcatttcaaaatt

SEQ ID NO: 376810 - DNA, 20 bp, Artificial Sequence
  Description of Artificial Sequence: Synthetic oligonucleotide
  Target: LAMA2; (+) strand; PAM type: YTN; PAM sequence: TTG
ggcatttcaaaattcaatat

SEQ ID NO: 376811 - DNA, 20 bp, Artificial Sequence
  Description of Artificial Sequence: Synthetic oligonucleotide
  Target: LAMA2; (+) strand; PAM type: YTN; PAM sequence: TTT
caaaattcaatattacatca

SEQ ID NO: 376812 - DNA, 20 bp, Artificial Sequence
  Description of Artificial Sequence: Synthetic oligonucleotide
  Target: LAMA2; (+) strand; PAM type: YTN; PAM sequence: TTC
aaaattcaatattacatcac

SEQ ID NO: 376813 - DNA, 20 bp, Artificial Sequence
  Description of Artificial Sequence: Synthetic oligonucleotide
  Target: LAMA2; (+) strand; PAM type: YTN; PAM sequence: TTC
aatattacatcacaaaataa

SEQ ID NO: 376814 - DNA, 20 bp, Artificial Sequence
  Description of Artificial Sequence: Synthetic oligonucleotide
  Target: LAMA2; (+) strand; PAM type: YTN; PAM sequence: TTA
catcacaaaataatgtagaa

SEQ ID NO: 376815 - DNA, 20 bp, Artificial Sequence
  Description of Artificial Sequence: Synthetic oligonucleotide
  Target: LAMA2; (+) strand; PAM type: YTN; PAM sequence: TTA
ctataatgtgattacagata

SEQ ID NO: 376816 - DNA, 20 bp, Artificial Sequence
  Description of Artificial Sequence: Synthetic oligonucleotide
  Target: LAMA2; (+) strand; PAM type: YTN; PAM sequence: CTA
taatgtgattacagatatta

SEQ ID NO: 376817 - DNA, 20 bp, Artificial Sequence
  Description of Artificial Sequence: Synthetic oligonucleotide
  Target: LAMA2; (+) strand; PAM type: YTN; PAM sequence: TTA
cagatattaatcaatatctt

SEQ ID NO: 376818 - DNA, 20 bp, Artificial Sequence
  Description of Artificial Sequence: Synthetic oligonucleotide
  Target: LAMA2; (+) strand; PAM type: YTN; PAM sequence: TTA
atcaatatcttacagtttac

SEQ ID NO: 376819 - DNA, 20 bp, Artificial Sequence
  Description of Artificial Sequence: Synthetic oligonucleotide
  Target: LAMA2; (+) strand; PAM type: YTN; PAM sequence: CTT
acagtttacttgtaggaaag

SEQ ID NO: 376820 - DNA, 20 bp, Artificial Sequence
  Description of Artificial Sequence: Synthetic oligonucleotide
  Target: LAMA2; (+) strand; PAM type: YTN; PAM sequence: TTA
cagtttacttgtaggaaaga

SEQ ID NO: 376821 - DNA, 20 bp, Artificial Sequence
  Description of Artificial Sequence: Synthetic oligonucleotide
  Target: LAMA2; (+) strand; PAM type: YTN; PAM sequence: TTT
acttgtaggaaagatgatga

SEQ ID NO: 376822 - DNA, 20 bp, Artificial Sequence
  Description of Artificial Sequence: Synthetic oligonucleotide
  Target: LAMA2; (+) strand; PAM type: YTN; PAM sequence: TTA
cttgtaggaaagatgatgaa

SEQ ID NO: 376823 - DNA, 20 bp, Artificial Sequence
  Description of Artificial Sequence: Synthetic oligonucleotide
  Target: LAMA2; (+) strand; PAM type: YTN; PAM sequence: CTT
gtaggaaagatgatgaagta

SEQ ID NO: 376824 - DNA, 20 bp, Artificial Sequence
  Description of Artificial Sequence: Synthetic oligonucleotide
  Target: LAMA2; (+) strand; PAM type: YTN; PAM sequence: TTG
taggaaagatgatgaagtaa

SEQ ID NO: 376825 - DNA, 20 bp, Artificial Sequence
  Description of Artificial Sequence: Synthetic oligonucleotide
  Target: LAMA2; (+) strand; PAM type: YTN; PAM sequence: TTT
atgcagctgaacacttgaaa

SEQ ID NO: 376826 - DNA, 20 bp, Artificial Sequence
  Description of Artificial Sequence: Synthetic oligonucleotide
  Target: LAMA2; (+) strand; PAM type: YTN; PAM sequence: TTA
tgcagctgaacacttgaaat

SEQ ID NO: 376827 - DNA, 20 bp, Artificial Sequence
  Description of Artificial Sequence: Synthetic oligonucleotide
  Target: LAMA2; (+) strand; PAM type: YTN; PAM sequence: CTG
aacacttgaaatctacaaga

SEQ ID NO: 376828 - DNA, 20 bp, Artificial Sequence
  Description of Artificial Sequence: Synthetic oligonucleotide
  Target: LAMA2; (+) strand; PAM type: YTN; PAM sequence: CTT
gaaatctacaagaggggtaa

SEQ ID NO: 376829 - DNA, 20 bp, Artificial Sequence
  Description of Artificial Sequence: Synthetic oligonucleotide
  Target: LAMA2; (+) strand; PAM type: YTN; PAM sequence: TTG
aaatctacaagaggggtaaa

SEQ ID NO: 376830 - DNA, 20 bp, Artificial Sequence
  Description of Artificial Sequence: Synthetic oligonucleotide
  Target: LAMA2; (+) strand; PAM type: YTN; PAM sequence: CTA
caagaggggtaaaaagaaca

SEQ ID NO: 376831 - DNA, 20 bp, Artificial Sequence
  Description of Artificial Sequence: Synthetic oligonucleotide
  Target: LAMA2; (+) strand; PAM type: YTN; PAM sequence: TTC
tgtaataataccagaaaaga

SEQ ID NO: 376832 - DNA, 20 bp, Artificial Sequence
  Description of Artificial Sequence: Synthetic oligonucleotide
  Target: LAMA2; (+) strand; PAM type: YTN; PAM sequence: CTG
taataataccagaaaagagc

SEQ ID NO: 376833 - DNA, 20 bp, Artificial Sequence
  Description of Artificial Sequence: Synthetic oligonucleotide
  Target: LAMA2; (+) strand; PAM type: YTN; PAM sequence: CTA
taacctcatacctaggcaca

SEQ ID NO: 376834 - DNA, 20 bp, Artificial Sequence
  Description of Artificial Sequence: Synthetic oligonucleotide
  Target: LAMA2; (+) strand; PAM type: YTN; PAM sequence: CTC
atacctaggcacaaggacat

SEQ ID NO: 376835 - DNA, 20 bp, Artificial Sequence
  Description of Artificial Sequence: Synthetic oligonucleotide
  Target: LAMA2; (+) strand; PAM type: YTN; PAM sequence: CTA
ggcacaaggacatacatgtg

SEQ ID NO: 376836 - DNA, 20 bp, Artificial Sequence
  Description of Artificial Sequence: Synthetic oligonucleotide
  Target: LAMA2; (+) strand; PAM type: YTN; PAM sequence: CTA
attaattttccaaaaatcta

SEQ ID NO: 376837 - DNA, 20 bp, Artificial Sequence
  Description of Artificial Sequence: Synthetic oligonucleotide
  Target: LAMA2; (+) strand; PAM type: YTN; PAM sequence: TTA
attttccaaaaatctataga

SEQ ID NO: 376838 - DNA, 20 bp, Artificial Sequence
  Description of Artificial Sequence: Synthetic oligonucleotide
  Target: LAMA2; (+) strand; PAM type: YTN; PAM sequence: TTT
tccaaaaatctatagaaatt

SEQ ID NO: 376839 - DNA, 20 bp, Artificial Sequence
  Description of Artificial Sequence: Synthetic oligonucleotide
  Target: LAMA2; (+) strand; PAM type: YTN; PAM sequence: TTT
ccaaaaatctatagaaattg

SEQ ID NO: 376840 - DNA, 20 bp, Artificial Sequence
  Description of Artificial Sequence: Synthetic oligonucleotide
  Target: LAMA2; (+) strand; PAM type: YTN; PAM sequence: TTC
caaaaatctatagaaattgc

SEQ ID NO: 376841 - DNA, 20 bp, Artificial Sequence
  Description of Artificial Sequence: Synthetic oligonucleotide
  Target: LAMA2; (+) strand; PAM type: YTN; PAM sequence: CTA
tagaaattgcccctgaatta

SEQ ID NO: 376842 - DNA, 20 bp, Artificial Sequence
  Description of Artificial Sequence: Synthetic oligonucleotide
  Target: LAMA2; (+) strand; PAM type: YTN; PAM sequence: TTG
cccctgaattatgactaggt

SEQ ID NO: 376843 - DNA, 20 bp, Artificial Sequence
  Description of Artificial Sequence: Synthetic oligonucleotide
  Target: LAMA2; (+) strand; PAM type: YTN; PAM sequence: CTG
aattatgactaggttttagg

SEQ ID NO: 376844 - DNA, 20 bp, Artificial Sequence
  Description of Artificial Sequence: Synthetic oligonucleotide
  Target: LAMA2; (+) strand; PAM type: YTN; PAM sequence: TTA
tgactaggttttaggtttca

SEQ ID NO: 376845 - DNA, 20 bp, Artificial Sequence
  Description of Artificial Sequence: Synthetic oligonucleotide
  Target: LAMA2; (+) strand; PAM type: YTN; PAM sequence: CTA
ggttttaggtttcaggaagt

SEQ ID NO: 376846 - DNA, 20 bp, Artificial Sequence
  Description of Artificial Sequence: Synthetic oligonucleotide
  Target: LAMA2; (+) strand; PAM type: YTN; PAM sequence: TTT
taggtttcaggaagtagttg

SEQ ID NO: 376847 - DNA, 20 bp, Artificial Sequence
  Description of Artificial Sequence: Synthetic oligonucleotide
  Target: LAMA2; (+) strand; PAM type: YTN; PAM sequence: TTT
aggtttcaggaagtagttga

SEQ ID NO: 376848 - DNA, 20 bp, Artificial Sequence
  Description of Artificial Sequence: Synthetic oligonucleotide
  Target: LAMA2; (+) strand; PAM type: YTN; PAM sequence: TTA
ggtttcaggaagtagttgag

SEQ ID NO: 376849 - DNA, 20 bp, Artificial Sequence
  Description of Artificial Sequence: Synthetic oligonucleotide
  Target: LAMA2; (+) strand; PAM type: YTN; PAM sequence: TTT
caggaagtagttgagatcat

SEQ ID NO: 376850 - DNA, 20 bp, Artificial Sequence
  Description of Artificial Sequence: Synthetic oligonucleotide
  Target: LAMA2; (+) strand; PAM type: YTN; PAM sequence: TTC
aggaagtagttgagatcatt

SEQ ID NO: 376851 - DNA, 20 bp, Artificial Sequence
  Description of Artificial Sequence: Synthetic oligonucleotide
  Target: LAMA2; (+) strand; PAM type: YTN; PAM sequence: TTG
agatcattctgaagagtcat

SEQ ID NO: 376852 - DNA, 20 bp, Artificial Sequence
  Description of Artificial Sequence: Synthetic oligonucleotide
  Target: LAMA2; (+) strand; PAM type: YTN; PAM sequence: TTC
tgaagagtcattttaacaac

SEQ ID NO: 376853 - DNA, 20 bp, Artificial Sequence
  Description of Artificial Sequence: Synthetic oligonucleotide
  Target: LAMA2; (+) strand; PAM type: YTN; PAM sequence: CTG
aagagtcattttaacaacat

SEQ ID NO: 376854 - DNA, 20 bp, Artificial Sequence
  Description of Artificial Sequence: Synthetic oligonucleotide
  Target: LAMA2; (+) strand; PAM type: YTN; PAM sequence: TTT
taacaacatttagcttggaa

SEQ ID NO: 376855 - DNA, 20 bp, Artificial Sequence
  Description of Artificial Sequence: Synthetic oligonucleotide
  Target: LAMA2; (+) strand; PAM type: YTN; PAM sequence: TTT
aacaacatttagcttggaaa

SEQ ID NO: 376856 - DNA, 20 bp, Artificial Sequence
  Description of Artificial Sequence: Synthetic oligonucleotide
  Target: LAMA2; (+) strand; PAM type: YTN; PAM sequence: TTA
acaacatttagcttggaaaa

SEQ ID NO: 376857 - DNA, 20 bp, Artificial Sequence
  Description of Artificial Sequence: Synthetic oligonucleotide
  Target: LAMA2; (+) strand; PAM type: YTN; PAM sequence: TTT
agcttggaaaataatcattt

SEQ ID NO: 376858 - DNA, 20 bp, Artificial Sequence
  Description of Artificial Sequence: Synthetic oligonucleotide
  Target: LAMA2; (+) strand; PAM type: YTN; PAM sequence: TTA
gcttggaaaataatcatttt

SEQ ID NO: 376859 - DNA, 20 bp, Artificial Sequence
  Description of Artificial Sequence: Synthetic oligonucleotide
  Target: LAMA2; (+) strand; PAM type: YTN; PAM sequence: CTT
ggaaaataatcattttttcc

SEQ ID NO: 376860 - DNA, 20 bp, Artificial Sequence
  Description of Artificial Sequence: Synthetic oligonucleotide
  Target: LAMA2; (+) strand; PAM type: YTN; PAM sequence: TTG
gaaaataatcattttttccc

SEQ ID NO: 376861 - DNA, 20 bp, Artificial Sequence
  Description of Artificial Sequence: Synthetic oligonucleotide
  Target: LAMA2; (+) strand; PAM type: YTN; PAM sequence: TTT
tttcccattggtagaccata

SEQ ID NO: 376862 - DNA, 20 bp, Artificial Sequence
  Description of Artificial Sequence: Synthetic oligonucleotide
  Target: LAMA2; (+) strand; PAM type: YTN; PAM sequence: TTT
ttcccattggtagaccatag

SEQ ID NO: 376863 - DNA, 20 bp, Artificial Sequence
  Description of Artificial Sequence: Synthetic oligonucleotide
  Target: LAMA2; (+) strand; PAM type: YTN; PAM sequence: TTT
tcccattggtagaccataga

SEQ ID NO: 376864 - DNA, 20 bp, Artificial Sequence
  Description of Artificial Sequence: Synthetic oligonucleotide
  Target: LAMA2; (+) strand; PAM type: YTN; PAM sequence: TTT
cccattggtagaccatagaa

SEQ ID NO: 376865 - DNA, 20 bp, Artificial Sequence
  Description of Artificial Sequence: Synthetic oligonucleotide
  Target: LAMA2; (+) strand; PAM type: YTN; PAM sequence: TTC
ccattggtagaccatagaaa

SEQ ID NO: 376866 - DNA, 20 bp, Artificial Sequence
  Description of Artificial Sequence: Synthetic oligonucleotide
  Target: LAMA2; (+) strand; PAM type: YTN; PAM sequence: TTG
gtagaccatagaaattgaca

SEQ ID NO: 376867 - DNA, 20 bp, Artificial Sequence
  Description of Artificial Sequence: Synthetic oligonucleotide
  Target: LAMA2; (+) strand; PAM type: YTN; PAM sequence: TTG
acatggccagagtcatgttc

SEQ ID NO: 376868 - DNA, 20 bp, Artificial Sequence
  Description of Artificial Sequence: Synthetic oligonucleotide
  Target: LAMA2; (+) strand; PAM type: YTN; PAM sequence: TTC
agagagatctatctagcatc

SEQ ID NO: 376869 - DNA, 20 bp, Artificial Sequence
  Description of Artificial Sequence: Synthetic oligonucleotide
  Target: LAMA2; (+) strand; PAM type: YTN; PAM sequence: CTA
tctagcatcagcagggatgg

SEQ ID NO: 376870 - DNA, 20 bp, Artificial Sequence
  Description of Artificial Sequence: Synthetic oligonucleotide
  Target: LAMA2; (+) strand; PAM type: YTN; PAM sequence: CTA
gcatcagcagggatggtaac

SEQ ID NO: 376871 - DNA, 20 bp, Artificial Sequence
  Description of Artificial Sequence: Synthetic oligonucleotide
  Target: LAMA2; (+) strand; PAM type: YTN; PAM sequence: TTT
ataaggctgttgaagaaata

SEQ ID NO: 376872 - DNA, 20 bp, Artificial Sequence
  Description of Artificial Sequence: Synthetic oligonucleotide
  Target: LAMA2; (+) strand; PAM type: YTN; PAM sequence: TTA
taaggctgttgaagaaatat

SEQ ID NO: 376873 - DNA, 20 bp, Artificial Sequence
  Description of Artificial Sequence: Synthetic oligonucleotide
  Target: LAMA2; (+) strand; PAM type: YTN; PAM sequence: CTG
ttgaagaaatattaataaga

SEQ ID NO: 376874 - DNA, 20 bp, Artificial Sequence
  Description of Artificial Sequence: Synthetic oligonucleotide
  Target: LAMA2; (+) strand; PAM type: YTN; PAM sequence: TTG
aagaaatattaataagagat

SEQ ID NO: 376875 - DNA, 20 bp, Artificial Sequence
  Description of Artificial Sequence: Synthetic oligonucleotide
  Target: LAMA2; (+) strand; PAM type: YTN; PAM sequence: TTA
ataagagatgccaaaagcct

SEQ ID NO: 376876 - DNA, 20 bp, Artificial Sequence
  Description of Artificial Sequence: Synthetic oligonucleotide
  Target: LAMA2; (+) strand; PAM type: YTN; PAM sequence: CTG
gacccagtcaatgagcgtca

SEQ ID NO: 376877 - DNA, 20 bp, Artificial Sequence
  Description of Artificial Sequence: Synthetic oligonucleotide
  Target: LAMA2; (+) strand; PAM type: YTN; PAM sequence: TTA
cattttagaactcaggctga

SEQ ID NO: 376878 - DNA, 20 bp, Artificial Sequence
  Description of Artificial Sequence: Synthetic oligonucleotide
  Target: LAMA2; (+) strand; PAM type: YTN; PAM sequence: TTT
tagaactcaggctgatacag

SEQ ID NO: 376879 - DNA, 20 bp, Artificial Sequence
  Description of Artificial Sequence: Synthetic oligonucleotide
  Target: LAMA2; (+) strand; PAM type: YTN; PAM sequence: TTT
agaactcaggctgatacagc

SEQ ID NO: 376880 - DNA, 20 bp, Artificial Sequence
  Description of Artificial Sequence: Synthetic oligonucleotide
  Target: LAMA2; (+) strand; PAM type: YTN; PAM sequence: TTA
gaactcaggctgatacagcc

SEQ ID NO: 376881 - DNA, 20 bp, Artificial Sequence
  Description of Artificial Sequence: Synthetic oligonucleotide
  Target: LAMA2; (+) strand; PAM type: YTN; PAM sequence: CTC
aggctgatacagcctggtga

SEQ ID NO: 376882 - DNA, 20 bp, Artificial Sequence
  Description of Artificial Sequence: Synthetic oligonucleotide
  Target: LAMA2; (+) strand; PAM type: YTN; PAM sequence: CTG
atacagcctggtgaattcat

SEQ ID NO: 376883 - DNA, 20 bp, Artificial Sequence
  Description of Artificial Sequence: Synthetic oligonucleotide
  Target: LAMA2; (+) strand; PAM type: YTN; PAM sequence: CTG
gtgaattcattgatttgggg

SEQ ID NO: 376884 - DNA, 20 bp, Artificial Sequence
  Description of Artificial Sequence: Synthetic oligonucleotide
  Target: LAMA2; (+) strand; PAM type: YTN; PAM sequence: TTC
attgatttggggaataagaa

SEQ ID NO: 376885 - DNA, 20 bp, Artificial Sequence
  Description of Artificial Sequence: Synthetic oligonucleotide
  Target: LAMA2; (+) strand; PAM type: YTN; PAM sequence: TTG
atttggggaataagaaagag

SEQ ID NO: 376886 - DNA, 20 bp, Artificial Sequence
  Description of Artificial Sequence: Synthetic oligonucleotide
  Target: LAMA2; (+) strand; PAM type: YTN; PAM sequence: TTT
ggggaataagaaagagaaga

SEQ ID NO: 376887 - DNA, 20 bp, Artificial Sequence
  Description of Artificial Sequence: Synthetic oligonucleotide
  Target: LAMA2; (+) strand; PAM type: YTN; PAM sequence: TTG
gggaataagaaagagaagac

SEQ ID NO: 376888 - DNA, 20 bp, Artificial Sequence
  Description of Artificial Sequence: Synthetic oligonucleotide
  Target: LAMA2; (+) strand; PAM type: YTN; PAM sequence: CTT
aggatgactcctaggttttg

SEQ ID NO: 376889 - DNA, 20 bp, Artificial Sequence
  Description of Artificial Sequence: Synthetic oligonucleotide
  Target: LAMA2; (+) strand; PAM type: YTN; PAM sequence: TTA
ggatgactcctaggttttgc

SEQ ID NO: 376890 - DNA, 20 bp, Artificial Sequence
  Description of Artificial Sequence: Synthetic oligonucleotide
  Target: LAMA2; (+) strand; PAM type: YTN; PAM sequence: CTC
ctaggttttgctttgcaatg

SEQ ID NO: 376891 - DNA, 20 bp, Artificial Sequence
  Description of Artificial Sequence: Synthetic oligonucleotide
  Target: LAMA2; (+) strand; PAM type: YTN; PAM sequence: CTA
ggttttgctttgcaatggag

SEQ ID NO: 376892 - DNA, 20 bp, Artificial Sequence
  Description of Artificial Sequence: Synthetic oligonucleotide
  Target: LAMA2; (+) strand; PAM type: YTN; PAM sequence: TTT
tgctttgcaatggagtagat

SEQ ID NO: 376893 - DNA, 20 bp, Artificial Sequence
  Description of Artificial Sequence: Synthetic oligonucleotide
  Target: LAMA2; (+) strand; PAM type: YTN; PAM sequence: TTT
gctttgcaatggagtagatg

SEQ ID NO: 376894 - DNA, 20 bp, Artificial Sequence
  Description of Artificial Sequence: Synthetic oligonucleotide
  Target: LAMA2; (+) strand; PAM type: YTN; PAM sequence: TTG
ctttgcaatggagtagatga

SEQ ID NO: 376895 - DNA, 20 bp, Artificial Sequence
  Description of Artificial Sequence: Synthetic oligonucleotide
  Target: LAMA2; (+) strand; PAM type: YTN; PAM sequence: CTT
tgcaatggagtagatgataa

SEQ ID NO: 376896 - DNA, 20 bp, Artificial Sequence
  Description of Artificial Sequence: Synthetic oligonucleotide
  Target: LAMA2; (+) strand; PAM type: YTN; PAM sequence: TTT
gcaatggagtagatgataat

SEQ ID NO: 376897 - DNA, 20 bp, Artificial Sequence
  Description of Artificial Sequence: Synthetic oligonucleotide
  Target: LAMA2; (+) strand; PAM type: YTN; PAM sequence: TTG
caatggagtagatgataata

SEQ ID NO: 376898 - DNA, 20 bp, Artificial Sequence
  Description of Artificial Sequence: Synthetic oligonucleotide
  Target: LAMA2; (+) strand; PAM type: YTN; PAM sequence: CTA
taggaattataggaggagga

SEQ ID NO: 376899 - DNA, 20 bp, Artificial Sequence
  Description of Artificial Sequence: Synthetic oligonucleotide
  Target: LAMA2; (+) strand; PAM type: YTN; PAM sequence: TTA
taggaggaggagcaagttca

SEQ ID NO: 376900 - DNA, 20 bp, Artificial Sequence
  Description of Artificial Sequence: Synthetic oligonucleotide
  Target: LAMA2; (+) strand; PAM type: YTN; PAM sequence: TTC
aggaaggaaagataatcact

SEQ ID NO: 376901 - DNA, 20 bp, Artificial Sequence
  Description of Artificial Sequence: Synthetic oligonucleotide
  Target: LAMA2; (+) strand; PAM type: YTN; PAM sequence: CTT
tgcatttttatcagcttttt

SEQ ID NO: 376902 - DNA, 20 bp, Artificial Sequence
  Description of Artificial Sequence: Synthetic oligonucleotide
  Target: LAMA2; (+) strand; PAM type: YTN; PAM sequence: TTT
gcatttttatcagctttttg

SEQ ID NO: 376903 - DNA, 20 bp, Artificial Sequence
  Description of Artificial Sequence: Synthetic oligonucleotide
  Target: LAMA2; (+) strand; PAM type: YTN; PAM sequence: TTG
catttttatcagctttttgt

SEQ ID NO: 376904 - DNA, 20 bp, Artificial Sequence
  Description of Artificial Sequence: Synthetic oligonucleotide
  Target: LAMA2; (+) strand; PAM type: YTN; PAM sequence: TTT
ttatcagctttttgtgaggt

SEQ ID NO: 376905 - DNA, 20 bp, Artificial Sequence
  Description of Artificial Sequence: Synthetic oligonucleotide
  Target: LAMA2; (+) strand; PAM type: YTN; PAM sequence: TTT
tatcagctttttgtgaggta

SEQ ID NO: 376906 - DNA, 20 bp, Artificial Sequence
  Description of Artificial Sequence: Synthetic oligonucleotide
  Target: LAMA2; (+) strand; PAM type: YTN; PAM sequence: TTT
atcagctttttgtgaggtat

SEQ ID NO: 376907 - DNA, 20 bp, Artificial Sequence
  Description of Artificial Sequence: Synthetic oligonucleotide
  Target: LAMA2; (+) strand; PAM type: YTN; PAM sequence: TTA
tcagctttttgtgaggtatt

SEQ ID NO: 376908 - DNA, 20 bp, Artificial Sequence
  Description of Artificial Sequence: Synthetic oligonucleotide
  Target: LAMA2; (+) strand; PAM type: YTN; PAM sequence: CTT
tttgtgaggtattaataaaa

SEQ ID NO: 376909 - DNA, 20 bp, Artificial Sequence
  Description of Artificial Sequence: Synthetic oligonucleotide
  Target: LAMA2; (+) strand; PAM type: YTN; PAM sequence: TTT
ttgtgaggtattaataaaat

SEQ ID NO: 376910 - DNA, 20 bp, Artificial Sequence
  Description of Artificial Sequence: Synthetic oligonucleotide
  Target: LAMA2; (+) strand; PAM type: YTN; PAM sequence: TTT
tgtgaggtattaataaaata

SEQ ID NO: 376911 - DNA, 20 bp, Artificial Sequence
  Description of Artificial Sequence: Synthetic oligonucleotide
  Target: LAMA2; (+) strand; PAM type: YTN; PAM sequence: TTT
gtgaggtattaataaaataa

SEQ ID NO: 376912 - DNA, 20 bp, Artificial Sequence
  Description of Artificial Sequence: Synthetic oligonucleotide
  Target: LAMA2; (+) strand; PAM type: YTN; PAM sequence: TTG
tgaggtattaataaaataaa

SEQ ID NO: 376913 - DNA, 20 bp, Artificial Sequence
  Description of Artificial Sequence: Synthetic oligonucleotide
  Target: LAMA2; (+) strand; PAM type: YTN; PAM sequence: TTA
ataaaataaaattcacccat

SEQ ID NO: 376914 - DNA, 20 bp, Artificial Sequence
  Description of Artificial Sequence: Synthetic oligonucleotide
  Target: LAMA2; (+) strand; PAM type: YTN; PAM sequence: TTC
acccatttatagtaatgaat

SEQ ID NO: 376915 - DNA, 20 bp, Artificial Sequence
  Description of Artificial Sequence: Synthetic oligonucleotide
  Target: LAMA2; (+) strand; PAM type: YTN; PAM sequence: TTT
atagtaatgaattttaacca

SEQ ID NO: 376916 - DNA, 20 bp, Artificial Sequence
  Description of Artificial Sequence: Synthetic oligonucleotide
  Target: LAMA2; (+) strand; PAM type: YTN; PAM sequence: TTA
tagtaatgaattttaaccaa

SEQ ID NO: 376917 - DNA, 20 bp, Artificial Sequence
  Description of Artificial Sequence: Synthetic oligonucleotide
  Target: LAMA2; (+) strand; PAM type: YTN; PAM sequence: TTT
taaccaatgattacagtggt

SEQ ID NO: 376918 - DNA, 20 bp, Artificial Sequence
  Description of Artificial Sequence: Synthetic oligonucleotide
  Target: LAMA2; (+) strand; PAM type: YTN; PAM sequence: TTT
aaccaatgattacagtggtg

SEQ ID NO: 376919 - DNA, 20 bp, Artificial Sequence
  Description of Artificial Sequence: Synthetic oligonucleotide
  Target: LAMA2; (+) strand; PAM type: YTN; PAM sequence: TTA
accaatgattacagtggtgt

SEQ ID NO: 376920 - DNA, 20 bp, Artificial Sequence
  Description of Artificial Sequence: Synthetic oligonucleotide
  Target: LAMA2; (+) strand; PAM type: YTN; PAM sequence: TTA
cagtggtgtaatcatccctt

SEQ ID NO: 376921 - DNA, 20 bp, Artificial Sequence
  Description of Artificial Sequence: Synthetic oligonucleotide
  Target: LAMA2; (+) strand; PAM type: YTN; PAM sequence: CTT
gtgccccattgcagtgaagt

SEQ ID NO: 376922 - DNA, 20 bp, Artificial Sequence
  Description of Artificial Sequence: Synthetic oligonucleotide
  Target: LAMA2; (+) strand; PAM type: YTN; PAM sequence: TTG
tgccccattgcagtgaagtc

SEQ ID NO: 376923 - DNA, 20 bp, Artificial Sequence
  Description of Artificial Sequence: Synthetic oligonucleotide
  Target: LAMA2; (+) strand; PAM type: YTN; PAM sequence: TTG
cagtgaagtccccatcaccc

SEQ ID NO: 376924 - DNA, 20 bp, Artificial Sequence
  Description of Artificial Sequence: Synthetic oligonucleotide
  Target: LAMA2; (+) strand; PAM type: YTN; PAM sequence: CTA
ctgttttgccttctagcatt

SEQ ID NO: 376925 - DNA, 20 bp, Artificial Sequence
  Description of Artificial Sequence: Synthetic oligonucleotide
  Target: LAMA2; (+) strand; PAM type: YTN; PAM sequence: CTG
ttttgccttctagcattata

SEQ ID NO: 376926 - DNA, 20 bp, Artificial Sequence
  Description of Artificial Sequence: Synthetic oligonucleotide
  Target: LAMA2; (+) strand; PAM type: YTN; PAM sequence: TTT
tgccttctagcattataatt

SEQ ID NO: 376927 - DNA, 20 bp, Artificial Sequence
  Description of Artificial Sequence: Synthetic oligonucleotide
  Target: LAMA2; (+) strand; PAM type: YTN; PAM sequence: TTT
gccttctagcattataattt

SEQ ID NO: 376928 - DNA, 20 bp, Artificial Sequence
  Description of Artificial Sequence: Synthetic oligonucleotide
  Target: LAMA2; (+) strand; PAM type: YTN; PAM sequence: TTG
ccttctagcattataatttt

SEQ ID NO: 376929 - DNA, 20 bp, Artificial Sequence
  Description of Artificial Sequence: Synthetic oligonucleotide
  Target: LAMA2; (+) strand; PAM type: YTN; PAM sequence: CTT
ctagcattataattttccaa

SEQ ID NO: 376930 - DNA, 20 bp, Artificial Sequence
  Description of Artificial Sequence: Synthetic oligonucleotide
  Target: LAMA2; (+) strand; PAM type: YTN; PAM sequence: TTC
tagcattataattttccaat

SEQ ID NO: 376931 - DNA, 20 bp, Artificial Sequence
  Description of Artificial Sequence: Synthetic oligonucleotide
  Target: LAMA2; (+) strand; PAM type: YTN; PAM sequence: CTA
gcattataattttccaattt

SEQ ID NO: 376932 - DNA, 20 bp, Artificial Sequence
  Description of Artificial Sequence: Synthetic oligonucleotide
  Target: LAMA2; (+) strand; PAM type: YTN; PAM sequence: TTA
taattttccaatttctacaa

SEQ ID NO: 376933 - DNA, 20 bp, Artificial Sequence
  Description of Artificial Sequence: Synthetic oligonucleotide
  Target: LAMA2; (+) strand; PAM type: YTN; PAM sequence: TTT
tccaatttctacaacttctg

SEQ ID NO: 376934 - DNA, 20 bp, Artificial Sequence
  Description of Artificial Sequence: Synthetic oligonucleotide
  Target: LAMA2; (+) strand; PAM type: YTN; PAM sequence: TTT
ccaatttctacaacttctga

SEQ ID NO: 376935 - DNA, 20 bp, Artificial Sequence
  Description of Artificial Sequence: Synthetic oligonucleotide
  Target: LAMA2; (+) strand; PAM type: YTN; PAM sequence: TTC
caatttctacaacttctgaa

SEQ ID NO: 376936 - DNA, 20 bp, Artificial Sequence
  Description of Artificial Sequence: Synthetic oligonucleotide
  Target: LAMA2; (+) strand; PAM type: YTN; PAM sequence: TTT
ctacaacttctgaaaaatag

SEQ ID NO: 376937 - DNA, 20 bp, Artificial Sequence
  Description of Artificial Sequence: Synthetic oligonucleotide
  Target: LAMA2; (+) strand; PAM type: YTN; PAM sequence: TTC
tacaacttctgaaaaataga

SEQ ID NO: 376938 - DNA, 20 bp, Artificial Sequence
  Description of Artificial Sequence: Synthetic oligonucleotide
  Target: LAMA2; (+) strand; PAM type: YTN; PAM sequence: CTA
caacttctgaaaaatagaat

SEQ ID NO: 376939 - DNA, 20 bp, Artificial Sequence
  Description of Artificial Sequence: Synthetic oligonucleotide
  Target: LAMA2; (+) strand; PAM type: YTN; PAM sequence: CTT
ctgaaaaatagaatcgtagt

SEQ ID NO: 376940 - DNA, 20 bp, Artificial Sequence
  Description of Artificial Sequence: Synthetic oligonucleotide
  Target: LAMA2; (+) strand; PAM type: YTN; PAM sequence: TTC
tgaaaaatagaatcgtagtc

SEQ ID NO: 376941 - DNA, 20 bp, Artificial Sequence
  Description of Artificial Sequence: Synthetic oligonucleotide
  Target: LAMA2; (+) strand; PAM type: YTN; PAM sequence: CTG
aaaaatagaatcgtagtctg

SEQ ID NO: 376942 - DNA, 20 bp, Artificial Sequence
  Description of Artificial Sequence: Synthetic oligonucleotide
  Target: LAMA2; (+) strand; PAM type: YTN; PAM sequence: CTG
tttttttgagggggggtttg

SEQ ID NO: 376943 - DNA, 20 bp, Artificial Sequence
  Description of Artificial Sequence: Synthetic oligonucleotide
  Target: LAMA2; (+) strand; PAM type: YTN; PAM sequence: TTT
ttttgagggggggtttgttt

SEQ ID NO: 376944 - DNA, 20 bp, Artificial Sequence
  Description of Artificial Sequence: Synthetic oligonucleotide
  Target: LAMA2; (+) strand; PAM type: YTN; PAM sequence: TTT
tttgagggggggtttgtttg

SEQ ID NO: 376945 - DNA, 20 bp, Artificial Sequence
  Description of Artificial Sequence: Synthetic oligonucleotide
  Target: LAMA2; (+) strand; PAM type: YTN; PAM sequence: TTT
ttgagggggggtttgtttgt

SEQ ID NO: 376946 - DNA, 20 bp, Artificial Sequence
  Description of Artificial Sequence: Synthetic oligonucleotide
  Target: LAMA2; (+) strand; PAM type: YTN; PAM sequence: TTT
tgagggggggtttgtttgtt

SEQ ID NO: 376947 - DNA, 20 bp, Artificial Sequence
  Description of Artificial Sequence: Synthetic oligonucleotide
  Target: LAMA2; (+) strand; PAM type: YTN; PAM sequence: TTT
gagggggggtttgtttgttt

SEQ ID NO: 376948 - DNA, 20 bp, Artificial Sequence
  Description of Artificial Sequence: Synthetic oligonucleotide
  Target: LAMA2; (+) strand; PAM type: YTN; PAM sequence: TTG
agggggggtttgtttgtttc

SEQ ID NO: 376949 - DNA, 20 bp, Artificial Sequence
  Description of Artificial Sequence: Synthetic oligonucleotide
  Target: LAMA2; (+) strand; PAM type: YTN; PAM sequence: TTT
gtttgtttctttgtttggct

SEQ ID NO: 376950 - DNA, 20 bp, Artificial Sequence
  Description of Artificial Sequence: Synthetic oligonucleotide
  Target: LAMA2; (+) strand; PAM type: YTN; PAM sequence: TTG
tttgtttctttgtttggctt

SEQ ID NO: 376951 - DNA, 20 bp, Artificial Sequence
  Description of Artificial Sequence: Synthetic oligonucleotide
  Target: LAMA2; (+) strand; PAM type: YTN; PAM sequence: TTT
gtttctttgtttggcttcct

SEQ ID NO: 376952 - DNA, 20 bp, Artificial Sequence
  Description of Artificial Sequence: Synthetic oligonucleotide
  Target: LAMA2; (+) strand; PAM type: YTN; PAM sequence: TTG
tttctttgtttggcttcctt

SEQ ID NO: 376953 - DNA, 20 bp, Artificial Sequence
  Description of Artificial Sequence: Synthetic oligonucleotide
  Target: LAMA2; (+) strand; PAM type: YTN; PAM sequence: TTT
ctttgtttggcttccttcac

SEQ ID NO: 376954 - DNA, 20 bp, Artificial Sequence
  Description of Artificial Sequence: Synthetic oligonucleotide
  Target: LAMA2; (+) strand; PAM type: YTN; PAM sequence: TTC
tttgtttggcttccttcact

SEQ ID NO: 376955 - DNA, 20 bp, Artificial Sequence
  Description of Artificial Sequence: Synthetic oligonucleotide
  Target: LAMA2; (+) strand; PAM type: YTN; PAM sequence: CTT
tgtttggcttccttcacttg

SEQ ID NO: 376956 - DNA, 20 bp, Artificial Sequence
  Description of Artificial Sequence: Synthetic oligonucleotide
  Target: LAMA2; (+) strand; PAM type: YTN; PAM sequence: TTT
gtttggcttccttcacttgg

SEQ ID NO: 376957 - DNA, 20 bp, Artificial Sequence
  Description of Artificial Sequence: Synthetic oligonucleotide
  Target: LAMA2; (+) strand; PAM type: YTN; PAM sequence: TTG
tttggcttccttcacttggt

SEQ ID NO: 376958 - DNA, 20 bp, Artificial Sequence
  Description of Artificial Sequence: Synthetic oligonucleotide
  Target: LAMA2; (+) strand; PAM type: YTN; PAM sequence: TTT
ggcttccttcacttggtgtt

SEQ ID NO: 376959 - DNA, 20 bp, Artificial Sequence
  Description of Artificial Sequence: Synthetic oligonucleotide
  Target: LAMA2; (+) strand; PAM type: YTN; PAM sequence: TTG
gcttccttcacttggtgtta

SEQ ID NO: 376960 - DNA, 20 bp, Artificial Sequence
  Description of Artificial Sequence: Synthetic oligonucleotide
  Target: LAMA2; (+) strand; PAM type: YTN; PAM sequence: CTT
ccttcacttggtgttacgtt

SEQ ID NO: 376961 - DNA, 20 bp, Artificial Sequence
  Description of Artificial Sequence: Synthetic oligonucleotide
  Target: LAMA2; (+) strand; PAM type: YTN; PAM sequence: TTC
cttcacttggtgttacgttt

SEQ ID NO: 376962 - DNA, 20 bp, Artificial Sequence
  Description of Artificial Sequence: Synthetic oligonucleotide
  Target: LAMA2; (+) strand; PAM type: YTN; PAM sequence: CTT
cacttggtgttacgtttttg

SEQ ID NO: 376963 - DNA, 20 bp, Artificial Sequence
  Description of Artificial Sequence: Synthetic oligonucleotide
  Target: LAMA2; (+) strand; PAM type: YTN; PAM sequence: TTC
acttggtgttacgtttttgt

SEQ ID NO: 376964 - DNA, 20 bp, Artificial Sequence
  Description of Artificial Sequence: Synthetic oligonucleotide
  Target: LAMA2; (+) strand; PAM type: YTN; PAM sequence: CTT
ggtgttacgtttttgtaatt

SEQ ID NO: 376965 - DNA, 20 bp, Artificial Sequence
  Description of Artificial Sequence: Synthetic oligonucleotide
  Target: LAMA2; (+) strand; PAM type: YTN; PAM sequence: TTG
gtgttacgtttttgtaattc

SEQ ID NO: 376966 - DNA, 20 bp, Artificial Sequence
  Description of Artificial Sequence: Synthetic oligonucleotide
  Target: LAMA2; (+) strand; PAM type: YTN; PAM sequence: TTA
cgtttttgtaattcatccat

SEQ ID NO: 376967 - DNA, 20 bp, Artificial Sequence
  Description of Artificial Sequence: Synthetic oligonucleotide
  Target: LAMA2; (+) strand; PAM type: YTN; PAM sequence: TTT
ttgtaattcatccatattgt

SEQ ID NO: 376968 - DNA, 20 bp, Artificial Sequence
  Description of Artificial Sequence: Synthetic oligonucleotide
  Target: LAMA2; (+) strand; PAM type: YTN; PAM sequence: TTT
tgtaattcatccatattgtt

SEQ ID NO: 376969 - DNA, 20 bp, Artificial Sequence
  Description of Artificial Sequence: Synthetic oligonucleotide
  Target: LAMA2; (+) strand; PAM type: YTN; PAM sequence: TTT
gtaattcatccatattgttg

SEQ ID NO: 376970 - DNA, 20 bp, Artificial Sequence
  Description of Artificial Sequence: Synthetic oligonucleotide
  Target: LAMA2; (+) strand; PAM type: YTN; PAM sequence: TTG
taattcatccatattgttgc

SEQ ID NO: 376971 - DNA, 20 bp, Artificial Sequence
  Description of Artificial Sequence: Synthetic oligonucleotide
  Target: LAMA2; (+) strand; PAM type: YTN; PAM sequence: TTC
atccatattgttgcatgtat

SEQ ID NO: 376972 - DNA, 20 bp, Artificial Sequence
  Description of Artificial Sequence: Synthetic oligonucleotide
  Target: LAMA2; (+) strand; PAM type: YTN; PAM sequence: TTG
ttgcatgtatcagcagtttg

SEQ ID NO: 376973 - DNA, 20 bp, Artificial Sequence
  Description of Artificial Sequence: Synthetic oligonucleotide
  Target: LAMA2; (+) strand; PAM type: YTN; PAM sequence: TTG
catgtatcagcagtttgttc

SEQ ID NO: 376974 - DNA, 20 bp, Artificial Sequence
  Description of Artificial Sequence: Synthetic oligonucleotide
  Target: LAMA2; (+) strand; PAM type: YTN; PAM sequence: TTT
gttctaaaaattgcttaata

SEQ ID NO: 376975 - DNA, 20 bp, Artificial Sequence
  Description of Artificial Sequence: Synthetic oligonucleotide
  Target: LAMA2; (+) strand; PAM type: YTN; PAM sequence: TTG
ttctaaaaattgcttaataa

SEQ ID NO: 376976 - DNA, 20 bp, Artificial Sequence
  Description of Artificial Sequence: Synthetic oligonucleotide
  Target: LAMA2; (+) strand; PAM type: YTN; PAM sequence: TTC
taaaaattgcttaataatat

SEQ ID NO: 376977 - DNA, 20 bp, Artificial Sequence
  Description of Artificial Sequence: Synthetic oligonucleotide
  Target: LAMA2; (+) strand; PAM type: YTN; PAM sequence: CTA
aaaattgcttaataatattc

SEQ ID NO: 376978 - DNA, 20 bp, Artificial Sequence
  Description of Artificial Sequence: Synthetic oligonucleotide
  Target: LAMA2; (+) strand; PAM type: YTN; PAM sequence: TTG
cttaataatattccatttgt

SEQ ID NO: 376979 - DNA, 20 bp, Artificial Sequence
  Description of Artificial Sequence: Synthetic oligonucleotide
  Target: LAMA2; (+) strand; PAM type: YTN; PAM sequence: CTT
aataatattccatttgtgta

SEQ ID NO: 376980 - DNA, 20 bp, Artificial Sequence
  Description of Artificial Sequence: Synthetic oligonucleotide
  Target: LAMA2; (+) strand; PAM type: YTN; PAM sequence: TTA
ataatattccatttgtgtaa

SEQ ID NO: 376981 - DNA, 20 bp, Artificial Sequence
  Description of Artificial Sequence: Synthetic oligonucleotide
  Target: LAMA2; (+) strand; PAM type: YTN; PAM sequence: TTC
catttgtgtaatgtacagtg

SEQ ID NO: 376982 - DNA, 20 bp, Artificial Sequence
  Description of Artificial Sequence: Synthetic oligonucleotide
  Target: LAMA2; (+) strand; PAM type: YTN; PAM sequence: TTT
gtgtaatgtacagtgacttg

SEQ ID NO: 376983 - DNA, 20 bp, Artificial Sequence
  Description of Artificial Sequence: Synthetic oligonucleotide
  Target: LAMA2; (+) strand; PAM type: YTN; PAM sequence: TTG
tgtaatgtacagtgacttgc

SEQ ID NO: 376984 - DNA, 20 bp, Artificial Sequence
  Description of Artificial Sequence: Synthetic oligonucleotide
  Target: LAMA2; (+) strand; PAM type: YTN; PAM sequence: CTT
gcttacctgtttaccattta

SEQ ID NO: 376985 - DNA, 20 bp, Artificial Sequence
  Description of Artificial Sequence: Synthetic oligonucleotide
  Target: LAMA2; (+) strand; PAM type: YTN; PAM sequence: TTG
cttacctgtttaccatttaa

SEQ ID NO: 376986 - DNA, 20 bp, Artificial Sequence
  Description of Artificial Sequence: Synthetic oligonucleotide
  Target: LAMA2; (+) strand; PAM type: YTN; PAM sequence: CTT
acctgtttaccatttaatgg

SEQ ID NO: 376987 - DNA, 20 bp, Artificial Sequence
  Description of Artificial Sequence: Synthetic oligonucleotide
  Target: LAMA2; (+) strand; PAM type: YTN; PAM sequence: TTA
cctgtttaccatttaatggg

SEQ ID NO: 376988 - DNA, 20 bp, Artificial Sequence
  Description of Artificial Sequence: Synthetic oligonucleotide
  Target: LAMA2; (+) strand; PAM type: YTN; PAM sequence: CTG
tttaccatttaatgggtgtt

SEQ ID NO: 376989 - DNA, 20 bp, Artificial Sequence
  Description of Artificial Sequence: Synthetic oligonucleotide
  Target: LAMA2; (+) strand; PAM type: YTN; PAM sequence: TTT
accatttaatgggtgtttgg

SEQ ID NO: 376990 - DNA, 20 bp, Artificial Sequence
  Description of Artificial Sequence: Synthetic oligonucleotide
  Target: LAMA2; (+) strand; PAM type: YTN; PAM sequence: TTA
ccatttaatgggtgtttggg

SEQ ID NO: 376991 - DNA, 20 bp, Artificial Sequence
  Description of Artificial Sequence: Synthetic oligonucleotide
  Target: LAMA2; (+) strand; PAM type: YTN; PAM sequence: TTT
aatgggtgtttgggtcattt

SEQ ID NO: 376992 - DNA, 20 bp, Artificial Sequence
  Description of Artificial Sequence: Synthetic oligonucleotide
  Target: LAMA2; (+) strand; PAM type: YTN; PAM sequence: TTA
atgggtgtttgggtcatttc

SEQ ID NO: 376993 - DNA, 20 bp, Artificial Sequence
  Description of Artificial Sequence: Synthetic oligonucleotide
  Target: LAMA2; (+) strand; PAM type: YTN; PAM sequence: TTT
gggtcatttctagtttgggg

SEQ ID NO: 376994 - DNA, 20 bp, Artificial Sequence
  Description of Artificial Sequence: Synthetic oligonucleotide
  Target: LAMA2; (+) strand; PAM type: YTN; PAM sequence: TTG
ggtcatttctagtttggggt

SEQ ID NO: 376995 - DNA, 20 bp, Artificial Sequence
  Description of Artificial Sequence: Synthetic oligonucleotide
  Target: LAMA2; (+) strand; PAM type: YTN; PAM sequence: TTT
ctagtttggggttacaattt

SEQ ID NO: 376996 - DNA, 20 bp, Artificial Sequence
  Description of Artificial Sequence: Synthetic oligonucleotide
  Target: LAMA2; (+) strand; PAM type: YTN; PAM sequence: TTC
tagtttggggttacaatttt

SEQ ID NO: 376997 - DNA, 20 bp, Artificial Sequence
  Description of Artificial Sequence: Synthetic oligonucleotide
  Target: LAMA2; (+) strand; PAM type: YTN; PAM sequence: CTA
gtttggggttacaattttgc

SEQ ID NO: 376998 - DNA, 20 bp, Artificial Sequence
  Description of Artificial Sequence: Synthetic oligonucleotide
  Target: LAMA2; (+) strand; PAM type: YTN; PAM sequence: TTT
ggggttacaattttgctgtg

SEQ ID NO: 376999 - DNA, 20 bp, Artificial Sequence
  Description of Artificial Sequence: Synthetic oligonucleotide
  Target: LAMA2; (+) strand; PAM type: YTN; PAM sequence: TTG
gggttacaattttgctgtga

SEQ ID NO: 377000 - DNA, 20 bp, Artificial Sequence
  Description of Artificial Sequence: Synthetic oligonucleotide
  Target: LAMA2; (+) strand; PAM type: YTN; PAM sequence: TTA
caattttgctgtgaacatta

SEQ ID NO: 377001 - DNA, 20 bp, Artificial Sequence
  Description of Artificial Sequence: Synthetic oligonucleotide
  Target: LAMA2; (+) strand; PAM type: YTN; PAM sequence: TTT
tgctgtgaacattagcatac

SEQ ID NO: 377002 - DNA, 20 bp, Artificial Sequence
  Description of Artificial Sequence: Synthetic oligonucleotide
  Target: LAMA2; (+) strand; PAM type: YTN; PAM sequence: TTT
gctgtgaacattagcataca

SEQ ID NO: 377003 - DNA, 20 bp, Artificial Sequence
  Description of Artificial Sequence: Synthetic oligonucleotide
  Target: LAMA2; (+) strand; PAM type: YTN; PAM sequence: TTG
ctgtgaacattagcatacaa

SEQ ID NO: 377004 - DNA, 20 bp, Artificial Sequence
  Description of Artificial Sequence: Synthetic oligonucleotide
  Target: LAMA2; (+) strand; PAM type: YTN; PAM sequence: CTG
tgaacattagcatacaagtc

SEQ ID NO: 377005 - DNA, 20 bp, Artificial Sequence
  Description of Artificial Sequence: Synthetic oligonucleotide
  Target: LAMA2; (+) strand; PAM type: YTN; PAM sequence: TTA
gcatacaagtcaaaagcata

SEQ ID NO: 377006 - DNA, 20 bp, Artificial Sequence
  Description of Artificial Sequence: Synthetic oligonucleotide
  Target: LAMA2; (+) strand; PAM type: YTN; PAM sequence: TTT
atggacaaatgttttctctt

SEQ ID NO: 377007 - DNA, 20 bp, Artificial Sequence
  Description of Artificial Sequence: Synthetic oligonucleotide
  Target: LAMA2; (+) strand; PAM type: YTN; PAM sequence: TTA
tggacaaatgttttctcttt

SEQ ID NO: 377008 - DNA, 20 bp, Artificial Sequence
  Description of Artificial Sequence: Synthetic oligonucleotide
  Target: LAMA2; (+) strand; PAM type: YTN; PAM sequence: TTT
tctcttttttttcttaagaa

SEQ ID NO: 377009 - DNA, 20 bp, Artificial Sequence
  Description of Artificial Sequence: Synthetic oligonucleotide
  Target: LAMA2; (+) strand; PAM type: YTN; PAM sequence: TTT
ctcttttttttcttaagaac

SEQ ID NO: 377010 - DNA, 20 bp, Artificial Sequence
  Description of Artificial Sequence: Synthetic oligonucleotide
  Target: LAMA2; (+) strand; PAM type: YTN; PAM sequence: TTC
tcttttttttcttaagaaca

SEQ ID NO: 377011 - DNA, 20 bp, Artificial Sequence
  Description of Artificial Sequence: Synthetic oligonucleotide
  Target: LAMA2; (+) strand; PAM type: YTN; PAM sequence: CTC
ttttttttcttaagaacact

SEQ ID NO: 377012 - DNA, 20 bp, Artificial Sequence
  Description of Artificial Sequence: Synthetic oligonucleotide
  Target: LAMA2; (+) strand; PAM type: YTN; PAM sequence: CTT
ttttttcttaagaacactcc

SEQ ID NO: 377013 - DNA, 20 bp, Artificial Sequence
  Description of Artificial Sequence: Synthetic oligonucleotide
  Target: LAMA2; (+) strand; PAM type: YTN; PAM sequence: TTT
tttttcttaagaacactcca

SEQ ID NO: 377014 - DNA, 20 bp, Artificial Sequence
  Description of Artificial Sequence: Synthetic oligonucleotide
  Target: LAMA2; (+) strand; PAM type: YTN; PAM sequence: TTT
ttttcttaagaacactccac

SEQ ID NO: 377015 - DNA, 20 bp, Artificial Sequence
  Description of Artificial Sequence: Synthetic oligonucleotide
  Target: LAMA2; (+) strand; PAM type: YTN; PAM sequence: TTT
tttcttaagaacactccaca

SEQ ID NO: 377016 - DNA, 20 bp, Artificial Sequence
  Description of Artificial Sequence: Synthetic oligonucleotide
  Target: LAMA2; (+) strand; PAM type: YTN; PAM sequence: TTT
ttcttaagaacactccacat

SEQ ID NO: 377017 - DNA, 20 bp, Artificial Sequence
  Description of Artificial Sequence: Synthetic oligonucleotide
  Target: LAMA2; (+) strand; PAM type: YTN; PAM sequence: TTT
tcttaagaacactccacatc

SEQ ID NO: 377018 - DNA, 20 bp, Artificial Sequence
  Description of Artificial Sequence: Synthetic oligonucleotide
  Target: LAMA2; (+) strand; PAM type: YTN; PAM sequence: TTT
cttaagaacactccacatct

SEQ ID NO: 377019 - DNA, 20 bp, Artificial Sequence
  Description of Artificial Sequence: Synthetic oligonucleotide
  Target: LAMA2; (+) strand; PAM type: YTN; PAM sequence: TTC
ttaagaacactccacatctt

SEQ ID NO: 377020 - DNA, 20 bp, Artificial Sequence
  Description of Artificial Sequence: Synthetic oligonucleotide
  Target: LAMA2; (+) strand; PAM type: YTN; PAM sequence: CTT
aagaacactccacatctttg

SEQ ID NO: 377021 - DNA, 20 bp, Artificial Sequence
  Description of Artificial Sequence: Synthetic oligonucleotide
  Target: LAMA2; (+) strand; PAM type: YTN; PAM sequence: TTA
agaacactccacatctttgc

SEQ ID NO: 377022 - DNA, 20 bp, Artificial Sequence
  Description of Artificial Sequence: Synthetic oligonucleotide
  Target: LAMA2; (+) strand; PAM type: YTN; PAM sequence: CTC
cacatctttgccaactcttg

SEQ ID NO: 377023 - DNA, 20 bp, Artificial Sequence
  Description of Artificial Sequence: Synthetic oligonucleotide
  Target: LAMA2; (+) strand; PAM type: YTN; PAM sequence: CTT
tgccaactcttggactttta

SEQ ID NO: 377024 - DNA, 20 bp, Artificial Sequence
  Description of Artificial Sequence: Synthetic oligonucleotide
  Target: LAMA2; (+) strand; PAM type: YTN; PAM sequence: TTT
gccaactcttggacttttaa

SEQ ID NO: 377025 - DNA, 20 bp, Artificial Sequence
  Description of Artificial Sequence: Synthetic oligonucleotide
  Target: LAMA2; (+) strand; PAM type: YTN; PAM sequence: TTG
ccaactcttggacttttaac

SEQ ID NO: 377026 - DNA, 20 bp, Artificial Sequence
  Description of Artificial Sequence: Synthetic oligonucleotide
  Target: LAMA2; (+) strand; PAM type: YTN; PAM sequence: CTC
ttggacttttaacccttttt

SEQ ID NO: 377027 - DNA, 20 bp, Artificial Sequence
  Description of Artificial Sequence: Synthetic oligonucleotide
  Target: LAMA2; (+) strand; PAM type: YTN; PAM sequence: CTT
ggacttttaaccctttttta

SEQ ID NO: 377028 - DNA, 20 bp, Artificial Sequence
  Description of Artificial Sequence: Synthetic oligonucleotide
  Target: LAMA2; (+) strand; PAM type: YTN; PAM sequence: TTG
gacttttaacccttttttaa

SEQ ID NO: 377029 - DNA, 20 bp, Artificial Sequence
  Description of Artificial Sequence: Synthetic oligonucleotide
  Target: LAMA2; (+) strand; PAM type: YTN; PAM sequence: CTT
ttaacccttttttaatttta

SEQ ID NO: 377030 - DNA, 20 bp, Artificial Sequence
  Description of Artificial Sequence: Synthetic oligonucleotide
  Target: LAMA2; (+) strand; PAM type: YTN; PAM sequence: TTT
taacccttttttaattttaa

SEQ ID NO: 377031 - DNA, 20 bp, Artificial Sequence
  Description of Artificial Sequence: Synthetic oligonucleotide
  Target: LAMA2; (+) strand; PAM type: YTN; PAM sequence: TTT
aacccttttttaattttaag

SEQ ID NO: 377032 - DNA, 20 bp, Artificial Sequence
  Description of Artificial Sequence: Synthetic oligonucleotide
  Target: LAMA2; (+) strand; PAM type: YTN; PAM sequence: TTA
acccttttttaattttaaga

SEQ ID NO: 377033 - DNA, 20 bp, Artificial Sequence
  Description of Artificial Sequence: Synthetic oligonucleotide
  Target: LAMA2; (+) strand; PAM type: YTN; PAM sequence: CTT
ttttaattttaagaattctg

SEQ ID NO: 377034 - DNA, 20 bp, Artificial Sequence
  Description of Artificial Sequence: Synthetic oligonucleotide
  Target: LAMA2; (+) strand; PAM type: YTN; PAM sequence: TTT
tttaattttaagaattctga

SEQ ID NO: 377035 - DNA, 20 bp, Artificial Sequence
  Description of Artificial Sequence: Synthetic oligonucleotide
  Target: LAMA2; (+) strand; PAM type: YTN; PAM sequence: TTT
ttaattttaagaattctgat

SEQ ID NO: 377036 - DNA, 20 bp, Artificial Sequence
  Description of Artificial Sequence: Synthetic oligonucleotide
  Target: LAMA2; (+) strand; PAM type: YTN; PAM sequence: TTT
taattttaagaattctgatg

SEQ ID NO: 377037 - DNA, 20 bp, Artificial Sequence
  Description of Artificial Sequence: Synthetic oligonucleotide
  Target: LAMA2; (+) strand; PAM type: YTN; PAM sequence: TTT
aattttaagaattctgatgc

SEQ ID NO: 377038 - DNA, 20 bp, Artificial Sequence
  Description of Artificial Sequence: Synthetic oligonucleotide
  Target: LAMA2; (+) strand; PAM type: YTN; PAM sequence: TTA
attttaagaattctgatgca

SEQ ID NO: 377039 - DNA, 20 bp, Artificial Sequence
  Description of Artificial Sequence: Synthetic oligonucleotide
  Target: LAMA2; (+) strand; PAM type: YTN; PAM sequence: TTT
taagaattctgatgcatgtg

SEQ ID NO: 377040 - DNA, 20 bp, Artificial Sequence
  Description of Artificial Sequence: Synthetic oligonucleotide
  Target: LAMA2; (+) strand; PAM type: YTN; PAM sequence: TTT
aagaattctgatgcatgtgt

SEQ ID NO: 377041 - DNA, 20 bp, Artificial Sequence
  Description of Artificial Sequence: Synthetic oligonucleotide
  Target: LAMA2; (+) strand; PAM type: YTN; PAM sequence: TTA
agaattctgatgcatgtgta

SEQ ID NO: 377042 - DNA, 20 bp, Artificial Sequence
  Description of Artificial Sequence: Synthetic oligonucleotide
  Target: LAMA2; (+) strand; PAM type: YTN; PAM sequence: TTC
tgatgcatgtgtatttctct

SEQ ID NO: 377043 - DNA, 20 bp, Artificial Sequence
  Description of Artificial Sequence: Synthetic oligonucleotide
  Target: LAMA2; (+) strand; PAM type: YTN; PAM sequence: CTG
atgcatgtgtatttctcttg

SEQ ID NO: 377044 - DNA, 20 bp, Artificial Sequence
  Description of Artificial Sequence: Synthetic oligonucleotide
  Target: LAMA2; (+) strand; PAM type: YTN; PAM sequence: TTT
ctcttgtttgcatttattta

SEQ ID NO: 377045 - DNA, 20 bp, Artificial Sequence
  Description of Artificial Sequence: Synthetic oligonucleotide
  Target: LAMA2; (+) strand; PAM type: YTN; PAM sequence: TTC
tcttgtttgcatttatttaa

SEQ ID NO: 377046 - DNA, 20 bp, Artificial Sequence
  Description of Artificial Sequence: Synthetic oligonucleotide
  Target: LAMA2; (+) strand; PAM type: YTN; PAM sequence: CTC
ttgtttgcatttatttaatg

SEQ ID NO: 377047 - DNA, 20 bp, Artificial Sequence
  Description of Artificial Sequence: Synthetic oligonucleotide
  Target: LAMA2; (+) strand; PAM type: YTN; PAM sequence: CTT
gtttgcatttatttaatgcc

SEQ ID NO: 377048 - DNA, 20 bp, Artificial Sequence
  Description of Artificial Sequence: Synthetic oligonucleotide
  Target: LAMA2; (+) strand; PAM type: YTN; PAM sequence: TTG
tttgcatttatttaatgccc

SEQ ID NO: 377049 - DNA, 20 bp, Artificial Sequence
  Description of Artificial Sequence: Synthetic oligonucleotide
  Target: LAMA2; (+) strand; PAM type: YTN; PAM sequence: TTT
gcatttatttaatgcccagt

SEQ ID NO: 377050 - DNA, 20 bp, Artificial Sequence
  Description of Artificial Sequence: Synthetic oligonucleotide
  Target: LAMA2; (+) strand; PAM type: YTN; PAM sequence: TTG
catttatttaatgcccagta

SEQ ID NO: 377051 - DNA, 20 bp, Artificial Sequence
  Description of Artificial Sequence: Synthetic oligonucleotide
  Target: LAMA2; (+) strand; PAM type: YTN; PAM sequence: TTT
atttaatgcccagtaatgtt

SEQ ID NO: 377052 - DNA, 20 bp, Artificial Sequence
  Description of Artificial Sequence: Synthetic oligonucleotide
  Target: LAMA2; (+) strand; PAM type: YTN; PAM sequence: TTA
tttaatgcccagtaatgttg

SEQ ID NO: 377053 - DNA, 20 bp, Artificial Sequence
  Description of Artificial Sequence: Synthetic oligonucleotide
  Target: LAMA2; (+) strand; PAM type: YTN; PAM sequence: TTT
aatgcccagtaatgttggga

SEQ ID NO: 377054 - DNA, 20 bp, Artificial Sequence
  Description of Artificial Sequence: Synthetic oligonucleotide
  Target: LAMA2; (+) strand; PAM type: YTN; PAM sequence: TTA
atgcccagtaatgttgggaa

SEQ ID NO: 377055 - DNA, 20 bp, Artificial Sequence
  Description of Artificial Sequence: Synthetic oligonucleotide
  Target: LAMA2; (+) strand; PAM type: YTN; PAM sequence: TTG
ggaatcctttcatttattta

SEQ ID NO: 377056 - DNA, 20 bp, Artificial Sequence
  Description of Artificial Sequence: Synthetic oligonucleotide
  Target: LAMA2; (+) strand; PAM type: YTN; PAM sequence: CTT
tcatttatttatttgtcatt

SEQ ID NO: 377057 - DNA, 20 bp, Artificial Sequence
  Description of Artificial Sequence: Synthetic oligonucleotide
  Target: LAMA2; (+) strand; PAM type: YTN; PAM sequence: TTT
catttatttatttgtcattt

SEQ ID NO: 377058 - DNA, 20 bp, Artificial Sequence
  Description of Artificial Sequence: Synthetic oligonucleotide
  Target: LAMA2; (+) strand; PAM type: YTN; PAM sequence: TTC
atttatttatttgtcattta

SEQ ID NO: 377059 - DNA, 20 bp, Artificial Sequence
  Description of Artificial Sequence: Synthetic oligonucleotide
  Target: LAMA2; (+) strand; PAM type: YTN; PAM sequence: TTT
atttatttgtcatttataca

SEQ ID NO: 377060 - DNA, 20 bp, Artificial Sequence
  Description of Artificial Sequence: Synthetic oligonucleotide
  Target: LAMA2; (+) strand; PAM type: YTN; PAM sequence: TTA
tttatttgtcatttatacat

SEQ ID NO: 377061 - DNA, 20 bp, Artificial Sequence
  Description of Artificial Sequence: Synthetic oligonucleotide
  Target: LAMA2; (+) strand; PAM type: YTN; PAM sequence: TTT
atttgtcatttatacatctt

SEQ ID NO: 377062 - DNA, 20 bp, Artificial Sequence
  Description of Artificial Sequence: Synthetic oligonucleotide
  Target: LAMA2; (+) strand; PAM type: YTN; PAM sequence: TTA
tttgtcatttatacatcttt

SEQ ID NO: 377063 - DNA, 20 bp, Artificial Sequence
  Description of Artificial Sequence: Synthetic oligonucleotide
  Target: LAMA2; (+) strand; PAM type: YTN; PAM sequence: TTT
gtcatttatacatctttttt

SEQ ID NO: 377064 - DNA, 20 bp, Artificial Sequence
  Description of Artificial Sequence: Synthetic oligonucleotide
  Target: LAMA2; (+) strand; PAM type: YTN; PAM sequence: TTG
tcatttatacatcttttttg

SEQ ID NO: 377065 - DNA, 20 bp, Artificial Sequence
  Description of Artificial Sequence: Synthetic oligonucleotide
  Target: LAMA2; (+) strand; PAM type: YTN; PAM sequence: TTT
atacatcttttttgaagtgt

SEQ ID NO: 377066 - DNA, 20 bp, Artificial Sequence
  Description of Artificial Sequence: Synthetic oligonucleotide
  Target: LAMA2; (+) strand; PAM type: YTN; PAM sequence: TTA
tacatcttttttgaagtgtt

SEQ ID NO: 377067 - DNA, 20 bp, Artificial Sequence
  Description of Artificial Sequence: Synthetic oligonucleotide
  Target: LAMA2; (+) strand; PAM type: YTN; PAM sequence: CTT
ttttgaagtgtttacaaagc

SEQ ID NO: 377068 - DNA, 20 bp, Artificial Sequence
  Description of Artificial Sequence: Synthetic oligonucleotide
  Target: LAMA2; (+) strand; PAM type: YTN; PAM sequence: TTT
tttgaagtgtttacaaagct

SEQ ID NO: 377069 - DNA, 20 bp, Artificial Sequence
  Description of Artificial Sequence: Synthetic oligonucleotide
  Target: LAMA2; (+) strand; PAM type: YTN; PAM sequence: TTT
ttgaagtgtttacaaagctt

SEQ ID NO: 377070 - DNA, 20 bp, Artificial Sequence
  Description of Artificial Sequence: Synthetic oligonucleotide
  Target: LAMA2; (+) strand; PAM type: YTN; PAM sequence: TTT
tgaagtgtttacaaagctta

SEQ ID NO: 377071 - DNA, 20 bp, Artificial Sequence
  Description of Artificial Sequence: Synthetic oligonucleotide
  Target: LAMA2; (+) strand; PAM type: YTN; PAM sequence: TTT
gaagtgtttacaaagcttat

SEQ ID NO: 377072 - DNA, 20 bp, Artificial Sequence
  Description of Artificial Sequence: Synthetic oligonucleotide
  Target: LAMA2; (+) strand; PAM type: YTN; PAM sequence: TTG
aagtgtttacaaagcttatg

SEQ ID NO: 377073 - DNA, 20 bp, Artificial Sequence
  Description of Artificial Sequence: Synthetic oligonucleotide
  Target: LAMA2; (+) strand; PAM type: YTN; PAM sequence: TTT
acaaagcttatgcccatttc

SEQ ID NO: 377074 - DNA, 20 bp, Artificial Sequence
  Description of Artificial Sequence: Synthetic oligonucleotide
  Target: LAMA2; (+) strand; PAM type: YTN; PAM sequence: TTA
caaagcttatgcccatttct

SEQ ID NO: 377075 - DNA, 20 bp, Artificial Sequence
  Description of Artificial Sequence: Synthetic oligonucleotide
  Target: LAMA2; (+) strand; PAM type: YTN; PAM sequence: CTT
atgcccatttctattttgag

SEQ ID NO: 377076 - DNA, 20 bp, Artificial Sequence
  Description of Artificial Sequence: Synthetic oligonucleotide
  Target: LAMA2; (+) strand; PAM type: YTN; PAM sequence: TTA
tgcccatttctattttgagt

SEQ ID NO: 377077 - DNA, 20 bp, Artificial Sequence
  Description of Artificial Sequence: Synthetic oligonucleotide
  Target: LAMA2; (+) strand; PAM type: YTN; PAM sequence: TTT
ctattttgagttgtttgttt

SEQ ID NO: 377078 - DNA, 20 bp, Artificial Sequence
  Description of Artificial Sequence: Synthetic oligonucleotide
  Target: LAMA2; (+) strand; PAM type: YTN; PAM sequence: TTC
tattttgagttgtttgtttc

SEQ ID NO: 377079 - DNA, 20 bp, Artificial Sequence
  Description of Artificial Sequence: Synthetic oligonucleotide
  Target: LAMA2; (+) strand; PAM type: YTN; PAM sequence: CTA
ttttgagttgtttgtttcct

SEQ ID NO: 377080 - DNA, 20 bp, Artificial Sequence
  Description of Artificial Sequence: Synthetic oligonucleotide
  Target: LAMA2; (+) strand; PAM type: YTN; PAM sequence: TTT
tgagttgtttgtttccttag

SEQ ID NO: 377081 - DNA, 20 bp, Artificial Sequence
  Description of Artificial Sequence: Synthetic oligonucleotide
  Target: LAMA2; (+) strand; PAM type: YTN; PAM sequence: TTT
gagttgtttgtttccttagt

SEQ ID NO: 377082 - DNA, 20 bp, Artificial Sequence
  Description of Artificial Sequence: Synthetic oligonucleotide
  Target: LAMA2; (+) strand; PAM type: YTN; PAM sequence: TTG
agttgtttgtttccttagta

SEQ ID NO: 377083 - DNA, 20 bp, Artificial Sequence
  Description of Artificial Sequence: Synthetic oligonucleotide
  Target: LAMA2; (+) strand; PAM type: YTN; PAM sequence: TTG
tttgtttccttagtaatgca

SEQ ID NO: 377084 - DNA, 20 bp, Artificial Sequence
  Description of Artificial Sequence: Synthetic oligonucleotide
  Target: LAMA2; (+) strand; PAM type: YTN; PAM sequence: TTT
gtttccttagtaatgcattg

SEQ ID NO: 377085 - DNA, 20 bp, Artificial Sequence
  Description of Artificial Sequence: Synthetic oligonucleotide
  Target: LAMA2; (+) strand; PAM type: YTN; PAM sequence: TTG
tttccttagtaatgcattgc

SEQ ID NO: 377086 - DNA, 20 bp, Artificial Sequence
  Description of Artificial Sequence: Synthetic oligonucleotide
  Target: LAMA2; (+) strand; PAM type: YTN; PAM sequence: TTT
ccttagtaatgcattgcaag

SEQ ID NO: 377087 - DNA, 20 bp, Artificial Sequence
  Description of Artificial Sequence: Synthetic oligonucleotide
  Target: LAMA2; (+) strand; PAM type: YTN; PAM sequence: TTC
cttagtaatgcattgcaagg

SEQ ID NO: 377088 - DNA, 20 bp, Artificial Sequence
  Description of Artificial Sequence: Synthetic oligonucleotide
  Target: LAMA2; (+) strand; PAM type: YTN; PAM sequence: CTT
agtaatgcattgcaaggatt

SEQ ID NO: 377089 - DNA, 20 bp, Artificial Sequence
  Description of Artificial Sequence: Synthetic oligonucleotide
  Target: LAMA2; (+) strand; PAM type: YTN; PAM sequence: TTA
gtaatgcattgcaaggatta

SEQ ID NO: 377090 - DNA, 20 bp, Artificial Sequence
  Description of Artificial Sequence: Synthetic oligonucleotide
  Target: LAMA2; (+) strand; PAM type: YTN; PAM sequence: TTG
caaggattatttatatattc

SEQ ID NO: 377091 - DNA, 20 bp, Artificial Sequence
  Description of Artificial Sequence: Synthetic oligonucleotide
  Target: LAMA2; (+) strand; PAM type: YTN; PAM sequence: TTA
tttatatattctggatacat

SEQ ID NO: 377092 - DNA, 20 bp, Artificial Sequence
  Description of Artificial Sequence: Synthetic oligonucleotide
  Target: LAMA2; (+) strand; PAM type: YTN; PAM sequence: TTT
atatattctggatacatgtt

SEQ ID NO: 377093 - DNA, 20 bp, Artificial Sequence
  Description of Artificial Sequence: Synthetic oligonucleotide
  Target: LAMA2; (+) strand; PAM type: YTN; PAM sequence: TTA
tatattctggatacatgttc

SEQ ID NO: 377094 - DNA, 20 bp, Artificial Sequence
  Description of Artificial Sequence: Synthetic oligonucleotide
  Target: LAMA2; (+) strand; PAM type: YTN; PAM sequence: TTC
tggatacatgttctttaacg

SEQ ID NO: 377095 - DNA, 20 bp, Artificial Sequence
  Description of Artificial Sequence: Synthetic oligonucleotide
  Target: LAMA2; (+) strand; PAM type: YTN; PAM sequence: CTG
gatacatgttctttaacgta

SEQ ID NO: 377096 - DNA, 20 bp, Artificial Sequence
  Description of Artificial Sequence: Synthetic oligonucleotide
  Target: LAMA2; (+) strand; PAM type: YTN; PAM sequence: TTC
tttaacgtatgttaaagctt

SEQ ID NO: 377097 - DNA, 20 bp, Artificial Sequence
  Description of Artificial Sequence: Synthetic oligonucleotide
  Target: LAMA2; (+) strand; PAM type: YTN; PAM sequence: CTT
taacgtatgttaaagcttgc

SEQ ID NO: 377098 - DNA, 20 bp, Artificial Sequence
  Description of Artificial Sequence: Synthetic oligonucleotide
  Target: LAMA2; (+) strand; PAM type: YTN; PAM sequence: TTT
aacgtatgttaaagcttgct

SEQ ID NO: 377099 - DNA, 20 bp, Artificial Sequence
  Description of Artificial Sequence: Synthetic oligonucleotide
  Target: LAMA2; (+) strand; PAM type: YTN; PAM sequence: TTA
acgtatgttaaagcttgctt

SEQ ID NO: 377100 - DNA, 20 bp, Artificial Sequence
  Description of Artificial Sequence: Synthetic oligonucleotide
  Target: LAMA2; (+) strand; PAM type: YTN; PAM sequence: TTA
aagcttgcttttcatataga

SEQ ID NO: 377101 - DNA, 20 bp, Artificial Sequence
  Description of Artificial Sequence: Synthetic oligonucleotide
  Target: LAMA2; (+) strand; PAM type: YTN; PAM sequence: CTT
gcttttcatatagattgctt

SEQ ID NO: 377102 - DNA, 20 bp, Artificial Sequence
  Description of Artificial Sequence: Synthetic oligonucleotide
  Target: LAMA2; (+) strand; PAM type: YTN; PAM sequence: TTG
cttttcatatagattgcttt

SEQ ID NO: 377103 - DNA, 20 bp, Artificial Sequence
  Description of Artificial Sequence: Synthetic oligonucleotide
  Target: LAMA2; (+) strand; PAM type: YTN; PAM sequence: CTT
ttcatatagattgcttttta

SEQ ID NO: 377104 - DNA, 20 bp, Artificial Sequence
  Description of Artificial Sequence: Synthetic oligonucleotide
  Target: LAMA2; (+) strand; PAM type: YTN; PAM sequence: TTT
tcatatagattgctttttac

SEQ ID NO: 377105 - DNA, 20 bp, Artificial Sequence
  Description of Artificial Sequence: Synthetic oligonucleotide
  Target: LAMA2; (+) strand; PAM type: YTN; PAM sequence: TTT
catatagattgctttttacc

SEQ ID NO: 377106 - DNA, 20 bp, Artificial Sequence
  Description of Artificial Sequence: Synthetic oligonucleotide
  Target: LAMA2; (+) strand; PAM type: YTN; PAM sequence: TTC
atatagattgctttttacct

SEQ ID NO: 377107 - DNA, 20 bp, Artificial Sequence
  Description of Artificial Sequence: Synthetic oligonucleotide
  Target: LAMA2; (+) strand; PAM type: YTN; PAM sequence: TTG
ctttttacctagtttcatca

SEQ ID NO: 377108 - DNA, 20 bp, Artificial Sequence
  Description of Artificial Sequence: Synthetic oligonucleotide
  Target: LAMA2; (+) strand; PAM type: YTN; PAM sequence: CTT
tttacctagtttcatcatct

SEQ ID NO: 377109 - DNA, 20 bp, Artificial Sequence
  Description of Artificial Sequence: Synthetic oligonucleotide
  Target: LAMA2; (+) strand; PAM type: YTN; PAM sequence: TTT
ttacctagtttcatcatcta

SEQ ID NO: 377110 - DNA, 20 bp, Artificial Sequence
  Description of Artificial Sequence: Synthetic oligonucleotide
  Target: LAMA2; (+) strand; PAM type: YTN; PAM sequence: TTT
tacctagtttcatcatctaa

SEQ ID NO: 377111 - DNA, 20 bp, Artificial Sequence
  Description of Artificial Sequence: Synthetic oligonucleotide
  Target: LAMA2; (+) strand; PAM type: YTN; PAM sequence: TTT
acctagtttcatcatctaat

SEQ ID NO: 377112 - DNA, 20 bp, Artificial Sequence
  Description of Artificial Sequence: Synthetic oligonucleotide
  Target: LAMA2; (+) strand; PAM type: YTN; PAM sequence: TTA
cctagtttcatcatctaatc

SEQ ID NO: 377113 - DNA, 20 bp, Artificial Sequence
  Description of Artificial Sequence: Synthetic oligonucleotide
  Target: LAMA2; (+) strand; PAM type: YTN; PAM sequence: CTA
gtttcatcatctaatcttta

SEQ ID NO: 377114 - DNA, 20 bp, Artificial Sequence
  Description of Artificial Sequence: Synthetic oligonucleotide
  Target: LAMA2; (+) strand; PAM type: YTN; PAM sequence: TTT
catcatctaatctttataaa

SEQ ID NO: 377115 - DNA, 20 bp, Artificial Sequence
  Description of Artificial Sequence: Synthetic oligonucleotide
  Target: LAMA2; (+) strand; PAM type: YTN; PAM sequence: TTC
atcatctaatctttataaac

SEQ ID NO: 377116 - DNA, 20 bp, Artificial Sequence
  Description of Artificial Sequence: Synthetic oligonucleotide
  Target: LAMA2; (+) strand; PAM type: YTN; PAM sequence: CTA
atctttataaacactagctt

SEQ ID NO: 377117 - DNA, 20 bp, Artificial Sequence
  Description of Artificial Sequence: Synthetic oligonucleotide
  Target: LAMA2; (+) strand; PAM type: YTN; PAM sequence: CTT
tataaacactagcttattat

SEQ ID NO: 377118 - DNA, 20 bp, Artificial Sequence
  Description of Artificial Sequence: Synthetic oligonucleotide
  Target: LAMA2; (+) strand; PAM type: YTN; PAM sequence: TTT
ataaacactagcttattatc

SEQ ID NO: 377119 - DNA, 20 bp, Artificial Sequence
  Description of Artificial Sequence: Synthetic oligonucleotide
  Target: LAMA2; (+) strand; PAM type: YTN; PAM sequence: TTA
taaacactagcttattatct

SEQ ID NO: 377120 - DNA, 20 bp, Artificial Sequence
  Description of Artificial Sequence: Synthetic oligonucleotide
  Target: LAMA2; (+) strand; PAM type: YTN; PAM sequence: CTA
gcttattatctttttcttct

SEQ ID NO: 377121 - DNA, 20 bp, Artificial Sequence
  Description of Artificial Sequence: Synthetic oligonucleotide
  Target: LAMA2; (+) strand; PAM type: YTN; PAM sequence: CTT
attatctttttcttctatag

SEQ ID NO: 377122 - DNA, 20 bp, Artificial Sequence
  Description of Artificial Sequence: Synthetic oligonucleotide
  Target: LAMA2; (+) strand; PAM type: YTN; PAM sequence: TTA
ttatctttttcttctatagt

SEQ ID NO: 377123 - DNA, 20 bp, Artificial Sequence
  Description of Artificial Sequence: Synthetic oligonucleotide
  Target: LAMA2; (+) strand; PAM type: YTN; PAM sequence: TTA
tctttttcttctatagtcca

SEQ ID NO: 377124 - DNA, 20 bp, Artificial Sequence
  Description of Artificial Sequence: Synthetic oligonucleotide
  Target: LAMA2; (+) strand; PAM type: YTN; PAM sequence: CTT
tttcttctatagtccatact

SEQ ID NO: 377125 - DNA, 20 bp, Artificial Sequence
  Description of Artificial Sequence: Synthetic oligonucleotide
  Target: LAMA2; (+) strand; PAM type: YTN; PAM sequence: TTT
ttcttctatagtccatactt

SEQ ID NO: 377126 - DNA, 20 bp, Artificial Sequence
  Description of Artificial Sequence: Synthetic oligonucleotide
  Target: LAMA2; (+) strand; PAM type: YTN; PAM sequence: TTT
tcttctatagtccatacttt

SEQ ID NO: 377127 - DNA, 20 bp, Artificial Sequence
  Description of Artificial Sequence: Synthetic oligonucleotide
  Target: LAMA2; (+) strand; PAM type: YTN; PAM sequence: TTT
cttctatagtccatactttt

SEQ ID NO: 377128 - DNA, 20 bp, Artificial Sequence
  Description of Artificial Sequence: Synthetic oligonucleotide
  Target: LAMA2; (+) strand; PAM type: YTN; PAM sequence: TTC
ttctatagtccatacttttt

SEQ ID NO: 377129 - DNA, 20 bp, Artificial Sequence
  Description of Artificial Sequence: Synthetic oligonucleotide
  Target: LAMA2; (+) strand; PAM type: YTN; PAM sequence: CTT
ctatagtccatactttttat

SEQ ID NO: 377130 - DNA, 20 bp, Artificial Sequence
  Description of Artificial Sequence: Synthetic oligonucleotide
  Target: LAMA2; (+) strand; PAM type: YTN; PAM sequence: TTC
tatagtccatactttttatg

SEQ ID NO: 377131 - DNA, 20 bp, Artificial Sequence
  Description of Artificial Sequence: Synthetic oligonucleotide
  Target: LAMA2; (+) strand; PAM type: YTN; PAM sequence: CTA
tagtccatactttttatgtt

SEQ ID NO: 377132 - DNA, 20 bp, Artificial Sequence
  Description of Artificial Sequence: Synthetic oligonucleotide
  Target: LAMA2; (+) strand; PAM type: YTN; PAM sequence: CTT
tttatgttctacccaagaaa

SEQ ID NO: 377133 - DNA, 20 bp, Artificial Sequence
  Description of Artificial Sequence: Synthetic oligonucleotide
  Target: LAMA2; (+) strand; PAM type: YTN; PAM sequence: TTT
ttatgttctacccaagaaag

SEQ ID NO: 377134 - DNA, 20 bp, Artificial Sequence
  Description of Artificial Sequence: Synthetic oligonucleotide
  Target: LAMA2; (+) strand; PAM type: YTN; PAM sequence: TTT
tatgttctacccaagaaaga

SEQ ID NO: 377135 - DNA, 20 bp, Artificial Sequence
  Description of Artificial Sequence: Synthetic oligonucleotide
  Target: LAMA2; (+) strand; PAM type: YTN; PAM sequence: TTT
atgttctacccaagaaagac

SEQ ID NO: 377136 - DNA, 20 bp, Artificial Sequence
  Description of Artificial Sequence: Synthetic oligonucleotide
  Target: LAMA2; (+) strand; PAM type: YTN; PAM sequence: TTA
tgttctacccaagaaagaca

SEQ ID NO: 377137 - DNA, 20 bp, Artificial Sequence
  Description of Artificial Sequence: Synthetic oligonucleotide
  Target: LAMA2; (+) strand; PAM type: YTN; PAM sequence: TTC
tacccaagaaagacaaggtc

SEQ ID NO: 377138 - DNA, 20 bp, Artificial Sequence
  Description of Artificial Sequence: Synthetic oligonucleotide
  Target: LAMA2; (+) strand; PAM type: YTN; PAM sequence: CTA
cccaagaaagacaaggtcca

SEQ ID NO: 377139 - DNA, 20 bp, Artificial Sequence
  Description of Artificial Sequence: Synthetic oligonucleotide
  Target: LAMA2; (+) strand; PAM type: YTN; PAM sequence: TTT
ctctcccatgttttcttcaa

SEQ ID NO: 377140 - DNA, 20 bp, Artificial Sequence
  Description of Artificial Sequence: Synthetic oligonucleotide
  Target: LAMA2; (+) strand; PAM type: YTN; PAM sequence: TTC
tctcccatgttttcttcaag

SEQ ID NO: 377141 - DNA, 20 bp, Artificial Sequence
  Description of Artificial Sequence: Synthetic oligonucleotide
  Target: LAMA2; (+) strand; PAM type: YTN; PAM sequence: CTC
tcccatgttttcttcaagaa

SEQ ID NO: 377142 - DNA, 20 bp, Artificial Sequence
  Description of Artificial Sequence: Synthetic oligonucleotide
  Target: LAMA2; (+) strand; PAM type: YTN; PAM sequence: CTC
ccatgttttcttcaagaagt

SEQ ID NO: 377143 - DNA, 20 bp, Artificial Sequence
  Description of Artificial Sequence: Synthetic oligonucleotide
  Target: LAMA2; (+) strand; PAM type: YTN; PAM sequence: TTT
tcttcaagaagttttagagt

SEQ ID NO: 377144 - DNA, 20 bp, Artificial Sequence
  Description of Artificial Sequence: Synthetic oligonucleotide
  Target: LAMA2; (+) strand; PAM type: YTN; PAM sequence: TTT
cttcaagaagttttagagtt

SEQ ID NO: 377145 - DNA, 20 bp, Artificial Sequence
  Description of Artificial Sequence: Synthetic oligonucleotide
  Target: LAMA2; (+) strand; PAM type: YTN; PAM sequence: TTC
ttcaagaagttttagagttt

SEQ ID NO: 377146 - DNA, 20 bp, Artificial Sequence
  Description of Artificial Sequence: Synthetic oligonucleotide
  Target: LAMA2; (+) strand; PAM type: YTN; PAM sequence: CTT
caagaagttttagagtttta

SEQ ID NO: 377147 - DNA, 20 bp, Artificial Sequence
  Description of Artificial Sequence: Synthetic oligonucleotide
  Target: LAMA2; (+) strand; PAM type: YTN; PAM sequence: TTC
aagaagttttagagttttag

SEQ ID NO: 377148 - DNA, 20 bp, Artificial Sequence
  Description of Artificial Sequence: Synthetic oligonucleotide
  Target: LAMA2; (+) strand; PAM type: YTN; PAM sequence: TTT
tagagttttagctcttaaat

SEQ ID NO: 377149 - DNA, 20 bp, Artificial Sequence
  Description of Artificial Sequence: Synthetic oligonucleotide
  Target: LAMA2; (+) strand; PAM type: YTN; PAM sequence: TTT
agagttttagctcttaaatg

SEQ ID NO: 377150 - DNA, 20 bp, Artificial Sequence
  Description of Artificial Sequence: Synthetic oligonucleotide
  Target: LAMA2; (+) strand; PAM type: YTN; PAM sequence: TTA
gagttttagctcttaaatgt

SEQ ID NO: 377151 - DNA, 20 bp, Artificial Sequence
  Description of Artificial Sequence: Synthetic oligonucleotide
  Target: LAMA2; (+) strand; PAM type: YTN; PAM sequence: TTT
tagctcttaaatgtaggttt

SEQ ID NO: 377152 - DNA, 20 bp, Artificial Sequence
  Description of Artificial Sequence: Synthetic oligonucleotide
  Target: LAMA2; (+) strand; PAM type: YTN; PAM sequence: TTT
agctcttaaatgtaggtttg

SEQ ID NO: 377153 - DNA, 20 bp, Artificial Sequence
  Description of Artificial Sequence: Synthetic oligonucleotide
  Target: LAMA2; (+) strand; PAM type: YTN; PAM sequence: TTA
gctcttaaatgtaggtttgg

SEQ ID NO: 377154 - DNA, 20 bp, Artificial Sequence
  Description of Artificial Sequence: Synthetic oligonucleotide
  Target: LAMA2; (+) strand; PAM type: YTN; PAM sequence: CTC
ttaaatgtaggtttggattc

SEQ ID NO: 377155 - DNA, 20 bp, Artificial Sequence
  Description of Artificial Sequence: Synthetic oligonucleotide
  Target: LAMA2; (+) strand; PAM type: YTN; PAM sequence: CTT
aaatgtaggtttggattcca

SEQ ID NO: 377156 - DNA, 20 bp, Artificial Sequence
  Description of Artificial Sequence: Synthetic oligonucleotide
  Target: LAMA2; (+) strand; PAM type: YTN; PAM sequence: TTA
aatgtaggtttggattccat

SEQ ID NO: 377157 - DNA, 20 bp, Artificial Sequence
  Description of Artificial Sequence: Synthetic oligonucleotide
  Target: LAMA2; (+) strand; PAM type: YTN; PAM sequence: TTT
ggattccattttgaatatta

SEQ ID NO: 377158 - DNA, 20 bp, Artificial Sequence
  Description of Artificial Sequence: Synthetic oligonucleotide
  Target: LAMA2; (+) strand; PAM type: YTN; PAM sequence: TTG
gattccattttgaatattaa

SEQ ID NO: 377159 - DNA, 20 bp, Artificial Sequence
  Description of Artificial Sequence: Synthetic oligonucleotide
  Target: LAMA2; (+) strand; PAM type: YTN; PAM sequence: TTC
cattttgaatattaattttt

SEQ ID NO: 377160 - DNA, 20 bp, Artificial Sequence
  Description of Artificial Sequence: Synthetic oligonucleotide
  Target: LAMA2; (+) strand; PAM type: YTN; PAM sequence: TTT
tgaatattaatttttctata

SEQ ID NO: 377161 - DNA, 20 bp, Artificial Sequence
  Description of Artificial Sequence: Synthetic oligonucleotide
  Target: LAMA2; (+) strand; PAM type: YTN; PAM sequence: TTT
gaatattaatttttctatat

SEQ ID NO: 377162 - DNA, 20 bp, Artificial Sequence
  Description of Artificial Sequence: Synthetic oligonucleotide
  Target: LAMA2; (+) strand; PAM type: YTN; PAM sequence: TTG
aatattaatttttctatata

SEQ ID NO: 377163 - DNA, 20 bp, Artificial Sequence
  Description of Artificial Sequence: Synthetic oligonucleotide
  Target: LAMA2; (+) strand; PAM type: YTN; PAM sequence: TTA
atttttctatatatcaggta

SEQ ID NO: 377164 - DNA, 20 bp, Artificial Sequence
  Description of Artificial Sequence: Synthetic oligonucleotide
  Target: LAMA2; (+) strand; PAM type: YTN; PAM sequence: TTT
ttctatatatcaggtaatgg

SEQ ID NO: 377165 - DNA, 20 bp, Artificial Sequence
  Description of Artificial Sequence: Synthetic oligonucleotide
  Target: LAMA2; (+) strand; PAM type: YTN; PAM sequence: TTT
tctatatatcaggtaatggt

SEQ ID NO: 377166 - DNA, 20 bp, Artificial Sequence
  Description of Artificial Sequence: Synthetic oligonucleotide
  Target: LAMA2; (+) strand; PAM type: YTN; PAM sequence: TTT
ctatatatcaggtaatggtc

SEQ ID NO: 377167 - DNA, 20 bp, Artificial Sequence
  Description of Artificial Sequence: Synthetic oligonucleotide
  Target: LAMA2; (+) strand; PAM type: YTN; PAM sequence: TTC
tatatatcaggtaatggtca

SEQ ID NO: 377168 - DNA, 20 bp, Artificial Sequence
  Description of Artificial Sequence: Synthetic oligonucleotide
  Target: LAMA2; (+) strand; PAM type: YTN; PAM sequence: CTA
tatatcaggtaatggtcaga

SEQ ID NO: 377169 - DNA, 20 bp, Artificial Sequence
  Description of Artificial Sequence: Synthetic oligonucleotide
  Target: LAMA2; (+) strand; PAM type: YTN; PAM sequence: CTC
actttttatggatacccaat

SEQ ID NO: 377170 - DNA, 20 bp, Artificial Sequence
  Description of Artificial Sequence: Synthetic oligonucleotide
  Target: LAMA2; (+) strand; PAM type: YTN; PAM sequence: CTT
tttatggatacccaattttt

SEQ ID NO: 377171 - DNA, 20 bp, Artificial Sequence
  Description of Artificial Sequence: Synthetic oligonucleotide
  Target: LAMA2; (+) strand; PAM type: YTN; PAM sequence: TTT
ttatggatacccaatttttc

SEQ ID NO: 377172 - DNA, 20 bp, Artificial Sequence
  Description of Artificial Sequence: Synthetic oligonucleotide
  Target: LAMA2; (+) strand; PAM type: YTN; PAM sequence: TTT
tatggatacccaatttttca

SEQ ID NO: 377173 - DNA, 20 bp, Artificial Sequence
  Description of Artificial Sequence: Synthetic oligonucleotide
  Target: LAMA2; (+) strand; PAM type: YTN; PAM sequence: TTT
atggatacccaatttttcaa

SEQ ID NO: 377174 - DNA, 20 bp, Artificial Sequence
  Description of Artificial Sequence: Synthetic oligonucleotide
  Target: LAMA2; (+) strand; PAM type: YTN; PAM sequence: TTA
tggatacccaatttttcaaa

SEQ ID NO: 377175 - DNA, 20 bp, Artificial Sequence
  Description of Artificial Sequence: Synthetic oligonucleotide
  Target: LAMA2; (+) strand; PAM type: YTN; PAM sequence: TTT
ttcaaacattatttgttgaa

SEQ ID NO: 377176 - DNA, 20 bp, Artificial Sequence
  Description of Artificial Sequence: Synthetic oligonucleotide
  Target: LAMA2; (+) strand; PAM type: YTN; PAM sequence: TTT
tcaaacattatttgttgaaa

SEQ ID NO: 377177 - DNA, 20 bp, Artificial Sequence
  Description of Artificial Sequence: Synthetic oligonucleotide
  Target: LAMA2; (+) strand; PAM type: YTN; PAM sequence: TTT
caaacattatttgttgaaaa

SEQ ID NO: 377178 - DNA, 20 bp, Artificial Sequence
  Description of Artificial Sequence: Synthetic oligonucleotide
  Target: LAMA2; (+) strand; PAM type: YTN; PAM sequence: TTC
aaacattatttgttgaaaag

SEQ ID NO: 377179 - DNA, 20 bp, Artificial Sequence
  Description of Artificial Sequence: Synthetic oligonucleotide
  Target: LAMA2; (+) strand; PAM type: YTN; PAM sequence: TTA
tttgttgaaaagactatcct

SEQ ID NO: 377180 - DNA, 20 bp, Artificial Sequence
  Description of Artificial Sequence: Synthetic oligonucleotide
  Target: LAMA2; (+) strand; PAM type: YTN; PAM sequence: TTT
gttgaaaagactatcctttt

SEQ ID NO: 377181 - DNA, 20 bp, Artificial Sequence
  Description of Artificial Sequence: Synthetic oligonucleotide
  Target: LAMA2; (+) strand; PAM type: YTN; PAM sequence: TTG
ttgaaaagactatccttttt

SEQ ID NO: 377182 - DNA, 20 bp, Artificial Sequence
  Description of Artificial Sequence: Synthetic oligonucleotide
  Target: LAMA2; (+) strand; PAM type: YTN; PAM sequence: TTG
aaaagactatcctttttccc

SEQ ID NO: 377183 - DNA, 20 bp, Artificial Sequence
  Description of Artificial Sequence: Synthetic oligonucleotide
  Target: LAMA2; (+) strand; PAM type: YTN; PAM sequence: CTA
tcctttttcccattgaatta

SEQ ID NO: 377184 - DNA, 20 bp, Artificial Sequence
  Description of Artificial Sequence: Synthetic oligonucleotide
  Target: LAMA2; (+) strand; PAM type: YTN; PAM sequence: CTT
tttcccattgaattactttg

SEQ ID NO: 377185 - DNA, 20 bp, Artificial Sequence
  Description of Artificial Sequence: Synthetic oligonucleotide
  Target: LAMA2; (+) strand; PAM type: YTN; PAM sequence: TTT
ttcccattgaattactttga

SEQ ID NO: 377186 - DNA, 20 bp, Artificial Sequence
  Description of Artificial Sequence: Synthetic oligonucleotide
  Target: LAMA2; (+) strand; PAM type: YTN; PAM sequence: TTT
tcccattgaattactttgac

SEQ ID NO: 377187 - DNA, 20 bp, Artificial Sequence
  Description of Artificial Sequence: Synthetic oligonucleotide
  Target: LAMA2; (+) strand; PAM type: YTN; PAM sequence: TTT
cccattgaattactttgact

SEQ ID NO: 377188 - DNA, 20 bp, Artificial Sequence
  Description of Artificial Sequence: Synthetic oligonucleotide
  Target: LAMA2; (+) strand; PAM type: YTN; PAM sequence: TTC
ccattgaattactttgactc

SEQ ID NO: 377189 - DNA, 20 bp, Artificial Sequence
  Description of Artificial Sequence: Synthetic oligonucleotide
  Target: LAMA2; (+) strand; PAM type: YTN; PAM sequence: TTG
aattactttgactcctttgt

SEQ ID NO: 377190 - DNA, 20 bp, Artificial Sequence
  Description of Artificial Sequence: Synthetic oligonucleotide
  Target: LAMA2; (+) strand; PAM type: YTN; PAM sequence: TTA
ctttgactcctttgtcaaaa

SEQ ID NO: 377191 - DNA, 20 bp, Artificial Sequence
  Description of Artificial Sequence: Synthetic oligonucleotide
  Target: LAMA2; (+) strand; PAM type: YTN; PAM sequence: CTT
tgactcctttgtcaaaatct

SEQ ID NO: 377192 - DNA, 20 bp, Artificial Sequence
  Description of Artificial Sequence: Synthetic oligonucleotide
  Target: LAMA2; (+) strand; PAM type: YTN; PAM sequence: TTT
gactcctttgtcaaaatcta

SEQ ID NO: 377193 - DNA, 20 bp, Artificial Sequence
  Description of Artificial Sequence: Synthetic oligonucleotide
  Target: LAMA2; (+) strand; PAM type: YTN; PAM sequence: TTG
actcctttgtcaaaatctat

SEQ ID NO: 377194 - DNA, 20 bp, Artificial Sequence
  Description of Artificial Sequence: Synthetic oligonucleotide
  Target: LAMA2; (+) strand; PAM type: YTN; PAM sequence: CTC
ctttgtcaaaatctatcaac

SEQ ID NO: 377195 - DNA, 20 bp, Artificial Sequence
  Description of Artificial Sequence: Synthetic oligonucleotide
  Target: LAMA2; (+) strand; PAM type: YTN; PAM sequence: CTT
tgtcaaaatctatcaactat

SEQ ID NO: 377196 - DNA, 20 bp, Artificial Sequence
  Description of Artificial Sequence: Synthetic oligonucleotide
  Target: LAMA2; (+) strand; PAM type: YTN; PAM sequence: TTT
gtcaaaatctatcaactata

SEQ ID NO: 377197 - DNA, 20 bp, Artificial Sequence
  Description of Artificial Sequence: Synthetic oligonucleotide
  Target: LAMA2; (+) strand; PAM type: YTN; PAM sequence: TTG
tcaaaatctatcaactatat

SEQ ID NO: 377198 - DNA, 20 bp, Artificial Sequence
  Description of Artificial Sequence: Synthetic oligonucleotide
  Target: LAMA2; (+) strand; PAM type: YTN; PAM sequence: CTA
tcaactatatatatgtttat

SEQ ID NO: 377199 - DNA, 20 bp, Artificial Sequence
  Description of Artificial Sequence: Synthetic oligonucleotide
  Target: LAMA2; (+) strand; PAM type: YTN; PAM sequence: CTA
tatatatgtttatgcatttc

SEQ ID NO: 377200 - DNA, 20 bp, Artificial Sequence
  Description of Artificial Sequence: Synthetic oligonucleotide
  Target: LAMA2; (+) strand; PAM type: YTN; PAM sequence: TTT
atgcatttctggactctttt

SEQ ID NO: 377201 - DNA, 20 bp, Artificial Sequence
  Description of Artificial Sequence: Synthetic oligonucleotide
  Target: LAMA2; (+) strand; PAM type: YTN; PAM sequence: TTA
tgcatttctggactcttttc

SEQ ID NO: 377202 - DNA, 20 bp, Artificial Sequence
  Description of Artificial Sequence: Synthetic oligonucleotide
  Target: LAMA2; (+) strand; PAM type: YTN; PAM sequence: TTT
ctggactcttttctgcttca

SEQ ID NO: 377203 - DNA, 20 bp, Artificial Sequence
  Description of Artificial Sequence: Synthetic oligonucleotide
  Target: LAMA2; (+) strand; PAM type: YTN; PAM sequence: TTC
tggactcttttctgcttcac

SEQ ID NO: 377204 - DNA, 20 bp, Artificial Sequence
  Description of Artificial Sequence: Synthetic oligonucleotide
  Target: LAMA2; (+) strand; PAM type: YTN; PAM sequence: CTG
gactcttttctgcttcaccg

SEQ ID NO: 377205 - DNA, 20 bp, Artificial Sequence
  Description of Artificial Sequence: Synthetic oligonucleotide
  Target: LAMA2; (+) strand; PAM type: YTN; PAM sequence: CTC
ttttctgcttcaccgatcta

SEQ ID NO: 377206 - DNA, 20 bp, Artificial Sequence
  Description of Artificial Sequence: Synthetic oligonucleotide
  Target: LAMA2; (+) strand; PAM type: YTN; PAM sequence: CTT
ttctgcttcaccgatctatt

SEQ ID NO: 377207 - DNA, 20 bp, Artificial Sequence
  Description of Artificial Sequence: Synthetic oligonucleotide
  Target: LAMA2; (+) strand; PAM type: YTN; PAM sequence: TTT
tctgcttcaccgatctattc

SEQ ID NO: 377208 - DNA, 20 bp, Artificial Sequence
  Description of Artificial Sequence: Synthetic oligonucleotide
  Target: LAMA2; (+) strand; PAM type: YTN; PAM sequence: TTT
ctgcttcaccgatctattct

SEQ ID NO: 377209 - DNA, 20 bp, Artificial Sequence
  Description of Artificial Sequence: Synthetic oligonucleotide
  Target: LAMA2; (+) strand; PAM type: YTN; PAM sequence: TTC
tgcttcaccgatctattctt

SEQ ID NO: 377210 - DNA, 20 bp, Artificial Sequence
  Description of Artificial Sequence: Synthetic oligonucleotide
  Target: LAMA2; (+) strand; PAM type: YTN; PAM sequence: CTG
cttcaccgatctattcttat

SEQ ID NO: 377211 - DNA, 20 bp, Artificial Sequence
  Description of Artificial Sequence: Synthetic oligonucleotide
  Target: LAMA2; (+) strand; PAM type: YTN; PAM sequence: CTT
caccgatctattcttatgtt

SEQ ID NO: 377212 - DNA, 20 bp, Artificial Sequence
  Description of Artificial Sequence: Synthetic oligonucleotide
  Target: LAMA2; (+) strand; PAM type: YTN; PAM sequence: TTC
accgatctattcttatgtta

SEQ ID NO: 377213 - DNA, 20 bp, Artificial Sequence
  Description of Artificial Sequence: Synthetic oligonucleotide
  Target: LAMA2; (+) strand; PAM type: YTN; PAM sequence: CTA
ttcttatgttaatactagtt

SEQ ID NO: 377214 - DNA, 20 bp, Artificial Sequence
  Description of Artificial Sequence: Synthetic oligonucleotide
  Target: LAMA2; (+) strand; PAM type: YTN; PAM sequence: TTC
ttatgttaatactagttaat

SEQ ID NO: 377215 - DNA, 20 bp, Artificial Sequence
  Description of Artificial Sequence: Synthetic oligonucleotide
  Target: LAMA2; (+) strand; PAM type: YTN; PAM sequence: CTT
atgttaatactagttaatat

SEQ ID NO: 377216 - DNA, 20 bp, Artificial Sequence
  Description of Artificial Sequence: Synthetic oligonucleotide
  Target: LAMA2; (+) strand; PAM type: YTN; PAM sequence: TTA
tgttaatactagttaatatg

SEQ ID NO: 377217 - DNA, 20 bp, Artificial Sequence
  Description of Artificial Sequence: Synthetic oligonucleotide
  Target: LAMA2; (+) strand; PAM type: YTN; PAM sequence: TTA
atactagttaatatgttaat

SEQ ID NO: 377218 - DNA, 20 bp, Artificial Sequence
  Description of Artificial Sequence: Synthetic oligonucleotide
  Target: LAMA2; (+) strand; PAM type: YTN; PAM sequence: CTA
gttaatatgttaattattgt

SEQ ID NO: 377219 - DNA, 20 bp, Artificial Sequence
  Description of Artificial Sequence: Synthetic oligonucleotide
  Target: LAMA2; (+) strand; PAM type: YTN; PAM sequence: TTA
atatgttaattattgtagct

SEQ ID NO: 377220 - DNA, 20 bp, Artificial Sequence
  Description of Artificial Sequence: Synthetic oligonucleotide
  Target: LAMA2; (+) strand; PAM type: YTN; PAM sequence: TTA
attattgtagctttccagca

SEQ ID NO: 377221 - DNA, 20 bp, Artificial Sequence
  Description of Artificial Sequence: Synthetic oligonucleotide
  Target: LAMA2; (+) strand; PAM type: YTN; PAM sequence: TTA
ttgtagctttccagcaagtc

SEQ ID NO: 377222 - DNA, 20 bp, Artificial Sequence
  Description of Artificial Sequence: Synthetic oligonucleotide
  Target: LAMA2; (+) strand; PAM type: YTN; PAM sequence: TTG
tagctttccagcaagtcata

SEQ ID NO: 377223 - DNA, 20 bp, Artificial Sequence
  Description of Artificial Sequence: Synthetic oligonucleotide
  Target: LAMA2; (+) strand; PAM type: YTN; PAM sequence: CTT
tccagcaagtcataaaatca

SEQ ID NO: 377224 - DNA, 20 bp, Artificial Sequence
  Description of Artificial Sequence: Synthetic oligonucleotide
  Target: LAMA2; (+) strand; PAM type: YTN; PAM sequence: TTT
ccagcaagtcataaaatcag

SEQ ID NO: 377225 - DNA, 20 bp, Artificial Sequence
  Description of Artificial Sequence: Synthetic oligonucleotide
  Target: LAMA2; (+) strand; PAM type: YTN; PAM sequence: TTC
cagcaagtcataaaatcagg

SEQ ID NO: 377226 - DNA, 20 bp, Artificial Sequence
  Description of Artificial Sequence: Synthetic oligonucleotide
  Target: LAMA2; (+) strand; PAM type: YTN; PAM sequence: TTG
taaattcctcaacctcattc

SEQ ID NO: 377227 - DNA, 20 bp, Artificial Sequence
  Description of Artificial Sequence: Synthetic oligonucleotide
  Target: LAMA2; (+) strand; PAM type: YTN; PAM sequence: TTC
ctcaacctcattcatcgttt

SEQ ID NO: 377228 - DNA, 20 bp, Artificial Sequence
  Description of Artificial Sequence: Synthetic oligonucleotide
  Target: LAMA2; (+) strand; PAM type: YTN; PAM sequence: CTC
aacctcattcatcgtttcca

SEQ ID NO: 377229 - DNA, 20 bp, Artificial Sequence
  Description of Artificial Sequence: Synthetic oligonucleotide
  Target: LAMA2; (+) strand; PAM type: YTN; PAM sequence: CTC
attcatcgtttccaatacct

SEQ ID NO: 377230 - DNA, 20 bp, Artificial Sequence
  Description of Artificial Sequence: Synthetic oligonucleotide
  Target: LAMA2; (+) strand; PAM type: YTN; PAM sequence: TTC
atcgtttccaataccttttg

SEQ ID NO: 377231 - DNA, 20 bp, Artificial Sequence
  Description of Artificial Sequence: Synthetic oligonucleotide
  Target: LAMA2; (+) strand; PAM type: YTN; PAM sequence: TTT
ccaataccttttgagtactt

SEQ ID NO: 377232 - DNA, 20 bp, Artificial Sequence
  Description of Artificial Sequence: Synthetic oligonucleotide
  Target: LAMA2; (+) strand; PAM type: YTN; PAM sequence: TTC
caataccttttgagtacttt

SEQ ID NO: 377233 - DNA, 20 bp, Artificial Sequence
  Description of Artificial Sequence: Synthetic oligonucleotide
  Target: LAMA2; (+) strand; PAM type: YTN; PAM sequence: CTT
ttgagtactttagctccttt

SEQ ID NO: 377234 - DNA, 20 bp, Artificial Sequence
  Description of Artificial Sequence: Synthetic oligonucleotide
  Target: LAMA2; (+) strand; PAM type: YTN; PAM sequence: TTT
tgagtactttagctccttta

SEQ ID NO: 377235 - DNA, 20 bp, Artificial Sequence
  Description of Artificial Sequence: Synthetic oligonucleotide
  Target: LAMA2; (+) strand; PAM type: YTN; PAM sequence: TTT
gagtactttagctcctttac

SEQ ID NO: 377236 - DNA, 20 bp, Artificial Sequence
  Description of Artificial Sequence: Synthetic oligonucleotide
  Target: LAMA2; (+) strand; PAM type: YTN; PAM sequence: TTG
agtactttagctcctttaca

SEQ ID NO: 377237 - DNA, 20 bp, Artificial Sequence
  Description of Artificial Sequence: Synthetic oligonucleotide
  Target: LAMA2; (+) strand; PAM type: YTN; PAM sequence: CTT
tagctcctttacatttccac

SEQ ID NO: 377238 - DNA, 20 bp, Artificial Sequence
  Description of Artificial Sequence: Synthetic oligonucleotide
  Target: LAMA2; (+) strand; PAM type: YTN; PAM sequence: TTT
agctcctttacatttccaca

SEQ ID NO: 377239 - DNA, 20 bp, Artificial Sequence
  Description of Artificial Sequence: Synthetic oligonucleotide
  Target: LAMA2; (+) strand; PAM type: YTN; PAM sequence: TTA
gctcctttacatttccacat

SEQ ID NO: 377240 - DNA, 20 bp, Artificial Sequence
  Description of Artificial Sequence: Synthetic oligonucleotide
  Target: LAMA2; (+) strand; PAM type: YTN; PAM sequence: CTC
ctttacatttccacataact

SEQ ID NO: 377241 - DNA, 20 bp, Artificial Sequence
  Description of Artificial Sequence: Synthetic oligonucleotide
  Target: LAMA2; (+) strand; PAM type: YTN; PAM sequence: CTT
tacatttccacataactttt

SEQ ID NO: 377242 - DNA, 20 bp, Artificial Sequence
  Description of Artificial Sequence: Synthetic oligonucleotide
  Target: LAMA2; (+) strand; PAM type: YTN; PAM sequence: TTT
acatttccacataactttta

SEQ ID NO: 377243 - DNA, 20 bp, Artificial Sequence
  Description of Artificial Sequence: Synthetic oligonucleotide
  Target: LAMA2; (+) strand; PAM type: YTN; PAM sequence: TTA
catttccacataacttttaa

SEQ ID NO: 377244 - DNA, 20 bp, Artificial Sequence
  Description of Artificial Sequence: Synthetic oligonucleotide
  Target: LAMA2; (+) strand; PAM type: YTN; PAM sequence: TTT
ccacataacttttaaattta

SEQ ID NO: 377245 - DNA, 20 bp, Artificial Sequence
  Description of Artificial Sequence: Synthetic oligonucleotide
  Target: LAMA2; (+) strand; PAM type: YTN; PAM sequence: TTC
cacataacttttaaatttag

SEQ ID NO: 377246 - DNA, 20 bp, Artificial Sequence
  Description of Artificial Sequence: Synthetic oligonucleotide
  Target: LAMA2; (+) strand; PAM type: YTN; PAM sequence: CTT
ttaaatttagcatgtcaatt

SEQ ID NO: 377247 - DNA, 20 bp, Artificial Sequence
  Description of Artificial Sequence: Synthetic oligonucleotide
  Target: LAMA2; (+) strand; PAM type: YTN; PAM sequence: TTT
taaatttagcatgtcaattc

SEQ ID NO: 377248 - DNA, 20 bp, Artificial Sequence
  Description of Artificial Sequence: Synthetic oligonucleotide
  Target: LAMA2; (+) strand; PAM type: YTN; PAM sequence: TTT
aaatttagcatgtcaattct

SEQ ID NO: 377249 - DNA, 20 bp, Artificial Sequence
  Description of Artificial Sequence: Synthetic oligonucleotide
  Target: LAMA2; (+) strand; PAM type: YTN; PAM sequence: TTA
aatttagcatgtcaattctt

SEQ ID NO: 377250 - DNA, 20 bp, Artificial Sequence
  Description of Artificial Sequence: Synthetic oligonucleotide
  Target: LAMA2; (+) strand; PAM type: YTN; PAM sequence: TTT
agcatgtcaattctttacca

SEQ ID NO: 377251 - DNA, 20 bp, Artificial Sequence
  Description of Artificial Sequence: Synthetic oligonucleotide
  Target: LAMA2; (+) strand; PAM type: YTN; PAM sequence: TTA
gcatgtcaattctttaccaa

SEQ ID NO: 377252 - DNA, 20 bp, Artificial Sequence
  Description of Artificial Sequence: Synthetic oligonucleotide
  Target: LAMA2; (+) strand; PAM type: YTN; PAM sequence: TTC
tttaccaaaaagcctgctag

SEQ ID NO: 377253 - DNA, 20 bp, Artificial Sequence
  Description of Artificial Sequence: Synthetic oligonucleotide
  Target: LAMA2; (+) strand; PAM type: YTN; PAM sequence: CTT
taccaaaaagcctgctagga

SEQ ID NO: 377254 - DNA, 20 bp, Artificial Sequence
  Description of Artificial Sequence: Synthetic oligonucleotide
  Target: LAMA2; (+) strand; PAM type: YTN; PAM sequence: TTT
accaaaaagcctgctaggat

SEQ ID NO: 377255 - DNA, 20 bp, Artificial Sequence
  Description of Artificial Sequence: Synthetic oligonucleotide
  Target: LAMA2; (+) strand; PAM type: YTN; PAM sequence: TTA
ccaaaaagcctgctaggatt

SEQ ID NO: 377256 - DNA, 20 bp, Artificial Sequence
  Description of Artificial Sequence: Synthetic oligonucleotide
  Target: LAMA2; (+) strand; PAM type: YTN; PAM sequence: CTG
ctaggatttggctgaaatta

SEQ ID NO: 377257 - DNA, 20 bp, Artificial Sequence
  Description of Artificial Sequence: Synthetic oligonucleotide
  Target: LAMA2; (+) strand; PAM type: YTN; PAM sequence: CTA
ggatttggctgaaattatat

SEQ ID NO: 377258 - DNA, 20 bp, Artificial Sequence
  Description of Artificial Sequence: Synthetic oligonucleotide
  Target: LAMA2; (+) strand; PAM type: YTN; PAM sequence: TTT
ggctgaaattatattgaatt

SEQ ID NO: 377259 - DNA, 20 bp, Artificial Sequence
  Description of Artificial Sequence: Synthetic oligonucleotide
  Target: LAMA2; (+) strand; PAM type: YTN; PAM sequence: TTG
gctgaaattatattgaattg

SEQ ID NO: 377260 - DNA, 20 bp, Artificial Sequence
  Description of Artificial Sequence: Synthetic oligonucleotide
  Target: LAMA2; (+) strand; PAM type: YTN; PAM sequence: CTG
aaattatattgaattgatag

SEQ ID NO: 377261 - DNA, 20 bp, Artificial Sequence
  Description of Artificial Sequence: Synthetic oligonucleotide
  Target: LAMA2; (+) strand; PAM type: YTN; PAM sequence: TTA
tattgaattgatagatcaat

SEQ ID NO: 377262 - DNA, 20 bp, Artificial Sequence
  Description of Artificial Sequence: Synthetic oligonucleotide
  Target: LAMA2; (+) strand; PAM type: YTN; PAM sequence: TTG
aattgatagatcaatttggg

SEQ ID NO: 377263 - DNA, 20 bp, Artificial Sequence
  Description of Artificial Sequence: Synthetic oligonucleotide
  Target: LAMA2; (+) strand; PAM type: YTN; PAM sequence: TTG
atagatcaatttgggaagaa

SEQ ID NO: 377264 - DNA, 20 bp, Artificial Sequence
  Description of Artificial Sequence: Synthetic oligonucleotide
  Target: LAMA2; (+) strand; PAM type: YTN; PAM sequence: TTT
gggaagaattgacagcttaa

SEQ ID NO: 377265 - DNA, 20 bp, Artificial Sequence
  Description of Artificial Sequence: Synthetic oligonucleotide
  Target: LAMA2; (+) strand; PAM type: YTN; PAM sequence: TTG
ggaagaattgacagcttaaa

SEQ ID NO: 377266 - DNA, 20 bp, Artificial Sequence
  Description of Artificial Sequence: Synthetic oligonucleotide
  Target: LAMA2; (+) strand; PAM type: YTN; PAM sequence: TTG
acagcttaaaagtattagat

SEQ ID NO: 377267 - DNA, 20 bp, Artificial Sequence
  Description of Artificial Sequence: Synthetic oligonucleotide
  Target: LAMA2; (+) strand; PAM type: YTN; PAM sequence: CTT
aaaagtattagatatcccag

SEQ ID NO: 377268 - DNA, 20 bp, Artificial Sequence
  Description of Artificial Sequence: Synthetic oligonucleotide
  Target: LAMA2; (+) strand; PAM type: YTN; PAM sequence: TTA
aaagtattagatatcccagt

SEQ ID NO: 377269 - DNA, 20 bp, Artificial Sequence
  Description of Artificial Sequence: Synthetic oligonucleotide
  Target: LAMA2; (+) strand; PAM type: YTN; PAM sequence: TTA
gatatcccagtgtatgaaca

SEQ ID NO: 377270 - DNA, 20 bp, Artificial Sequence
  Description of Artificial Sequence: Synthetic oligonucleotide
  Target: LAMA2; (+) strand; PAM type: YTN; PAM sequence: CTC
tgcatttttttaggttgtta

SEQ ID NO: 377271 - DNA, 20 bp, Artificial Sequence
  Description of Artificial Sequence: Synthetic oligonucleotide
  Target: LAMA2; (+) strand; PAM type: YTN; PAM sequence: CTG
catttttttaggttgttata

SEQ ID NO: 377272 - DNA, 20 bp, Artificial Sequence
  Description of Artificial Sequence: Synthetic oligonucleotide
  Target: LAMA2; (+) strand; PAM type: YTN; PAM sequence: TTT
ttttaggttgttataatttt

SEQ ID NO: 377273 - DNA, 20 bp, Artificial Sequence
  Description of Artificial Sequence: Synthetic oligonucleotide
  Target: LAMA2; (+) strand; PAM type: YTN; PAM sequence: TTT
tttaggttgttataattttt

SEQ ID NO: 377274 - DNA, 20 bp, Artificial Sequence
  Description of Artificial Sequence: Synthetic oligonucleotide
  Target: LAMA2; (+) strand; PAM type: YTN; PAM sequence: TTT
ttaggttgttataatttttt

SEQ ID NO: 377275 - DNA, 20 bp, Artificial Sequence
  Description of Artificial Sequence: Synthetic oligonucleotide
  Target: LAMA2; (+) strand; PAM type: YTN; PAM sequence: TTT
taggttgttataattttttc

SEQ ID NO: 377276 - DNA, 20 bp, Artificial Sequence
  Description of Artificial Sequence: Synthetic oligonucleotide
  Target: LAMA2; (+) strand; PAM type: YTN; PAM sequence: TTT
aggttgttataattttttct

SEQ ID NO: 377277 - DNA, 20 bp, Artificial Sequence
  Description of Artificial Sequence: Synthetic oligonucleotide
  Target: LAMA2; (+) strand; PAM type: YTN; PAM sequence: TTA
ggttgttataattttttctc

SEQ ID NO: 377278 - DNA, 20 bp, Artificial Sequence
  Description of Artificial Sequence: Synthetic oligonucleotide
  Target: LAMA2; (+) strand; PAM type: YTN; PAM sequence: TTG
ttataattttttctcagaaa

SEQ ID NO: 377279 - DNA, 20 bp, Artificial Sequence
  Description of Artificial Sequence: Synthetic oligonucleotide
  Target: LAMA2; (+) strand; PAM type: YTN; PAM sequence: TTA
taattttttctcagaaatgt

SEQ ID NO: 377280 - DNA, 20 bp, Artificial Sequence
  Description of Artificial Sequence: Synthetic oligonucleotide
  Target: LAMA2; (+) strand; PAM type: YTN; PAM sequence: TTT
tttctcagaaatgtttgtag

SEQ ID NO: 377281 - DNA, 20 bp, Artificial Sequence
  Description of Artificial Sequence: Synthetic oligonucleotide
  Target: LAMA2; (+) strand; PAM type: YTN; PAM sequence: TTT
ttctcagaaatgtttgtagt

SEQ ID NO: 377282 - DNA, 20 bp, Artificial Sequence
  Description of Artificial Sequence: Synthetic oligonucleotide
  Target: LAMA2; (+) strand; PAM type: YTN; PAM sequence: TTT
tctcagaaatgtttgtagtt

SEQ ID NO: 377283 - DNA, 20 bp, Artificial Sequence
  Description of Artificial Sequence: Synthetic oligonucleotide
  Target: LAMA2; (+) strand; PAM type: YTN; PAM sequence: TTT
ctcagaaatgtttgtagttt

SEQ ID NO: 377284 - DNA, 20 bp, Artificial Sequence
  Description of Artificial Sequence: Synthetic oligonucleotide
  Target: LAMA2; (+) strand; PAM type: YTN; PAM sequence: TTC
tcagaaatgtttgtagtttt

SEQ ID NO: 377285 - DNA, 20 bp, Artificial Sequence
  Description of Artificial Sequence: Synthetic oligonucleotide
  Target: LAMA2; (+) strand; PAM type: YTN; PAM sequence: CTC
agaaatgtttgtagtttttg

SEQ ID NO: 377286 - DNA, 20 bp, Artificial Sequence
  Description of Artificial Sequence: Synthetic oligonucleotide
  Target: LAMA2; (+) strand; PAM type: YTN; PAM sequence: TTT
gtagtttttgatgtgcaagc

SEQ ID NO: 377287 - DNA, 20 bp, Artificial Sequence
  Description of Artificial Sequence: Synthetic oligonucleotide
  Target: LAMA2; (+) strand; PAM type: YTN; PAM sequence: TTG
tagtttttgatgtgcaagct

SEQ ID NO: 377288 - DNA, 20 bp, Artificial Sequence
  Description of Artificial Sequence: Synthetic oligonucleotide
  Target: LAMA2; (+) strand; PAM type: YTN; PAM sequence: TTT
ttgatgtgcaagctttgcat

SEQ ID NO: 377289 - DNA, 20 bp, Artificial Sequence
  Description of Artificial Sequence: Synthetic oligonucleotide
  Target: LAMA2; (+) strand; PAM type: YTN; PAM sequence: TTT
tgatgtgcaagctttgcata

SEQ ID NO: 377290 - DNA, 20 bp, Artificial Sequence
  Description of Artificial Sequence: Synthetic oligonucleotide
  Target: LAMA2; (+) strand; PAM type: YTN; PAM sequence: TTT
gatgtgcaagctttgcatat

SEQ ID NO: 377291 - DNA, 20 bp, Artificial Sequence
  Description of Artificial Sequence: Synthetic oligonucleotide
  Target: LAMA2; (+) strand; PAM type: YTN; PAM sequence: TTG
atgtgcaagctttgcatata

SEQ ID NO: 377292 - DNA, 20 bp, Artificial Sequence
  Description of Artificial Sequence: Synthetic oligonucleotide
  Target: LAMA2; (+) strand; PAM type: YTN; PAM sequence: CTT
tgcatatatattgttaaatg

SEQ ID NO: 377293 - DNA, 20 bp, Artificial Sequence
  Description of Artificial Sequence: Synthetic oligonucleotide
  Target: LAMA2; (+) strand; PAM type: YTN; PAM sequence: TTT
gcatatatattgttaaatgt

SEQ ID NO: 377294 - DNA, 20 bp, Artificial Sequence
  Description of Artificial Sequence: Synthetic oligonucleotide
  Target: LAMA2; (+) strand; PAM type: YTN; PAM sequence: TTG
catatatattgttaaatgta

SEQ ID NO: 377295 - DNA, 20 bp, Artificial Sequence
  Description of Artificial Sequence: Synthetic oligonucleotide
  Target: LAMA2; (+) strand; PAM type: YTN; PAM sequence: TTG
ttaaatgtatccgtttcata

SEQ ID NO: 377296 - DNA, 20 bp, Artificial Sequence
  Description of Artificial Sequence: Synthetic oligonucleotide
  Target: LAMA2; (+) strand; PAM type: YTN; PAM sequence: TTA
aatgtatccgtttcatattt

SEQ ID NO: 377297 - DNA, 20 bp, Artificial Sequence
  Description of Artificial Sequence: Synthetic oligonucleotide
  Target: LAMA2; (+) strand; PAM type: YTN; PAM sequence: TTT
catattttttatcaaaagca

SEQ ID NO: 377298 - DNA, 20 bp, Artificial Sequence
  Description of Artificial Sequence: Synthetic oligonucleotide
  Target: LAMA2; (+) strand; PAM type: YTN; PAM sequence: TTC
atattttttatcaaaagcaa

SEQ ID NO: 377299 - DNA, 20 bp, Artificial Sequence
  Description of Artificial Sequence: Synthetic oligonucleotide
  Target: LAMA2; (+) strand; PAM type: YTN; PAM sequence: TTT
tttatcaaaagcaaatgctg

SEQ ID NO: 377300 - DNA, 20 bp, Artificial Sequence
  Description of Artificial Sequence: Synthetic oligonucleotide
  Target: LAMA2; (+) strand; PAM type: YTN; PAM sequence: TTT
ttatcaaaagcaaatgctgt

SEQ ID NO: 377301 - DNA, 20 bp, Artificial Sequence
  Description of Artificial Sequence: Synthetic oligonucleotide
  Target: LAMA2; (+) strand; PAM type: YTN; PAM sequence: TTT
tatcaaaagcaaatgctgtg

SEQ ID NO: 377302 - DNA, 20 bp, Artificial Sequence
  Description of Artificial Sequence: Synthetic oligonucleotide
  Target: LAMA2; (+) strand; PAM type: YTN; PAM sequence: TTT
atcaaaagcaaatgctgtgt

SEQ ID NO: 377303 - DNA, 20 bp, Artificial Sequence
  Description of Artificial Sequence: Synthetic oligonucleotide
  Target: LAMA2; (+) strand; PAM type: YTN; PAM sequence: TTA
tcaaaagcaaatgctgtgtt

SEQ ID NO: 377304 - DNA, 20 bp, Artificial Sequence
  Description of Artificial Sequence: Synthetic oligonucleotide
  Target: LAMA2; (+) strand; PAM type: YTN; PAM sequence: CTG
tgttccatttcagttttaaa

SEQ ID NO: 377305 - DNA, 20 bp, Artificial Sequence
  Description of Artificial Sequence: Synthetic oligonucleotide
  Target: LAMA2; (+) strand; PAM type: YTN; PAM sequence: TTC
catttcagttttaaattgct

SEQ ID NO: 377306 - DNA, 20 bp, Artificial Sequence
  Description of Artificial Sequence: Synthetic oligonucleotide
  Target: LAMA2; (+) strand; PAM type: YTN; PAM sequence: TTT
cagttttaaattgcttgtta

SEQ ID NO: 377307 - DNA, 20 bp, Artificial Sequence
  Description of Artificial Sequence: Synthetic oligonucleotide
  Target: LAMA2; (+) strand; PAM type: YTN; PAM sequence: TTC
agttttaaattgcttgttac

SEQ ID NO: 377308 - DNA, 20 bp, Artificial Sequence
  Description of Artificial Sequence: Synthetic oligonucleotide
  Target: LAMA2; (+) strand; PAM type: YTN; PAM sequence: TTT
taaattgcttgttactagaa

SEQ ID NO: 377309 - DNA, 20 bp, Artificial Sequence
  Description of Artificial Sequence: Synthetic oligonucleotide
  Target: LAMA2; (+) strand; PAM type: YTN; PAM sequence: TTT
aaattgcttgttactagaat

SEQ ID NO: 377310 - DNA, 20 bp, Artificial Sequence
  Description of Artificial Sequence: Synthetic oligonucleotide
  Target: LAMA2; (+) strand; PAM type: YTN; PAM sequence: TTA
aattgcttgttactagaata

SEQ ID NO: 377311 - DNA, 20 bp, Artificial Sequence
  Description of Artificial Sequence: Synthetic oligonucleotide
  Target: LAMA2; (+) strand; PAM type: YTN; PAM sequence: TTG
cttgttactagaatagaaaa

SEQ ID NO: 377312 - DNA, 20 bp, Artificial Sequence
  Description of Artificial Sequence: Synthetic oligonucleotide
  Target: LAMA2; (+) strand; PAM type: YTN; PAM sequence: CTT
gttactagaatagaaaaata

SEQ ID NO: 377313 - DNA, 20 bp, Artificial Sequence
  Description of Artificial Sequence: Synthetic oligonucleotide
  Target: LAMA2; (+) strand; PAM type: YTN; PAM sequence: TTG
ttactagaatagaaaaatac

SEQ ID NO: 377314 - DNA, 20 bp, Artificial Sequence
  Description of Artificial Sequence: Synthetic oligonucleotide
  Target: LAMA2; (+) strand; PAM type: YTN; PAM sequence: TTA
ctagaatagaaaaatacaat

SEQ ID NO: 377315 - DNA, 20 bp, Artificial Sequence
  Description of Artificial Sequence: Synthetic oligonucleotide
  Target: LAMA2; (+) strand; PAM type: YTN; PAM sequence: CTA
gaatagaaaaatacaattat

SEQ ID NO: 377316 - DNA, 20 bp, Artificial Sequence
  Description of Artificial Sequence: Synthetic oligonucleotide
  Target: LAMA2; (+) strand; PAM type: YTN; PAM sequence: TTA
tttttataccttatccttct

SEQ ID NO: 377317 - DNA, 20 bp, Artificial Sequence
  Description of Artificial Sequence: Synthetic oligonucleotide
  Target: LAMA2; (+) strand; PAM type: YTN; PAM sequence: TTT
ttataccttatccttctata

SEQ ID NO: 377318 - DNA, 20 bp, Artificial Sequence
  Description of Artificial Sequence: Synthetic oligonucleotide
  Target: LAMA2; (+) strand; PAM type: YTN; PAM sequence: TTT
tataccttatccttctatac

SEQ ID NO: 377319 - DNA, 20 bp, Artificial Sequence
  Description of Artificial Sequence: Synthetic oligonucleotide
  Target: LAMA2; (+) strand; PAM type: YTN; PAM sequence: TTT
ataccttatccttctatact

SEQ ID NO: 377320 - DNA, 20 bp, Artificial Sequence
  Description of Artificial Sequence: Synthetic oligonucleotide
  Target: LAMA2; (+) strand; PAM type: YTN; PAM sequence: TTA
taccttatccttctatactg

SEQ ID NO: 377321 - DNA, 20 bp, Artificial Sequence
  Description of Artificial Sequence: Synthetic oligonucleotide
  Target: LAMA2; (+) strand; PAM type: YTN; PAM sequence: CTT
atccttctatactgtaatct

SEQ ID NO: 377322 - DNA, 20 bp, Artificial Sequence
  Description of Artificial Sequence: Synthetic oligonucleotide
  Target: LAMA2; (+) strand; PAM type: YTN; PAM sequence: TTA
tccttctatactgtaatctt

SEQ ID NO: 377323 - DNA, 20 bp, Artificial Sequence
  Description of Artificial Sequence: Synthetic oligonucleotide
  Target: LAMA2; (+) strand; PAM type: YTN; PAM sequence: CTT
ctatactgtaatcttgctaa

SEQ ID NO: 377324 - DNA, 20 bp, Artificial Sequence
  Description of Artificial Sequence: Synthetic oligonucleotide
  Target: LAMA2; (+) strand; PAM type: YTN; PAM sequence: TTC
tatactgtaatcttgctaaa

SEQ ID NO: 377325 - DNA, 20 bp, Artificial Sequence
  Description of Artificial Sequence: Synthetic oligonucleotide
  Target: LAMA2; (+) strand; PAM type: YTN; PAM sequence: CTA
tactgtaatcttgctaaact

SEQ ID NO: 377326 - DNA, 20 bp, Artificial Sequence
  Description of Artificial Sequence: Synthetic oligonucleotide
  Target: LAMA2; (+) strand; PAM type: YTN; PAM sequence: CTG
taatcttgctaaacttatta

SEQ ID NO: 377327 - DNA, 20 bp, Artificial Sequence
  Description of Artificial Sequence: Synthetic oligonucleotide
  Target: LAMA2; (+) strand; PAM type: YTN; PAM sequence: CTT
gctaaacttattagttctag

SEQ ID NO: 377328 - DNA, 20 bp, Artificial Sequence
  Description of Artificial Sequence: Synthetic oligonucleotide
  Target: LAMA2; (+) strand; PAM type: YTN; PAM sequence: TTG
ctaaacttattagttctagt

SEQ ID NO: 377329 - DNA, 20 bp, Artificial Sequence
  Description of Artificial Sequence: Synthetic oligonucleotide
  Target: LAMA2; (+) strand; PAM type: YTN; PAM sequence: CTA
aacttattagttctagtttc

SEQ ID NO: 377330 - DNA, 20 bp, Artificial Sequence
  Description of Artificial Sequence: Synthetic oligonucleotide
  Target: LAMA2; (+) strand; PAM type: YTN; PAM sequence: CTT
attagttctagtttcttttt

SEQ ID NO: 377331 - DNA, 20 bp, Artificial Sequence
  Description of Artificial Sequence: Synthetic oligonucleotide
  Target: LAMA2; (+) strand; PAM type: YTN; PAM sequence: TTA
ttagttctagtttctttttg

SEQ ID NO: 377332 - DNA, 20 bp, Artificial Sequence
  Description of Artificial Sequence: Synthetic oligonucleotide
  Target: LAMA2; (+) strand; PAM type: YTN; PAM sequence: TTA
gttctagtttctttttggtc

SEQ ID NO: 377333 - DNA, 20 bp, Artificial Sequence
  Description of Artificial Sequence: Synthetic oligonucleotide
  Target: LAMA2; (+) strand; PAM type: YTN; PAM sequence: TTC
tagtttctttttggtccatt

SEQ ID NO: 377334 - DNA, 20 bp, Artificial Sequence
  Description of Artificial Sequence: Synthetic oligonucleotide
  Target: LAMA2; (+) strand; PAM type: YTN; PAM sequence: CTA
gtttctttttggtccattta

SEQ ID NO: 377335 - DNA, 20 bp, Artificial Sequence
  Description of Artificial Sequence: Synthetic oligonucleotide
  Target: LAMA2; (+) strand; PAM type: YTN; PAM sequence: TTT
ctttttggtccatttagtga

SEQ ID NO: 377336 - DNA, 20 bp, Artificial Sequence
  Description of Artificial Sequence: Synthetic oligonucleotide
  Target: LAMA2; (+) strand; PAM type: YTN; PAM sequence: TTC
tttttggtccatttagtgag

SEQ ID NO: 377337 - DNA, 20 bp, Artificial Sequence
  Description of Artificial Sequence: Synthetic oligonucleotide
  Target: LAMA2; (+) strand; PAM type: YTN; PAM sequence: CTT
tttggtccatttagtgagat

SEQ ID NO: 377338 - DNA, 20 bp, Artificial Sequence
  Description of Artificial Sequence: Synthetic oligonucleotide
  Target: LAMA2; (+) strand; PAM type: YTN; PAM sequence: TTT
ttggtccatttagtgagatt

SEQ ID NO: 377339 - DNA, 20 bp, Artificial Sequence
  Description of Artificial Sequence: Synthetic oligonucleotide
  Target: LAMA2; (+) strand; PAM type: YTN; PAM sequence: TTT
tggtccatttagtgagattt

SEQ ID NO: 377340 - DNA, 20 bp, Artificial Sequence
  Description of Artificial Sequence: Synthetic oligonucleotide
  Target: LAMA2; (+) strand; PAM type: YTN; PAM sequence: TTT
ggtccatttagtgagatttt

SEQ ID NO: 377341 - DNA, 20 bp, Artificial Sequence
  Description of Artificial Sequence: Synthetic oligonucleotide
  Target: LAMA2; (+) strand; PAM type: YTN; PAM sequence: TTG
gtccatttagtgagattttc

SEQ ID NO: 377342 - DNA, 20 bp, Artificial Sequence
  Description of Artificial Sequence: Synthetic oligonucleotide
  Target: LAMA2; (+) strand; PAM type: YTN; PAM sequence: TTT
agtgagattttcttgtagat

SEQ ID NO: 377343 - DNA, 20 bp, Artificial Sequence
  Description of Artificial Sequence: Synthetic oligonucleotide
  Target: LAMA2; (+) strand; PAM type: YTN; PAM sequence: TTA
gtgagattttcttgtagata

SEQ ID NO: 377344 - DNA, 20 bp, Artificial Sequence
  Description of Artificial Sequence: Synthetic oligonucleotide
  Target: LAMA2; (+) strand; PAM type: YTN; PAM sequence: TTT
tcttgtagataatcatgtca

SEQ ID NO: 377345 - DNA, 20 bp, Artificial Sequence
  Description of Artificial Sequence: Synthetic oligonucleotide
  Target: LAMA2; (+) strand; PAM type: YTN; PAM sequence: TTT
cttgtagataatcatgtcat

SEQ ID NO: 377346 - DNA, 20 bp, Artificial Sequence
  Description of Artificial Sequence: Synthetic oligonucleotide
  Target: LAMA2; (+) strand; PAM type: YTN; PAM sequence: TTC
ttgtagataatcatgtcatc

SEQ ID NO: 377347 - DNA, 20 bp, Artificial Sequence
  Description of Artificial Sequence: Synthetic oligonucleotide
  Target: LAMA2; (+) strand; PAM type: YTN; PAM sequence: CTT
gtagataatcatgtcatctg

SEQ ID NO: 377348 - DNA, 20 bp, Artificial Sequence
  Description of Artificial Sequence: Synthetic oligonucleotide
  Target: LAMA2; (+) strand; PAM type: YTN; PAM sequence: TTG
tagataatcatgtcatctgc

SEQ ID NO: 377349 - DNA, 20 bp, Artificial Sequence
  Description of Artificial Sequence: Synthetic oligonucleotide
  Target: LAMA2; (+) strand; PAM type: YTN; PAM sequence: CTG
caaagagagatttacttcct

SEQ ID NO: 377350 - DNA, 20 bp, Artificial Sequence
  Description of Artificial Sequence: Synthetic oligonucleotide
  Target: LAMA2; (+) strand; PAM type: YTN; PAM sequence: TTT
acttcctttctaatctgtgt

SEQ ID NO: 377351 - DNA, 20 bp, Artificial Sequence
  Description of Artificial Sequence: Synthetic oligonucleotide
  Target: LAMA2; (+) strand; PAM type: YTN; PAM sequence: TTA
cttcctttctaatctgtgta

SEQ ID NO: 377352 - DNA, 20 bp, Artificial Sequence
  Description of Artificial Sequence: Synthetic oligonucleotide
  Target: LAMA2; (+) strand; PAM type: YTN; PAM sequence: CTT
cctttctaatctgtgtaact

SEQ ID NO: 377353 - DNA, 20 bp, Artificial Sequence
  Description of Artificial Sequence: Synthetic oligonucleotide
  Target: LAMA2; (+) strand; PAM type: YTN; PAM sequence: TTC
ctttctaatctgtgtaactt

SEQ ID NO: 377354 - DNA, 20 bp, Artificial Sequence
  Description of Artificial Sequence: Synthetic oligonucleotide
  Target: LAMA2; (+) strand; PAM type: YTN; PAM sequence: CTT
tctaatctgtgtaacttctg

SEQ ID NO: 377355 - DNA, 20 bp, Artificial Sequence
  Description of Artificial Sequence: Synthetic oligonucleotide
  Target: LAMA2; (+) strand; PAM type: YTN; PAM sequence: TTT
ctaatctgtgtaacttctgt

SEQ ID NO: 377356 - DNA, 20 bp, Artificial Sequence
  Description of Artificial Sequence: Synthetic oligonucleotide
  Target: LAMA2; (+) strand; PAM type: YTN; PAM sequence: TTC
taatctgtgtaacttctgtg

SEQ ID NO: 377357 - DNA, 20 bp, Artificial Sequence
  Description of Artificial Sequence: Synthetic oligonucleotide
  Target: LAMA2; (+) strand; PAM type: YTN; PAM sequence: CTA
atctgtgtaacttctgtggc

SEQ ID NO: 377358 - DNA, 20 bp, Artificial Sequence
  Description of Artificial Sequence: Synthetic oligonucleotide
  Target: LAMA2; (+) strand; PAM type: YTN; PAM sequence: CTG
tgtaacttctgtggcatttt

SEQ ID NO: 377359 - DNA, 20 bp, Artificial Sequence
  Description of Artificial Sequence: Synthetic oligonucleotide
  Target: LAMA2; (+) strand; PAM type: YTN; PAM sequence: CTT
ctgtggcattttcttgtcct

SEQ ID NO: 377360 - DNA, 20 bp, Artificial Sequence
  Description of Artificial Sequence: Synthetic oligonucleotide
  Target: LAMA2; (+) strand; PAM type: YTN; PAM sequence: TTC
tgtggcattttcttgtccta

SEQ ID NO: 377361 - DNA, 20 bp, Artificial Sequence
  Description of Artificial Sequence: Synthetic oligonucleotide
  Target: LAMA2; (+) strand; PAM type: YTN; PAM sequence: CTG
tggcattttcttgtcctatt

SEQ ID NO: 377362 - DNA, 20 bp, Artificial Sequence
  Description of Artificial Sequence: Synthetic oligonucleotide
  Target: LAMA2; (+) strand; PAM type: YTN; PAM sequence: TTT
tcttgtcctattgtagtaaa

SEQ ID NO: 377363 - DNA, 20 bp, Artificial Sequence
  Description of Artificial Sequence: Synthetic oligonucleotide
  Target: LAMA2; (+) strand; PAM type: YTN; PAM sequence: TTT
cttgtcctattgtagtaaac

SEQ ID NO: 377364 - DNA, 20 bp, Artificial Sequence
  Description of Artificial Sequence: Synthetic oligonucleotide
  Target: LAMA2; (+) strand; PAM type: YTN; PAM sequence: TTC
ttgtcctattgtagtaaact

SEQ ID NO: 377365 - DNA, 20 bp, Artificial Sequence
  Description of Artificial Sequence: Synthetic oligonucleotide
  Target: LAMA2; (+) strand; PAM type: YTN; PAM sequence: CTT
gtcctattgtagtaaactat

SEQ ID NO: 377366 - DNA, 20 bp, Artificial Sequence
  Description of Artificial Sequence: Synthetic oligonucleotide
  Target: LAMA2; (+) strand; PAM type: YTN; PAM sequence: TTG
tcctattgtagtaaactatt

SEQ ID NO: 377367 - DNA, 20 bp, Artificial Sequence
  Description of Artificial Sequence: Synthetic oligonucleotide
  Target: LAMA2; (+) strand; PAM type: YTN; PAM sequence: CTA
ttgtagtaaactattgacta

SEQ ID NO: 377368 - DNA, 20 bp, Artificial Sequence
  Description of Artificial Sequence: Synthetic oligonucleotide
  Target: LAMA2; (+) strand; PAM type: YTN; PAM sequence: TTG
tagtaaactattgactagaa

SEQ ID NO: 377369 - DNA, 20 bp, Artificial Sequence
  Description of Artificial Sequence: Synthetic oligonucleotide
  Target: LAMA2; (+) strand; PAM type: YTN; PAM sequence: CTA
ttgactagaagtggtggaag

SEQ ID NO: 377370 - DNA, 20 bp, Artificial Sequence
  Description of Artificial Sequence: Synthetic oligonucleotide
  Target: LAMA2; (+) strand; PAM type: YTN; PAM sequence: TTG
actagaagtggtggaagcaa

SEQ ID NO: 377371 - DNA, 20 bp, Artificial Sequence
  Description of Artificial Sequence: Synthetic oligonucleotide
  Target: LAMA2; (+) strand; PAM type: YTN; PAM sequence: CTA
gaagtggtggaagcaaatat

SEQ ID NO: 377372 - DNA, 20 bp, Artificial Sequence
  Description of Artificial Sequence: Synthetic oligonucleotide
  Target: LAMA2; (+) strand; PAM type: YTN; PAM sequence: CTT
gccttgttccttagtttaag

SEQ ID NO: 377373 - DNA, 20 bp, Artificial Sequence
  Description of Artificial Sequence: Synthetic oligonucleotide
  Target: LAMA2; (+) strand; PAM type: YTN; PAM sequence: TTG
ccttgttccttagtttaagt

SEQ ID NO: 377374 - DNA, 20 bp, Artificial Sequence
  Description of Artificial Sequence: Synthetic oligonucleotide
  Target: LAMA2; (+) strand; PAM type: YTN; PAM sequence: CTT
gttccttagtttaagtggaa

SEQ ID NO: 377375 - DNA, 20 bp, Artificial Sequence
  Description of Artificial Sequence: Synthetic oligonucleotide
  Target: LAMA2; (+) strand; PAM type: YTN; PAM sequence: TTG
ttccttagtttaagtggaaa

SEQ ID NO: 377376 - DNA, 20 bp, Artificial Sequence
  Description of Artificial Sequence: Synthetic oligonucleotide
  Target: LAMA2; (+) strand; PAM type: YTN; PAM sequence: TTC
cttagtttaagtggaaagca

SEQ ID NO: 377377 - DNA, 20 bp, Artificial Sequence
  Description of Artificial Sequence: Synthetic oligonucleotide
  Target: LAMA2; (+) strand; PAM type: YTN; PAM sequence: CTT
agtttaagtggaaagcattg

SEQ ID NO: 377378 - DNA, 20 bp, Artificial Sequence
  Description of Artificial Sequence: Synthetic oligonucleotide
  Target: LAMA2; (+) strand; PAM type: YTN; PAM sequence: TTA
gtttaagtggaaagcattgt

SEQ ID NO: 377379 - DNA, 20 bp, Artificial Sequence
  Description of Artificial Sequence: Synthetic oligonucleotide
  Target: LAMA2; (+) strand; PAM type: YTN; PAM sequence: TTT
aagtggaaagcattgtcttt

SEQ ID NO: 377380 - DNA, 20 bp, Artificial Sequence
  Description of Artificial Sequence: Synthetic oligonucleotide
  Target: LAMA2; (+) strand; PAM type: YTN; PAM sequence: TTA
agtggaaagcattgtctttt

SEQ ID NO: 377381 - DNA, 20 bp, Artificial Sequence
  Description of Artificial Sequence: Synthetic oligonucleotide
  Target: LAMA2; (+) strand; PAM type: YTN; PAM sequence: TTG
tcttttataattgaaaatga

SEQ ID NO: 377382 - DNA, 20 bp, Artificial Sequence
  Description of Artificial Sequence: Synthetic oligonucleotide
  Target: LAMA2; (+) strand; PAM type: YTN; PAM sequence: CTT
ttataattgaaaatgatgtt

SEQ ID NO: 377383 - DNA, 20 bp, Artificial Sequence
  Description of Artificial Sequence: Synthetic oligonucleotide
  Target: LAMA2; (+) strand; PAM type: YTN; PAM sequence: TTT
tataattgaaaatgatgttg

SEQ ID NO: 377384 - DNA, 20 bp, Artificial Sequence
  Description of Artificial Sequence: Synthetic oligonucleotide
  Target: LAMA2; (+) strand; PAM type: YTN; PAM sequence: TTT
ataattgaaaatgatgttgg

SEQ ID NO: 377385 - DNA, 20 bp, Artificial Sequence
  Description of Artificial Sequence: Synthetic oligonucleotide
  Target: LAMA2; (+) strand; PAM type: YTN; PAM sequence: TTA
taattgaaaatgatgttggc

SEQ ID NO: 377386 - DNA, 20 bp, Artificial Sequence
  Description of Artificial Sequence: Synthetic oligonucleotide
  Target: LAMA2; (+) strand; PAM type: YTN; PAM sequence: TTG
aaaatgatgttggctatatt

SEQ ID NO: 377387 - DNA, 20 bp, Artificial Sequence
  Description of Artificial Sequence: Synthetic oligonucleotide
  Target: LAMA2; (+) strand; PAM type: YTN; PAM sequence: TTG
gctatattttacctgtaggt

SEQ ID NO: 377388 - DNA, 20 bp, Artificial Sequence
  Description of Artificial Sequence: Synthetic oligonucleotide
  Target: LAMA2; (+) strand; PAM type: YTN; PAM sequence: CTA
tattttacctgtaggtgctt

SEQ ID NO: 377389 - DNA, 20 bp, Artificial Sequence
  Description of Artificial Sequence: Synthetic oligonucleotide
  Target: LAMA2; (+) strand; PAM type: YTN; PAM sequence: TTT
tacctgtaggtgctttttat

SEQ ID NO: 377390 - DNA, 20 bp, Artificial Sequence
  Description of Artificial Sequence: Synthetic oligonucleotide
  Target: LAMA2; (+) strand; PAM type: YTN; PAM sequence: TTT
acctgtaggtgctttttatt

SEQ ID NO: 377391 - DNA, 20 bp, Artificial Sequence
  Description of Artificial Sequence: Synthetic oligonucleotide
  Target: LAMA2; (+) strand; PAM type: YTN; PAM sequence: TTA
cctgtaggtgctttttattg

SEQ ID NO: 377392 - DNA, 20 bp, Artificial Sequence
  Description of Artificial Sequence: Synthetic oligonucleotide
  Target: LAMA2; (+) strand; PAM type: YTN; PAM sequence: CTG
taggtgctttttattgtttt

SEQ ID NO: 377393 - DNA, 20 bp, Artificial Sequence
  Description of Artificial Sequence: Synthetic oligonucleotide
  Target: LAMA2; (+) strand; PAM type: YTN; PAM sequence: CTT
tttattgttttgaggatgcc

SEQ ID NO: 377394 - DNA, 20 bp, Artificial Sequence
  Description of Artificial Sequence: Synthetic oligonucleotide
  Target: LAMA2; (+) strand; PAM type: YTN; PAM sequence: TTT
ttattgttttgaggatgccc

SEQ ID NO: 377395 - DNA, 20 bp, Artificial Sequence
  Description of Artificial Sequence: Synthetic oligonucleotide
  Target: LAMA2; (+) strand; PAM type: YTN; PAM sequence: TTT
tattgttttgaggatgcccc

SEQ ID NO: 377396 - DNA, 20 bp, Artificial Sequence
  Description of Artificial Sequence: Synthetic oligonucleotide
  Target: LAMA2; (+) strand; PAM type: YTN; PAM sequence: TTT
attgttttgaggatgccccc

SEQ ID NO: 377397 - DNA, 20 bp, Artificial Sequence
  Description of Artificial Sequence: Synthetic oligonucleotide
  Target: LAMA2; (+) strand; PAM type: YTN; PAM sequence: TTA
ttgttttgaggatgccccct

SEQ ID NO: 377398 - DNA, 20 bp, Artificial Sequence
  Description of Artificial Sequence: Synthetic oligonucleotide
  Target: LAMA2; (+) strand; PAM type: YTN; PAM sequence: TTG
ttttgaggatgccccctcgt

SEQ ID NO: 377399 - DNA, 20 bp, Artificial Sequence
  Description of Artificial Sequence: Synthetic oligonucleotide
  Target: LAMA2; (+) strand; PAM type: YTN; PAM sequence: TTT
tgaggatgccccctcgtgtt

SEQ ID NO: 377400 - DNA, 20 bp, Artificial Sequence
  Description of Artificial Sequence: Synthetic oligonucleotide
  Target: LAMA2; (+) strand; PAM type: YTN; PAM sequence: TTT
gaggatgccccctcgtgttt

SEQ ID NO: 377401 - DNA, 20 bp, Artificial Sequence
  Description of Artificial Sequence: Synthetic oligonucleotide
  Target: LAMA2; (+) strand; PAM type: YTN; PAM sequence: TTG
aggatgccccctcgtgtttt

SEQ ID NO: 377402 - DNA, 20 bp, Artificial Sequence
  Description of Artificial Sequence: Synthetic oligonucleotide
  Target: LAMA2; (+) strand; PAM type: YTN; PAM sequence: CTC
gtgtttttagtttgctaaga

SEQ ID NO: 377403 - DNA, 20 bp, Artificial Sequence
  Description of Artificial Sequence: Synthetic oligonucleotide
  Target: LAMA2; (+) strand; PAM type: YTN; PAM sequence: TTT
ttagtttgctaagagctttt

SEQ ID NO: 377404 - DNA, 20 bp, Artificial Sequence
  Description of Artificial Sequence: Synthetic oligonucleotide
  Target: LAMA2; (+) strand; PAM type: YTN; PAM sequence: TTT
tagtttgctaagagctttta

SEQ ID NO: 377405 - DNA, 20 bp, Artificial Sequence
  Description of Artificial Sequence: Synthetic oligonucleotide
  Target: LAMA2; (+) strand; PAM type: YTN; PAM sequence: TTT
agtttgctaagagcttttat

SEQ ID NO: 377406 - DNA, 20 bp, Artificial Sequence
  Description of Artificial Sequence: Synthetic oligonucleotide
  Target: LAMA2; (+) strand; PAM type: YTN; PAM sequence: TTA
gtttgctaagagcttttatc

SEQ ID NO: 377407 - DNA, 20 bp, Artificial Sequence
  Description of Artificial Sequence: Synthetic oligonucleotide
  Target: LAMA2; (+) strand; PAM type: YTN; PAM sequence: TTT
gctaagagcttttatcaaga

SEQ ID NO: 377408 - DNA, 20 bp, Artificial Sequence
  Description of Artificial Sequence: Synthetic oligonucleotide
  Target: LAMA2; (+) strand; PAM type: YTN; PAM sequence: TTG
ctaagagcttttatcaagaa

SEQ ID NO: 377409 - DNA, 20 bp, Artificial Sequence
  Description of Artificial Sequence: Synthetic oligonucleotide
  Target: LAMA2; (+) strand; PAM type: YTN; PAM sequence: CTA
agagcttttatcaagaatat

SEQ ID NO: 377410 - DNA, 20 bp, Artificial Sequence
  Description of Artificial Sequence: Synthetic oligonucleotide
  Target: LAMA2; (+) strand; PAM type: YTN; PAM sequence: CTT
ttatcaagaatatgtgttca

SEQ ID NO: 377411 - DNA, 20 bp, Artificial Sequence
  Description of Artificial Sequence: Synthetic oligonucleotide
  Target: LAMA2; (+) strand; PAM type: YTN; PAM sequence: TTT
tatcaagaatatgtgttcaa

SEQ ID NO: 377412 - DNA, 20 bp, Artificial Sequence
  Description of Artificial Sequence: Synthetic oligonucleotide
  Target: LAMA2; (+) strand; PAM type: YTN; PAM sequence: TTT
atcaagaatatgtgttcaat

SEQ ID NO: 377413 - DNA, 20 bp, Artificial Sequence
  Description of Artificial Sequence: Synthetic oligonucleotide
  Target: LAMA2; (+) strand; PAM type: YTN; PAM sequence: TTA
tcaagaatatgtgttcaatt

SEQ ID NO: 377414 - DNA, 20 bp, Artificial Sequence
  Description of Artificial Sequence: Synthetic oligonucleotide
  Target: LAMA2; (+) strand; PAM type: YTN; PAM sequence: TTC
aattttgttaaatgactttt

SEQ ID NO: 377415 - DNA, 20 bp, Artificial Sequence
  Description of Artificial Sequence: Synthetic oligonucleotide
  Target: LAMA2; (+) strand; PAM type: YTN; PAM sequence: TTT
tgttaaatgacttttctgca

SEQ ID NO: 377416 - DNA, 20 bp, Artificial Sequence
  Description of Artificial Sequence: Synthetic oligonucleotide
  Target: LAMA2; (+) strand; PAM type: YTN; PAM sequence: TTT
gttaaatgacttttctgcat

SEQ ID NO: 377417 - DNA, 20 bp, Artificial Sequence
  Description of Artificial Sequence: Synthetic oligonucleotide
  Target: LAMA2; (+) strand; PAM type: YTN; PAM sequence: TTG
ttaaatgacttttctgcatc

SEQ ID NO: 377418 - DNA, 20 bp, Artificial Sequence
  Description of Artificial Sequence: Synthetic oligonucleotide
  Target: LAMA2; (+) strand; PAM type: YTN; PAM sequence: TTA
aatgacttttctgcatctat

SEQ ID NO: 377419 - DNA, 20 bp, Artificial Sequence
  Description of Artificial Sequence: Synthetic oligonucleotide
  Target: LAMA2; (+) strand; PAM type: YTN; PAM sequence: CTT
ttctgcatctattgagatga

SEQ ID NO: 377420 - DNA, 20 bp, Artificial Sequence
  Description of Artificial Sequence: Synthetic oligonucleotide
  Target: LAMA2; (+) strand; PAM type: YTN; PAM sequence: TTT
tctgcatctattgagatgac

SEQ ID NO: 377421 - DNA, 20 bp, Artificial Sequence
  Description of Artificial Sequence: Synthetic oligonucleotide
  Target: LAMA2; (+) strand; PAM type: YTN; PAM sequence: TTT
ctgcatctattgagatgacc

SEQ ID NO: 377422 - DNA, 20 bp, Artificial Sequence
  Description of Artificial Sequence: Synthetic oligonucleotide
  Target: LAMA2; (+) strand; PAM type: YTN; PAM sequence: TTC
tgcatctattgagatgacca

SEQ ID NO: 377423 - DNA, 20 bp, Artificial Sequence
  Description of Artificial Sequence: Synthetic oligonucleotide
  Target: LAMA2; (+) strand; PAM type: YTN; PAM sequence: CTG
catctattgagatgaccata

SEQ ID NO: 377424 - DNA, 20 bp, Artificial Sequence
  Description of Artificial Sequence: Synthetic oligonucleotide
  Target: LAMA2; (+) strand; PAM type: YTN; PAM sequence: CTA
ttgagatgaccatatgatat

SEQ ID NO: 377425 - DNA, 20 bp, Artificial Sequence
  Description of Artificial Sequence: Synthetic oligonucleotide
  Target: LAMA2; (+) strand; PAM type: YTN; PAM sequence: TTG
agatgaccatatgatatttc

SEQ ID NO: 377426 - DNA, 20 bp, Artificial Sequence
  Description of Artificial Sequence: Synthetic oligonucleotide
  Target: LAMA2; (+) strand; PAM type: YTN; PAM sequence: TTT
ctttttaagctgttaatatg

SEQ ID NO: 377427 - DNA, 20 bp, Artificial Sequence
  Description of Artificial Sequence: Synthetic oligonucleotide
  Target: LAMA2; (+) strand; PAM type: YTN; PAM sequence: TTC
tttttaagctgttaatatga

SEQ ID NO: 377428 - DNA, 20 bp, Artificial Sequence
  Description of Artificial Sequence: Synthetic oligonucleotide
  Target: LAMA2; (+) strand; PAM type: YTN; PAM sequence: CTT
tttaagctgttaatatgaca

SEQ ID NO: 377429 - DNA, 20 bp, Artificial Sequence
  Description of Artificial Sequence: Synthetic oligonucleotide
  Target: LAMA2; (+) strand; PAM type: YTN; PAM sequence: TTT
ttaagctgttaatatgacag

SEQ ID NO: 377430 - DNA, 20 bp, Artificial Sequence
  Description of Artificial Sequence: Synthetic oligonucleotide
  Target: LAMA2; (+) strand; PAM type: YTN; PAM sequence: TTT
taagctgttaatatgacaga

SEQ ID NO: 377431 - DNA, 20 bp, Artificial Sequence
  Description of Artificial Sequence: Synthetic oligonucleotide
  Target: LAMA2; (+) strand; PAM type: YTN; PAM sequence: TTT
aagctgttaatatgacagat

SEQ ID NO: 377432 - DNA, 20 bp, Artificial Sequence
  Description of Artificial Sequence: Synthetic oligonucleotide
  Target: LAMA2; (+) strand; PAM type: YTN; PAM sequence: TTA
agctgttaatatgacagatt

SEQ ID NO: 377433 - DNA, 20 bp, Artificial Sequence
  Description of Artificial Sequence: Synthetic oligonucleotide
  Target: LAMA2; (+) strand; PAM type: YTN; PAM sequence: CTG
ttaatatgacagattatact

SEQ ID NO: 377434 - DNA, 20 bp, Artificial Sequence
  Description of Artificial Sequence: Synthetic oligonucleotide
  Target: LAMA2; (+) strand; PAM type: YTN; PAM sequence: TTA
atatgacagattatactgat

SEQ ID NO: 377435 - DNA, 20 bp, Artificial Sequence
  Description of Artificial Sequence: Synthetic oligonucleotide
  Target: LAMA2; (+) strand; PAM type: YTN; PAM sequence: TTA
tactgattgattttcaacat

SEQ ID NO: 377436 - DNA, 20 bp, Artificial Sequence
  Description of Artificial Sequence: Synthetic oligonucleotide
  Target: LAMA2; (+) strand; PAM type: YTN; PAM sequence: CTG
attgattttcaacatatcaa

SEQ ID NO: 377437 - DNA, 20 bp, Artificial Sequence
  Description of Artificial Sequence: Synthetic oligonucleotide
  Target: LAMA2; (+) strand; PAM type: YTN; PAM sequence: TTG
attttcaacatatcaatcca

SEQ ID NO: 377438 - DNA, 20 bp, Artificial Sequence
  Description of Artificial Sequence: Synthetic oligonucleotide
  Target: LAMA2; (+) strand; PAM type: YTN; PAM sequence: TTT
tcaacatatcaatccagtct

SEQ ID NO: 377439 - DNA, 20 bp, Artificial Sequence
  Description of Artificial Sequence: Synthetic oligonucleotide
  Target: LAMA2; (+) strand; PAM type: YTN; PAM sequence: TTT
caacatatcaatccagtctt

SEQ ID NO: 377440 - DNA, 20 bp, Artificial Sequence
  Description of Artificial Sequence: Synthetic oligonucleotide
  Target: LAMA2; (+) strand; PAM type: YTN; PAM sequence: TTC
aacatatcaatccagtctta

SEQ ID NO: 377441 - DNA, 20 bp, Artificial Sequence
  Description of Artificial Sequence: Synthetic oligonucleotide
  Target: LAMA2; (+) strand; PAM type: YTN; PAM sequence: CTT
acaatcctcagattaatcct

SEQ ID NO: 377442 - DNA, 20 bp, Artificial Sequence
  Description of Artificial Sequence: Synthetic oligonucleotide
  Target: LAMA2; (+) strand; PAM type: YTN; PAM sequence: TTA
caatcctcagattaatcctg

SEQ ID NO: 377443 - DNA, 20 bp, Artificial Sequence
  Description of Artificial Sequence: Synthetic oligonucleotide
  Target: LAMA2; (+) strand; PAM type: YTN; PAM sequence: CTC
agattaatcctgcttggcca

SEQ ID NO: 377444 - DNA, 20 bp, Artificial Sequence
  Description of Artificial Sequence: Synthetic oligonucleotide
  Target: LAMA2; (+) strand; PAM type: YTN; PAM sequence: TTA
atcctgcttggccatgggga

SEQ ID NO: 377445 - DNA, 20 bp, Artificial Sequence
  Description of Artificial Sequence: Synthetic oligonucleotide
  Target: LAMA2; (+) strand; PAM type: YTN; PAM sequence: CTG
cttggccatggggattatcc

SEQ ID NO: 377446 - DNA, 20 bp, Artificial Sequence
  Description of Artificial Sequence: Synthetic oligonucleotide
  Target: LAMA2; (+) strand; PAM type: YTN; PAM sequence: CTT
ggccatggggattatccttt

SEQ ID NO: 377447 - DNA, 20 bp, Artificial Sequence
  Description of Artificial Sequence: Synthetic oligonucleotide
  Target: LAMA2; (+) strand; PAM type: YTN; PAM sequence: TTG
gccatggggattatcctttt

SEQ ID NO: 377448 - DNA, 20 bp, Artificial Sequence
  Description of Artificial Sequence: Synthetic oligonucleotide
  Target: LAMA2; (+) strand; PAM type: YTN; PAM sequence: TTA
tccttttaaaattatgttga

SEQ ID NO: 377449 - DNA, 20 bp, Artificial Sequence
  Description of Artificial Sequence: Synthetic oligonucleotide
  Target: LAMA2; (+) strand; PAM type: YTN; PAM sequence: CTT
ttaaaattatgttgaatcct

SEQ ID NO: 377450 - DNA, 20 bp, Artificial Sequence
  Description of Artificial Sequence: Synthetic oligonucleotide
  Target: LAMA2; (+) strand; PAM type: YTN; PAM sequence: TTT
taaaattatgttgaatcctg

SEQ ID NO: 377451 - DNA, 20 bp, Artificial Sequence
  Description of Artificial Sequence: Synthetic oligonucleotide
  Target: LAMA2; (+) strand; PAM type: YTN; PAM sequence: TTT
aaaattatgttgaatcctgt

SEQ ID NO: 377452 - DNA, 20 bp, Artificial Sequence
  Description of Artificial Sequence: Synthetic oligonucleotide
  Target: LAMA2; (+) strand; PAM type: YTN; PAM sequence: TTA
aaattatgttgaatcctgtt

SEQ ID NO: 377453 - DNA, 20 bp, Artificial Sequence
  Description of Artificial Sequence: Synthetic oligonucleotide
  Target: LAMA2; (+) strand; PAM type: YTN; PAM sequence: TTA
tgttgaatcctgtttgctag

SEQ ID NO: 377454 - DNA, 20 bp, Artificial Sequence
  Description of Artificial Sequence: Synthetic oligonucleotide
  Target: LAMA2; (+) strand; PAM type: YTN; PAM sequence: TTG
aatcctgtttgctagcattt

SEQ ID NO: 377455 - DNA, 20 bp, Artificial Sequence
  Description of Artificial Sequence: Synthetic oligonucleotide
  Target: LAMA2; (+) strand; PAM type: YTN; PAM sequence: CTG
tttgctagcattttcttaat

SEQ ID NO: 377456 - DNA, 20 bp, Artificial Sequence
  Description of Artificial Sequence: Synthetic oligonucleotide
  Target: LAMA2; (+) strand; PAM type: YTN; PAM sequence: TTT
gctagcattttcttaatgat

SEQ ID NO: 377457 - DNA, 20 bp, Artificial Sequence
  Description of Artificial Sequence: Synthetic oligonucleotide
  Target: LAMA2; (+) strand; PAM type: YTN; PAM sequence: TTG
ctagcattttcttaatgatt

SEQ ID NO: 377458 - DNA, 20 bp, Artificial Sequence
  Description of Artificial Sequence: Synthetic oligonucleotide
  Target: LAMA2; (+) strand; PAM type: YTN; PAM sequence: CTA
gcattttcttaatgattttg

SEQ ID NO: 377459 - DNA, 20 bp, Artificial Sequence
  Description of Artificial Sequence: Synthetic oligonucleotide
  Target: LAMA2; (+) strand; PAM type: YTN; PAM sequence: TTT
tcttaatgattttggatcta

SEQ ID NO: 377460 - DNA, 20 bp, Artificial Sequence
  Description of Artificial Sequence: Synthetic oligonucleotide
  Target: LAMA2; (+) strand; PAM type: YTN; PAM sequence: TTT
cttaatgattttggatctac

SEQ ID NO: 377461 - DNA, 20 bp, Artificial Sequence
  Description of Artificial Sequence: Synthetic oligonucleotide
  Target: LAMA2; (+) strand; PAM type: YTN; PAM sequence: TTC
ttaatgattttggatctacg

SEQ ID NO: 377462 - DNA, 20 bp, Artificial Sequence
  Description of Artificial Sequence: Synthetic oligonucleotide
  Target: LAMA2; (+) strand; PAM type: YTN; PAM sequence: CTT
aatgattttggatctacgtt

SEQ ID NO: 377463 - DNA, 20 bp, Artificial Sequence
  Description of Artificial Sequence: Synthetic oligonucleotide
  Target: LAMA2; (+) strand; PAM type: YTN; PAM sequence: TTA
atgattttggatctacgttt

SEQ ID NO: 377464 - DNA, 20 bp, Artificial Sequence
  Description of Artificial Sequence: Synthetic oligonucleotide
  Target: LAMA2; (+) strand; PAM type: YTN; PAM sequence: TTT
tggatctacgtttataagaa

SEQ ID NO: 377465 - DNA, 20 bp, Artificial Sequence
  Description of Artificial Sequence: Synthetic oligonucleotide
  Target: LAMA2; (+) strand; PAM type: YTN; PAM sequence: TTT
ggatctacgtttataagaaa

SEQ ID NO: 377466 - DNA, 20 bp, Artificial Sequence
  Description of Artificial Sequence: Synthetic oligonucleotide
  Target: LAMA2; (+) strand; PAM type: YTN; PAM sequence: TTG
gatctacgtttataagaaat

SEQ ID NO: 377467 - DNA, 20 bp, Artificial Sequence
  Description of Artificial Sequence: Synthetic oligonucleotide
  Target: LAMA2; (+) strand; PAM type: YTN; PAM sequence: CTA
cgtttataagaaatattggt

SEQ ID NO: 377468 - DNA, 20 bp, Artificial Sequence
  Description of Artificial Sequence: Synthetic oligonucleotide
  Target: LAMA2; (+) strand; PAM type: YTN; PAM sequence: TTT
ataagaaatattggtatgaa

SEQ ID NO: 377469 - DNA, 20 bp, Artificial Sequence
  Description of Artificial Sequence: Synthetic oligonucleotide
  Target: LAMA2; (+) strand; PAM type: YTN; PAM sequence: TTA
taagaaatattggtatgaac

SEQ ID NO: 377470 - DNA, 20 bp, Artificial Sequence
  Description of Artificial Sequence: Synthetic oligonucleotide
  Target: LAMA2; (+) strand; PAM type: YTN; PAM sequence: TTG
gtatgaacttatttttcttg

SEQ ID NO: 377471 - DNA, 20 bp, Artificial Sequence
  Description of Artificial Sequence: Synthetic oligonucleotide
  Target: LAMA2; (+) strand; PAM type: YTN; PAM sequence: CTT
atttttcttgtagcgttgtc

SEQ ID NO: 377472 - DNA, 20 bp, Artificial Sequence
  Description of Artificial Sequence: Synthetic oligonucleotide
  Target: LAMA2; (+) strand; PAM type: YTN; PAM sequence: TTA
tttttcttgtagcgttgtcg

SEQ ID NO: 377473 - DNA, 20 bp, Artificial Sequence
  Description of Artificial Sequence: Synthetic oligonucleotide
  Target: LAMA2; (+) strand; PAM type: YTN; PAM sequence: TTT
ttcttgtagcgttgtcgtcg

SEQ ID NO: 377474 - DNA, 20 bp, Artificial Sequence
  Description of Artificial Sequence: Synthetic oligonucleotide
  Target: LAMA2; (+) strand; PAM type: YTN; PAM sequence: TTT
tcttgtagcgttgtcgtcgg

SEQ ID NO: 377475 - DNA, 20 bp, Artificial Sequence
  Description of Artificial Sequence: Synthetic oligonucleotide
  Target: LAMA2; (+) strand; PAM type: YTN; PAM sequence: TTT
cttgtagcgttgtcgtcggg

SEQ ID NO: 377476 - DNA, 20 bp, Artificial Sequence
  Description of Artificial Sequence: Synthetic oligonucleotide
  Target: LAMA2; (+) strand; PAM type: YTN; PAM sequence: TTC
ttgtagcgttgtcgtcggga

SEQ ID NO: 377477 - DNA, 20 bp, Artificial Sequence
  Description of Artificial Sequence: Synthetic oligonucleotide
  Target: LAMA2; (+) strand; PAM type: YTN; PAM sequence: CTT
gtagcgttgtcgtcgggatg

SEQ ID NO: 377478 - DNA, 20 bp, Artificial Sequence
  Description of Artificial Sequence: Synthetic oligonucleotide
  Target: LAMA2; (+) strand; PAM type: YTN; PAM sequence: TTG
tagcgttgtcgtcgggatga

SEQ ID NO: 377479 - DNA, 20 bp, Artificial Sequence
  Description of Artificial Sequence: Synthetic oligonucleotide
  Target: LAMA2; (+) strand; PAM type: YTN; PAM sequence: TTG
tcgtcgggatgaggtactgc

SEQ ID NO: 377480 - DNA, 20 bp, Artificial Sequence
  Description of Artificial Sequence: Synthetic oligonucleotide
  Target: LAMA2; (+) strand; PAM type: YTN; PAM sequence: CTG
caagcttcatgaaatggatt

SEQ ID NO: 377481 - DNA, 20 bp, Artificial Sequence
  Description of Artificial Sequence: Synthetic oligonucleotide
  Target: LAMA2; (+) strand; PAM type: YTN; PAM sequence: CTT
catgaaatggattcagaagt

SEQ ID NO: 377482 - DNA, 20 bp, Artificial Sequence
  Description of Artificial Sequence: Synthetic oligonucleotide
  Target: LAMA2; (+) strand; PAM type: YTN; PAM sequence: TTC
atgaaatggattcagaagta

SEQ ID NO: 377483 - DNA, 20 bp, Artificial Sequence
  Description of Artificial Sequence: Synthetic oligonucleotide
  Target: LAMA2; (+) strand; PAM type: YTN; PAM sequence: TTC
agaagtattccctcctcata

SEQ ID NO: 377484 - DNA, 20 bp, Artificial Sequence
  Description of Artificial Sequence: Synthetic oligonucleotide
  Target: LAMA2; (+) strand; PAM type: YTN; PAM sequence: TTC
cctcctcataatttataaaa

SEQ ID NO: 377485 - DNA, 20 bp, Artificial Sequence
  Description of Artificial Sequence: Synthetic oligonucleotide
  Target: LAMA2; (+) strand; PAM type: YTN; PAM sequence: CTC
ctcataatttataaaagcgt

SEQ ID NO: 377486 - DNA, 20 bp, Artificial Sequence
  Description of Artificial Sequence: Synthetic oligonucleotide
  Target: LAMA2; (+) strand; PAM type: YTN; PAM sequence: CTC
ataatttataaaagcgtttt

SEQ ID NO: 377487 - DNA, 20 bp, Artificial Sequence
  Description of Artificial Sequence: Synthetic oligonucleotide
  Target: LAMA2; (+) strand; PAM type: YTN; PAM sequence: TTT
ataaaagcgttttcacaatc

SEQ ID NO: 377488 - DNA, 20 bp, Artificial Sequence
  Description of Artificial Sequence: Synthetic oligonucleotide
  Target: LAMA2; (+) strand; PAM type: YTN; PAM sequence: TTA
taaaagcgttttcacaatca

SEQ ID NO: 377489 - DNA, 20 bp, Artificial Sequence
  Description of Artificial Sequence: Synthetic oligonucleotide
  Target: LAMA2; (+) strand; PAM type: YTN; PAM sequence: TTT
tcacaatcaatgaggtagaa

SEQ ID NO: 377490 - DNA, 20 bp, Artificial Sequence
  Description of Artificial Sequence: Synthetic oligonucleotide
  Target: LAMA2; (+) strand; PAM type: YTN; PAM sequence: TTT
cacaatcaatgaggtagaaa

SEQ ID NO: 377491 - DNA, 20 bp, Artificial Sequence
  Description of Artificial Sequence: Synthetic oligonucleotide
  Target: LAMA2; (+) strand; PAM type: YTN; PAM sequence: TTC
acaatcaatgaggtagaaaa

SEQ ID NO: 377492 - DNA, 20 bp, Artificial Sequence
  Description of Artificial Sequence: Synthetic oligonucleotide
  Target: LAMA2; (+) strand; PAM type: YTN; PAM sequence: CTT
tagaggaacccaaaagctca

SEQ ID NO: 377493 - DNA, 20 bp, Artificial Sequence
  Description of Artificial Sequence: Synthetic oligonucleotide
  Target: LAMA2; (+) strand; PAM type: YTN; PAM sequence: TTT
agaggaacccaaaagctcac

SEQ ID NO: 377494 - DNA, 20 bp, Artificial Sequence
  Description of Artificial Sequence: Synthetic oligonucleotide
  Target: LAMA2; (+) strand; PAM type: YTN; PAM sequence: TTA
gaggaacccaaaagctcact

SEQ ID NO: 377495 - DNA, 20 bp, Artificial Sequence
  Description of Artificial Sequence: Synthetic oligonucleotide
  Target: LAMA2; (+) strand; PAM type: YTN; PAM sequence: CTC
actatttgaaaagatcagta

SEQ ID NO: 377496 - DNA, 20 bp, Artificial Sequence
  Description of Artificial Sequence: Synthetic oligonucleotide
  Target: LAMA2; (+) strand; PAM type: YTN; PAM sequence: CTA
tttgaaaagatcagtaaagt

SEQ ID NO: 377497 - DNA, 20 bp, Artificial Sequence
  Description of Artificial Sequence: Synthetic oligonucleotide
  Target: LAMA2; (+) strand; PAM type: YTN; PAM sequence: TTT
gaaaagatcagtaaagttgg

SEQ ID NO: 377498 - DNA, 20 bp, Artificial Sequence
  Description of Artificial Sequence: Synthetic oligonucleotide
  Target: LAMA2; (+) strand; PAM type: YTN; PAM sequence: TTG
aaaagatcagtaaagttggt

SEQ ID NO: 377499 - DNA, 20 bp, Artificial Sequence
  Description of Artificial Sequence: Synthetic oligonucleotide
  Target: LAMA2; (+) strand; PAM type: YTN; PAM sequence: TTG
gtaatattctagaaaggtta

SEQ ID NO: 377500 - DNA, 20 bp, Artificial Sequence
  Description of Artificial Sequence: Synthetic oligonucleotide
  Target: LAMA2; (+) strand; PAM type: YTN; PAM sequence: TTC
tagaaaggttaatcaagaaa

SEQ ID NO: 377501 - DNA, 20 bp, Artificial Sequence
  Description of Artificial Sequence: Synthetic oligonucleotide
  Target: LAMA2; (+) strand; PAM type: YTN; PAM sequence: CTA
gaaaggttaatcaagaaaaa

SEQ ID NO: 377502 - DNA, 20 bp, Artificial Sequence
  Description of Artificial Sequence: Synthetic oligonucleotide
  Target: LAMA2; (+) strand; PAM type: YTN; PAM sequence: TTA
atcaagaaaaaagagagaag

SEQ ID NO: 377503 - DNA, 20 bp, Artificial Sequence
  Description of Artificial Sequence: Synthetic oligonucleotide
  Target: LAMA2; (+) strand; PAM type: YTN; PAM sequence: CTA
tagatcctatagacattaag

SEQ ID NO: 377504 - DNA, 20 bp, Artificial Sequence
  Description of Artificial Sequence: Synthetic oligonucleotide
  Target: LAMA2; (+) strand; PAM type: YTN; PAM sequence: CTA
tagacattaagataataata

SEQ ID NO: 377505 - DNA, 20 bp, Artificial Sequence
  Description of Artificial Sequence: Synthetic oligonucleotide
  Target: LAMA2; (+) strand; PAM type: YTN; PAM sequence: TTA
agataataatatggtagtaa

SEQ ID NO: 377506 - DNA, 20 bp, Artificial Sequence
  Description of Artificial Sequence: Synthetic oligonucleotide
  Target: LAMA2; (+) strand; PAM type: YTN; PAM sequence: TTT
tgcctaataaatgtgataac

SEQ ID NO: 377507 - DNA, 20 bp, Artificial Sequence
  Description of Artificial Sequence: Synthetic oligonucleotide
  Target: LAMA2; (+) strand; PAM type: YTN; PAM sequence: TTT
gcctaataaatgtgataact

SEQ ID NO: 377508 - DNA, 20 bp, Artificial Sequence
  Description of Artificial Sequence: Synthetic oligonucleotide
  Target: LAMA2; (+) strand; PAM type: YTN; PAM sequence: TTG
cctaataaatgtgataactt

SEQ ID NO: 377509 - DNA, 20 bp, Artificial Sequence
  Description of Artificial Sequence: Synthetic oligonucleotide
  Target: LAMA2; (+) strand; PAM type: YTN; PAM sequence: CTA
ataaatgtgataacttgcat

SEQ ID NO: 377510 - DNA, 20 bp, Artificial Sequence
  Description of Artificial Sequence: Synthetic oligonucleotide
  Target: LAMA2; (+) strand; PAM type: YTN; PAM sequence: CTT
gcatgaaaagaacattcctt

SEQ ID NO: 377511 - DNA, 20 bp, Artificial Sequence
  Description of Artificial Sequence: Synthetic oligonucleotide
  Target: LAMA2; (+) strand; PAM type: YTN; PAM sequence: TTG
catgaaaagaacattccttc

SEQ ID NO: 377512 - DNA, 20 bp, Artificial Sequence
  Description of Artificial Sequence: Synthetic oligonucleotide
  Target: LAMA2; (+) strand; PAM type: YTN; PAM sequence: TTC
cttcttttgcttactttgag

SEQ ID NO: 377513 - DNA, 20 bp, Artificial Sequence
  Description of Artificial Sequence: Synthetic oligonucleotide
  Target: LAMA2; (+) strand; PAM type: YTN; PAM sequence: CTT
cttttgcttactttgagttt

SEQ ID NO: 377514 - DNA, 20 bp, Artificial Sequence
  Description of Artificial Sequence: Synthetic oligonucleotide
  Target: LAMA2; (+) strand; PAM type: YTN; PAM sequence: TTC
ttttgcttactttgagttta

SEQ ID NO: 377515 - DNA, 20 bp, Artificial Sequence
  Description of Artificial Sequence: Synthetic oligonucleotide
  Target: LAMA2; (+) strand; PAM type: YTN; PAM sequence: CTT
ttgcttactttgagtttaat

SEQ ID NO: 377516 - DNA, 20 bp, Artificial Sequence
  Description of Artificial Sequence: Synthetic oligonucleotide
  Target: LAMA2; (+) strand; PAM type: YTN; PAM sequence: TTT
tgcttactttgagtttaatt

SEQ ID NO: 377517 - DNA, 20 bp, Artificial Sequence
  Description of Artificial Sequence: Synthetic oligonucleotide
  Target: LAMA2; (+) strand; PAM type: YTN; PAM sequence: TTT
gcttactttgagtttaattt

SEQ ID NO: 377518 - DNA, 20 bp, Artificial Sequence
  Description of Artificial Sequence: Synthetic oligonucleotide
  Target: LAMA2; (+) strand; PAM type: YTN; PAM sequence: TTG
cttactttgagtttaatttt

SEQ ID NO: 377519 - DNA, 20 bp, Artificial Sequence
  Description of Artificial Sequence: Synthetic oligonucleotide
  Target: LAMA2; (+) strand; PAM type: YTN; PAM sequence: CTT
actttgagtttaattttctc

SEQ ID NO: 377520 - DNA, 20 bp, Artificial Sequence
  Description of Artificial Sequence: Synthetic oligonucleotide
  Target: LAMA2; (+) strand; PAM type: YTN; PAM sequence: TTA
ctttgagtttaattttctct

SEQ ID NO: 377521 - DNA, 20 bp, Artificial Sequence
  Description of Artificial Sequence: Synthetic oligonucleotide
  Target: LAMA2; (+) strand; PAM type: YTN; PAM sequence: CTT
tgagtttaattttctcttgt

SEQ ID NO: 377522 - DNA, 20 bp, Artificial Sequence
  Description of Artificial Sequence: Synthetic oligonucleotide
  Target: LAMA2; (+) strand; PAM type: YTN; PAM sequence: TTT
gagtttaattttctcttgtg

SEQ ID NO: 377523 - DNA, 20 bp, Artificial Sequence
  Description of Artificial Sequence: Synthetic oligonucleotide
  Target: LAMA2; (+) strand; PAM type: YTN; PAM sequence: TTG
agtttaattttctcttgtgt

SEQ ID NO: 377524 - DNA, 20 bp, Artificial Sequence
  Description of Artificial Sequence: Synthetic oligonucleotide
  Target: LAMA2; (+) strand; PAM type: YTN; PAM sequence: TTT
aattttctcttgtgttccaa

SEQ ID NO: 377525 - DNA, 20 bp, Artificial Sequence
  Description of Artificial Sequence: Synthetic oligonucleotide
  Target: LAMA2; (+) strand; PAM type: YTN; PAM sequence: TTA
attttctcttgtgttccaag

SEQ ID NO: 377526 - DNA, 20 bp, Artificial Sequence
  Description of Artificial Sequence: Synthetic oligonucleotide
  Target: LAMA2; (+) strand; PAM type: YTN; PAM sequence: TTT
tctcttgtgttccaagtttt

SEQ ID NO: 377527 - DNA, 20 bp, Artificial Sequence
  Description of Artificial Sequence: Synthetic oligonucleotide
  Target: LAMA2; (+) strand; PAM type: YTN; PAM sequence: TTT
ctcttgtgttccaagttttt

SEQ ID NO: 377528 - DNA, 20 bp, Artificial Sequence
  Description of Artificial Sequence: Synthetic oligonucleotide
  Target: LAMA2; (+) strand; PAM type: YTN; PAM sequence: TTC
tcttgtgttccaagtttttt

SEQ ID NO: 377529 - DNA, 20 bp, Artificial Sequence
  Description of Artificial Sequence: Synthetic oligonucleotide
  Target: LAMA2; (+) strand; PAM type: YTN; PAM sequence: CTC
ttgtgttccaagtttttttg

SEQ ID NO: 377530 - DNA, 20 bp, Artificial Sequence
  Description of Artificial Sequence: Synthetic oligonucleotide
  Target: LAMA2; (+) strand; PAM type: YTN; PAM sequence: CTT
gtgttccaagtttttttgtt

SEQ ID NO: 377531 - DNA, 20 bp, Artificial Sequence
  Description of Artificial Sequence: Synthetic oligonucleotide
  Target: LAMA2; (+) strand; PAM type: YTN; PAM sequence: TTG
tgttccaagtttttttgttt

SEQ ID NO: 377532 - DNA, 20 bp, Artificial Sequence
  Description of Artificial Sequence: Synthetic oligonucleotide
  Target: LAMA2; (+) strand; PAM type: YTN; PAM sequence: TTC
caagtttttttgttttttgt

SEQ ID NO: 377533 - DNA, 20 bp, Artificial Sequence
  Description of Artificial Sequence: Synthetic oligonucleotide
  Target: LAMA2; (+) strand; PAM type: YTN; PAM sequence: TTT
ttttgttttttgttttttgt

SEQ ID NO: 377534 - DNA, 20 bp, Artificial Sequence
  Description of Artificial Sequence: Synthetic oligonucleotide
  Target: LAMA2; (+) strand; PAM type: YTN; PAM sequence: TTT
tttgttttttgttttttgtt

SEQ ID NO: 377535 - DNA, 20 bp, Artificial Sequence
  Description of Artificial Sequence: Synthetic oligonucleotide
  Target: LAMA2; (+) strand; PAM type: YTN; PAM sequence: TTT
ttgttttttgttttttgttt

SEQ ID NO: 377536 - DNA, 20 bp, Artificial Sequence
  Description of Artificial Sequence: Synthetic oligonucleotide
  Target: LAMA2; (+) strand; PAM type: YTN; PAM sequence: TTT
tgttttttgttttttgtttt

SEQ ID NO: 377537 - DNA, 20 bp, Artificial Sequence
  Description of Artificial Sequence: Synthetic oligonucleotide
  Target: LAMA2; (+) strand; PAM type: YTN; PAM sequence: TTT
gttttttgttttttgttttt

SEQ ID NO: 377538 - DNA, 20 bp, Artificial Sequence
  Description of Artificial Sequence: Synthetic oligonucleotide
  Target: LAMA2; (+) strand; PAM type: YTN; PAM sequence: TTG
ttttttgttttttgtttttg

SEQ ID NO: 377539 - DNA, 20 bp, Artificial Sequence
  Description of Artificial Sequence: Synthetic oligonucleotide
  Target: LAMA2; (+) strand; PAM type: YTN; PAM sequence: TTT
tttgttttttgtttttgaga

SEQ ID NO: 377540 - DNA, 20 bp, Artificial Sequence
  Description of Artificial Sequence: Synthetic oligonucleotide
  Target: LAMA2; (+) strand; PAM type: YTN; PAM sequence: TTT
ttgttttttgtttttgagac

SEQ ID NO: 377541 - DNA, 20 bp, Artificial Sequence
  Description of Artificial Sequence: Synthetic oligonucleotide
  Target: LAMA2; (+) strand; PAM type: YTN; PAM sequence: TTT
tgttttttgtttttgagacg

SEQ ID NO: 377542 - DNA, 20 bp, Artificial Sequence
  Description of Artificial Sequence: Synthetic oligonucleotide
  Target: LAMA2; (+) strand; PAM type: YTN; PAM sequence: TTT
gttttttgtttttgagacgg

SEQ ID NO: 377543 - DNA, 20 bp, Artificial Sequence
  Description of Artificial Sequence: Synthetic oligonucleotide
  Target: LAMA2; (+) strand; PAM type: YTN; PAM sequence: TTG
ttttttgtttttgagacgga

SEQ ID NO: 377544 - DNA, 20 bp, Artificial Sequence
  Description of Artificial Sequence: Synthetic oligonucleotide
  Target: LAMA2; (+) strand; PAM type: YTN; PAM sequence: TTT
tttgtttttgagacggagtc

SEQ ID NO: 377545 - DNA, 20 bp, Artificial Sequence
  Description of Artificial Sequence: Synthetic oligonucleotide
  Target: LAMA2; (+) strand; PAM type: YTN; PAM sequence: TTT
ttgtttttgagacggagtct

SEQ ID NO: 377546 - DNA, 20 bp, Artificial Sequence
  Description of Artificial Sequence: Synthetic oligonucleotide
  Target: LAMA2; (+) strand; PAM type: YTN; PAM sequence: TTT
tgtttttgagacggagtctt

SEQ ID NO: 377547 - DNA, 20 bp, Artificial Sequence
  Description of Artificial Sequence: Synthetic oligonucleotide
  Target: LAMA2; (+) strand; PAM type: YTN; PAM sequence: TTT
gtttttgagacggagtcttg

SEQ ID NO: 377548 - DNA, 20 bp, Artificial Sequence
  Description of Artificial Sequence: Synthetic oligonucleotide
  Target: LAMA2; (+) strand; PAM type: YTN; PAM sequence: TTG
tttttgagacggagtcttgc

SEQ ID NO: 377549 - DNA, 20 bp, Artificial Sequence
  Description of Artificial Sequence: Synthetic oligonucleotide
  Target: LAMA2; (+) strand; PAM type: YTN; PAM sequence: TTT
ttgagacggagtcttgctct

SEQ ID NO: 377550 - DNA, 20 bp, Artificial Sequence
  Description of Artificial Sequence: Synthetic oligonucleotide
  Target: LAMA2; (+) strand; PAM type: YTN; PAM sequence: TTT
tgagacggagtcttgctctg

SEQ ID NO: 377551 - DNA, 20 bp, Artificial Sequence
  Description of Artificial Sequence: Synthetic oligonucleotide
  Target: LAMA2; (+) strand; PAM type: YTN; PAM sequence: TTT
gagacggagtcttgctctga

SEQ ID NO: 377552 - DNA, 20 bp, Artificial Sequence
  Description of Artificial Sequence: Synthetic oligonucleotide
  Target: LAMA2; (+) strand; PAM type: YTN; PAM sequence: TTG
agacggagtcttgctctgac

SEQ ID NO: 377553 - DNA, 20 bp, Artificial Sequence
  Description of Artificial Sequence: Synthetic oligonucleotide
  Target: LAMA2; (+) strand; PAM type: YTN; PAM sequence: CTT
gctctgacccccaggctcga

SEQ ID NO: 377554 - DNA, 20 bp, Artificial Sequence
  Description of Artificial Sequence: Synthetic oligonucleotide
  Target: LAMA2; (+) strand; PAM type: YTN; PAM sequence: TTG
ctctgacccccaggctcgag

SEQ ID NO: 377555 - DNA, 20 bp, Artificial Sequence
  Description of Artificial Sequence: Synthetic oligonucleotide
  Target: LAMA2; (+) strand; PAM type: YTN; PAM sequence: CTC
tgacccccaggctcgagtgc

SEQ ID NO: 377556 - DNA, 20 bp, Artificial Sequence
  Description of Artificial Sequence: Synthetic oligonucleotide
  Target: LAMA2; (+) strand; PAM type: YTN; PAM sequence: CTG
acccccaggctcgagtgcag

SEQ ID NO: 377557 - DNA, 20 bp, Artificial Sequence
  Description of Artificial Sequence: Synthetic oligonucleotide
  Target: LAMA2; (+) strand; PAM type: YTN; PAM sequence: CTC
gagtgcagtggcagatcttg

SEQ ID NO: 377558 - DNA, 20 bp, Artificial Sequence
  Description of Artificial Sequence: Synthetic oligonucleotide
  Target: LAMA2; (+) strand; PAM type: YTN; PAM sequence: CTT
ggctcactgccagctccgcc

SEQ ID NO: 377559 - DNA, 20 bp, Artificial Sequence
  Description of Artificial Sequence: Synthetic oligonucleotide
  Target: LAMA2; (+) strand; PAM type: YTN; PAM sequence: TTG
gctcactgccagctccgcct

SEQ ID NO: 377560 - DNA, 20 bp, Artificial Sequence
  Description of Artificial Sequence: Synthetic oligonucleotide
  Target: LAMA2; (+) strand; PAM type: YTN; PAM sequence: CTC
actgccagctccgcctcccg

SEQ ID NO: 377561 - DNA, 20 bp, Artificial Sequence
  Description of Artificial Sequence: Synthetic oligonucleotide
  Target: LAMA2; (+) strand; PAM type: YTN; PAM sequence: CTG
ccagctccgcctcccgggtt

SEQ ID NO: 377562 - DNA, 20 bp, Artificial Sequence
  Description of Artificial Sequence: Synthetic oligonucleotide
  Target: LAMA2; (+) strand; PAM type: YTN; PAM sequence: CTC
cgcctcccgggttcacgcca

SEQ ID NO: 377563 - DNA, 20 bp, Artificial Sequence
  Description of Artificial Sequence: Synthetic oligonucleotide
  Target: LAMA2; (+) strand; PAM type: YTN; PAM sequence: CTC
ccgggttcacgccattctcc

SEQ ID NO: 377564 - DNA, 20 bp, Artificial Sequence
  Description of Artificial Sequence: Synthetic oligonucleotide
  Target: LAMA2; (+) strand; PAM type: YTN; PAM sequence: TTC
acgccattctcctgcctcag

SEQ ID NO: 377565 - DNA, 20 bp, Artificial Sequence
  Description of Artificial Sequence: Synthetic oligonucleotide
  Target: LAMA2; (+) strand; PAM type: YTN; PAM sequence: TTC
tcctgcctcagcctcctgag

SEQ ID NO: 377566 - DNA, 20 bp, Artificial Sequence
  Description of Artificial Sequence: Synthetic oligonucleotide
  Target: LAMA2; (+) strand; PAM type: YTN; PAM sequence: CTC
ctgcctcagcctcctgagta

SEQ ID NO: 377567 - DNA, 20 bp, Artificial Sequence
  Description of Artificial Sequence: Synthetic oligonucleotide
  Target: LAMA2; (+) strand; PAM type: YTN; PAM sequence: CTG
cctcagcctcctgagtagct

SEQ ID NO: 377568 - DNA, 20 bp, Artificial Sequence
  Description of Artificial Sequence: Synthetic oligonucleotide
  Target: LAMA2; (+) strand; PAM type: YTN; PAM sequence: CTC
agcctcctgagtagctggga

SEQ ID NO: 377569 - DNA, 20 bp, Artificial Sequence
  Description of Artificial Sequence: Synthetic oligonucleotide
  Target: LAMA2; (+) strand; PAM type: YTN; PAM sequence: CTC
ctgagtagctgggactacag

SEQ ID NO: 377570 - DNA, 20 bp, Artificial Sequence
  Description of Artificial Sequence: Synthetic oligonucleotide
  Target: LAMA2; (+) strand; PAM type: YTN; PAM sequence: CTG
agtagctgggactacaggtg

SEQ ID NO: 377571 - DNA, 20 bp, Artificial Sequence
  Description of Artificial Sequence: Synthetic oligonucleotide
  Target: LAMA2; (+) strand; PAM type: YTN; PAM sequence: CTG
ggactacaggtgcccgccac

SEQ ID NO: 377572 - DNA, 20 bp, Artificial Sequence
  Description of Artificial Sequence: Synthetic oligonucleotide
  Target: LAMA2; (+) strand; PAM type: YTN; PAM sequence: CTA
caggtgcccgccactacgcc

SEQ ID NO: 377573 - DNA, 20 bp, Artificial Sequence
  Description of Artificial Sequence: Synthetic oligonucleotide
  Target: LAMA2; (+) strand; PAM type: YTN; PAM sequence: CTA
cgcccggctaattttttgta

SEQ ID NO: 377574 - DNA, 20 bp, Artificial Sequence
  Description of Artificial Sequence: Synthetic oligonucleotide
  Target: LAMA2; (+) strand; PAM type: YTN; PAM sequence: CTA
attttttgtatttttagtag

SEQ ID NO: 377575 - DNA, 20 bp, Artificial Sequence
  Description of Artificial Sequence: Synthetic oligonucleotide
  Target: LAMA2; (+) strand; PAM type: YTN; PAM sequence: TTT
tttgtatttttagtagagac

SEQ ID NO: 377576 - DNA, 20 bp, Artificial Sequence
  Description of Artificial Sequence: Synthetic oligonucleotide
  Target: LAMA2; (+) strand; PAM type: YTN; PAM sequence: TTT
ttgtatttttagtagagacg

SEQ ID NO: 377577 - DNA, 20 bp, Artificial Sequence
  Description of Artificial Sequence: Synthetic oligonucleotide
  Target: LAMA2; (+) strand; PAM type: YTN; PAM sequence: TTT
tgtatttttagtagagacgg

SEQ ID NO: 377578 - DNA, 20 bp, Artificial Sequence
  Description of Artificial Sequence: Synthetic oligonucleotide
  Target: LAMA2; (+) strand; PAM type: YTN; PAM sequence: TTT
gtatttttagtagagacggg

SEQ ID NO: 377579 - DNA, 20 bp, Artificial Sequence
  Description of Artificial Sequence: Synthetic oligonucleotide
  Target: LAMA2; (+) strand; PAM type: YTN; PAM sequence: TTG
tatttttagtagagacgggg

SEQ ID NO: 377580 - DNA, 20 bp, Artificial Sequence
  Description of Artificial Sequence: Synthetic oligonucleotide
  Target: LAMA2; (+) strand; PAM type: YTN; PAM sequence: TTT
ttagtagagacggggtttca

SEQ ID NO: 377581 - DNA, 20 bp, Artificial Sequence
  Description of Artificial Sequence: Synthetic oligonucleotide
  Target: LAMA2; (+) strand; PAM type: YTN; PAM sequence: TTT
tagtagagacggggtttcac

SEQ ID NO: 377582 - DNA, 20 bp, Artificial Sequence
  Description of Artificial Sequence: Synthetic oligonucleotide
  Target: LAMA2; (+) strand; PAM type: YTN; PAM sequence: TTT
agtagagacggggtttcacc

SEQ ID NO: 377583 - DNA, 20 bp, Artificial Sequence
  Description of Artificial Sequence: Synthetic oligonucleotide
  Target: LAMA2; (+) strand; PAM type: YTN; PAM sequence: TTA
gtagagacggggtttcaccg

SEQ ID NO: 377584 - DNA, 20 bp, Artificial Sequence
  Description of Artificial Sequence: Synthetic oligonucleotide
  Target: LAMA2; (+) strand; PAM type: YTN; PAM sequence: TTT
caccgcgttagccaggatgg

SEQ ID NO: 377585 - DNA, 20 bp, Artificial Sequence
  Description of Artificial Sequence: Synthetic oligonucleotide
  Target: LAMA2; (+) strand; PAM type: YTN; PAM sequence: TTC
accgcgttagccaggatggt

SEQ ID NO: 377586 - DNA, 20 bp, Artificial Sequence
  Description of Artificial Sequence: Synthetic oligonucleotide
  Target: LAMA2; (+) strand; PAM type: YTN; PAM sequence: TTA
gccaggatggtctcgatctc

SEQ ID NO: 377587 - DNA, 20 bp, Artificial Sequence
  Description of Artificial Sequence: Synthetic oligonucleotide
  Target: LAMA2; (+) strand; PAM type: YTN; PAM sequence: CTC
gatctcctgacctcgtgatc

SEQ ID NO: 377588 - DNA, 20 bp, Artificial Sequence
  Description of Artificial Sequence: Synthetic oligonucleotide
  Target: LAMA2; (+) strand; PAM type: YTN; PAM sequence: CTC
ctgacctcgtgatccgccag

SEQ ID NO: 377589 - DNA, 20 bp, Artificial Sequence
  Description of Artificial Sequence: Synthetic oligonucleotide
  Target: LAMA2; (+) strand; PAM type: YTN; PAM sequence: CTG
acctcgtgatccgccagcct

SEQ ID NO: 377590 - DNA, 20 bp, Artificial Sequence
  Description of Artificial Sequence: Synthetic oligonucleotide
  Target: LAMA2; (+) strand; PAM type: YTN; PAM sequence: CTC
gtgatccgccagcctcagcc

SEQ ID NO: 377591 - DNA, 20 bp, Artificial Sequence
  Description of Artificial Sequence: Synthetic oligonucleotide
  Target: LAMA2; (+) strand; PAM type: YTN; PAM sequence: CTC
agcctcccaaaatgctagga

SEQ ID NO: 377592 - DNA, 20 bp, Artificial Sequence
  Description of Artificial Sequence: Synthetic oligonucleotide
  Target: LAMA2; (+) strand; PAM type: YTN; PAM sequence: CTC
ccaaaatgctaggattacag

SEQ ID NO: 377593 - DNA, 20 bp, Artificial Sequence
  Description of Artificial Sequence: Synthetic oligonucleotide
  Target: LAMA2; (+) strand; PAM type: YTN; PAM sequence: CTA
ggattacaggcgtgagccac

SEQ ID NO: 377594 - DNA, 20 bp, Artificial Sequence
  Description of Artificial Sequence: Synthetic oligonucleotide
  Target: LAMA2; (+) strand; PAM type: YTN; PAM sequence: TTA
caggcgtgagccaccgtgcc

SEQ ID NO: 377595 - DNA, 20 bp, Artificial Sequence
  Description of Artificial Sequence: Synthetic oligonucleotide
  Target: LAMA2; (+) strand; PAM type: YTN; PAM sequence: TTG
tgttccaagtttcttaaggt

SEQ ID NO: 377596 - DNA, 20 bp, Artificial Sequence
  Description of Artificial Sequence: Synthetic oligonucleotide
  Target: LAMA2; (+) strand; PAM type: YTN; PAM sequence: TTC
caagtttcttaaggtgaaac

SEQ ID NO: 377597 - DNA, 20 bp, Artificial Sequence
  Description of Artificial Sequence: Synthetic oligonucleotide
  Target: LAMA2; (+) strand; PAM type: YTN; PAM sequence: TTT
cttaaggtgaaaccttagat

SEQ ID NO: 377598 - DNA, 20 bp, Artificial Sequence
  Description of Artificial Sequence: Synthetic oligonucleotide
  Target: LAMA2; (+) strand; PAM type: YTN; PAM sequence: TTC
ttaaggtgaaaccttagatc

SEQ ID NO: 377599 - DNA, 20 bp, Artificial Sequence
  Description of Artificial Sequence: Synthetic oligonucleotide
  Target: LAMA2; (+) strand; PAM type: YTN; PAM sequence: CTT
aaggtgaaaccttagatcat

SEQ ID NO: 377600 - DNA, 20 bp, Artificial Sequence
  Description of Artificial Sequence: Synthetic oligonucleotide
  Target: LAMA2; (+) strand; PAM type: YTN; PAM sequence: TTA
aggtgaaaccttagatcatt

SEQ ID NO: 377601 - DNA, 20 bp, Artificial Sequence
  Description of Artificial Sequence: Synthetic oligonucleotide
  Target: LAMA2; (+) strand; PAM type: YTN; PAM sequence: CTT
agatcattgatttgtaatcc

SEQ ID NO: 377602 - DNA, 20 bp, Artificial Sequence
  Description of Artificial Sequence: Synthetic oligonucleotide
  Target: LAMA2; (+) strand; PAM type: YTN; PAM sequence: TTA
gatcattgatttgtaatcct

SEQ ID NO: 377603 - DNA, 20 bp, Artificial Sequence
  Description of Artificial Sequence: Synthetic oligonucleotide
  Target: LAMA2; (+) strand; PAM type: YTN; PAM sequence: TTG
atttgtaatcctttttctct

SEQ ID NO: 377604 - DNA, 20 bp, Artificial Sequence
  Description of Artificial Sequence: Synthetic oligonucleotide
  Target: LAMA2; (+) strand; PAM type: YTN; PAM sequence: TTT
gtaatcctttttctctaata

SEQ ID NO: 377605 - DNA, 20 bp, Artificial Sequence
  Description of Artificial Sequence: Synthetic oligonucleotide
  Target: LAMA2; (+) strand; PAM type: YTN; PAM sequence: TTG
taatcctttttctctaatat

SEQ ID NO: 377606 - DNA, 20 bp, Artificial Sequence
  Description of Artificial Sequence: Synthetic oligonucleotide
  Target: LAMA2; (+) strand; PAM type: YTN; PAM sequence: CTT
tttctctaatatgggcattt

SEQ ID NO: 377607 - DNA, 20 bp, Artificial Sequence
  Description of Artificial Sequence: Synthetic oligonucleotide
  Target: LAMA2; (+) strand; PAM type: YTN; PAM sequence: TTT
ttctctaatatgggcatttg

SEQ ID NO: 377608 - DNA, 20 bp, Artificial Sequence
  Description of Artificial Sequence: Synthetic oligonucleotide
  Target: LAMA2; (+) strand; PAM type: YTN; PAM sequence: TTT
tctctaatatgggcatttga

SEQ ID NO: 377609 - DNA, 20 bp, Artificial Sequence
  Description of Artificial Sequence: Synthetic oligonucleotide
  Target: LAMA2; (+) strand; PAM type: YTN; PAM sequence: TTT
ctctaatatgggcatttgat

SEQ ID NO: 377610 - DNA, 20 bp, Artificial Sequence
  Description of Artificial Sequence: Synthetic oligonucleotide
  Target: LAMA2; (+) strand; PAM type: YTN; PAM sequence: TTC
tctaatatgggcatttgata

SEQ ID NO: 377611 - DNA, 20 bp, Artificial Sequence
  Description of Artificial Sequence: Synthetic oligonucleotide
  Target: LAMA2; (+) strand; PAM type: YTN; PAM sequence: CTC
taatatgggcatttgataca

SEQ ID NO: 377612 - DNA, 20 bp, Artificial Sequence
  Description of Artificial Sequence: Synthetic oligonucleotide
  Target: LAMA2; (+) strand; PAM type: YTN; PAM sequence: CTA
atatgggcatttgatacatt

SEQ ID NO: 377613 - DNA, 20 bp, Artificial Sequence
  Description of Artificial Sequence: Synthetic oligonucleotide
  Target: LAMA2; (+) strand; PAM type: YTN; PAM sequence: TTT
gatacatttttttccagaaa

SEQ ID NO: 377614 - DNA, 20 bp, Artificial Sequence
  Description of Artificial Sequence: Synthetic oligonucleotide
  Target: LAMA2; (+) strand; PAM type: YTN; PAM sequence: TTG
atacatttttttccagaaac

SEQ ID NO: 377615 - DNA, 20 bp, Artificial Sequence
  Description of Artificial Sequence: Synthetic oligonucleotide
  Target: LAMA2; (+) strand; PAM type: YTN; PAM sequence: TTT
ttttccagaaactactttgt

SEQ ID NO: 377616 - DNA, 20 bp, Artificial Sequence
  Description of Artificial Sequence: Synthetic oligonucleotide
  Target: LAMA2; (+) strand; PAM type: YTN; PAM sequence: TTT
tttccagaaactactttgtt

SEQ ID NO: 377617 - DNA, 20 bp, Artificial Sequence
  Description of Artificial Sequence: Synthetic oligonucleotide
  Target: LAMA2; (+) strand; PAM type: YTN; PAM sequence: TTT
ttccagaaactactttgttt

SEQ ID NO: 377618 - DNA, 20 bp, Artificial Sequence
  Description of Artificial Sequence: Synthetic oligonucleotide
  Target: LAMA2; (+) strand; PAM type: YTN; PAM sequence: TTT
tccagaaactactttgtttg

SEQ ID NO: 377619 - DNA, 20 bp, Artificial Sequence
  Description of Artificial Sequence: Synthetic oligonucleotide
  Target: LAMA2; (+) strand; PAM type: YTN; PAM sequence: TTT
ccagaaactactttgtttgc

SEQ ID NO: 377620 - DNA, 20 bp, Artificial Sequence
  Description of Artificial Sequence: Synthetic oligonucleotide
  Target: LAMA2; (+) strand; PAM type: YTN; PAM sequence: TTC
cagaaactactttgtttgca

SEQ ID NO: 377621 - DNA, 20 bp, Artificial Sequence
  Description of Artificial Sequence: Synthetic oligonucleotide
  Target: LAMA2; (+) strand; PAM type: YTN; PAM sequence: CTA
ctttgtttgcactccacata

SEQ ID NO: 377622 - DNA, 20 bp, Artificial Sequence
  Description of Artificial Sequence: Synthetic oligonucleotide
  Target: LAMA2; (+) strand; PAM type: YTN; PAM sequence: CTT
tgtttgcactccacatattt

SEQ ID NO: 377623 - DNA, 20 bp, Artificial Sequence
  Description of Artificial Sequence: Synthetic oligonucleotide
  Target: LAMA2; (+) strand; PAM type: YTN; PAM sequence: TTT
gtttgcactccacatatttt

SEQ ID NO: 377624 - DNA, 20 bp, Artificial Sequence
  Description of Artificial Sequence: Synthetic oligonucleotide
  Target: LAMA2; (+) strand; PAM type: YTN; PAM sequence: TTG
tttgcactccacatattttg

SEQ ID NO: 377625 - DNA, 20 bp, Artificial Sequence
  Description of Artificial Sequence: Synthetic oligonucleotide
  Target: LAMA2; (+) strand; PAM type: YTN; PAM sequence: TTT
gcactccacatattttgata

SEQ ID NO: 377626 - DNA, 20 bp, Artificial Sequence
  Description of Artificial Sequence: Synthetic oligonucleotide
  Target: LAMA2; (+) strand; PAM type: YTN; PAM sequence: TTG
cactccacatattttgatat

SEQ ID NO: 377627 - DNA, 20 bp, Artificial Sequence
  Description of Artificial Sequence: Synthetic oligonucleotide
  Target: LAMA2; (+) strand; PAM type: YTN; PAM sequence: CTC
cacatattttgatatgctgt

SEQ ID NO: 377628 - DNA, 20 bp, Artificial Sequence
  Description of Artificial Sequence: Synthetic oligonucleotide
  Target: LAMA2; (+) strand; PAM type: YTN; PAM sequence: TTT
tgatatgctgtgttttaatt

SEQ ID NO: 377629 - DNA, 20 bp, Artificial Sequence
  Description of Artificial Sequence: Synthetic oligonucleotide
  Target: LAMA2; (+) strand; PAM type: YTN; PAM sequence: TTT
gatatgctgtgttttaattt

SEQ ID NO: 377630 - DNA, 20 bp, Artificial Sequence
  Description of Artificial Sequence: Synthetic oligonucleotide
  Target: LAMA2; (+) strand; PAM type: YTN; PAM sequence: TTG
atatgctgtgttttaatttt

SEQ ID NO: 377631 - DNA, 20 bp, Artificial Sequence
  Description of Artificial Sequence: Synthetic oligonucleotide
  Target: LAMA2; (+) strand; PAM type: YTN; PAM sequence: CTG
tgttttaattttcacttggt

SEQ ID NO: 377632 - DNA, 20 bp, Artificial Sequence
  Description of Artificial Sequence: Synthetic oligonucleotide
  Target: LAMA2; (+) strand; PAM type: YTN; PAM sequence: TTT
taattttcacttggtttaat

SEQ ID NO: 377633 - DNA, 20 bp, Artificial Sequence
  Description of Artificial Sequence: Synthetic oligonucleotide
  Target: LAMA2; (+) strand; PAM type: YTN; PAM sequence: TTT
aattttcacttggtttaata

SEQ ID NO: 377634 - DNA, 20 bp, Artificial Sequence
  Description of Artificial Sequence: Synthetic oligonucleotide
  Target: LAMA2; (+) strand; PAM type: YTN; PAM sequence: TTA
attttcacttggtttaatat

SEQ ID NO: 377635 - DNA, 20 bp, Artificial Sequence
  Description of Artificial Sequence: Synthetic oligonucleotide
  Target: LAMA2; (+) strand; PAM type: YTN; PAM sequence: TTT
tcacttggtttaatataatc

SEQ ID NO: 377636 - DNA, 20 bp, Artificial Sequence
  Description of Artificial Sequence: Synthetic oligonucleotide
  Target: LAMA2; (+) strand; PAM type: YTN; PAM sequence: TTT
cacttggtttaatataatct

SEQ ID NO: 377637 - DNA, 20 bp, Artificial Sequence
  Description of Artificial Sequence: Synthetic oligonucleotide
  Target: LAMA2; (+) strand; PAM type: YTN; PAM sequence: TTC
acttggtttaatataatctt

SEQ ID NO: 377638 - DNA, 20 bp, Artificial Sequence
  Description of Artificial Sequence: Synthetic oligonucleotide
  Target: LAMA2; (+) strand; PAM type: YTN; PAM sequence: CTT
ggtttaatataatctttaat

SEQ ID NO: 377639 - DNA, 20 bp, Artificial Sequence
  Description of Artificial Sequence: Synthetic oligonucleotide
  Target: LAMA2; (+) strand; PAM type: YTN; PAM sequence: TTG
gtttaatataatctttaatt

SEQ ID NO: 377640 - DNA, 20 bp, Artificial Sequence
  Description of Artificial Sequence: Synthetic oligonucleotide
  Target: LAMA2; (+) strand; PAM type: YTN; PAM sequence: TTT
aatataatctttaatttatt

SEQ ID NO: 377641 - DNA, 20 bp, Artificial Sequence
  Description of Artificial Sequence: Synthetic oligonucleotide
  Target: LAMA2; (+) strand; PAM type: YTN; PAM sequence: TTA
atataatctttaatttattt

SEQ ID NO: 377642 - DNA, 20 bp, Artificial Sequence
  Description of Artificial Sequence: Synthetic oligonucleotide
  Target: LAMA2; (+) strand; PAM type: YTN; PAM sequence: CTT
taatttattttggggataat

SEQ ID NO: 377643 - DNA, 20 bp, Artificial Sequence
  Description of Artificial Sequence: Synthetic oligonucleotide
  Target: LAMA2; (+) strand; PAM type: YTN; PAM sequence: TTT
aatttattttggggataatg

SEQ ID NO: 377644 - DNA, 20 bp, Artificial Sequence
  Description of Artificial Sequence: Synthetic oligonucleotide
  Target: LAMA2; (+) strand; PAM type: YTN; PAM sequence: TTA
atttattttggggataatgt

SEQ ID NO: 377645 - DNA, 20 bp, Artificial Sequence
  Description of Artificial Sequence: Synthetic oligonucleotide
  Target: LAMA2; (+) strand; PAM type: YTN; PAM sequence: TTT
attttggggataatgtttag

SEQ ID NO: 377646 - DNA, 20 bp, Artificial Sequence
  Description of Artificial Sequence: Synthetic oligonucleotide
  Target: LAMA2; (+) strand; PAM type: YTN; PAM sequence: TTA
ttttggggataatgtttagt

SEQ ID NO: 377647 - DNA, 20 bp, Artificial Sequence
  Description of Artificial Sequence: Synthetic oligonucleotide
  Target: LAMA2; (+) strand; PAM type: YTN; PAM sequence: TTT
tggggataatgtttagtttc

SEQ ID NO: 377648 - DNA, 20 bp, Artificial Sequence
  Description of Artificial Sequence: Synthetic oligonucleotide
  Target: LAMA2; (+) strand; PAM type: YTN; PAM sequence: TTT
ggggataatgtttagtttct

SEQ ID NO: 377649 - DNA, 20 bp, Artificial Sequence
  Description of Artificial Sequence: Synthetic oligonucleotide
  Target: LAMA2; (+) strand; PAM type: YTN; PAM sequence: TTG
gggataatgtttagtttcta

SEQ ID NO: 377650 - DNA, 20 bp, Artificial Sequence
  Description of Artificial Sequence: Synthetic oligonucleotide
  Target: LAMA2; (+) strand; PAM type: YTN; PAM sequence: TTT
agtttctaaatatttgggga

SEQ ID NO: 377651 - DNA, 20 bp, Artificial Sequence
  Description of Artificial Sequence: Synthetic oligonucleotide
  Target: LAMA2; (+) strand; PAM type: YTN; PAM sequence: TTA
gtttctaaatatttggggaa

SEQ ID NO: 377652 - DNA, 20 bp, Artificial Sequence
  Description of Artificial Sequence: Synthetic oligonucleotide
  Target: LAMA2; (+) strand; PAM type: YTN; PAM sequence: TTT
ctaaatatttggggaatttt

SEQ ID NO: 377653 - DNA, 20 bp, Artificial Sequence
  Description of Artificial Sequence: Synthetic oligonucleotide
  Target: LAMA2; (+) strand; PAM type: YTN; PAM sequence: TTC
taaatatttggggaattttc

SEQ ID NO: 377654 - DNA, 20 bp, Artificial Sequence
  Description of Artificial Sequence: Synthetic oligonucleotide
  Target: LAMA2; (+) strand; PAM type: YTN; PAM sequence: CTA
aatatttggggaattttcaa

SEQ ID NO: 377655 - DNA, 20 bp, Artificial Sequence
  Description of Artificial Sequence: Synthetic oligonucleotide
  Target: LAMA2; (+) strand; PAM type: YTN; PAM sequence: TTT
ggggaattttcaaggtatcg

SEQ ID NO: 377656 - DNA, 20 bp, Artificial Sequence
  Description of Artificial Sequence: Synthetic oligonucleotide
  Target: LAMA2; (+) strand; PAM type: YTN; PAM sequence: TTG
gggaattttcaaggtatcgt

SEQ ID NO: 377657 - DNA, 20 bp, Artificial Sequence
  Description of Artificial Sequence: Synthetic oligonucleotide
  Target: LAMA2; (+) strand; PAM type: YTN; PAM sequence: TTT
tcaaggtatcgttactgtta

SEQ ID NO: 377658 - DNA, 20 bp, Artificial Sequence
  Description of Artificial Sequence: Synthetic oligonucleotide
  Target: LAMA2; (+) strand; PAM type: YTN; PAM sequence: TTT
caaggtatcgttactgttac

SEQ ID NO: 377659 - DNA, 20 bp, Artificial Sequence
  Description of Artificial Sequence: Synthetic oligonucleotide
  Target: LAMA2; (+) strand; PAM type: YTN; PAM sequence: TTC
aaggtatcgttactgttact

SEQ ID NO: 377660 - DNA, 20 bp, Artificial Sequence
  Description of Artificial Sequence: Synthetic oligonucleotide
  Target: LAMA2; (+) strand; PAM type: YTN; PAM sequence: TTA
ctgttactagtatctagttt

SEQ ID NO: 377661 - DNA, 20 bp, Artificial Sequence
  Description of Artificial Sequence: Synthetic oligonucleotide
  Target: LAMA2; (+) strand; PAM type: YTN; PAM sequence: CTG
ttactagtatctagtttaat

SEQ ID NO: 377662 - DNA, 20 bp, Artificial Sequence
  Description of Artificial Sequence: Synthetic oligonucleotide
  Target: LAMA2; (+) strand; PAM type: YTN; PAM sequence: TTA
ctagtatctagtttaattct

SEQ ID NO: 377663 - DNA, 20 bp, Artificial Sequence
  Description of Artificial Sequence: Synthetic oligonucleotide
  Target: LAMA2; (+) strand; PAM type: YTN; PAM sequence: CTA
gtatctagtttaattctaaa

SEQ ID NO: 377664 - DNA, 20 bp, Artificial Sequence
  Description of Artificial Sequence: Synthetic oligonucleotide
  Target: LAMA2; (+) strand; PAM type: YTN; PAM sequence: CTA
gtttaattctaaattgttct

SEQ ID NO: 377665 - DNA, 20 bp, Artificial Sequence
  Description of Artificial Sequence: Synthetic oligonucleotide
  Target: LAMA2; (+) strand; PAM type: YTN; PAM sequence: TTT
aattctaaattgttctgaga

SEQ ID NO: 377666 - DNA, 20 bp, Artificial Sequence
  Description of Artificial Sequence: Synthetic oligonucleotide
  Target: LAMA2; (+) strand; PAM type: YTN; PAM sequence: TTA
attctaaattgttctgagaa

SEQ ID NO: 377667 - DNA, 20 bp, Artificial Sequence
  Description of Artificial Sequence: Synthetic oligonucleotide
  Target: LAMA2; (+) strand; PAM type: YTN; PAM sequence: TTC
taaattgttctgagaacata

SEQ ID NO: 377668 - DNA, 20 bp, Artificial Sequence
  Description of Artificial Sequence: Synthetic oligonucleotide
  Target: LAMA2; (+) strand; PAM type: YTN; PAM sequence: CTA
aattgttctgagaacataat

SEQ ID NO: 377669 - DNA, 20 bp, Artificial Sequence
  Description of Artificial Sequence: Synthetic oligonucleotide
  Target: LAMA2; (+) strand; PAM type: YTN; PAM sequence: TTG
ttctgagaacataatctgca

SEQ ID NO: 377670 - DNA, 20 bp, Artificial Sequence
  Description of Artificial Sequence: Synthetic oligonucleotide
  Target: LAMA2; (+) strand; PAM type: YTN; PAM sequence: TTC
tgagaacataatctgcatta

SEQ ID NO: 377671 - DNA, 20 bp, Artificial Sequence
  Description of Artificial Sequence: Synthetic oligonucleotide
  Target: LAMA2; (+) strand; PAM type: YTN; PAM sequence: CTG
agaacataatctgcattatt

SEQ ID NO: 377672 - DNA, 20 bp, Artificial Sequence
  Description of Artificial Sequence: Synthetic oligonucleotide
  Target: LAMA2; (+) strand; PAM type: YTN; PAM sequence: CTG
cattatttcagaccttttga

SEQ ID NO: 377673 - DNA, 20 bp, Artificial Sequence
  Description of Artificial Sequence: Synthetic oligonucleotide
  Target: LAMA2; (+) strand; PAM type: YTN; PAM sequence: TTA
tttcagaccttttgaaaatt

SEQ ID NO: 377674 - DNA, 20 bp, Artificial Sequence
  Description of Artificial Sequence: Synthetic oligonucleotide
  Target: LAMA2; (+) strand; PAM type: YTN; PAM sequence: TTT
cagaccttttgaaaattatt

SEQ ID NO: 377675 - DNA, 20 bp, Artificial Sequence
  Description of Artificial Sequence: Synthetic oligonucleotide
  Target: LAMA2; (+) strand; PAM type: YTN; PAM sequence: TTC
agaccttttgaaaattattg

SEQ ID NO: 377676 - DNA, 20 bp, Artificial Sequence
  Description of Artificial Sequence: Synthetic oligonucleotide
  Target: LAMA2; (+) strand; PAM type: YTN; PAM sequence: CTT
ttgaaaattattgagatttg

SEQ ID NO: 377677 - DNA, 20 bp, Artificial Sequence
  Description of Artificial Sequence: Synthetic oligonucleotide
  Target: LAMA2; (+) strand; PAM type: YTN; PAM sequence: TTT
tgaaaattattgagatttgt

SEQ ID NO: 377678 - DNA, 20 bp, Artificial Sequence
  Description of Artificial Sequence: Synthetic oligonucleotide
  Target: LAMA2; (+) strand; PAM type: YTN; PAM sequence: TTT
gaaaattattgagatttgtt

SEQ ID NO: 377679 - DNA, 20 bp, Artificial Sequence
  Description of Artificial Sequence: Synthetic oligonucleotide
  Target: LAMA2; (+) strand; PAM type: YTN; PAM sequence: TTG
aaaattattgagatttgttt

SEQ ID NO: 377680 - DNA, 20 bp, Artificial Sequence
  Description of Artificial Sequence: Synthetic oligonucleotide
  Target: LAMA2; (+) strand; PAM type: YTN; PAM sequence: TTA
ttgagatttgttttatggcc

SEQ ID NO: 377681 - DNA, 20 bp, Artificial Sequence
  Description of Artificial Sequence: Synthetic oligonucleotide
  Target: LAMA2; (+) strand; PAM type: YTN; PAM sequence: TTG
agatttgttttatggcccgg

SEQ ID NO: 377682 - DNA, 20 bp, Artificial Sequence
  Description of Artificial Sequence: Synthetic oligonucleotide
  Target: LAMA2; (+) strand; PAM type: YTN; PAM sequence: TTT
gttttatggcccggaatagt

SEQ ID NO: 377683 - DNA, 20 bp, Artificial Sequence
  Description of Artificial Sequence: Synthetic oligonucleotide
  Target: LAMA2; (+) strand; PAM type: YTN; PAM sequence: TTG
ttttatggcccggaatagtg

SEQ ID NO: 377684 - DNA, 20 bp, Artificial Sequence
  Description of Artificial Sequence: Synthetic oligonucleotide
  Target: LAMA2; (+) strand; PAM type: YTN; PAM sequence: TTT
tatggcccggaatagtgttc

SEQ ID NO: 377685 - DNA, 20 bp, Artificial Sequence
  Description of Artificial Sequence: Synthetic oligonucleotide
  Target: LAMA2; (+) strand; PAM type: YTN; PAM sequence: TTT
atggcccggaatagtgttca

SEQ ID NO: 377686 - DNA, 20 bp, Artificial Sequence
  Description of Artificial Sequence: Synthetic oligonucleotide
  Target: LAMA2; (+) strand; PAM type: YTN; PAM sequence: TTA
tggcccggaatagtgttcag

SEQ ID NO: 377687 - DNA, 20 bp, Artificial Sequence
  Description of Artificial Sequence: Synthetic oligonucleotide
  Target: LAMA2; (+) strand; PAM type: YTN; PAM sequence: TTC
agtttgtttattataacatg

SEQ ID NO: 377688 - DNA, 20 bp, Artificial Sequence
  Description of Artificial Sequence: Synthetic oligonucleotide
  Target: LAMA2; (+) strand; PAM type: YTN; PAM sequence: TTT
gtttattataacatgtgcac

SEQ ID NO: 377689 - DNA, 20 bp, Artificial Sequence
  Description of Artificial Sequence: Synthetic oligonucleotide
  Target: LAMA2; (+) strand; PAM type: YTN; PAM sequence: TTG
tttattataacatgtgcact

SEQ ID NO: 377690 - DNA, 20 bp, Artificial Sequence
  Description of Artificial Sequence: Synthetic oligonucleotide
  Target: LAMA2; (+) strand; PAM type: YTN; PAM sequence: TTT
attataacatgtgcacttga

SEQ ID NO: 377691 - DNA, 20 bp, Artificial Sequence
  Description of Artificial Sequence: Synthetic oligonucleotide
  Target: LAMA2; (+) strand; PAM type: YTN; PAM sequence: TTA
ttataacatgtgcacttgaa

SEQ ID NO: 377692 - DNA, 20 bp, Artificial Sequence
  Description of Artificial Sequence: Synthetic oligonucleotide
  Target: LAMA2; (+) strand; PAM type: YTN; PAM sequence: TTA
taacatgtgcacttgaaaat

SEQ ID NO: 377693 - DNA, 20 bp, Artificial Sequence
  Description of Artificial Sequence: Synthetic oligonucleotide
  Target: LAMA2; (+) strand; PAM type: YTN; PAM sequence: CTT
gaaaataatgtgtattctgg

SEQ ID NO: 377694 - DNA, 20 bp, Artificial Sequence
  Description of Artificial Sequence: Synthetic oligonucleotide
  Target: LAMA2; (+) strand; PAM type: YTN; PAM sequence: TTG
aaaataatgtgtattctgga

SEQ ID NO: 377695 - DNA, 20 bp, Artificial Sequence
  Description of Artificial Sequence: Synthetic oligonucleotide
  Target: LAMA2; (+) strand; PAM type: YTN; PAM sequence: TTC
tggagttgttggatgaaaac

SEQ ID NO: 377696 - DNA, 20 bp, Artificial Sequence
  Description of Artificial Sequence: Synthetic oligonucleotide
  Target: LAMA2; (+) strand; PAM type: YTN; PAM sequence: CTG
gagttgttggatgaaaactt

SEQ ID NO: 377697 - DNA, 20 bp, Artificial Sequence
  Description of Artificial Sequence: Synthetic oligonucleotide
  Target: LAMA2; (+) strand; PAM type: YTN; PAM sequence: TTG
ttggatgaaaacttctatat

SEQ ID NO: 377698 - DNA, 20 bp, Artificial Sequence
  Description of Artificial Sequence: Synthetic oligonucleotide
  Target: LAMA2; (+) strand; PAM type: YTN; PAM sequence: TTG
gatgaaaacttctatatagg

SEQ ID NO: 377699 - DNA, 20 bp, Artificial Sequence
  Description of Artificial Sequence: Synthetic oligonucleotide
  Target: LAMA2; (+) strand; PAM type: YTN; PAM sequence: CTT
ctatataggtcaattatcct

SEQ ID NO: 377700 - DNA, 20 bp, Artificial Sequence
  Description of Artificial Sequence: Synthetic oligonucleotide
  Target: LAMA2; (+) strand; PAM type: YTN; PAM sequence: TTC
tatataggtcaattatcctt

SEQ ID NO: 377701 - DNA, 20 bp, Artificial Sequence
  Description of Artificial Sequence: Synthetic oligonucleotide
  Target: LAMA2; (+) strand; PAM type: YTN; PAM sequence: CTA
tataggtcaattatccttaa

SEQ ID NO: 377702 - DNA, 20 bp, Artificial Sequence
  Description of Artificial Sequence: Synthetic oligonucleotide
  Target: LAMA2; (+) strand; PAM type: YTN; PAM sequence: TTA
tccttaacggtttttagatc

SEQ ID NO: 377703 - DNA, 20 bp, Artificial Sequence
  Description of Artificial Sequence: Synthetic oligonucleotide
  Target: LAMA2; (+) strand; PAM type: YTN; PAM sequence: CTT
aacggtttttagatctacat

SEQ ID NO: 377704 - DNA, 20 bp, Artificial Sequence
  Description of Artificial Sequence: Synthetic oligonucleotide
  Target: LAMA2; (+) strand; PAM type: YTN; PAM sequence: TTA
acggtttttagatctacatg

SEQ ID NO: 377705 - DNA, 20 bp, Artificial Sequence
  Description of Artificial Sequence: Synthetic oligonucleotide
  Target: LAMA2; (+) strand; PAM type: YTN; PAM sequence: TTT
ttagatctacatgttctctc

SEQ ID NO: 377706 - DNA, 20 bp, Artificial Sequence
  Description of Artificial Sequence: Synthetic oligonucleotide
  Target: LAMA2; (+) strand; PAM type: YTN; PAM sequence: TTT
tagatctacatgttctctca

SEQ ID NO: 377707 - DNA, 20 bp, Artificial Sequence
  Description of Artificial Sequence: Synthetic oligonucleotide
  Target: LAMA2; (+) strand; PAM type: YTN; PAM sequence: TTT
agatctacatgttctctcag

SEQ ID NO: 377708 - DNA, 20 bp, Artificial Sequence
  Description of Artificial Sequence: Synthetic oligonucleotide
  Target: LAMA2; (+) strand; PAM type: YTN; PAM sequence: TTA
gatctacatgttctctcagt

SEQ ID NO: 377709 - DNA, 20 bp, Artificial Sequence
  Description of Artificial Sequence: Synthetic oligonucleotide
  Target: LAMA2; (+) strand; PAM type: YTN; PAM sequence: CTA
catgttctctcagttactga

SEQ ID NO: 377710 - DNA, 20 bp, Artificial Sequence
  Description of Artificial Sequence: Synthetic oligonucleotide
  Target: LAMA2; (+) strand; PAM type: YTN; PAM sequence: TTC
tctcagttactgagagtgtt

SEQ ID NO: 377711 - DNA, 20 bp, Artificial Sequence
  Description of Artificial Sequence: Synthetic oligonucleotide
  Target: LAMA2; (+) strand; PAM type: YTN; PAM sequence: CTC
tcagttactgagagtgttgg

SEQ ID NO: 377712 - DNA, 20 bp, Artificial Sequence
  Description of Artificial Sequence: Synthetic oligonucleotide
  Target: LAMA2; (+) strand; PAM type: YTN; PAM sequence: CTC
agttactgagagtgttggac

SEQ ID NO: 377713 - DNA, 20 bp, Artificial Sequence
  Description of Artificial Sequence: Synthetic oligonucleotide
  Target: LAMA2; (+) strand; PAM type: YTN; PAM sequence: TTA
ctgagagtgttggactataa

SEQ ID NO: 377714 - DNA, 20 bp, Artificial Sequence
  Description of Artificial Sequence: Synthetic oligonucleotide
  Target: LAMA2; (+) strand; PAM type: YTN; PAM sequence: CTG
agagtgttggactataactt

SEQ ID NO: 377715 - DNA, 20 bp, Artificial Sequence
  Description of Artificial Sequence: Synthetic oligonucleotide
  Target: LAMA2; (+) strand; PAM type: YTN; PAM sequence: TTG
gactataactttgtccgttt

SEQ ID NO: 377716 - DNA, 20 bp, Artificial Sequence
  Description of Artificial Sequence: Synthetic oligonucleotide
  Target: LAMA2; (+) strand; PAM type: YTN; PAM sequence: CTA
taactttgtccgtttcttct

SEQ ID NO: 377717 - DNA, 20 bp, Artificial Sequence
  Description of Artificial Sequence: Synthetic oligonucleotide
  Target: LAMA2; (+) strand; PAM type: YTN; PAM sequence: CTT
tgtccgtttcttctttcact

SEQ ID NO: 377718 - DNA, 20 bp, Artificial Sequence
  Description of Artificial Sequence: Synthetic oligonucleotide
  Target: LAMA2; (+) strand; PAM type: YTN; PAM sequence: TTT
gtccgtttcttctttcactt

SEQ ID NO: 377719 - DNA, 20 bp, Artificial Sequence
  Description of Artificial Sequence: Synthetic oligonucleotide
  Target: LAMA2; (+) strand; PAM type: YTN; PAM sequence: TTG
tccgtttcttctttcacttc

SEQ ID NO: 377720 - DNA, 20 bp, Artificial Sequence
  Description of Artificial Sequence: Synthetic oligonucleotide
  Target: LAMA2; (+) strand; PAM type: YTN; PAM sequence: TTT
cttctttcacttctctcagg

SEQ ID NO: 377721 - DNA, 20 bp, Artificial Sequence
  Description of Artificial Sequence: Synthetic oligonucleotide
  Target: LAMA2; (+) strand; PAM type: YTN; PAM sequence: TTC
ttctttcacttctctcaggt

SEQ ID NO: 377722 - DNA, 20 bp, Artificial Sequence
  Description of Artificial Sequence: Synthetic oligonucleotide
  Target: LAMA2; (+) strand; PAM type: YTN; PAM sequence: CTT
ctttcacttctctcaggttt

SEQ ID NO: 377723 - DNA, 20 bp, Artificial Sequence
  Description of Artificial Sequence: Synthetic oligonucleotide
  Target: LAMA2; (+) strand; PAM type: YTN; PAM sequence: TTC
tttcacttctctcaggtttt

SEQ ID NO: 377724 - DNA, 20 bp, Artificial Sequence
  Description of Artificial Sequence: Synthetic oligonucleotide
  Target: LAMA2; (+) strand; PAM type: YTN; PAM sequence: CTT
tcacttctctcaggttttat

SEQ ID NO: 377725 - DNA, 20 bp, Artificial Sequence
  Description of Artificial Sequence: Synthetic oligonucleotide
  Target: LAMA2; (+) strand; PAM type: YTN; PAM sequence: TTT
cacttctctcaggttttatt

SEQ ID NO: 377726 - DNA, 20 bp, Artificial Sequence
  Description of Artificial Sequence: Synthetic oligonucleotide
  Target: LAMA2; (+) strand; PAM type: YTN; PAM sequence: TTC
acttctctcaggttttattc

SEQ ID NO: 377727 - DNA, 20 bp, Artificial Sequence
  Description of Artificial Sequence: Synthetic oligonucleotide
  Target: LAMA2; (+) strand; PAM type: YTN; PAM sequence: CTT
ctctcaggttttattcacat

SEQ ID NO: 377728 - DNA, 20 bp, Artificial Sequence
  Description of Artificial Sequence: Synthetic oligonucleotide
  Target: LAMA2; (+) strand; PAM type: YTN; PAM sequence: TTC
tctcaggttttattcacatg

SEQ ID NO: 377729 - DNA, 20 bp, Artificial Sequence
  Description of Artificial Sequence: Synthetic oligonucleotide
  Target: LAMA2; (+) strand; PAM type: YTN; PAM sequence: CTC
tcaggttttattcacatgta

SEQ ID NO: 377730 - DNA, 20 bp, Artificial Sequence
  Description of Artificial Sequence: Synthetic oligonucleotide
  Target: LAMA2; (+) strand; PAM type: YTN; PAM sequence: CTC
aggttttattcacatgtatt

SEQ ID NO: 377731 - DNA, 20 bp, Artificial Sequence
  Description of Artificial Sequence: Synthetic oligonucleotide
  Target: LAMA2; (+) strand; PAM type: YTN; PAM sequence: TTT
tattcacatgtatttttgag

SEQ ID NO: 377732 - DNA, 20 bp, Artificial Sequence
  Description of Artificial Sequence: Synthetic oligonucleotide
  Target: LAMA2; (+) strand; PAM type: YTN; PAM sequence: TTT
attcacatgtatttttgagc

SEQ ID NO: 377733 - DNA, 20 bp, Artificial Sequence
  Description of Artificial Sequence: Synthetic oligonucleotide
  Target: LAMA2; (+) strand; PAM type: YTN; PAM sequence: TTA
ttcacatgtatttttgagca

SEQ ID NO: 377734 - DNA, 20 bp, Artificial Sequence
  Description of Artificial Sequence: Synthetic oligonucleotide
  Target: LAMA2; (+) strand; PAM type: YTN; PAM sequence: TTC
acatgtatttttgagcagtg

SEQ ID NO: 377735 - DNA, 20 bp, Artificial Sequence
  Description of Artificial Sequence: Synthetic oligonucleotide
  Target: LAMA2; (+) strand; PAM type: YTN; PAM sequence: TTT
ttgagcagtgatactaggtg

SEQ ID NO: 377736 - DNA, 20 bp, Artificial Sequence
  Description of Artificial Sequence: Synthetic oligonucleotide
  Target: LAMA2; (+) strand; PAM type: YTN; PAM sequence: TTT
tgagcagtgatactaggtgc

SEQ ID NO: 377737 - DNA, 20 bp, Artificial Sequence
  Description of Artificial Sequence: Synthetic oligonucleotide
  Target: LAMA2; (+) strand; PAM type: YTN; PAM sequence: TTT
gagcagtgatactaggtgca

SEQ ID NO: 377738 - DNA, 20 bp, Artificial Sequence
  Description of Artificial Sequence: Synthetic oligonucleotide
  Target: LAMA2; (+) strand; PAM type: YTN; PAM sequence: TTG
agcagtgatactaggtgcat

SEQ ID NO: 377739 - DNA, 20 bp, Artificial Sequence
  Description of Artificial Sequence: Synthetic oligonucleotide
  Target: LAMA2; (+) strand; PAM type: YTN; PAM sequence: CTA
ggtgcatgaacatttaggat

SEQ ID NO: 377740 - DNA, 20 bp, Artificial Sequence
  Description of Artificial Sequence: Synthetic oligonucleotide
  Target: LAMA2; (+) strand; PAM type: YTN; PAM sequence: TTT
aggattgctatgtctttttg

SEQ ID NO: 377741 - DNA, 20 bp, Artificial Sequence
  Description of Artificial Sequence: Synthetic oligonucleotide
  Target: LAMA2; (+) strand; PAM type: YTN; PAM sequence: TTA
ggattgctatgtctttttga

SEQ ID NO: 377742 - DNA, 20 bp, Artificial Sequence
  Description of Artificial Sequence: Synthetic oligonucleotide
  Target: LAMA2; (+) strand; PAM type: YTN; PAM sequence: TTG
ctatgtctttttgaaaagtt

SEQ ID NO: 377743 - DNA, 20 bp, Artificial Sequence
  Description of Artificial Sequence: Synthetic oligonucleotide
  Target: LAMA2; (+) strand; PAM type: YTN; PAM sequence: CTA
tgtctttttgaaaagttggt

SEQ ID NO: 377744 - DNA, 20 bp, Artificial Sequence
  Description of Artificial Sequence: Synthetic oligonucleotide
  Target: LAMA2; (+) strand; PAM type: YTN; PAM sequence: CTT
tttgaaaagttggtgccttt

SEQ ID NO: 377745 - DNA, 20 bp, Artificial Sequence
  Description of Artificial Sequence: Synthetic oligonucleotide
  Target: LAMA2; (+) strand; PAM type: YTN; PAM sequence: TTT
ttgaaaagttggtgcctttt

SEQ ID NO: 377746 - DNA, 20 bp, Artificial Sequence
  Description of Artificial Sequence: Synthetic oligonucleotide
  Target: LAMA2; (+) strand; PAM type: YTN; PAM sequence: TTT
tgaaaagttggtgccttttg

SEQ ID NO: 377747 - DNA, 20 bp, Artificial Sequence
  Description of Artificial Sequence: Synthetic oligonucleotide
  Target: LAMA2; (+) strand; PAM type: YTN; PAM sequence: TTT
gaaaagttggtgccttttga

SEQ ID NO: 377748 - DNA, 20 bp, Artificial Sequence
  Description of Artificial Sequence: Synthetic oligonucleotide
  Target: LAMA2; (+) strand; PAM type: YTN; PAM sequence: TTG
aaaagttggtgccttttgac

SEQ ID NO: 377749 - DNA, 20 bp, Artificial Sequence
  Description of Artificial Sequence: Synthetic oligonucleotide
  Target: LAMA2; (+) strand; PAM type: YTN; PAM sequence: TTG
gtgccttttgacattgtgaa

SEQ ID NO: 377750 - DNA, 20 bp, Artificial Sequence
  Description of Artificial Sequence: Synthetic oligonucleotide
  Target: LAMA2; (+) strand; PAM type: YTN; PAM sequence: CTT
ttgacattgtgaaatgtctc

SEQ ID NO: 377751 - DNA, 20 bp, Artificial Sequence
  Description of Artificial Sequence: Synthetic oligonucleotide
  Target: LAMA2; (+) strand; PAM type: YTN; PAM sequence: TTT
tgacattgtgaaatgtctct

SEQ ID NO: 377752 - DNA, 20 bp, Artificial Sequence
  Description of Artificial Sequence: Synthetic oligonucleotide
  Target: LAMA2; (+) strand; PAM type: YTN; PAM sequence: TTT
gacattgtgaaatgtctctc

SEQ ID NO: 377753 - DNA, 20 bp, Artificial Sequence
  Description of Artificial Sequence: Synthetic oligonucleotide
  Target: LAMA2; (+) strand; PAM type: YTN; PAM sequence: TTG
acattgtgaaatgtctctct

SEQ ID NO: 377754 - DNA, 20 bp, Artificial Sequence
  Description of Artificial Sequence: Synthetic oligonucleotide
  Target: LAMA2; (+) strand; PAM type: YTN; PAM sequence: TTG
tgaaatgtctctctttattc

SEQ ID NO: 377755 - DNA, 20 bp, Artificial Sequence
  Description of Artificial Sequence: Synthetic oligonucleotide
  Target: LAMA2; (+) strand; PAM type: YTN; PAM sequence: CTC
tctttattcctagtaacatt

SEQ ID NO: 377756 - DNA, 20 bp, Artificial Sequence
  Description of Artificial Sequence: Synthetic oligonucleotide
  Target: LAMA2; (+) strand; PAM type: YTN; PAM sequence: CTC
tttattcctagtaacattcc

SEQ ID NO: 377757 - DNA, 20 bp, Artificial Sequence
  Description of Artificial Sequence: Synthetic oligonucleotide
  Target: LAMA2; (+) strand; PAM type: YTN; PAM sequence: CTT
tattcctagtaacattcctt

SEQ ID NO: 377758 - DNA, 20 bp, Artificial Sequence
  Description of Artificial Sequence: Synthetic oligonucleotide
  Target: LAMA2; (+) strand; PAM type: YTN; PAM sequence: TTT
attcctagtaacattccttg

SEQ ID NO: 377759 - DNA, 20 bp, Artificial Sequence
  Description of Artificial Sequence: Synthetic oligonucleotide
  Target: LAMA2; (+) strand; PAM type: YTN; PAM sequence: TTA
ttcctagtaacattccttgt

SEQ ID NO: 377760 - DNA, 20 bp, Artificial Sequence
  Description of Artificial Sequence: Synthetic oligonucleotide
  Target: LAMA2; (+) strand; PAM type: YTN; PAM sequence: TTC
ctagtaacattccttgttca

SEQ ID NO: 377761 - DNA, 20 bp, Artificial Sequence
  Description of Artificial Sequence: Synthetic oligonucleotide
  Target: LAMA2; (+) strand; PAM type: YTN; PAM sequence: CTA
gtaacattccttgttcagaa

SEQ ID NO: 377762 - DNA, 20 bp, Artificial Sequence
  Description of Artificial Sequence: Synthetic oligonucleotide
  Target: LAMA2; (+) strand; PAM type: YTN; PAM sequence: TTC
cttgttcagaagtgtacttt

SEQ ID NO: 377763 - DNA, 20 bp, Artificial Sequence
  Description of Artificial Sequence: Synthetic oligonucleotide
  Target: LAMA2; (+) strand; PAM type: YTN; PAM sequence: CTT
gttcagaagtgtactttttc

SEQ ID NO: 377764 - DNA, 20 bp, Artificial Sequence
  Description of Artificial Sequence: Synthetic oligonucleotide
  Target: LAMA2; (+) strand; PAM type: YTN; PAM sequence: TTG
ttcagaagtgtactttttct

SEQ ID NO: 377765 - DNA, 20 bp, Artificial Sequence
  Description of Artificial Sequence: Synthetic oligonucleotide
  Target: LAMA2; (+) strand; PAM type: YTN; PAM sequence: TTC
agaagtgtactttttctgat

SEQ ID NO: 377766 - DNA, 20 bp, Artificial Sequence
  Description of Artificial Sequence: Synthetic oligonucleotide
  Target: LAMA2; (+) strand; PAM type: YTN; PAM sequence: CTT
tttctgatatttatatagct

SEQ ID NO: 377767 - DNA, 20 bp, Artificial Sequence
  Description of Artificial Sequence: Synthetic oligonucleotide
  Target: LAMA2; (+) strand; PAM type: YTN; PAM sequence: TTT
ttctgatatttatatagcta

SEQ ID NO: 377768 - DNA, 20 bp, Artificial Sequence
  Description of Artificial Sequence: Synthetic oligonucleotide
  Target: LAMA2; (+) strand; PAM type: YTN; PAM sequence: TTT
tctgatatttatatagctat

SEQ ID NO: 377769 - DNA, 20 bp, Artificial Sequence
  Description of Artificial Sequence: Synthetic oligonucleotide
  Target: LAMA2; (+) strand; PAM type: YTN; PAM sequence: TTT
ctgatatttatatagctatt

SEQ ID NO: 377770 - DNA, 20 bp, Artificial Sequence
  Description of Artificial Sequence: Synthetic oligonucleotide
  Target: LAMA2; (+) strand; PAM type: YTN; PAM sequence: TTC
tgatatttatatagctattg

SEQ ID NO: 377771 - DNA, 20 bp, Artificial Sequence
  Description of Artificial Sequence: Synthetic oligonucleotide
  Target: LAMA2; (+) strand; PAM type: YTN; PAM sequence: CTG
atatttatatagctattgca

SEQ ID NO: 377772 - DNA, 20 bp, Artificial Sequence
  Description of Artificial Sequence: Synthetic oligonucleotide
  Target: LAMA2; (+) strand; PAM type: YTN; PAM sequence: TTT
atatagctattgcaactttc

SEQ ID NO: 377773 - DNA, 20 bp, Artificial Sequence
  Description of Artificial Sequence: Synthetic oligonucleotide
  Target: LAMA2; (+) strand; PAM type: YTN; PAM sequence: TTA
tatagctattgcaactttct

SEQ ID NO: 377774 - DNA, 20 bp, Artificial Sequence
  Description of Artificial Sequence: Synthetic oligonucleotide
  Target: LAMA2; (+) strand; PAM type: YTN; PAM sequence: CTA
ttgcaactttctttttaatg

SEQ ID NO: 377775 - DNA, 20 bp, Artificial Sequence
  Description of Artificial Sequence: Synthetic oligonucleotide
  Target: LAMA2; (+) strand; PAM type: YTN; PAM sequence: TTG
caactttctttttaatggtg

SEQ ID NO: 377776 - DNA, 20 bp, Artificial Sequence
  Description of Artificial Sequence: Synthetic oligonucleotide
  Target: LAMA2; (+) strand; PAM type: YTN; PAM sequence: CTT
tctttttaatggtgtttgtg

SEQ ID NO: 377777 - DNA, 20 bp, Artificial Sequence
  Description of Artificial Sequence: Synthetic oligonucleotide
  Target: LAMA2; (+) strand; PAM type: YTN; PAM sequence: TTT
ctttttaatggtgtttgtgt

SEQ ID NO: 377778 - DNA, 20 bp, Artificial Sequence
  Description of Artificial Sequence: Synthetic oligonucleotide
  Target: LAMA2; (+) strand; PAM type: YTN; PAM sequence: TTC
tttttaatggtgtttgtgtg

SEQ ID NO: 377779 - DNA, 20 bp, Artificial Sequence
  Description of Artificial Sequence: Synthetic oligonucleotide
  Target: LAMA2; (+) strand; PAM type: YTN; PAM sequence: CTT
tttaatggtgtttgtgtggt

SEQ ID NO: 377780 - DNA, 20 bp, Artificial Sequence
  Description of Artificial Sequence: Synthetic oligonucleotide
  Target: LAMA2; (+) strand; PAM type: YTN; PAM sequence: TTT
ttaatggtgtttgtgtggta

SEQ ID NO: 377781 - DNA, 20 bp, Artificial Sequence
  Description of Artificial Sequence: Synthetic oligonucleotide
  Target: LAMA2; (+) strand; PAM type: YTN; PAM sequence: TTT
taatggtgtttgtgtggtat

SEQ ID NO: 377782 - DNA, 20 bp, Artificial Sequence
  Description of Artificial Sequence: Synthetic oligonucleotide
  Target: LAMA2; (+) strand; PAM type: YTN; PAM sequence: TTT
aatggtgtttgtgtggtata

SEQ ID NO: 377783 - DNA, 20 bp, Artificial Sequence
  Description of Artificial Sequence: Synthetic oligonucleotide
  Target: LAMA2; (+) strand; PAM type: YTN; PAM sequence: TTA
atggtgtttgtgtggtatat

SEQ ID NO: 377784 - DNA, 20 bp, Artificial Sequence
  Description of Artificial Sequence: Synthetic oligonucleotide
  Target: LAMA2; (+) strand; PAM type: YTN; PAM sequence: TTT
gtgtggtatatatttttcac

SEQ ID NO: 377785 - DNA, 20 bp, Artificial Sequence
  Description of Artificial Sequence: Synthetic oligonucleotide
  Target: LAMA2; (+) strand; PAM type: YTN; PAM sequence: TTG
tgtggtatatatttttcaca

SEQ ID NO: 377786 - DNA, 20 bp, Artificial Sequence
  Description of Artificial Sequence: Synthetic oligonucleotide
  Target: LAMA2; (+) strand; PAM type: YTN; PAM sequence: TTT
ttcacaccatcatctatttc

SEQ ID NO: 377787 - DNA, 20 bp, Artificial Sequence
  Description of Artificial Sequence: Synthetic oligonucleotide
  Target: LAMA2; (+) strand; PAM type: YTN; PAM sequence: TTT
tcacaccatcatctatttca

SEQ ID NO: 377788 - DNA, 20 bp, Artificial Sequence
  Description of Artificial Sequence: Synthetic oligonucleotide
  Target: LAMA2; (+) strand; PAM type: YTN; PAM sequence: TTT
cacaccatcatctatttcat

SEQ ID NO: 377789 - DNA, 20 bp, Artificial Sequence
  Description of Artificial Sequence: Synthetic oligonucleotide
  Target: LAMA2; (+) strand; PAM type: YTN; PAM sequence: TTC
acaccatcatctatttcatc

SEQ ID NO: 377790 - DNA, 20 bp, Artificial Sequence
  Description of Artificial Sequence: Synthetic oligonucleotide
  Target: LAMA2; (+) strand; PAM type: YTN; PAM sequence: CTA
tttcatctccctttttagta

SEQ ID NO: 377791 - DNA, 20 bp, Artificial Sequence
  Description of Artificial Sequence: Synthetic oligonucleotide
  Target: LAMA2; (+) strand; PAM type: YTN; PAM sequence: TTT
catctccctttttagtattt

SEQ ID NO: 377792 - DNA, 20 bp, Artificial Sequence
  Description of Artificial Sequence: Synthetic oligonucleotide
  Target: LAMA2; (+) strand; PAM type: YTN; PAM sequence: TTC
atctccctttttagtatttt

SEQ ID NO: 377793 - DNA, 20 bp, Artificial Sequence
  Description of Artificial Sequence: Synthetic oligonucleotide
  Target: LAMA2; (+) strand; PAM type: YTN; PAM sequence: CTC
cctttttagtattttaatgt

SEQ ID NO: 377794 - DNA, 20 bp, Artificial Sequence
  Description of Artificial Sequence: Synthetic oligonucleotide
  Target: LAMA2; (+) strand; PAM type: YTN; PAM sequence: CTT
tttagtattttaatgtgtgc

SEQ ID NO: 377795 - DNA, 20 bp, Artificial Sequence
  Description of Artificial Sequence: Synthetic oligonucleotide
  Target: LAMA2; (+) strand; PAM type: YTN; PAM sequence: TTT
ttagtattttaatgtgtgcc

SEQ ID NO: 377796 - DNA, 20 bp, Artificial Sequence
  Description of Artificial Sequence: Synthetic oligonucleotide
  Target: LAMA2; (+) strand; PAM type: YTN; PAM sequence: TTT
tagtattttaatgtgtgcct

SEQ ID NO: 377797 - DNA, 20 bp, Artificial Sequence
  Description of Artificial Sequence: Synthetic oligonucleotide
  Target: LAMA2; (+) strand; PAM type: YTN; PAM sequence: TTT
agtattttaatgtgtgcctt

SEQ ID NO: 377798 - DNA, 20 bp, Artificial Sequence
  Description of Artificial Sequence: Synthetic oligonucleotide
  Target: LAMA2; (+) strand; PAM type: YTN; PAM sequence: TTA
gtattttaatgtgtgccttt

SEQ ID NO: 377799 - DNA, 20 bp, Artificial Sequence
  Description of Artificial Sequence: Synthetic oligonucleotide
  Target: LAMA2; (+) strand; PAM type: YTN; PAM sequence: TTT
taatgtgtgccttttttttt

SEQ ID NO: 377800 - DNA, 20 bp, Artificial Sequence
  Description of Artificial Sequence: Synthetic oligonucleotide
  Target: LAMA2; (+) strand; PAM type: YTN; PAM sequence: TTT
aatgtgtgcctttttttttt

SEQ ID NO: 377801 - DNA, 20 bp, Artificial Sequence
  Description of Artificial Sequence: Synthetic oligonucleotide
  Target: LAMA2; (+) strand; PAM type: YTN; PAM sequence: TTA
atgtgtgccttttttttttt

SEQ ID NO: 377802 - DNA, 20 bp, Artificial Sequence
  Description of Artificial Sequence: Synthetic oligonucleotide
  Target: LAMA2; (+) strand; PAM type: YTN; PAM sequence: CTT
ttttttttttattctgagac

SEQ ID NO: 377803 - DNA, 20 bp, Artificial Sequence
  Description of Artificial Sequence: Synthetic oligonucleotide
  Target: LAMA2; (+) strand; PAM type: YTN; PAM sequence: TTT
tttttttttattctgagaca

SEQ ID NO: 377804 - DNA, 20 bp, Artificial Sequence
  Description of Artificial Sequence: Synthetic oligonucleotide
  Target: LAMA2; (+) strand; PAM type: YTN; PAM sequence: TTT
ttttttttattctgagacag

SEQ ID NO: 377805 - DNA, 20 bp, Artificial Sequence
  Description of Artificial Sequence: Synthetic oligonucleotide
  Target: LAMA2; (+) strand; PAM type: YTN; PAM sequence: TTT
tttttttattctgagacagg

SEQ ID NO: 377806 - DNA, 20 bp, Artificial Sequence
  Description of Artificial Sequence: Synthetic oligonucleotide
  Target: LAMA2; (+) strand; PAM type: YTN; PAM sequence: TTT
ttttttattctgagacaggg

SEQ ID NO: 377807 - DNA, 20 bp, Artificial Sequence
  Description of Artificial Sequence: Synthetic oligonucleotide
  Target: LAMA2; (+) strand; PAM type: YTN; PAM sequence: TTT
tttttattctgagacagggt

SEQ ID NO: 377808 - DNA, 20 bp, Artificial Sequence
  Description of Artificial Sequence: Synthetic oligonucleotide
  Target: LAMA2; (+) strand; PAM type: YTN; PAM sequence: TTT
ttttattctgagacagggtc

SEQ ID NO: 377809 - DNA, 20 bp, Artificial Sequence
  Description of Artificial Sequence: Synthetic oligonucleotide
  Target: LAMA2; (+) strand; PAM type: YTN; PAM sequence: TTT
tttattctgagacagggtct

SEQ ID NO: 377810 - DNA, 20 bp, Artificial Sequence
  Description of Artificial Sequence: Synthetic oligonucleotide
  Target: LAMA2; (+) strand; PAM type: YTN; PAM sequence: TTT
ttattctgagacagggtctt

SEQ ID NO: 377811 - DNA, 20 bp, Artificial Sequence
  Description of Artificial Sequence: Synthetic oligonucleotide
  Target: LAMA2; (+) strand; PAM type: YTN; PAM sequence: TTT
tattctgagacagggtctta

SEQ ID NO: 377812 - DNA, 20 bp, Artificial Sequence
  Description of Artificial Sequence: Synthetic oligonucleotide
  Target: LAMA2; (+) strand; PAM type: YTN; PAM sequence: TTT
attctgagacagggtcttac

SEQ ID NO: 377813 - DNA, 20 bp, Artificial Sequence
  Description of Artificial Sequence: Synthetic oligonucleotide
  Target: LAMA2; (+) strand; PAM type: YTN; PAM sequence: TTA
ttctgagacagggtcttact

SEQ ID NO: 377814 - DNA, 20 bp, Artificial Sequence
  Description of Artificial Sequence: Synthetic oligonucleotide
  Target: LAMA2; (+) strand; PAM type: YTN; PAM sequence: TTC
tgagacagggtcttactcca

SEQ ID NO: 377815 - DNA, 20 bp, Artificial Sequence
  Description of Artificial Sequence: Synthetic oligonucleotide
  Target: LAMA2; (+) strand; PAM type: YTN; PAM sequence: CTG
agacagggtcttactccatt

SEQ ID NO: 377816 - DNA, 20 bp, Artificial Sequence
  Description of Artificial Sequence: Synthetic oligonucleotide
  Target: LAMA2; (+) strand; PAM type: YTN; PAM sequence: CTT
actccattgcccaggctaga

SEQ ID NO: 377817 - DNA, 20 bp, Artificial Sequence
  Description of Artificial Sequence: Synthetic oligonucleotide
  Target: LAMA2; (+) strand; PAM type: YTN; PAM sequence: TTA
ctccattgcccaggctagag

SEQ ID NO: 377818 - DNA, 20 bp, Artificial Sequence
  Description of Artificial Sequence: Synthetic oligonucleotide
  Target: LAMA2; (+) strand; PAM type: YTN; PAM sequence: CTC
cattgcccaggctagagtgc

SEQ ID NO: 377819 - DNA, 20 bp, Artificial Sequence
  Description of Artificial Sequence: Synthetic oligonucleotide
  Target: LAMA2; (+) strand; PAM type: YTN; PAM sequence: TTG
cccaggctagagtgcagtgg

SEQ ID NO: 377820 - DNA, 20 bp, Artificial Sequence
  Description of Artificial Sequence: Synthetic oligonucleotide
  Target: LAMA2; (+) strand; PAM type: YTN; PAM sequence: CTA
gagtgcagtggtgtgatctc

SEQ ID NO: 377821 - DNA, 20 bp, Artificial Sequence
  Description of Artificial Sequence: Synthetic oligonucleotide
  Target: LAMA2; (+) strand; PAM type: YTN; PAM sequence: CTC
agctcactgcaccctccacc

SEQ ID NO: 377822 - DNA, 20 bp, Artificial Sequence
  Description of Artificial Sequence: Synthetic oligonucleotide
  Target: LAMA2; (+) strand; PAM type: YTN; PAM sequence: CTC
actgcaccctccaccttctg

SEQ ID NO: 377823 - DNA, 20 bp, Artificial Sequence
  Description of Artificial Sequence: Synthetic oligonucleotide
  Target: LAMA2; (+) strand; PAM type: YTN; PAM sequence: CTG
caccctccaccttctgggct

SEQ ID NO: 377824 - DNA, 20 bp, Artificial Sequence
  Description of Artificial Sequence: Synthetic oligonucleotide
  Target: LAMA2; (+) strand; PAM type: YTN; PAM sequence: CTC
caccttctgggctcaagaaa

SEQ ID NO: 377825 - DNA, 20 bp, Artificial Sequence
  Description of Artificial Sequence: Synthetic oligonucleotide
  Target: LAMA2; (+) strand; PAM type: YTN; PAM sequence: CTT
ctgggctcaagaaatcctct

SEQ ID NO: 377826 - DNA, 20 bp, Artificial Sequence
  Description of Artificial Sequence: Synthetic oligonucleotide
  Target: LAMA2; (+) strand; PAM type: YTN; PAM sequence: TTC
tgggctcaagaaatcctctc

SEQ ID NO: 377827 - DNA, 20 bp, Artificial Sequence
  Description of Artificial Sequence: Synthetic oligonucleotide
  Target: LAMA2; (+) strand; PAM type: YTN; PAM sequence: CTG
ggctcaagaaatcctctcac

SEQ ID NO: 377828 - DNA, 20 bp, Artificial Sequence
  Description of Artificial Sequence: Synthetic oligonucleotide
  Target: LAMA2; (+) strand; PAM type: YTN; PAM sequence: CTC
aagaaatcctctcacctcag

SEQ ID NO: 377829 - DNA, 20 bp, Artificial Sequence
  Description of Artificial Sequence: Synthetic oligonucleotide
  Target: LAMA2; (+) strand; PAM type: YTN; PAM sequence: CTC
tcacctcagcctccagagta

SEQ ID NO: 377830 - DNA, 20 bp, Artificial Sequence
  Description of Artificial Sequence: Synthetic oligonucleotide
  Target: LAMA2; (+) strand; PAM type: YTN; PAM sequence: CTC
acctcagcctccagagtagc

SEQ ID NO: 377831 - DNA, 20 bp, Artificial Sequence
  Description of Artificial Sequence: Synthetic oligonucleotide
  Target: LAMA2; (+) strand; PAM type: YTN; PAM sequence: CTC
agcctccagagtagctggga

SEQ ID NO: 377832 - DNA, 20 bp, Artificial Sequence
  Description of Artificial Sequence: Synthetic oligonucleotide
  Target: LAMA2; (+) strand; PAM type: YTN; PAM sequence: CTC
cagagtagctgggactacag

SEQ ID NO: 377833 - DNA, 20 bp, Artificial Sequence
  Description of Artificial Sequence: Synthetic oligonucleotide
  Target: LAMA2; (+) strand; PAM type: YTN; PAM sequence: CTG
ggactacaggcgcatgccac

SEQ ID NO: 377834 - DNA, 20 bp, Artificial Sequence
  Description of Artificial Sequence: Synthetic oligonucleotide
  Target: LAMA2; (+) strand; PAM type: YTN; PAM sequence: CTA
caggcgcatgccaccatgct

SEQ ID NO: 377835 - DNA, 20 bp, Artificial Sequence
  Description of Artificial Sequence: Synthetic oligonucleotide
  Target: LAMA2; (+) strand; PAM type: YTN; PAM sequence: CTT
ggctaatttttaagtttttt

SEQ ID NO: 377836 - DNA, 20 bp, Artificial Sequence
  Description of Artificial Sequence: Synthetic oligonucleotide
  Target: LAMA2; (+) strand; PAM type: YTN; PAM sequence: TTG
gctaatttttaagttttttg

SEQ ID NO: 377837 - DNA, 20 bp, Artificial Sequence
  Description of Artificial Sequence: Synthetic oligonucleotide
  Target: LAMA2; (+) strand; PAM type: YTN; PAM sequence: CTA
atttttaagttttttgtaga

SEQ ID NO: 377838 - DNA, 20 bp, Artificial Sequence
  Description of Artificial Sequence: Synthetic oligonucleotide
  Target: LAMA2; (+) strand; PAM type: YTN; PAM sequence: TTT
ttaagttttttgtagaaatg

SEQ ID NO: 377839 - DNA, 20 bp, Artificial Sequence
  Description of Artificial Sequence: Synthetic oligonucleotide
  Target: LAMA2; (+) strand; PAM type: YTN; PAM sequence: TTT
taagttttttgtagaaatga

SEQ ID NO: 377840 - DNA, 20 bp, Artificial Sequence
  Description of Artificial Sequence: Synthetic oligonucleotide
  Target: LAMA2; (+) strand; PAM type: YTN; PAM sequence: TTT
aagttttttgtagaaatgag

SEQ ID NO: 377841 - DNA, 20 bp, Artificial Sequence
  Description of Artificial Sequence: Synthetic oligonucleotide
  Target: LAMA2; (+) strand; PAM type: YTN; PAM sequence: TTA
agttttttgtagaaatgaga

SEQ ID NO: 377842 - DNA, 20 bp, Artificial Sequence
  Description of Artificial Sequence: Synthetic oligonucleotide
  Target: LAMA2; (+) strand; PAM type: YTN; PAM sequence: TTT
tttgtagaaatgagatctca

SEQ ID NO: 377843 - DNA, 20 bp, Artificial Sequence
  Description of Artificial Sequence: Synthetic oligonucleotide
  Target: LAMA2; (+) strand; PAM type: YTN; PAM sequence: TTT
ttgtagaaatgagatctcac

SEQ ID NO: 377844 - DNA, 20 bp, Artificial Sequence
  Description of Artificial Sequence: Synthetic oligonucleotide
  Target: LAMA2; (+) strand; PAM type: YTN; PAM sequence: TTT
tgtagaaatgagatctcact

SEQ ID NO: 377845 - DNA, 20 bp, Artificial Sequence
  Description of Artificial Sequence: Synthetic oligonucleotide
  Target: LAMA2; (+) strand; PAM type: YTN; PAM sequence: TTT
gtagaaatgagatctcacta

SEQ ID NO: 377846 - DNA, 20 bp, Artificial Sequence
  Description of Artificial Sequence: Synthetic oligonucleotide
  Target: LAMA2; (+) strand; PAM type: YTN; PAM sequence: TTG
tagaaatgagatctcactat

SEQ ID NO: 377847 - DNA, 20 bp, Artificial Sequence
  Description of Artificial Sequence: Synthetic oligonucleotide
  Target: LAMA2; (+) strand; PAM type: YTN; PAM sequence: CTC
actatattgcccatgcttgt

SEQ ID NO: 377848 - DNA, 20 bp, Artificial Sequence
  Description of Artificial Sequence: Synthetic oligonucleotide
  Target: LAMA2; (+) strand; PAM type: YTN; PAM sequence: CTA
tattgcccatgcttgtctca

SEQ ID NO: 377849 - DNA, 20 bp, Artificial Sequence
  Description of Artificial Sequence: Synthetic oligonucleotide
  Target: LAMA2; (+) strand; PAM type: YTN; PAM sequence: TTG
cccatgcttgtctcaaagtc

SEQ ID NO: 377850 - DNA, 20 bp, Artificial Sequence
  Description of Artificial Sequence: Synthetic oligonucleotide
  Target: LAMA2; (+) strand; PAM type: YTN; PAM sequence: CTT
gtctcaaagtcctgtgctca

SEQ ID NO: 377851 - DNA, 20 bp, Artificial Sequence
  Description of Artificial Sequence: Synthetic oligonucleotide
  Target: LAMA2; (+) strand; PAM type: YTN; PAM sequence: TTG
tctcaaagtcctgtgctcaa

SEQ ID NO: 377852 - DNA, 20 bp, Artificial Sequence
  Description of Artificial Sequence: Synthetic oligonucleotide
  Target: LAMA2; (+) strand; PAM type: YTN; PAM sequence: CTC
aaagtcctgtgctcaagtga

SEQ ID NO: 377853 - DNA, 20 bp, Artificial Sequence
  Description of Artificial Sequence: Synthetic oligonucleotide
  Target: LAMA2; (+) strand; PAM type: YTN; PAM sequence: CTG
tgctcaagtgatcctgcaaa

SEQ ID NO: 377854 - DNA, 20 bp, Artificial Sequence
  Description of Artificial Sequence: Synthetic oligonucleotide
  Target: LAMA2; (+) strand; PAM type: YTN; PAM sequence: CTC
aagtgatcctgcaaaattct

SEQ ID NO: 377855 - DNA, 20 bp, Artificial Sequence
  Description of Artificial Sequence: Synthetic oligonucleotide
  Target: LAMA2; (+) strand; PAM type: YTN; PAM sequence: CTG
caaaattctgggattacagg

SEQ ID NO: 377856 - DNA, 20 bp, Artificial Sequence
  Description of Artificial Sequence: Synthetic oligonucleotide
  Target: LAMA2; (+) strand; PAM type: YTN; PAM sequence: TTC
tgggattacaggtgtatacc

SEQ ID NO: 377857 - DNA, 20 bp, Artificial Sequence
  Description of Artificial Sequence: Synthetic oligonucleotide
  Target: LAMA2; (+) strand; PAM type: YTN; PAM sequence: CTG
ggattacaggtgtataccac

SEQ ID NO: 377858 - DNA, 20 bp, Artificial Sequence
  Description of Artificial Sequence: Synthetic oligonucleotide
  Target: LAMA2; (+) strand; PAM type: YTN; PAM sequence: TTA
caggtgtataccaccatgcc

SEQ ID NO: 377859 - DNA, 20 bp, Artificial Sequence
  Description of Artificial Sequence: Synthetic oligonucleotide
  Target: LAMA2; (+) strand; PAM type: YTN; PAM sequence: CTA
gcttaatgtgtgtgtgtgtg

SEQ ID NO: 377860 - DNA, 20 bp, Artificial Sequence
  Description of Artificial Sequence: Synthetic oligonucleotide
  Target: LAMA2; (+) strand; PAM type: YTN; PAM sequence: CTT
aatgtgtgtgtgtgtgagag

SEQ ID NO: 377861 - DNA, 20 bp, Artificial Sequence
  Description of Artificial Sequence: Synthetic oligonucleotide
  Target: LAMA2; (+) strand; PAM type: YTN; PAM sequence: TTA
atgtgtgtgtgtgtgagaga

SEQ ID NO: 377862 - DNA, 20 bp, Artificial Sequence
  Description of Artificial Sequence: Synthetic oligonucleotide
  Target: LAMA2; (+) strand; PAM type: YTN; PAM sequence: TTC
agatctttatttttcaacga

SEQ ID NO: 377863 - DNA, 20 bp, Artificial Sequence
  Description of Artificial Sequence: Synthetic oligonucleotide
  Target: LAMA2; (+) strand; PAM type: YTN; PAM sequence: CTT
tatttttcaacgaatcttaa

SEQ ID NO: 377864 - DNA, 20 bp, Artificial Sequence
  Description of Artificial Sequence: Synthetic oligonucleotide
  Target: LAMA2; (+) strand; PAM type: YTN; PAM sequence: TTT
atttttcaacgaatcttaat

SEQ ID NO: 377865 - DNA, 20 bp, Artificial Sequence
  Description of Artificial Sequence: Synthetic oligonucleotide
  Target: LAMA2; (+) strand; PAM type: YTN; PAM sequence: TTA
tttttcaacgaatcttaata

SEQ ID NO: 377866 - DNA, 20 bp, Artificial Sequence
  Description of Artificial Sequence: Synthetic oligonucleotide
  Target: LAMA2; (+) strand; PAM type: YTN; PAM sequence: TTT
ttcaacgaatcttaataatt

SEQ ID NO: 377867 - DNA, 20 bp, Artificial Sequence
  Description of Artificial Sequence: Synthetic oligonucleotide
  Target: LAMA2; (+) strand; PAM type: YTN; PAM sequence: TTT
tcaacgaatcttaataattt

SEQ ID NO: 377868 - DNA, 20 bp, Artificial Sequence
  Description of Artificial Sequence: Synthetic oligonucleotide
  Target: LAMA2; (+) strand; PAM type: YTN; PAM sequence: TTT
caacgaatcttaataatttg

SEQ ID NO: 377869 - DNA, 20 bp, Artificial Sequence
  Description of Artificial Sequence: Synthetic oligonucleotide
  Target: LAMA2; (+) strand; PAM type: YTN; PAM sequence: TTC
aacgaatcttaataatttgg

SEQ ID NO: 377870 - DNA, 20 bp, Artificial Sequence
  Description of Artificial Sequence: Synthetic oligonucleotide
  Target: LAMA2; (+) strand; PAM type: YTN; PAM sequence: CTT
aataatttggccttttaatt

SEQ ID NO: 377871 - DNA, 20 bp, Artificial Sequence
  Description of Artificial Sequence: Synthetic oligonucleotide
  Target: LAMA2; (+) strand; PAM type: YTN; PAM sequence: TTA
ataatttggccttttaattt

SEQ ID NO: 377872 - DNA, 20 bp, Artificial Sequence
  Description of Artificial Sequence: Synthetic oligonucleotide
  Target: LAMA2; (+) strand; PAM type: YTN; PAM sequence: TTT
ggccttttaatttgaggagt

SEQ ID NO: 377873 - DNA, 20 bp, Artificial Sequence
  Description of Artificial Sequence: Synthetic oligonucleotide
  Target: LAMA2; (+) strand; PAM type: YTN; PAM sequence: TTG
gccttttaatttgaggagtt

SEQ ID NO: 377874 - DNA, 20 bp, Artificial Sequence
  Description of Artificial Sequence: Synthetic oligonucleotide
  Target: LAMA2; (+) strand; PAM type: YTN; PAM sequence: CTT
ttaatttgaggagttaaatc

SEQ ID NO: 377875 - DNA, 20 bp, Artificial Sequence
  Description of Artificial Sequence: Synthetic oligonucleotide
  Target: LAMA2; (+) strand; PAM type: YTN; PAM sequence: TTT
taatttgaggagttaaatca

SEQ ID NO: 377876 - DNA, 20 bp, Artificial Sequence
  Description of Artificial Sequence: Synthetic oligonucleotide
  Target: LAMA2; (+) strand; PAM type: YTN; PAM sequence: TTT
aatttgaggagttaaatcat

SEQ ID NO: 377877 - DNA, 20 bp, Artificial Sequence
  Description of Artificial Sequence: Synthetic oligonucleotide
  Target: LAMA2; (+) strand; PAM type: YTN; PAM sequence: TTA
atttgaggagttaaatcatt

SEQ ID NO: 377878 - DNA, 20 bp, Artificial Sequence
  Description of Artificial Sequence: Synthetic oligonucleotide
  Target: LAMA2; (+) strand; PAM type: YTN; PAM sequence: TTT
gaggagttaaatcatttcca

SEQ ID NO: 377879 - DNA, 20 bp, Artificial Sequence
  Description of Artificial Sequence: Synthetic oligonucleotide
  Target: LAMA2; (+) strand; PAM type: YTN; PAM sequence: TTG
aggagttaaatcatttccac

SEQ ID NO: 377880 - DNA, 20 bp, Artificial Sequence
  Description of Artificial Sequence: Synthetic oligonucleotide
  Target: LAMA2; (+) strand; PAM type: YTN; PAM sequence: TTA
aatcatttccacttaatgta

SEQ ID NO: 377881 - DNA, 20 bp, Artificial Sequence
  Description of Artificial Sequence: Synthetic oligonucleotide
  Target: LAMA2; (+) strand; PAM type: YTN; PAM sequence: TTT
ccacttaatgtaaatattgg

SEQ ID NO: 377882 - DNA, 20 bp, Artificial Sequence
  Description of Artificial Sequence: Synthetic oligonucleotide
  Target: LAMA2; (+) strand; PAM type: YTN; PAM sequence: TTC
cacttaatgtaaatattggt

SEQ ID NO: 377883 - DNA, 20 bp, Artificial Sequence
  Description of Artificial Sequence: Synthetic oligonucleotide
  Target: LAMA2; (+) strand; PAM type: YTN; PAM sequence: CTT
aatgtaaatattggtatgat

SEQ ID NO: 377884 - DNA, 20 bp, Artificial Sequence
  Description of Artificial Sequence: Synthetic oligonucleotide
  Target: LAMA2; (+) strand; PAM type: YTN; PAM sequence: TTA
atgtaaatattggtatgatt

SEQ ID NO: 377885 - DNA, 20 bp, Artificial Sequence
  Description of Artificial Sequence: Synthetic oligonucleotide
  Target: LAMA2; (+) strand; PAM type: YTN; PAM sequence: TTG
gtatgattggattaagcctg

SEQ ID NO: 377886 - DNA, 20 bp, Artificial Sequence
  Description of Artificial Sequence: Synthetic oligonucleotide
  Target: LAMA2; (+) strand; PAM type: YTN; PAM sequence: TTG
gattaagcctgcactttgct

SEQ ID NO: 377887 - DNA, 20 bp, Artificial Sequence
  Description of Artificial Sequence: Synthetic oligonucleotide
  Target: LAMA2; (+) strand; PAM type: YTN; PAM sequence: TTA
agcctgcactttgctatttg

SEQ ID NO: 377888 - DNA, 20 bp, Artificial Sequence
  Description of Artificial Sequence: Synthetic oligonucleotide
  Target: LAMA2; (+) strand; PAM type: YTN; PAM sequence: CTG
cactttgctatttgcttttg

SEQ ID NO: 377889 - DNA, 20 bp, Artificial Sequence
  Description of Artificial Sequence: Synthetic oligonucleotide
  Target: LAMA2; (+) strand; PAM type: YTN; PAM sequence: CTT
tgctatttgcttttgcttgc

SEQ ID NO: 377890 - DNA, 20 bp, Artificial Sequence
  Description of Artificial Sequence: Synthetic oligonucleotide
  Target: LAMA2; (+) strand; PAM type: YTN; PAM sequence: TTT
gctatttgcttttgcttgcc

SEQ ID NO: 377891 - DNA, 20 bp, Artificial Sequence
  Description of Artificial Sequence: Synthetic oligonucleotide
  Target: LAMA2; (+) strand; PAM type: YTN; PAM sequence: TTG
ctatttgcttttgcttgcct

SEQ ID NO: 377892 - DNA, 20 bp, Artificial Sequence
  Description of Artificial Sequence: Synthetic oligonucleotide
  Target: LAMA2; (+) strand; PAM type: YTN; PAM sequence: CTA
tttgcttttgcttgccttat

SEQ ID NO: 377893 - DNA, 20 bp, Artificial Sequence
  Description of Artificial Sequence: Synthetic oligonucleotide
  Target: LAMA2; (+) strand; PAM type: YTN; PAM sequence: TTT
gcttttgcttgccttatctg

SEQ ID NO: 377894 - DNA, 20 bp, Artificial Sequence
  Description of Artificial Sequence: Synthetic oligonucleotide
  Target: LAMA2; (+) strand; PAM type: YTN; PAM sequence: TTG
cttttgcttgccttatctgc

SEQ ID NO: 377895 - DNA, 20 bp, Artificial Sequence
  Description of Artificial Sequence: Synthetic oligonucleotide
  Target: LAMA2; (+) strand; PAM type: YTN; PAM sequence: CTT
ttgcttgccttatctgctct

SEQ ID NO: 377896 - DNA, 20 bp, Artificial Sequence
  Description of Artificial Sequence: Synthetic oligonucleotide
  Target: LAMA2; (+) strand; PAM type: YTN; PAM sequence: TTT
tgcttgccttatctgctctt

SEQ ID NO: 377897 - DNA, 20 bp, Artificial Sequence
  Description of Artificial Sequence: Synthetic oligonucleotide
  Target: LAMA2; (+) strand; PAM type: YTN; PAM sequence: TTT
gcttgccttatctgctcttg

SEQ ID NO: 377898 - DNA, 20 bp, Artificial Sequence
  Description of Artificial Sequence: Synthetic oligonucleotide
  Target: LAMA2; (+) strand; PAM type: YTN; PAM sequence: TTG
cttgccttatctgctcttgc

SEQ ID NO: 377899 - DNA, 20 bp, Artificial Sequence
  Description of Artificial Sequence: Synthetic oligonucleotide
  Target: LAMA2; (+) strand; PAM type: YTN; PAM sequence: CTT
gccttatctgctcttgcctt

SEQ ID NO: 377900 - DNA, 20 bp, Artificial Sequence
  Description of Artificial Sequence: Synthetic oligonucleotide
  Target: LAMA2; (+) strand; PAM type: YTN; PAM sequence: TTG
ccttatctgctcttgccttt

SEQ ID NO: 377901 - DNA, 20 bp, Artificial Sequence
  Description of Artificial Sequence: Synthetic oligonucleotide
  Target: LAMA2; (+) strand; PAM type: YTN; PAM sequence: CTT
atctgctcttgccttttttt

SEQ ID NO: 377902 - DNA, 20 bp, Artificial Sequence
  Description of Artificial Sequence: Synthetic oligonucleotide
  Target: LAMA2; (+) strand; PAM type: YTN; PAM sequence: TTA
tctgctcttgcctttttttt

SEQ ID NO: 377903 - DNA, 20 bp, Artificial Sequence
  Description of Artificial Sequence: Synthetic oligonucleotide
  Target: LAMA2; (+) strand; PAM type: YTN; PAM sequence: CTG
ctcttgccttttttttttcc

SEQ ID NO: 377904 - DNA, 20 bp, Artificial Sequence
  Description of Artificial Sequence: Synthetic oligonucleotide
  Target: LAMA2; (+) strand; PAM type: YTN; PAM sequence: CTC
ttgccttttttttttcctta

SEQ ID NO: 377905 - DNA, 20 bp, Artificial Sequence
  Description of Artificial Sequence: Synthetic oligonucleotide
  Target: LAMA2; (+) strand; PAM type: YTN; PAM sequence: CTT
gccttttttttttccttatt

SEQ ID NO: 377906 - DNA, 20 bp, Artificial Sequence
  Description of Artificial Sequence: Synthetic oligonucleotide
  Target: LAMA2; (+) strand; PAM type: YTN; PAM sequence: TTG
ccttttttttttccttattg

SEQ ID NO: 377907 - DNA, 20 bp, Artificial Sequence
  Description of Artificial Sequence: Synthetic oligonucleotide
  Target: LAMA2; (+) strand; PAM type: YTN; PAM sequence: CTT
ttttttttccttattgtcct

SEQ ID NO: 377908 - DNA, 20 bp, Artificial Sequence
  Description of Artificial Sequence: Synthetic oligonucleotide
  Target: LAMA2; (+) strand; PAM type: YTN; PAM sequence: TTT
tttttttccttattgtcctg

SEQ ID NO: 377909 - DNA, 20 bp, Artificial Sequence
  Description of Artificial Sequence: Synthetic oligonucleotide
  Target: LAMA2; (+) strand; PAM type: YTN; PAM sequence: TTT
ttttttccttattgtcctgc

SEQ ID NO: 377910 - DNA, 20 bp, Artificial Sequence
  Description of Artificial Sequence: Synthetic oligonucleotide
  Target: LAMA2; (+) strand; PAM type: YTN; PAM sequence: TTT
tttttccttattgtcctgcc

SEQ ID NO: 377911 - DNA, 20 bp, Artificial Sequence
  Description of Artificial Sequence: Synthetic oligonucleotide
  Target: LAMA2; (+) strand; PAM type: YTN; PAM sequence: TTT
ttttccttattgtcctgcct

SEQ ID NO: 377912 - DNA, 20 bp, Artificial Sequence
  Description of Artificial Sequence: Synthetic oligonucleotide
  Target: LAMA2; (+) strand; PAM type: YTN; PAM sequence: TTT
tttccttattgtcctgcctt

SEQ ID NO: 377913 - DNA, 20 bp, Artificial Sequence
  Description of Artificial Sequence: Synthetic oligonucleotide
  Target: LAMA2; (+) strand; PAM type: YTN; PAM sequence: TTT
ttccttattgtcctgccttc

SEQ ID NO: 377914 - DNA, 20 bp, Artificial Sequence
  Description of Artificial Sequence: Synthetic oligonucleotide
  Target: LAMA2; (+) strand; PAM type: YTN; PAM sequence: TTT
tccttattgtcctgccttct

SEQ ID NO: 377915 - DNA, 20 bp, Artificial Sequence
  Description of Artificial Sequence: Synthetic oligonucleotide
  Target: LAMA2; (+) strand; PAM type: YTN; PAM sequence: TTT
ccttattgtcctgccttctt

SEQ ID NO: 377916 - DNA, 20 bp, Artificial Sequence
  Description of Artificial Sequence: Synthetic oligonucleotide
  Target: LAMA2; (+) strand; PAM type: YTN; PAM sequence: TTC
cttattgtcctgccttcttt

SEQ ID NO: 377917 - DNA, 20 bp, Artificial Sequence
  Description of Artificial Sequence: Synthetic oligonucleotide
  Target: LAMA2; (+) strand; PAM type: YTN; PAM sequence: CTT
attgtcctgccttcttttgc

SEQ ID NO: 377918 - DNA, 20 bp, Artificial Sequence
  Description of Artificial Sequence: Synthetic oligonucleotide
  Target: LAMA2; (+) strand; PAM type: YTN; PAM sequence: TTA
ttgtcctgccttcttttgca

SEQ ID NO: 377919 - DNA, 20 bp, Artificial Sequence
  Description of Artificial Sequence: Synthetic oligonucleotide
  Target: LAMA2; (+) strand; PAM type: YTN; PAM sequence: TTG
tcctgccttcttttgcatta

SEQ ID NO: 377920 - DNA, 20 bp, Artificial Sequence
  Description of Artificial Sequence: Synthetic oligonucleotide
  Target: LAMA2; (+) strand; PAM type: YTN; PAM sequence: CTG
ccttcttttgcattaatttg

SEQ ID NO: 377921 - DNA, 20 bp, Artificial Sequence
  Description of Artificial Sequence: Synthetic oligonucleotide
  Target: LAMA2; (+) strand; PAM type: YTN; PAM sequence: CTT
cttttgcattaatttgtata

SEQ ID NO: 377922 - DNA, 20 bp, Artificial Sequence
  Description of Artificial Sequence: Synthetic oligonucleotide
  Target: LAMA2; (+) strand; PAM type: YTN; PAM sequence: TTC
ttttgcattaatttgtataa

SEQ ID NO: 377923 - DNA, 20 bp, Artificial Sequence
  Description of Artificial Sequence: Synthetic oligonucleotide
  Target: LAMA2; (+) strand; PAM type: YTN; PAM sequence: CTT
ttgcattaatttgtataaca

SEQ ID NO: 377924 - DNA, 20 bp, Artificial Sequence
  Description of Artificial Sequence: Synthetic oligonucleotide
  Target: LAMA2; (+) strand; PAM type: YTN; PAM sequence: TTT
tgcattaatttgtataacat

SEQ ID NO: 377925 - DNA, 20 bp, Artificial Sequence
  Description of Artificial Sequence: Synthetic oligonucleotide
  Target: LAMA2; (+) strand; PAM type: YTN; PAM sequence: TTT
gcattaatttgtataacatc

SEQ ID NO: 377926 - DNA, 20 bp, Artificial Sequence
  Description of Artificial Sequence: Synthetic oligonucleotide
  Target: LAMA2; (+) strand; PAM type: YTN; PAM sequence: TTG
cattaatttgtataacatct

SEQ ID NO: 377927 - DNA, 20 bp, Artificial Sequence
  Description of Artificial Sequence: Synthetic oligonucleotide
  Target: LAMA2; (+) strand; PAM type: YTN; PAM sequence: TTA
atttgtataacatcttctct

SEQ ID NO: 377928 - DNA, 20 bp, Artificial Sequence
  Description of Artificial Sequence: Synthetic oligonucleotide
  Target: LAMA2; (+) strand; PAM type: YTN; PAM sequence: TTT
gtataacatcttctcttgac

SEQ ID NO: 377929 - DNA, 20 bp, Artificial Sequence
  Description of Artificial Sequence: Synthetic oligonucleotide
  Target: LAMA2; (+) strand; PAM type: YTN; PAM sequence: TTG
tataacatcttctcttgact

SEQ ID NO: 377930 - DNA, 20 bp, Artificial Sequence
  Description of Artificial Sequence: Synthetic oligonucleotide
  Target: LAMA2; (+) strand; PAM type: YTN; PAM sequence: CTT
ctcttgacttttggattatt

SEQ ID NO: 377931 - DNA, 20 bp, Artificial Sequence
  Description of Artificial Sequence: Synthetic oligonucleotide
  Target: LAMA2; (+) strand; PAM type: YTN; PAM sequence: TTC
tcttgacttttggattatta

SEQ ID NO: 377932 - DNA, 20 bp, Artificial Sequence
  Description of Artificial Sequence: Synthetic oligonucleotide
  Target: LAMA2; (+) strand; PAM type: YTN; PAM sequence: CTC
ttgacttttggattattaaa

SEQ ID NO: 377933 - DNA, 20 bp, Artificial Sequence
  Description of Artificial Sequence: Synthetic oligonucleotide
  Target: LAMA2; (+) strand; PAM type: YTN; PAM sequence: CTT
gacttttggattattaaata

SEQ ID NO: 377934 - DNA, 20 bp, Artificial Sequence
  Description of Artificial Sequence: Synthetic oligonucleotide
  Target: LAMA2; (+) strand; PAM type: YTN; PAM sequence: TTG
acttttggattattaaatat

SEQ ID NO: 377935 - DNA, 20 bp, Artificial Sequence
  Description of Artificial Sequence: Synthetic oligonucleotide
  Target: LAMA2; (+) strand; PAM type: YTN; PAM sequence: CTT
ttggattattaaatatacct

SEQ ID NO: 377936 - DNA, 20 bp, Artificial Sequence
  Description of Artificial Sequence: Synthetic oligonucleotide
  Target: LAMA2; (+) strand; PAM type: YTN; PAM sequence: TTT
tggattattaaatataccta

SEQ ID NO: 377937 - DNA, 20 bp, Artificial Sequence
  Description of Artificial Sequence: Synthetic oligonucleotide
  Target: LAMA2; (+) strand; PAM type: YTN; PAM sequence: TTT
ggattattaaatatacctat

SEQ ID NO: 377938 - DNA, 20 bp, Artificial Sequence
  Description of Artificial Sequence: Synthetic oligonucleotide
  Target: LAMA2; (+) strand; PAM type: YTN; PAM sequence: TTG
gattattaaatatacctatt

SEQ ID NO: 377939 - DNA, 20 bp, Artificial Sequence
  Description of Artificial Sequence: Synthetic oligonucleotide
  Target: LAMA2; (+) strand; PAM type: YTN; PAM sequence: TTA
ttaaatatacctattcattt

SEQ ID NO: 377940 - DNA, 20 bp, Artificial Sequence
  Description of Artificial Sequence: Synthetic oligonucleotide
  Target: LAMA2; (+) strand; PAM type: YTN; PAM sequence: TTA
aatatacctattcattttat

SEQ ID NO: 377941 - DNA, 20 bp, Artificial Sequence
  Description of Artificial Sequence: Synthetic oligonucleotide
  Target: LAMA2; (+) strand; PAM type: YTN; PAM sequence: CTA
ttcattttatttctttggtt

SEQ ID NO: 377942 - DNA, 20 bp, Artificial Sequence
  Description of Artificial Sequence: Synthetic oligonucleotide
  Target: LAMA2; (+) strand; PAM type: YTN; PAM sequence: TTC
attttatttctttggttttg

SEQ ID NO: 377943 - DNA, 20 bp, Artificial Sequence
  Description of Artificial Sequence: Synthetic oligonucleotide
  Target: LAMA2; (+) strand; PAM type: YTN; PAM sequence: TTT
tatttctttggttttgtcta

SEQ ID NO: 377944 - DNA, 20 bp, Artificial Sequence
  Description of Artificial Sequence: Synthetic oligonucleotide
  Target: LAMA2; (+) strand; PAM type: YTN; PAM sequence: TTT
atttctttggttttgtctag

SEQ ID NO: 377945 - DNA, 20 bp, Artificial Sequence
  Description of Artificial Sequence: Synthetic oligonucleotide
  Target: LAMA2; (+) strand; PAM type: YTN; PAM sequence: TTA
tttctttggttttgtctagg

SEQ ID NO: 377946 - DNA, 20 bp, Artificial Sequence
  Description of Artificial Sequence: Synthetic oligonucleotide
  Target: LAMA2; (+) strand; PAM type: YTN; PAM sequence: TTT
ctttggttttgtctaggaat

SEQ ID NO: 377947 - DNA, 20 bp, Artificial Sequence
  Description of Artificial Sequence: Synthetic oligonucleotide
  Target: LAMA2; (+) strand; PAM type: YTN; PAM sequence: TTC
tttggttttgtctaggaata

SEQ ID NO: 377948 - DNA, 20 bp, Artificial Sequence
  Description of Artificial Sequence: Synthetic oligonucleotide
  Target: LAMA2; (+) strand; PAM type: YTN; PAM sequence: CTT
tggttttgtctaggaatata

SEQ ID NO: 377949 - DNA, 20 bp, Artificial Sequence
  Description of Artificial Sequence: Synthetic oligonucleotide
  Target: LAMA2; (+) strand; PAM type: YTN; PAM sequence: TTT
ggttttgtctaggaatatac

SEQ ID NO: 377950 - DNA, 20 bp, Artificial Sequence
  Description of Artificial Sequence: Synthetic oligonucleotide
  Target: LAMA2; (+) strand; PAM type: YTN; PAM sequence: TTG
gttttgtctaggaatataca

SEQ ID NO: 377951 - DNA, 20 bp, Artificial Sequence
  Description of Artificial Sequence: Synthetic oligonucleotide
  Target: LAMA2; (+) strand; PAM type: YTN; PAM sequence: TTT
tgtctaggaatatacatctt

SEQ ID NO: 377952 - DNA, 20 bp, Artificial Sequence
  Description of Artificial Sequence: Synthetic oligonucleotide
  Target: LAMA2; (+) strand; PAM type: YTN; PAM sequence: TTT
gtctaggaatatacatcttt

SEQ ID NO: 377953 - DNA, 20 bp, Artificial Sequence
  Description of Artificial Sequence: Synthetic oligonucleotide
  Target: LAMA2; (+) strand; PAM type: YTN; PAM sequence: TTG
tctaggaatatacatcttta

SEQ ID NO: 377954 - DNA, 20 bp, Artificial Sequence
  Description of Artificial Sequence: Synthetic oligonucleotide
  Target: LAMA2; (+) strand; PAM type: YTN; PAM sequence: CTA
ggaatatacatctttaactt

SEQ ID NO: 377955 - DNA, 20 bp, Artificial Sequence
  Description of Artificial Sequence: Synthetic oligonucleotide
  Target: LAMA2; (+) strand; PAM type: YTN; PAM sequence: CTT
taactttccagaatgtacat

SEQ ID NO: 377956 - DNA, 20 bp, Artificial Sequence
  Description of Artificial Sequence: Synthetic oligonucleotide
  Target: LAMA2; (+) strand; PAM type: YTN; PAM sequence: TTT
aactttccagaatgtacatt

SEQ ID NO: 377957 - DNA, 20 bp, Artificial Sequence
  Description of Artificial Sequence: Synthetic oligonucleotide
  Target: LAMA2; (+) strand; PAM type: YTN; PAM sequence: TTA
actttccagaatgtacatta

SEQ ID NO: 377958 - DNA, 20 bp, Artificial Sequence
  Description of Artificial Sequence: Synthetic oligonucleotide
  Target: LAMA2; (+) strand; PAM type: YTN; PAM sequence: CTT
tccagaatgtacattaaaat

SEQ ID NO: 377959 - DNA, 20 bp, Artificial Sequence
  Description of Artificial Sequence: Synthetic oligonucleotide
  Target: LAMA2; (+) strand; PAM type: YTN; PAM sequence: TTT
ccagaatgtacattaaaata

SEQ ID NO: 377960 - DNA, 20 bp, Artificial Sequence
  Description of Artificial Sequence: Synthetic oligonucleotide
  Target: LAMA2; (+) strand; PAM type: YTN; PAM sequence: TTC
cagaatgtacattaaaataa

SEQ ID NO: 377961 - DNA, 20 bp, Artificial Sequence
  Description of Artificial Sequence: Synthetic oligonucleotide
  Target: LAMA2; (+) strand; PAM type: YTN; PAM sequence: TTA
aaataatattataccacttt

SEQ ID NO: 377962 - DNA, 20 bp, Artificial Sequence
  Description of Artificial Sequence: Synthetic oligonucleotide
  Target: LAMA2; (+) strand; PAM type: YTN; PAM sequence: TTA
taccactttacatttagcgt

SEQ ID NO: 377963 - DNA, 20 bp, Artificial Sequence
  Description of Artificial Sequence: Synthetic oligonucleotide
  Target: LAMA2; (+) strand; PAM type: YTN; PAM sequence: CTT
tacatttagcgtaagaacct

SEQ ID NO: 377964 - DNA, 20 bp, Artificial Sequence
  Description of Artificial Sequence: Synthetic oligonucleotide
  Target: LAMA2; (+) strand; PAM type: YTN; PAM sequence: TTT
acatttagcgtaagaacctt

SEQ ID NO: 377965 - DNA, 20 bp, Artificial Sequence
  Description of Artificial Sequence: Synthetic oligonucleotide
  Target: LAMA2; (+) strand; PAM type: YTN; PAM sequence: TTA
catttagcgtaagaacctta

SEQ ID NO: 377966 - DNA, 20 bp, Artificial Sequence
  Description of Artificial Sequence: Synthetic oligonucleotide
  Target: LAMA2; (+) strand; PAM type: YTN; PAM sequence: TTT
agcgtaagaaccttacaaca

SEQ ID NO: 377967 - DNA, 20 bp, Artificial Sequence
  Description of Artificial Sequence: Synthetic oligonucleotide
  Target: LAMA2; (+) strand; PAM type: YTN; PAM sequence: TTA
gcgtaagaaccttacaacag

SEQ ID NO: 377968 - DNA, 20 bp, Artificial Sequence
  Description of Artificial Sequence: Synthetic oligonucleotide
  Target: LAMA2; (+) strand; PAM type: YTN; PAM sequence: CTT
acaacaggaaacctccagtc

SEQ ID NO: 377969 - DNA, 20 bp, Artificial Sequence
  Description of Artificial Sequence: Synthetic oligonucleotide
  Target: LAMA2; (+) strand; PAM type: YTN; PAM sequence: TTA
caacaggaaacctccagtcc

SEQ ID NO: 377970 - DNA, 20 bp, Artificial Sequence
  Description of Artificial Sequence: Synthetic oligonucleotide
  Target: LAMA2; (+) strand; PAM type: YTN; PAM sequence: CTC
cagtcccctttcctatcctt

SEQ ID NO: 377971 - DNA, 20 bp, Artificial Sequence
  Description of Artificial Sequence: Synthetic oligonucleotide
  Target: LAMA2; (+) strand; PAM type: YTN; PAM sequence: CTT
tcctatcctttgtactatat

SEQ ID NO: 377972 - DNA, 20 bp, Artificial Sequence
  Description of Artificial Sequence: Synthetic oligonucleotide
  Target: LAMA2; (+) strand; PAM type: YTN; PAM sequence: TTT
cctatcctttgtactatatt

SEQ ID NO: 377973 - DNA, 20 bp, Artificial Sequence
  Description of Artificial Sequence: Synthetic oligonucleotide
  Target: LAMA2; (+) strand; PAM type: YTN; PAM sequence: TTC
ctatcctttgtactatattg

SEQ ID NO: 377974 - DNA, 20 bp, Artificial Sequence
  Description of Artificial Sequence: Synthetic oligonucleotide
  Target: LAMA2; (+) strand; PAM type: YTN; PAM sequence: CTA
tcctttgtactatattgtca

SEQ ID NO: 377975 - DNA, 20 bp, Artificial Sequence
  Description of Artificial Sequence: Synthetic oligonucleotide
  Target: LAMA2; (+) strand; PAM type: YTN; PAM sequence: CTT
tgtactatattgtcatatat

SEQ ID NO: 377976 - DNA, 20 bp, Artificial Sequence
  Description of Artificial Sequence: Synthetic oligonucleotide
  Target: LAMA2; (+) strand; PAM type: YTN; PAM sequence: TTT
gtactatattgtcatatatt

SEQ ID NO: 377977 - DNA, 20 bp, Artificial Sequence
  Description of Artificial Sequence: Synthetic oligonucleotide
  Target: LAMA2; (+) strand; PAM type: YTN; PAM sequence: TTG
tactatattgtcatatattt

SEQ ID NO: 377978 - DNA, 20 bp, Artificial Sequence
  Description of Artificial Sequence: Synthetic oligonucleotide
  Target: LAMA2; (+) strand; PAM type: YTN; PAM sequence: CTA
tattgtcatatatttttact

SEQ ID NO: 377979 - DNA, 20 bp, Artificial Sequence
  Description of Artificial Sequence: Synthetic oligonucleotide
  Target: LAMA2; (+) strand; PAM type: YTN; PAM sequence: TTG
tcatatatttttacttctat

SEQ ID NO: 377980 - DNA, 20 bp, Artificial Sequence
  Description of Artificial Sequence: Synthetic oligonucleotide
  Target: LAMA2; (+) strand; PAM type: YTN; PAM sequence: TTT
ttacttctatatattataca

SEQ ID NO: 377981 - DNA, 20 bp, Artificial Sequence
  Description of Artificial Sequence: Synthetic oligonucleotide
  Target: LAMA2; (+) strand; PAM type: YTN; PAM sequence: TTT
tacttctatatattatacat

SEQ ID NO: 377982 - DNA, 20 bp, Artificial Sequence
  Description of Artificial Sequence: Synthetic oligonucleotide
  Target: LAMA2; (+) strand; PAM type: YTN; PAM sequence: TTT
acttctatatattatacatc

SEQ ID NO: 377983 - DNA, 20 bp, Artificial Sequence
  Description of Artificial Sequence: Synthetic oligonucleotide
  Target: LAMA2; (+) strand; PAM type: YTN; PAM sequence: TTA
cttctatatattatacatct

SEQ ID NO: 377984 - DNA, 20 bp, Artificial Sequence
  Description of Artificial Sequence: Synthetic oligonucleotide
  Target: LAMA2; (+) strand; PAM type: YTN; PAM sequence: CTT
ctatatattatacatctgac

SEQ ID NO: 377985 - DNA, 20 bp, Artificial Sequence
  Description of Artificial Sequence: Synthetic oligonucleotide
  Target: LAMA2; (+) strand; PAM type: YTN; PAM sequence: TTC
tatatattatacatctgaca

SEQ ID NO: 377986 - DNA, 20 bp, Artificial Sequence
  Description of Artificial Sequence: Synthetic oligonucleotide
  Target: LAMA2; (+) strand; PAM type: YTN; PAM sequence: CTA
tatattatacatctgacaat

SEQ ID NO: 377987 - DNA, 20 bp, Artificial Sequence
  Description of Artificial Sequence: Synthetic oligonucleotide
  Target: LAMA2; (+) strand; PAM type: YTN; PAM sequence: TTA
tacatctgacaatataagct

SEQ ID NO: 377988 - DNA, 20 bp, Artificial Sequence
  Description of Artificial Sequence: Synthetic oligonucleotide
  Target: LAMA2; (+) strand; PAM type: YTN; PAM sequence: CTG
acaatataagcttacgattt

SEQ ID NO: 377989 - DNA, 20 bp, Artificial Sequence
  Description of Artificial Sequence: Synthetic oligonucleotide
  Target: LAMA2; (+) strand; PAM type: YTN; PAM sequence: CTT
acgattttgatttcaatagt

SEQ ID NO: 377990 - DNA, 20 bp, Artificial Sequence
  Description of Artificial Sequence: Synthetic oligonucleotide
  Target: LAMA2; (+) strand; PAM type: YTN; PAM sequence: TTA
cgattttgatttcaatagtc

SEQ ID NO: 377991 - DNA, 20 bp, Artificial Sequence
  Description of Artificial Sequence: Synthetic oligonucleotide
  Target: LAMA2; (+) strand; PAM type: YTN; PAM sequence: TTT
tgatttcaatagtcaattat

SEQ ID NO: 377992 - DNA, 20 bp, Artificial Sequence
  Description of Artificial Sequence: Synthetic oligonucleotide
  Target: LAMA2; (+) strand; PAM type: YTN; PAM sequence: TTT
gatttcaatagtcaattatc

SEQ ID NO: 377993 - DNA, 20 bp, Artificial Sequence
  Description of Artificial Sequence: Synthetic oligonucleotide
  Target: LAMA2; (+) strand; PAM type: YTN; PAM sequence: TTG
atttcaatagtcaattatct

SEQ ID NO: 377994 - DNA, 20 bp, Artificial Sequence
  Description of Artificial Sequence: Synthetic oligonucleotide
  Target: LAMA2; (+) strand; PAM type: YTN; PAM sequence: TTT
caatagtcaattatcttttt

SEQ ID NO: 377995 - DNA, 20 bp, Artificial Sequence
  Description of Artificial Sequence: Synthetic oligonucleotide
  Target: LAMA2; (+) strand; PAM type: YTN; PAM sequence: TTC
aatagtcaattatcttttta

SEQ ID NO: 377996 - DNA, 20 bp, Artificial Sequence
  Description of Artificial Sequence: Synthetic oligonucleotide
  Target: LAMA2; (+) strand; PAM type: YTN; PAM sequence: TTA
tctttttaaacaagaaaatt

SEQ ID NO: 377997 - DNA, 20 bp, Artificial Sequence
  Description of Artificial Sequence: Synthetic oligonucleotide
  Target: LAMA2; (+) strand; PAM type: YTN; PAM sequence: CTT
tttaaacaagaaaatttctc

SEQ ID NO: 377998 - DNA, 20 bp, Artificial Sequence
  Description of Artificial Sequence: Synthetic oligonucleotide
  Target: LAMA2; (+) strand; PAM type: YTN; PAM sequence: TTT
ttaaacaagaaaatttctcc

SEQ ID NO: 377999 - DNA, 20 bp, Artificial Sequence
  Description of Artificial Sequence: Synthetic oligonucleotide
  Target: LAMA2; (+) strand; PAM type: YTN; PAM sequence: TTT
taaacaagaaaatttctcct

SEQ ID NO: 378000 - DNA, 20 bp, Artificial Sequence
  Description of Artificial Sequence: Synthetic oligonucleotide
  Target: LAMA2; (+) strand; PAM type: YTN; PAM sequence: TTT
aaacaagaaaatttctccta

SEQ ID NO: 378001 - DNA, 20 bp, Artificial Sequence
  Description of Artificial Sequence: Synthetic oligonucleotide
  Target: LAMA2; (+) strand; PAM type: YTN; PAM sequence: TTA
aacaagaaaatttctcctat

SEQ ID NO: 378002 - DNA, 20 bp, Artificial Sequence
  Description of Artificial Sequence: Synthetic oligonucleotide
  Target: LAMA2; (+) strand; PAM type: YTN; PAM sequence: TTT
ctcctataactctttttcct

SEQ ID NO: 378003 - DNA, 20 bp, Artificial Sequence
  Description of Artificial Sequence: Synthetic oligonucleotide
  Target: LAMA2; (+) strand; PAM type: YTN; PAM sequence: TTC
tcctataactctttttcctt

SEQ ID NO: 378004 - DNA, 20 bp, Artificial Sequence
  Description of Artificial Sequence: Synthetic oligonucleotide
  Target: LAMA2; (+) strand; PAM type: YTN; PAM sequence: CTC
ctataactctttttccttgt

SEQ ID NO: 378005 - DNA, 20 bp, Artificial Sequence
  Description of Artificial Sequence: Synthetic oligonucleotide
  Target: LAMA2; (+) strand; PAM type: YTN; PAM sequence: CTA
taactctttttccttgtgta

SEQ ID NO: 378006 - DNA, 20 bp, Artificial Sequence
  Description of Artificial Sequence: Synthetic oligonucleotide
  Target: LAMA2; (+) strand; PAM type: YTN; PAM sequence: CTC
tttttccttgtgtatatcaa

SEQ ID NO: 378007 - DNA, 20 bp, Artificial Sequence
  Description of Artificial Sequence: Synthetic oligonucleotide
  Target: LAMA2; (+) strand; PAM type: YTN; PAM sequence: CTT
tttccttgtgtatatcaatt

SEQ ID NO: 378008 - DNA, 20 bp, Artificial Sequence
  Description of Artificial Sequence: Synthetic oligonucleotide
  Target: LAMA2; (+) strand; PAM type: YTN; PAM sequence: TTT
ttccttgtgtatatcaattt

SEQ ID NO: 378009 - DNA, 20 bp, Artificial Sequence
  Description of Artificial Sequence: Synthetic oligonucleotide
  Target: LAMA2; (+) strand; PAM type: YTN; PAM sequence: TTT
tccttgtgtatatcaatttt

SEQ ID NO: 378010 - DNA, 20 bp, Artificial Sequence
  Description of Artificial Sequence: Synthetic oligonucleotide
  Target: LAMA2; (+) strand; PAM type: YTN; PAM sequence: TTT
ccttgtgtatatcaatttta

SEQ ID NO: 378011 - DNA, 20 bp, Artificial Sequence
  Description of Artificial Sequence: Synthetic oligonucleotide
  Target: LAMA2; (+) strand; PAM type: YTN; PAM sequence: TTC
cttgtgtatatcaattttaa

SEQ ID NO: 378012 - DNA, 20 bp, Artificial Sequence
  Description of Artificial Sequence: Synthetic oligonucleotide
  Target: LAMA2; (+) strand; PAM type: YTN; PAM sequence: CTT
gtgtatatcaattttaatgc

SEQ ID NO: 378013 - DNA, 20 bp, Artificial Sequence
  Description of Artificial Sequence: Synthetic oligonucleotide
  Target: LAMA2; (+) strand; PAM type: YTN; PAM sequence: TTG
tgtatatcaattttaatgct

SEQ ID NO: 378014 - DNA, 20 bp, Artificial Sequence
  Description of Artificial Sequence: Synthetic oligonucleotide
  Target: LAMA2; (+) strand; PAM type: YTN; PAM sequence: TTT
taatgctttaaattcctttg

SEQ ID NO: 378015 - DNA, 20 bp, Artificial Sequence
  Description of Artificial Sequence: Synthetic oligonucleotide
  Target: LAMA2; (+) strand; PAM type: YTN; PAM sequence: TTT
aatgctttaaattcctttgt

SEQ ID NO: 378016 - DNA, 20 bp, Artificial Sequence
  Description of Artificial Sequence: Synthetic oligonucleotide
  Target: LAMA2; (+) strand; PAM type: YTN; PAM sequence: TTA
atgctttaaattcctttgtg

SEQ ID NO: 378017 - DNA, 20 bp, Artificial Sequence
  Description of Artificial Sequence: Synthetic oligonucleotide
  Target: LAMA2; (+) strand; PAM type: YTN; PAM sequence: CTT
taaattcctttgtgtacatt

SEQ ID NO: 378018 - DNA, 20 bp, Artificial Sequence
  Description of Artificial Sequence: Synthetic oligonucleotide
  Target: LAMA2; (+) strand; PAM type: YTN; PAM sequence: TTT
aaattcctttgtgtacatta

SEQ ID NO: 378019 - DNA, 20 bp, Artificial Sequence
  Description of Artificial Sequence: Synthetic oligonucleotide
  Target: LAMA2; (+) strand; PAM type: YTN; PAM sequence: TTA
aattcctttgtgtacattaa

SEQ ID NO: 378020 - DNA, 20 bp, Artificial Sequence
  Description of Artificial Sequence: Synthetic oligonucleotide
  Target: LAMA2; (+) strand; PAM type: YTN; PAM sequence: TTC
ctttgtgtacattaaaattt

SEQ ID NO: 378021 - DNA, 20 bp, Artificial Sequence
  Description of Artificial Sequence: Synthetic oligonucleotide
  Target: LAMA2; (+) strand; PAM type: YTN; PAM sequence: CTT
tgtgtacattaaaattttca

SEQ ID NO: 378022 - DNA, 20 bp, Artificial Sequence
  Description of Artificial Sequence: Synthetic oligonucleotide
  Target: LAMA2; (+) strand; PAM type: YTN; PAM sequence: TTT
gtgtacattaaaattttcat

SEQ ID NO: 378023 - DNA, 20 bp, Artificial Sequence
  Description of Artificial Sequence: Synthetic oligonucleotide
  Target: LAMA2; (+) strand; PAM type: YTN; PAM sequence: TTG
tgtacattaaaattttcatt

SEQ ID NO: 378024 - DNA, 20 bp, Artificial Sequence
  Description of Artificial Sequence: Synthetic oligonucleotide
  Target: LAMA2; (+) strand; PAM type: YTN; PAM sequence: TTA
aaattttcatttcatatcat

SEQ ID NO: 378025 - DNA, 20 bp, Artificial Sequence
  Description of Artificial Sequence: Synthetic oligonucleotide
  Target: LAMA2; (+) strand; PAM type: YTN; PAM sequence: TTT
tcatttcatatcatttttct

SEQ ID NO: 378026 - DNA, 20 bp, Artificial Sequence
  Description of Artificial Sequence: Synthetic oligonucleotide
  Target: LAMA2; (+) strand; PAM type: YTN; PAM sequence: TTT
catttcatatcatttttctt

SEQ ID NO: 378027 - DNA, 20 bp, Artificial Sequence
  Description of Artificial Sequence: Synthetic oligonucleotide
  Target: LAMA2; (+) strand; PAM type: YTN; PAM sequence: TTC
atttcatatcatttttcttc

SEQ ID NO: 378028 - DNA, 20 bp, Artificial Sequence
  Description of Artificial Sequence: Synthetic oligonucleotide
  Target: LAMA2; (+) strand; PAM type: YTN; PAM sequence: TTT
catatcatttttcttcttcc

SEQ ID NO: 378029 - DNA, 20 bp, Artificial Sequence
  Description of Artificial Sequence: Synthetic oligonucleotide
  Target: LAMA2; (+) strand; PAM type: YTN; PAM sequence: TTC
atatcatttttcttcttcca

SEQ ID NO: 378030 - DNA, 20 bp, Artificial Sequence
  Description of Artificial Sequence: Synthetic oligonucleotide
  Target: LAMA2; (+) strand; PAM type: YTN; PAM sequence: TTT
ttcttcttccattaactact

SEQ ID NO: 378031 - DNA, 20 bp, Artificial Sequence
  Description of Artificial Sequence: Synthetic oligonucleotide
  Target: LAMA2; (+) strand; PAM type: YTN; PAM sequence: TTT
tcttcttccattaactactt

SEQ ID NO: 378032 - DNA, 20 bp, Artificial Sequence
  Description of Artificial Sequence: Synthetic oligonucleotide
  Target: LAMA2; (+) strand; PAM type: YTN; PAM sequence: TTT
cttcttccattaactacttc

SEQ ID NO: 378033 - DNA, 20 bp, Artificial Sequence
  Description of Artificial Sequence: Synthetic oligonucleotide
  Target: LAMA2; (+) strand; PAM type: YTN; PAM sequence: TTC
ttcttccattaactacttcc

SEQ ID NO: 378034 - DNA, 20 bp, Artificial Sequence
  Description of Artificial Sequence: Synthetic oligonucleotide
  Target: LAMA2; (+) strand; PAM type: YTN; PAM sequence: CTT
cttccattaactacttccta

SEQ ID NO: 378035 - DNA, 20 bp, Artificial Sequence
  Description of Artificial Sequence: Synthetic oligonucleotide
  Target: LAMA2; (+) strand; PAM type: YTN; PAM sequence: TTC
ttccattaactacttcctaa

SEQ ID NO: 378036 - DNA, 20 bp, Artificial Sequence
  Description of Artificial Sequence: Synthetic oligonucleotide
  Target: LAMA2; (+) strand; PAM type: YTN; PAM sequence: CTT
ccattaactacttcctaatc

SEQ ID NO: 378037 - DNA, 20 bp, Artificial Sequence
  Description of Artificial Sequence: Synthetic oligonucleotide
  Target: LAMA2; (+) strand; PAM type: YTN; PAM sequence: TTC
cattaactacttcctaatct

SEQ ID NO: 378038 - DNA, 20 bp, Artificial Sequence
  Description of Artificial Sequence: Synthetic oligonucleotide
  Target: LAMA2; (+) strand; PAM type: YTN; PAM sequence: TTA
actacttcctaatctttatc

SEQ ID NO: 378039 - DNA, 20 bp, Artificial Sequence
  Description of Artificial Sequence: Synthetic oligonucleotide
  Target: LAMA2; (+) strand; PAM type: YTN; PAM sequence: CTA
cttcctaatctttatcattt

SEQ ID NO: 378040 - DNA, 20 bp, Artificial Sequence
  Description of Artificial Sequence: Synthetic oligonucleotide
  Target: LAMA2; (+) strand; PAM type: YTN; PAM sequence: CTT
cctaatctttatcattttat

SEQ ID NO: 378041 - DNA, 20 bp, Artificial Sequence
  Description of Artificial Sequence: Synthetic oligonucleotide
  Target: LAMA2; (+) strand; PAM type: YTN; PAM sequence: TTC
ctaatctttatcattttatt

SEQ ID NO: 378042 - DNA, 20 bp, Artificial Sequence
  Description of Artificial Sequence: Synthetic oligonucleotide
  Target: LAMA2; (+) strand; PAM type: YTN; PAM sequence: CTA
atctttatcattttattcct

SEQ ID NO: 378043 - DNA, 20 bp, Artificial Sequence
  Description of Artificial Sequence: Synthetic oligonucleotide
  Target: LAMA2; (+) strand; PAM type: YTN; PAM sequence: CTT
tatcattttattcctgttgt

SEQ ID NO: 378044 - DNA, 20 bp, Artificial Sequence
  Description of Artificial Sequence: Synthetic oligonucleotide
  Target: LAMA2; (+) strand; PAM type: YTN; PAM sequence: TTT
atcattttattcctgttgtt

SEQ ID NO: 378045 - DNA, 20 bp, Artificial Sequence
  Description of Artificial Sequence: Synthetic oligonucleotide
  Target: LAMA2; (+) strand; PAM type: YTN; PAM sequence: TTA
tcattttattcctgttgttt

SEQ ID NO: 378046 - DNA, 20 bp, Artificial Sequence
  Description of Artificial Sequence: Synthetic oligonucleotide
  Target: LAMA2; (+) strand; PAM type: YTN; PAM sequence: TTT
tattcctgttgtttcaggtc

SEQ ID NO: 378047 - DNA, 20 bp, Artificial Sequence
  Description of Artificial Sequence: Synthetic oligonucleotide
  Target: LAMA2; (+) strand; PAM type: YTN; PAM sequence: TTT
attcctgttgtttcaggtct

SEQ ID NO: 378048 - DNA, 20 bp, Artificial Sequence
  Description of Artificial Sequence: Synthetic oligonucleotide
  Target: LAMA2; (+) strand; PAM type: YTN; PAM sequence: TTA
ttcctgttgtttcaggtctg

SEQ ID NO: 378049 - DNA, 20 bp, Artificial Sequence
  Description of Artificial Sequence: Synthetic oligonucleotide
  Target: LAMA2; (+) strand; PAM type: YTN; PAM sequence: TTC
ctgttgtttcaggtctgctg

SEQ ID NO: 378050 - DNA, 20 bp, Artificial Sequence
  Description of Artificial Sequence: Synthetic oligonucleotide
  Target: LAMA2; (+) strand; PAM type: YTN; PAM sequence: CTG
ttgtttcaggtctgctgaca

SEQ ID NO: 378051 - DNA, 20 bp, Artificial Sequence
  Description of Artificial Sequence: Synthetic oligonucleotide
  Target: LAMA2; (+) strand; PAM type: YTN; PAM sequence: TTG
tttcaggtctgctgacaata

SEQ ID NO: 378052 - DNA, 20 bp, Artificial Sequence
  Description of Artificial Sequence: Synthetic oligonucleotide
  Target: LAMA2; (+) strand; PAM type: YTN; PAM sequence: TTT
caggtctgctgacaataatt

SEQ ID NO: 378053 - DNA, 20 bp, Artificial Sequence
  Description of Artificial Sequence: Synthetic oligonucleotide
  Target: LAMA2; (+) strand; PAM type: YTN; PAM sequence: TTC
aggtctgctgacaataattt

SEQ ID NO: 378054 - DNA, 20 bp, Artificial Sequence
  Description of Artificial Sequence: Synthetic oligonucleotide
  Target: LAMA2; (+) strand; PAM type: YTN; PAM sequence: CTG
ctgacaataattttttcctt

SEQ ID NO: 378055 - DNA, 20 bp, Artificial Sequence
  Description of Artificial Sequence: Synthetic oligonucleotide
  Target: LAMA2; (+) strand; PAM type: YTN; PAM sequence: CTG
acaataattttttccttttt

SEQ ID NO: 378056 - DNA, 20 bp, Artificial Sequence
  Description of Artificial Sequence: Synthetic oligonucleotide
  Target: LAMA2; (+) strand; PAM type: YTN; PAM sequence: TTT
tttccttttttttttttttt

SEQ ID NO: 378057 - DNA, 20 bp, Artificial Sequence
  Description of Artificial Sequence: Synthetic oligonucleotide
  Target: LAMA2; (+) strand; PAM type: YTN; PAM sequence: TTT
ttcctttttttttttttttt

SEQ ID NO: 378058 - DNA, 20 bp, Artificial Sequence
  Description of Artificial Sequence: Synthetic oligonucleotide
  Target: LAMA2; (+) strand; PAM type: YTN; PAM sequence: TTT
tccttttttttttttttttt

SEQ ID NO: 378059 - DNA, 20 bp, Artificial Sequence
  Description of Artificial Sequence: Synthetic oligonucleotide
  Target: LAMA2; (+) strand; PAM type: YTN; PAM sequence: TTT
cctttttttttttttttttt

SEQ ID NO: 378060 - DNA, 20 bp, Artificial Sequence
  Description of Artificial Sequence: Synthetic oligonucleotide
  Target: LAMA2; (+) strand; PAM type: YTN; PAM sequence: TTC
cttttttttttttttttttt

SEQ ID NO: 378061 - DNA, 20 bp, Artificial Sequence
  Description of Artificial Sequence: Synthetic oligonucleotide
  Target: LAMA2; (+) strand; PAM type: YTN; PAM sequence: CTT
ttttttttttttttttttgt

SEQ ID NO: 378062 - DNA, 20 bp, Artificial Sequence
  Description of Artificial Sequence: Synthetic oligonucleotide
  Target: LAMA2; (+) strand; PAM type: YTN; PAM sequence: TTT
tttttttttttttttttgtt

SEQ ID NO: 378063 - DNA, 20 bp, Artificial Sequence
  Description of Artificial Sequence: Synthetic oligonucleotide
  Target: LAMA2; (+) strand; PAM type: YTN; PAM sequence: TTT
ttttttttttttttttgttc

SEQ ID NO: 378064 - DNA, 20 bp, Artificial Sequence
  Description of Artificial Sequence: Synthetic oligonucleotide
  Target: LAMA2; (+) strand; PAM type: YTN; PAM sequence: TTT
tttttttttttttttgttcc

SEQ ID NO: 378065 - DNA, 20 bp, Artificial Sequence
  Description of Artificial Sequence: Synthetic oligonucleotide
  Target: LAMA2; (+) strand; PAM type: YTN; PAM sequence: TTT
ttttttttttttttgttcca

SEQ ID NO: 378066 - DNA, 20 bp, Artificial Sequence
  Description of Artificial Sequence: Synthetic oligonucleotide
  Target: LAMA2; (+) strand; PAM type: YTN; PAM sequence: TTT
tttttttttttttgttccag

SEQ ID NO: 378067 - DNA, 20 bp, Artificial Sequence
  Description of Artificial Sequence: Synthetic oligonucleotide
  Target: LAMA2; (+) strand; PAM type: YTN; PAM sequence: TTT
ttttttttttttgttccaga

SEQ ID NO: 378068 - DNA, 20 bp, Artificial Sequence
  Description of Artificial Sequence: Synthetic oligonucleotide
  Target: LAMA2; (+) strand; PAM type: YTN; PAM sequence: TTT
tttttttttttgttccagaa

SEQ ID NO: 378069 - DNA, 20 bp, Artificial Sequence
  Description of Artificial Sequence: Synthetic oligonucleotide
  Target: LAMA2; (+) strand; PAM type: YTN; PAM sequence: TTT
ttttttttttgttccagaaa

SEQ ID NO: 378070 - DNA, 20 bp, Artificial Sequence
  Description of Artificial Sequence: Synthetic oligonucleotide
  Target: LAMA2; (+) strand; PAM type: YTN; PAM sequence: TTT
tttttttttgttccagaaag

SEQ ID NO: 378071 - DNA, 20 bp, Artificial Sequence
  Description of Artificial Sequence: Synthetic oligonucleotide
  Target: LAMA2; (+) strand; PAM type: YTN; PAM sequence: TTT
ttttttttgttccagaaagg

SEQ ID NO: 378072 - DNA, 20 bp, Artificial Sequence
  Description of Artificial Sequence: Synthetic oligonucleotide
  Target: LAMA2; (+) strand; PAM type: YTN; PAM sequence: TTT
tttttttgttccagaaaggt

SEQ ID NO: 378073 - DNA, 20 bp, Artificial Sequence
  Description of Artificial Sequence: Synthetic oligonucleotide
  Target: LAMA2; (+) strand; PAM type: YTN; PAM sequence: TTT
ttttttgttccagaaaggtg

SEQ ID NO: 378074 - DNA, 20 bp, Artificial Sequence
  Description of Artificial Sequence: Synthetic oligonucleotide
  Target: LAMA2; (+) strand; PAM type: YTN; PAM sequence: TTT
tttttgttccagaaaggtgt

SEQ ID NO: 378075 - DNA, 20 bp, Artificial Sequence
  Description of Artificial Sequence: Synthetic oligonucleotide
  Target: LAMA2; (+) strand; PAM type: YTN; PAM sequence: TTT
ttttgttccagaaaggtgtt

SEQ ID NO: 378076 - DNA, 20 bp, Artificial Sequence
  Description of Artificial Sequence: Synthetic oligonucleotide
  Target: LAMA2; (+) strand; PAM type: YTN; PAM sequence: TTT
tttgttccagaaaggtgttt

SEQ ID NO: 378077 - DNA, 20 bp, Artificial Sequence
  Description of Artificial Sequence: Synthetic oligonucleotide
  Target: LAMA2; (+) strand; PAM type: YTN; PAM sequence: TTT
ttgttccagaaaggtgtttt

SEQ ID NO: 378078 - DNA, 20 bp, Artificial Sequence
  Description of Artificial Sequence: Synthetic oligonucleotide
  Target: LAMA2; (+) strand; PAM type: YTN; PAM sequence: TTT
tgttccagaaaggtgttttt

SEQ ID NO: 378079 - DNA, 20 bp, Artificial Sequence
  Description of Artificial Sequence: Synthetic oligonucleotide
  Target: LAMA2; (+) strand; PAM type: YTN; PAM sequence: TTT
gttccagaaaggtgtttttt

SEQ ID NO: 378080 - DNA, 20 bp, Artificial Sequence
  Description of Artificial Sequence: Synthetic oligonucleotide
  Target: LAMA2; (+) strand; PAM type: YTN; PAM sequence: TTG
ttccagaaaggtgttttttt

SEQ ID NO: 378081 - DNA, 20 bp, Artificial Sequence
  Description of Artificial Sequence: Synthetic oligonucleotide
  Target: LAMA2; (+) strand; PAM type: YTN; PAM sequence: TTC
cagaaaggtgtttttttttt

SEQ ID NO: 378082 - DNA, 20 bp, Artificial Sequence
  Description of Artificial Sequence: Synthetic oligonucleotide
  Target: LAMA2; (+) strand; PAM type: YTN; PAM sequence: TTT
tttttttttccgaagatgtt

SEQ ID NO: 378083 - DNA, 20 bp, Artificial Sequence
  Description of Artificial Sequence: Synthetic oligonucleotide
  Target: LAMA2; (+) strand; PAM type: YTN; PAM sequence: TTT
ttttttttccgaagatgttt

SEQ ID NO: 378084 - DNA, 20 bp, Artificial Sequence
  Description of Artificial Sequence: Synthetic oligonucleotide
  Target: LAMA2; (+) strand; PAM type: YTN; PAM sequence: TTT
tttttttccgaagatgtttt

SEQ ID NO: 378085 - DNA, 20 bp, Artificial Sequence
  Description of Artificial Sequence: Synthetic oligonucleotide
  Target: LAMA2; (+) strand; PAM type: YTN; PAM sequence: TTT
ttttttccgaagatgttttt

SEQ ID NO: 378086 - DNA, 20 bp, Artificial Sequence
  Description of Artificial Sequence: Synthetic oligonucleotide
  Target: LAMA2; (+) strand; PAM type: YTN; PAM sequence: TTT
tttttccgaagatgtttttg

SEQ ID NO: 378087 - DNA, 20 bp, Artificial Sequence
  Description of Artificial Sequence: Synthetic oligonucleotide
  Target: LAMA2; (+) strand; PAM type: YTN; PAM sequence: TTT
ttttccgaagatgtttttgc

SEQ ID NO: 378088 - DNA, 20 bp, Artificial Sequence
  Description of Artificial Sequence: Synthetic oligonucleotide
  Target: LAMA2; (+) strand; PAM type: YTN; PAM sequence: TTT
tttccgaagatgtttttgca

SEQ ID NO: 378089 - DNA, 20 bp, Artificial Sequence
  Description of Artificial Sequence: Synthetic oligonucleotide
  Target: LAMA2; (+) strand; PAM type: YTN; PAM sequence: TTT
ttccgaagatgtttttgcag

SEQ ID NO: 378090 - DNA, 20 bp, Artificial Sequence
  Description of Artificial Sequence: Synthetic oligonucleotide
  Target: LAMA2; (+) strand; PAM type: YTN; PAM sequence: TTT
tccgaagatgtttttgcaga

SEQ ID NO: 378091 - DNA, 20 bp, Artificial Sequence
  Description of Artificial Sequence: Synthetic oligonucleotide
  Target: LAMA2; (+) strand; PAM type: YTN; PAM sequence: TTT
ccgaagatgtttttgcagag

SEQ ID NO: 378092 - DNA, 20 bp, Artificial Sequence
  Description of Artificial Sequence: Synthetic oligonucleotide
  Target: LAMA2; (+) strand; PAM type: YTN; PAM sequence: TTC
cgaagatgtttttgcagagt

SEQ ID NO: 378093 - DNA, 20 bp, Artificial Sequence
  Description of Artificial Sequence: Synthetic oligonucleotide
  Target: LAMA2; (+) strand; PAM type: YTN; PAM sequence: TTT
ttgcagagtatgtaatccta

SEQ ID NO: 378094 - DNA, 20 bp, Artificial Sequence
  Description of Artificial Sequence: Synthetic oligonucleotide
  Target: LAMA2; (+) strand; PAM type: YTN; PAM sequence: TTT
tgcagagtatgtaatcctaa

SEQ ID NO: 378095 - DNA, 20 bp, Artificial Sequence
  Description of Artificial Sequence: Synthetic oligonucleotide
  Target: LAMA2; (+) strand; PAM type: YTN; PAM sequence: TTT
gcagagtatgtaatcctaaa

SEQ ID NO: 378096 - DNA, 20 bp, Artificial Sequence
  Description of Artificial Sequence: Synthetic oligonucleotide
  Target: LAMA2; (+) strand; PAM type: YTN; PAM sequence: TTG
cagagtatgtaatcctaaat

SEQ ID NO: 378097 - DNA, 20 bp, Artificial Sequence
  Description of Artificial Sequence: Synthetic oligonucleotide
  Target: LAMA2; (+) strand; PAM type: YTN; PAM sequence: CTA
aatactggtttgcagcaatt

SEQ ID NO: 378098 - DNA, 20 bp, Artificial Sequence
  Description of Artificial Sequence: Synthetic oligonucleotide
  Target: LAMA2; (+) strand; PAM type: YTN; PAM sequence: CTG
gtttgcagcaatttaattat

SEQ ID NO: 378099 - DNA, 20 bp, Artificial Sequence
  Description of Artificial Sequence: Synthetic oligonucleotide
  Target: LAMA2; (+) strand; PAM type: YTN; PAM sequence: TTT
gcagcaatttaattatgctt

SEQ ID NO: 378100 - DNA, 20 bp, Artificial Sequence
  Description of Artificial Sequence: Synthetic oligonucleotide
  Target: LAMA2; (+) strand; PAM type: YTN; PAM sequence: TTG
cagcaatttaattatgcttt

SEQ ID NO: 378101 - DNA, 20 bp, Artificial Sequence
  Description of Artificial Sequence: Synthetic oligonucleotide
  Target: LAMA2; (+) strand; PAM type: YTN; PAM sequence: TTT
aattatgctttttgttttct

SEQ ID NO: 378102 - DNA, 20 bp, Artificial Sequence
  Description of Artificial Sequence: Synthetic oligonucleotide
  Target: LAMA2; (+) strand; PAM type: YTN; PAM sequence: TTA
attatgctttttgttttctt

SEQ ID NO: 378103 - DNA, 20 bp, Artificial Sequence
  Description of Artificial Sequence: Synthetic oligonucleotide
  Target: LAMA2; (+) strand; PAM type: YTN; PAM sequence: TTA
tgctttttgttttctttttg

SEQ ID NO: 378104 - DNA, 20 bp, Artificial Sequence
  Description of Artificial Sequence: Synthetic oligonucleotide
  Target: LAMA2; (+) strand; PAM type: YTN; PAM sequence: CTT
tttgttttctttttgtgtgt

SEQ ID NO: 378105 - DNA, 20 bp, Artificial Sequence
  Description of Artificial Sequence: Synthetic oligonucleotide
  Target: LAMA2; (+) strand; PAM type: YTN; PAM sequence: TTT
ttgttttctttttgtgtgtt

SEQ ID NO: 378106 - DNA, 20 bp, Artificial Sequence
  Description of Artificial Sequence: Synthetic oligonucleotide
  Target: LAMA2; (+) strand; PAM type: YTN; PAM sequence: TTT
tgttttctttttgtgtgttt

SEQ ID NO: 378107 - DNA, 20 bp, Artificial Sequence
  Description of Artificial Sequence: Synthetic oligonucleotide
  Target: LAMA2; (+) strand; PAM type: YTN; PAM sequence: TTT
gttttctttttgtgtgttta

SEQ ID NO: 378108 - DNA, 20 bp, Artificial Sequence
  Description of Artificial Sequence: Synthetic oligonucleotide
  Target: LAMA2; (+) strand; PAM type: YTN; PAM sequence: TTG
ttttctttttgtgtgtttaa

SEQ ID NO: 378109 - DNA, 20 bp, Artificial Sequence
  Description of Artificial Sequence: Synthetic oligonucleotide
  Target: LAMA2; (+) strand; PAM type: YTN; PAM sequence: TTT
tctttttgtgtgtttaataa

SEQ ID NO: 378110 - DNA, 20 bp, Artificial Sequence
  Description of Artificial Sequence: Synthetic oligonucleotide
  Target: LAMA2; (+) strand; PAM type: YTN; PAM sequence: TTT
ctttttgtgtgtttaataat

SEQ ID NO: 378111 - DNA, 20 bp, Artificial Sequence
  Description of Artificial Sequence: Synthetic oligonucleotide
  Target: LAMA2; (+) strand; PAM type: YTN; PAM sequence: TTC
tttttgtgtgtttaataatt

SEQ ID NO: 378112 - DNA, 20 bp, Artificial Sequence
  Description of Artificial Sequence: Synthetic oligonucleotide
  Target: LAMA2; (+) strand; PAM type: YTN; PAM sequence: CTT
tttgtgtgtttaataattat

SEQ ID NO: 378113 - DNA, 20 bp, Artificial Sequence
  Description of Artificial Sequence: Synthetic oligonucleotide
  Target: LAMA2; (+) strand; PAM type: YTN; PAM sequence: TTT
ttgtgtgtttaataattatt

SEQ ID NO: 378114 - DNA, 20 bp, Artificial Sequence
  Description of Artificial Sequence: Synthetic oligonucleotide
  Target: LAMA2; (+) strand; PAM type: YTN; PAM sequence: TTT
tgtgtgtttaataattattt

SEQ ID NO: 378115 - DNA, 20 bp, Artificial Sequence
  Description of Artificial Sequence: Synthetic oligonucleotide
  Target: LAMA2; (+) strand; PAM type: YTN; PAM sequence: TTT
gtgtgtttaataattatttt

SEQ ID NO: 378116 - DNA, 20 bp, Artificial Sequence
  Description of Artificial Sequence: Synthetic oligonucleotide
  Target: LAMA2; (+) strand; PAM type: YTN; PAM sequence: TTG
tgtgtttaataattattttt

SEQ ID NO: 378117 - DNA, 20 bp, Artificial Sequence
  Description of Artificial Sequence: Synthetic oligonucleotide
  Target: LAMA2; (+) strand; PAM type: YTN; PAM sequence: TTT
aataattattttttcatggg

SEQ ID NO: 378118 - DNA, 20 bp, Artificial Sequence
  Description of Artificial Sequence: Synthetic oligonucleotide
  Target: LAMA2; (+) strand; PAM type: YTN; PAM sequence: TTA
ataattattttttcatggga

SEQ ID NO: 378119 - DNA, 20 bp, Artificial Sequence
  Description of Artificial Sequence: Synthetic oligonucleotide
  Target: LAMA2; (+) strand; PAM type: YTN; PAM sequence: TTA
ttttttcatgggattagtta

SEQ ID NO: 378120 - DNA, 20 bp, Artificial Sequence
  Description of Artificial Sequence: Synthetic oligonucleotide
  Target: LAMA2; (+) strand; PAM type: YTN; PAM sequence: TTT
tttcatgggattagttagat

SEQ ID NO: 378121 - DNA, 20 bp, Artificial Sequence
  Description of Artificial Sequence: Synthetic oligonucleotide
  Target: LAMA2; (+) strand; PAM type: YTN; PAM sequence: TTT
ttcatgggattagttagatc

SEQ ID NO: 378122 - DNA, 20 bp, Artificial Sequence
  Description of Artificial Sequence: Synthetic oligonucleotide
  Target: LAMA2; (+) strand; PAM type: YTN; PAM sequence: TTT
tcatgggattagttagatct

SEQ ID NO: 378123 - DNA, 20 bp, Artificial Sequence
  Description of Artificial Sequence: Synthetic oligonucleotide
  Target: LAMA2; (+) strand; PAM type: YTN; PAM sequence: TTT
catgggattagttagatctg

SEQ ID NO: 378124 - DNA, 20 bp, Artificial Sequence
  Description of Artificial Sequence: Synthetic oligonucleotide
  Target: LAMA2; (+) strand; PAM type: YTN; PAM sequence: TTC
atgggattagttagatctgt

SEQ ID NO: 378125 - DNA, 20 bp, Artificial Sequence
  Description of Artificial Sequence: Synthetic oligonucleotide
  Target: LAMA2; (+) strand; PAM type: YTN; PAM sequence: TTA
gttagatctgttggccctgt

SEQ ID NO: 378126 - DNA, 20 bp, Artificial Sequence
  Description of Artificial Sequence: Synthetic oligonucleotide
  Target: LAMA2; (+) strand; PAM type: YTN; PAM sequence: TTA
gatctgttggccctgtagga

SEQ ID NO: 378127 - DNA, 20 bp, Artificial Sequence
  Description of Artificial Sequence: Synthetic oligonucleotide
  Target: LAMA2; (+) strand; PAM type: YTN; PAM sequence: CTG
ttggccctgtaggattatag

SEQ ID NO: 378128 - DNA, 20 bp, Artificial Sequence
  Description of Artificial Sequence: Synthetic oligonucleotide
  Target: LAMA2; (+) strand; PAM type: YTN; PAM sequence: TTG
gccctgtaggattatagttt

SEQ ID NO: 378129 - DNA, 20 bp, Artificial Sequence
  Description of Artificial Sequence: Synthetic oligonucleotide
  Target: LAMA2; (+) strand; PAM type: YTN; PAM sequence: CTG
taggattatagttttcatca

SEQ ID NO: 378130 - DNA, 20 bp, Artificial Sequence
  Description of Artificial Sequence: Synthetic oligonucleotide
  Target: LAMA2; (+) strand; PAM type: YTN; PAM sequence: TTA
tagttttcatcaaatttgga

SEQ ID NO: 378131 - DNA, 20 bp, Artificial Sequence
  Description of Artificial Sequence: Synthetic oligonucleotide
  Target: LAMA2; (+) strand; PAM type: YTN; PAM sequence: TTT
tcatcaaatttggaaatgaa

SEQ ID NO: 378132 - DNA, 20 bp, Artificial Sequence
  Description of Artificial Sequence: Synthetic oligonucleotide
  Target: LAMA2; (+) strand; PAM type: YTN; PAM sequence: TTT
catcaaatttggaaatgaaa

SEQ ID NO: 378133 - DNA, 20 bp, Artificial Sequence
  Description of Artificial Sequence: Synthetic oligonucleotide
  Target: LAMA2; (+) strand; PAM type: YTN; PAM sequence: TTC
atcaaatttggaaatgaaag

SEQ ID NO: 378134 - DNA, 20 bp, Artificial Sequence
  Description of Artificial Sequence: Synthetic oligonucleotide
  Target: LAMA2; (+) strand; PAM type: YTN; PAM sequence: TTT
ggaaatgaaagttgtcagcc

SEQ ID NO: 378135 - DNA, 20 bp, Artificial Sequence
  Description of Artificial Sequence: Synthetic oligonucleotide
  Target: LAMA2; (+) strand; PAM type: YTN; PAM sequence: TTG
gaaatgaaagttgtcagcca

SEQ ID NO: 378136 - DNA, 20 bp, Artificial Sequence
  Description of Artificial Sequence: Synthetic oligonucleotide
  Target: LAMA2; (+) strand; PAM type: YTN; PAM sequence: TTG
tcagccattatatctttaaa

SEQ ID NO: 378137 - DNA, 20 bp, Artificial Sequence
  Description of Artificial Sequence: Synthetic oligonucleotide
  Target: LAMA2; (+) strand; PAM type: YTN; PAM sequence: TTA
tatctttaaatatttttttg

SEQ ID NO: 378138 - DNA, 20 bp, Artificial Sequence
  Description of Artificial Sequence: Synthetic oligonucleotide
  Target: LAMA2; (+) strand; PAM type: YTN; PAM sequence: CTT
taaatatttttttgttcttc

SEQ ID NO: 378139 - DNA, 20 bp, Artificial Sequence
  Description of Artificial Sequence: Synthetic oligonucleotide
  Target: LAMA2; (+) strand; PAM type: YTN; PAM sequence: TTT
aaatatttttttgttcttca

SEQ ID NO: 378140 - DNA, 20 bp, Artificial Sequence
  Description of Artificial Sequence: Synthetic oligonucleotide
  Target: LAMA2; (+) strand; PAM type: YTN; PAM sequence: TTA
aatatttttttgttcttcat

SEQ ID NO: 378141 - DNA, 20 bp, Artificial Sequence
  Description of Artificial Sequence: Synthetic oligonucleotide
  Target: LAMA2; (+) strand; PAM type: YTN; PAM sequence: TTT
ttttgttcttcattcttatt

SEQ ID NO: 378142 - DNA, 20 bp, Artificial Sequence
  Description of Artificial Sequence: Synthetic oligonucleotide
  Target: LAMA2; (+) strand; PAM type: YTN; PAM sequence: TTT
tttgttcttcattcttattg

SEQ ID NO: 378143 - DNA, 20 bp, Artificial Sequence
  Description of Artificial Sequence: Synthetic oligonucleotide
  Target: LAMA2; (+) strand; PAM type: YTN; PAM sequence: TTT
ttgttcttcattcttattgt

SEQ ID NO: 378144 - DNA, 20 bp, Artificial Sequence
  Description of Artificial Sequence: Synthetic oligonucleotide
  Target: LAMA2; (+) strand; PAM type: YTN; PAM sequence: TTT
tgttcttcattcttattgtc

SEQ ID NO: 378145 - DNA, 20 bp, Artificial Sequence
  Description of Artificial Sequence: Synthetic oligonucleotide
  Target: LAMA2; (+) strand; PAM type: YTN; PAM sequence: TTT
gttcttcattcttattgtct

SEQ ID NO: 378146 - DNA, 20 bp, Artificial Sequence
  Description of Artificial Sequence: Synthetic oligonucleotide
  Target: LAMA2; (+) strand; PAM type: YTN; PAM sequence: TTG
ttcttcattcttattgtctc

SEQ ID NO: 378147 - DNA, 20 bp, Artificial Sequence
  Description of Artificial Sequence: Synthetic oligonucleotide
  Target: LAMA2; (+) strand; PAM type: YTN; PAM sequence: TTC
ttcattcttattgtctcttt

SEQ ID NO: 378148 - DNA, 20 bp, Artificial Sequence
  Description of Artificial Sequence: Synthetic oligonucleotide
  Target: LAMA2; (+) strand; PAM type: YTN; PAM sequence: CTT
cattcttattgtctctttct

SEQ ID NO: 378149 - DNA, 20 bp, Artificial Sequence
  Description of Artificial Sequence: Synthetic oligonucleotide
  Target: LAMA2; (+) strand; PAM type: YTN; PAM sequence: TTC
attcttattgtctctttctg

SEQ ID NO: 378150 - DNA, 20 bp, Artificial Sequence
  Description of Artificial Sequence: Synthetic oligonucleotide
  Target: LAMA2; (+) strand; PAM type: YTN; PAM sequence: TTC
ttattgtctctttctggaaa

SEQ ID NO: 378151 - DNA, 20 bp, Artificial Sequence
  Description of Artificial Sequence: Synthetic oligonucleotide
  Target: LAMA2; (+) strand; PAM type: YTN; PAM sequence: CTT
attgtctctttctggaaatc

SEQ ID NO: 378152 - DNA, 20 bp, Artificial Sequence
  Description of Artificial Sequence: Synthetic oligonucleotide
  Target: LAMA2; (+) strand; PAM type: YTN; PAM sequence: TTA
ttgtctctttctggaaatca

SEQ ID NO: 378153 - DNA, 20 bp, Artificial Sequence
  Description of Artificial Sequence: Synthetic oligonucleotide
  Target: LAMA2; (+) strand; PAM type: YTN; PAM sequence: TTG
tctctttctggaaatcattt

SEQ ID NO: 378154 - DNA, 20 bp, Artificial Sequence
  Description of Artificial Sequence: Synthetic oligonucleotide
  Target: LAMA2; (+) strand; PAM type: YTN; PAM sequence: CTC
tttctggaaatcattttttg

SEQ ID NO: 378155 - DNA, 20 bp, Artificial Sequence
  Description of Artificial Sequence: Synthetic oligonucleotide
  Target: LAMA2; (+) strand; PAM type: YTN; PAM sequence: CTT
tctggaaatcattttttgta

SEQ ID NO: 378156 - DNA, 20 bp, Artificial Sequence
  Description of Artificial Sequence: Synthetic oligonucleotide
  Target: LAMA2; (+) strand; PAM type: YTN; PAM sequence: TTT
ctggaaatcattttttgtat

SEQ ID NO: 378157 - DNA, 20 bp, Artificial Sequence
  Description of Artificial Sequence: Synthetic oligonucleotide
  Target: LAMA2; (+) strand; PAM type: YTN; PAM sequence: TTC
tggaaatcattttttgtatg

SEQ ID NO: 378158 - DNA, 20 bp, Artificial Sequence
  Description of Artificial Sequence: Synthetic oligonucleotide
  Target: LAMA2; (+) strand; PAM type: YTN; PAM sequence: CTG
gaaatcattttttgtatgtt

SEQ ID NO: 378159 - DNA, 20 bp, Artificial Sequence
  Description of Artificial Sequence: Synthetic oligonucleotide
  Target: LAMA2; (+) strand; PAM type: YTN; PAM sequence: TTT
tttgtatgttgggccaattg

SEQ ID NO: 378160 - DNA, 20 bp, Artificial Sequence
  Description of Artificial Sequence: Synthetic oligonucleotide
  Target: LAMA2; (+) strand; PAM type: YTN; PAM sequence: TTT
ttgtatgttgggccaattga

SEQ ID NO: 378161 - DNA, 20 bp, Artificial Sequence
  Description of Artificial Sequence: Synthetic oligonucleotide
  Target: LAMA2; (+) strand; PAM type: YTN; PAM sequence: TTT
tgtatgttgggccaattgat

SEQ ID NO: 378162 - DNA, 20 bp, Artificial Sequence
  Description of Artificial Sequence: Synthetic oligonucleotide
  Target: LAMA2; (+) strand; PAM type: YTN; PAM sequence: TTT
gtatgttgggccaattgata

SEQ ID NO: 378163 - DNA, 20 bp, Artificial Sequence
  Description of Artificial Sequence: Synthetic oligonucleotide
  Target: LAMA2; (+) strand; PAM type: YTN; PAM sequence: TTG
tatgttgggccaattgatat

SEQ ID NO: 378164 - DNA, 20 bp, Artificial Sequence
  Description of Artificial Sequence: Synthetic oligonucleotide
  Target: LAMA2; (+) strand; PAM type: YTN; PAM sequence: TTG
ggccaattgatattttcccc

SEQ ID NO: 378165 - DNA, 20 bp, Artificial Sequence
  Description of Artificial Sequence: Synthetic oligonucleotide
  Target: LAMA2; (+) strand; PAM type: YTN; PAM sequence: TTG
atattttcccccatctcact

SEQ ID NO: 378166 - DNA, 20 bp, Artificial Sequence
  Description of Artificial Sequence: Synthetic oligonucleotide
  Target: LAMA2; (+) strand; PAM type: YTN; PAM sequence: TTT
tcccccatctcactgaggtt

SEQ ID NO: 378167 - DNA, 20 bp, Artificial Sequence
  Description of Artificial Sequence: Synthetic oligonucleotide
  Target: LAMA2; (+) strand; PAM type: YTN; PAM sequence: TTT
cccccatctcactgaggttc

SEQ ID NO: 378168 - DNA, 20 bp, Artificial Sequence
  Description of Artificial Sequence: Synthetic oligonucleotide
  Target: LAMA2; (+) strand; PAM type: YTN; PAM sequence: TTC
ccccatctcactgaggttct

SEQ ID NO: 378169 - DNA, 20 bp, Artificial Sequence
  Description of Artificial Sequence: Synthetic oligonucleotide
  Target: LAMA2; (+) strand; PAM type: YTN; PAM sequence: CTC
actgaggttcttattttttt

SEQ ID NO: 378170 - DNA, 20 bp, Artificial Sequence
  Description of Artificial Sequence: Synthetic oligonucleotide
  Target: LAMA2; (+) strand; PAM type: YTN; PAM sequence: CTG
aggttcttatttttttaatt

SEQ ID NO: 378171 - DNA, 20 bp, Artificial Sequence
  Description of Artificial Sequence: Synthetic oligonucleotide
  Target: LAMA2; (+) strand; PAM type: YTN; PAM sequence: TTC
ttatttttttaattattttt

SEQ ID NO: 378172 - DNA, 20 bp, Artificial Sequence
  Description of Artificial Sequence: Synthetic oligonucleotide
  Target: LAMA2; (+) strand; PAM type: YTN; PAM sequence: CTT
atttttttaattatttttgt

SEQ ID NO: 378173 - DNA, 20 bp, Artificial Sequence
  Description of Artificial Sequence: Synthetic oligonucleotide
  Target: LAMA2; (+) strand; PAM type: YTN; PAM sequence: TTA
tttttttaattatttttgta

SEQ ID NO: 378174 - DNA, 20 bp, Artificial Sequence
  Description of Artificial Sequence: Synthetic oligonucleotide
  Target: LAMA2; (+) strand; PAM type: YTN; PAM sequence: TTT
ttttaattatttttgtatct

SEQ ID NO: 378175 - DNA, 20 bp, Artificial Sequence
  Description of Artificial Sequence: Synthetic oligonucleotide
  Target: LAMA2; (+) strand; PAM type: YTN; PAM sequence: TTT
tttaattatttttgtatctg

SEQ ID NO: 378176 - DNA, 20 bp, Artificial Sequence
  Description of Artificial Sequence: Synthetic oligonucleotide
  Target: LAMA2; (+) strand; PAM type: YTN; PAM sequence: TTT
ttaattatttttgtatctgt

SEQ ID NO: 378177 - DNA, 20 bp, Artificial Sequence
  Description of Artificial Sequence: Synthetic oligonucleotide
  Target: LAMA2; (+) strand; PAM type: YTN; PAM sequence: TTT
taattatttttgtatctgta

SEQ ID NO: 378178 - DNA, 20 bp, Artificial Sequence
  Description of Artificial Sequence: Synthetic oligonucleotide
  Target: LAMA2; (+) strand; PAM type: YTN; PAM sequence: TTT
aattatttttgtatctgtat

SEQ ID NO: 378179 - DNA, 20 bp, Artificial Sequence
  Description of Artificial Sequence: Synthetic oligonucleotide
  Target: LAMA2; (+) strand; PAM type: YTN; PAM sequence: TTA
attatttttgtatctgtatt

SEQ ID NO: 378180 - DNA, 20 bp, Artificial Sequence
  Description of Artificial Sequence: Synthetic oligonucleotide
  Target: LAMA2; (+) strand; PAM type: YTN; PAM sequence: TTA
tttttgtatctgtatttttt

SEQ ID NO: 378181 - DNA, 20 bp, Artificial Sequence
  Description of Artificial Sequence: Synthetic oligonucleotide
  Target: LAMA2; (+) strand; PAM type: YTN; PAM sequence: TTT
ttgtatctgtattttttatt

SEQ ID NO: 378182 - DNA, 20 bp, Artificial Sequence
  Description of Artificial Sequence: Synthetic oligonucleotide
  Target: LAMA2; (+) strand; PAM type: YTN; PAM sequence: TTT
tgtatctgtattttttattt

SEQ ID NO: 378183 - DNA, 20 bp, Artificial Sequence
  Description of Artificial Sequence: Synthetic oligonucleotide
  Target: LAMA2; (+) strand; PAM type: YTN; PAM sequence: TTT
gtatctgtattttttatttc

SEQ ID NO: 378184 - DNA, 20 bp, Artificial Sequence
  Description of Artificial Sequence: Synthetic oligonucleotide
  Target: LAMA2; (+) strand; PAM type: YTN; PAM sequence: TTG
tatctgtattttttatttct

SEQ ID NO: 378185 - DNA, 20 bp, Artificial Sequence
  Description of Artificial Sequence: Synthetic oligonucleotide
  Target: LAMA2; (+) strand; PAM type: YTN; PAM sequence: CTG
tattttttatttctgatagt

SEQ ID NO: 378186 - DNA, 20 bp, Artificial Sequence
  Description of Artificial Sequence: Synthetic oligonucleotide
  Target: LAMA2; (+) strand; PAM type: YTN; PAM sequence: TTT
tttatttctgatagtttcta

SEQ ID NO: 378187 - DNA, 20 bp, Artificial Sequence
  Description of Artificial Sequence: Synthetic oligonucleotide
  Target: LAMA2; (+) strand; PAM type: YTN; PAM sequence: TTT
ttatttctgatagtttctat

SEQ ID NO: 378188 - DNA, 20 bp, Artificial Sequence
  Description of Artificial Sequence: Synthetic oligonucleotide
  Target: LAMA2; (+) strand; PAM type: YTN; PAM sequence: TTT
tatttctgatagtttctatt

SEQ ID NO: 378189 - DNA, 20 bp, Artificial Sequence
  Description of Artificial Sequence: Synthetic oligonucleotide
  Target: LAMA2; (+) strand; PAM type: YTN; PAM sequence: TTT
atttctgatagtttctattg

SEQ ID NO: 378190 - DNA, 20 bp, Artificial Sequence
  Description of Artificial Sequence: Synthetic oligonucleotide
  Target: LAMA2; (+) strand; PAM type: YTN; PAM sequence: TTA
tttctgatagtttctattgt

SEQ ID NO: 378191 - DNA, 20 bp, Artificial Sequence
  Description of Artificial Sequence: Synthetic oligonucleotide
  Target: LAMA2; (+) strand; PAM type: YTN; PAM sequence: TTT
ctgatagtttctattgttaa

SEQ ID NO: 378192 - DNA, 20 bp, Artificial Sequence
  Description of Artificial Sequence: Synthetic oligonucleotide
  Target: LAMA2; (+) strand; PAM type: YTN; PAM sequence: TTC
tgatagtttctattgttaag

SEQ ID NO: 378193 - DNA, 20 bp, Artificial Sequence
  Description of Artificial Sequence: Synthetic oligonucleotide
  Target: LAMA2; (+) strand; PAM type: YTN; PAM sequence: CTG
atagtttctattgttaagtg

SEQ ID NO: 378194 - DNA, 20 bp, Artificial Sequence
  Description of Artificial Sequence: Synthetic oligonucleotide
  Target: LAMA2; (+) strand; PAM type: YTN; PAM sequence: TTT
ctattgttaagtgtccaaag

SEQ ID NO: 378195 - DNA, 20 bp, Artificial Sequence
  Description of Artificial Sequence: Synthetic oligonucleotide
  Target: LAMA2; (+) strand; PAM type: YTN; PAM sequence: TTC
tattgttaagtgtccaaagt

SEQ ID NO: 378196 - DNA, 20 bp, Artificial Sequence
  Description of Artificial Sequence: Synthetic oligonucleotide
  Target: LAMA2; (+) strand; PAM type: YTN; PAM sequence: CTA
ttgttaagtgtccaaagtca

SEQ ID NO: 378197 - DNA, 20 bp, Artificial Sequence
  Description of Artificial Sequence: Synthetic oligonucleotide
  Target: LAMA2; (+) strand; PAM type: YTN; PAM sequence: TTG
ttaagtgtccaaagtcactg

SEQ ID NO: 378198 - DNA, 20 bp, Artificial Sequence
  Description of Artificial Sequence: Synthetic oligonucleotide
  Target: LAMA2; (+) strand; PAM type: YTN; PAM sequence: TTA
agtgtccaaagtcactgatt

SEQ ID NO: 378199 - DNA, 20 bp, Artificial Sequence
  Description of Artificial Sequence: Synthetic oligonucleotide
  Target: LAMA2; (+) strand; PAM type: YTN; PAM sequence: CTG
attttttaatgcagcctaac

SEQ ID NO: 378200 - DNA, 20 bp, Artificial Sequence
  Description of Artificial Sequence: Synthetic oligonucleotide
  Target: LAMA2; (+) strand; PAM type: YTN; PAM sequence: TTT
tttaatgcagcctaacctgt

SEQ ID NO: 378201 - DNA, 20 bp, Artificial Sequence
  Description of Artificial Sequence: Synthetic oligonucleotide
  Target: LAMA2; (+) strand; PAM type: YTN; PAM sequence: TTT
ttaatgcagcctaacctgtt

SEQ ID NO: 378202 - DNA, 20 bp, Artificial Sequence
  Description of Artificial Sequence: Synthetic oligonucleotide
  Target: LAMA2; (+) strand; PAM type: YTN; PAM sequence: TTT
taatgcagcctaacctgttt

SEQ ID NO: 378203 - DNA, 20 bp, Artificial Sequence
  Description of Artificial Sequence: Synthetic oligonucleotide
  Target: LAMA2; (+) strand; PAM type: YTN; PAM sequence: TTT
aatgcagcctaacctgtttt

SEQ ID NO: 378204 - DNA, 20 bp, Artificial Sequence
  Description of Artificial Sequence: Synthetic oligonucleotide
  Target: LAMA2; (+) strand; PAM type: YTN; PAM sequence: TTA
atgcagcctaacctgttttt

SEQ ID NO: 378205 - DNA, 20 bp, Artificial Sequence
  Description of Artificial Sequence: Synthetic oligonucleotide
  Target: LAMA2; (+) strand; PAM type: YTN; PAM sequence: CTA
acctgtttttaatccaattg

SEQ ID NO: 378206 - DNA, 20 bp, Artificial Sequence
  Description of Artificial Sequence: Synthetic oligonucleotide
  Target: LAMA2; (+) strand; PAM type: YTN; PAM sequence: CTG
tttttaatccaattgagtct

SEQ ID NO: 378207 - DNA, 20 bp, Artificial Sequence
  Description of Artificial Sequence: Synthetic oligonucleotide
  Target: LAMA2; (+) strand; PAM type: YTN; PAM sequence: TTT
ttaatccaattgagtctatt

SEQ ID NO: 378208 - DNA, 20 bp, Artificial Sequence
  Description of Artificial Sequence: Synthetic oligonucleotide
  Target: LAMA2; (+) strand; PAM type: YTN; PAM sequence: TTT
taatccaattgagtctattt

SEQ ID NO: 378209 - DNA, 20 bp, Artificial Sequence
  Description of Artificial Sequence: Synthetic oligonucleotide
  Target: LAMA2; (+) strand; PAM type: YTN; PAM sequence: TTT
aatccaattgagtctatttt

SEQ ID NO: 378210 - DNA, 20 bp, Artificial Sequence
  Description of Artificial Sequence: Synthetic oligonucleotide
  Target: LAMA2; (+) strand; PAM type: YTN; PAM sequence: TTA
atccaattgagtctattttt

SEQ ID NO: 378211 - DNA, 20 bp, Artificial Sequence
  Description of Artificial Sequence: Synthetic oligonucleotide
  Target: LAMA2; (+) strand; PAM type: YTN; PAM sequence: TTG
agtctattttttattttaaa

SEQ ID NO: 378212 - DNA, 20 bp, Artificial Sequence
  Description of Artificial Sequence: Synthetic oligonucleotide
  Target: LAMA2; (+) strand; PAM type: YTN; PAM sequence: CTA
ttttttattttaaacattgt

SEQ ID NO: 378213 - DNA, 20 bp, Artificial Sequence
  Description of Artificial Sequence: Synthetic oligonucleotide
  Target: LAMA2; (+) strand; PAM type: YTN; PAM sequence: TTT
tttattttaaacattgtatt

SEQ ID NO: 378214 - DNA, 20 bp, Artificial Sequence
  Description of Artificial Sequence: Synthetic oligonucleotide
  Target: LAMA2; (+) strand; PAM type: YTN; PAM sequence: TTT
ttattttaaacattgtattt

SEQ ID NO: 378215 - DNA, 20 bp, Artificial Sequence
  Description of Artificial Sequence: Synthetic oligonucleotide
  Target: LAMA2; (+) strand; PAM type: YTN; PAM sequence: TTT
tattttaaacattgtatttt

SEQ ID NO: 378216 - DNA, 20 bp, Artificial Sequence
  Description of Artificial Sequence: Synthetic oligonucleotide
  Target: LAMA2; (+) strand; PAM type: YTN; PAM sequence: TTT
attttaaacattgtattttt

SEQ ID NO: 378217 - DNA, 20 bp, Artificial Sequence
  Description of Artificial Sequence: Synthetic oligonucleotide
  Target: LAMA2; (+) strand; PAM type: YTN; PAM sequence: TTA
ttttaaacattgtatttttt

SEQ ID NO: 378218 - DNA, 20 bp, Artificial Sequence
  Description of Artificial Sequence: Synthetic oligonucleotide
  Target: LAMA2; (+) strand; PAM type: YTN; PAM sequence: TTT
taaacattgtatttttttat

SEQ ID NO: 378219 - DNA, 20 bp, Artificial Sequence
  Description of Artificial Sequence: Synthetic oligonucleotide
  Target: LAMA2; (+) strand; PAM type: YTN; PAM sequence: TTT
aaacattgtatttttttatc

SEQ ID NO: 378220 - DNA, 20 bp, Artificial Sequence
  Description of Artificial Sequence: Synthetic oligonucleotide
  Target: LAMA2; (+) strand; PAM type: YTN; PAM sequence: TTA
aacattgtatttttttatct

SEQ ID NO: 378221 - DNA, 20 bp, Artificial Sequence
  Description of Artificial Sequence: Synthetic oligonucleotide
  Target: LAMA2; (+) strand; PAM type: YTN; PAM sequence: TTG
tatttttttatcttttaaat

SEQ ID NO: 378222 - DNA, 20 bp, Artificial Sequence
  Description of Artificial Sequence: Synthetic oligonucleotide
  Target: LAMA2; (+) strand; PAM type: YTN; PAM sequence: TTT
ttttatcttttaaatttcct

SEQ ID NO: 378223 - DNA, 20 bp, Artificial Sequence
  Description of Artificial Sequence: Synthetic oligonucleotide
  Target: LAMA2; (+) strand; PAM type: YTN; PAM sequence: TTT
tttatcttttaaatttcctt

SEQ ID NO: 378224 - DNA, 20 bp, Artificial Sequence
  Description of Artificial Sequence: Synthetic oligonucleotide
  Target: LAMA2; (+) strand; PAM type: YTN; PAM sequence: TTT
ttatcttttaaatttccttt

SEQ ID NO: 378225 - DNA, 20 bp, Artificial Sequence
  Description of Artificial Sequence: Synthetic oligonucleotide
  Target: LAMA2; (+) strand; PAM type: YTN; PAM sequence: TTT
tatcttttaaatttcctttt

SEQ ID NO: 378226 - DNA, 20 bp, Artificial Sequence
  Description of Artificial Sequence: Synthetic oligonucleotide
  Target: LAMA2; (+) strand; PAM type: YTN; PAM sequence: TTT
atcttttaaatttccttttg

SEQ ID NO: 378227 - DNA, 20 bp, Artificial Sequence
  Description of Artificial Sequence: Synthetic oligonucleotide
  Target: LAMA2; (+) strand; PAM type: YTN; PAM sequence: TTA
tcttttaaatttccttttgg

SEQ ID NO: 378228 - DNA, 20 bp, Artificial Sequence
  Description of Artificial Sequence: Synthetic oligonucleotide
  Target: LAMA2; (+) strand; PAM type: YTN; PAM sequence: CTT
ttaaatttccttttggacat

SEQ ID NO: 378229 - DNA, 20 bp, Artificial Sequence
  Description of Artificial Sequence: Synthetic oligonucleotide
  Target: LAMA2; (+) strand; PAM type: YTN; PAM sequence: TTT
taaatttccttttggacatt

SEQ ID NO: 378230 - DNA, 20 bp, Artificial Sequence
  Description of Artificial Sequence: Synthetic oligonucleotide
  Target: LAMA2; (+) strand; PAM type: YTN; PAM sequence: TTT
aaatttccttttggacattg

SEQ ID NO: 378231 - DNA, 20 bp, Artificial Sequence
  Description of Artificial Sequence: Synthetic oligonucleotide
  Target: LAMA2; (+) strand; PAM type: YTN; PAM sequence: TTA
aatttccttttggacattgt

SEQ ID NO: 378232 - DNA, 20 bp, Artificial Sequence
  Description of Artificial Sequence: Synthetic oligonucleotide
  Target: LAMA2; (+) strand; PAM type: YTN; PAM sequence: TTT
ccttttggacattgtatatc

SEQ ID NO: 378233 - DNA, 20 bp, Artificial Sequence
  Description of Artificial Sequence: Synthetic oligonucleotide
  Target: LAMA2; (+) strand; PAM type: YTN; PAM sequence: TTC
cttttggacattgtatatct

SEQ ID NO: 378234 - DNA, 20 bp, Artificial Sequence
  Description of Artificial Sequence: Synthetic oligonucleotide
  Target: LAMA2; (+) strand; PAM type: YTN; PAM sequence: CTT
ttggacattgtatatctttt

SEQ ID NO: 378235 - DNA, 20 bp, Artificial Sequence
  Description of Artificial Sequence: Synthetic oligonucleotide
  Target: LAMA2; (+) strand; PAM type: YTN; PAM sequence: TTT
tggacattgtatatctttta

SEQ ID NO: 378236 - DNA, 20 bp, Artificial Sequence
  Description of Artificial Sequence: Synthetic oligonucleotide
  Target: LAMA2; (+) strand; PAM type: YTN; PAM sequence: TTT
ggacattgtatatcttttat

SEQ ID NO: 378237 - DNA, 20 bp, Artificial Sequence
  Description of Artificial Sequence: Synthetic oligonucleotide
  Target: LAMA2; (+) strand; PAM type: YTN; PAM sequence: TTG
gacattgtatatcttttatt

SEQ ID NO: 378238 - DNA, 20 bp, Artificial Sequence
  Description of Artificial Sequence: Synthetic oligonucleotide
  Target: LAMA2; (+) strand; PAM type: YTN; PAM sequence: TTG
tatatcttttatttctctac

SEQ ID NO: 378239 - DNA, 20 bp, Artificial Sequence
  Description of Artificial Sequence: Synthetic oligonucleotide
  Target: LAMA2; (+) strand; PAM type: YTN; PAM sequence: CTT
ttatttctctactatactca

SEQ ID NO: 378240 - DNA, 20 bp, Artificial Sequence
  Description of Artificial Sequence: Synthetic oligonucleotide
  Target: LAMA2; (+) strand; PAM type: YTN; PAM sequence: TTT
tatttctctactatactcac

SEQ ID NO: 378241 - DNA, 20 bp, Artificial Sequence
  Description of Artificial Sequence: Synthetic oligonucleotide
  Target: LAMA2; (+) strand; PAM type: YTN; PAM sequence: TTT
atttctctactatactcaca

SEQ ID NO: 378242 - DNA, 20 bp, Artificial Sequence
  Description of Artificial Sequence: Synthetic oligonucleotide
  Target: LAMA2; (+) strand; PAM type: YTN; PAM sequence: TTA
tttctctactatactcacat

SEQ ID NO: 378243 - DNA, 20 bp, Artificial Sequence
  Description of Artificial Sequence: Synthetic oligonucleotide
  Target: LAMA2; (+) strand; PAM type: YTN; PAM sequence: TTT
ctctactatactcacatttt

SEQ ID NO: 378244 - DNA, 20 bp, Artificial Sequence
  Description of Artificial Sequence: Synthetic oligonucleotide
  Target: LAMA2; (+) strand; PAM type: YTN; PAM sequence: TTC
tctactatactcacattttt

SEQ ID NO: 378245 - DNA, 20 bp, Artificial Sequence
  Description of Artificial Sequence: Synthetic oligonucleotide
  Target: LAMA2; (+) strand; PAM type: YTN; PAM sequence: CTC
tactatactcacattttttc

SEQ ID NO: 378246 - DNA, 20 bp, Artificial Sequence
  Description of Artificial Sequence: Synthetic oligonucleotide
  Target: LAMA2; (+) strand; PAM type: YTN; PAM sequence: CTA
ctatactcacattttttcat

SEQ ID NO: 378247 - DNA, 20 bp, Artificial Sequence
  Description of Artificial Sequence: Synthetic oligonucleotide
  Target: LAMA2; (+) strand; PAM type: YTN; PAM sequence: CTA
tactcacattttttcattta

SEQ ID NO: 378248 - DNA, 20 bp, Artificial Sequence
  Description of Artificial Sequence: Synthetic oligonucleotide
  Target: LAMA2; (+) strand; PAM type: YTN; PAM sequence: CTC
acattttttcatttattctt

SEQ ID NO: 378249 - DNA, 20 bp, Artificial Sequence
  Description of Artificial Sequence: Synthetic oligonucleotide
  Target: LAMA2; (+) strand; PAM type: YTN; PAM sequence: TTT
tttcatttattcttgaaaat

SEQ ID NO: 378250 - DNA, 20 bp, Artificial Sequence
  Description of Artificial Sequence: Synthetic oligonucleotide
  Target: LAMA2; (+) strand; PAM type: YTN; PAM sequence: TTT
ttcatttattcttgaaaata

SEQ ID NO: 378251 - DNA, 20 bp, Artificial Sequence
  Description of Artificial Sequence: Synthetic oligonucleotide
  Target: LAMA2; (+) strand; PAM type: YTN; PAM sequence: TTT
tcatttattcttgaaaatat

SEQ ID NO: 378252 - DNA, 20 bp, Artificial Sequence
  Description of Artificial Sequence: Synthetic oligonucleotide
  Target: LAMA2; (+) strand; PAM type: YTN; PAM sequence: TTT
catttattcttgaaaatata

SEQ ID NO: 378253 - DNA, 20 bp, Artificial Sequence
  Description of Artificial Sequence: Synthetic oligonucleotide
  Target: LAMA2; (+) strand; PAM type: YTN; PAM sequence: TTC
atttattcttgaaaatataa

SEQ ID NO: 378254 - DNA, 20 bp, Artificial Sequence
  Description of Artificial Sequence: Synthetic oligonucleotide
  Target: LAMA2; (+) strand; PAM type: YTN; PAM sequence: TTT
attcttgaaaatataatgtt

SEQ ID NO: 378255 - DNA, 20 bp, Artificial Sequence
  Description of Artificial Sequence: Synthetic oligonucleotide
  Target: LAMA2; (+) strand; PAM type: YTN; PAM sequence: TTA
ttcttgaaaatataatgttt

SEQ ID NO: 378256 - DNA, 20 bp, Artificial Sequence
  Description of Artificial Sequence: Synthetic oligonucleotide
  Target: LAMA2; (+) strand; PAM type: YTN; PAM sequence: TTC
ttgaaaatataatgtttata

SEQ ID NO: 378257 - DNA, 20 bp, Artificial Sequence
  Description of Artificial Sequence: Synthetic oligonucleotide
  Target: LAMA2; (+) strand; PAM type: YTN; PAM sequence: CTT
gaaaatataatgtttataaa

SEQ ID NO: 378258 - DNA, 20 bp, Artificial Sequence
  Description of Artificial Sequence: Synthetic oligonucleotide
  Target: LAMA2; (+) strand; PAM type: YTN; PAM sequence: TTG
aaaatataatgtttataaac

SEQ ID NO: 378259 - DNA, 20 bp, Artificial Sequence
  Description of Artificial Sequence: Synthetic oligonucleotide
  Target: LAMA2; (+) strand; PAM type: YTN; PAM sequence: TTT
ataaacattagcatttttaa

SEQ ID NO: 378260 - DNA, 20 bp, Artificial Sequence
  Description of Artificial Sequence: Synthetic oligonucleotide
  Target: LAMA2; (+) strand; PAM type: YTN; PAM sequence: TTA
taaacattagcatttttaaa

SEQ ID NO: 378261 - DNA, 20 bp, Artificial Sequence
  Description of Artificial Sequence: Synthetic oligonucleotide
  Target: LAMA2; (+) strand; PAM type: YTN; PAM sequence: TTA
gcatttttaaaatggtcatc

SEQ ID NO: 378262 - DNA, 20 bp, Artificial Sequence
  Description of Artificial Sequence: Synthetic oligonucleotide
  Target: LAMA2; (+) strand; PAM type: YTN; PAM sequence: TTT
ttaaaatggtcatctgcaaa

SEQ ID NO: 378263 - DNA, 20 bp, Artificial Sequence
  Description of Artificial Sequence: Synthetic oligonucleotide
  Target: LAMA2; (+) strand; PAM type: YTN; PAM sequence: TTT
taaaatggtcatctgcaaat

SEQ ID NO: 378264 - DNA, 20 bp, Artificial Sequence
  Description of Artificial Sequence: Synthetic oligonucleotide
  Target: LAMA2; (+) strand; PAM type: YTN; PAM sequence: TTT
aaaatggtcatctgcaaatt

SEQ ID NO: 378265 - DNA, 20 bp, Artificial Sequence
  Description of Artificial Sequence: Synthetic oligonucleotide
  Target: LAMA2; (+) strand; PAM type: YTN; PAM sequence: TTA
aaatggtcatctgcaaattc

SEQ ID NO: 378266 - DNA, 20 bp, Artificial Sequence
  Description of Artificial Sequence: Synthetic oligonucleotide
  Target: LAMA2; (+) strand; PAM type: YTN; PAM sequence: CTG
caaattccatcttttttatt

SEQ ID NO: 378267 - DNA, 20 bp, Artificial Sequence
  Description of Artificial Sequence: Synthetic oligonucleotide
  Target: LAMA2; (+) strand; PAM type: YTN; PAM sequence: TTC
catcttttttattgcaggac

SEQ ID NO: 378268 - DNA, 20 bp, Artificial Sequence
  Description of Artificial Sequence: Synthetic oligonucleotide
  Target: LAMA2; (+) strand; PAM type: YTN; PAM sequence: CTT
ttttattgcaggactattcc

SEQ ID NO: 378269 - DNA, 20 bp, Artificial Sequence
  Description of Artificial Sequence: Synthetic oligonucleotide
  Target: LAMA2; (+) strand; PAM type: YTN; PAM sequence: TTT
tttattgcaggactattcct

SEQ ID NO: 378270 - DNA, 20 bp, Artificial Sequence
  Description of Artificial Sequence: Synthetic oligonucleotide
  Target: LAMA2; (+) strand; PAM type: YTN; PAM sequence: TTT
ttattgcaggactattccta

SEQ ID NO: 378271 - DNA, 20 bp, Artificial Sequence
  Description of Artificial Sequence: Synthetic oligonucleotide
  Target: LAMA2; (+) strand; PAM type: YTN; PAM sequence: TTT
tattgcaggactattcctac

SEQ ID NO: 378272 - DNA, 20 bp, Artificial Sequence
  Description of Artificial Sequence: Synthetic oligonucleotide
  Target: LAMA2; (+) strand; PAM type: YTN; PAM sequence: TTT
attgcaggactattcctact

SEQ ID NO: 378273 - DNA, 20 bp, Artificial Sequence
  Description of Artificial Sequence: Synthetic oligonucleotide
  Target: LAMA2; (+) strand; PAM type: YTN; PAM sequence: TTA
ttgcaggactattcctactg

SEQ ID NO: 378274 - DNA, 20 bp, Artificial Sequence
  Description of Artificial Sequence: Synthetic oligonucleotide
  Target: LAMA2; (+) strand; PAM type: YTN; PAM sequence: TTG
caggactattcctactgact

SEQ ID NO: 378275 - DNA, 20 bp, Artificial Sequence
  Description of Artificial Sequence: Synthetic oligonucleotide
  Target: LAMA2; (+) strand; PAM type: YTN; PAM sequence: CTA
ttcctactgactgacttttc

SEQ ID NO: 378276 - DNA, 20 bp, Artificial Sequence
  Description of Artificial Sequence: Synthetic oligonucleotide
  Target: LAMA2; (+) strand; PAM type: YTN; PAM sequence: TTC
ctactgactgacttttctcc

SEQ ID NO: 378277 - DNA, 20 bp, Artificial Sequence
  Description of Artificial Sequence: Synthetic oligonucleotide
  Target: LAMA2; (+) strand; PAM type: YTN; PAM sequence: CTA
ctgactgacttttctcctgt

SEQ ID NO: 378278 - DNA, 20 bp, Artificial Sequence
  Description of Artificial Sequence: Synthetic oligonucleotide
  Target: LAMA2; (+) strand; PAM type: YTN; PAM sequence: CTG
actgacttttctcctgtttc

SEQ ID NO: 378279 - DNA, 20 bp, Artificial Sequence
  Description of Artificial Sequence: Synthetic oligonucleotide
  Target: LAMA2; (+) strand; PAM type: YTN; PAM sequence: CTG
acttttctcctgtttctgag

SEQ ID NO: 378280 - DNA, 20 bp, Artificial Sequence
  Description of Artificial Sequence: Synthetic oligonucleotide
  Target: LAMA2; (+) strand; PAM type: YTN; PAM sequence: CTT
ttctcctgtttctgagtcat

SEQ ID NO: 378281 - DNA, 20 bp, Artificial Sequence
  Description of Artificial Sequence: Synthetic oligonucleotide
  Target: LAMA2; (+) strand; PAM type: YTN; PAM sequence: TTT
tctcctgtttctgagtcata

SEQ ID NO: 378282 - DNA, 20 bp, Artificial Sequence
  Description of Artificial Sequence: Synthetic oligonucleotide
  Target: LAMA2; (+) strand; PAM type: YTN; PAM sequence: TTT
ctcctgtttctgagtcatat

SEQ ID NO: 378283 - DNA, 20 bp, Artificial Sequence
  Description of Artificial Sequence: Synthetic oligonucleotide
  Target: LAMA2; (+) strand; PAM type: YTN; PAM sequence: TTC
tcctgtttctgagtcatatt

SEQ ID NO: 378284 - DNA, 20 bp, Artificial Sequence
  Description of Artificial Sequence: Synthetic oligonucleotide
  Target: LAMA2; (+) strand; PAM type: YTN; PAM sequence: CTC
ctgtttctgagtcatatttt

SEQ ID NO: 378285 - DNA, 20 bp, Artificial Sequence
  Description of Artificial Sequence: Synthetic oligonucleotide
  Target: LAMA2; (+) strand; PAM type: YTN; PAM sequence: CTG
tttctgagtcatattttctt

SEQ ID NO: 378286 - DNA, 20 bp, Artificial Sequence
  Description of Artificial Sequence: Synthetic oligonucleotide
  Target: LAMA2; (+) strand; PAM type: YTN; PAM sequence: TTT
ctgagtcatattttcttgat

SEQ ID NO: 378287 - DNA, 20 bp, Artificial Sequence
  Description of Artificial Sequence: Synthetic oligonucleotide
  Target: LAMA2; (+) strand; PAM type: YTN; PAM sequence: TTC
tgagtcatattttcttgatt

SEQ ID NO: 378288 - DNA, 20 bp, Artificial Sequence
  Description of Artificial Sequence: Synthetic oligonucleotide
  Target: LAMA2; (+) strand; PAM type: YTN; PAM sequence: CTG
agtcatattttcttgattct

SEQ ID NO: 378289 - DNA, 20 bp, Artificial Sequence
  Description of Artificial Sequence: Synthetic oligonucleotide
  Target: LAMA2; (+) strand; PAM type: YTN; PAM sequence: TTT
tcttgattctttacatgcct

SEQ ID NO: 378290 - DNA, 20 bp, Artificial Sequence
  Description of Artificial Sequence: Synthetic oligonucleotide
  Target: LAMA2; (+) strand; PAM type: YTN; PAM sequence: TTT
cttgattctttacatgcctg

SEQ ID NO: 378291 - DNA, 20 bp, Artificial Sequence
  Description of Artificial Sequence: Synthetic oligonucleotide
  Target: LAMA2; (+) strand; PAM type: YTN; PAM sequence: TTC
ttgattctttacatgcctga

SEQ ID NO: 378292 - DNA, 20 bp, Artificial Sequence
  Description of Artificial Sequence: Synthetic oligonucleotide
  Target: LAMA2; (+) strand; PAM type: YTN; PAM sequence: CTT
gattctttacatgcctgata

SEQ ID NO: 378293 - DNA, 20 bp, Artificial Sequence
  Description of Artificial Sequence: Synthetic oligonucleotide
  Target: LAMA2; (+) strand; PAM type: YTN; PAM sequence: TTG
attctttacatgcctgataa

SEQ ID NO: 378294 - DNA, 20 bp, Artificial Sequence
  Description of Artificial Sequence: Synthetic oligonucleotide
  Target: LAMA2; (+) strand; PAM type: YTN; PAM sequence: TTC
tttacatgcctgataatttt

SEQ ID NO: 378295 - DNA, 20 bp, Artificial Sequence
  Description of Artificial Sequence: Synthetic oligonucleotide
  Target: LAMA2; (+) strand; PAM type: YTN; PAM sequence: CTT
tacatgcctgataattttta

SEQ ID NO: 378296 - DNA, 20 bp, Artificial Sequence
  Description of Artificial Sequence: Synthetic oligonucleotide
  Target: LAMA2; (+) strand; PAM type: YTN; PAM sequence: TTT
acatgcctgataatttttat

SEQ ID NO: 378297 - DNA, 20 bp, Artificial Sequence
  Description of Artificial Sequence: Synthetic oligonucleotide
  Target: LAMA2; (+) strand; PAM type: YTN; PAM sequence: TTA
catgcctgataatttttatt

SEQ ID NO: 378298 - DNA, 20 bp, Artificial Sequence
  Description of Artificial Sequence: Synthetic oligonucleotide
  Target: LAMA2; (+) strand; PAM type: YTN; PAM sequence: CTG
ataatttttatttggatgcc

SEQ ID NO: 378299 - DNA, 20 bp, Artificial Sequence
  Description of Artificial Sequence: Synthetic oligonucleotide
  Target: LAMA2; (+) strand; PAM type: YTN; PAM sequence: TTT
ttatttggatgccagacatt

SEQ ID NO: 378300 - DNA, 20 bp, Artificial Sequence
  Description of Artificial Sequence: Synthetic oligonucleotide
  Target: LAMA2; (+) strand; PAM type: YTN; PAM sequence: TTT
tatttggatgccagacatta

SEQ ID NO: 378301 - DNA, 20 bp, Artificial Sequence
  Description of Artificial Sequence: Synthetic oligonucleotide
  Target: LAMA2; (+) strand; PAM type: YTN; PAM sequence: TTT
atttggatgccagacattat

SEQ ID NO: 378302 - DNA, 20 bp, Artificial Sequence
  Description of Artificial Sequence: Synthetic oligonucleotide
  Target: LAMA2; (+) strand; PAM type: YTN; PAM sequence: TTA
tttggatgccagacattata

SEQ ID NO: 378303 - DNA, 20 bp, Artificial Sequence
  Description of Artificial Sequence: Synthetic oligonucleotide
  Target: LAMA2; (+) strand; PAM type: YTN; PAM sequence: TTT
ggatgccagacattatatac

SEQ ID NO: 378304 - DNA, 20 bp, Artificial Sequence
  Description of Artificial Sequence: Synthetic oligonucleotide
  Target: LAMA2; (+) strand; PAM type: YTN; PAM sequence: TTG
gatgccagacattatatact

SEQ ID NO: 378305 - DNA, 20 bp, Artificial Sequence
  Description of Artificial Sequence: Synthetic oligonucleotide
  Target: LAMA2; (+) strand; PAM type: YTN; PAM sequence: TTA
tatacttttcattgttgtgt

SEQ ID NO: 378306 - DNA, 20 bp, Artificial Sequence
  Description of Artificial Sequence: Synthetic oligonucleotide
  Target: LAMA2; (+) strand; PAM type: YTN; PAM sequence: CTT
ttcattgttgtgtattggat

SEQ ID NO: 378307 - DNA, 20 bp, Artificial Sequence
  Description of Artificial Sequence: Synthetic oligonucleotide
  Target: LAMA2; (+) strand; PAM type: YTN; PAM sequence: TTT
tcattgttgtgtattggatt

SEQ ID NO: 378308 - DNA, 20 bp, Artificial Sequence
  Description of Artificial Sequence: Synthetic oligonucleotide
  Target: LAMA2; (+) strand; PAM type: YTN; PAM sequence: TTT
cattgttgtgtattggattt

SEQ ID NO: 378309 - DNA, 20 bp, Artificial Sequence
  Description of Artificial Sequence: Synthetic oligonucleotide
  Target: LAMA2; (+) strand; PAM type: YTN; PAM sequence: TTC
attgttgtgtattggatttt

SEQ ID NO: 378310 - DNA, 20 bp, Artificial Sequence
  Description of Artificial Sequence: Synthetic oligonucleotide
  Target: LAMA2; (+) strand; PAM type: YTN; PAM sequence: TTG
ttgtgtattggattttattg

SEQ ID NO: 378311 - DNA, 20 bp, Artificial Sequence
  Description of Artificial Sequence: Synthetic oligonucleotide
  Target: LAMA2; (+) strand; PAM type: YTN; PAM sequence: TTG
tgtattggattttattgtat

SEQ ID NO: 378312 - DNA, 20 bp, Artificial Sequence
  Description of Artificial Sequence: Synthetic oligonucleotide
  Target: LAMA2; (+) strand; PAM type: YTN; PAM sequence: TTG
gattttattgtatttcttta

SEQ ID NO: 378313 - DNA, 20 bp, Artificial Sequence
  Description of Artificial Sequence: Synthetic oligonucleotide
  Target: LAMA2; (+) strand; PAM type: YTN; PAM sequence: TTT
tattgtatttctttaaagaa

SEQ ID NO: 378314 - DNA, 20 bp, Artificial Sequence
  Description of Artificial Sequence: Synthetic oligonucleotide
  Target: LAMA2; (+) strand; PAM type: YTN; PAM sequence: TTT
attgtatttctttaaagaat

SEQ ID NO: 378315 - DNA, 20 bp, Artificial Sequence
  Description of Artificial Sequence: Synthetic oligonucleotide
  Target: LAMA2; (+) strand; PAM type: YTN; PAM sequence: TTA
ttgtatttctttaaagaatg

SEQ ID NO: 378316 - DNA, 20 bp, Artificial Sequence
  Description of Artificial Sequence: Synthetic oligonucleotide
  Target: LAMA2; (+) strand; PAM type: YTN; PAM sequence: TTG
tatttctttaaagaatgttg

SEQ ID NO: 378317 - DNA, 20 bp, Artificial Sequence
  Description of Artificial Sequence: Synthetic oligonucleotide
  Target: LAMA2; (+) strand; PAM type: YTN; PAM sequence: TTT
ctttaaagaatgttgaactt

SEQ ID NO: 378318 - DNA, 20 bp, Artificial Sequence
  Description of Artificial Sequence: Synthetic oligonucleotide
  Target: LAMA2; (+) strand; PAM type: YTN; PAM sequence: TTC
tttaaagaatgttgaacttt

SEQ ID NO: 378319 - DNA, 20 bp, Artificial Sequence
  Description of Artificial Sequence: Synthetic oligonucleotide
  Target: LAMA2; (+) strand; PAM type: YTN; PAM sequence: CTT
taaagaatgttgaactttat

SEQ ID NO: 378320 - DNA, 20 bp, Artificial Sequence
  Description of Artificial Sequence: Synthetic oligonucleotide
  Target: LAMA2; (+) strand; PAM type: YTN; PAM sequence: TTT
aaagaatgttgaactttatg

SEQ ID NO: 378321 - DNA, 20 bp, Artificial Sequence
  Description of Artificial Sequence: Synthetic oligonucleotide
  Target: LAMA2; (+) strand; PAM type: YTN; PAM sequence: TTA
aagaatgttgaactttatgc

SEQ ID NO: 378322 - DNA, 20 bp, Artificial Sequence
  Description of Artificial Sequence: Synthetic oligonucleotide
  Target: LAMA2; (+) strand; PAM type: YTN; PAM sequence: TTG
aactttatgctggcaaacag

SEQ ID NO: 378323 - DNA, 20 bp, Artificial Sequence
  Description of Artificial Sequence: Synthetic oligonucleotide
  Target: LAMA2; (+) strand; PAM type: YTN; PAM sequence: CTT
tatgctggcaaacagtttag

SEQ ID NO: 378324 - DNA, 20 bp, Artificial Sequence
  Description of Artificial Sequence: Synthetic oligonucleotide
  Target: LAMA2; (+) strand; PAM type: YTN; PAM sequence: TTT
atgctggcaaacagtttagg

SEQ ID NO: 378325 - DNA, 20 bp, Artificial Sequence
  Description of Artificial Sequence: Synthetic oligonucleotide
  Target: LAMA2; (+) strand; PAM type: YTN; PAM sequence: TTA
tgctggcaaacagtttaggt

SEQ ID NO: 378326 - DNA, 20 bp, Artificial Sequence
  Description of Artificial Sequence: Synthetic oligonucleotide
  Target: LAMA2; (+) strand; PAM type: YTN; PAM sequence: CTG
gcaaacagtttaggtagtca

SEQ ID NO: 378327 - DNA, 20 bp, Artificial Sequence
  Description of Artificial Sequence: Synthetic oligonucleotide
  Target: LAMA2; (+) strand; PAM type: YTN; PAM sequence: TTT
aggtagtcacgggtcacttg

SEQ ID NO: 378328 - DNA, 20 bp, Artificial Sequence
  Description of Artificial Sequence: Synthetic oligonucleotide
  Target: LAMA2; (+) strand; PAM type: YTN; PAM sequence: TTA
ggtagtcacgggtcacttgg

SEQ ID NO: 378329 - DNA, 20 bp, Artificial Sequence
  Description of Artificial Sequence: Synthetic oligonucleotide
  Target: LAMA2; (+) strand; PAM type: YTN; PAM sequence: CTT
ggattcttttgaagcttgct

SEQ ID NO: 378330 - DNA, 20 bp, Artificial Sequence
  Description of Artificial Sequence: Synthetic oligonucleotide
  Target: LAMA2; (+) strand; PAM type: YTN; PAM sequence: TTG
gattcttttgaagcttgctt

SEQ ID NO: 378331 - DNA, 20 bp, Artificial Sequence
  Description of Artificial Sequence: Synthetic oligonucleotide
  Target: LAMA2; (+) strand; PAM type: YTN; PAM sequence: TTC
ttttgaagcttgcttttgag

SEQ ID NO: 378332 - DNA, 20 bp, Artificial Sequence
  Description of Artificial Sequence: Synthetic oligonucleotide
  Target: LAMA2; (+) strand; PAM type: YTN; PAM sequence: CTT
ttgaagcttgcttttgagtt

SEQ ID NO: 378333 - DNA, 20 bp, Artificial Sequence
  Description of Artificial Sequence: Synthetic oligonucleotide
  Target: LAMA2; (+) strand; PAM type: YTN; PAM sequence: TTT
tgaagcttgcttttgagttt

SEQ ID NO: 378334 - DNA, 20 bp, Artificial Sequence
  Description of Artificial Sequence: Synthetic oligonucleotide
  Target: LAMA2; (+) strand; PAM type: YTN; PAM sequence: TTT
gaagcttgcttttgagtttt

SEQ ID NO: 378335 - DNA, 20 bp, Artificial Sequence
  Description of Artificial Sequence: Synthetic oligonucleotide
  Target: LAMA2; (+) strand; PAM type: YTN; PAM sequence: TTG
aagcttgcttttgagttttg

SEQ ID NO: 378336 - DNA, 20 bp, Artificial Sequence
  Description of Artificial Sequence: Synthetic oligonucleotide
  Target: LAMA2; (+) strand; PAM type: YTN; PAM sequence: CTT
gcttttgagttttgttaggg

SEQ ID NO: 378337 - DNA, 20 bp, Artificial Sequence
  Description of Artificial Sequence: Synthetic oligonucleotide
  Target: LAMA2; (+) strand; PAM type: YTN; PAM sequence: TTG
cttttgagttttgttaggga

SEQ ID NO: 378338 - DNA, 20 bp, Artificial Sequence
  Description of Artificial Sequence: Synthetic oligonucleotide
  Target: LAMA2; (+) strand; PAM type: YTN; PAM sequence: CTT
ttgagttttgttagggaagg

SEQ ID NO: 378339 - DNA, 20 bp, Artificial Sequence
  Description of Artificial Sequence: Synthetic oligonucleotide
  Target: LAMA2; (+) strand; PAM type: YTN; PAM sequence: TTT
tgagttttgttagggaaggt

SEQ ID NO: 378340 - DNA, 20 bp, Artificial Sequence
  Description of Artificial Sequence: Synthetic oligonucleotide
  Target: LAMA2; (+) strand; PAM type: YTN; PAM sequence: TTT
gagttttgttagggaaggtg

SEQ ID NO: 378341 - DNA, 20 bp, Artificial Sequence
  Description of Artificial Sequence: Synthetic oligonucleotide
  Target: LAMA2; (+) strand; PAM type: YTN; PAM sequence: TTG
agttttgttagggaaggtgc

SEQ ID NO: 378342 - DNA, 20 bp, Artificial Sequence
  Description of Artificial Sequence: Synthetic oligonucleotide
  Target: LAMA2; (+) strand; PAM type: YTN; PAM sequence: TTT
tgttagggaaggtgcagcag

SEQ ID NO: 378343 - DNA, 20 bp, Artificial Sequence
  Description of Artificial Sequence: Synthetic oligonucleotide
  Target: LAMA2; (+) strand; PAM type: YTN; PAM sequence: TTT
gttagggaaggtgcagcaga

SEQ ID NO: 378344 - DNA, 20 bp, Artificial Sequence
  Description of Artificial Sequence: Synthetic oligonucleotide
  Target: LAMA2; (+) strand; PAM type: YTN; PAM sequence: TTG
ttagggaaggtgcagcagaa

SEQ ID NO: 378345 - DNA, 20 bp, Artificial Sequence
  Description of Artificial Sequence: Synthetic oligonucleotide
  Target: LAMA2; (+) strand; PAM type: YTN; PAM sequence: TTA
gggaaggtgcagcagaacag

SEQ ID NO: 378346 - DNA, 20 bp, Artificial Sequence
  Description of Artificial Sequence: Synthetic oligonucleotide
  Target: LAMA2; (+) strand; PAM type: YTN; PAM sequence: CTG
aaagcccttctactaagctg

SEQ ID NO: 378347 - DNA, 20 bp, Artificial Sequence
  Description of Artificial Sequence: Synthetic oligonucleotide
  Target: LAMA2; (+) strand; PAM type: YTN; PAM sequence: CTT
ctactaagctgtgaaacttc

SEQ ID NO: 378348 - DNA, 20 bp, Artificial Sequence
  Description of Artificial Sequence: Synthetic oligonucleotide
  Target: LAMA2; (+) strand; PAM type: YTN; PAM sequence: TTC
tactaagctgtgaaacttct

SEQ ID NO: 378349 - DNA, 20 bp, Artificial Sequence
  Description of Artificial Sequence: Synthetic oligonucleotide
  Target: LAMA2; (+) strand; PAM type: YTN; PAM sequence: CTA
ctaagctgtgaaacttctga

SEQ ID NO: 378350 - DNA, 20 bp, Artificial Sequence
  Description of Artificial Sequence: Synthetic oligonucleotide
  Target: LAMA2; (+) strand; PAM type: YTN; PAM sequence: CTA
agctgtgaaacttctgagaa

SEQ ID NO: 378351 - DNA, 20 bp, Artificial Sequence
  Description of Artificial Sequence: Synthetic oligonucleotide
  Target: LAMA2; (+) strand; PAM type: YTN; PAM sequence: CTG
tgaaacttctgagaatacta

SEQ ID NO: 378352 - DNA, 20 bp, Artificial Sequence
  Description of Artificial Sequence: Synthetic oligonucleotide
  Target: LAMA2; (+) strand; PAM type: YTN; PAM sequence: CTT
ctgagaatactacctagttg

SEQ ID NO: 378353 - DNA, 20 bp, Artificial Sequence
  Description of Artificial Sequence: Synthetic oligonucleotide
  Target: LAMA2; (+) strand; PAM type: YTN; PAM sequence: TTC
tgagaatactacctagttgg

SEQ ID NO: 378354 - DNA, 20 bp, Artificial Sequence
  Description of Artificial Sequence: Synthetic oligonucleotide
  Target: LAMA2; (+) strand; PAM type: YTN; PAM sequence: CTG
agaatactacctagttggtt

SEQ ID NO: 378355 - DNA, 20 bp, Artificial Sequence
  Description of Artificial Sequence: Synthetic oligonucleotide
  Target: LAMA2; (+) strand; PAM type: YTN; PAM sequence: CTA
cctagttggttactatgtct

SEQ ID NO: 378356 - DNA, 20 bp, Artificial Sequence
  Description of Artificial Sequence: Synthetic oligonucleotide
  Target: LAMA2; (+) strand; PAM type: YTN; PAM sequence: CTA
gttggttactatgtctcttt

SEQ ID NO: 378357 - DNA, 20 bp, Artificial Sequence
  Description of Artificial Sequence: Synthetic oligonucleotide
  Target: LAMA2; (+) strand; PAM type: YTN; PAM sequence: TTG
gttactatgtctctttactc

SEQ ID NO: 378358 - DNA, 20 bp, Artificial Sequence
  Description of Artificial Sequence: Synthetic oligonucleotide
  Target: LAMA2; (+) strand; PAM type: YTN; PAM sequence: TTA
ctatgtctctttactctggc

SEQ ID NO: 378359 - DNA, 20 bp, Artificial Sequence
  Description of Artificial Sequence: Synthetic oligonucleotide
  Target: LAMA2; (+) strand; PAM type: YTN; PAM sequence: CTA
tgtctctttactctggctgt

SEQ ID NO: 378360 - DNA, 20 bp, Artificial Sequence
  Description of Artificial Sequence: Synthetic oligonucleotide
  Target: LAMA2; (+) strand; PAM type: YTN; PAM sequence: CTC
tttactctggctgttgaaaa

SEQ ID NO: 378361 - DNA, 20 bp, Artificial Sequence
  Description of Artificial Sequence: Synthetic oligonucleotide
  Target: LAMA2; (+) strand; PAM type: YTN; PAM sequence: CTT
tactctggctgttgaaaata

SEQ ID NO: 378362 - DNA, 20 bp, Artificial Sequence
  Description of Artificial Sequence: Synthetic oligonucleotide
  Target: LAMA2; (+) strand; PAM type: YTN; PAM sequence: TTT
actctggctgttgaaaatat

SEQ ID NO: 378363 - DNA, 20 bp, Artificial Sequence
  Description of Artificial Sequence: Synthetic oligonucleotide
  Target: LAMA2; (+) strand; PAM type: YTN; PAM sequence: TTA
ctctggctgttgaaaatatg

SEQ ID NO: 378364 - DNA, 20 bp, Artificial Sequence
  Description of Artificial Sequence: Synthetic oligonucleotide
  Target: LAMA2; (+) strand; PAM type: YTN; PAM sequence: CTC
tggctgttgaaaatatggct

SEQ ID NO: 378365 - DNA, 20 bp, Artificial Sequence
  Description of Artificial Sequence: Synthetic oligonucleotide
  Target: LAMA2; (+) strand; PAM type: YTN; PAM sequence: CTG
gctgttgaaaatatggctta

SEQ ID NO: 378366 - DNA, 20 bp, Artificial Sequence
  Description of Artificial Sequence: Synthetic oligonucleotide
  Target: LAMA2; (+) strand; PAM type: YTN; PAM sequence: CTG
ttgaaaatatggcttattcc

SEQ ID NO: 378367 - DNA, 20 bp, Artificial Sequence
  Description of Artificial Sequence: Synthetic oligonucleotide
  Target: LAMA2; (+) strand; PAM type: YTN; PAM sequence: TTG
aaaatatggcttattccaag

SEQ ID NO: 378368 - DNA, 20 bp, Artificial Sequence
  Description of Artificial Sequence: Synthetic oligonucleotide
  Target: LAMA2; (+) strand; PAM type: YTN; PAM sequence: CTT
attccaagctttctctgggc

SEQ ID NO: 378369 - DNA, 20 bp, Artificial Sequence
  Description of Artificial Sequence: Synthetic oligonucleotide
  Target: LAMA2; (+) strand; PAM type: YTN; PAM sequence: TTA
ttccaagctttctctgggct

SEQ ID NO: 378370 - DNA, 20 bp, Artificial Sequence
  Description of Artificial Sequence: Synthetic oligonucleotide
  Target: LAMA2; (+) strand; PAM type: YTN; PAM sequence: TTC
caagctttctctgggctgta

SEQ ID NO: 378371 - DNA, 20 bp, Artificial Sequence
  Description of Artificial Sequence: Synthetic oligonucleotide
  Target: LAMA2; (+) strand; PAM type: YTN; PAM sequence: CTT
tctctgggctgtaagaattt

SEQ ID NO: 378372 - DNA, 20 bp, Artificial Sequence
  Description of Artificial Sequence: Synthetic oligonucleotide
  Target: LAMA2; (+) strand; PAM type: YTN; PAM sequence: TTT
ctctgggctgtaagaatttt

SEQ ID NO: 378373 - DNA, 20 bp, Artificial Sequence
  Description of Artificial Sequence: Synthetic oligonucleotide
  Target: LAMA2; (+) strand; PAM type: YTN; PAM sequence: TTC
tctgggctgtaagaattttt

SEQ ID NO: 378374 - DNA, 20 bp, Artificial Sequence
  Description of Artificial Sequence: Synthetic oligonucleotide
  Target: LAMA2; (+) strand; PAM type: YTN; PAM sequence: CTC
tgggctgtaagaatttttgc

SEQ ID NO: 378375 - DNA, 20 bp, Artificial Sequence
  Description of Artificial Sequence: Synthetic oligonucleotide
  Target: LAMA2; (+) strand; PAM type: YTN; PAM sequence: CTG
ggctgtaagaatttttgcag

SEQ ID NO: 378376 - DNA, 20 bp, Artificial Sequence
  Description of Artificial Sequence: Synthetic oligonucleotide
  Target: LAMA2; (+) strand; PAM type: YTN; PAM sequence: CTG
taagaatttttgcagcctag

SEQ ID NO: 378377 - DNA, 20 bp, Artificial Sequence
  Description of Artificial Sequence: Synthetic oligonucleotide
  Target: LAMA2; (+) strand; PAM type: YTN; PAM sequence: TTT
ttgcagcctagggttttcca

SEQ ID NO: 378378 - DNA, 20 bp, Artificial Sequence
  Description of Artificial Sequence: Synthetic oligonucleotide
  Target: LAMA2; (+) strand; PAM type: YTN; PAM sequence: TTT
tgcagcctagggttttccaa

SEQ ID NO: 378379 - DNA, 20 bp, Artificial Sequence
  Description of Artificial Sequence: Synthetic oligonucleotide
  Target: LAMA2; (+) strand; PAM type: YTN; PAM sequence: TTT
gcagcctagggttttccaat

SEQ ID NO: 378380 - DNA, 20 bp, Artificial Sequence
  Description of Artificial Sequence: Synthetic oligonucleotide
  Target: LAMA2; (+) strand; PAM type: YTN; PAM sequence: TTG
cagcctagggttttccaatg

SEQ ID NO: 378381 - DNA, 20 bp, Artificial Sequence
  Description of Artificial Sequence: Synthetic oligonucleotide
  Target: LAMA2; (+) strand; PAM type: YTN; PAM sequence: CTA
gggttttccaatgccatttt

SEQ ID NO: 378382 - DNA, 20 bp, Artificial Sequence
  Description of Artificial Sequence: Synthetic oligonucleotide
  Target: LAMA2; (+) strand; PAM type: YTN; PAM sequence: TTT
tccaatgccattttccttca

SEQ ID NO: 378383 - DNA, 20 bp, Artificial Sequence
  Description of Artificial Sequence: Synthetic oligonucleotide
  Target: LAMA2; (+) strand; PAM type: YTN; PAM sequence: TTT
ccaatgccattttccttcat

SEQ ID NO: 378384 - DNA, 20 bp, Artificial Sequence
  Description of Artificial Sequence: Synthetic oligonucleotide
  Target: LAMA2; (+) strand; PAM type: YTN; PAM sequence: TTC
caatgccattttccttcatc

SEQ ID NO: 378385 - DNA, 20 bp, Artificial Sequence
  Description of Artificial Sequence: Synthetic oligonucleotide
  Target: LAMA2; (+) strand; PAM type: YTN; PAM sequence: TTT
tccttcatcccatgcatgca

SEQ ID NO: 378386 - DNA, 20 bp, Artificial Sequence
  Description of Artificial Sequence: Synthetic oligonucleotide
  Target: LAMA2; (+) strand; PAM type: YTN; PAM sequence: TTT
ccttcatcccatgcatgcac

SEQ ID NO: 378387 - DNA, 20 bp, Artificial Sequence
  Description of Artificial Sequence: Synthetic oligonucleotide
  Target: LAMA2; (+) strand; PAM type: YTN; PAM sequence: TTC
cttcatcccatgcatgcacc

SEQ ID NO: 378388 - DNA, 20 bp, Artificial Sequence
  Description of Artificial Sequence: Synthetic oligonucleotide
  Target: LAMA2; (+) strand; PAM type: YTN; PAM sequence: CTT
catcccatgcatgcacctat

SEQ ID NO: 378389 - DNA, 20 bp, Artificial Sequence
  Description of Artificial Sequence: Synthetic oligonucleotide
  Target: LAMA2; (+) strand; PAM type: YTN; PAM sequence: TTC
atcccatgcatgcacctatc

SEQ ID NO: 378390 - DNA, 20 bp, Artificial Sequence
  Description of Artificial Sequence: Synthetic oligonucleotide
  Target: LAMA2; (+) strand; PAM type: YTN; PAM sequence: CTA
tcagcattcagtcaatgact

SEQ ID NO: 378391 - DNA, 20 bp, Artificial Sequence
  Description of Artificial Sequence: Synthetic oligonucleotide
  Target: LAMA2; (+) strand; PAM type: YTN; PAM sequence: TTC
agtcaatgactcaagagaac

SEQ ID NO: 378392 - DNA, 20 bp, Artificial Sequence
  Description of Artificial Sequence: Synthetic oligonucleotide
  Target: LAMA2; (+) strand; PAM type: YTN; PAM sequence: CTC
aagagaacgcttctgcacat

SEQ ID NO: 378393 - DNA, 20 bp, Artificial Sequence
  Description of Artificial Sequence: Synthetic oligonucleotide
  Target: LAMA2; (+) strand; PAM type: YTN; PAM sequence: CTT
ctgcacatctctggaattac

SEQ ID NO: 378394 - DNA, 20 bp, Artificial Sequence
  Description of Artificial Sequence: Synthetic oligonucleotide
  Target: LAMA2; (+) strand; PAM type: YTN; PAM sequence: TTC
tgcacatctctggaattacc

SEQ ID NO: 378395 - DNA, 20 bp, Artificial Sequence
  Description of Artificial Sequence: Synthetic oligonucleotide
  Target: LAMA2; (+) strand; PAM type: YTN; PAM sequence: CTG
cacatctctggaattacctt

SEQ ID NO: 378396 - DNA, 20 bp, Artificial Sequence
  Description of Artificial Sequence: Synthetic oligonucleotide
  Target: LAMA2; (+) strand; PAM type: YTN; PAM sequence: CTC
tggaattacctttctatcta

SEQ ID NO: 378397 - DNA, 20 bp, Artificial Sequence
  Description of Artificial Sequence: Synthetic oligonucleotide
  Target: LAMA2; (+) strand; PAM type: YTN; PAM sequence: CTG
gaattacctttctatctaac

SEQ ID NO: 378398 - DNA, 20 bp, Artificial Sequence
  Description of Artificial Sequence: Synthetic oligonucleotide
  Target: LAMA2; (+) strand; PAM type: YTN; PAM sequence: TTA
cctttctatctaacttcttt

SEQ ID NO: 378399 - DNA, 20 bp, Artificial Sequence
  Description of Artificial Sequence: Synthetic oligonucleotide
  Target: LAMA2; (+) strand; PAM type: YTN; PAM sequence: CTT
tctatctaacttctttcttt

SEQ ID NO: 378400 - DNA, 20 bp, Artificial Sequence
  Description of Artificial Sequence: Synthetic oligonucleotide
  Target: LAMA2; (+) strand; PAM type: YTN; PAM sequence: TTT
ctatctaacttctttctttt

SEQ ID NO: 378401 - DNA, 20 bp, Artificial Sequence
  Description of Artificial Sequence: Synthetic oligonucleotide
  Target: LAMA2; (+) strand; PAM type: YTN; PAM sequence: TTC
tatctaacttctttcttttt

SEQ ID NO: 378402 - DNA, 20 bp, Artificial Sequence
  Description of Artificial Sequence: Synthetic oligonucleotide
  Target: LAMA2; (+) strand; PAM type: YTN; PAM sequence: CTA
tctaacttctttctttttga

SEQ ID NO: 378403 - DNA, 20 bp, Artificial Sequence
  Description of Artificial Sequence: Synthetic oligonucleotide
  Target: LAMA2; (+) strand; PAM type: YTN; PAM sequence: CTA
acttctttctttttgaacac

SEQ ID NO: 378404 - DNA, 20 bp, Artificial Sequence
  Description of Artificial Sequence: Synthetic oligonucleotide
  Target: LAMA2; (+) strand; PAM type: YTN; PAM sequence: CTT
ctttctttttgaacacgtat

SEQ ID NO: 378405 - DNA, 20 bp, Artificial Sequence
  Description of Artificial Sequence: Synthetic oligonucleotide
  Target: LAMA2; (+) strand; PAM type: YTN; PAM sequence: TTC
tttctttttgaacacgtatt

SEQ ID NO: 378406 - DNA, 20 bp, Artificial Sequence
  Description of Artificial Sequence: Synthetic oligonucleotide
  Target: LAMA2; (+) strand; PAM type: YTN; PAM sequence: CTT
tctttttgaacacgtattct

SEQ ID NO: 378407 - DNA, 20 bp, Artificial Sequence
  Description of Artificial Sequence: Synthetic oligonucleotide
  Target: LAMA2; (+) strand; PAM type: YTN; PAM sequence: TTT
ctttttgaacacgtattcta

SEQ ID NO: 378408 - DNA, 20 bp, Artificial Sequence
  Description of Artificial Sequence: Synthetic oligonucleotide
  Target: LAMA2; (+) strand; PAM type: YTN; PAM sequence: TTC
tttttgaacacgtattctat

SEQ ID NO: 378409 - DNA, 20 bp, Artificial Sequence
  Description of Artificial Sequence: Synthetic oligonucleotide
  Target: LAMA2; (+) strand; PAM type: YTN; PAM sequence: CTT
tttgaacacgtattctattt

SEQ ID NO: 378410 - DNA, 20 bp, Artificial Sequence
  Description of Artificial Sequence: Synthetic oligonucleotide
  Target: LAMA2; (+) strand; PAM type: YTN; PAM sequence: TTT
ttgaacacgtattctatttg

SEQ ID NO: 378411 - DNA, 20 bp, Artificial Sequence
  Description of Artificial Sequence: Synthetic oligonucleotide
  Target: LAMA2; (+) strand; PAM type: YTN; PAM sequence: TTT
tgaacacgtattctatttgc

SEQ ID NO: 378412 - DNA, 20 bp, Artificial Sequence
  Description of Artificial Sequence: Synthetic oligonucleotide
  Target: LAMA2; (+) strand; PAM type: YTN; PAM sequence: TTT
gaacacgtattctatttgcc

SEQ ID NO: 378413 - DNA, 20 bp, Artificial Sequence
  Description of Artificial Sequence: Synthetic oligonucleotide
  Target: LAMA2; (+) strand; PAM type: YTN; PAM sequence: TTG
aacacgtattctatttgcca

SEQ ID NO: 378414 - DNA, 20 bp, Artificial Sequence
  Description of Artificial Sequence: Synthetic oligonucleotide
  Target: LAMA2; (+) strand; PAM type: YTN; PAM sequence: TTC
tatttgccatcataagtttc

SEQ ID NO: 378415 - DNA, 20 bp, Artificial Sequence
  Description of Artificial Sequence: Synthetic oligonucleotide
  Target: LAMA2; (+) strand; PAM type: YTN; PAM sequence: CTA
tttgccatcataagtttcag

SEQ ID NO: 378416 - DNA, 20 bp, Artificial Sequence
  Description of Artificial Sequence: Synthetic oligonucleotide
  Target: LAMA2; (+) strand; PAM type: YTN; PAM sequence: TTT
gccatcataagtttcagcag

SEQ ID NO: 378417 - DNA, 20 bp, Artificial Sequence
  Description of Artificial Sequence: Synthetic oligonucleotide
  Target: LAMA2; (+) strand; PAM type: YTN; PAM sequence: TTG
ccatcataagtttcagcagc

SEQ ID NO: 378418 - DNA, 20 bp, Artificial Sequence
  Description of Artificial Sequence: Synthetic oligonucleotide
  Target: LAMA2; (+) strand; PAM type: YTN; PAM sequence: TTT
cagcagcctcggcttcctca

SEQ ID NO: 378419 - DNA, 20 bp, Artificial Sequence
  Description of Artificial Sequence: Synthetic oligonucleotide
  Target: LAMA2; (+) strand; PAM type: YTN; PAM sequence: TTC
agcagcctcggcttcctcaa

SEQ ID NO: 378420 - DNA, 20 bp, Artificial Sequence
  Description of Artificial Sequence: Synthetic oligonucleotide
  Target: LAMA2; (+) strand; PAM type: YTN; PAM sequence: CTC
ggcttcctcaaactccactc

SEQ ID NO: 378421 - DNA, 20 bp, Artificial Sequence
  Description of Artificial Sequence: Synthetic oligonucleotide
  Target: LAMA2; (+) strand; PAM type: YTN; PAM sequence: CTT
cctcaaactccactctttgt

SEQ ID NO: 378422 - DNA, 20 bp, Artificial Sequence
  Description of Artificial Sequence: Synthetic oligonucleotide
  Target: LAMA2; (+) strand; PAM type: YTN; PAM sequence: TTC
ctcaaactccactctttgtc

SEQ ID NO: 378423 - DNA, 20 bp, Artificial Sequence
  Description of Artificial Sequence: Synthetic oligonucleotide
  Target: LAMA2; (+) strand; PAM type: YTN; PAM sequence: CTC
aaactccactctttgtctct

SEQ ID NO: 378424 - DNA, 20 bp, Artificial Sequence
  Description of Artificial Sequence: Synthetic oligonucleotide
  Target: LAMA2; (+) strand; PAM type: YTN; PAM sequence: CTC
cactctttgtctctcaactc

SEQ ID NO: 378425 - DNA, 20 bp, Artificial Sequence
  Description of Artificial Sequence: Synthetic oligonucleotide
  Target: LAMA2; (+) strand; PAM type: YTN; PAM sequence: CTC
tttgtctctcaactcagcta

SEQ ID NO: 378426 - DNA, 20 bp, Artificial Sequence
  Description of Artificial Sequence: Synthetic oligonucleotide
  Target: LAMA2; (+) strand; PAM type: YTN; PAM sequence: CTT
tgtctctcaactcagctata

SEQ ID NO: 378427 - DNA, 20 bp, Artificial Sequence
  Description of Artificial Sequence: Synthetic oligonucleotide
  Target: LAMA2; (+) strand; PAM type: YTN; PAM sequence: TTT
gtctctcaactcagctataa

SEQ ID NO: 378428 - DNA, 20 bp, Artificial Sequence
  Description of Artificial Sequence: Synthetic oligonucleotide
  Target: LAMA2; (+) strand; PAM type: YTN; PAM sequence: TTG
tctctcaactcagctataat

SEQ ID NO: 378429 - DNA, 20 bp, Artificial Sequence
  Description of Artificial Sequence: Synthetic oligonucleotide
  Target: LAMA2; (+) strand; PAM type: YTN; PAM sequence: CTC
tcaactcagctataatgcgg

SEQ ID NO: 378430 - DNA, 20 bp, Artificial Sequence
  Description of Artificial Sequence: Synthetic oligonucleotide
  Target: LAMA2; (+) strand; PAM type: YTN; PAM sequence: CTC
aactcagctataatgcgggc

SEQ ID NO: 378431 - DNA, 20 bp, Artificial Sequence
  Description of Artificial Sequence: Synthetic oligonucleotide
  Target: LAMA2; (+) strand; PAM type: YTN; PAM sequence: CTC
agctataatgcgggctttgg

SEQ ID NO: 378432 - DNA, 20 bp, Artificial Sequence
  Description of Artificial Sequence: Synthetic oligonucleotide
  Target: LAMA2; (+) strand; PAM type: YTN; PAM sequence: CTA
taatgcgggctttgggttta

SEQ ID NO: 378433 - DNA, 20 bp, Artificial Sequence
  Description of Artificial Sequence: Synthetic oligonucleotide
  Target: LAMA2; (+) strand; PAM type: YTN; PAM sequence: CTT
tgggtttaccctctctgtgt

SEQ ID NO: 378434 - DNA, 20 bp, Artificial Sequence
  Description of Artificial Sequence: Synthetic oligonucleotide
  Target: LAMA2; (+) strand; PAM type: YTN; PAM sequence: TTT
gggtttaccctctctgtgtt

SEQ ID NO: 378435 - DNA, 20 bp, Artificial Sequence
  Description of Artificial Sequence: Synthetic oligonucleotide
  Target: LAMA2; (+) strand; PAM type: YTN; PAM sequence: TTG
ggtttaccctctctgtgttg

SEQ ID NO: 378436 - DNA, 20 bp, Artificial Sequence
  Description of Artificial Sequence: Synthetic oligonucleotide
  Target: LAMA2; (+) strand; PAM type: YTN; PAM sequence: TTT
accctctctgtgttgcagcc

SEQ ID NO: 378437 - DNA, 20 bp, Artificial Sequence
  Description of Artificial Sequence: Synthetic oligonucleotide
  Target: LAMA2; (+) strand; PAM type: YTN; PAM sequence: TTA
ccctctctgtgttgcagcct

SEQ ID NO: 378438 - DNA, 20 bp, Artificial Sequence
  Description of Artificial Sequence: Synthetic oligonucleotide
  Target: LAMA2; (+) strand; PAM type: YTN; PAM sequence: CTC
tctgtgttgcagcctagaaa

SEQ ID NO: 378439 - DNA, 20 bp, Artificial Sequence
  Description of Artificial Sequence: Synthetic oligonucleotide
  Target: LAMA2; (+) strand; PAM type: YTN; PAM sequence: CTC
tgtgttgcagcctagaaatt

SEQ ID NO: 378440 - DNA, 20 bp, Artificial Sequence
  Description of Artificial Sequence: Synthetic oligonucleotide
  Target: LAMA2; (+) strand; PAM type: YTN; PAM sequence: CTG
tgttgcagcctagaaattgc

SEQ ID NO: 378441 - DNA, 20 bp, Artificial Sequence
  Description of Artificial Sequence: Synthetic oligonucleotide
  Target: LAMA2; (+) strand; PAM type: YTN; PAM sequence: TTG
cagcctagaaattgcctctg

SEQ ID NO: 378442 - DNA, 20 bp, Artificial Sequence
  Description of Artificial Sequence: Synthetic oligonucleotide
  Target: LAMA2; (+) strand; PAM type: YTN; PAM sequence: CTA
gaaattgcctctgtacactg

SEQ ID NO: 378443 - DNA, 20 bp, Artificial Sequence
  Description of Artificial Sequence: Synthetic oligonucleotide
  Target: LAMA2; (+) strand; PAM type: YTN; PAM sequence: TTG
cctctgtacactgcttcatg

SEQ ID NO: 378444 - DNA, 20 bp, Artificial Sequence
  Description of Artificial Sequence: Synthetic oligonucleotide
  Target: LAMA2; (+) strand; PAM type: YTN; PAM sequence: CTC
tgtacactgcttcatgtttt

SEQ ID NO: 378445 - DNA, 20 bp, Artificial Sequence
  Description of Artificial Sequence: Synthetic oligonucleotide
  Target: LAMA2; (+) strand; PAM type: YTN; PAM sequence: CTG
tacactgcttcatgtttttt

SEQ ID NO: 378446 - DNA, 20 bp, Artificial Sequence
  Description of Artificial Sequence: Synthetic oligonucleotide
  Target: LAMA2; (+) strand; PAM type: YTN; PAM sequence: CTG
cttcatgtttttttccttct

SEQ ID NO: 378447 - DNA, 20 bp, Artificial Sequence
  Description of Artificial Sequence: Synthetic oligonucleotide
  Target: LAMA2; (+) strand; PAM type: YTN; PAM sequence: CTT
catgtttttttccttctctc

SEQ ID NO: 378448 - DNA, 20 bp, Artificial Sequence
  Description of Artificial Sequence: Synthetic oligonucleotide
  Target: LAMA2; (+) strand; PAM type: YTN; PAM sequence: TTC
atgtttttttccttctctca

SEQ ID NO: 378449 - DNA, 20 bp, Artificial Sequence
  Description of Artificial Sequence: Synthetic oligonucleotide
  Target: LAMA2; (+) strand; PAM type: YTN; PAM sequence: TTT
ttttccttctctcagaaatc

SEQ ID NO: 378450 - DNA, 20 bp, Artificial Sequence
  Description of Artificial Sequence: Synthetic oligonucleotide
  Target: LAMA2; (+) strand; PAM type: YTN; PAM sequence: TTT
tttccttctctcagaaatca

SEQ ID NO: 378451 - DNA, 20 bp, Artificial Sequence
  Description of Artificial Sequence: Synthetic oligonucleotide
  Target: LAMA2; (+) strand; PAM type: YTN; PAM sequence: TTT
ttccttctctcagaaatcac

SEQ ID NO: 378452 - DNA, 20 bp, Artificial Sequence
  Description of Artificial Sequence: Synthetic oligonucleotide
  Target: LAMA2; (+) strand; PAM type: YTN; PAM sequence: TTT
tccttctctcagaaatcaca

SEQ ID NO: 378453 - DNA, 20 bp, Artificial Sequence
  Description of Artificial Sequence: Synthetic oligonucleotide
  Target: LAMA2; (+) strand; PAM type: YTN; PAM sequence: TTT
ccttctctcagaaatcacag

SEQ ID NO: 378454 - DNA, 20 bp, Artificial Sequence
  Description of Artificial Sequence: Synthetic oligonucleotide
  Target: LAMA2; (+) strand; PAM type: YTN; PAM sequence: TTC
cttctctcagaaatcacagt

SEQ ID NO: 378455 - DNA, 20 bp, Artificial Sequence
  Description of Artificial Sequence: Synthetic oligonucleotide
  Target: LAMA2; (+) strand; PAM type: YTN; PAM sequence: CTT
ctctcagaaatcacagtcct

SEQ ID NO: 378456 - DNA, 20 bp, Artificial Sequence
  Description of Artificial Sequence: Synthetic oligonucleotide
  Target: LAMA2; (+) strand; PAM type: YTN; PAM sequence: TTC
tctcagaaatcacagtcctg

SEQ ID NO: 378457 - DNA, 20 bp, Artificial Sequence
  Description of Artificial Sequence: Synthetic oligonucleotide
  Target: LAMA2; (+) strand; PAM type: YTN; PAM sequence: CTC
tcagaaatcacagtcctgtg

SEQ ID NO: 378458 - DNA, 20 bp, Artificial Sequence
  Description of Artificial Sequence: Synthetic oligonucleotide
  Target: LAMA2; (+) strand; PAM type: YTN; PAM sequence: CTC
agaaatcacagtcctgtgct

SEQ ID NO: 378459 - DNA, 20 bp, Artificial Sequence
  Description of Artificial Sequence: Synthetic oligonucleotide
  Target: LAMA2; (+) strand; PAM type: YTN; PAM sequence: CTG
tgcttcctataattcaatat

SEQ ID NO: 378460 - DNA, 20 bp, Artificial Sequence
  Description of Artificial Sequence: Synthetic oligonucleotide
  Target: LAMA2; (+) strand; PAM type: YTN; PAM sequence: CTT
cctataattcaatatctaaa

SEQ ID NO: 378461 - DNA, 20 bp, Artificial Sequence
  Description of Artificial Sequence: Synthetic oligonucleotide
  Target: LAMA2; (+) strand; PAM type: YTN; PAM sequence: TTC
ctataattcaatatctaaaa

SEQ ID NO: 378462 - DNA, 20 bp, Artificial Sequence
  Description of Artificial Sequence: Synthetic oligonucleotide
  Target: LAMA2; (+) strand; PAM type: YTN; PAM sequence: CTA
taattcaatatctaaaaaca

SEQ ID NO: 378463 - DNA, 20 bp, Artificial Sequence
  Description of Artificial Sequence: Synthetic oligonucleotide
  Target: LAMA2; (+) strand; PAM type: YTN; PAM sequence: TTC
aatatctaaaaacaattgtt

SEQ ID NO: 378464 - DNA, 20 bp, Artificial Sequence
  Description of Artificial Sequence: Synthetic oligonucleotide
  Target: LAMA2; (+) strand; PAM type: YTN; PAM sequence: CTA
aaaacaattgtttcttggtt

SEQ ID NO: 378465 - DNA, 20 bp, Artificial Sequence
  Description of Artificial Sequence: Synthetic oligonucleotide
  Target: LAMA2; (+) strand; PAM type: YTN; PAM sequence: TTG
tttcttggtttgtattttta

SEQ ID NO: 378466 - DNA, 20 bp, Artificial Sequence
  Description of Artificial Sequence: Synthetic oligonucleotide
  Target: LAMA2; (+) strand; PAM type: YTN; PAM sequence: TTT
cttggtttgtatttttattt

SEQ ID NO: 378467 - DNA, 20 bp, Artificial Sequence
  Description of Artificial Sequence: Synthetic oligonucleotide
  Target: LAMA2; (+) strand; PAM type: YTN; PAM sequence: TTC
ttggtttgtatttttatttt

SEQ ID NO: 378468 - DNA, 20 bp, Artificial Sequence
  Description of Artificial Sequence: Synthetic oligonucleotide
  Target: LAMA2; (+) strand; PAM type: YTN; PAM sequence: CTT
ggtttgtatttttattttag

SEQ ID NO: 378469 - DNA, 20 bp, Artificial Sequence
  Description of Artificial Sequence: Synthetic oligonucleotide
  Target: LAMA2; (+) strand; PAM type: YTN; PAM sequence: TTG
gtttgtatttttattttagt

SEQ ID NO: 378470 - DNA, 20 bp, Artificial Sequence
  Description of Artificial Sequence: Synthetic oligonucleotide
  Target: LAMA2; (+) strand; PAM type: YTN; PAM sequence: TTT
gtatttttattttagttggt

SEQ ID NO: 378471 - DNA, 20 bp, Artificial Sequence
  Description of Artificial Sequence: Synthetic oligonucleotide
  Target: LAMA2; (+) strand; PAM type: YTN; PAM sequence: TTG
tatttttattttagttggtt

SEQ ID NO: 378472 - DNA, 20 bp, Artificial Sequence
  Description of Artificial Sequence: Synthetic oligonucleotide
  Target: LAMA2; (+) strand; PAM type: YTN; PAM sequence: TTT
ttattttagttggttgtgta

SEQ ID NO: 378473 - DNA, 20 bp, Artificial Sequence
  Description of Artificial Sequence: Synthetic oligonucleotide
  Target: LAMA2; (+) strand; PAM type: YTN; PAM sequence: TTT
tattttagttggttgtgtac

SEQ ID NO: 378474 - DNA, 20 bp, Artificial Sequence
  Description of Artificial Sequence: Synthetic oligonucleotide
  Target: LAMA2; (+) strand; PAM type: YTN; PAM sequence: TTT
attttagttggttgtgtact

SEQ ID NO: 378475 - DNA, 20 bp, Artificial Sequence
  Description of Artificial Sequence: Synthetic oligonucleotide
  Target: LAMA2; (+) strand; PAM type: YTN; PAM sequence: TTA
ttttagttggttgtgtactt

SEQ ID NO: 378476 - DNA, 20 bp, Artificial Sequence
  Description of Artificial Sequence: Synthetic oligonucleotide
  Target: LAMA2; (+) strand; PAM type: YTN; PAM sequence: TTT
tagttggttgtgtactttaa

SEQ ID NO: 378477 - DNA, 20 bp, Artificial Sequence
  Description of Artificial Sequence: Synthetic oligonucleotide
  Target: LAMA2; (+) strand; PAM type: YTN; PAM sequence: TTT
agttggttgtgtactttaac

SEQ ID NO: 378478 - DNA, 20 bp, Artificial Sequence
  Description of Artificial Sequence: Synthetic oligonucleotide
  Target: LAMA2; (+) strand; PAM type: YTN; PAM sequence: TTA
gttggttgtgtactttaaca

SEQ ID NO: 378479 - DNA, 20 bp, Artificial Sequence
  Description of Artificial Sequence: Synthetic oligonucleotide
  Target: LAMA2; (+) strand; PAM type: YTN; PAM sequence: TTG
gttgtgtactttaacagctt

SEQ ID NO: 378480 - DNA, 20 bp, Artificial Sequence
  Description of Artificial Sequence: Synthetic oligonucleotide
  Target: LAMA2; (+) strand; PAM type: YTN; PAM sequence: TTG
tgtactttaacagcttaaca

SEQ ID NO: 378481 - DNA, 20 bp, Artificial Sequence
  Description of Artificial Sequence: Synthetic oligonucleotide
  Target: LAMA2; (+) strand; PAM type: YTN; PAM sequence: CTT
taacagcttaacaaagaaga

SEQ ID NO: 378482 - DNA, 20 bp, Artificial Sequence
  Description of Artificial Sequence: Synthetic oligonucleotide
  Target: LAMA2; (+) strand; PAM type: YTN; PAM sequence: TTT
aacagcttaacaaagaagaa

SEQ ID NO: 378483 - DNA, 20 bp, Artificial Sequence
  Description of Artificial Sequence: Synthetic oligonucleotide
  Target: LAMA2; (+) strand; PAM type: YTN; PAM sequence: TTA
acagcttaacaaagaagaat

SEQ ID NO: 378484 - DNA, 20 bp, Artificial Sequence
  Description of Artificial Sequence: Synthetic oligonucleotide
  Target: LAMA2; (+) strand; PAM type: YTN; PAM sequence: CTT
aacaaagaagaataaatact

SEQ ID NO: 378485 - DNA, 20 bp, Artificial Sequence
  Description of Artificial Sequence: Synthetic oligonucleotide
  Target: LAMA2; (+) strand; PAM type: YTN; PAM sequence: TTA
acaaagaagaataaatactg

SEQ ID NO: 378486 - DNA, 20 bp, Artificial Sequence
  Description of Artificial Sequence: Synthetic oligonucleotide
  Target: LAMA2; (+) strand; PAM type: YTN; PAM sequence: CTG
taaaaactaagaagaggctg

SEQ ID NO: 378487 - DNA, 20 bp, Artificial Sequence
  Description of Artificial Sequence: Synthetic oligonucleotide
  Target: LAMA2; (+) strand; PAM type: YTN; PAM sequence: CTA
agaagaggctgttcaaaaga

SEQ ID NO: 378488 - DNA, 20 bp, Artificial Sequence
  Description of Artificial Sequence: Synthetic oligonucleotide
  Target: LAMA2; (+) strand; PAM type: YTN; PAM sequence: CTG
ttcaaaagaagaatattctt

SEQ ID NO: 378489 - DNA, 20 bp, Artificial Sequence
  Description of Artificial Sequence: Synthetic oligonucleotide
  Target: LAMA2; (+) strand; PAM type: YTN; PAM sequence: TTC
aaaagaagaatattcttcag

SEQ ID NO: 378490 - DNA, 20 bp, Artificial Sequence
  Description of Artificial Sequence: Synthetic oligonucleotide
  Target: LAMA2; (+) strand; PAM type: YTN; PAM sequence: TTC
ttcagtgcctaatgcaacac

SEQ ID NO: 378491 - DNA, 20 bp, Artificial Sequence
  Description of Artificial Sequence: Synthetic oligonucleotide
  Target: LAMA2; (+) strand; PAM type: YTN; PAM sequence: CTT
cagtgcctaatgcaacacaa

SEQ ID NO: 378492 - DNA, 20 bp, Artificial Sequence
  Description of Artificial Sequence: Synthetic oligonucleotide
  Target: LAMA2; (+) strand; PAM type: YTN; PAM sequence: TTC
agtgcctaatgcaacacaaa

SEQ ID NO: 378493 - DNA, 20 bp, Artificial Sequence
  Description of Artificial Sequence: Synthetic oligonucleotide
  Target: LAMA2; (+) strand; PAM type: YTN; PAM sequence: CTA
atgcaacacaaaggtcaagt

SEQ ID NO: 378494 - DNA, 20 bp, Artificial Sequence
  Description of Artificial Sequence: Synthetic oligonucleotide
  Target: LAMA2; (+) strand; PAM type: YTN; PAM sequence: TTA
gtgctgaagttgttcattaa

SEQ ID NO: 378495 - DNA, 20 bp, Artificial Sequence
  Description of Artificial Sequence: Synthetic oligonucleotide
  Target: LAMA2; (+) strand; PAM type: YTN; PAM sequence: CTG
aagttgttcattaaattgaa

SEQ ID NO: 378496 - DNA, 20 bp, Artificial Sequence
  Description of Artificial Sequence: Synthetic oligonucleotide
  Target: LAMA2; (+) strand; PAM type: YTN; PAM sequence: TTG
ttcattaaattgaagagcaa

SEQ ID NO: 378497 - DNA, 20 bp, Artificial Sequence
  Description of Artificial Sequence: Synthetic oligonucleotide
  Target: LAMA2; (+) strand; PAM type: YTN; PAM sequence: TTC
attaaattgaagagcaataa

SEQ ID NO: 378498 - DNA, 20 bp, Artificial Sequence
  Description of Artificial Sequence: Synthetic oligonucleotide
  Target: LAMA2; (+) strand; PAM type: YTN; PAM sequence: TTA
aattgaagagcaataataag

SEQ ID NO: 378499 - DNA, 20 bp, Artificial Sequence
  Description of Artificial Sequence: Synthetic oligonucleotide
  Target: LAMA2; (+) strand; PAM type: YTN; PAM sequence: TTG
aagagcaataataagggcat

SEQ ID NO: 378500 - DNA, 20 bp, Artificial Sequence
  Description of Artificial Sequence: Synthetic oligonucleotide
  Target: LAMA2; (+) strand; PAM type: YTN; PAM sequence: TTT
ttttatgttagtgggagtcg

SEQ ID NO: 378501 - DNA, 20 bp, Artificial Sequence
  Description of Artificial Sequence: Synthetic oligonucleotide
  Target: LAMA2; (+) strand; PAM type: YTN; PAM sequence: TTT
tttatgttagtgggagtcgt

SEQ ID NO: 378502 - DNA, 20 bp, Artificial Sequence
  Description of Artificial Sequence: Synthetic oligonucleotide
  Target: LAMA2; (+) strand; PAM type: YTN; PAM sequence: TTT
ttatgttagtgggagtcgtt

SEQ ID NO: 378503 - DNA, 20 bp, Artificial Sequence
  Description of Artificial Sequence: Synthetic oligonucleotide
  Target: LAMA2; (+) strand; PAM type: YTN; PAM sequence: TTT
tatgttagtgggagtcgttc

SEQ ID NO: 378504 - DNA, 20 bp, Artificial Sequence
  Description of Artificial Sequence: Synthetic oligonucleotide
  Target: LAMA2; (+) strand; PAM type: YTN; PAM sequence: TTT
atgttagtgggagtcgttcc

SEQ ID NO: 378505 - DNA, 20 bp, Artificial Sequence
  Description of Artificial Sequence: Synthetic oligonucleotide
  Target: LAMA2; (+) strand; PAM type: YTN; PAM sequence: TTA
tgttagtgggagtcgttcca

SEQ ID NO: 378506 - DNA, 20 bp, Artificial Sequence
  Description of Artificial Sequence: Synthetic oligonucleotide
  Target: LAMA2; (+) strand; PAM type: YTN; PAM sequence: TTA
gtgggagtcgttccaattga

SEQ ID NO: 378507 - DNA, 20 bp, Artificial Sequence
  Description of Artificial Sequence: Synthetic oligonucleotide
  Target: LAMA2; (+) strand; PAM type: YTN; PAM sequence: TTC
caattgattccactgggttg

SEQ ID NO: 378508 - DNA, 20 bp, Artificial Sequence
  Description of Artificial Sequence: Synthetic oligonucleotide
  Target: LAMA2; (+) strand; PAM type: YTN; PAM sequence: TTG
attccactgggttgtgaaat

SEQ ID NO: 378509 - DNA, 20 bp, Artificial Sequence
  Description of Artificial Sequence: Synthetic oligonucleotide
  Target: LAMA2; (+) strand; PAM type: YTN; PAM sequence: TTC
cactgggttgtgaaatattg

SEQ ID NO: 378510 - DNA, 20 bp, Artificial Sequence
  Description of Artificial Sequence: Synthetic oligonucleotide
  Target: LAMA2; (+) strand; PAM type: YTN; PAM sequence: CTG
ggttgtgaaatattggaacg

SEQ ID NO: 378511 - DNA, 20 bp, Artificial Sequence
  Description of Artificial Sequence: Synthetic oligonucleotide
  Target: LAMA2; (+) strand; PAM type: YTN; PAM sequence: TTG
tgaaatattggaacgtgatg

SEQ ID NO: 378512 - DNA, 20 bp, Artificial Sequence
  Description of Artificial Sequence: Synthetic oligonucleotide
  Target: LAMA2; (+) strand; PAM type: YTN; PAM sequence: TTG
gaacgtgatgaccaagtgtg

SEQ ID NO: 378513 - DNA, 20 bp, Artificial Sequence
  Description of Artificial Sequence: Synthetic oligonucleotide
  Target: LAMA2; (+) strand; PAM type: YTN; PAM sequence: CTG
tttgaccctatagcagtacc

SEQ ID NO: 378514 - DNA, 20 bp, Artificial Sequence
  Description of Artificial Sequence: Synthetic oligonucleotide
  Target: LAMA2; (+) strand; PAM type: YTN; PAM sequence: TTT
gaccctatagcagtacccta

SEQ ID NO: 378515 - DNA, 20 bp, Artificial Sequence
  Description of Artificial Sequence: Synthetic oligonucleotide
  Target: LAMA2; (+) strand; PAM type: YTN; PAM sequence: TTG
accctatagcagtaccctat

SEQ ID NO: 378516 - DNA, 20 bp, Artificial Sequence
  Description of Artificial Sequence: Synthetic oligonucleotide
  Target: LAMA2; (+) strand; PAM type: YTN; PAM sequence: CTA
tagcagtaccctatagagat

SEQ ID NO: 378517 - DNA, 20 bp, Artificial Sequence
  Description of Artificial Sequence: Synthetic oligonucleotide
  Target: LAMA2; (+) strand; PAM type: YTN; PAM sequence: CTA
tagagatgtaaacttttttt

SEQ ID NO: 378518 - DNA, 20 bp, Artificial Sequence
  Description of Artificial Sequence: Synthetic oligonucleotide
  Target: LAMA2; (+) strand; PAM type: YTN; PAM sequence: CTT
tttttcctgctgagttagca

SEQ ID NO: 378519 - DNA, 20 bp, Artificial Sequence
  Description of Artificial Sequence: Synthetic oligonucleotide
  Target: LAMA2; (+) strand; PAM type: YTN; PAM sequence: TTT
ttttcctgctgagttagcac

SEQ ID NO: 378520 - DNA, 20 bp, Artificial Sequence
  Description of Artificial Sequence: Synthetic oligonucleotide
  Target: LAMA2; (+) strand; PAM type: YTN; PAM sequence: TTT
tttcctgctgagttagcaca

SEQ ID NO: 378521 - DNA, 20 bp, Artificial Sequence
  Description of Artificial Sequence: Synthetic oligonucleotide
  Target: LAMA2; (+) strand; PAM type: YTN; PAM sequence: TTT
ttcctgctgagttagcacag

SEQ ID NO: 378522 - DNA, 20 bp, Artificial Sequence
  Description of Artificial Sequence: Synthetic oligonucleotide
  Target: LAMA2; (+) strand; PAM type: YTN; PAM sequence: TTT
tcctgctgagttagcacaga

SEQ ID NO: 378523 - DNA, 20 bp, Artificial Sequence
  Description of Artificial Sequence: Synthetic oligonucleotide
  Target: LAMA2; (+) strand; PAM type: YTN; PAM sequence: TTT
cctgctgagttagcacagat

SEQ ID NO: 378524 - DNA, 20 bp, Artificial Sequence
  Description of Artificial Sequence: Synthetic oligonucleotide
  Target: LAMA2; (+) strand; PAM type: YTN; PAM sequence: TTC
ctgctgagttagcacagatg

SEQ ID NO: 378525 - DNA, 20 bp, Artificial Sequence
  Description of Artificial Sequence: Synthetic oligonucleotide
  Target: LAMA2; (+) strand; PAM type: YTN; PAM sequence: CTG
ctgagttagcacagatgaaa

SEQ ID NO: 378526 - DNA, 20 bp, Artificial Sequence
  Description of Artificial Sequence: Synthetic oligonucleotide
  Target: LAMA2; (+) strand; PAM type: YTN; PAM sequence: CTG
agttagcacagatgaaataa

SEQ ID NO: 378527 - DNA, 20 bp, Artificial Sequence
  Description of Artificial Sequence: Synthetic oligonucleotide
  Target: LAMA2; (+) strand; PAM type: YTN; PAM sequence: TTA
gcacagatgaaataatagac

SEQ ID NO: 378528 - DNA, 20 bp, Artificial Sequence
  Description of Artificial Sequence: Synthetic oligonucleotide
  Target: LAMA2; (+) strand; PAM type: YTN; PAM sequence: CTC
taaccaccttcacatgtatg

SEQ ID NO: 378529 - DNA, 20 bp, Artificial Sequence
  Description of Artificial Sequence: Synthetic oligonucleotide
  Target: LAMA2; (+) strand; PAM type: YTN; PAM sequence: CTA
accaccttcacatgtatgat

SEQ ID NO: 378530 - DNA, 20 bp, Artificial Sequence
  Description of Artificial Sequence: Synthetic oligonucleotide
  Target: LAMA2; (+) strand; PAM type: YTN; PAM sequence: CTT
cacatgtatgataaaacatt

SEQ ID NO: 378531 - DNA, 20 bp, Artificial Sequence
  Description of Artificial Sequence: Synthetic oligonucleotide
  Target: LAMA2; (+) strand; PAM type: YTN; PAM sequence: TTC
acatgtatgataaaacattt

SEQ ID NO: 378532 - DNA, 20 bp, Artificial Sequence
  Description of Artificial Sequence: Synthetic oligonucleotide
  Target: LAMA2; (+) strand; PAM type: YTN; PAM sequence: TTT
gaacctggtctagaatatgc

SEQ ID NO: 378533 - DNA, 20 bp, Artificial Sequence
  Description of Artificial Sequence: Synthetic oligonucleotide
  Target: LAMA2; (+) strand; PAM type: YTN; PAM sequence: TTG
aacctggtctagaatatgct

SEQ ID NO: 378534 - DNA, 20 bp, Artificial Sequence
  Description of Artificial Sequence: Synthetic oligonucleotide
  Target: LAMA2; (+) strand; PAM type: YTN; PAM sequence: CTG
gtctagaatatgctgaccta

SEQ ID NO: 378535 - DNA, 20 bp, Artificial Sequence
  Description of Artificial Sequence: Synthetic oligonucleotide
  Target: LAMA2; (+) strand; PAM type: YTN; PAM sequence: CTA
gaatatgctgacctagagga

SEQ ID NO: 378536 - DNA, 20 bp, Artificial Sequence
  Description of Artificial Sequence: Synthetic oligonucleotide
  Target: LAMA2; (+) strand; PAM type: YTN; PAM sequence: CTG
acctagaggaaaacaagcat

SEQ ID NO: 378537 - DNA, 20 bp, Artificial Sequence
  Description of Artificial Sequence: Synthetic oligonucleotide
  Target: LAMA2; (+) strand; PAM type: YTN; PAM sequence: CTA
gaggaaaacaagcatattga

SEQ ID NO: 378538 - DNA, 20 bp, Artificial Sequence
  Description of Artificial Sequence: Synthetic oligonucleotide
  Target: LAMA2; (+) strand; PAM type: YTN; PAM sequence: TTG
atgattcttcaaggaagttc

SEQ ID NO: 378539 - DNA, 20 bp, Artificial Sequence
  Description of Artificial Sequence: Synthetic oligonucleotide
  Target: LAMA2; (+) strand; PAM type: YTN; PAM sequence: TTC
ttcaaggaagttcagatgtc

SEQ ID NO: 378540 - DNA, 20 bp, Artificial Sequence
  Description of Artificial Sequence: Synthetic oligonucleotide
  Target: LAMA2; (+) strand; PAM type: YTN; PAM sequence: CTT
caaggaagttcagatgtctg

SEQ ID NO: 378541 - DNA, 20 bp, Artificial Sequence
  Description of Artificial Sequence: Synthetic oligonucleotide
  Target: LAMA2; (+) strand; PAM type: YTN; PAM sequence: TTC
aaggaagttcagatgtctga

SEQ ID NO: 378542 - DNA, 20 bp, Artificial Sequence
  Description of Artificial Sequence: Synthetic oligonucleotide
  Target: LAMA2; (+) strand; PAM type: YTN; PAM sequence: TTC
agatgtctgacttcaattag

SEQ ID NO: 378543 - DNA, 20 bp, Artificial Sequence
  Description of Artificial Sequence: Synthetic oligonucleotide
  Target: LAMA2; (+) strand; PAM type: YTN; PAM sequence: CTG
acttcaattagacatgtgat

SEQ ID NO: 378544 - DNA, 20 bp, Artificial Sequence
  Description of Artificial Sequence: Synthetic oligonucleotide
  Target: LAMA2; (+) strand; PAM type: YTN; PAM sequence: CTT
caattagacatgtgattaga

SEQ ID NO: 378545 - DNA, 20 bp, Artificial Sequence
  Description of Artificial Sequence: Synthetic oligonucleotide
  Target: LAMA2; (+) strand; PAM type: YTN; PAM sequence: TTC
aattagacatgtgattagaa

SEQ ID NO: 378546 - DNA, 20 bp, Artificial Sequence
  Description of Artificial Sequence: Synthetic oligonucleotide
  Target: LAMA2; (+) strand; PAM type: YTN; PAM sequence: TTA
gacatgtgattagaaaaaat

SEQ ID NO: 378547 - DNA, 20 bp, Artificial Sequence
  Description of Artificial Sequence: Synthetic oligonucleotide
  Target: LAMA2; (+) strand; PAM type: YTN; PAM sequence: TTA
gaaaaaataaaaactggaca

SEQ ID NO: 378548 - DNA, 20 bp, Artificial Sequence
  Description of Artificial Sequence: Synthetic oligonucleotide
  Target: LAMA2; (+) strand; PAM type: YTN; PAM sequence: CTG
gacaggacattcatttttct

SEQ ID NO: 378549 - DNA, 20 bp, Artificial Sequence
  Description of Artificial Sequence: Synthetic oligonucleotide
  Target: LAMA2; (+) strand; PAM type: YTN; PAM sequence: TTC
atttttctattgtcaatagc

SEQ ID NO: 378550 - DNA, 20 bp, Artificial Sequence
  Description of Artificial Sequence: Synthetic oligonucleotide
  Target: LAMA2; (+) strand; PAM type: YTN; PAM sequence: TTT
ttctattgtcaatagcatta

SEQ ID NO: 378551 - DNA, 20 bp, Artificial Sequence
  Description of Artificial Sequence: Synthetic oligonucleotide
  Target: LAMA2; (+) strand; PAM type: YTN; PAM sequence: TTT
tctattgtcaatagcattat

SEQ ID NO: 378552 - DNA, 20 bp, Artificial Sequence
  Description of Artificial Sequence: Synthetic oligonucleotide
  Target: LAMA2; (+) strand; PAM type: YTN; PAM sequence: TTT
ctattgtcaatagcattatt

SEQ ID NO: 378553 - DNA, 20 bp, Artificial Sequence
  Description of Artificial Sequence: Synthetic oligonucleotide
  Target: LAMA2; (+) strand; PAM type: YTN; PAM sequence: TTC
tattgtcaatagcattatta

SEQ ID NO: 378554 - DNA, 20 bp, Artificial Sequence
  Description of Artificial Sequence: Synthetic oligonucleotide
  Target: LAMA2; (+) strand; PAM type: YTN; PAM sequence: CTA
ttgtcaatagcattattaag

SEQ ID NO: 378555 - DNA, 20 bp, Artificial Sequence
  Description of Artificial Sequence: Synthetic oligonucleotide
  Target: LAMA2; (+) strand; PAM type: YTN; PAM sequence: TTG
tcaatagcattattaagttt

SEQ ID NO: 378556 - DNA, 20 bp, Artificial Sequence
  Description of Artificial Sequence: Synthetic oligonucleotide
  Target: LAMA2; (+) strand; PAM type: YTN; PAM sequence: TTA
ttaagtttaaaatgcaagag

SEQ ID NO: 378557 - DNA, 20 bp, Artificial Sequence
  Description of Artificial Sequence: Synthetic oligonucleotide
  Target: LAMA2; (+) strand; PAM type: YTN; PAM sequence: TTA
agtttaaaatgcaagagagc

SEQ ID NO: 378558 - DNA, 20 bp, Artificial Sequence
  Description of Artificial Sequence: Synthetic oligonucleotide
  Target: LAMA2; (+) strand; PAM type: YTN; PAM sequence: TTT
aaaatgcaagagagctacat

SEQ ID NO: 378559 - DNA, 20 bp, Artificial Sequence
  Description of Artificial Sequence: Synthetic oligonucleotide
  Target: LAMA2; (+) strand; PAM type: YTN; PAM sequence: TTA
aaatgcaagagagctacatt

SEQ ID NO: 378560 - DNA, 20 bp, Artificial Sequence
  Description of Artificial Sequence: Synthetic oligonucleotide
  Target: LAMA2; (+) strand; PAM type: YTN; PAM sequence: CTA
catttttagaaagaaatcaa

SEQ ID NO: 378561 - DNA, 20 bp, Artificial Sequence
  Description of Artificial Sequence: Synthetic oligonucleotide
  Target: LAMA2; (+) strand; PAM type: YTN; PAM sequence: TTT
ttagaaagaaatcaaaaact

SEQ ID NO: 378562 - DNA, 20 bp, Artificial Sequence
  Description of Artificial Sequence: Synthetic oligonucleotide
  Target: LAMA2; (+) strand; PAM type: YTN; PAM sequence: TTT
tagaaagaaatcaaaaactc

SEQ ID NO: 378563 - DNA, 20 bp, Artificial Sequence
  Description of Artificial Sequence: Synthetic oligonucleotide
  Target: LAMA2; (+) strand; PAM type: YTN; PAM sequence: TTT
agaaagaaatcaaaaactcc

SEQ ID NO: 378564 - DNA, 20 bp, Artificial Sequence
  Description of Artificial Sequence: Synthetic oligonucleotide
  Target: LAMA2; (+) strand; PAM type: YTN; PAM sequence: TTA
gaaagaaatcaaaaactcct

SEQ ID NO: 378565 - DNA, 20 bp, Artificial Sequence
  Description of Artificial Sequence: Synthetic oligonucleotide
  Target: LAMA2; (+) strand; PAM type: YTN; PAM sequence: CTC
ctcagaatttcaaagtgttc

SEQ ID NO: 378566 - DNA, 20 bp, Artificial Sequence
  Description of Artificial Sequence: Synthetic oligonucleotide
  Target: LAMA2; (+) strand; PAM type: YTN; PAM sequence: CTC
agaatttcaaagtgttctta

SEQ ID NO: 378567 - DNA, 20 bp, Artificial Sequence
  Description of Artificial Sequence: Synthetic oligonucleotide
  Target: LAMA2; (+) strand; PAM type: YTN; PAM sequence: TTT
caaagtgttcttatgaatat

SEQ ID NO: 378568 - DNA, 20 bp, Artificial Sequence
  Description of Artificial Sequence: Synthetic oligonucleotide
  Target: LAMA2; (+) strand; PAM type: YTN; PAM sequence: TTC
aaagtgttcttatgaatatg

SEQ ID NO: 378569 - DNA, 20 bp, Artificial Sequence
  Description of Artificial Sequence: Synthetic oligonucleotide
  Target: LAMA2; (+) strand; PAM type: YTN; PAM sequence: TTC
ttatgaatatgaacaatgct

SEQ ID NO: 378570 - DNA, 20 bp, Artificial Sequence
  Description of Artificial Sequence: Synthetic oligonucleotide
  Target: LAMA2; (+) strand; PAM type: YTN; PAM sequence: CTT
atgaatatgaacaatgctat

SEQ ID NO: 378571 - DNA, 20 bp, Artificial Sequence
  Description of Artificial Sequence: Synthetic oligonucleotide
  Target: LAMA2; (+) strand; PAM type: YTN; PAM sequence: TTA
tgaatatgaacaatgctata

SEQ ID NO: 378572 - DNA, 20 bp, Artificial Sequence
  Description of Artificial Sequence: Synthetic oligonucleotide
  Target: LAMA2; (+) strand; PAM type: YTN; PAM sequence: CTA
taagtgtctatgactgactt

SEQ ID NO: 378573 - DNA, 20 bp, Artificial Sequence
  Description of Artificial Sequence: Synthetic oligonucleotide
  Target: LAMA2; (+) strand; PAM type: YTN; PAM sequence: CTA
tgactgacttttgcattttc

SEQ ID NO: 378574 - DNA, 20 bp, Artificial Sequence
  Description of Artificial Sequence: Synthetic oligonucleotide
  Target: LAMA2; (+) strand; PAM type: YTN; PAM sequence: CTG
acttttgcattttcagcttc

SEQ ID NO: 378575 - DNA, 20 bp, Artificial Sequence
  Description of Artificial Sequence: Synthetic oligonucleotide
  Target: LAMA2; (+) strand; PAM type: YTN; PAM sequence: CTT
ttgcattttcagcttcaaat

SEQ ID NO: 378576 - DNA, 20 bp, Artificial Sequence
  Description of Artificial Sequence: Synthetic oligonucleotide
  Target: LAMA2; (+) strand; PAM type: YTN; PAM sequence: TTT
tgcattttcagcttcaaatc

SEQ ID NO: 378577 - DNA, 20 bp, Artificial Sequence
  Description of Artificial Sequence: Synthetic oligonucleotide
  Target: LAMA2; (+) strand; PAM type: YTN; PAM sequence: TTT
gcattttcagcttcaaatcc

SEQ ID NO: 378578 - DNA, 20 bp, Artificial Sequence
  Description of Artificial Sequence: Synthetic oligonucleotide
  Target: LAMA2; (+) strand; PAM type: YTN; PAM sequence: TTG
cattttcagcttcaaatcca

SEQ ID NO: 378579 - DNA, 20 bp, Artificial Sequence
  Description of Artificial Sequence: Synthetic oligonucleotide
  Target: LAMA2; (+) strand; PAM type: YTN; PAM sequence: TTT
tcagcttcaaatccaagcat

SEQ ID NO: 378580 - DNA, 20 bp, Artificial Sequence
  Description of Artificial Sequence: Synthetic oligonucleotide
  Target: LAMA2; (+) strand; PAM type: YTN; PAM sequence: TTT
cagcttcaaatccaagcatc

SEQ ID NO: 378581 - DNA, 20 bp, Artificial Sequence
  Description of Artificial Sequence: Synthetic oligonucleotide
  Target: LAMA2; (+) strand; PAM type: YTN; PAM sequence: TTC
agcttcaaatccaagcatcc

SEQ ID NO: 378582 - DNA, 20 bp, Artificial Sequence
  Description of Artificial Sequence: Synthetic oligonucleotide
  Target: LAMA2; (+) strand; PAM type: YTN; PAM sequence: CTT
caaatccaagcatccaccat

SEQ ID NO: 378583 - DNA, 20 bp, Artificial Sequence
  Description of Artificial Sequence: Synthetic oligonucleotide
  Target: LAMA2; (+) strand; PAM type: YTN; PAM sequence: TTC
aaatccaagcatccaccata

SEQ ID NO: 378584 - DNA, 20 bp, Artificial Sequence
  Description of Artificial Sequence: Synthetic oligonucleotide
  Target: LAMA2; (+) strand; PAM type: YTN; PAM sequence: CTT
ggactcaggagtaagcccta

SEQ ID NO: 378585 - DNA, 20 bp, Artificial Sequence
  Description of Artificial Sequence: Synthetic oligonucleotide
  Target: LAMA2; (+) strand; PAM type: YTN; PAM sequence: TTG
gactcaggagtaagccctag

SEQ ID NO: 378586 - DNA, 20 bp, Artificial Sequence
  Description of Artificial Sequence: Synthetic oligonucleotide
  Target: LAMA2; (+) strand; PAM type: YTN; PAM sequence: CTC
aggagtaagccctagggaaa

SEQ ID NO: 378587 - DNA, 20 bp, Artificial Sequence
  Description of Artificial Sequence: Synthetic oligonucleotide
  Target: LAMA2; (+) strand; PAM type: YTN; PAM sequence: CTA
gggaaacttacaagagttcc

SEQ ID NO: 378588 - DNA, 20 bp, Artificial Sequence
  Description of Artificial Sequence: Synthetic oligonucleotide
  Target: LAMA2; (+) strand; PAM type: YTN; PAM sequence: CTT
acaagagttccgttttatcc

SEQ ID NO: 378589 - DNA, 20 bp, Artificial Sequence
  Description of Artificial Sequence: Synthetic oligonucleotide
  Target: LAMA2; (+) strand; PAM type: YTN; PAM sequence: TTA
caagagttccgttttatcca

SEQ ID NO: 378590 - DNA, 20 bp, Artificial Sequence
  Description of Artificial Sequence: Synthetic oligonucleotide
  Target: LAMA2; (+) strand; PAM type: YTN; PAM sequence: TTC
cgttttatccacagaatgct

SEQ ID NO: 378591 - DNA, 20 bp, Artificial Sequence
  Description of Artificial Sequence: Synthetic oligonucleotide
  Target: LAMA2; (+) strand; PAM type: YTN; PAM sequence: TTT
tatccacagaatgctatgat

SEQ ID NO: 378592 - DNA, 20 bp, Artificial Sequence
  Description of Artificial Sequence: Synthetic oligonucleotide
  Target: LAMA2; (+) strand; PAM type: YTN; PAM sequence: TTT
atccacagaatgctatgata

SEQ ID NO: 378593 - DNA, 20 bp, Artificial Sequence
  Description of Artificial Sequence: Synthetic oligonucleotide
  Target: LAMA2; (+) strand; PAM type: YTN; PAM sequence: TTA
tccacagaatgctatgatat

SEQ ID NO: 378594 - DNA, 20 bp, Artificial Sequence
  Description of Artificial Sequence: Synthetic oligonucleotide
  Target: LAMA2; (+) strand; PAM type: YTN; PAM sequence: CTA
tgatatagccaaactctaat

SEQ ID NO: 378595 - DNA, 20 bp, Artificial Sequence
  Description of Artificial Sequence: Synthetic oligonucleotide
  Target: LAMA2; (+) strand; PAM type: YTN; PAM sequence: CTC
taattaaactcttgaaattg

SEQ ID NO: 378596 - DNA, 20 bp, Artificial Sequence
  Description of Artificial Sequence: Synthetic oligonucleotide
  Target: LAMA2; (+) strand; PAM type: YTN; PAM sequence: CTA
attaaactcttgaaattgaa

SEQ ID NO: 378597 - DNA, 20 bp, Artificial Sequence
  Description of Artificial Sequence: Synthetic oligonucleotide
  Target: LAMA2; (+) strand; PAM type: YTN; PAM sequence: TTA
aactcttgaaattgaagttg

SEQ ID NO: 378598 - DNA, 20 bp, Artificial Sequence
  Description of Artificial Sequence: Synthetic oligonucleotide
  Target: LAMA2; (+) strand; PAM type: YTN; PAM sequence: CTC
ttgaaattgaagttgatacc

SEQ ID NO: 378599 - DNA, 20 bp, Artificial Sequence
  Description of Artificial Sequence: Synthetic oligonucleotide
  Target: LAMA2; (+) strand; PAM type: YTN; PAM sequence: CTT
gaaattgaagttgatacctc

SEQ ID NO: 378600 - DNA, 20 bp, Artificial Sequence
  Description of Artificial Sequence: Synthetic oligonucleotide
  Target: LAMA2; (+) strand; PAM type: YTN; PAM sequence: TTG
aaattgaagttgatacctca

SEQ ID NO: 378601 - DNA, 20 bp, Artificial Sequence
  Description of Artificial Sequence: Synthetic oligonucleotide
  Target: LAMA2; (+) strand; PAM type: YTN; PAM sequence: TTG
aagttgatacctcatgttca

SEQ ID NO: 378602 - DNA, 20 bp, Artificial Sequence
  Description of Artificial Sequence: Synthetic oligonucleotide
  Target: LAMA2; (+) strand; PAM type: YTN; PAM sequence: TTG
atacctcatgttcaagatat

SEQ ID NO: 378603 - DNA, 20 bp, Artificial Sequence
  Description of Artificial Sequence: Synthetic oligonucleotide
  Target: LAMA2; (+) strand; PAM type: YTN; PAM sequence: CTC
atgttcaagatataaatcag

SEQ ID NO: 378604 - DNA, 20 bp, Artificial Sequence
  Description of Artificial Sequence: Synthetic oligonucleotide
  Target: LAMA2; (+) strand; PAM type: YTN; PAM sequence: TTC
aagatataaatcaggataaa

SEQ ID NO: 378605 - DNA, 20 bp, Artificial Sequence
  Description of Artificial Sequence: Synthetic oligonucleotide
  Target: LAMA2; (+) strand; PAM type: YTN; PAM sequence: TTC
caagtttctatgaaaacgta

SEQ ID NO: 378606 - DNA, 20 bp, Artificial Sequence
  Description of Artificial Sequence: Synthetic oligonucleotide
  Target: LAMA2; (+) strand; PAM type: YTN; PAM sequence: TTT
ctatgaaaacgtagttatat

SEQ ID NO: 378607 - DNA, 20 bp, Artificial Sequence
  Description of Artificial Sequence: Synthetic oligonucleotide
  Target: LAMA2; (+) strand; PAM type: YTN; PAM sequence: TTC
tatgaaaacgtagttatatg

SEQ ID NO: 378608 - DNA, 20 bp, Artificial Sequence
  Description of Artificial Sequence: Synthetic oligonucleotide
  Target: LAMA2; (+) strand; PAM type: YTN; PAM sequence: CTA
tgaaaacgtagttatatgtt

SEQ ID NO: 378609 - DNA, 20 bp, Artificial Sequence
  Description of Artificial Sequence: Synthetic oligonucleotide
  Target: LAMA2; (+) strand; PAM type: YTN; PAM sequence: TTA
tatgtttagtactatcattt

SEQ ID NO: 378610 - DNA, 20 bp, Artificial Sequence
  Description of Artificial Sequence: Synthetic oligonucleotide
  Target: LAMA2; (+) strand; PAM type: YTN; PAM sequence: TTT
agtactatcatttttactga

SEQ ID NO: 378611 - DNA, 20 bp, Artificial Sequence
  Description of Artificial Sequence: Synthetic oligonucleotide
  Target: LAMA2; (+) strand; PAM type: YTN; PAM sequence: TTA
gtactatcatttttactgat

SEQ ID NO: 378612 - DNA, 20 bp, Artificial Sequence
  Description of Artificial Sequence: Synthetic oligonucleotide
  Target: LAMA2; (+) strand; PAM type: YTN; PAM sequence: CTA
tcatttttactgatcattag

SEQ ID NO: 378613 - DNA, 20 bp, Artificial Sequence
  Description of Artificial Sequence: Synthetic oligonucleotide
  Target: LAMA2; (+) strand; PAM type: YTN; PAM sequence: TTT
ttactgatcattagataatt

SEQ ID NO: 378614 - DNA, 20 bp, Artificial Sequence
  Description of Artificial Sequence: Synthetic oligonucleotide
  Target: LAMA2; (+) strand; PAM type: YTN; PAM sequence: TTT
tactgatcattagataatta

SEQ ID NO: 378615 - DNA, 20 bp, Artificial Sequence
  Description of Artificial Sequence: Synthetic oligonucleotide
  Target: LAMA2; (+) strand; PAM type: YTN; PAM sequence: TTT
actgatcattagataattac

SEQ ID NO: 378616 - DNA, 20 bp, Artificial Sequence
  Description of Artificial Sequence: Synthetic oligonucleotide
  Target: LAMA2; (+) strand; PAM type: YTN; PAM sequence: TTA
ctgatcattagataattact

SEQ ID NO: 378617 - DNA, 20 bp, Artificial Sequence
  Description of Artificial Sequence: Synthetic oligonucleotide
  Target: LAMA2; (+) strand; PAM type: YTN; PAM sequence: CTG
atcattagataattactctg

SEQ ID NO: 378618 - DNA, 20 bp, Artificial Sequence
  Description of Artificial Sequence: Synthetic oligonucleotide
  Target: LAMA2; (+) strand; PAM type: YTN; PAM sequence: TTA
gataattactctgttgacta

SEQ ID NO: 378619 - DNA, 20 bp, Artificial Sequence
  Description of Artificial Sequence: Synthetic oligonucleotide
  Target: LAMA2; (+) strand; PAM type: YTN; PAM sequence: TTA
ctctgttgactaaagttgac

SEQ ID NO: 378620 - DNA, 20 bp, Artificial Sequence
  Description of Artificial Sequence: Synthetic oligonucleotide
  Target: LAMA2; (+) strand; PAM type: YTN; PAM sequence: CTC
tgttgactaaagttgactga

SEQ ID NO: 378621 - DNA, 20 bp, Artificial Sequence
  Description of Artificial Sequence: Synthetic oligonucleotide
  Target: LAMA2; (+) strand; PAM type: YTN; PAM sequence: CTG
ttgactaaagttgactgaat

SEQ ID NO: 378622 - DNA, 20 bp, Artificial Sequence
  Description of Artificial Sequence: Synthetic oligonucleotide
  Target: LAMA2; (+) strand; PAM type: YTN; PAM sequence: TTG
actaaagttgactgaatttt

SEQ ID NO: 378623 - DNA, 20 bp, Artificial Sequence
  Description of Artificial Sequence: Synthetic oligonucleotide
  Target: LAMA2; (+) strand; PAM type: YTN; PAM sequence: CTA
aagttgactgaattttttga

SEQ ID NO: 378624 - DNA, 20 bp, Artificial Sequence
  Description of Artificial Sequence: Synthetic oligonucleotide
  Target: LAMA2; (+) strand; PAM type: YTN; PAM sequence: TTG
actgaattttttgattactt

SEQ ID NO: 378625 - DNA, 20 bp, Artificial Sequence
  Description of Artificial Sequence: Synthetic oligonucleotide
  Target: LAMA2; (+) strand; PAM type: YTN; PAM sequence: CTG
aattttttgattactttaaa

SEQ ID NO: 378626 - DNA, 20 bp, Artificial Sequence
  Description of Artificial Sequence: Synthetic oligonucleotide
  Target: LAMA2; (+) strand; PAM type: YTN; PAM sequence: TTT
tttgattactttaaaatcac

SEQ ID NO: 378627 - DNA, 20 bp, Artificial Sequence
  Description of Artificial Sequence: Synthetic oligonucleotide
  Target: LAMA2; (+) strand; PAM type: YTN; PAM sequence: TTT
ttgattactttaaaatcacc

SEQ ID NO: 378628 - DNA, 20 bp, Artificial Sequence
  Description of Artificial Sequence: Synthetic oligonucleotide
  Target: LAMA2; (+) strand; PAM type: YTN; PAM sequence: TTT
tgattactttaaaatcacca

SEQ ID NO: 378629 - DNA, 20 bp, Artificial Sequence
  Description of Artificial Sequence: Synthetic oligonucleotide
  Target: LAMA2; (+) strand; PAM type: YTN; PAM sequence: TTT
gattactttaaaatcaccat

SEQ ID NO: 378630 - DNA, 20 bp, Artificial Sequence
  Description of Artificial Sequence: Synthetic oligonucleotide
  Target: LAMA2; (+) strand; PAM type: YTN; PAM sequence: TTG
attactttaaaatcaccatc

SEQ ID NO: 378631 - DNA, 20 bp, Artificial Sequence
  Description of Artificial Sequence: Synthetic oligonucleotide
  Target: LAMA2; (+) strand; PAM type: YTN; PAM sequence: TTA
ctttaaaatcaccatcaaaa

SEQ ID NO: 378632 - DNA, 20 bp, Artificial Sequence
  Description of Artificial Sequence: Synthetic oligonucleotide
  Target: LAMA2; (+) strand; PAM type: YTN; PAM sequence: CTT
taaaatcaccatcaaaagtc

SEQ ID NO: 378633 - DNA, 20 bp, Artificial Sequence
  Description of Artificial Sequence: Synthetic oligonucleotide
  Target: LAMA2; (+) strand; PAM type: YTN; PAM sequence: TTT
aaaatcaccatcaaaagtct

SEQ ID NO: 378634 - DNA, 20 bp, Artificial Sequence
  Description of Artificial Sequence: Synthetic oligonucleotide
  Target: LAMA2; (+) strand; PAM type: YTN; PAM sequence: TTA
aaatcaccatcaaaagtcta

SEQ ID NO: 378635 - DNA, 20 bp, Artificial Sequence
  Description of Artificial Sequence: Synthetic oligonucleotide
  Target: LAMA2; (+) strand; PAM type: YTN; PAM sequence: CTA
gacttctgaatcgagaaata

SEQ ID NO: 378636 - DNA, 20 bp, Artificial Sequence
  Description of Artificial Sequence: Synthetic oligonucleotide
  Target: LAMA2; (+) strand; PAM type: YTN; PAM sequence: CTT
ctgaatcgagaaatacttca

SEQ ID NO: 378637 - DNA, 20 bp, Artificial Sequence
  Description of Artificial Sequence: Synthetic oligonucleotide
  Target: LAMA2; (+) strand; PAM type: YTN; PAM sequence: TTC
tgaatcgagaaatacttcac

SEQ ID NO: 378638 - DNA, 20 bp, Artificial Sequence
  Description of Artificial Sequence: Synthetic oligonucleotide
  Target: LAMA2; (+) strand; PAM type: YTN; PAM sequence: CTG
aatcgagaaatacttcacca

SEQ ID NO: 378639 - DNA, 20 bp, Artificial Sequence
  Description of Artificial Sequence: Synthetic oligonucleotide
  Target: LAMA2; (+) strand; PAM type: YTN; PAM sequence: CTT
caccattatgaagaattaca

SEQ ID NO: 378640 - DNA, 20 bp, Artificial Sequence
  Description of Artificial Sequence: Synthetic oligonucleotide
  Target: LAMA2; (+) strand; PAM type: YTN; PAM sequence: TTC
accattatgaagaattacaa

SEQ ID NO: 378641 - DNA, 20 bp, Artificial Sequence
  Description of Artificial Sequence: Synthetic oligonucleotide
  Target: LAMA2; (+) strand; PAM type: YTN; PAM sequence: TTA
tgaagaattacaaaaaaaaa

SEQ ID NO: 378642 - DNA, 20 bp, Artificial Sequence
  Description of Artificial Sequence: Synthetic oligonucleotide
  Target: LAMA2; (+) strand; PAM type: YTN; PAM sequence: TTA
caaaaaaaaacaaaactcat

SEQ ID NO: 378643 - DNA, 20 bp, Artificial Sequence
  Description of Artificial Sequence: Synthetic oligonucleotide
  Target: LAMA2; (+) strand; PAM type: YTN; PAM sequence: CTC
atagagcctgtatcagacaa

SEQ ID NO: 378644 - DNA, 20 bp, Artificial Sequence
  Description of Artificial Sequence: Synthetic oligonucleotide
  Target: LAMA2; (+) strand; PAM type: YTN; PAM sequence: CTG
tatcagacaattcttgcatt

SEQ ID NO: 378645 - DNA, 20 bp, Artificial Sequence
  Description of Artificial Sequence: Synthetic oligonucleotide
  Target: LAMA2; (+) strand; PAM type: YTN; PAM sequence: TTC
ttgcattgctataaagaaat

SEQ ID NO: 378646 - DNA, 20 bp, Artificial Sequence
  Description of Artificial Sequence: Synthetic oligonucleotide
  Target: LAMA2; (+) strand; PAM type: YTN; PAM sequence: CTT
gcattgctataaagaaatac

SEQ ID NO: 378647 - DNA, 20 bp, Artificial Sequence
  Description of Artificial Sequence: Synthetic oligonucleotide
  Target: LAMA2; (+) strand; PAM type: YTN; PAM sequence: TTG
cattgctataaagaaatacc

SEQ ID NO: 378648 - DNA, 20 bp, Artificial Sequence
  Description of Artificial Sequence: Synthetic oligonucleotide
  Target: LAMA2; (+) strand; PAM type: YTN; PAM sequence: TTG
ctataaagaaatacctgaga

SEQ ID NO: 378649 - DNA, 20 bp, Artificial Sequence
  Description of Artificial Sequence: Synthetic oligonucleotide
  Target: LAMA2; (+) strand; PAM type: YTN; PAM sequence: CTA
taaagaaatacctgagactg

SEQ ID NO: 378650 - DNA, 20 bp, Artificial Sequence
  Description of Artificial Sequence: Synthetic oligonucleotide
  Target: LAMA2; (+) strand; PAM type: YTN; PAM sequence: CTG
agactgattataagaaaact

SEQ ID NO: 378651 - DNA, 20 bp, Artificial Sequence
  Description of Artificial Sequence: Synthetic oligonucleotide
  Target: LAMA2; (+) strand; PAM type: YTN; PAM sequence: CTG
attataagaaaactggttta

SEQ ID NO: 378652 - DNA, 20 bp, Artificial Sequence
  Description of Artificial Sequence: Synthetic oligonucleotide
  Target: LAMA2; (+) strand; PAM type: YTN; PAM sequence: TTA
taagaaaactggtttaatgg

SEQ ID NO: 378653 - DNA, 20 bp, Artificial Sequence
  Description of Artificial Sequence: Synthetic oligonucleotide
  Target: LAMA2; (+) strand; PAM type: YTN; PAM sequence: CTG
gtttaatgggctcacagttc

SEQ ID NO: 378654 - DNA, 20 bp, Artificial Sequence
  Description of Artificial Sequence: Synthetic oligonucleotide
  Target: LAMA2; (+) strand; PAM type: YTN; PAM sequence: TTT
aatgggctcacagttctgga

SEQ ID NO: 378655 - DNA, 20 bp, Artificial Sequence
  Description of Artificial Sequence: Synthetic oligonucleotide
  Target: LAMA2; (+) strand; PAM type: YTN; PAM sequence: TTA
atgggctcacagttctggag

SEQ ID NO: 378656 - DNA, 20 bp, Artificial Sequence
  Description of Artificial Sequence: Synthetic oligonucleotide
  Target: LAMA2; (+) strand; PAM type: YTN; PAM sequence: CTC
acagttctggagggtgtaca

SEQ ID NO: 378657 - DNA, 20 bp, Artificial Sequence
  Description of Artificial Sequence: Synthetic oligonucleotide
  Target: LAMA2; (+) strand; PAM type: YTN; PAM sequence: TTC
tggagggtgtacaggaagca

SEQ ID NO: 378658 - DNA, 20 bp, Artificial Sequence
  Description of Artificial Sequence: Synthetic oligonucleotide
  Target: LAMA2; (+) strand; PAM type: YTN; PAM sequence: CTG
gagggtgtacaggaagcata

SEQ ID NO: 378659 - DNA, 20 bp, Artificial Sequence
  Description of Artificial Sequence: Synthetic oligonucleotide
  Target: LAMA2; (+) strand; PAM type: YTN; PAM sequence: CTG
tttctggtgaaggcctcagg

SEQ ID NO: 378660 - DNA, 20 bp, Artificial Sequence
  Description of Artificial Sequence: Synthetic oligonucleotide
  Target: LAMA2; (+) strand; PAM type: YTN; PAM sequence: TTT
ctggtgaaggcctcaggaag

SEQ ID NO: 378661 - DNA, 20 bp, Artificial Sequence
  Description of Artificial Sequence: Synthetic oligonucleotide
  Target: LAMA2; (+) strand; PAM type: YTN; PAM sequence: TTC
tggtgaaggcctcaggaagc

SEQ ID NO: 378662 - DNA, 20 bp, Artificial Sequence
  Description of Artificial Sequence: Synthetic oligonucleotide
  Target: LAMA2; (+) strand; PAM type: YTN; PAM sequence: CTG
gtgaaggcctcaggaagctt

SEQ ID NO: 378663 - DNA, 20 bp, Artificial Sequence
  Description of Artificial Sequence: Synthetic oligonucleotide
  Target: LAMA2; (+) strand; PAM type: YTN; PAM sequence: CTC
aggaagcttccagtcatgat

SEQ ID NO: 378664 - DNA, 20 bp, Artificial Sequence
  Description of Artificial Sequence: Synthetic oligonucleotide
  Target: LAMA2; (+) strand; PAM type: YTN; PAM sequence: CTT
ccagtcatgatggaaggcca

SEQ ID NO: 378665 - DNA, 20 bp, Artificial Sequence
  Description of Artificial Sequence: Synthetic oligonucleotide
  Target: LAMA2; (+) strand; PAM type: YTN; PAM sequence: TTC
cagtcatgatggaaggccaa

SEQ ID NO: 378666 - DNA, 20 bp, Artificial Sequence
  Description of Artificial Sequence: Synthetic oligonucleotide
  Target: LAMA2; (+) strand; PAM type: YTN; PAM sequence: CTT
ccacatggcaggatcaggag

SEQ ID NO: 378667 - DNA, 20 bp, Artificial Sequence
  Description of Artificial Sequence: Synthetic oligonucleotide
  Target: LAMA2; (+) strand; PAM type: YTN; PAM sequence: TTC
cacatggcaggatcaggaga

SEQ ID NO: 378668 - DNA, 20 bp, Artificial Sequence
  Description of Artificial Sequence: Synthetic oligonucleotide
  Target: LAMA2; (+) strand; PAM type: YTN; PAM sequence: TTT
aaacaaccagatcttgccgg

SEQ ID NO: 378669 - DNA, 20 bp, Artificial Sequence
  Description of Artificial Sequence: Synthetic oligonucleotide
  Target: LAMA2; (+) strand; PAM type: YTN; PAM sequence: TTA
aacaaccagatcttgccggt

SEQ ID NO: 378670 - DNA, 20 bp, Artificial Sequence
  Description of Artificial Sequence: Synthetic oligonucleotide
  Target: LAMA2; (+) strand; PAM type: YTN; PAM sequence: CTT
gccggtaggaactcatggtc

SEQ ID NO: 378671 - DNA, 20 bp, Artificial Sequence
  Description of Artificial Sequence: Synthetic oligonucleotide
  Target: LAMA2; (+) strand; PAM type: YTN; PAM sequence: TTG
ccggtaggaactcatggtca

SEQ ID NO: 378672 - DNA, 20 bp, Artificial Sequence
  Description of Artificial Sequence: Synthetic oligonucleotide
  Target: LAMA2; (+) strand; PAM type: YTN; PAM sequence: CTC
atggtcacaaggacagcacc

SEQ ID NO: 378673 - DNA, 20 bp, Artificial Sequence
  Description of Artificial Sequence: Synthetic oligonucleotide
  Target: LAMA2; (+) strand; PAM type: YTN; PAM sequence: CTG
agggatcagcccccatgatc

SEQ ID NO: 378674 - DNA, 20 bp, Artificial Sequence
  Description of Artificial Sequence: Synthetic oligonucleotide
  Target: LAMA2; (+) strand; PAM type: YTN; PAM sequence: CTC
ccaccaggctccacctccaa

SEQ ID NO: 378675 - DNA, 20 bp, Artificial Sequence
  Description of Artificial Sequence: Synthetic oligonucleotide
  Target: LAMA2; (+) strand; PAM type: YTN; PAM sequence: CTC
cacctccaacactggggatt

SEQ ID NO: 378676 - DNA, 20 bp, Artificial Sequence
  Description of Artificial Sequence: Synthetic oligonucleotide
  Target: LAMA2; (+) strand; PAM type: YTN; PAM sequence: CTC
caacactggggattatattt

SEQ ID NO: 378677 - DNA, 20 bp, Artificial Sequence
  Description of Artificial Sequence: Synthetic oligonucleotide
  Target: LAMA2; (+) strand; PAM type: YTN; PAM sequence: CTG
gggattatattttaacacga

SEQ ID NO: 378678 - DNA, 20 bp, Artificial Sequence
  Description of Artificial Sequence: Synthetic oligonucleotide
  Target: LAMA2; (+) strand; PAM type: YTN; PAM sequence: TTA
tattttaacacgagaattag

SEQ ID NO: 378679 - DNA, 20 bp, Artificial Sequence
  Description of Artificial Sequence: Synthetic oligonucleotide
  Target: LAMA2; (+) strand; PAM type: YTN; PAM sequence: TTT
taacacgagaattagtgggg

SEQ ID NO: 378680 - DNA, 20 bp, Artificial Sequence
  Description of Artificial Sequence: Synthetic oligonucleotide
  Target: LAMA2; (+) strand; PAM type: YTN; PAM sequence: TTT
aacacgagaattagtgggga

SEQ ID NO: 378681 - DNA, 20 bp, Artificial Sequence
  Description of Artificial Sequence: Synthetic oligonucleotide
  Target: LAMA2; (+) strand; PAM type: YTN; PAM sequence: TTA
acacgagaattagtggggac

SEQ ID NO: 378682 - DNA, 20 bp, Artificial Sequence
  Description of Artificial Sequence: Synthetic oligonucleotide
  Target: LAMA2; (+) strand; PAM type: YTN; PAM sequence: TTA
gtggggacatatccaactgt

SEQ ID NO: 378683 - DNA, 20 bp, Artificial Sequence
  Description of Artificial Sequence: Synthetic oligonucleotide
  Target: LAMA2; (+) strand; PAM type: YTN; PAM sequence: CTG
tatcagagacctctcaagta

SEQ ID NO: 378684 - DNA, 20 bp, Artificial Sequence
  Description of Artificial Sequence: Synthetic oligonucleotide
  Target: LAMA2; (+) strand; PAM type: YTN; PAM sequence: CTC
tcaagtaatttatttatgag

SEQ ID NO: 378685 - DNA, 20 bp, Artificial Sequence
  Description of Artificial Sequence: Synthetic oligonucleotide
  Target: LAMA2; (+) strand; PAM type: YTN; PAM sequence: CTC
aagtaatttatttatgagca

SEQ ID NO: 378686 - DNA, 20 bp, Artificial Sequence
  Description of Artificial Sequence: Synthetic oligonucleotide
  Target: LAMA2; (+) strand; PAM type: YTN; PAM sequence: TTT
atttatgagcatgtgtttta

SEQ ID NO: 378687 - DNA, 20 bp, Artificial Sequence
  Description of Artificial Sequence: Synthetic oligonucleotide
  Target: LAMA2; (+) strand; PAM type: YTN; PAM sequence: TTA
tttatgagcatgtgttttac

SEQ ID NO: 378688 - DNA, 20 bp, Artificial Sequence
  Description of Artificial Sequence: Synthetic oligonucleotide
  Target: LAMA2; (+) strand; PAM type: YTN; PAM sequence: TTT
atgagcatgtgttttactgt

SEQ ID NO: 378689 - DNA, 20 bp, Artificial Sequence
  Description of Artificial Sequence: Synthetic oligonucleotide
  Target: LAMA2; (+) strand; PAM type: YTN; PAM sequence: TTA
tgagcatgtgttttactgtt

SEQ ID NO: 378690 - DNA, 20 bp, Artificial Sequence
  Description of Artificial Sequence: Synthetic oligonucleotide
  Target: LAMA2; (+) strand; PAM type: YTN; PAM sequence: TTT
tactgtttttaaaactggga

SEQ ID NO: 378691 - DNA, 20 bp, Artificial Sequence
  Description of Artificial Sequence: Synthetic oligonucleotide
  Target: LAMA2; (+) strand; PAM type: YTN; PAM sequence: TTT
actgtttttaaaactgggat

SEQ ID NO: 378692 - DNA, 20 bp, Artificial Sequence
  Description of Artificial Sequence: Synthetic oligonucleotide
  Target: LAMA2; (+) strand; PAM type: YTN; PAM sequence: TTA
ctgtttttaaaactgggatg

SEQ ID NO: 378693 - DNA, 20 bp, Artificial Sequence
  Description of Artificial Sequence: Synthetic oligonucleotide
  Target: LAMA2; (+) strand; PAM type: YTN; PAM sequence: CTG
tttttaaaactgggatgact

SEQ ID NO: 378694 - DNA, 20 bp, Artificial Sequence
  Description of Artificial Sequence: Synthetic oligonucleotide
  Target: LAMA2; (+) strand; PAM type: YTN; PAM sequence: TTT
ttaaaactgggatgacttta

SEQ ID NO: 378695 - DNA, 20 bp, Artificial Sequence
  Description of Artificial Sequence: Synthetic oligonucleotide
  Target: LAMA2; (+) strand; PAM type: YTN; PAM sequence: TTT
taaaactgggatgactttaa

SEQ ID NO: 378696 - DNA, 20 bp, Artificial Sequence
  Description of Artificial Sequence: Synthetic oligonucleotide
  Target: LAMA2; (+) strand; PAM type: YTN; PAM sequence: TTT
aaaactgggatgactttaat

SEQ ID NO: 378697 - DNA, 20 bp, Artificial Sequence
  Description of Artificial Sequence: Synthetic oligonucleotide
  Target: LAMA2; (+) strand; PAM type: YTN; PAM sequence: TTA
aaactgggatgactttaatt

SEQ ID NO: 378698 - DNA, 20 bp, Artificial Sequence
  Description of Artificial Sequence: Synthetic oligonucleotide
  Target: LAMA2; (+) strand; PAM type: YTN; PAM sequence: CTG
ggatgactttaatttaaatg

SEQ ID NO: 378699 - DNA, 20 bp, Artificial Sequence
  Description of Artificial Sequence: Synthetic oligonucleotide
  Target: LAMA2; (+) strand; PAM type: YTN; PAM sequence: CTT
taatttaaatgaacagtgat

SEQ ID NO: 378700 - DNA, 20 bp, Artificial Sequence
  Description of Artificial Sequence: Synthetic oligonucleotide
  Target: LAMA2; (+) strand; PAM type: YTN; PAM sequence: TTT
aatttaaatgaacagtgatt

SEQ ID NO: 378701 - DNA, 20 bp, Artificial Sequence
  Description of Artificial Sequence: Synthetic oligonucleotide
  Target: LAMA2; (+) strand; PAM type: YTN; PAM sequence: TTA
atttaaatgaacagtgattt

SEQ ID NO: 378702 - DNA, 20 bp, Artificial Sequence
  Description of Artificial Sequence: Synthetic oligonucleotide
  Target: LAMA2; (+) strand; PAM type: YTN; PAM sequence: TTT
aaatgaacagtgatttgaga

SEQ ID NO: 378703 - DNA, 20 bp, Artificial Sequence
  Description of Artificial Sequence: Synthetic oligonucleotide
  Target: LAMA2; (+) strand; PAM type: YTN; PAM sequence: TTA
aatgaacagtgatttgagat

SEQ ID NO: 378704 - DNA, 20 bp, Artificial Sequence
  Description of Artificial Sequence: Synthetic oligonucleotide
  Target: LAMA2; (+) strand; PAM type: YTN; PAM sequence: TTT
gagatttatagcttcccttt

SEQ ID NO: 378705 - DNA, 20 bp, Artificial Sequence
  Description of Artificial Sequence: Synthetic oligonucleotide
  Target: LAMA2; (+) strand; PAM type: YTN; PAM sequence: TTG
agatttatagcttccctttc

SEQ ID NO: 378706 - DNA, 20 bp, Artificial Sequence
  Description of Artificial Sequence: Synthetic oligonucleotide
  Target: LAMA2; (+) strand; PAM type: YTN; PAM sequence: TTT
atagcttccctttctttgtg

SEQ ID NO: 378707 - DNA, 20 bp, Artificial Sequence
  Description of Artificial Sequence: Synthetic oligonucleotide
  Target: LAMA2; (+) strand; PAM type: YTN; PAM sequence: TTA
tagcttccctttctttgtgt

SEQ ID NO: 378708 - DNA, 20 bp, Artificial Sequence
  Description of Artificial Sequence: Synthetic oligonucleotide
  Target: LAMA2; (+) strand; PAM type: YTN; PAM sequence: CTT
ccctttctttgtgtcatgga

SEQ ID NO: 378709 - DNA, 20 bp, Artificial Sequence
  Description of Artificial Sequence: Synthetic oligonucleotide
  Target: LAMA2; (+) strand; PAM type: YTN; PAM sequence: TTC
cctttctttgtgtcatggat

SEQ ID NO: 378710 - DNA, 20 bp, Artificial Sequence
  Description of Artificial Sequence: Synthetic oligonucleotide
  Target: LAMA2; (+) strand; PAM type: YTN; PAM sequence: CTT
tctttgtgtcatggataatt

SEQ ID NO: 378711 - DNA, 20 bp, Artificial Sequence
  Description of Artificial Sequence: Synthetic oligonucleotide
  Target: LAMA2; (+) strand; PAM type: YTN; PAM sequence: TTT
ctttgtgtcatggataattt

SEQ ID NO: 378712 - DNA, 20 bp, Artificial Sequence
  Description of Artificial Sequence: Synthetic oligonucleotide
  Target: LAMA2; (+) strand; PAM type: YTN; PAM sequence: TTC
tttgtgtcatggataatttc

SEQ ID NO: 378713 - DNA, 20 bp, Artificial Sequence
  Description of Artificial Sequence: Synthetic oligonucleotide
  Target: LAMA2; (+) strand; PAM type: YTN; PAM sequence: CTT
tgtgtcatggataatttctc

SEQ ID NO: 378714 - DNA, 20 bp, Artificial Sequence
  Description of Artificial Sequence: Synthetic oligonucleotide
  Target: LAMA2; (+) strand; PAM type: YTN; PAM sequence: TTT
gtgtcatggataatttctct

SEQ ID NO: 378715 - DNA, 20 bp, Artificial Sequence
  Description of Artificial Sequence: Synthetic oligonucleotide
  Target: LAMA2; (+) strand; PAM type: YTN; PAM sequence: TTG
tgtcatggataatttctctg

SEQ ID NO: 378716 - DNA, 20 bp, Artificial Sequence
  Description of Artificial Sequence: Synthetic oligonucleotide
  Target: LAMA2; (+) strand; PAM type: YTN; PAM sequence: TTT
ctctgtgctaaggtgtgagc

SEQ ID NO: 378717 - DNA, 20 bp, Artificial Sequence
  Description of Artificial Sequence: Synthetic oligonucleotide
  Target: LAMA2; (+) strand; PAM type: YTN; PAM sequence: TTC
tctgtgctaaggtgtgagca

SEQ ID NO: 378718 - DNA, 20 bp, Artificial Sequence
  Description of Artificial Sequence: Synthetic oligonucleotide
  Target: LAMA2; (+) strand; PAM type: YTN; PAM sequence: CTC
tgtgctaaggtgtgagcata

SEQ ID NO: 378719 - DNA, 20 bp, Artificial Sequence
  Description of Artificial Sequence: Synthetic oligonucleotide
  Target: LAMA2; (+) strand; PAM type: YTN; PAM sequence: CTG
tgctaaggtgtgagcataca

SEQ ID NO: 378720 - DNA, 20 bp, Artificial Sequence
  Description of Artificial Sequence: Synthetic oligonucleotide
  Target: LAMA2; (+) strand; PAM type: YTN; PAM sequence: CTA
aggtgtgagcatacacatca

SEQ ID NO: 378721 - DNA, 20 bp, Artificial Sequence
  Description of Artificial Sequence: Synthetic oligonucleotide
  Target: LAMA2; (+) strand; PAM type: YTN; PAM sequence: TTT
gggctgttattgaagtagaa

SEQ ID NO: 378722 - DNA, 20 bp, Artificial Sequence
  Description of Artificial Sequence: Synthetic oligonucleotide
  Target: LAMA2; (+) strand; PAM type: YTN; PAM sequence: TTG
ggctgttattgaagtagaat

SEQ ID NO: 378723 - DNA, 20 bp, Artificial Sequence
  Description of Artificial Sequence: Synthetic oligonucleotide
  Target: LAMA2; (+) strand; PAM type: YTN; PAM sequence: CTG
ttattgaagtagaatacgaa

SEQ ID NO: 378724 - DNA, 20 bp, Artificial Sequence
  Description of Artificial Sequence: Synthetic oligonucleotide
  Target: LAMA2; (+) strand; PAM type: YTN; PAM sequence: TTA
ttgaagtagaatacgaagcc

SEQ ID NO: 378725 - DNA, 20 bp, Artificial Sequence
  Description of Artificial Sequence: Synthetic oligonucleotide
  Target: LAMA2; (+) strand; PAM type: YTN; PAM sequence: TTG
aagtagaatacgaagcctgc

SEQ ID NO: 378726 - DNA, 20 bp, Artificial Sequence
  Description of Artificial Sequence: Synthetic oligonucleotide
  Target: LAMA2; (+) strand; PAM type: YTN; PAM sequence: CTG
ccttctttcactagcagggg

SEQ ID NO: 378727 - DNA, 20 bp, Artificial Sequence
  Description of Artificial Sequence: Synthetic oligonucleotide
  Target: LAMA2; (+) strand; PAM type: YTN; PAM sequence: CTT
ctttcactagcaggggaata

SEQ ID NO: 378728 - DNA, 20 bp, Artificial Sequence
  Description of Artificial Sequence: Synthetic oligonucleotide
  Target: LAMA2; (+) strand; PAM type: YTN; PAM sequence: TTC
tttcactagcaggggaatag

SEQ ID NO: 378729 - DNA, 20 bp, Artificial Sequence
  Description of Artificial Sequence: Synthetic oligonucleotide
  Target: LAMA2; (+) strand; PAM type: YTN; PAM sequence: CTT
tcactagcaggggaatagtg

SEQ ID NO: 378730 - DNA, 20 bp, Artificial Sequence
  Description of Artificial Sequence: Synthetic oligonucleotide
  Target: LAMA2; (+) strand; PAM type: YTN; PAM sequence: TTT
cactagcaggggaatagtga

SEQ ID NO: 378731 - DNA, 20 bp, Artificial Sequence
  Description of Artificial Sequence: Synthetic oligonucleotide
  Target: LAMA2; (+) strand; PAM type: YTN; PAM sequence: TTC
actagcaggggaatagtgag

SEQ ID NO: 378732 - DNA, 20 bp, Artificial Sequence
  Description of Artificial Sequence: Synthetic oligonucleotide
  Target: LAMA2; (+) strand; PAM type: YTN; PAM sequence: CTA
gcaggggaatagtgagtaaa

SEQ ID NO: 378733 - DNA, 20 bp, Artificial Sequence
  Description of Artificial Sequence: Synthetic oligonucleotide
  Target: LAMA2; (+) strand; PAM type: YTN; PAM sequence: TTC
tctattgctaaacaaatatt

SEQ ID NO: 378734 - DNA, 20 bp, Artificial Sequence
  Description of Artificial Sequence: Synthetic oligonucleotide
  Target: LAMA2; (+) strand; PAM type: YTN; PAM sequence: CTC
tattgctaaacaaatattac

SEQ ID NO: 378735 - DNA, 20 bp, Artificial Sequence
  Description of Artificial Sequence: Synthetic oligonucleotide
  Target: LAMA2; (+) strand; PAM type: YTN; PAM sequence: CTA
ttgctaaacaaatattacct

SEQ ID NO: 378736 - DNA, 20 bp, Artificial Sequence
  Description of Artificial Sequence: Synthetic oligonucleotide
  Target: LAMA2; (+) strand; PAM type: YTN; PAM sequence: TTG
ctaaacaaatattacctcta

SEQ ID NO: 378737 - DNA, 20 bp, Artificial Sequence
  Description of Artificial Sequence: Synthetic oligonucleotide
  Target: LAMA2; (+) strand; PAM type: YTN; PAM sequence: CTA
aacaaatattacctctattt

SEQ ID NO: 378738 - DNA, 20 bp, Artificial Sequence
  Description of Artificial Sequence: Synthetic oligonucleotide
  Target: LAMA2; (+) strand; PAM type: YTN; PAM sequence: TTA
cctctatttatgatttaaat

SEQ ID NO: 378739 - DNA, 20 bp, Artificial Sequence
  Description of Artificial Sequence: Synthetic oligonucleotide
  Target: LAMA2; (+) strand; PAM type: YTN; PAM sequence: CTC
tatttatgatttaaatttga

SEQ ID NO: 378740 - DNA, 20 bp, Artificial Sequence
  Description of Artificial Sequence: Synthetic oligonucleotide
  Target: LAMA2; (+) strand; PAM type: YTN; PAM sequence: CTA
tttatgatttaaatttgatg

SEQ ID NO: 378741 - DNA, 20 bp, Artificial Sequence
  Description of Artificial Sequence: Synthetic oligonucleotide
  Target: LAMA2; (+) strand; PAM type: YTN; PAM sequence: TTT
atgatttaaatttgatgatg

SEQ ID NO: 378742 - DNA, 20 bp, Artificial Sequence
  Description of Artificial Sequence: Synthetic oligonucleotide
  Target: LAMA2; (+) strand; PAM type: YTN; PAM sequence: TTA
tgatttaaatttgatgatgg

SEQ ID NO: 378743 - DNA, 20 bp, Artificial Sequence
  Description of Artificial Sequence: Synthetic oligonucleotide
  Target: LAMA2; (+) strand; PAM type: YTN; PAM sequence: TTT
aaatttgatgatggccatag

SEQ ID NO: 378744 - DNA, 20 bp, Artificial Sequence
  Description of Artificial Sequence: Synthetic oligonucleotide
  Target: LAMA2; (+) strand; PAM type: YTN; PAM sequence: TTA
aatttgatgatggccatagt

SEQ ID NO: 378745 - DNA, 20 bp, Artificial Sequence
  Description of Artificial Sequence: Synthetic oligonucleotide
  Target: LAMA2; (+) strand; PAM type: YTN; PAM sequence: TTT
gatgatggccatagtgctat

SEQ ID NO: 378746 - DNA, 20 bp, Artificial Sequence
  Description of Artificial Sequence: Synthetic oligonucleotide
  Target: LAMA2; (+) strand; PAM type: YTN; PAM sequence: TTG
atgatggccatagtgctatc

SEQ ID NO: 378747 - DNA, 20 bp, Artificial Sequence
  Description of Artificial Sequence: Synthetic oligonucleotide
  Target: LAMA2; (+) strand; PAM type: YTN; PAM sequence: CTA
tctaaacacatggttaatgg

SEQ ID NO: 378748 - DNA, 20 bp, Artificial Sequence
  Description of Artificial Sequence: Synthetic oligonucleotide
  Target: LAMA2; (+) strand; PAM type: YTN; PAM sequence: CTA
aacacatggttaatggtctg

SEQ ID NO: 378749 - DNA, 20 bp, Artificial Sequence
  Description of Artificial Sequence: Synthetic oligonucleotide
  Target: LAMA2; (+) strand; PAM type: YTN; PAM sequence: TTA
atggtctggtttattctcca

SEQ ID NO: 378750 - DNA, 20 bp, Artificial Sequence
  Description of Artificial Sequence: Synthetic oligonucleotide
  Target: LAMA2; (+) strand; PAM type: YTN; PAM sequence: CTG
gtttattctccactataact

SEQ ID NO: 378751 - DNA, 20 bp, Artificial Sequence
  Description of Artificial Sequence: Synthetic oligonucleotide
  Target: LAMA2; (+) strand; PAM type: YTN; PAM sequence: TTT
attctccactataacttcct

SEQ ID NO: 378752 - DNA, 20 bp, Artificial Sequence
  Description of Artificial Sequence: Synthetic oligonucleotide
  Target: LAMA2; (+) strand; PAM type: YTN; PAM sequence: TTA
ttctccactataacttcctg

SEQ ID NO: 378753 - DNA, 20 bp, Artificial Sequence
  Description of Artificial Sequence: Synthetic oligonucleotide
  Target: LAMA2; (+) strand; PAM type: YTN; PAM sequence: TTC
tccactataacttcctgaat

SEQ ID NO: 378754 - DNA, 20 bp, Artificial Sequence
  Description of Artificial Sequence: Synthetic oligonucleotide
  Target: LAMA2; (+) strand; PAM type: YTN; PAM sequence: CTC
cactataacttcctgaataa

SEQ ID NO: 378755 - DNA, 20 bp, Artificial Sequence
  Description of Artificial Sequence: Synthetic oligonucleotide
  Target: LAMA2; (+) strand; PAM type: YTN; PAM sequence: CTA
taacttcctgaataaacttc

SEQ ID NO: 378756 - DNA, 20 bp, Artificial Sequence
  Description of Artificial Sequence: Synthetic oligonucleotide
  Target: LAMA2; (+) strand; PAM type: YTN; PAM sequence: CTT
cctgaataaacttcctgatt

SEQ ID NO: 378757 - DNA, 20 bp, Artificial Sequence
  Description of Artificial Sequence: Synthetic oligonucleotide
  Target: LAMA2; (+) strand; PAM type: YTN; PAM sequence: TTC
ctgaataaacttcctgattt

SEQ ID NO: 378758 - DNA, 20 bp, Artificial Sequence
  Description of Artificial Sequence: Synthetic oligonucleotide
  Target: LAMA2; (+) strand; PAM type: YTN; PAM sequence: CTG
aataaacttcctgatttgga

SEQ ID NO: 378759 - DNA, 20 bp, Artificial Sequence
  Description of Artificial Sequence: Synthetic oligonucleotide
  Target: LAMA2; (+) strand; PAM type: YTN; PAM sequence: CTT
cctgatttggaaaggtccca

SEQ ID NO: 378760 - DNA, 20 bp, Artificial Sequence
  Description of Artificial Sequence: Synthetic oligonucleotide
  Target: LAMA2; (+) strand; PAM type: YTN; PAM sequence: TTC
ctgatttggaaaggtcccaa

SEQ ID NO: 378761 - DNA, 20 bp, Artificial Sequence
  Description of Artificial Sequence: Synthetic oligonucleotide
  Target: LAMA2; (+) strand; PAM type: YTN; PAM sequence: CTG
atttggaaaggtcccaatgt

SEQ ID NO: 378762 - DNA, 20 bp, Artificial Sequence
  Description of Artificial Sequence: Synthetic oligonucleotide
  Target: LAMA2; (+) strand; PAM type: YTN; PAM sequence: TTT
ggaaaggtcccaatgtctat

SEQ ID NO: 378763 - DNA, 20 bp, Artificial Sequence
  Description of Artificial Sequence: Synthetic oligonucleotide
  Target: LAMA2; (+) strand; PAM type: YTN; PAM sequence: TTG
gaaaggtcccaatgtctatt

SEQ ID NO: 378764 - DNA, 20 bp, Artificial Sequence
  Description of Artificial Sequence: Synthetic oligonucleotide
  Target: LAMA2; (+) strand; PAM type: YTN; PAM sequence: CTA
tttgtactgtcaacaatttt

SEQ ID NO: 378765 - DNA, 20 bp, Artificial Sequence
  Description of Artificial Sequence: Synthetic oligonucleotide
  Target: LAMA2; (+) strand; PAM type: YTN; PAM sequence: TTT
gtactgtcaacaattttgta

SEQ ID NO: 378766 - DNA, 20 bp, Artificial Sequence
  Description of Artificial Sequence: Synthetic oligonucleotide
  Target: LAMA2; (+) strand; PAM type: YTN; PAM sequence: TTG
tactgtcaacaattttgtaa

SEQ ID NO: 378767 - DNA, 20 bp, Artificial Sequence
  Description of Artificial Sequence: Synthetic oligonucleotide
  Target: LAMA2; (+) strand; PAM type: YTN; PAM sequence: CTG
tcaacaattttgtaaaaatt

SEQ ID NO: 378768 - DNA, 20 bp, Artificial Sequence
  Description of Artificial Sequence: Synthetic oligonucleotide
  Target: LAMA2; (+) strand; PAM type: YTN; PAM sequence: TTT
tgtaaaaattcatgctttgg

SEQ ID NO: 378769 - DNA, 20 bp, Artificial Sequence
  Description of Artificial Sequence: Synthetic oligonucleotide
  Target: LAMA2; (+) strand; PAM type: YTN; PAM sequence: TTT
gtaaaaattcatgctttggt

SEQ ID NO: 378770 - DNA, 20 bp, Artificial Sequence
  Description of Artificial Sequence: Synthetic oligonucleotide
  Target: LAMA2; (+) strand; PAM type: YTN; PAM sequence: TTG
taaaaattcatgctttggtt

SEQ ID NO: 378771 - DNA, 20 bp, Artificial Sequence
  Description of Artificial Sequence: Synthetic oligonucleotide
  Target: LAMA2; (+) strand; PAM type: YTN; PAM sequence: TTC
atgctttggttttatacaat

SEQ ID NO: 378772 - DNA, 20 bp, Artificial Sequence
  Description of Artificial Sequence: Synthetic oligonucleotide
  Target: LAMA2; (+) strand; PAM type: YTN; PAM sequence: CTT
tggttttatacaattatttg

SEQ ID NO: 378773 - DNA, 20 bp, Artificial Sequence
  Description of Artificial Sequence: Synthetic oligonucleotide
  Target: LAMA2; (+) strand; PAM type: YTN; PAM sequence: TTT
ggttttatacaattatttgg

SEQ ID NO: 378774 - DNA, 20 bp, Artificial Sequence
  Description of Artificial Sequence: Synthetic oligonucleotide
  Target: LAMA2; (+) strand; PAM type: YTN; PAM sequence: TTG
gttttatacaattatttgga

SEQ ID NO: 378775 - DNA, 20 bp, Artificial Sequence
  Description of Artificial Sequence: Synthetic oligonucleotide
  Target: LAMA2; (+) strand; PAM type: YTN; PAM sequence: TTT
tatacaattatttggataac

SEQ ID NO: 378776 - DNA, 20 bp, Artificial Sequence
  Description of Artificial Sequence: Synthetic oligonucleotide
  Target: LAMA2; (+) strand; PAM type: YTN; PAM sequence: TTT
atacaattatttggataact

SEQ ID NO: 378777 - DNA, 20 bp, Artificial Sequence
  Description of Artificial Sequence: Synthetic oligonucleotide
  Target: LAMA2; (+) strand; PAM type: YTN; PAM sequence: TTA
tacaattatttggataactt

SEQ ID NO: 378778 - DNA, 20 bp, Artificial Sequence
  Description of Artificial Sequence: Synthetic oligonucleotide
  Target: LAMA2; (+) strand; PAM type: YTN; PAM sequence: TTA
tttggataacttcatatttt

SEQ ID NO: 378779 - DNA, 20 bp, Artificial Sequence
  Description of Artificial Sequence: Synthetic oligonucleotide
  Target: LAMA2; (+) strand; PAM type: YTN; PAM sequence: TTT
ggataacttcatattttagt

SEQ ID NO: 378780 - DNA, 20 bp, Artificial Sequence
  Description of Artificial Sequence: Synthetic oligonucleotide
  Target: LAMA2; (+) strand; PAM type: YTN; PAM sequence: TTG
gataacttcatattttagtt

SEQ ID NO: 378781 - DNA, 20 bp, Artificial Sequence
  Description of Artificial Sequence: Synthetic oligonucleotide
  Target: LAMA2; (+) strand; PAM type: YTN; PAM sequence: CTT
catattttagttaaagataa

SEQ ID NO: 378782 - DNA, 20 bp, Artificial Sequence
  Description of Artificial Sequence: Synthetic oligonucleotide
  Target: LAMA2; (+) strand; PAM type: YTN; PAM sequence: TTC
atattttagttaaagataaa

SEQ ID NO: 378783 - DNA, 20 bp, Artificial Sequence
  Description of Artificial Sequence: Synthetic oligonucleotide
  Target: LAMA2; (+) strand; PAM type: YTN; PAM sequence: TTT
tagttaaagataaagatgcc

SEQ ID NO: 378784 - DNA, 20 bp, Artificial Sequence
  Description of Artificial Sequence: Synthetic oligonucleotide
  Target: LAMA2; (+) strand; PAM type: YTN; PAM sequence: TTT
agttaaagataaagatgcct

SEQ ID NO: 378785 - DNA, 20 bp, Artificial Sequence
  Description of Artificial Sequence: Synthetic oligonucleotide
  Target: LAMA2; (+) strand; PAM type: YTN; PAM sequence: TTA
gttaaagataaagatgcctc

SEQ ID NO: 378786 - DNA, 20 bp, Artificial Sequence
  Description of Artificial Sequence: Synthetic oligonucleotide
  Target: LAMA2; (+) strand; PAM type: YTN; PAM sequence: TTA
aagataaagatgcctcacag

SEQ ID NO: 378787 - DNA, 20 bp, Artificial Sequence
  Description of Artificial Sequence: Synthetic oligonucleotide
  Target: LAMA2; (+) strand; PAM type: YTN; PAM sequence: CTC
acaggataatttaaatttat

SEQ ID NO: 378788 - DNA, 20 bp, Artificial Sequence
  Description of Artificial Sequence: Synthetic oligonucleotide
  Target: LAMA2; (+) strand; PAM type: YTN; PAM sequence: TTT
aaatttattatttgattata

SEQ ID NO: 378789 - DNA, 20 bp, Artificial Sequence
  Description of Artificial Sequence: Synthetic oligonucleotide
  Target: LAMA2; (+) strand; PAM type: YTN; PAM sequence: TTA
aatttattatttgattatag

SEQ ID NO: 378790 - DNA, 20 bp, Artificial Sequence
  Description of Artificial Sequence: Synthetic oligonucleotide
  Target: LAMA2; (+) strand; PAM type: YTN; PAM sequence: TTT
attatttgattatagttttg

SEQ ID NO: 378791 - DNA, 20 bp, Artificial Sequence
  Description of Artificial Sequence: Synthetic oligonucleotide
  Target: LAMA2; (+) strand; PAM type: YTN; PAM sequence: TTA
ttatttgattatagttttga

SEQ ID NO: 378792 - DNA, 20 bp, Artificial Sequence
  Description of Artificial Sequence: Synthetic oligonucleotide
  Target: LAMA2; (+) strand; PAM type: YTN; PAM sequence: TTA
tttgattatagttttgataa

SEQ ID NO: 378793 - DNA, 20 bp, Artificial Sequence
  Description of Artificial Sequence: Synthetic oligonucleotide
  Target: LAMA2; (+) strand; PAM type: YTN; PAM sequence: TTT
gattatagttttgataacat

SEQ ID NO: 378794 - DNA, 20 bp, Artificial Sequence
  Description of Artificial Sequence: Synthetic oligonucleotide
  Target: LAMA2; (+) strand; PAM type: YTN; PAM sequence: TTG
attatagttttgataacatg

SEQ ID NO: 378795 - DNA, 20 bp, Artificial Sequence
  Description of Artificial Sequence: Synthetic oligonucleotide
  Target: LAMA2; (+) strand; PAM type: YTN; PAM sequence: TTA
tagttttgataacatgattt

SEQ ID NO: 378796 - DNA, 20 bp, Artificial Sequence
  Description of Artificial Sequence: Synthetic oligonucleotide
  Target: LAMA2; (+) strand; PAM type: YTN; PAM sequence: TTT
tgataacatgattttctatt

SEQ ID NO: 378797 - DNA, 20 bp, Artificial Sequence
  Description of Artificial Sequence: Synthetic oligonucleotide
  Target: LAMA2; (+) strand; PAM type: YTN; PAM sequence: TTT
gataacatgattttctatta

SEQ ID NO: 378798 - DNA, 20 bp, Artificial Sequence
  Description of Artificial Sequence: Synthetic oligonucleotide
  Target: LAMA2; (+) strand; PAM type: YTN; PAM sequence: TTG
ataacatgattttctattaa

SEQ ID NO: 378799 - DNA, 20 bp, Artificial Sequence
  Description of Artificial Sequence: Synthetic oligonucleotide
  Target: LAMA2; (+) strand; PAM type: YTN; PAM sequence: TTT
tctattaatacccgattatg

SEQ ID NO: 378800 - DNA, 20 bp, Artificial Sequence
  Description of Artificial Sequence: Synthetic oligonucleotide
  Target: LAMA2; (+) strand; PAM type: YTN; PAM sequence: TTT
ctattaatacccgattatgg

SEQ ID NO: 378801 - DNA, 20 bp, Artificial Sequence
  Description of Artificial Sequence: Synthetic oligonucleotide
  Target: LAMA2; (+) strand; PAM type: YTN; PAM sequence: TTC
tattaatacccgattatggc

SEQ ID NO: 378802 - DNA, 20 bp, Artificial Sequence
  Description of Artificial Sequence: Synthetic oligonucleotide
  Target: LAMA2; (+) strand; PAM type: YTN; PAM sequence: CTA
ttaatacccgattatggcct

SEQ ID NO: 378803 - DNA, 20 bp, Artificial Sequence
  Description of Artificial Sequence: Synthetic oligonucleotide
  Target: LAMA2; (+) strand; PAM type: YTN; PAM sequence: TTA
atacccgattatggcctatt

SEQ ID NO: 378804 - DNA, 20 bp, Artificial Sequence
  Description of Artificial Sequence: Synthetic oligonucleotide
  Target: LAMA2; (+) strand; PAM type: YTN; PAM sequence: TTA
tggcctattttgtttaagtg

SEQ ID NO: 378805 - DNA, 20 bp, Artificial Sequence
  Description of Artificial Sequence: Synthetic oligonucleotide
  Target: LAMA2; (+) strand; PAM type: YTN; PAM sequence: CTA
ttttgtttaagtgagttaat

SEQ ID NO: 378806 - DNA, 20 bp, Artificial Sequence
  Description of Artificial Sequence: Synthetic oligonucleotide
  Target: LAMA2; (+) strand; PAM type: YTN; PAM sequence: TTT
tgtttaagtgagttaataca

SEQ ID NO: 378807 - DNA, 20 bp, Artificial Sequence
  Description of Artificial Sequence: Synthetic oligonucleotide
  Target: LAMA2; (+) strand; PAM type: YTN; PAM sequence: TTT
gtttaagtgagttaatacat

SEQ ID NO: 378808 - DNA, 20 bp, Artificial Sequence
  Description of Artificial Sequence: Synthetic oligonucleotide
  Target: LAMA2; (+) strand; PAM type: YTN; PAM sequence: TTG
tttaagtgagttaatacata

SEQ ID NO: 378809 - DNA, 20 bp, Artificial Sequence
  Description of Artificial Sequence: Synthetic oligonucleotide
  Target: LAMA2; (+) strand; PAM type: YTN; PAM sequence: TTT
aagtgagttaatacatactc

SEQ ID NO: 378810 - DNA, 20 bp, Artificial Sequence
  Description of Artificial Sequence: Synthetic oligonucleotide
  Target: LAMA2; (+) strand; PAM type: YTN; PAM sequence: TTA
agtgagttaatacatactca

SEQ ID NO: 378811 - DNA, 20 bp, Artificial Sequence
  Description of Artificial Sequence: Synthetic oligonucleotide
  Target: LAMA2; (+) strand; PAM type: YTN; PAM sequence: TTA
atacatactcaaagcagttg

SEQ ID NO: 378812 - DNA, 20 bp, Artificial Sequence
  Description of Artificial Sequence: Synthetic oligonucleotide
  Target: LAMA2; (+) strand; PAM type: YTN; PAM sequence: CTC
aaagcagttggcaaagaaaa

SEQ ID NO: 378813 - DNA, 20 bp, Artificial Sequence
  Description of Artificial Sequence: Synthetic oligonucleotide
  Target: LAMA2; (+) strand; PAM type: YTN; PAM sequence: TTG
gcaaagaaaaactatgtaag

SEQ ID NO: 378814 - DNA, 20 bp, Artificial Sequence
  Description of Artificial Sequence: Synthetic oligonucleotide
  Target: LAMA2; (+) strand; PAM type: YTN; PAM sequence: CTA
tgtaagtgaatatgtaagac

SEQ ID NO: 378815 - DNA, 20 bp, Artificial Sequence
  Description of Artificial Sequence: Synthetic oligonucleotide
  Target: LAMA2; (+) strand; PAM type: YTN; PAM sequence: CTA
attttgaaatttgattctac

SEQ ID NO: 378816 - DNA, 20 bp, Artificial Sequence
  Description of Artificial Sequence: Synthetic oligonucleotide
  Target: LAMA2; (+) strand; PAM type: YTN; PAM sequence: TTT
tgaaatttgattctacatct

SEQ ID NO: 378817 - DNA, 20 bp, Artificial Sequence
  Description of Artificial Sequence: Synthetic oligonucleotide
  Target: LAMA2; (+) strand; PAM type: YTN; PAM sequence: TTT
gaaatttgattctacatctg

SEQ ID NO: 378818 - DNA, 20 bp, Artificial Sequence
  Description of Artificial Sequence: Synthetic oligonucleotide
  Target: LAMA2; (+) strand; PAM type: YTN; PAM sequence: TTG
aaatttgattctacatctga

SEQ ID NO: 378819 - DNA, 20 bp, Artificial Sequence
  Description of Artificial Sequence: Synthetic oligonucleotide
  Target: LAMA2; (+) strand; PAM type: YTN; PAM sequence: TTT
gattctacatctgatgttct

SEQ ID NO: 378820 - DNA, 20 bp, Artificial Sequence
  Description of Artificial Sequence: Synthetic oligonucleotide
  Target: LAMA2; (+) strand; PAM type: YTN; PAM sequence: TTG
attctacatctgatgttctt

SEQ ID NO: 378821 - DNA, 20 bp, Artificial Sequence
  Description of Artificial Sequence: Synthetic oligonucleotide
  Target: LAMA2; (+) strand; PAM type: YTN; PAM sequence: TTC
tacatctgatgttctttaag

SEQ ID NO: 378822 - DNA, 20 bp, Artificial Sequence
  Description of Artificial Sequence: Synthetic oligonucleotide
  Target: LAMA2; (+) strand; PAM type: YTN; PAM sequence: CTA
catctgatgttctttaagtt

SEQ ID NO: 378823 - DNA, 20 bp, Artificial Sequence
  Description of Artificial Sequence: Synthetic oligonucleotide
  Target: LAMA2; (+) strand; PAM type: YTN; PAM sequence: CTG
atgttctttaagttacttgg

SEQ ID NO: 378824 - DNA, 20 bp, Artificial Sequence
  Description of Artificial Sequence: Synthetic oligonucleotide
  Target: LAMA2; (+) strand; PAM type: YTN; PAM sequence: TTC
tttaagttacttggcggtga

SEQ ID NO: 378825 - DNA, 20 bp, Artificial Sequence
  Description of Artificial Sequence: Synthetic oligonucleotide
  Target: LAMA2; (+) strand; PAM type: YTN; PAM sequence: CTT
taagttacttggcggtgagg

SEQ ID NO: 378826 - DNA, 20 bp, Artificial Sequence
  Description of Artificial Sequence: Synthetic oligonucleotide
  Target: LAMA2; (+) strand; PAM type: YTN; PAM sequence: TTT
aagttacttggcggtgaggt

SEQ ID NO: 378827 - DNA, 20 bp, Artificial Sequence
  Description of Artificial Sequence: Synthetic oligonucleotide
  Target: LAMA2; (+) strand; PAM type: YTN; PAM sequence: TTA
agttacttggcggtgaggtt

SEQ ID NO: 378828 - DNA, 20 bp, Artificial Sequence
  Description of Artificial Sequence: Synthetic oligonucleotide
  Target: LAMA2; (+) strand; PAM type: YTN; PAM sequence: TTA
cttggcggtgaggttagtgg

SEQ ID NO: 378829 - DNA, 20 bp, Artificial Sequence
  Description of Artificial Sequence: Synthetic oligonucleotide
  Target: LAMA2; (+) strand; PAM type: YTN; PAM sequence: CTT
ggcggtgaggttagtgggtt

SEQ ID NO: 378830 - DNA, 20 bp, Artificial Sequence
  Description of Artificial Sequence: Synthetic oligonucleotide
  Target: LAMA2; (+) strand; PAM type: YTN; PAM sequence: TTG
gcggtgaggttagtgggtta

SEQ ID NO: 378831 - DNA, 20 bp, Artificial Sequence
  Description of Artificial Sequence: Synthetic oligonucleotide
  Target: LAMA2; (+) strand; PAM type: YTN; PAM sequence: TTA
gtgggttattctatgccttg

SEQ ID NO: 378832 - DNA, 20 bp, Artificial Sequence
  Description of Artificial Sequence: Synthetic oligonucleotide
  Target: LAMA2; (+) strand; PAM type: YTN; PAM sequence: TTA
ttctatgccttggaagcttt

SEQ ID NO: 378833 - DNA, 20 bp, Artificial Sequence
  Description of Artificial Sequence: Synthetic oligonucleotide
  Target: LAMA2; (+) strand; PAM type: YTN; PAM sequence: TTC
tatgccttggaagctttgtc

SEQ ID NO: 378834 - DNA, 20 bp, Artificial Sequence
  Description of Artificial Sequence: Synthetic oligonucleotide
  Target: LAMA2; (+) strand; PAM type: YTN; PAM sequence: CTA
tgccttggaagctttgtcca

SEQ ID NO: 378835 - DNA, 20 bp, Artificial Sequence
  Description of Artificial Sequence: Synthetic oligonucleotide
  Target: LAMA2; (+) strand; PAM type: YTN; PAM sequence: CTT
ggaagctttgtccatattta

SEQ ID NO: 378836 - DNA, 20 bp, Artificial Sequence
  Description of Artificial Sequence: Synthetic oligonucleotide
  Target: LAMA2; (+) strand; PAM type: YTN; PAM sequence: TTG
gaagctttgtccatatttat

SEQ ID NO: 378837 - DNA, 20 bp, Artificial Sequence
  Description of Artificial Sequence: Synthetic oligonucleotide
  Target: LAMA2; (+) strand; PAM type: YTN; PAM sequence: CTT
tgtccatatttataatatac

SEQ ID NO: 378838 - DNA, 20 bp, Artificial Sequence
  Description of Artificial Sequence: Synthetic oligonucleotide
  Target: LAMA2; (+) strand; PAM type: YTN; PAM sequence: TTT
gtccatatttataatataca

SEQ ID NO: 378839 - DNA, 20 bp, Artificial Sequence
  Description of Artificial Sequence: Synthetic oligonucleotide
  Target: LAMA2; (+) strand; PAM type: YTN; PAM sequence: TTG
tccatatttataatatacaa

SEQ ID NO: 378840 - DNA, 20 bp, Artificial Sequence
  Description of Artificial Sequence: Synthetic oligonucleotide
  Target: LAMA2; (+) strand; PAM type: YTN; PAM sequence: TTT
ataatatacaaataatcaca

SEQ ID NO: 378841 - DNA, 20 bp, Artificial Sequence
  Description of Artificial Sequence: Synthetic oligonucleotide
  Target: LAMA2; (+) strand; PAM type: YTN; PAM sequence: TTA
taatatacaaataatcacat

SEQ ID NO: 378842 - DNA, 20 bp, Artificial Sequence
  Description of Artificial Sequence: Synthetic oligonucleotide
  Target: LAMA2; (+) strand; PAM type: YTN; PAM sequence: TTT
tagatctttgggtttaaaat

SEQ ID NO: 378843 - DNA, 20 bp, Artificial Sequence
  Description of Artificial Sequence: Synthetic oligonucleotide
  Target: LAMA2; (+) strand; PAM type: YTN; PAM sequence: TTT
agatctttgggtttaaaata

SEQ ID NO: 378844 - DNA, 20 bp, Artificial Sequence
  Description of Artificial Sequence: Synthetic oligonucleotide
  Target: LAMA2; (+) strand; PAM type: YTN; PAM sequence: TTA
gatctttgggtttaaaatat

SEQ ID NO: 378845 - DNA, 20 bp, Artificial Sequence
  Description of Artificial Sequence: Synthetic oligonucleotide
  Target: LAMA2; (+) strand; PAM type: YTN; PAM sequence: CTT
tgggtttaaaatatcttcta

SEQ ID NO: 378846 - DNA, 20 bp, Artificial Sequence
  Description of Artificial Sequence: Synthetic oligonucleotide
  Target: LAMA2; (+) strand; PAM type: YTN; PAM sequence: TTT
gggtttaaaatatcttctag

SEQ ID NO: 378847 - DNA, 20 bp, Artificial Sequence
  Description of Artificial Sequence: Synthetic oligonucleotide
  Target: LAMA2; (+) strand; PAM type: YTN; PAM sequence: TTG
ggtttaaaatatcttctaga

SEQ ID NO: 378848 - DNA, 20 bp, Artificial Sequence
  Description of Artificial Sequence: Synthetic oligonucleotide
  Target: LAMA2; (+) strand; PAM type: YTN; PAM sequence: TTT
aaaatatcttctagaagccg

SEQ ID NO: 378849 - DNA, 20 bp, Artificial Sequence
  Description of Artificial Sequence: Synthetic oligonucleotide
  Target: LAMA2; (+) strand; PAM type: YTN; PAM sequence: TTA
aaatatcttctagaagccgc

SEQ ID NO: 378850 - DNA, 20 bp, Artificial Sequence
  Description of Artificial Sequence: Synthetic oligonucleotide
  Target: LAMA2; (+) strand; PAM type: YTN; PAM sequence: CTT
ctagaagccgcccttattgc

SEQ ID NO: 378851 - DNA, 20 bp, Artificial Sequence
  Description of Artificial Sequence: Synthetic oligonucleotide
  Target: LAMA2; (+) strand; PAM type: YTN; PAM sequence: TTC
tagaagccgcccttattgca

SEQ ID NO: 378852 - DNA, 20 bp, Artificial Sequence
  Description of Artificial Sequence: Synthetic oligonucleotide
  Target: LAMA2; (+) strand; PAM type: YTN; PAM sequence: CTA
gaagccgcccttattgcagc

SEQ ID NO: 378853 - DNA, 20 bp, Artificial Sequence
  Description of Artificial Sequence: Synthetic oligonucleotide
  Target: LAMA2; (+) strand; PAM type: YTN; PAM sequence: CTT
attgcagcctttctactgat

SEQ ID NO: 378854 - DNA, 20 bp, Artificial Sequence
  Description of Artificial Sequence: Synthetic oligonucleotide
  Target: LAMA2; (+) strand; PAM type: YTN; PAM sequence: TTA
ttgcagcctttctactgatt

SEQ ID NO: 378855 - DNA, 20 bp, Artificial Sequence
  Description of Artificial Sequence: Synthetic oligonucleotide
  Target: LAMA2; (+) strand; PAM type: YTN; PAM sequence: TTG
cagcctttctactgattagc

SEQ ID NO: 378856 - DNA, 20 bp, Artificial Sequence
  Description of Artificial Sequence: Synthetic oligonucleotide
  Target: LAMA2; (+) strand; PAM type: YTN; PAM sequence: CTT
tctactgattagcaataatt

SEQ ID NO: 378857 - DNA, 20 bp, Artificial Sequence
  Description of Artificial Sequence: Synthetic oligonucleotide
  Target: LAMA2; (+) strand; PAM type: YTN; PAM sequence: TTT
ctactgattagcaataatta

SEQ ID NO: 378858 - DNA, 20 bp, Artificial Sequence
  Description of Artificial Sequence: Synthetic oligonucleotide
  Target: LAMA2; (+) strand; PAM type: YTN; PAM sequence: TTC
tactgattagcaataattag

SEQ ID NO: 378859 - DNA, 20 bp, Artificial Sequence
  Description of Artificial Sequence: Synthetic oligonucleotide
  Target: LAMA2; (+) strand; PAM type: YTN; PAM sequence: CTA
ctgattagcaataattagat

SEQ ID NO: 378860 - DNA, 20 bp, Artificial Sequence
  Description of Artificial Sequence: Synthetic oligonucleotide
  Target: LAMA2; (+) strand; PAM type: YTN; PAM sequence: CTG
attagcaataattagataga

SEQ ID NO: 378861 - DNA, 20 bp, Artificial Sequence
  Description of Artificial Sequence: Synthetic oligonucleotide
  Target: LAMA2; (+) strand; PAM type: YTN; PAM sequence: TTA
gcaataattagatagaaaaa

SEQ ID NO: 378862 - DNA, 20 bp, Artificial Sequence
  Description of Artificial Sequence: Synthetic oligonucleotide
  Target: LAMA2; (+) strand; PAM type: YTN; PAM sequence: TTA
gatagaaaaatacttaccta

SEQ ID NO: 378863 - DNA, 20 bp, Artificial Sequence
  Description of Artificial Sequence: Synthetic oligonucleotide
  Target: LAMA2; (+) strand; PAM type: YTN; PAM sequence: CTT
acctataaagacaagaaata

SEQ ID NO: 378864 - DNA, 20 bp, Artificial Sequence
  Description of Artificial Sequence: Synthetic oligonucleotide
  Target: LAMA2; (+) strand; PAM type: YTN; PAM sequence: TTA
cctataaagacaagaaataa

SEQ ID NO: 378865 - DNA, 20 bp, Artificial Sequence
  Description of Artificial Sequence: Synthetic oligonucleotide
  Target: LAMA2; (+) strand; PAM type: YTN; PAM sequence: CTA
taaagacaagaaataaagct

SEQ ID NO: 378866 - DNA, 20 bp, Artificial Sequence
  Description of Artificial Sequence: Synthetic oligonucleotide
  Target: LAMA2; (+) strand; PAM type: YTN; PAM sequence: CTA
atcctgataatcattttttt

SEQ ID NO: 378867 - DNA, 20 bp, Artificial Sequence
  Description of Artificial Sequence: Synthetic oligonucleotide
  Target: LAMA2; (+) strand; PAM type: YTN; PAM sequence: CTG
ataatcattttttttttttt

SEQ ID NO: 378868 - DNA, 20 bp, Artificial Sequence
  Description of Artificial Sequence: Synthetic oligonucleotide
  Target: LAMA2; (+) strand; PAM type: YTN; PAM sequence: TTT
ttttttttttttgagacgga

SEQ ID NO: 378869 - DNA, 20 bp, Artificial Sequence
  Description of Artificial Sequence: Synthetic oligonucleotide
  Target: LAMA2; (+) strand; PAM type: YTN; PAM sequence: TTT
tttttttttttgagacggag

SEQ ID NO: 378870 - DNA, 20 bp, Artificial Sequence
  Description of Artificial Sequence: Synthetic oligonucleotide
  Target: LAMA2; (+) strand; PAM type: YTN; PAM sequence: TTT
ttttttttttgagacggagt

SEQ ID NO: 378871 - DNA, 20 bp, Artificial Sequence
  Description of Artificial Sequence: Synthetic oligonucleotide
  Target: LAMA2; (+) strand; PAM type: YTN; PAM sequence: TTT
tttttttttgagacggagtc

SEQ ID NO: 378872 - DNA, 20 bp, Artificial Sequence
  Description of Artificial Sequence: Synthetic oligonucleotide
  Target: LAMA2; (+) strand; PAM type: YTN; PAM sequence: TTT
ttttttttgagacggagtct

SEQ ID NO: 378873 - DNA, 20 bp, Artificial Sequence
  Description of Artificial Sequence: Synthetic oligonucleotide
  Target: LAMA2; (+) strand; PAM type: YTN; PAM sequence: TTT
tttttttgagacggagtctc

SEQ ID NO: 378874 - DNA, 20 bp, Artificial Sequence
  Description of Artificial Sequence: Synthetic oligonucleotide
  Target: LAMA2; (+) strand; PAM type: YTN; PAM sequence: TTT
ttttttgagacggagtctcg

SEQ ID NO: 378875 - DNA, 20 bp, Artificial Sequence
  Description of Artificial Sequence: Synthetic oligonucleotide
  Target: LAMA2; (+) strand; PAM type: YTN; PAM sequence: TTT
tttttgagacggagtctcgc

SEQ ID NO: 378876 - DNA, 20 bp, Artificial Sequence
  Description of Artificial Sequence: Synthetic oligonucleotide
  Target: LAMA2; (+) strand; PAM type: YTN; PAM sequence: TTT
ttttgagacggagtctcgct

SEQ ID NO: 378877 - DNA, 20 bp, Artificial Sequence
  Description of Artificial Sequence: Synthetic oligonucleotide
  Target: LAMA2; (+) strand; PAM type: YTN; PAM sequence: TTT
tttgagacggagtctcgctc

SEQ ID NO: 378878 - DNA, 20 bp, Artificial Sequence
  Description of Artificial Sequence: Synthetic oligonucleotide
  Target: LAMA2; (+) strand; PAM type: YTN; PAM sequence: TTT
ttgagacggagtctcgctct

SEQ ID NO: 378879 - DNA, 20 bp, Artificial Sequence
  Description of Artificial Sequence: Synthetic oligonucleotide
  Target: LAMA2; (+) strand; PAM type: YTN; PAM sequence: TTT
tgagacggagtctcgctctg

SEQ ID NO: 378880 - DNA, 20 bp, Artificial Sequence
  Description of Artificial Sequence: Synthetic oligonucleotide
  Target: LAMA2; (+) strand; PAM type: YTN; PAM sequence: TTT
gagacggagtctcgctctgt

SEQ ID NO: 378881 - DNA, 20 bp, Artificial Sequence
  Description of Artificial Sequence: Synthetic oligonucleotide
  Target: LAMA2; (+) strand; PAM type: YTN; PAM sequence: TTG
agacggagtctcgctctgtc

SEQ ID NO: 378882 - DNA, 20 bp, Artificial Sequence
  Description of Artificial Sequence: Synthetic oligonucleotide
  Target: LAMA2; (+) strand; PAM type: YTN; PAM sequence: CTC
gctctgtcacccaggctgga

SEQ ID NO: 378883 - DNA, 20 bp, Artificial Sequence
  Description of Artificial Sequence: Synthetic oligonucleotide
  Target: LAMA2; (+) strand; PAM type: YTN; PAM sequence: CTC
tgtcacccaggctggagtgc

SEQ ID NO: 378884 - DNA, 20 bp, Artificial Sequence
  Description of Artificial Sequence: Synthetic oligonucleotide
  Target: LAMA2; (+) strand; PAM type: YTN; PAM sequence: CTG
tcacccaggctggagtgcag

SEQ ID NO: 378885 - DNA, 20 bp, Artificial Sequence
  Description of Artificial Sequence: Synthetic oligonucleotide
  Target: LAMA2; (+) strand; PAM type: YTN; PAM sequence: CTG
gagtgcagtggcgcgatctc

SEQ ID NO: 378886 - DNA, 20 bp, Artificial Sequence
  Description of Artificial Sequence: Synthetic oligonucleotide
  Target: LAMA2; (+) strand; PAM type: YTN; PAM sequence: CTC
ggctcactgcaagctccgcc

SEQ ID NO: 378887 - DNA, 20 bp, Artificial Sequence
  Description of Artificial Sequence: Synthetic oligonucleotide
  Target: LAMA2; (+) strand; PAM type: YTN; PAM sequence: CTC
actgcaagctccgcctcccg

SEQ ID NO: 378888 - DNA, 20 bp, Artificial Sequence
  Description of Artificial Sequence: Synthetic oligonucleotide
  Target: LAMA2; (+) strand; PAM type: YTN; PAM sequence: CTG
caagctccgcctcccgggtt

SEQ ID NO: 378889 - DNA, 20 bp, Artificial Sequence
  Description of Artificial Sequence: Synthetic oligonucleotide
  Target: LAMA2; (+) strand; PAM type: YTN; PAM sequence: CTC
cgcctcccgggttcacgcca

SEQ ID NO: 378890 - DNA, 20 bp, Artificial Sequence
  Description of Artificial Sequence: Synthetic oligonucleotide
  Target: LAMA2; (+) strand; PAM type: YTN; PAM sequence: CTC
ccgggttcacgccattctcc

SEQ ID NO: 378891 - DNA, 20 bp, Artificial Sequence
  Description of Artificial Sequence: Synthetic oligonucleotide
  Target: LAMA2; (+) strand; PAM type: YTN; PAM sequence: TTC
acgccattctcctgcctcag

SEQ ID NO: 378892 - DNA, 20 bp, Artificial Sequence
  Description of Artificial Sequence: Synthetic oligonucleotide
  Target: LAMA2; (+) strand; PAM type: YTN; PAM sequence: TTC
tcctgcctcagcctcccgag

SEQ ID NO: 378893 - DNA, 20 bp, Artificial Sequence
  Description of Artificial Sequence: Synthetic oligonucleotide
  Target: LAMA2; (+) strand; PAM type: YTN; PAM sequence: CTC
ctgcctcagcctcccgagta

SEQ ID NO: 378894 - DNA, 20 bp, Artificial Sequence
  Description of Artificial Sequence: Synthetic oligonucleotide
  Target: LAMA2; (+) strand; PAM type: YTN; PAM sequence: CTG
cctcagcctcccgagtagct

SEQ ID NO: 378895 - DNA, 20 bp, Artificial Sequence
  Description of Artificial Sequence: Synthetic oligonucleotide
  Target: LAMA2; (+) strand; PAM type: YTN; PAM sequence: CTC
agcctcccgagtagctggga

SEQ ID NO: 378896 - DNA, 20 bp, Artificial Sequence
  Description of Artificial Sequence: Synthetic oligonucleotide
  Target: LAMA2; (+) strand; PAM type: YTN; PAM sequence: CTC
ccgagtagctgggactacag

SEQ ID NO: 378897 - DNA, 20 bp, Artificial Sequence
  Description of Artificial Sequence: Synthetic oligonucleotide
  Target: LAMA2; (+) strand; PAM type: YTN; PAM sequence: CTG
ggactacaggcgcccgctac

SEQ ID NO: 378898 - DNA, 20 bp, Artificial Sequence
  Description of Artificial Sequence: Synthetic oligonucleotide
  Target: LAMA2; (+) strand; PAM type: YTN; PAM sequence: CTA
caggcgcccgctaccacgcc

SEQ ID NO: 378899 - DNA, 20 bp, Artificial Sequence
  Description of Artificial Sequence: Synthetic oligonucleotide
  Target: LAMA2; (+) strand; PAM type: YTN; PAM sequence: CTA
ccacgcccggctaatttttt

SEQ ID NO: 378900 - DNA, 20 bp, Artificial Sequence
  Description of Artificial Sequence: Synthetic oligonucleotide
  Target: LAMA2; (+) strand; PAM type: YTN; PAM sequence: CTA
attttttgtatttttagtag

SEQ ID NO: 378901 - DNA, 20 bp, Artificial Sequence
  Description of Artificial Sequence: Synthetic oligonucleotide
  Target: LAMA2; (+) strand; PAM type: YTN; PAM sequence: TTT
tttgtatttttagtagagac

SEQ ID NO: 378902 - DNA, 20 bp, Artificial Sequence
  Description of Artificial Sequence: Synthetic oligonucleotide
  Target: LAMA2; (+) strand; PAM type: YTN; PAM sequence: TTT
ttgtatttttagtagagacg

SEQ ID NO: 378903 - DNA, 20 bp, Artificial Sequence
  Description of Artificial Sequence: Synthetic oligonucleotide
  Target: LAMA2; (+) strand; PAM type: YTN; PAM sequence: TTT
tgtatttttagtagagacgg

SEQ ID NO: 378904 - DNA, 20 bp, Artificial Sequence
  Description of Artificial Sequence: Synthetic oligonucleotide
  Target: LAMA2; (+) strand; PAM type: YTN; PAM sequence: TTT
gtatttttagtagagacggg

SEQ ID NO: 378905 - DNA, 20 bp, Artificial Sequence
  Description of Artificial Sequence: Synthetic oligonucleotide
  Target: LAMA2; (+) strand; PAM type: YTN; PAM sequence: TTG
tatttttagtagagacgggg

SEQ ID NO: 378906 - DNA, 20 bp, Artificial Sequence
  Description of Artificial Sequence: Synthetic oligonucleotide
  Target: LAMA2; (+) strand; PAM type: YTN; PAM sequence: TTT
ttagtagagacggggtttca

SEQ ID NO: 378907 - DNA, 20 bp, Artificial Sequence
  Description of Artificial Sequence: Synthetic oligonucleotide
  Target: LAMA2; (+) strand; PAM type: YTN; PAM sequence: TTT
tagtagagacggggtttcac

SEQ ID NO: 378908 - DNA, 20 bp, Artificial Sequence
  Description of Artificial Sequence: Synthetic oligonucleotide
  Target: LAMA2; (+) strand; PAM type: YTN; PAM sequence: TTT
agtagagacggggtttcacc

SEQ ID NO: 378909 - DNA, 20 bp, Artificial Sequence
  Description of Artificial Sequence: Synthetic oligonucleotide
  Target: LAMA2; (+) strand; PAM type: YTN; PAM sequence: TTA
gtagagacggggtttcaccg

SEQ ID NO: 378910 - DNA, 20 bp, Artificial Sequence
  Description of Artificial Sequence: Synthetic oligonucleotide
  Target: LAMA2; (+) strand; PAM type: YTN; PAM sequence: TTT
caccgtgttagccaggatgg

SEQ ID NO: 378911 - DNA, 20 bp, Artificial Sequence
  Description of Artificial Sequence: Synthetic oligonucleotide
  Target: LAMA2; (+) strand; PAM type: YTN; PAM sequence: TTC
accgtgttagccaggatggt

SEQ ID NO: 378912 - DNA, 20 bp, Artificial Sequence
  Description of Artificial Sequence: Synthetic oligonucleotide
  Target: LAMA2; (+) strand; PAM type: YTN; PAM sequence: TTA
gccaggatggtctcgatctc

SEQ ID NO: 378913 - DNA, 20 bp, Artificial Sequence
  Description of Artificial Sequence: Synthetic oligonucleotide
  Target: LAMA2; (+) strand; PAM type: YTN; PAM sequence: CTC
gatctcctgacctcgtgatc

SEQ ID NO: 378914 - DNA, 20 bp, Artificial Sequence
  Description of Artificial Sequence: Synthetic oligonucleotide
  Target: LAMA2; (+) strand; PAM type: YTN; PAM sequence: CTC
ctgacctcgtgatccgcccg

SEQ ID NO: 378915 - DNA, 20 bp, Artificial Sequence
  Description of Artificial Sequence: Synthetic oligonucleotide
  Target: LAMA2; (+) strand; PAM type: YTN; PAM sequence: CTG
acctcgtgatccgcccgcct

SEQ ID NO: 378916 - DNA, 20 bp, Artificial Sequence
  Description of Artificial Sequence: Synthetic oligonucleotide
  Target: LAMA2; (+) strand; PAM type: YTN; PAM sequence: CTC
gtgatccgcccgcctcggcc

SEQ ID NO: 378917 - DNA, 20 bp, Artificial Sequence
  Description of Artificial Sequence: Synthetic oligonucleotide
  Target: LAMA2; (+) strand; PAM type: YTN; PAM sequence: CTC
ggcctcccaaagtgctggga

SEQ ID NO: 378918 - DNA, 20 bp, Artificial Sequence
  Description of Artificial Sequence: Synthetic oligonucleotide
  Target: LAMA2; (+) strand; PAM type: YTN; PAM sequence: CTC
ccaaagtgctgggattacag

SEQ ID NO: 378919 - DNA, 20 bp, Artificial Sequence
  Description of Artificial Sequence: Synthetic oligonucleotide
  Target: LAMA2; (+) strand; PAM type: YTN; PAM sequence: CTG
ggattacaggcgtgagccac

SEQ ID NO: 378920 - DNA, 20 bp, Artificial Sequence
  Description of Artificial Sequence: Synthetic oligonucleotide
  Target: LAMA2; (+) strand; PAM type: YTN; PAM sequence: TTA
caggcgtgagccaccgcgcc

SEQ ID NO: 378921 - DNA, 20 bp, Artificial Sequence
  Description of Artificial Sequence: Synthetic oligonucleotide
  Target: LAMA2; (+) strand; PAM type: YTN; PAM sequence: TTT
taataacagaatctgggaag

SEQ ID NO: 378922 - DNA, 20 bp, Artificial Sequence
  Description of Artificial Sequence: Synthetic oligonucleotide
  Target: LAMA2; (+) strand; PAM type: YTN; PAM sequence: TTT
aataacagaatctgggaaga

SEQ ID NO: 378923 - DNA, 20 bp, Artificial Sequence
  Description of Artificial Sequence: Synthetic oligonucleotide
  Target: LAMA2; (+) strand; PAM type: YTN; PAM sequence: TTA
ataacagaatctgggaagat

SEQ ID NO: 378924 - DNA, 20 bp, Artificial Sequence
  Description of Artificial Sequence: Synthetic oligonucleotide
  Target: LAMA2; (+) strand; PAM type: YTN; PAM sequence: CTG
ggaagatttttaaccaaata

SEQ ID NO: 378925 - DNA, 20 bp, Artificial Sequence
  Description of Artificial Sequence: Synthetic oligonucleotide
  Target: LAMA2; (+) strand; PAM type: YTN; PAM sequence: TTT
ttaaccaaatatttgggcat

SEQ ID NO: 378926 - DNA, 20 bp, Artificial Sequence
  Description of Artificial Sequence: Synthetic oligonucleotide
  Target: LAMA2; (+) strand; PAM type: YTN; PAM sequence: TTT
taaccaaatatttgggcatg

SEQ ID NO: 378927 - DNA, 20 bp, Artificial Sequence
  Description of Artificial Sequence: Synthetic oligonucleotide
  Target: LAMA2; (+) strand; PAM type: YTN; PAM sequence: TTT
aaccaaatatttgggcatga

SEQ ID NO: 378928 - DNA, 20 bp, Artificial Sequence
  Description of Artificial Sequence: Synthetic oligonucleotide
  Target: LAMA2; (+) strand; PAM type: YTN; PAM sequence: TTA
accaaatatttgggcatgaa

SEQ ID NO: 378929 - DNA, 20 bp, Artificial Sequence
  Description of Artificial Sequence: Synthetic oligonucleotide
  Target: LAMA2; (+) strand; PAM type: YTN; PAM sequence: TTT
gggcatgaaagacaatagag

SEQ ID NO: 378930 - DNA, 20 bp, Artificial Sequence
  Description of Artificial Sequence: Synthetic oligonucleotide
  Target: LAMA2; (+) strand; PAM type: YTN; PAM sequence: TTG
ggcatgaaagacaatagagg

SEQ ID NO: 378931 - DNA, 20 bp, Artificial Sequence
  Description of Artificial Sequence: Synthetic oligonucleotide
  Target: LAMA2; (+) strand; PAM type: YTN; PAM sequence: CTG
gtgatcttggaaatgataat

SEQ ID NO: 378932 - DNA, 20 bp, Artificial Sequence
  Description of Artificial Sequence: Synthetic oligonucleotide
  Target: LAMA2; (+) strand; PAM type: YTN; PAM sequence: CTT
ggaaatgataatctcataag

SEQ ID NO: 378933 - DNA, 20 bp, Artificial Sequence
  Description of Artificial Sequence: Synthetic oligonucleotide
  Target: LAMA2; (+) strand; PAM type: YTN; PAM sequence: TTG
gaaatgataatctcataagc

SEQ ID NO: 378934 - DNA, 20 bp, Artificial Sequence
  Description of Artificial Sequence: Synthetic oligonucleotide
  Target: LAMA2; (+) strand; PAM type: YTN; PAM sequence: CTC
ataagcaaactactgttagc

SEQ ID NO: 378935 - DNA, 20 bp, Artificial Sequence
  Description of Artificial Sequence: Synthetic oligonucleotide
  Target: LAMA2; (+) strand; PAM type: YTN; PAM sequence: CTA
ctgttagcaggaacagaaac

SEQ ID NO: 378936 - DNA, 20 bp, Artificial Sequence
  Description of Artificial Sequence: Synthetic oligonucleotide
  Target: LAMA2; (+) strand; PAM type: YTN; PAM sequence: CTG
ttagcaggaacagaaacata

SEQ ID NO: 378937 - DNA, 20 bp, Artificial Sequence
  Description of Artificial Sequence: Synthetic oligonucleotide
  Target: LAMA2; (+) strand; PAM type: YTN; PAM sequence: TTA
gcaggaacagaaacataata

SEQ ID NO: 378938 - DNA, 20 bp, Artificial Sequence
  Description of Artificial Sequence: Synthetic oligonucleotide
  Target: LAMA2; (+) strand; PAM type: YTN; PAM sequence: CTC
ctggtaatggtggatataag

SEQ ID NO: 378939 - DNA, 20 bp, Artificial Sequence
  Description of Artificial Sequence: Synthetic oligonucleotide
  Target: LAMA2; (+) strand; PAM type: YTN; PAM sequence: CTG
gtaatggtggatataagaat

SEQ ID NO: 378940 - DNA, 20 bp, Artificial Sequence
  Description of Artificial Sequence: Synthetic oligonucleotide
  Target: LAMA2; (+) strand; PAM type: YTN; PAM sequence: TTA
agctgaggagggaaagtgtg

SEQ ID NO: 378941 - DNA, 20 bp, Artificial Sequence
  Description of Artificial Sequence: Synthetic oligonucleotide
  Target: LAMA2; (+) strand; PAM type: YTN; PAM sequence: CTG
aggagggaaagtgtgagata

SEQ ID NO: 378942 - DNA, 20 bp, Artificial Sequence
  Description of Artificial Sequence: Synthetic oligonucleotide
  Target: LAMA2; (+) strand; PAM type: YTN; PAM sequence: CTT
ggatctaggagtttggccag

SEQ ID NO: 378943 - DNA, 20 bp, Artificial Sequence
  Description of Artificial Sequence: Synthetic oligonucleotide
  Target: LAMA2; (+) strand; PAM type: YTN; PAM sequence: TTG
gatctaggagtttggccagg

SEQ ID NO: 378944 - DNA, 20 bp, Artificial Sequence
  Description of Artificial Sequence: Synthetic oligonucleotide
  Target: LAMA2; (+) strand; PAM type: YTN; PAM sequence: CTA
ggagtttggccaggtgctat

SEQ ID NO: 378945 - DNA, 20 bp, Artificial Sequence
  Description of Artificial Sequence: Synthetic oligonucleotide
  Target: LAMA2; (+) strand; PAM type: YTN; PAM sequence: TTT
ggccaggtgctatgcatatg

SEQ ID NO: 378946 - DNA, 20 bp, Artificial Sequence
  Description of Artificial Sequence: Synthetic oligonucleotide
  Target: LAMA2; (+) strand; PAM type: YTN; PAM sequence: TTG
gccaggtgctatgcatatga

SEQ ID NO: 378947 - DNA, 20 bp, Artificial Sequence
  Description of Artificial Sequence: Synthetic oligonucleotide
  Target: LAMA2; (+) strand; PAM type: YTN; PAM sequence: CTA
tgcatatgactttaccactg

SEQ ID NO: 378948 - DNA, 20 bp, Artificial Sequence
  Description of Artificial Sequence: Synthetic oligonucleotide
  Target: LAMA2; (+) strand; PAM type: YTN; PAM sequence: CTT
taccactgggctgtagatct

SEQ ID NO: 378949 - DNA, 20 bp, Artificial Sequence
  Description of Artificial Sequence: Synthetic oligonucleotide
  Target: LAMA2; (+) strand; PAM type: YTN; PAM sequence: TTT
accactgggctgtagatctg

SEQ ID NO: 378950 - DNA, 20 bp, Artificial Sequence
  Description of Artificial Sequence: Synthetic oligonucleotide
  Target: LAMA2; (+) strand; PAM type: YTN; PAM sequence: TTA
ccactgggctgtagatctga

SEQ ID NO: 378951 - DNA, 20 bp, Artificial Sequence
  Description of Artificial Sequence: Synthetic oligonucleotide
  Target: LAMA2; (+) strand; PAM type: YTN; PAM sequence: CTG
ggctgtagatctgagaagga

SEQ ID NO: 378952 - DNA, 20 bp, Artificial Sequence
  Description of Artificial Sequence: Synthetic oligonucleotide
  Target: LAMA2; (+) strand; PAM type: YTN; PAM sequence: CTG
tagatctgagaaggataata

SEQ ID NO: 378953 - DNA, 20 bp, Artificial Sequence
  Description of Artificial Sequence: Synthetic oligonucleotide
  Target: LAMA2; (+) strand; PAM type: YTN; PAM sequence: CTG
agaaggataatagaacagca

SEQ ID NO: 378954 - DNA, 20 bp, Artificial Sequence
  Description of Artificial Sequence: Synthetic oligonucleotide
  Target: LAMA2; (+) strand; PAM type: YTN; PAM sequence: TTA
agtcacaaagtgcatacacc

SEQ ID NO: 378955 - DNA, 20 bp, Artificial Sequence
  Description of Artificial Sequence: Synthetic oligonucleotide
  Target: LAMA2; (+) strand; PAM type: YTN; PAM sequence: CTC
agacagagagaggtgatacc

SEQ ID NO: 378956 - DNA, 20 bp, Artificial Sequence
  Description of Artificial Sequence: Synthetic oligonucleotide
  Target: LAMA2; (+) strand; PAM type: YTN; PAM sequence: CTT
tgtaatgccaagtcatgctc

SEQ ID NO: 378957 - DNA, 20 bp, Artificial Sequence
  Description of Artificial Sequence: Synthetic oligonucleotide
  Target: LAMA2; (+) strand; PAM type: YTN; PAM sequence: TTT
gtaatgccaagtcatgctct

SEQ ID NO: 378958 - DNA, 20 bp, Artificial Sequence
  Description of Artificial Sequence: Synthetic oligonucleotide
  Target: LAMA2; (+) strand; PAM type: YTN; PAM sequence: TTG
taatgccaagtcatgctctg

SEQ ID NO: 378959 - DNA, 20 bp, Artificial Sequence
  Description of Artificial Sequence: Synthetic oligonucleotide
  Target: LAMA2; (+) strand; PAM type: YTN; PAM sequence: CTC
tgcttgggagacagaaacta

SEQ ID NO: 378960 - DNA, 20 bp, Artificial Sequence
  Description of Artificial Sequence: Synthetic oligonucleotide
  Target: LAMA2; (+) strand; PAM type: YTN; PAM sequence: CTG
cttgggagacagaaactaca

SEQ ID NO: 378961 - DNA, 20 bp, Artificial Sequence
  Description of Artificial Sequence: Synthetic oligonucleotide
  Target: LAMA2; (+) strand; PAM type: YTN; PAM sequence: CTT
gggagacagaaactacactg

SEQ ID NO: 378962 - DNA, 20 bp, Artificial Sequence
  Description of Artificial Sequence: Synthetic oligonucleotide
  Target: LAMA2; (+) strand; PAM type: YTN; PAM sequence: TTG
ggagacagaaactacactgg

SEQ ID NO: 378963 - DNA, 20 bp, Artificial Sequence
  Description of Artificial Sequence: Synthetic oligonucleotide
  Target: LAMA2; (+) strand; PAM type: YTN; PAM sequence: CTA
cactggttttttaaacagtg

SEQ ID NO: 378964 - DNA, 20 bp, Artificial Sequence
  Description of Artificial Sequence: Synthetic oligonucleotide
  Target: LAMA2; (+) strand; PAM type: YTN; PAM sequence: CTG
gttttttaaacagtgaaatg

SEQ ID NO: 378965 - DNA, 20 bp, Artificial Sequence
  Description of Artificial Sequence: Synthetic oligonucleotide
  Target: LAMA2; (+) strand; PAM type: YTN; PAM sequence: TTT
tttaaacagtgaaatggaat

SEQ ID NO: 378966 - DNA, 20 bp, Artificial Sequence
  Description of Artificial Sequence: Synthetic oligonucleotide
  Target: LAMA2; (+) strand; PAM type: YTN; PAM sequence: TTT
ttaaacagtgaaatggaatt

SEQ ID NO: 378967 - DNA, 20 bp, Artificial Sequence
  Description of Artificial Sequence: Synthetic oligonucleotide
  Target: LAMA2; (+) strand; PAM type: YTN; PAM sequence: TTT
taaacagtgaaatggaattg

SEQ ID NO: 378968 - DNA, 20 bp, Artificial Sequence
  Description of Artificial Sequence: Synthetic oligonucleotide
  Target: LAMA2; (+) strand; PAM type: YTN; PAM sequence: TTT
aaacagtgaaatggaattgt

SEQ ID NO: 378969 - DNA, 20 bp, Artificial Sequence
  Description of Artificial Sequence: Synthetic oligonucleotide
  Target: LAMA2; (+) strand; PAM type: YTN; PAM sequence: TTA
aacagtgaaatggaattgtt

SEQ ID NO: 378970 - DNA, 20 bp, Artificial Sequence
  Description of Artificial Sequence: Synthetic oligonucleotide
  Target: LAMA2; (+) strand; PAM type: YTN; PAM sequence: TTG
ttaactggtaaaaggtggtt

SEQ ID NO: 378971 - DNA, 20 bp, Artificial Sequence
  Description of Artificial Sequence: Synthetic oligonucleotide
  Target: LAMA2; (+) strand; PAM type: YTN; PAM sequence: TTA
actggtaaaaggtggttggt

SEQ ID NO: 378972 - DNA, 20 bp, Artificial Sequence
  Description of Artificial Sequence: Synthetic oligonucleotide
  Target: LAMA2; (+) strand; PAM type: YTN; PAM sequence: CTG
gtaaaaggtggttggttact

SEQ ID NO: 378973 - DNA, 20 bp, Artificial Sequence
  Description of Artificial Sequence: Synthetic oligonucleotide
  Target: LAMA2; (+) strand; PAM type: YTN; PAM sequence: TTG
gttactaaaaaaggataaaa

SEQ ID NO: 378974 - DNA, 20 bp, Artificial Sequence
  Description of Artificial Sequence: Synthetic oligonucleotide
  Target: LAMA2; (+) strand; PAM type: YTN; PAM sequence: TTA
ctaaaaaaggataaaagaaa

SEQ ID NO: 378975 - DNA, 20 bp, Artificial Sequence
  Description of Artificial Sequence: Synthetic oligonucleotide
  Target: LAMA2; (+) strand; PAM type: YTN; PAM sequence: CTA
aaaaaggataaaagaaagct

SEQ ID NO: 378976 - DNA, 20 bp, Artificial Sequence
  Description of Artificial Sequence: Synthetic oligonucleotide
  Target: LAMA2; (+) strand; PAM type: YTN; PAM sequence: CTA
taaggtgtcccgagtacagg

SEQ ID NO: 378977 - DNA, 20 bp, Artificial Sequence
  Description of Artificial Sequence: Synthetic oligonucleotide
  Target: LAMA2; (+) strand; PAM type: YTN; PAM sequence: CTA
ctccctctaggctgagggag

SEQ ID NO: 378978 - DNA, 20 bp, Artificial Sequence
  Description of Artificial Sequence: Synthetic oligonucleotide
  Target: LAMA2; (+) strand; PAM type: YTN; PAM sequence: CTC
cctctaggctgagggaggaa

SEQ ID NO: 378979 - DNA, 20 bp, Artificial Sequence
  Description of Artificial Sequence: Synthetic oligonucleotide
  Target: LAMA2; (+) strand; PAM type: YTN; PAM sequence: CTC
taggctgagggaggaaagac

SEQ ID NO: 378980 - DNA, 20 bp, Artificial Sequence
  Description of Artificial Sequence: Synthetic oligonucleotide
  Target: LAMA2; (+) strand; PAM type: YTN; PAM sequence: CTA
ggctgagggaggaaagacag

SEQ ID NO: 378981 - DNA, 20 bp, Artificial Sequence
  Description of Artificial Sequence: Synthetic oligonucleotide
  Target: LAMA2; (+) strand; PAM type: YTN; PAM sequence: CTG
agggaggaaagacagtgaag

SEQ ID NO: 378982 - DNA, 20 bp, Artificial Sequence
  Description of Artificial Sequence: Synthetic oligonucleotide
  Target: LAMA2; (+) strand; PAM type: YTN; PAM sequence: TTA
agggctaagagagggcatgc

SEQ ID NO: 378983 - DNA, 20 bp, Artificial Sequence
  Description of Artificial Sequence: Synthetic oligonucleotide
  Target: LAMA2; (+) strand; PAM type: YTN; PAM sequence: CTA
agagagggcatgctccttct

SEQ ID NO: 378984 - DNA, 20 bp, Artificial Sequence
  Description of Artificial Sequence: Synthetic oligonucleotide
  Target: LAMA2; (+) strand; PAM type: YTN; PAM sequence: CTC
cttctccccacttgcagcaa

SEQ ID NO: 378985 - DNA, 20 bp, Artificial Sequence
  Description of Artificial Sequence: Synthetic oligonucleotide
  Target: LAMA2; (+) strand; PAM type: YTN; PAM sequence: CTT
ctccccacttgcagcaaagc

SEQ ID NO: 378986 - DNA, 20 bp, Artificial Sequence
  Description of Artificial Sequence: Synthetic oligonucleotide
  Target: LAMA2; (+) strand; PAM type: YTN; PAM sequence: TTC
tccccacttgcagcaaagct

SEQ ID NO: 378987 - DNA, 20 bp, Artificial Sequence
  Description of Artificial Sequence: Synthetic oligonucleotide
  Target: LAMA2; (+) strand; PAM type: YTN; PAM sequence: CTC
cccacttgcagcaaagctga

SEQ ID NO: 378988 - DNA, 20 bp, Artificial Sequence
  Description of Artificial Sequence: Synthetic oligonucleotide
  Target: LAMA2; (+) strand; PAM type: YTN; PAM sequence: CTT
gcagcaaagctgaggttcag

SEQ ID NO: 378989 - DNA, 20 bp, Artificial Sequence
  Description of Artificial Sequence: Synthetic oligonucleotide
  Target: LAMA2; (+) strand; PAM type: YTN; PAM sequence: TTG
cagcaaagctgaggttcaga

SEQ ID NO: 378990 - DNA, 20 bp, Artificial Sequence
  Description of Artificial Sequence: Synthetic oligonucleotide
  Target: LAMA2; (+) strand; PAM type: YTN; PAM sequence: CTG
aggttcagaaatctttcaag

SEQ ID NO: 378991 - DNA, 20 bp, Artificial Sequence
  Description of Artificial Sequence: Synthetic oligonucleotide
  Target: LAMA2; (+) strand; PAM type: YTN; PAM sequence: TTC
agaaatctttcaagagggcg

SEQ ID NO: 378992 - DNA, 20 bp, Artificial Sequence
  Description of Artificial Sequence: Synthetic oligonucleotide
  Target: LAMA2; (+) strand; PAM type: YTN; PAM sequence: CTT
tcaagagggcgttgctgtca

SEQ ID NO: 378993 - DNA, 20 bp, Artificial Sequence
  Description of Artificial Sequence: Synthetic oligonucleotide
  Target: LAMA2; (+) strand; PAM type: YTN; PAM sequence: TTT
caagagggcgttgctgtcat

SEQ ID NO: 378994 - DNA, 20 bp, Artificial Sequence
  Description of Artificial Sequence: Synthetic oligonucleotide
  Target: LAMA2; (+) strand; PAM type: YTN; PAM sequence: TTC
aagagggcgttgctgtcata

SEQ ID NO: 378995 - DNA, 20 bp, Artificial Sequence
  Description of Artificial Sequence: Synthetic oligonucleotide
  Target: LAMA2; (+) strand; PAM type: YTN; PAM sequence: TTG
ctgtcataggaatgtacagc

SEQ ID NO: 378996 - DNA, 20 bp, Artificial Sequence
  Description of Artificial Sequence: Synthetic oligonucleotide
  Target: LAMA2; (+) strand; PAM type: YTN; PAM sequence: CTG
tcataggaatgtacagccta

SEQ ID NO: 378997 - DNA, 20 bp, Artificial Sequence
  Description of Artificial Sequence: Synthetic oligonucleotide
  Target: LAMA2; (+) strand; PAM type: YTN; PAM sequence: CTA
tggatggtcaaacaaaacca

SEQ ID NO: 378998 - DNA, 20 bp, Artificial Sequence
  Description of Artificial Sequence: Synthetic oligonucleotide
  Target: LAMA2; (+) strand; PAM type: YTN; PAM sequence: TTT
gtaggcaaatgcatgtctgt

SEQ ID NO: 378999 - DNA, 20 bp, Artificial Sequence
  Description of Artificial Sequence: Synthetic oligonucleotide
  Target: LAMA2; (+) strand; PAM type: YTN; PAM sequence: TTG
taggcaaatgcatgtctgta

SEQ ID NO: 379000 - DNA, 20 bp, Artificial Sequence
  Description of Artificial Sequence: Synthetic oligonucleotide
  Target: LAMA2; (+) strand; PAM type: YTN; PAM sequence: CTG
tagaagctgcccaccgttct

SEQ ID NO: 379001 - DNA, 20 bp, Artificial Sequence
  Description of Artificial Sequence: Synthetic oligonucleotide
  Target: LAMA2; (+) strand; PAM type: YTN; PAM sequence: CTG
cccaccgttcttggaggata

SEQ ID NO: 379002 - DNA, 20 bp, Artificial Sequence
  Description of Artificial Sequence: Synthetic oligonucleotide
  Target: LAMA2; (+) strand; PAM type: YTN; PAM sequence: TTC
ttggaggataggagcacgct

SEQ ID NO: 379003 - DNA, 20 bp, Artificial Sequence
  Description of Artificial Sequence: Synthetic oligonucleotide
  Target: LAMA2; (+) strand; PAM type: YTN; PAM sequence: CTT
ggaggataggagcacgctgg

SEQ ID NO: 379004 - DNA, 20 bp, Artificial Sequence
  Description of Artificial Sequence: Synthetic oligonucleotide
  Target: LAMA2; (+) strand; PAM type: YTN; PAM sequence: TTG
gaggataggagcacgctggg

SEQ ID NO: 379005 - DNA, 20 bp, Artificial Sequence
  Description of Artificial Sequence: Synthetic oligonucleotide
  Target: LAMA2; (+) strand; PAM type: YTN; PAM sequence: CTG
ggctactgagaagccgactt

SEQ ID NO: 379006 - DNA, 20 bp, Artificial Sequence
  Description of Artificial Sequence: Synthetic oligonucleotide
  Target: LAMA2; (+) strand; PAM type: YTN; PAM sequence: CTA
ctgagaagccgacttcaagg

SEQ ID NO: 379007 - DNA, 20 bp, Artificial Sequence
  Description of Artificial Sequence: Synthetic oligonucleotide
  Target: LAMA2; (+) strand; PAM type: YTN; PAM sequence: CTG
agaagccgacttcaaggtca

SEQ ID NO: 379008 - DNA, 20 bp, Artificial Sequence
  Description of Artificial Sequence: Synthetic oligonucleotide
  Target: LAMA2; (+) strand; PAM type: YTN; PAM sequence: CTT
caaggtcagagcgtgtgtgc

SEQ ID NO: 379009 - DNA, 20 bp, Artificial Sequence
  Description of Artificial Sequence: Synthetic oligonucleotide
  Target: LAMA2; (+) strand; PAM type: YTN; PAM sequence: TTC
aaggtcagagcgtgtgtgca

SEQ ID NO: 379010 - DNA, 20 bp, Artificial Sequence
  Description of Artificial Sequence: Synthetic oligonucleotide
  Target: LAMA2; (+) strand; PAM type: YTN; PAM sequence: CTA
gtcagaagggtgcctatgga

SEQ ID NO: 379011 - DNA, 20 bp, Artificial Sequence
  Description of Artificial Sequence: Synthetic oligonucleotide
  Target: LAMA2; (+) strand; PAM type: YTN; PAM sequence: CTA
tggagagacaatgtgccctc

SEQ ID NO: 379012 - DNA, 20 bp, Artificial Sequence
  Description of Artificial Sequence: Synthetic oligonucleotide
  Target: LAMA2; (+) strand; PAM type: YTN; PAM sequence: CTC
ccaactaaaggcacacctgg

SEQ ID NO: 379013 - DNA, 20 bp, Artificial Sequence
  Description of Artificial Sequence: Synthetic oligonucleotide
  Target: LAMA2; (+) strand; PAM type: YTN; PAM sequence: CTA
aaggcacacctgggattctt

SEQ ID NO: 379014 - DNA, 20 bp, Artificial Sequence
  Description of Artificial Sequence: Synthetic oligonucleotide
  Target: LAMA2; (+) strand; PAM type: YTN; PAM sequence: CTG
ggattctttctgggccactg

SEQ ID NO: 379015 - DNA, 20 bp, Artificial Sequence
  Description of Artificial Sequence: Synthetic oligonucleotide
  Target: LAMA2; (+) strand; PAM type: YTN; PAM sequence: TTC
tttctgggccactgggctcc

SEQ ID NO: 379016 - DNA, 20 bp, Artificial Sequence
  Description of Artificial Sequence: Synthetic oligonucleotide
  Target: LAMA2; (+) strand; PAM type: YTN; PAM sequence: CTT
tctgggccactgggctcccg

SEQ ID NO: 379017 - DNA, 20 bp, Artificial Sequence
  Description of Artificial Sequence: Synthetic oligonucleotide
  Target: LAMA2; (+) strand; PAM type: YTN; PAM sequence: TTT
ctgggccactgggctcccgt

SEQ ID NO: 379018 - DNA, 20 bp, Artificial Sequence
  Description of Artificial Sequence: Synthetic oligonucleotide
  Target: LAMA2; (+) strand; PAM type: YTN; PAM sequence: TTC
tgggccactgggctcccgtg

SEQ ID NO: 379019 - DNA, 20 bp, Artificial Sequence
  Description of Artificial Sequence: Synthetic oligonucleotide
  Target: LAMA2; (+) strand; PAM type: YTN; PAM sequence: CTG
ggccactgggctcccgtgct

SEQ ID NO: 379020 - DNA, 20 bp, Artificial Sequence
  Description of Artificial Sequence: Synthetic oligonucleotide
  Target: LAMA2; (+) strand; PAM type: YTN; PAM sequence: CTG
ggctcccgtgctaaataata

SEQ ID NO: 379021 - DNA, 20 bp, Artificial Sequence
  Description of Artificial Sequence: Synthetic oligonucleotide
  Target: LAMA2; (+) strand; PAM type: YTN; PAM sequence: CTC
ccgtgctaaataatacaaaa

SEQ ID NO: 379022 - DNA, 20 bp, Artificial Sequence
  Description of Artificial Sequence: Synthetic oligonucleotide
  Target: LAMA2; (+) strand; PAM type: YTN; PAM sequence: CTA
aataatacaaaaataatgat

SEQ ID NO: 379023 - DNA, 20 bp, Artificial Sequence
  Description of Artificial Sequence: Synthetic oligonucleotide
  Target: LAMA2; (+) strand; PAM type: YTN; PAM sequence: TTC
tttttttttttttagacaga

SEQ ID NO: 379024 - DNA, 20 bp, Artificial Sequence
  Description of Artificial Sequence: Synthetic oligonucleotide
  Target: LAMA2; (+) strand; PAM type: YTN; PAM sequence: CTT
tttttttttttagacagagc

SEQ ID NO: 379025 - DNA, 20 bp, Artificial Sequence
  Description of Artificial Sequence: Synthetic oligonucleotide
  Target: LAMA2; (+) strand; PAM type: YTN; PAM sequence: TTT
ttttttttttagacagagcc

SEQ ID NO: 379026 - DNA, 20 bp, Artificial Sequence
  Description of Artificial Sequence: Synthetic oligonucleotide
  Target: LAMA2; (+) strand; PAM type: YTN; PAM sequence: TTT
tttttttttagacagagcct

SEQ ID NO: 379027 - DNA, 20 bp, Artificial Sequence
  Description of Artificial Sequence: Synthetic oligonucleotide
  Target: LAMA2; (+) strand; PAM type: YTN; PAM sequence: TTT
ttttttttagacagagcctt

SEQ ID NO: 379028 - DNA, 20 bp, Artificial Sequence
  Description of Artificial Sequence: Synthetic oligonucleotide
  Target: LAMA2; (+) strand; PAM type: YTN; PAM sequence: TTT
tttttttagacagagccttg

SEQ ID NO: 379029 - DNA, 20 bp, Artificial Sequence
  Description of Artificial Sequence: Synthetic oligonucleotide
  Target: LAMA2; (+) strand; PAM type: YTN; PAM sequence: TTT
ttttttagacagagccttgc

SEQ ID NO: 379030 - DNA, 20 bp, Artificial Sequence
  Description of Artificial Sequence: Synthetic oligonucleotide
  Target: LAMA2; (+) strand; PAM type: YTN; PAM sequence: TTT
tttttagacagagccttgct

SEQ ID NO: 379031 - DNA, 20 bp, Artificial Sequence
  Description of Artificial Sequence: Synthetic oligonucleotide
  Target: LAMA2; (+) strand; PAM type: YTN; PAM sequence: TTT
ttttagacagagccttgctc

SEQ ID NO: 379032 - DNA, 20 bp, Artificial Sequence
  Description of Artificial Sequence: Synthetic oligonucleotide
  Target: LAMA2; (+) strand; PAM type: YTN; PAM sequence: TTT
tttagacagagccttgctct

SEQ ID NO: 379033 - DNA, 20 bp, Artificial Sequence
  Description of Artificial Sequence: Synthetic oligonucleotide
  Target: LAMA2; (+) strand; PAM type: YTN; PAM sequence: TTT
ttagacagagccttgctctg

SEQ ID NO: 379034 - DNA, 20 bp, Artificial Sequence
  Description of Artificial Sequence: Synthetic oligonucleotide
  Target: LAMA2; (+) strand; PAM type: YTN; PAM sequence: TTT
tagacagagccttgctctgt

SEQ ID NO: 379035 - DNA, 20 bp, Artificial Sequence
  Description of Artificial Sequence: Synthetic oligonucleotide
  Target: LAMA2; (+) strand; PAM type: YTN; PAM sequence: TTT
agacagagccttgctctgtc

SEQ ID NO: 379036 - DNA, 20 bp, Artificial Sequence
  Description of Artificial Sequence: Synthetic oligonucleotide
  Target: LAMA2; (+) strand; PAM type: YTN; PAM sequence: TTA
gacagagccttgctctgtcg

SEQ ID NO: 379037 - DNA, 20 bp, Artificial Sequence
  Description of Artificial Sequence: Synthetic oligonucleotide
  Target: LAMA2; (+) strand; PAM type: YTN; PAM sequence: CTT
gctctgtcgcctaggctgga

SEQ ID NO: 379038 - DNA, 20 bp, Artificial Sequence
  Description of Artificial Sequence: Synthetic oligonucleotide
  Target: LAMA2; (+) strand; PAM type: YTN; PAM sequence: TTG
ctctgtcgcctaggctggag

SEQ ID NO: 379039 - DNA, 20 bp, Artificial Sequence
  Description of Artificial Sequence: Synthetic oligonucleotide
  Target: LAMA2; (+) strand; PAM type: YTN; PAM sequence: CTC
tgtcgcctaggctggagtgc

SEQ ID NO: 379040 - DNA, 20 bp, Artificial Sequence
  Description of Artificial Sequence: Synthetic oligonucleotide
  Target: LAMA2; (+) strand; PAM type: YTN; PAM sequence: CTG
tcgcctaggctggagtgcag

SEQ ID NO: 379041 - DNA, 20 bp, Artificial Sequence
  Description of Artificial Sequence: Synthetic oligonucleotide
  Target: LAMA2; (+) strand; PAM type: YTN; PAM sequence: CTA
ggctggagtgcagtggcgcg

SEQ ID NO: 379042 - DNA, 20 bp, Artificial Sequence
  Description of Artificial Sequence: Synthetic oligonucleotide
  Target: LAMA2; (+) strand; PAM type: YTN; PAM sequence: CTG
gagtgcagtggcgcgatctc

SEQ ID NO: 379043 - DNA, 20 bp, Artificial Sequence
  Description of Artificial Sequence: Synthetic oligonucleotide
  Target: LAMA2; (+) strand; PAM type: YTN; PAM sequence: CTC
ggctcactgcaagctgcacc

SEQ ID NO: 379044 - DNA, 20 bp, Artificial Sequence
  Description of Artificial Sequence: Synthetic oligonucleotide
  Target: LAMA2; (+) strand; PAM type: YTN; PAM sequence: CTC
actgcaagctgcacctcctg

SEQ ID NO: 379045 - DNA, 20 bp, Artificial Sequence
  Description of Artificial Sequence: Synthetic oligonucleotide
  Target: LAMA2; (+) strand; PAM type: YTN; PAM sequence: CTG
caagctgcacctcctgggtt

SEQ ID NO: 379046 - DNA, 20 bp, Artificial Sequence
  Description of Artificial Sequence: Synthetic oligonucleotide
  Target: LAMA2; (+) strand; PAM type: YTN; PAM sequence: CTG
cacctcctgggttcacgcca

SEQ ID NO: 379047 - DNA, 20 bp, Artificial Sequence
  Description of Artificial Sequence: Synthetic oligonucleotide
  Target: LAMA2; (+) strand; PAM type: YTN; PAM sequence: CTC
ctgggttcacgccattctcc

SEQ ID NO: 379048 - DNA, 20 bp, Artificial Sequence
  Description of Artificial Sequence: Synthetic oligonucleotide
  Target: LAMA2; (+) strand; PAM type: YTN; PAM sequence: CTG
ggttcacgccattctcctgc

SEQ ID NO: 379049 - DNA, 20 bp, Artificial Sequence
  Description of Artificial Sequence: Synthetic oligonucleotide
  Target: LAMA2; (+) strand; PAM type: YTN; PAM sequence: TTC
acgccattctcctgcctcag

SEQ ID NO: 379050 - DNA, 20 bp, Artificial Sequence
  Description of Artificial Sequence: Synthetic oligonucleotide
  Target: LAMA2; (+) strand; PAM type: YTN; PAM sequence: TTC
tcctgcctcagcctcaggag

SEQ ID NO: 379051 - DNA, 20 bp, Artificial Sequence
  Description of Artificial Sequence: Synthetic oligonucleotide
  Target: LAMA2; (+) strand; PAM type: YTN; PAM sequence: CTC
ctgcctcagcctcaggagta

SEQ ID NO: 379052 - DNA, 20 bp, Artificial Sequence
  Description of Artificial Sequence: Synthetic oligonucleotide
  Target: LAMA2; (+) strand; PAM type: YTN; PAM sequence: CTG
cctcagcctcaggagtagct

SEQ ID NO: 379053 - DNA, 20 bp, Artificial Sequence
  Description of Artificial Sequence: Synthetic oligonucleotide
  Target: LAMA2; (+) strand; PAM type: YTN; PAM sequence: CTC
agcctcaggagtagctggga

SEQ ID NO: 379054 - DNA, 20 bp, Artificial Sequence
  Description of Artificial Sequence: Synthetic oligonucleotide
  Target: LAMA2; (+) strand; PAM type: YTN; PAM sequence: CTC
aggagtagctgggactacag

SEQ ID NO: 379055 - DNA, 20 bp, Artificial Sequence
  Description of Artificial Sequence: Synthetic oligonucleotide
  Target: LAMA2; (+) strand; PAM type: YTN; PAM sequence: CTG
ggactacaggcgtccgccac

SEQ ID NO: 379056 - DNA, 20 bp, Artificial Sequence
  Description of Artificial Sequence: Synthetic oligonucleotide
  Target: LAMA2; (+) strand; PAM type: YTN; PAM sequence: CTA
caggcgtccgccaccacgcc

SEQ ID NO: 379057 - DNA, 20 bp, Artificial Sequence
  Description of Artificial Sequence: Synthetic oligonucleotide
  Target: LAMA2; (+) strand; PAM type: YTN; PAM sequence: CTA
attttttgtgtttttaatag

SEQ ID NO: 379058 - DNA, 20 bp, Artificial Sequence
  Description of Artificial Sequence: Synthetic oligonucleotide
  Target: LAMA2; (+) strand; PAM type: YTN; PAM sequence: TTT
tttgtgtttttaatagagac

SEQ ID NO: 379059 - DNA, 20 bp, Artificial Sequence
  Description of Artificial Sequence: Synthetic oligonucleotide
  Target: LAMA2; (+) strand; PAM type: YTN; PAM sequence: TTT
ttgtgtttttaatagagaca

SEQ ID NO: 379060 - DNA, 20 bp, Artificial Sequence
  Description of Artificial Sequence: Synthetic oligonucleotide
  Target: LAMA2; (+) strand; PAM type: YTN; PAM sequence: TTT
tgtgtttttaatagagacag

SEQ ID NO: 379061 - DNA, 20 bp, Artificial Sequence
  Description of Artificial Sequence: Synthetic oligonucleotide
  Target: LAMA2; (+) strand; PAM type: YTN; PAM sequence: TTT
gtgtttttaatagagacagg

SEQ ID NO: 379062 - DNA, 20 bp, Artificial Sequence
  Description of Artificial Sequence: Synthetic oligonucleotide
  Target: LAMA2; (+) strand; PAM type: YTN; PAM sequence: TTG
tgtttttaatagagacaggg

SEQ ID NO: 379063 - DNA, 20 bp, Artificial Sequence
  Description of Artificial Sequence: Synthetic oligonucleotide
  Target: LAMA2; (+) strand; PAM type: YTN; PAM sequence: TTT
ttaatagagacagggtttca

SEQ ID NO: 379064 - DNA, 20 bp, Artificial Sequence
  Description of Artificial Sequence: Synthetic oligonucleotide
  Target: LAMA2; (+) strand; PAM type: YTN; PAM sequence: TTT
taatagagacagggtttcac

SEQ ID NO: 379065 - DNA, 20 bp, Artificial Sequence
  Description of Artificial Sequence: Synthetic oligonucleotide
  Target: LAMA2; (+) strand; PAM type: YTN; PAM sequence: TTT
aatagagacagggtttcacc

SEQ ID NO: 379066 - DNA, 20 bp, Artificial Sequence
  Description of Artificial Sequence: Synthetic oligonucleotide
  Target: LAMA2; (+) strand; PAM type: YTN; PAM sequence: TTA
atagagacagggtttcacca

SEQ ID NO: 379067 - DNA, 20 bp, Artificial Sequence
  Description of Artificial Sequence: Synthetic oligonucleotide
  Target: LAMA2; (+) strand; PAM type: YTN; PAM sequence: TTT
caccatgttagccaggacgg

SEQ ID NO: 379068 - DNA, 20 bp, Artificial Sequence
  Description of Artificial Sequence: Synthetic oligonucleotide
  Target: LAMA2; (+) strand; PAM type: YTN; PAM sequence: TTC
accatgttagccaggacggt

SEQ ID NO: 379069 - DNA, 20 bp, Artificial Sequence
  Description of Artificial Sequence: Synthetic oligonucleotide
  Target: LAMA2; (+) strand; PAM type: YTN; PAM sequence: TTA
gccaggacggtctcaatctc

SEQ ID NO: 379070 - DNA, 20 bp, Artificial Sequence
  Description of Artificial Sequence: Synthetic oligonucleotide
  Target: LAMA2; (+) strand; PAM type: YTN; PAM sequence: CTC
aatctcctgaccttgtgatc

SEQ ID NO: 379071 - DNA, 20 bp, Artificial Sequence
  Description of Artificial Sequence: Synthetic oligonucleotide
  Target: LAMA2; (+) strand; PAM type: YTN; PAM sequence: CTC
ctgaccttgtgatccgccct

SEQ ID NO: 379072 - DNA, 20 bp, Artificial Sequence
  Description of Artificial Sequence: Synthetic oligonucleotide
  Target: LAMA2; (+) strand; PAM type: YTN; PAM sequence: CTG
accttgtgatccgccctcct

SEQ ID NO: 379073 - DNA, 20 bp, Artificial Sequence
  Description of Artificial Sequence: Synthetic oligonucleotide
  Target: LAMA2; (+) strand; PAM type: YTN; PAM sequence: CTT
gtgatccgccctcctcggcc

SEQ ID NO: 379074 - DNA, 20 bp, Artificial Sequence
  Description of Artificial Sequence: Synthetic oligonucleotide
  Target: LAMA2; (+) strand; PAM type: YTN; PAM sequence: TTG
tgatccgccctcctcggcct

SEQ ID NO: 379075 - DNA, 20 bp, Artificial Sequence
  Description of Artificial Sequence: Synthetic oligonucleotide
  Target: LAMA2; (+) strand; PAM type: YTN; PAM sequence: CTC
ctcggcctcccaaagtgctg

SEQ ID NO: 379076 - DNA, 20 bp, Artificial Sequence
  Description of Artificial Sequence: Synthetic oligonucleotide
  Target: LAMA2; (+) strand; PAM type: YTN; PAM sequence: CTC
ggcctcccaaagtgctggga

SEQ ID NO: 379077 - DNA, 20 bp, Artificial Sequence
  Description of Artificial Sequence: Synthetic oligonucleotide
  Target: LAMA2; (+) strand; PAM type: YTN; PAM sequence: CTC
ccaaagtgctgggattacag

SEQ ID NO: 379078 - DNA, 20 bp, Artificial Sequence
  Description of Artificial Sequence: Synthetic oligonucleotide
  Target: LAMA2; (+) strand; PAM type: YTN; PAM sequence: CTG
ggattacaggcatgagccac

SEQ ID NO: 379079 - DNA, 20 bp, Artificial Sequence
  Description of Artificial Sequence: Synthetic oligonucleotide
  Target: LAMA2; (+) strand; PAM type: YTN; PAM sequence: TTA
caggcatgagccaccgcgcc

SEQ ID NO: 379080 - DNA, 20 bp, Artificial Sequence
  Description of Artificial Sequence: Synthetic oligonucleotide
  Target: LAMA2; (+) strand; PAM type: YTN; PAM sequence: CTA
atgaagaaccagaactcagc

SEQ ID NO: 379081 - DNA, 20 bp, Artificial Sequence
  Description of Artificial Sequence: Synthetic oligonucleotide
  Target: LAMA2; (+) strand; PAM type: YTN; PAM sequence: CTC
agcttggaagtgtggtgggc

SEQ ID NO: 379082 - DNA, 20 bp, Artificial Sequence
  Description of Artificial Sequence: Synthetic oligonucleotide
  Target: LAMA2; (+) strand; PAM type: YTN; PAM sequence: CTT
ggaagtgtggtgggccgcca

SEQ ID NO: 379083 - DNA, 20 bp, Artificial Sequence
  Description of Artificial Sequence: Synthetic oligonucleotide
  Target: LAMA2; (+) strand; PAM type: YTN; PAM sequence: TTG
gaagtgtggtgggccgccat

SEQ ID NO: 379084 - DNA, 20 bp, Artificial Sequence
  Description of Artificial Sequence: Synthetic oligonucleotide
  Target: LAMA2; (+) strand; PAM type: YTN; PAM sequence: TTA
tggacttattgggtccttcc

SEQ ID NO: 379085 - DNA, 20 bp, Artificial Sequence
  Description of Artificial Sequence: Synthetic oligonucleotide
  Target: LAMA2; (+) strand; PAM type: YTN; PAM sequence: CTT
attgggtccttccaaggcct

SEQ ID NO: 379086 - DNA, 20 bp, Artificial Sequence
  Description of Artificial Sequence: Synthetic oligonucleotide
  Target: LAMA2; (+) strand; PAM type: YTN; PAM sequence: TTA
ttgggtccttccaaggcctc

SEQ ID NO: 379087 - DNA, 20 bp, Artificial Sequence
  Description of Artificial Sequence: Synthetic oligonucleotide
  Target: LAMA2; (+) strand; PAM type: YTN; PAM sequence: TTG
ggtccttccaaggcctctat

SEQ ID NO: 379088 - DNA, 20 bp, Artificial Sequence
  Description of Artificial Sequence: Synthetic oligonucleotide
  Target: LAMA2; (+) strand; PAM type: YTN; PAM sequence: CTT
ccaaggcctctattgactaa

SEQ ID NO: 379089 - DNA, 20 bp, Artificial Sequence
  Description of Artificial Sequence: Synthetic oligonucleotide
  Target: LAMA2; (+) strand; PAM type: YTN; PAM sequence: TTC
caaggcctctattgactaag

SEQ ID NO: 379090 - DNA, 20 bp, Artificial Sequence
  Description of Artificial Sequence: Synthetic oligonucleotide
  Target: LAMA2; (+) strand; PAM type: YTN; PAM sequence: CTC
tattgactaagcctatcatt

SEQ ID NO: 379091 - DNA, 20 bp, Artificial Sequence
  Description of Artificial Sequence: Synthetic oligonucleotide
  Target: LAMA2; (+) strand; PAM type: YTN; PAM sequence: CTA
ttgactaagcctatcattct

SEQ ID NO: 379092 - DNA, 20 bp, Artificial Sequence
  Description of Artificial Sequence: Synthetic oligonucleotide
  Target: LAMA2; (+) strand; PAM type: YTN; PAM sequence: TTG
actaagcctatcattctgcc

SEQ ID NO: 379093 - DNA, 20 bp, Artificial Sequence
  Description of Artificial Sequence: Synthetic oligonucleotide
  Target: LAMA2; (+) strand; PAM type: YTN; PAM sequence: CTA
agcctatcattctgccaccg

SEQ ID NO: 379094 - DNA, 20 bp, Artificial Sequence
  Description of Artificial Sequence: Synthetic oligonucleotide
  Target: LAMA2; (+) strand; PAM type: YTN; PAM sequence: CTA
tcattctgccaccggatacg

SEQ ID NO: 379095 - DNA, 20 bp, Artificial Sequence
  Description of Artificial Sequence: Synthetic oligonucleotide
  Target: LAMA2; (+) strand; PAM type: YTN; PAM sequence: TTC
tgccaccggatacggagaaa

SEQ ID NO: 379096 - DNA, 20 bp, Artificial Sequence
  Description of Artificial Sequence: Synthetic oligonucleotide
  Target: LAMA2; (+) strand; PAM type: YTN; PAM sequence: CTG
ccaccggatacggagaaatg

SEQ ID NO: 379097 - DNA, 20 bp, Artificial Sequence
  Description of Artificial Sequence: Synthetic oligonucleotide
  Target: LAMA2; (+) strand; PAM type: YTN; PAM sequence: CTA
cggggtctacctactgtatc

SEQ ID NO: 379098 - DNA, 20 bp, Artificial Sequence
  Description of Artificial Sequence: Synthetic oligonucleotide
  Target: LAMA2; (+) strand; PAM type: YTN; PAM sequence: CTA
cctactgtatcacaaagcag

SEQ ID NO: 379099 - DNA, 20 bp, Artificial Sequence
  Description of Artificial Sequence: Synthetic oligonucleotide
  Target: LAMA2; (+) strand; PAM type: YTN; PAM sequence: CTA
ctgtatcacaaagcagggtg

SEQ ID NO: 379100 - DNA, 20 bp, Artificial Sequence
  Description of Artificial Sequence: Synthetic oligonucleotide
  Target: LAMA2; (+) strand; PAM type: YTN; PAM sequence: CTG
tatcacaaagcagggtgaat

SEQ ID NO: 379101 - DNA, 20 bp, Artificial Sequence
  Description of Artificial Sequence: Synthetic oligonucleotide
  Target: LAMA2; (+) strand; PAM type: YTN; PAM sequence: TTT
ggagctcagaaacagtagat

SEQ ID NO: 379102 - DNA, 20 bp, Artificial Sequence
  Description of Artificial Sequence: Synthetic oligonucleotide
  Target: LAMA2; (+) strand; PAM type: YTN; PAM sequence: TTG
gagctcagaaacagtagatg

SEQ ID NO: 379103 - DNA, 20 bp, Artificial Sequence
  Description of Artificial Sequence: Synthetic oligonucleotide
  Target: LAMA2; (+) strand; PAM type: YTN; PAM sequence: CTC
agaaacagtagatgtataat

SEQ ID NO: 379104 - DNA, 20 bp, Artificial Sequence
  Description of Artificial Sequence: Synthetic oligonucleotide
  Target: LAMA2; (+) strand; PAM type: YTN; PAM sequence: TTG
gcacagctggtccctgaaat

SEQ ID NO: 379105 - DNA, 20 bp, Artificial Sequence
  Description of Artificial Sequence: Synthetic oligonucleotide
  Target: LAMA2; (+) strand; PAM type: YTN; PAM sequence: CTG
gtccctgaaatgacttattc

SEQ ID NO: 379106 - DNA, 20 bp, Artificial Sequence
  Description of Artificial Sequence: Synthetic oligonucleotide
  Target: LAMA2; (+) strand; PAM type: YTN; PAM sequence: CTG
aaatgacttattccaagatc

SEQ ID NO: 379107 - DNA, 20 bp, Artificial Sequence
  Description of Artificial Sequence: Synthetic oligonucleotide
  Target: LAMA2; (+) strand; PAM type: YTN; PAM sequence: CTT
attccaagatcctaaatgac

SEQ ID NO: 379108 - DNA, 20 bp, Artificial Sequence
  Description of Artificial Sequence: Synthetic oligonucleotide
  Target: LAMA2; (+) strand; PAM type: YTN; PAM sequence: TTA
ttccaagatcctaaatgaca

SEQ ID NO: 379109 - DNA, 20 bp, Artificial Sequence
  Description of Artificial Sequence: Synthetic oligonucleotide
  Target: LAMA2; (+) strand; PAM type: YTN; PAM sequence: TTC
caagatcctaaatgacattt

SEQ ID NO: 379110 - DNA, 20 bp, Artificial Sequence
  Description of Artificial Sequence: Synthetic oligonucleotide
  Target: LAMA2; (+) strand; PAM type: YTN; PAM sequence: CTA
aatgacattttagaaattca

SEQ ID NO: 379111 - DNA, 20 bp, Artificial Sequence
  Description of Artificial Sequence: Synthetic oligonucleotide
  Target: LAMA2; (+) strand; PAM type: YTN; PAM sequence: TTT
tagaaattcacttggcattt

SEQ ID NO: 379112 - DNA, 20 bp, Artificial Sequence
  Description of Artificial Sequence: Synthetic oligonucleotide
  Target: LAMA2; (+) strand; PAM type: YTN; PAM sequence: TTT
agaaattcacttggcatttt

SEQ ID NO: 379113 - DNA, 20 bp, Artificial Sequence
  Description of Artificial Sequence: Synthetic oligonucleotide
  Target: LAMA2; (+) strand; PAM type: YTN; PAM sequence: TTA
gaaattcacttggcattttt

SEQ ID NO: 379114 - DNA, 20 bp, Artificial Sequence
  Description of Artificial Sequence: Synthetic oligonucleotide
  Target: LAMA2; (+) strand; PAM type: YTN; PAM sequence: TTC
acttggcatttttattaaat

SEQ ID NO: 379115 - DNA, 20 bp, Artificial Sequence
  Description of Artificial Sequence: Synthetic oligonucleotide
  Target: LAMA2; (+) strand; PAM type: YTN; PAM sequence: CTT
ggcatttttattaaattgca

SEQ ID NO: 379116 - DNA, 20 bp, Artificial Sequence
  Description of Artificial Sequence: Synthetic oligonucleotide
  Target: LAMA2; (+) strand; PAM type: YTN; PAM sequence: TTG
gcatttttattaaattgcaa

SEQ ID NO: 379117 - DNA, 20 bp, Artificial Sequence
  Description of Artificial Sequence: Synthetic oligonucleotide
  Target: LAMA2; (+) strand; PAM type: YTN; PAM sequence: TTT
ttattaaattgcaagaagat

SEQ ID NO: 379118 - DNA, 20 bp, Artificial Sequence
  Description of Artificial Sequence: Synthetic oligonucleotide
  Target: LAMA2; (+) strand; PAM type: YTN; PAM sequence: TTT
tattaaattgcaagaagata

SEQ ID NO: 379119 - DNA, 20 bp, Artificial Sequence
  Description of Artificial Sequence: Synthetic oligonucleotide
  Target: LAMA2; (+) strand; PAM type: YTN; PAM sequence: TTT
attaaattgcaagaagatat

SEQ ID NO: 379120 - DNA, 20 bp, Artificial Sequence
  Description of Artificial Sequence: Synthetic oligonucleotide
  Target: LAMA2; (+) strand; PAM type: YTN; PAM sequence: TTA
ttaaattgcaagaagatatg

SEQ ID NO: 379121 - DNA, 20 bp, Artificial Sequence
  Description of Artificial Sequence: Synthetic oligonucleotide
  Target: LAMA2; (+) strand; PAM type: YTN; PAM sequence: TTA
aattgcaagaagatatgagc

SEQ ID NO: 379122 - DNA, 20 bp, Artificial Sequence
  Description of Artificial Sequence: Synthetic oligonucleotide
  Target: LAMA2; (+) strand; PAM type: YTN; PAM sequence: TTG
caagaagatatgagctctgt

SEQ ID NO: 379123 - DNA, 20 bp, Artificial Sequence
  Description of Artificial Sequence: Synthetic oligonucleotide
  Target: LAMA2; (+) strand; PAM type: YTN; PAM sequence: CTC
tgtaaatcaagagcagaaac

SEQ ID NO: 379124 - DNA, 20 bp, Artificial Sequence
  Description of Artificial Sequence: Synthetic oligonucleotide
  Target: LAMA2; (+) strand; PAM type: YTN; PAM sequence: CTG
taaatcaagagcagaaacct

SEQ ID NO: 379125 - DNA, 20 bp, Artificial Sequence
  Description of Artificial Sequence: Synthetic oligonucleotide
  Target: LAMA2; (+) strand; PAM type: YTN; PAM sequence: CTT
taaaaggataatgtaagaca

SEQ ID NO: 379126 - DNA, 20 bp, Artificial Sequence
  Description of Artificial Sequence: Synthetic oligonucleotide
  Target: LAMA2; (+) strand; PAM type: YTN; PAM sequence: TTT
aaaaggataatgtaagacaa

SEQ ID NO: 379127 - DNA, 20 bp, Artificial Sequence
  Description of Artificial Sequence: Synthetic oligonucleotide
  Target: LAMA2; (+) strand; PAM type: YTN; PAM sequence: TTA
aaaggataatgtaagacaaa

SEQ ID NO: 379128 - DNA, 20 bp, Artificial Sequence
  Description of Artificial Sequence: Synthetic oligonucleotide
  Target: LAMA2; (+) strand; PAM type: YTN; PAM sequence: TTA
aagatgagagaaataaaatt

SEQ ID NO: 379129 - DNA, 20 bp, Artificial Sequence
  Description of Artificial Sequence: Synthetic oligonucleotide
  Target: LAMA2; (+) strand; PAM type: YTN; PAM sequence: TTA
ttcaaaagaagttaagattg

SEQ ID NO: 379130 - DNA, 20 bp, Artificial Sequence
  Description of Artificial Sequence: Synthetic oligonucleotide
  Target: LAMA2; (+) strand; PAM type: YTN; PAM sequence: TTC
aaaagaagttaagattgcaa

SEQ ID NO: 379131 - DNA, 20 bp, Artificial Sequence
  Description of Artificial Sequence: Synthetic oligonucleotide
  Target: LAMA2; (+) strand; PAM type: YTN; PAM sequence: TTA
agattgcaatagggtaatga

SEQ ID NO: 379132 - DNA, 20 bp, Artificial Sequence
  Description of Artificial Sequence: Synthetic oligonucleotide
  Target: LAMA2; (+) strand; PAM type: YTN; PAM sequence: TTG
caatagggtaatgaaaataa

SEQ ID NO: 379133 - DNA, 20 bp, Artificial Sequence
  Description of Artificial Sequence: Synthetic oligonucleotide
  Target: LAMA2; (+) strand; PAM type: YTN; PAM sequence: TTG
gtggtatgtgtatacaataa

SEQ ID NO: 379134 - DNA, 20 bp, Artificial Sequence
  Description of Artificial Sequence: Synthetic oligonucleotide
  Target: LAMA2; (+) strand; PAM type: YTN; PAM sequence: CTT
ttcctgtaaaacaggagctg

SEQ ID NO: 379135 - DNA, 20 bp, Artificial Sequence
  Description of Artificial Sequence: Synthetic oligonucleotide
  Target: LAMA2; (+) strand; PAM type: YTN; PAM sequence: TTT
tcctgtaaaacaggagctgt

SEQ ID NO: 379136 - DNA, 20 bp, Artificial Sequence
  Description of Artificial Sequence: Synthetic oligonucleotide
  Target: LAMA2; (+) strand; PAM type: YTN; PAM sequence: TTT
cctgtaaaacaggagctgtg

SEQ ID NO: 379137 - DNA, 20 bp, Artificial Sequence
  Description of Artificial Sequence: Synthetic oligonucleotide
  Target: LAMA2; (+) strand; PAM type: YTN; PAM sequence: TTC
ctgtaaaacaggagctgtga

SEQ ID NO: 379138 - DNA, 20 bp, Artificial Sequence
  Description of Artificial Sequence: Synthetic oligonucleotide
  Target: LAMA2; (+) strand; PAM type: YTN; PAM sequence: CTG
taaaacaggagctgtgaaag

SEQ ID NO: 379139 - DNA, 20 bp, Artificial Sequence
  Description of Artificial Sequence: Synthetic oligonucleotide
  Target: LAMA2; (+) strand; PAM type: YTN; PAM sequence: CTG
tgaaagtaggataccaattt

SEQ ID NO: 379140 - DNA, 20 bp, Artificial Sequence
  Description of Artificial Sequence: Synthetic oligonucleotide
  Target: LAMA2; (+) strand; PAM type: YTN; PAM sequence: TTT
gagaggtaaatacagcaaga

SEQ ID NO: 379141 - DNA, 20 bp, Artificial Sequence
  Description of Artificial Sequence: Synthetic oligonucleotide
  Target: LAMA2; (+) strand; PAM type: YTN; PAM sequence: TTG
agaggtaaatacagcaagaa

SEQ ID NO: 379142 - DNA, 20 bp, Artificial Sequence
  Description of Artificial Sequence: Synthetic oligonucleotide
  Target: LAMA2; (+) strand; PAM type: YTN; PAM sequence: TTG
cagaagacattaggatatta

SEQ ID NO: 379143 - DNA, 20 bp, Artificial Sequence
  Description of Artificial Sequence: Synthetic oligonucleotide
  Target: LAMA2; (+) strand; PAM type: YTN; PAM sequence: TTA
ggatattatagatttggcag

SEQ ID NO: 379144 - DNA, 20 bp, Artificial Sequence
  Description of Artificial Sequence: Synthetic oligonucleotide
  Target: LAMA2; (+) strand; PAM type: YTN; PAM sequence: TTA
tagatttggcagagagaaca

SEQ ID NO: 379145 - DNA, 20 bp, Artificial Sequence
  Description of Artificial Sequence: Synthetic oligonucleotide
  Target: LAMA2; (+) strand; PAM type: YTN; PAM sequence: TTT
ggcagagagaacagagtgat

SEQ ID NO: 379146 - DNA, 20 bp, Artificial Sequence
  Description of Artificial Sequence: Synthetic oligonucleotide
  Target: LAMA2; (+) strand; PAM type: YTN; PAM sequence: TTG
gcagagagaacagagtgatg

SEQ ID NO: 379147 - DNA, 20 bp, Artificial Sequence
  Description of Artificial Sequence: Synthetic oligonucleotide
  Target: LAMA2; (+) strand; PAM type: YTN; PAM sequence: CTT
taagaattatagatgatcct

SEQ ID NO: 379148 - DNA, 20 bp, Artificial Sequence
  Description of Artificial Sequence: Synthetic oligonucleotide
  Target: LAMA2; (+) strand; PAM type: YTN; PAM sequence: TTT
aagaattatagatgatcctg

SEQ ID NO: 379149 - DNA, 20 bp, Artificial Sequence
  Description of Artificial Sequence: Synthetic oligonucleotide
  Target: LAMA2; (+) strand; PAM type: YTN; PAM sequence: TTA
agaattatagatgatcctga

SEQ ID NO: 379150 - DNA, 20 bp, Artificial Sequence
  Description of Artificial Sequence: Synthetic oligonucleotide
  Target: LAMA2; (+) strand; PAM type: YTN; PAM sequence: TTA
tagatgatcctgaaaaagaa

SEQ ID NO: 379151 - DNA, 20 bp, Artificial Sequence
  Description of Artificial Sequence: Synthetic oligonucleotide
  Target: LAMA2; (+) strand; PAM type: YTN; PAM sequence: CTG
aaaaagaaaattgattaatt

SEQ ID NO: 379152 - DNA, 20 bp, Artificial Sequence
  Description of Artificial Sequence: Synthetic oligonucleotide
  Target: LAMA2; (+) strand; PAM type: YTN; PAM sequence: TTG
attaattagaacagatgtaa

SEQ ID NO: 379153 - DNA, 20 bp, Artificial Sequence
  Description of Artificial Sequence: Synthetic oligonucleotide
  Target: LAMA2; (+) strand; PAM type: YTN; PAM sequence: TTA
attagaacagatgtaaaaat

SEQ ID NO: 379154 - DNA, 20 bp, Artificial Sequence
  Description of Artificial Sequence: Synthetic oligonucleotide
  Target: LAMA2; (+) strand; PAM type: YTN; PAM sequence: TTA
gaacagatgtaaaaatcaaa

SEQ ID NO: 379155 - DNA, 20 bp, Artificial Sequence
  Description of Artificial Sequence: Synthetic oligonucleotide
  Target: LAMA2; (+) strand; PAM type: YTN; PAM sequence: CTG
aagaagaaacagtactgaat

SEQ ID NO: 379156 - DNA, 20 bp, Artificial Sequence
  Description of Artificial Sequence: Synthetic oligonucleotide
  Target: LAMA2; (+) strand; PAM type: YTN; PAM sequence: CTG
aatcaaaacacaattatgtt

SEQ ID NO: 379157 - DNA, 20 bp, Artificial Sequence
  Description of Artificial Sequence: Synthetic oligonucleotide
  Target: LAMA2; (+) strand; PAM type: YTN; PAM sequence: TTA
tgttcccaaactgaaagaac

SEQ ID NO: 379158 - DNA, 20 bp, Artificial Sequence
  Description of Artificial Sequence: Synthetic oligonucleotide
  Target: LAMA2; (+) strand; PAM type: YTN; PAM sequence: TTC
ccaaactgaaagaactatgt

SEQ ID NO: 379159 - DNA, 20 bp, Artificial Sequence
  Description of Artificial Sequence: Synthetic oligonucleotide
  Target: LAMA2; (+) strand; PAM type: YTN; PAM sequence: CTG
aaagaactatgttccagtaa

SEQ ID NO: 379160 - DNA, 20 bp, Artificial Sequence
  Description of Artificial Sequence: Synthetic oligonucleotide
  Target: LAMA2; (+) strand; PAM type: YTN; PAM sequence: CTA
tgttccagtaagttgatgga

SEQ ID NO: 379161 - DNA, 20 bp, Artificial Sequence
  Description of Artificial Sequence: Synthetic oligonucleotide
  Target: LAMA2; (+) strand; PAM type: YTN; PAM sequence: TTC
cagtaagttgatggaaaaaa

SEQ ID NO: 379162 - DNA, 20 bp, Artificial Sequence
  Description of Artificial Sequence: Synthetic oligonucleotide
  Target: LAMA2; (+) strand; PAM type: YTN; PAM sequence: TTG
atggaaaaaaaaaaaacaaa

SEQ ID NO: 379163 - DNA, 20 bp, Artificial Sequence
  Description of Artificial Sequence: Synthetic oligonucleotide
  Target: LAMA2; (+) strand; PAM type: YTN; PAM sequence: CTT
cagaaaattctagcaaaaat

SEQ ID NO: 379164 - DNA, 20 bp, Artificial Sequence
  Description of Artificial Sequence: Synthetic oligonucleotide
  Target: LAMA2; (+) strand; PAM type: YTN; PAM sequence: TTC
agaaaattctagcaaaaata

SEQ ID NO: 379165 - DNA, 20 bp, Artificial Sequence
  Description of Artificial Sequence: Synthetic oligonucleotide
  Target: LAMA2; (+) strand; PAM type: YTN; PAM sequence: TTC
tagcaaaaatatgaattatg

SEQ ID NO: 379166 - DNA, 20 bp, Artificial Sequence
  Description of Artificial Sequence: Synthetic oligonucleotide
  Target: LAMA2; (+) strand; PAM type: YTN; PAM sequence: CTA
gcaaaaatatgaattatgta

SEQ ID NO: 379167 - DNA, 20 bp, Artificial Sequence
  Description of Artificial Sequence: Synthetic oligonucleotide
  Target: LAMA2; (+) strand; PAM type: YTN; PAM sequence: TTA
tgtaaataaagagaaaatcg

SEQ ID NO: 379168 - DNA, 20 bp, Artificial Sequence
  Description of Artificial Sequence: Synthetic oligonucleotide
  Target: LAMA2; (+) strand; PAM type: YTN; PAM sequence: CTT
gggcgaagaaaaacgttact

SEQ ID NO: 379169 - DNA, 20 bp, Artificial Sequence
  Description of Artificial Sequence: Synthetic oligonucleotide
  Target: LAMA2; (+) strand; PAM type: YTN; PAM sequence: TTG
ggcgaagaaaaacgttacta

SEQ ID NO: 379170 - DNA, 20 bp, Artificial Sequence
  Description of Artificial Sequence: Synthetic oligonucleotide
  Target: LAMA2; (+) strand; PAM type: YTN; PAM sequence: TTA
ctaacagagacctcaaatca

SEQ ID NO: 379171 - DNA, 20 bp, Artificial Sequence
  Description of Artificial Sequence: Synthetic oligonucleotide
  Target: LAMA2; (+) strand; PAM type: YTN; PAM sequence: CTA
acagagacctcaaatcagaa

SEQ ID NO: 379172 - DNA, 20 bp, Artificial Sequence
  Description of Artificial Sequence: Synthetic oligonucleotide
  Target: LAMA2; (+) strand; PAM type: YTN; PAM sequence: CTC
aaatcagaattgtatgcaag

SEQ ID NO: 379173 - DNA, 20 bp, Artificial Sequence
  Description of Artificial Sequence: Synthetic oligonucleotide
  Target: LAMA2; (+) strand; PAM type: YTN; PAM sequence: TTG
tatgcaagaataaatgccaa

SEQ ID NO: 379174 - DNA, 20 bp, Artificial Sequence
  Description of Artificial Sequence: Synthetic oligonucleotide
  Target: LAMA2; (+) strand; PAM type: YTN; PAM sequence: CTA
gatgttacttctcttcaagc

SEQ ID NO: 379175 - DNA, 20 bp, Artificial Sequence
  Description of Artificial Sequence: Synthetic oligonucleotide
  Target: LAMA2; (+) strand; PAM type: YTN; PAM sequence: TTA
cttctcttcaagctctcctt

SEQ ID NO: 379176 - DNA, 20 bp, Artificial Sequence
  Description of Artificial Sequence: Synthetic oligonucleotide
  Target: LAMA2; (+) strand; PAM type: YTN; PAM sequence: CTT
ctcttcaagctctccttgga

SEQ ID NO: 379177 - DNA, 20 bp, Artificial Sequence
  Description of Artificial Sequence: Synthetic oligonucleotide
  Target: LAMA2; (+) strand; PAM type: YTN; PAM sequence: TTC
tcttcaagctctccttggat

SEQ ID NO: 379178 - DNA, 20 bp, Artificial Sequence
  Description of Artificial Sequence: Synthetic oligonucleotide
  Target: LAMA2; (+) strand; PAM type: YTN; PAM sequence: CTC
ttcaagctctccttggattc

SEQ ID NO: 379179 - DNA, 20 bp, Artificial Sequence
  Description of Artificial Sequence: Synthetic oligonucleotide
  Target: LAMA2; (+) strand; PAM type: YTN; PAM sequence: CTT
caagctctccttggattccc

SEQ ID NO: 379180 - DNA, 20 bp, Artificial Sequence
  Description of Artificial Sequence: Synthetic oligonucleotide
  Target: LAMA2; (+) strand; PAM type: YTN; PAM sequence: TTC
aagctctccttggattcccc

SEQ ID NO: 379181 - DNA, 20 bp, Artificial Sequence
  Description of Artificial Sequence: Synthetic oligonucleotide
  Target: LAMA2; (+) strand; PAM type: YTN; PAM sequence: CTC
tccttggattccccaagtct

SEQ ID NO: 379182 - DNA, 20 bp, Artificial Sequence
  Description of Artificial Sequence: Synthetic oligonucleotide
  Target: LAMA2; (+) strand; PAM type: YTN; PAM sequence: CTC
cttggattccccaagtctag

SEQ ID NO: 379183 - DNA, 20 bp, Artificial Sequence
  Description of Artificial Sequence: Synthetic oligonucleotide
  Target: LAMA2; (+) strand; PAM type: YTN; PAM sequence: CTT
ggattccccaagtctagtct

SEQ ID NO: 379184 - DNA, 20 bp, Artificial Sequence
  Description of Artificial Sequence: Synthetic oligonucleotide
  Target: LAMA2; (+) strand; PAM type: YTN; PAM sequence: TTG
gattccccaagtctagtctg

SEQ ID NO: 379185 - DNA, 20 bp, Artificial Sequence
  Description of Artificial Sequence: Synthetic oligonucleotide
  Target: LAMA2; (+) strand; PAM type: YTN; PAM sequence: TTC
cccaagtctagtctgatgcc

SEQ ID NO: 379186 - DNA, 20 bp, Artificial Sequence
  Description of Artificial Sequence: Synthetic oligonucleotide
  Target: LAMA2; (+) strand; PAM type: YTN; PAM sequence: CTA
gtctgatgccctttgtatgt

SEQ ID NO: 379187 - DNA, 20 bp, Artificial Sequence
  Description of Artificial Sequence: Synthetic oligonucleotide
  Target: LAMA2; (+) strand; PAM type: YTN; PAM sequence: CTG
atgccctttgtatgttcaca

SEQ ID NO: 379188 - DNA, 20 bp, Artificial Sequence
  Description of Artificial Sequence: Synthetic oligonucleotide
  Target: LAMA2; (+) strand; PAM type: YTN; PAM sequence: CTT
tgtatgttcacatagcattt

SEQ ID NO: 379189 - DNA, 20 bp, Artificial Sequence
  Description of Artificial Sequence: Synthetic oligonucleotide
  Target: LAMA2; (+) strand; PAM type: YTN; PAM sequence: TTT
gtatgttcacatagcatttt

SEQ ID NO: 379190 - DNA, 20 bp, Artificial Sequence
  Description of Artificial Sequence: Synthetic oligonucleotide
  Target: LAMA2; (+) strand; PAM type: YTN; PAM sequence: TTG
tatgttcacatagcattttg

SEQ ID NO: 379191 - DNA, 20 bp, Artificial Sequence
  Description of Artificial Sequence: Synthetic oligonucleotide
  Target: LAMA2; (+) strand; PAM type: YTN; PAM sequence: TTC
acatagcattttggacttct

SEQ ID NO: 379192 - DNA, 20 bp, Artificial Sequence
  Description of Artificial Sequence: Synthetic oligonucleotide
  Target: LAMA2; (+) strand; PAM type: YTN; PAM sequence: TTT
tggacttctcctattatata

SEQ ID NO: 379193 - DNA, 20 bp, Artificial Sequence
  Description of Artificial Sequence: Synthetic oligonucleotide
  Target: LAMA2; (+) strand; PAM type: YTN; PAM sequence: TTT
ggacttctcctattatataa

SEQ ID NO: 379194 - DNA, 20 bp, Artificial Sequence
  Description of Artificial Sequence: Synthetic oligonucleotide
  Target: LAMA2; (+) strand; PAM type: YTN; PAM sequence: TTG
gacttctcctattatataat

SEQ ID NO: 379195 - DNA, 20 bp, Artificial Sequence
  Description of Artificial Sequence: Synthetic oligonucleotide
  Target: LAMA2; (+) strand; PAM type: YTN; PAM sequence: CTT
ctcctattatataatgctta

SEQ ID NO: 379196 - DNA, 20 bp, Artificial Sequence
  Description of Artificial Sequence: Synthetic oligonucleotide
  Target: LAMA2; (+) strand; PAM type: YTN; PAM sequence: TTC
tcctattatataatgcttat

SEQ ID NO: 379197 - DNA, 20 bp, Artificial Sequence
  Description of Artificial Sequence: Synthetic oligonucleotide
  Target: LAMA2; (+) strand; PAM type: YTN; PAM sequence: CTC
ctattatataatgcttattc

SEQ ID NO: 379198 - DNA, 20 bp, Artificial Sequence
  Description of Artificial Sequence: Synthetic oligonucleotide
  Target: LAMA2; (+) strand; PAM type: YTN; PAM sequence: CTA
ttatataatgcttattctat

SEQ ID NO: 379199 - DNA, 20 bp, Artificial Sequence
  Description of Artificial Sequence: Synthetic oligonucleotide
  Target: LAMA2; (+) strand; PAM type: YTN; PAM sequence: TTA
tataatgcttattctatcat

SEQ ID NO: 379200 - DNA, 20 bp, Artificial Sequence
  Description of Artificial Sequence: Synthetic oligonucleotide
  Target: LAMA2; (+) strand; PAM type: YTN; PAM sequence: CTT
attctatcatgttatgctaa

SEQ ID NO: 379201 - DNA, 20 bp, Artificial Sequence
  Description of Artificial Sequence: Synthetic oligonucleotide
  Target: LAMA2; (+) strand; PAM type: YTN; PAM sequence: TTA
ttctatcatgttatgctaac

SEQ ID NO: 379202 - DNA, 20 bp, Artificial Sequence
  Description of Artificial Sequence: Synthetic oligonucleotide
  Target: LAMA2; (+) strand; PAM type: YTN; PAM sequence: TTC
tatcatgttatgctaacata

SEQ ID NO: 379203 - DNA, 20 bp, Artificial Sequence
  Description of Artificial Sequence: Synthetic oligonucleotide
  Target: LAMA2; (+) strand; PAM type: YTN; PAM sequence: CTA
tcatgttatgctaacatatt

SEQ ID NO: 379204 - DNA, 20 bp, Artificial Sequence
  Description of Artificial Sequence: Synthetic oligonucleotide
  Target: LAMA2; (+) strand; PAM type: YTN; PAM sequence: TTA
tgctaacatatttacttgtc

SEQ ID NO: 379205 - DNA, 20 bp, Artificial Sequence
  Description of Artificial Sequence: Synthetic oligonucleotide
  Target: LAMA2; (+) strand; PAM type: YTN; PAM sequence: CTA
acatatttacttgtctccct

SEQ ID NO: 379206 - DNA, 20 bp, Artificial Sequence
  Description of Artificial Sequence: Synthetic oligonucleotide
  Target: LAMA2; (+) strand; PAM type: YTN; PAM sequence: TTT
acttgtctccctctactaga

SEQ ID NO: 379207 - DNA, 20 bp, Artificial Sequence
  Description of Artificial Sequence: Synthetic oligonucleotide
  Target: LAMA2; (+) strand; PAM type: YTN; PAM sequence: TTA
cttgtctccctctactagac

SEQ ID NO: 379208 - DNA, 20 bp, Artificial Sequence
  Description of Artificial Sequence: Synthetic oligonucleotide
  Target: LAMA2; (+) strand; PAM type: YTN; PAM sequence: CTT
gtctccctctactagaccgt

SEQ ID NO: 379209 - DNA, 20 bp, Artificial Sequence
  Description of Artificial Sequence: Synthetic oligonucleotide
  Target: LAMA2; (+) strand; PAM type: YTN; PAM sequence: TTG
tctccctctactagaccgta

SEQ ID NO: 379210 - DNA, 20 bp, Artificial Sequence
  Description of Artificial Sequence: Synthetic oligonucleotide
  Target: LAMA2; (+) strand; PAM type: YTN; PAM sequence: CTC
cctctactagaccgtaaggt

SEQ ID NO: 379211 - DNA, 20 bp, Artificial Sequence
  Description of Artificial Sequence: Synthetic oligonucleotide
  Target: LAMA2; (+) strand; PAM type: YTN; PAM sequence: CTC
tactagaccgtaaggtatgt

SEQ ID NO: 379212 - DNA, 20 bp, Artificial Sequence
  Description of Artificial Sequence: Synthetic oligonucleotide
  Target: LAMA2; (+) strand; PAM type: YTN; PAM sequence: CTA
ctagaccgtaaggtatgtct

SEQ ID NO: 379213 - DNA, 20 bp, Artificial Sequence
  Description of Artificial Sequence: Synthetic oligonucleotide
  Target: LAMA2; (+) strand; PAM type: YTN; PAM sequence: CTA
gaccgtaaggtatgtctcca

SEQ ID NO: 379214 - DNA, 20 bp, Artificial Sequence
  Description of Artificial Sequence: Synthetic oligonucleotide
  Target: LAMA2; (+) strand; PAM type: YTN; PAM sequence: CTC
caaataaatgtttaaatgct

SEQ ID NO: 379215 - DNA, 20 bp, Artificial Sequence
  Description of Artificial Sequence: Synthetic oligonucleotide
  Target: LAMA2; (+) strand; PAM type: YTN; PAM sequence: TTT
aaatgctacaattatgagat

SEQ ID NO: 379216 - DNA, 20 bp, Artificial Sequence
  Description of Artificial Sequence: Synthetic oligonucleotide
  Target: LAMA2; (+) strand; PAM type: YTN; PAM sequence: TTA
aatgctacaattatgagata

SEQ ID NO: 379217 - DNA, 20 bp, Artificial Sequence
  Description of Artificial Sequence: Synthetic oligonucleotide
  Target: LAMA2; (+) strand; PAM type: YTN; PAM sequence: CTA
caattatgagataataaggt

SEQ ID NO: 379218 - DNA, 20 bp, Artificial Sequence
  Description of Artificial Sequence: Synthetic oligonucleotide
  Target: LAMA2; (+) strand; PAM type: YTN; PAM sequence: TTA
tgagataataaggtaaaata

SEQ ID NO: 379219 - DNA, 20 bp, Artificial Sequence
  Description of Artificial Sequence: Synthetic oligonucleotide
  Target: LAMA2; (+) strand; PAM type: YTN; PAM sequence: CTT
tgtctaaaatttaatctttg

SEQ ID NO: 379220 - DNA, 20 bp, Artificial Sequence
  Description of Artificial Sequence: Synthetic oligonucleotide
  Target: LAMA2; (+) strand; PAM type: YTN; PAM sequence: TTT
gtctaaaatttaatctttga

SEQ ID NO: 379221 - DNA, 20 bp, Artificial Sequence
  Description of Artificial Sequence: Synthetic oligonucleotide
  Target: LAMA2; (+) strand; PAM type: YTN; PAM sequence: TTG
tctaaaatttaatctttgag

SEQ ID NO: 379222 - DNA, 20 bp, Artificial Sequence
  Description of Artificial Sequence: Synthetic oligonucleotide
  Target: LAMA2; (+) strand; PAM type: YTN; PAM sequence: CTA
aaatttaatctttgagacaa

SEQ ID NO: 379223 - DNA, 20 bp, Artificial Sequence
  Description of Artificial Sequence: Synthetic oligonucleotide
  Target: LAMA2; (+) strand; PAM type: YTN; PAM sequence: TTT
aatctttgagacaaagcagt

SEQ ID NO: 379224 - DNA, 20 bp, Artificial Sequence
  Description of Artificial Sequence: Synthetic oligonucleotide
  Target: LAMA2; (+) strand; PAM type: YTN; PAM sequence: TTA
atctttgagacaaagcagtt

SEQ ID NO: 379225 - DNA, 20 bp, Artificial Sequence
  Description of Artificial Sequence: Synthetic oligonucleotide
  Target: LAMA2; (+) strand; PAM type: YTN; PAM sequence: CTT
tgagacaaagcagttggaaa

SEQ ID NO: 379226 - DNA, 20 bp, Artificial Sequence
  Description of Artificial Sequence: Synthetic oligonucleotide
  Target: LAMA2; (+) strand; PAM type: YTN; PAM sequence: TTT
gagacaaagcagttggaaaa

SEQ ID NO: 379227 - DNA, 20 bp, Artificial Sequence
  Description of Artificial Sequence: Synthetic oligonucleotide
  Target: LAMA2; (+) strand; PAM type: YTN; PAM sequence: TTG
agacaaagcagttggaaaaa

SEQ ID NO: 379228 - DNA, 20 bp, Artificial Sequence
  Description of Artificial Sequence: Synthetic oligonucleotide
  Target: LAMA2; (+) strand; PAM type: YTN; PAM sequence: TTG
gaaaaaacccatacccagcc

SEQ ID NO: 379229 - DNA, 20 bp, Artificial Sequence
  Description of Artificial Sequence: Synthetic oligonucleotide
  Target: LAMA2; (+) strand; PAM type: YTN; PAM sequence: CTC
tctacctcagaaagagagaa

SEQ ID NO: 379230 - DNA, 20 bp, Artificial Sequence
  Description of Artificial Sequence: Synthetic oligonucleotide
  Target: LAMA2; (+) strand; PAM type: YTN; PAM sequence: CTC
tacctcagaaagagagaaga

SEQ ID NO: 379231 - DNA, 20 bp, Artificial Sequence
  Description of Artificial Sequence: Synthetic oligonucleotide
  Target: LAMA2; (+) strand; PAM type: YTN; PAM sequence: CTA
cctcagaaagagagaagaca

SEQ ID NO: 379232 - DNA, 20 bp, Artificial Sequence
  Description of Artificial Sequence: Synthetic oligonucleotide
  Target: LAMA2; (+) strand; PAM type: YTN; PAM sequence: CTC
agaaagagagaagacacatt

SEQ ID NO: 379233 - DNA, 20 bp, Artificial Sequence
  Description of Artificial Sequence: Synthetic oligonucleotide
  Target: LAMA2; (+) strand; PAM type: YTN; PAM sequence: TTT
tctttctaattcacatagca

SEQ ID NO: 379234 - DNA, 20 bp, Artificial Sequence
  Description of Artificial Sequence: Synthetic oligonucleotide
  Target: LAMA2; (+) strand; PAM type: YTN; PAM sequence: TTT
ctttctaattcacatagcat

SEQ ID NO: 379235 - DNA, 20 bp, Artificial Sequence
  Description of Artificial Sequence: Synthetic oligonucleotide
  Target: LAMA2; (+) strand; PAM type: YTN; PAM sequence: TTC
tttctaattcacatagcatt

SEQ ID NO: 379236 - DNA, 20 bp, Artificial Sequence
  Description of Artificial Sequence: Synthetic oligonucleotide
  Target: LAMA2; (+) strand; PAM type: YTN; PAM sequence: CTT
tctaattcacatagcattat

SEQ ID NO: 379237 - DNA, 20 bp, Artificial Sequence
  Description of Artificial Sequence: Synthetic oligonucleotide
  Target: LAMA2; (+) strand; PAM type: YTN; PAM sequence: TTT
ctaattcacatagcattatg

SEQ ID NO: 379238 - DNA, 20 bp, Artificial Sequence
  Description of Artificial Sequence: Synthetic oligonucleotide
  Target: LAMA2; (+) strand; PAM type: YTN; PAM sequence: TTC
taattcacatagcattatgg

SEQ ID NO: 379239 - DNA, 20 bp, Artificial Sequence
  Description of Artificial Sequence: Synthetic oligonucleotide
  Target: LAMA2; (+) strand; PAM type: YTN; PAM sequence: CTA
attcacatagcattatggtt

SEQ ID NO: 379240 - DNA, 20 bp, Artificial Sequence
  Description of Artificial Sequence: Synthetic oligonucleotide
  Target: LAMA2; (+) strand; PAM type: YTN; PAM sequence: TTC
acatagcattatggtttctg

SEQ ID NO: 379241 - DNA, 20 bp, Artificial Sequence
  Description of Artificial Sequence: Synthetic oligonucleotide
  Target: LAMA2; (+) strand; PAM type: YTN; PAM sequence: TTA
tggtttctggacgatcatat

SEQ ID NO: 379242 - DNA, 20 bp, Artificial Sequence
  Description of Artificial Sequence: Synthetic oligonucleotide
  Target: LAMA2; (+) strand; PAM type: YTN; PAM sequence: TTT
ctggacgatcatatatttcc

SEQ ID NO: 379243 - DNA, 20 bp, Artificial Sequence
  Description of Artificial Sequence: Synthetic oligonucleotide
  Target: LAMA2; (+) strand; PAM type: YTN; PAM sequence: TTC
tggacgatcatatatttcca

SEQ ID NO: 379244 - DNA, 20 bp, Artificial Sequence
  Description of Artificial Sequence: Synthetic oligonucleotide
  Target: LAMA2; (+) strand; PAM type: YTN; PAM sequence: CTG
gacgatcatatatttccata

SEQ ID NO: 379245 - DNA, 20 bp, Artificial Sequence
  Description of Artificial Sequence: Synthetic oligonucleotide
  Target: LAMA2; (+) strand; PAM type: YTN; PAM sequence: TTT
ccataaatgcaggaagcaat

SEQ ID NO: 379246 - DNA, 20 bp, Artificial Sequence
  Description of Artificial Sequence: Synthetic oligonucleotide
  Target: LAMA2; (+) strand; PAM type: YTN; PAM sequence: TTC
cataaatgcaggaagcaatt

SEQ ID NO: 379247 - DNA, 20 bp, Artificial Sequence
  Description of Artificial Sequence: Synthetic oligonucleotide
  Target: LAMA2; (+) strand; PAM type: YTN; PAM sequence: TTT
taatgtttatgttcactgat

SEQ ID NO: 379248 - DNA, 20 bp, Artificial Sequence
  Description of Artificial Sequence: Synthetic oligonucleotide
  Target: LAMA2; (+) strand; PAM type: YTN; PAM sequence: TTT
aatgtttatgttcactgatg

SEQ ID NO: 379249 - DNA, 20 bp, Artificial Sequence
  Description of Artificial Sequence: Synthetic oligonucleotide
  Target: LAMA2; (+) strand; PAM type: YTN; PAM sequence: TTA
atgtttatgttcactgatgt

SEQ ID NO: 379250 - DNA, 20 bp, Artificial Sequence
  Description of Artificial Sequence: Synthetic oligonucleotide
  Target: LAMA2; (+) strand; PAM type: YTN; PAM sequence: TTT
atgttcactgatgtttccca

SEQ ID NO: 379251 - DNA, 20 bp, Artificial Sequence
  Description of Artificial Sequence: Synthetic oligonucleotide
  Target: LAMA2; (+) strand; PAM type: YTN; PAM sequence: TTA
tgttcactgatgtttcccaa

SEQ ID NO: 379252 - DNA, 20 bp, Artificial Sequence
  Description of Artificial Sequence: Synthetic oligonucleotide
  Target: LAMA2; (+) strand; PAM type: YTN; PAM sequence: TTC
actgatgtttcccaagtgac

SEQ ID NO: 379253 - DNA, 20 bp, Artificial Sequence
  Description of Artificial Sequence: Synthetic oligonucleotide
  Target: LAMA2; (+) strand; PAM type: YTN; PAM sequence: CTG
atgtttcccaagtgactaaa

SEQ ID NO: 379254 - DNA, 20 bp, Artificial Sequence
  Description of Artificial Sequence: Synthetic oligonucleotide
  Target: LAMA2; (+) strand; PAM type: YTN; PAM sequence: TTT
cccaagtgactaaactagaa

SEQ ID NO: 379255 - DNA, 20 bp, Artificial Sequence
  Description of Artificial Sequence: Synthetic oligonucleotide
  Target: LAMA2; (+) strand; PAM type: YTN; PAM sequence: TTC
ccaagtgactaaactagaat

SEQ ID NO: 379256 - DNA, 20 bp, Artificial Sequence
  Description of Artificial Sequence: Synthetic oligonucleotide
  Target: LAMA2; (+) strand; PAM type: YTN; PAM sequence: CTA
aactagaatagtacaaagcc

SEQ ID NO: 379257 - DNA, 20 bp, Artificial Sequence
  Description of Artificial Sequence: Synthetic oligonucleotide
  Target: LAMA2; (+) strand; PAM type: YTN; PAM sequence: CTA
gaatagtacaaagcctataa

SEQ ID NO: 379258 - DNA, 20 bp, Artificial Sequence
  Description of Artificial Sequence: Synthetic oligonucleotide
  Target: LAMA2; (+) strand; PAM type: YTN; PAM sequence: CTA
taacagatacatgattaata

SEQ ID NO: 379259 - DNA, 20 bp, Artificial Sequence
  Description of Artificial Sequence: Synthetic oligonucleotide
  Target: LAMA2; (+) strand; PAM type: YTN; PAM sequence: TTA
atatgtgtttaatggaagca

SEQ ID NO: 379260 - DNA, 20 bp, Artificial Sequence
  Description of Artificial Sequence: Synthetic oligonucleotide
  Target: LAMA2; (+) strand; PAM type: YTN; PAM sequence: TTT
aatggaagcatagaaacatt

SEQ ID NO: 379261 - DNA, 20 bp, Artificial Sequence
  Description of Artificial Sequence: Synthetic oligonucleotide
  Target: LAMA2; (+) strand; PAM type: YTN; PAM sequence: TTA
atggaagcatagaaacatta

SEQ ID NO: 379262 - DNA, 20 bp, Artificial Sequence
  Description of Artificial Sequence: Synthetic oligonucleotide
  Target: LAMA2; (+) strand; PAM type: YTN; PAM sequence: TTA
gaattaaaattttaagatat

SEQ ID NO: 379263 - DNA, 20 bp, Artificial Sequence
  Description of Artificial Sequence: Synthetic oligonucleotide
  Target: LAMA2; (+) strand; PAM type: YTN; PAM sequence: TTA
aaattttaagatatttccca

SEQ ID NO: 379264 - DNA, 20 bp, Artificial Sequence
  Description of Artificial Sequence: Synthetic oligonucleotide
  Target: LAMA2; (+) strand; PAM type: YTN; PAM sequence: TTT
taagatatttcccataaagt

SEQ ID NO: 379265 - DNA, 20 bp, Artificial Sequence
  Description of Artificial Sequence: Synthetic oligonucleotide
  Target: LAMA2; (+) strand; PAM type: YTN; PAM sequence: TTT
aagatatttcccataaagtt

SEQ ID NO: 379266 - DNA, 20 bp, Artificial Sequence
  Description of Artificial Sequence: Synthetic oligonucleotide
  Target: LAMA2; (+) strand; PAM type: YTN; PAM sequence: TTA
agatatttcccataaagttg

SEQ ID NO: 379267 - DNA, 20 bp, Artificial Sequence
  Description of Artificial Sequence: Synthetic oligonucleotide
  Target: LAMA2; (+) strand; PAM type: YTN; PAM sequence: TTT
cccataaagttgtgttaatg

SEQ ID NO: 379268 - DNA, 20 bp, Artificial Sequence
  Description of Artificial Sequence: Synthetic oligonucleotide
  Target: LAMA2; (+) strand; PAM type: YTN; PAM sequence: TTC
ccataaagttgtgttaatgg

SEQ ID NO: 379269 - DNA, 20 bp, Artificial Sequence
  Description of Artificial Sequence: Synthetic oligonucleotide
  Target: LAMA2; (+) strand; PAM type: YTN; PAM sequence: TTG
tgttaatggttgctgttttt

SEQ ID NO: 379270 - DNA, 20 bp, Artificial Sequence
  Description of Artificial Sequence: Synthetic oligonucleotide
  Target: LAMA2; (+) strand; PAM type: YTN; PAM sequence: TTA
atggttgctgtttttatctc

SEQ ID NO: 379271 - DNA, 20 bp, Artificial Sequence
  Description of Artificial Sequence: Synthetic oligonucleotide
  Target: LAMA2; (+) strand; PAM type: YTN; PAM sequence: TTG
ctgtttttatctcctctata

SEQ ID NO: 379272 - DNA, 20 bp, Artificial Sequence
  Description of Artificial Sequence: Synthetic oligonucleotide
  Target: LAMA2; (+) strand; PAM type: YTN; PAM sequence: CTG
tttttatctcctctataggc

SEQ ID NO: 379273 - DNA, 20 bp, Artificial Sequence
  Description of Artificial Sequence: Synthetic oligonucleotide
  Target: LAMA2; (+) strand; PAM type: YTN; PAM sequence: TTT
ttatctcctctataggcttg

SEQ ID NO: 379274 - DNA, 20 bp, Artificial Sequence
  Description of Artificial Sequence: Synthetic oligonucleotide
  Target: LAMA2; (+) strand; PAM type: YTN; PAM sequence: TTT
tatctcctctataggcttgt

SEQ ID NO: 379275 - DNA, 20 bp, Artificial Sequence
  Description of Artificial Sequence: Synthetic oligonucleotide
  Target: LAMA2; (+) strand; PAM type: YTN; PAM sequence: TTT
atctcctctataggcttgta

SEQ ID NO: 379276 - DNA, 20 bp, Artificial Sequence
  Description of Artificial Sequence: Synthetic oligonucleotide
  Target: LAMA2; (+) strand; PAM type: YTN; PAM sequence: TTA
tctcctctataggcttgtaa

SEQ ID NO: 379277 - DNA, 20 bp, Artificial Sequence
  Description of Artificial Sequence: Synthetic oligonucleotide
  Target: LAMA2; (+) strand; PAM type: YTN; PAM sequence: CTC
ctctataggcttgtaactgc

SEQ ID NO: 379278 - DNA, 20 bp, Artificial Sequence
  Description of Artificial Sequence: Synthetic oligonucleotide
  Target: LAMA2; (+) strand; PAM type: YTN; PAM sequence: CTC
tataggcttgtaactgcagc

SEQ ID NO: 379279 - DNA, 20 bp, Artificial Sequence
  Description of Artificial Sequence: Synthetic oligonucleotide
  Target: LAMA2; (+) strand; PAM type: YTN; PAM sequence: CTA
taggcttgtaactgcagcac

SEQ ID NO: 379280 - DNA, 20 bp, Artificial Sequence
  Description of Artificial Sequence: Synthetic oligonucleotide
  Target: LAMA2; (+) strand; PAM type: YTN; PAM sequence: CTT
gtaactgcagcacagtggga

SEQ ID NO: 379281 - DNA, 20 bp, Artificial Sequence
  Description of Artificial Sequence: Synthetic oligonucleotide
  Target: LAMA2; (+) strand; PAM type: YTN; PAM sequence: TTG
taactgcagcacagtgggat

SEQ ID NO: 379282 - DNA, 20 bp, Artificial Sequence
  Description of Artificial Sequence: Synthetic oligonucleotide
  Target: LAMA2; (+) strand; PAM type: YTN; PAM sequence: CTG
cagcacagtgggatccttgg

SEQ ID NO: 379283 - DNA, 20 bp, Artificial Sequence
  Description of Artificial Sequence: Synthetic oligonucleotide
  Target: LAMA2; (+) strand; PAM type: YTN; PAM sequence: CTT
ggatttccaatgcaatgtaa

SEQ ID NO: 379284 - DNA, 20 bp, Artificial Sequence
  Description of Artificial Sequence: Synthetic oligonucleotide
  Target: LAMA2; (+) strand; PAM type: YTN; PAM sequence: TTG
gatttccaatgcaatgtaaa

SEQ ID NO: 379285 - DNA, 20 bp, Artificial Sequence
  Description of Artificial Sequence: Synthetic oligonucleotide
  Target: LAMA2; (+) strand; PAM type: YTN; PAM sequence: TTT
ccaatgcaatgtaaatacag

SEQ ID NO: 379286 - DNA, 20 bp, Artificial Sequence
  Description of Artificial Sequence: Synthetic oligonucleotide
  Target: LAMA2; (+) strand; PAM type: YTN; PAM sequence: TTC
caatgcaatgtaaatacagg

SEQ ID NO: 379287 - DNA, 20 bp, Artificial Sequence
  Description of Artificial Sequence: Synthetic oligonucleotide
  Target: LAMA2; (+) strand; PAM type: YTN; PAM sequence: CTG
tcatccaaaattctctggtg

SEQ ID NO: 379288 - DNA, 20 bp, Artificial Sequence
  Description of Artificial Sequence: Synthetic oligonucleotide
  Target: LAMA2; (+) strand; PAM type: YTN; PAM sequence: TTC
tctggtgcaaaatgtacaga

SEQ ID NO: 379289 - DNA, 20 bp, Artificial Sequence
  Description of Artificial Sequence: Synthetic oligonucleotide
  Target: LAMA2; (+) strand; PAM type: YTN; PAM sequence: CTC
tggtgcaaaatgtacagagt

SEQ ID NO: 379290 - DNA, 20 bp, Artificial Sequence
  Description of Artificial Sequence: Synthetic oligonucleotide
  Target: LAMA2; (+) strand; PAM type: YTN; PAM sequence: CTG
gtgcaaaatgtacagagtgc

SEQ ID NO: 379291 - DNA, 20 bp, Artificial Sequence
  Description of Artificial Sequence: Synthetic oligonucleotide
  Target: LAMA2; (+) strand; PAM type: YTN; PAM sequence: CTG
gaactaccctcgctgcaatc

SEQ ID NO: 379292 - DNA, 20 bp, Artificial Sequence
  Description of Artificial Sequence: Synthetic oligonucleotide
  Target: LAMA2; (+) strand; PAM type: YTN; PAM sequence: CTA
ccctcgctgcaatctctgtg

SEQ ID NO: 379293 - DNA, 20 bp, Artificial Sequence
  Description of Artificial Sequence: Synthetic oligonucleotide
  Target: LAMA2; (+) strand; PAM type: YTN; PAM sequence: CTC
gctgcaatctctgtgactgc

SEQ ID NO: 379294 - DNA, 20 bp, Artificial Sequence
  Description of Artificial Sequence: Synthetic oligonucleotide
  Target: LAMA2; (+) strand; PAM type: YTN; PAM sequence: CTG
caatctctgtgactgcttcc

SEQ ID NO: 379295 - DNA, 20 bp, Artificial Sequence
  Description of Artificial Sequence: Synthetic oligonucleotide
  Target: LAMA2; (+) strand; PAM type: YTN; PAM sequence: CTC
tgtgactgcttcctccctgg

SEQ ID NO: 379296 - DNA, 20 bp, Artificial Sequence
  Description of Artificial Sequence: Synthetic oligonucleotide
  Target: LAMA2; (+) strand; PAM type: YTN; PAM sequence: CTG
tgactgcttcctccctggga

SEQ ID NO: 379297 - DNA, 20 bp, Artificial Sequence
  Description of Artificial Sequence: Synthetic oligonucleotide
  Target: LAMA2; (+) strand; PAM type: YTN; PAM sequence: CTG
cttcctccctgggacagatg

SEQ ID NO: 379298 - DNA, 20 bp, Artificial Sequence
  Description of Artificial Sequence: Synthetic oligonucleotide
  Target: LAMA2; (+) strand; PAM type: YTN; PAM sequence: CTT
cctccctgggacagatgcca

SEQ ID NO: 379299 - DNA, 20 bp, Artificial Sequence
  Description of Artificial Sequence: Synthetic oligonucleotide
  Target: LAMA2; (+) strand; PAM type: YTN; PAM sequence: TTC
ctccctgggacagatgccac

SEQ ID NO: 379300 - DNA, 20 bp, Artificial Sequence
  Description of Artificial Sequence: Synthetic oligonucleotide
  Target: LAMA2; (+) strand; PAM type: YTN; PAM sequence: CTC
cctgggacagatgccacaac

SEQ ID NO: 379301 - DNA, 20 bp, Artificial Sequence
  Description of Artificial Sequence: Synthetic oligonucleotide
  Target: LAMA2; (+) strand; PAM type: YTN; PAM sequence: CTG
ggacagatgccacaacctgt

SEQ ID NO: 379302 - DNA, 20 bp, Artificial Sequence
  Description of Artificial Sequence: Synthetic oligonucleotide
  Target: LAMA2; (+) strand; PAM type: YTN; PAM sequence: CTG
tgattcagagactaaaaaat

SEQ ID NO: 379303 - DNA, 20 bp, Artificial Sequence
  Description of Artificial Sequence: Synthetic oligonucleotide
  Target: LAMA2; (+) strand; PAM type: YTN; PAM sequence: TTC
agagactaaaaaatgctcct

SEQ ID NO: 379304 - DNA, 20 bp, Artificial Sequence
  Description of Artificial Sequence: Synthetic oligonucleotide
  Target: LAMA2; (+) strand; PAM type: YTN; PAM sequence: CTA
aaaaatgctcctgtagtgat

SEQ ID NO: 379305 - DNA, 20 bp, Artificial Sequence
  Description of Artificial Sequence: Synthetic oligonucleotide
  Target: LAMA2; (+) strand; PAM type: YTN; PAM sequence: CTC
ctgtagtgatcaaactgggc

SEQ ID NO: 379306 - DNA, 20 bp, Artificial Sequence
  Description of Artificial Sequence: Synthetic oligonucleotide
  Target: LAMA2; (+) strand; PAM type: YTN; PAM sequence: CTG
tagtgatcaaactgggcagt

SEQ ID NO: 379307 - DNA, 20 bp, Artificial Sequence
  Description of Artificial Sequence: Synthetic oligonucleotide
  Target: LAMA2; (+) strand; PAM type: YTN; PAM sequence: CTG
ggcagtgcacttgtaaggta

SEQ ID NO: 379308 - DNA, 20 bp, Artificial Sequence
  Description of Artificial Sequence: Synthetic oligonucleotide
  Target: LAMA2; (+) strand; PAM type: YTN; PAM sequence: CTT
gtaaggtatgtgctgctgac

SEQ ID NO: 379309 - DNA, 20 bp, Artificial Sequence
  Description of Artificial Sequence: Synthetic oligonucleotide
  Target: LAMA2; (+) strand; PAM type: YTN; PAM sequence: TTG
taaggtatgtgctgctgaca

SEQ ID NO: 379310 - DNA, 20 bp, Artificial Sequence
  Description of Artificial Sequence: Synthetic oligonucleotide
  Target: LAMA2; (+) strand; PAM type: YTN; PAM sequence: CTG
ctgacatgcagctagggaaa

SEQ ID NO: 379311 - DNA, 20 bp, Artificial Sequence
  Description of Artificial Sequence: Synthetic oligonucleotide
  Target: LAMA2; (+) strand; PAM type: YTN; PAM sequence: CTG
acatgcagctagggaaaacc

SEQ ID NO: 379312 - DNA, 20 bp, Artificial Sequence
  Description of Artificial Sequence: Synthetic oligonucleotide
  Target: LAMA2; (+) strand; PAM type: YTN; PAM sequence: CTA
gggaaaacctccctcaattc

SEQ ID NO: 379313 - DNA, 20 bp, Artificial Sequence
  Description of Artificial Sequence: Synthetic oligonucleotide
  Target: LAMA2; (+) strand; PAM type: YTN; PAM sequence: CTC
cctcaattctgtttccattg

SEQ ID NO: 379314 - DNA, 20 bp, Artificial Sequence
  Description of Artificial Sequence: Synthetic oligonucleotide
  Target: LAMA2; (+) strand; PAM type: YTN; PAM sequence: CTC
aattctgtttccattgctca

SEQ ID NO: 379315 - DNA, 20 bp, Artificial Sequence
  Description of Artificial Sequence: Synthetic oligonucleotide
  Target: LAMA2; (+) strand; PAM type: YTN; PAM sequence: TTC
tgtttccattgctcagtttt

SEQ ID NO: 379316 - DNA, 20 bp, Artificial Sequence
  Description of Artificial Sequence: Synthetic oligonucleotide
  Target: LAMA2; (+) strand; PAM type: YTN; PAM sequence: CTG
tttccattgctcagttttaa

SEQ ID NO: 379317 - DNA, 20 bp, Artificial Sequence
  Description of Artificial Sequence: Synthetic oligonucleotide
  Target: LAMA2; (+) strand; PAM type: YTN; PAM sequence: TTT
ccattgctcagttttaactt

SEQ ID NO: 379318 - DNA, 20 bp, Artificial Sequence
  Description of Artificial Sequence: Synthetic oligonucleotide
  Target: LAMA2; (+) strand; PAM type: YTN; PAM sequence: TTC
cattgctcagttttaacttc

SEQ ID NO: 379319 - DNA, 20 bp, Artificial Sequence
  Description of Artificial Sequence: Synthetic oligonucleotide
  Target: LAMA2; (+) strand; PAM type: YTN; PAM sequence: TTG
ctcagttttaacttcattca

SEQ ID NO: 379320 - DNA, 20 bp, Artificial Sequence
  Description of Artificial Sequence: Synthetic oligonucleotide
  Target: LAMA2; (+) strand; PAM type: YTN; PAM sequence: CTC
agttttaacttcattcagtg

SEQ ID NO: 379321 - DNA, 20 bp, Artificial Sequence
  Description of Artificial Sequence: Synthetic oligonucleotide
  Target: LAMA2; (+) strand; PAM type: YTN; PAM sequence: TTT
taacttcattcagtgtttgt

SEQ ID NO: 379322 - DNA, 20 bp, Artificial Sequence
  Description of Artificial Sequence: Synthetic oligonucleotide
  Target: LAMA2; (+) strand; PAM type: YTN; PAM sequence: TTT
aacttcattcagtgtttgtt

SEQ ID NO: 379323 - DNA, 20 bp, Artificial Sequence
  Description of Artificial Sequence: Synthetic oligonucleotide
  Target: LAMA2; (+) strand; PAM type: YTN; PAM sequence: TTA
acttcattcagtgtttgtta

SEQ ID NO: 379324 - DNA, 20 bp, Artificial Sequence
  Description of Artificial Sequence: Synthetic oligonucleotide
  Target: LAMA2; (+) strand; PAM type: YTN; PAM sequence: CTT
cattcagtgtttgttatacc

SEQ ID NO: 379325 - DNA, 20 bp, Artificial Sequence
  Description of Artificial Sequence: Synthetic oligonucleotide
  Target: LAMA2; (+) strand; PAM type: YTN; PAM sequence: TTC
attcagtgtttgttatacct

SEQ ID NO: 379326 - DNA, 20 bp, Artificial Sequence
  Description of Artificial Sequence: Synthetic oligonucleotide
  Target: LAMA2; (+) strand; PAM type: YTN; PAM sequence: TTC
agtgtttgttatacctgctt

SEQ ID NO: 379327 - DNA, 20 bp, Artificial Sequence
  Description of Artificial Sequence: Synthetic oligonucleotide
  Target: LAMA2; (+) strand; PAM type: YTN; PAM sequence: TTT
gttatacctgcttcattaag

SEQ ID NO: 379328 - DNA, 20 bp, Artificial Sequence
  Description of Artificial Sequence: Synthetic oligonucleotide
  Target: LAMA2; (+) strand; PAM type: YTN; PAM sequence: TTG
ttatacctgcttcattaagc

SEQ ID NO: 379329 - DNA, 20 bp, Artificial Sequence
  Description of Artificial Sequence: Synthetic oligonucleotide
  Target: LAMA2; (+) strand; PAM type: YTN; PAM sequence: TTA
tacctgcttcattaagctaa

SEQ ID NO: 379330 - DNA, 20 bp, Artificial Sequence
  Description of Artificial Sequence: Synthetic oligonucleotide
  Target: LAMA2; (+) strand; PAM type: YTN; PAM sequence: CTG
cttcattaagctaaacaaac

SEQ ID NO: 379331 - DNA, 20 bp, Artificial Sequence
  Description of Artificial Sequence: Synthetic oligonucleotide
  Target: LAMA2; (+) strand; PAM type: YTN; PAM sequence: CTT
cattaagctaaacaaacaga

SEQ ID NO: 379332 - DNA, 20 bp, Artificial Sequence
  Description of Artificial Sequence: Synthetic oligonucleotide
  Target: LAMA2; (+) strand; PAM type: YTN; PAM sequence: TTC
attaagctaaacaaacagat

SEQ ID NO: 379333 - DNA, 20 bp, Artificial Sequence
  Description of Artificial Sequence: Synthetic oligonucleotide
  Target: LAMA2; (+) strand; PAM type: YTN; PAM sequence: TTA
agctaaacaaacagatggac

SEQ ID NO: 379334 - DNA, 20 bp, Artificial Sequence
  Description of Artificial Sequence: Synthetic oligonucleotide
  Target: LAMA2; (+) strand; PAM type: YTN; PAM sequence: CTA
aacaaacagatggacaaaat

SEQ ID NO: 379335 - DNA, 20 bp, Artificial Sequence
  Description of Artificial Sequence: Synthetic oligonucleotide
  Target: LAMA2; (+) strand; PAM type: YTN; PAM sequence: CTC
attgccagacatggagtttt

SEQ ID NO: 379336 - DNA, 20 bp, Artificial Sequence
  Description of Artificial Sequence: Synthetic oligonucleotide
  Target: LAMA2; (+) strand; PAM type: YTN; PAM sequence: TTG
ccagacatggagttttcatt

SEQ ID NO: 379337 - DNA, 20 bp, Artificial Sequence
  Description of Artificial Sequence: Synthetic oligonucleotide
  Target: LAMA2; (+) strand; PAM type: YTN; PAM sequence: TTT
tcattgatatgcatttgttg

SEQ ID NO: 379338 - DNA, 20 bp, Artificial Sequence
  Description of Artificial Sequence: Synthetic oligonucleotide
  Target: LAMA2; (+) strand; PAM type: YTN; PAM sequence: TTT
cattgatatgcatttgttgg

SEQ ID NO: 379339 - DNA, 20 bp, Artificial Sequence
  Description of Artificial Sequence: Synthetic oligonucleotide
  Target: LAMA2; (+) strand; PAM type: YTN; PAM sequence: TTC
attgatatgcatttgttggc

SEQ ID NO: 379340 - DNA, 20 bp, Artificial Sequence
  Description of Artificial Sequence: Synthetic oligonucleotide
  Target: LAMA2; (+) strand; PAM type: YTN; PAM sequence: TTG
atatgcatttgttggcatac

SEQ ID NO: 379341 - DNA, 20 bp, Artificial Sequence
  Description of Artificial Sequence: Synthetic oligonucleotide
  Target: LAMA2; (+) strand; PAM type: YTN; PAM sequence: TTT
gttggcataccgataaacac

SEQ ID NO: 379342 - DNA, 20 bp, Artificial Sequence
  Description of Artificial Sequence: Synthetic oligonucleotide
  Target: LAMA2; (+) strand; PAM type: YTN; PAM sequence: TTG
ttggcataccgataaacact

SEQ ID NO: 379343 - DNA, 20 bp, Artificial Sequence
  Description of Artificial Sequence: Synthetic oligonucleotide
  Target: LAMA2; (+) strand; PAM type: YTN; PAM sequence: TTG
gcataccgataaacactgct

SEQ ID NO: 379344 - DNA, 20 bp, Artificial Sequence
  Description of Artificial Sequence: Synthetic oligonucleotide
  Target: LAMA2; (+) strand; PAM type: YTN; PAM sequence: CTG
cttttctagagcttattttc

SEQ ID NO: 379345 - DNA, 20 bp, Artificial Sequence
  Description of Artificial Sequence: Synthetic oligonucleotide
  Target: LAMA2; (+) strand; PAM type: YTN; PAM sequence: CTT
ttctagagcttattttcaac

SEQ ID NO: 379346 - DNA, 20 bp, Artificial Sequence
  Description of Artificial Sequence: Synthetic oligonucleotide
  Target: LAMA2; (+) strand; PAM type: YTN; PAM sequence: TTT
tctagagcttattttcaacc

SEQ ID NO: 379347 - DNA, 20 bp, Artificial Sequence
  Description of Artificial Sequence: Synthetic oligonucleotide
  Target: LAMA2; (+) strand; PAM type: YTN; PAM sequence: TTT
ctagagcttattttcaaccc

SEQ ID NO: 379348 - DNA, 20 bp, Artificial Sequence
  Description of Artificial Sequence: Synthetic oligonucleotide
  Target: LAMA2; (+) strand; PAM type: YTN; PAM sequence: TTC
tagagcttattttcaaccca

SEQ ID NO: 379349 - DNA, 20 bp, Artificial Sequence
  Description of Artificial Sequence: Synthetic oligonucleotide
  Target: LAMA2; (+) strand; PAM type: YTN; PAM sequence: CTA
gagcttattttcaacccaaa

SEQ ID NO: 379350 - DNA, 20 bp, Artificial Sequence
  Description of Artificial Sequence: Synthetic oligonucleotide
  Target: LAMA2; (+) strand; PAM type: YTN; PAM sequence: CTT
attttcaacccaaacccacc

SEQ ID NO: 379351 - DNA, 20 bp, Artificial Sequence
  Description of Artificial Sequence: Synthetic oligonucleotide
  Target: LAMA2; (+) strand; PAM type: YTN; PAM sequence: TTA
ttttcaacccaaacccacct

SEQ ID NO: 379352 - DNA, 20 bp, Artificial Sequence
  Description of Artificial Sequence: Synthetic oligonucleotide
  Target: LAMA2; (+) strand; PAM type: YTN; PAM sequence: TTT
tcaacccaaacccacctttt

SEQ ID NO: 379353 - DNA, 20 bp, Artificial Sequence
  Description of Artificial Sequence: Synthetic oligonucleotide
  Target: LAMA2; (+) strand; PAM type: YTN; PAM sequence: TTT
caacccaaacccaccttttt

SEQ ID NO: 379354 - DNA, 20 bp, Artificial Sequence
  Description of Artificial Sequence: Synthetic oligonucleotide
  Target: LAMA2; (+) strand; PAM type: YTN; PAM sequence: TTC
aacccaaacccacctttttt

SEQ ID NO: 379355 - DNA, 20 bp, Artificial Sequence
  Description of Artificial Sequence: Synthetic oligonucleotide
  Target: LAMA2; (+) strand; PAM type: YTN; PAM sequence: CTT
tttttctagttggtggagat

SEQ ID NO: 379356 - DNA, 20 bp, Artificial Sequence
  Description of Artificial Sequence: Synthetic oligonucleotide
  Target: LAMA2; (+) strand; PAM type: YTN; PAM sequence: TTT
ttttctagttggtggagatg

SEQ ID NO: 379357 - DNA, 20 bp, Artificial Sequence
  Description of Artificial Sequence: Synthetic oligonucleotide
  Target: LAMA2; (+) strand; PAM type: YTN; PAM sequence: TTT
tttctagttggtggagatga

SEQ ID NO: 379358 - DNA, 20 bp, Artificial Sequence
  Description of Artificial Sequence: Synthetic oligonucleotide
  Target: LAMA2; (+) strand; PAM type: YTN; PAM sequence: TTT
ttctagttggtggagatgat

SEQ ID NO: 379359 - DNA, 20 bp, Artificial Sequence
  Description of Artificial Sequence: Synthetic oligonucleotide
  Target: LAMA2; (+) strand; PAM type: YTN; PAM sequence: TTT
tctagttggtggagatgatc

SEQ ID NO: 379360 - DNA, 20 bp, Artificial Sequence
  Description of Artificial Sequence: Synthetic oligonucleotide
  Target: LAMA2; (+) strand; PAM type: YTN; PAM sequence: TTT
ctagttggtggagatgatct

SEQ ID NO: 379361 - DNA, 20 bp, Artificial Sequence
  Description of Artificial Sequence: Synthetic oligonucleotide
  Target: LAMA2; (+) strand; PAM type: YTN; PAM sequence: TTC
tagttggtggagatgatcta

SEQ ID NO: 379362 - DNA, 20 bp, Artificial Sequence
  Description of Artificial Sequence: Synthetic oligonucleotide
  Target: LAMA2; (+) strand; PAM type: YTN; PAM sequence: CTA
gttggtggagatgatctatt

SEQ ID NO: 379363 - DNA, 20 bp, Artificial Sequence
  Description of Artificial Sequence: Synthetic oligonucleotide
  Target: LAMA2; (+) strand; PAM type: YTN; PAM sequence: TTG
gtggagatgatctattttca

SEQ ID NO: 379364 - DNA, 20 bp, Artificial Sequence
  Description of Artificial Sequence: Synthetic oligonucleotide
  Target: LAMA2; (+) strand; PAM type: YTN; PAM sequence: CTA
ttttcaatggtatagtgatt

SEQ ID NO: 379365 - DNA, 20 bp, Artificial Sequence
  Description of Artificial Sequence: Synthetic oligonucleotide
  Target: LAMA2; (+) strand; PAM type: YTN; PAM sequence: TTT
tcaatggtatagtgattttt

SEQ ID NO: 379366 - DNA, 20 bp, Artificial Sequence
  Description of Artificial Sequence: Synthetic oligonucleotide
  Target: LAMA2; (+) strand; PAM type: YTN; PAM sequence: TTT
caatggtatagtgatttttt

SEQ ID NO: 379367 - DNA, 20 bp, Artificial Sequence
  Description of Artificial Sequence: Synthetic oligonucleotide
  Target: LAMA2; (+) strand; PAM type: YTN; PAM sequence: TTC
aatggtatagtgatttttta

SEQ ID NO: 379368 - DNA, 20 bp, Artificial Sequence
  Description of Artificial Sequence: Synthetic oligonucleotide
  Target: LAMA2; (+) strand; PAM type: YTN; PAM sequence: TTT
tttaaaaaatatattagatt

SEQ ID NO: 379369 - DNA, 20 bp, Artificial Sequence
  Description of Artificial Sequence: Synthetic oligonucleotide
  Target: LAMA2; (+) strand; PAM type: YTN; PAM sequence: TTT
ttaaaaaatatattagattt

SEQ ID NO: 379370 - DNA, 20 bp, Artificial Sequence
  Description of Artificial Sequence: Synthetic oligonucleotide
  Target: LAMA2; (+) strand; PAM type: YTN; PAM sequence: TTT
taaaaaatatattagatttg

SEQ ID NO: 379371 - DNA, 20 bp, Artificial Sequence
  Description of Artificial Sequence: Synthetic oligonucleotide
  Target: LAMA2; (+) strand; PAM type: YTN; PAM sequence: TTT
aaaaaatatattagatttgc

SEQ ID NO: 379372 - DNA, 20 bp, Artificial Sequence
  Description of Artificial Sequence: Synthetic oligonucleotide
  Target: LAMA2; (+) strand; PAM type: YTN; PAM sequence: TTA
aaaaatatattagatttgct

SEQ ID NO: 379373 - DNA, 20 bp, Artificial Sequence
  Description of Artificial Sequence: Synthetic oligonucleotide
  Target: LAMA2; (+) strand; PAM type: YTN; PAM sequence: TTA
gatttgcttcgataaggaca

SEQ ID NO: 379374 - DNA, 20 bp, Artificial Sequence
  Description of Artificial Sequence: Synthetic oligonucleotide
  Target: LAMA2; (+) strand; PAM type: YTN; PAM sequence: TTT
gcttcgataaggacaatctg

SEQ ID NO: 379375 - DNA, 20 bp, Artificial Sequence
  Description of Artificial Sequence: Synthetic oligonucleotide
  Target: LAMA2; (+) strand; PAM type: YTN; PAM sequence: TTG
cttcgataaggacaatctgg

SEQ ID NO: 379376 - DNA, 20 bp, Artificial Sequence
  Description of Artificial Sequence: Synthetic oligonucleotide
  Target: LAMA2; (+) strand; PAM type: YTN; PAM sequence: CTT
cgataaggacaatctgggag

SEQ ID NO: 379377 - DNA, 20 bp, Artificial Sequence
  Description of Artificial Sequence: Synthetic oligonucleotide
  Target: LAMA2; (+) strand; PAM type: YTN; PAM sequence: TTC
gataaggacaatctgggagg

SEQ ID NO: 379378 - DNA, 20 bp, Artificial Sequence
  Description of Artificial Sequence: Synthetic oligonucleotide
  Target: LAMA2; (+) strand; PAM type: YTN; PAM sequence: CTG
ggaggggtggcagggaagac

SEQ ID NO: 379379 - DNA, 20 bp, Artificial Sequence
  Description of Artificial Sequence: Synthetic oligonucleotide
  Target: LAMA2; (+) strand; PAM type: YTN; PAM sequence: TTC
ttttaagcatcatcagagaa

SEQ ID NO: 379380 - DNA, 20 bp, Artificial Sequence
  Description of Artificial Sequence: Synthetic oligonucleotide
  Target: LAMA2; (+) strand; PAM type: YTN; PAM sequence: CTT
ttaagcatcatcagagaaaa

SEQ ID NO: 379381 - DNA, 20 bp, Artificial Sequence
  Description of Artificial Sequence: Synthetic oligonucleotide
  Target: LAMA2; (+) strand; PAM type: YTN; PAM sequence: TTT
taagcatcatcagagaaaat

SEQ ID NO: 379382 - DNA, 20 bp, Artificial Sequence
  Description of Artificial Sequence: Synthetic oligonucleotide
  Target: LAMA2; (+) strand; PAM type: YTN; PAM sequence: TTT
aagcatcatcagagaaaatc

SEQ ID NO: 379383 - DNA, 20 bp, Artificial Sequence
  Description of Artificial Sequence: Synthetic oligonucleotide
  Target: LAMA2; (+) strand; PAM type: YTN; PAM sequence: TTA
agcatcatcagagaaaatca

SEQ ID NO: 379384 - DNA, 20 bp, Artificial Sequence
  Description of Artificial Sequence: Synthetic oligonucleotide
  Target: LAMA2; (+) strand; PAM type: YTN; PAM sequence: CTA
aataataaggcttataaaaa

SEQ ID NO: 379385 - DNA, 20 bp, Artificial Sequence
  Description of Artificial Sequence: Synthetic oligonucleotide
  Target: LAMA2; (+) strand; PAM type: YTN; PAM sequence: CTT
ataaaaaccatttctccaaa

SEQ ID NO: 379386 - DNA, 20 bp, Artificial Sequence
  Description of Artificial Sequence: Synthetic oligonucleotide
  Target: LAMA2; (+) strand; PAM type: YTN; PAM sequence: TTA
taaaaaccatttctccaaaa

SEQ ID NO: 379387 - DNA, 20 bp, Artificial Sequence
  Description of Artificial Sequence: Synthetic oligonucleotide
  Target: LAMA2; (+) strand; PAM type: YTN; PAM sequence: TTT
ctccaaaaattaatctgcaa

SEQ ID NO: 379388 - DNA, 20 bp, Artificial Sequence
  Description of Artificial Sequence: Synthetic oligonucleotide
  Target: LAMA2; (+) strand; PAM type: YTN; PAM sequence: TTC
tccaaaaattaatctgcaat

SEQ ID NO: 379389 - DNA, 20 bp, Artificial Sequence
  Description of Artificial Sequence: Synthetic oligonucleotide
  Target: LAMA2; (+) strand; PAM type: YTN; PAM sequence: CTC
caaaaattaatctgcaatcg

SEQ ID NO: 379390 - DNA, 20 bp, Artificial Sequence
  Description of Artificial Sequence: Synthetic oligonucleotide
  Target: LAMA2; (+) strand; PAM type: YTN; PAM sequence: TTA
atctgcaatcgctgtatact

SEQ ID NO: 379391 - DNA, 20 bp, Artificial Sequence
  Description of Artificial Sequence: Synthetic oligonucleotide
  Target: LAMA2; (+) strand; PAM type: YTN; PAM sequence: CTG
caatcgctgtatactagaaa

SEQ ID NO: 379392 - DNA, 20 bp, Artificial Sequence
  Description of Artificial Sequence: Synthetic oligonucleotide
  Target: LAMA2; (+) strand; PAM type: YTN; PAM sequence: CTG
tatactagaaaatatattta

SEQ ID NO: 379393 - DNA, 20 bp, Artificial Sequence
  Description of Artificial Sequence: Synthetic oligonucleotide
  Target: LAMA2; (+) strand; PAM type: YTN; PAM sequence: CTA
gaaaatatatttactgctgt

SEQ ID NO: 379394 - DNA, 20 bp, Artificial Sequence
  Description of Artificial Sequence: Synthetic oligonucleotide
  Target: LAMA2; (+) strand; PAM type: YTN; PAM sequence: TTT
actgctgtggaagtttagta

SEQ ID NO: 379395 - DNA, 20 bp, Artificial Sequence
  Description of Artificial Sequence: Synthetic oligonucleotide
  Target: LAMA2; (+) strand; PAM type: YTN; PAM sequence: TTA
ctgctgtggaagtttagtaa

SEQ ID NO: 379396 - DNA, 20 bp, Artificial Sequence
  Description of Artificial Sequence: Synthetic oligonucleotide
  Target: LAMA2; (+) strand; PAM type: YTN; PAM sequence: CTG
ctgtggaagtttagtaaaat

SEQ ID NO: 379397 - DNA, 20 bp, Artificial Sequence
  Description of Artificial Sequence: Synthetic oligonucleotide
  Target: LAMA2; (+) strand; PAM type: YTN; PAM sequence: CTG
tggaagtttagtaaaatttc

SEQ ID NO: 379398 - DNA, 20 bp, Artificial Sequence
  Description of Artificial Sequence: Synthetic oligonucleotide
  Target: LAMA2; (+) strand; PAM type: YTN; PAM sequence: TTT
agtaaaatttcaacacatat

SEQ ID NO: 379399 - DNA, 20 bp, Artificial Sequence
  Description of Artificial Sequence: Synthetic oligonucleotide
  Target: LAMA2; (+) strand; PAM type: YTN; PAM sequence: TTA
gtaaaatttcaacacatata

SEQ ID NO: 379400 - DNA, 20 bp, Artificial Sequence
  Description of Artificial Sequence: Synthetic oligonucleotide
  Target: LAMA2; (+) strand; PAM type: YTN; PAM sequence: TTT
caacacatataaacgctgtc

SEQ ID NO: 379401 - DNA, 20 bp, Artificial Sequence
  Description of Artificial Sequence: Synthetic oligonucleotide
  Target: LAMA2; (+) strand; PAM type: YTN; PAM sequence: TTC
aacacatataaacgctgtca

SEQ ID NO: 379402 - DNA, 20 bp, Artificial Sequence
  Description of Artificial Sequence: Synthetic oligonucleotide
  Target: LAMA2; (+) strand; PAM type: YTN; PAM sequence: CTG
tcattacaaacagtgactat

SEQ ID NO: 379403 - DNA, 20 bp, Artificial Sequence
  Description of Artificial Sequence: Synthetic oligonucleotide
  Target: LAMA2; (+) strand; PAM type: YTN; PAM sequence: TTA
caaacagtgactatgtgcaa

SEQ ID NO: 379404 - DNA, 20 bp, Artificial Sequence
  Description of Artificial Sequence: Synthetic oligonucleotide
  Target: LAMA2; (+) strand; PAM type: YTN; PAM sequence: CTA
tgtgcaaatttcagccctca

SEQ ID NO: 379405 - DNA, 20 bp, Artificial Sequence
  Description of Artificial Sequence: Synthetic oligonucleotide
  Target: LAMA2; (+) strand; PAM type: YTN; PAM sequence: TTT
cagccctcattaatatggtt

SEQ ID NO: 379406 - DNA, 20 bp, Artificial Sequence
  Description of Artificial Sequence: Synthetic oligonucleotide
  Target: LAMA2; (+) strand; PAM type: YTN; PAM sequence: TTC
agccctcattaatatggtta

SEQ ID NO: 379407 - DNA, 20 bp, Artificial Sequence
  Description of Artificial Sequence: Synthetic oligonucleotide
  Target: LAMA2; (+) strand; PAM type: YTN; PAM sequence: CTC
attaatatggttaaatgatg

SEQ ID NO: 379408 - DNA, 20 bp, Artificial Sequence
  Description of Artificial Sequence: Synthetic oligonucleotide
  Target: LAMA2; (+) strand; PAM type: YTN; PAM sequence: TTA
atatggttaaatgatgtaga

SEQ ID NO: 379409 - DNA, 20 bp, Artificial Sequence
  Description of Artificial Sequence: Synthetic oligonucleotide
  Target: LAMA2; (+) strand; PAM type: YTN; PAM sequence: TTA
aatgatgtagaaaaagagcc

SEQ ID NO: 379410 - DNA, 20 bp, Artificial Sequence
  Description of Artificial Sequence: Synthetic oligonucleotide
  Target: LAMA2; (+) strand; PAM type: YTN; PAM sequence: TTA
aaaaggtaaaaaggattttt

SEQ ID NO: 379411 - DNA, 20 bp, Artificial Sequence
  Description of Artificial Sequence: Synthetic oligonucleotide
  Target: LAMA2; (+) strand; PAM type: YTN; PAM sequence: TTT
ttcccctcagatagttctga

SEQ ID NO: 379412 - DNA, 20 bp, Artificial Sequence
  Description of Artificial Sequence: Synthetic oligonucleotide
  Target: LAMA2; (+) strand; PAM type: YTN; PAM sequence: TTT
tcccctcagatagttctgaa

SEQ ID NO: 379413 - DNA, 20 bp, Artificial Sequence
  Description of Artificial Sequence: Synthetic oligonucleotide
  Target: LAMA2; (+) strand; PAM type: YTN; PAM sequence: TTT
cccctcagatagttctgaaa

SEQ ID NO: 379414 - DNA, 20 bp, Artificial Sequence
  Description of Artificial Sequence: Synthetic oligonucleotide
  Target: LAMA2; (+) strand; PAM type: YTN; PAM sequence: TTC
ccctcagatagttctgaaaa

SEQ ID NO: 379415 - DNA, 20 bp, Artificial Sequence
  Description of Artificial Sequence: Synthetic oligonucleotide
  Target: LAMA2; (+) strand; PAM type: YTN; PAM sequence: CTC
agatagttctgaaaaatcaa

SEQ ID NO: 379416 - DNA, 20 bp, Artificial Sequence
  Description of Artificial Sequence: Synthetic oligonucleotide
  Target: LAMA2; (+) strand; PAM type: YTN; PAM sequence: TTC
tgaaaaatcaattccaggat

SEQ ID NO: 379417 - DNA, 20 bp, Artificial Sequence
  Description of Artificial Sequence: Synthetic oligonucleotide
  Target: LAMA2; (+) strand; PAM type: YTN; PAM sequence: CTG
aaaaatcaattccaggataa

SEQ ID NO: 379418 - DNA, 20 bp, Artificial Sequence
  Description of Artificial Sequence: Synthetic oligonucleotide
  Target: LAMA2; (+) strand; PAM type: YTN; PAM sequence: TTC
caggataaatgcagtttaaa

SEQ ID NO: 379419 - DNA, 20 bp, Artificial Sequence
  Description of Artificial Sequence: Synthetic oligonucleotide
  Target: LAMA2; (+) strand; PAM type: YTN; PAM sequence: TTT
aaactgtgtcagaggtatct

SEQ ID NO: 379420 - DNA, 20 bp, Artificial Sequence
  Description of Artificial Sequence: Synthetic oligonucleotide
  Target: LAMA2; (+) strand; PAM type: YTN; PAM sequence: TTA
aactgtgtcagaggtatctt

SEQ ID NO: 379421 - DNA, 20 bp, Artificial Sequence
  Description of Artificial Sequence: Synthetic oligonucleotide
  Target: LAMA2; (+) strand; PAM type: YTN; PAM sequence: CTG
tgtcagaggtatcttttcaa

SEQ ID NO: 379422 - DNA, 20 bp, Artificial Sequence
  Description of Artificial Sequence: Synthetic oligonucleotide
  Target: LAMA2; (+) strand; PAM type: YTN; PAM sequence: CTT
ttcaagataaaatctatgca

SEQ ID NO: 379423 - DNA, 20 bp, Artificial Sequence
  Description of Artificial Sequence: Synthetic oligonucleotide
  Target: LAMA2; (+) strand; PAM type: YTN; PAM sequence: TTT
tcaagataaaatctatgcaa

SEQ ID NO: 379424 - DNA, 20 bp, Artificial Sequence
  Description of Artificial Sequence: Synthetic oligonucleotide
  Target: LAMA2; (+) strand; PAM type: YTN; PAM sequence: TTT
caagataaaatctatgcaaa

SEQ ID NO: 379425 - DNA, 20 bp, Artificial Sequence
  Description of Artificial Sequence: Synthetic oligonucleotide
  Target: LAMA2; (+) strand; PAM type: YTN; PAM sequence: TTC
aagataaaatctatgcaaaa

SEQ ID NO: 379426 - DNA, 20 bp, Artificial Sequence
  Description of Artificial Sequence: Synthetic oligonucleotide
  Target: LAMA2; (+) strand; PAM type: YTN; PAM sequence: CTA
tgcaaaaagggacagaggaa

SEQ ID NO: 379427 - DNA, 20 bp, Artificial Sequence
  Description of Artificial Sequence: Synthetic oligonucleotide
  Target: LAMA2; (+) strand; PAM type: YTN; PAM sequence: CTG
ggtagtggttgttaaaatgg

SEQ ID NO: 379428 - DNA, 20 bp, Artificial Sequence
  Description of Artificial Sequence: Synthetic oligonucleotide
  Target: LAMA2; (+) strand; PAM type: YTN; PAM sequence: TTG
ttaaaatggccttgagaatt

SEQ ID NO: 379429 - DNA, 20 bp, Artificial Sequence
  Description of Artificial Sequence: Synthetic oligonucleotide
  Target: LAMA2; (+) strand; PAM type: YTN; PAM sequence: TTA
aaatggccttgagaattgag

SEQ ID NO: 379430 - DNA, 20 bp, Artificial Sequence
  Description of Artificial Sequence: Synthetic oligonucleotide
  Target: LAMA2; (+) strand; PAM type: YTN; PAM sequence: CTT
gagaattgaggaaaatggca

SEQ ID NO: 379431 - DNA, 20 bp, Artificial Sequence
  Description of Artificial Sequence: Synthetic oligonucleotide
  Target: LAMA2; (+) strand; PAM type: YTN; PAM sequence: TTG
agaattgaggaaaatggcag

SEQ ID NO: 379432 - DNA, 20 bp, Artificial Sequence
  Description of Artificial Sequence: Synthetic oligonucleotide
  Target: LAMA2; (+) strand; PAM type: YTN; PAM sequence: TTG
aggaaaatggcagtttctac

SEQ ID NO: 379433 - DNA, 20 bp, Artificial Sequence
  Description of Artificial Sequence: Synthetic oligonucleotide
  Target: LAMA2; (+) strand; PAM type: YTN; PAM sequence: TTT
ctaccatcaagggcttcggc

SEQ ID NO: 379434 - DNA, 20 bp, Artificial Sequence
  Description of Artificial Sequence: Synthetic oligonucleotide
  Target: LAMA2; (+) strand; PAM type: YTN; PAM sequence: TTC
taccatcaagggcttcggcc

SEQ ID NO: 379435 - DNA, 20 bp, Artificial Sequence
  Description of Artificial Sequence: Synthetic oligonucleotide
  Target: LAMA2; (+) strand; PAM type: YTN; PAM sequence: CTA
ccatcaagggcttcggccaa

SEQ ID NO: 379436 - DNA, 20 bp, Artificial Sequence
  Description of Artificial Sequence: Synthetic oligonucleotide
  Target: LAMA2; (+) strand; PAM type: YTN; PAM sequence: CTT
cggccaataccgagtacaat

SEQ ID NO: 379437 - DNA, 20 bp, Artificial Sequence
  Description of Artificial Sequence: Synthetic oligonucleotide
  Target: LAMA2; (+) strand; PAM type: YTN; PAM sequence: TTC
ggccaataccgagtacaatg

SEQ ID NO: 379438 - DNA, 20 bp, Artificial Sequence
  Description of Artificial Sequence: Synthetic oligonucleotide
  Target: LAMA2; (+) strand; PAM type: YTN; PAM sequence: CTG
cattcttatatctcgcaatt

SEQ ID NO: 379439 - DNA, 20 bp, Artificial Sequence
  Description of Artificial Sequence: Synthetic oligonucleotide
  Target: LAMA2; (+) strand; PAM type: YTN; PAM sequence: TTC
ttatatctcgcaattatgat

SEQ ID NO: 379440 - DNA, 20 bp, Artificial Sequence
  Description of Artificial Sequence: Synthetic oligonucleotide
  Target: LAMA2; (+) strand; PAM type: YTN; PAM sequence: CTT
atatctcgcaattatgatca

SEQ ID NO: 379441 - DNA, 20 bp, Artificial Sequence
  Description of Artificial Sequence: Synthetic oligonucleotide
  Target: LAMA2; (+) strand; PAM type: YTN; PAM sequence: TTA
tatctcgcaattatgatcat

SEQ ID NO: 379442 - DNA, 20 bp, Artificial Sequence
  Description of Artificial Sequence: Synthetic oligonucleotide
  Target: LAMA2; (+) strand; PAM type: YTN; PAM sequence: CTC
gcaattatgatcatatattt

SEQ ID NO: 379443 - DNA, 20 bp, Artificial Sequence
  Description of Artificial Sequence: Synthetic oligonucleotide
  Target: LAMA2; (+) strand; PAM type: YTN; PAM sequence: TTA
tgatcatatatttaatacat

SEQ ID NO: 379444 - DNA, 20 bp, Artificial Sequence
  Description of Artificial Sequence: Synthetic oligonucleotide
  Target: LAMA2; (+) strand; PAM type: YTN; PAM sequence: TTT
aatacatgttatgtgtgtat

SEQ ID NO: 379445 - DNA, 20 bp, Artificial Sequence
  Description of Artificial Sequence: Synthetic oligonucleotide
  Target: LAMA2; (+) strand; PAM type: YTN; PAM sequence: TTA
atacatgttatgtgtgtata

SEQ ID NO: 379446 - DNA, 20 bp, Artificial Sequence
  Description of Artificial Sequence: Synthetic oligonucleotide
  Target: LAMA2; (+) strand; PAM type: YTN; PAM sequence: TTA
tgtgtgtatatatattacaa

SEQ ID NO: 379447 - DNA, 20 bp, Artificial Sequence
  Description of Artificial Sequence: Synthetic oligonucleotide
  Target: LAMA2; (+) strand; PAM type: YTN; PAM sequence: TTA
caataattatataaattgat

SEQ ID NO: 379448 - DNA, 20 bp, Artificial Sequence
  Description of Artificial Sequence: Synthetic oligonucleotide
  Target: LAMA2; (+) strand; PAM type: YTN; PAM sequence: TTA
tataaattgatattttaacc

SEQ ID NO: 379449 - DNA, 20 bp, Artificial Sequence
  Description of Artificial Sequence: Synthetic oligonucleotide
  Target: LAMA2; (+) strand; PAM type: YTN; PAM sequence: TTG
atattttaacctgctgccta

SEQ ID NO: 379450 - DNA, 20 bp, Artificial Sequence
  Description of Artificial Sequence: Synthetic oligonucleotide
  Target: LAMA2; (+) strand; PAM type: YTN; PAM sequence: TTT
taacctgctgcctatttctt

SEQ ID NO: 379451 - DNA, 20 bp, Artificial Sequence
  Description of Artificial Sequence: Synthetic oligonucleotide
  Target: LAMA2; (+) strand; PAM type: YTN; PAM sequence: TTT
aacctgctgcctatttctta

SEQ ID NO: 379452 - DNA, 20 bp, Artificial Sequence
  Description of Artificial Sequence: Synthetic oligonucleotide
  Target: LAMA2; (+) strand; PAM type: YTN; PAM sequence: TTA
acctgctgcctatttcttac

SEQ ID NO: 379453 - DNA, 20 bp, Artificial Sequence
  Description of Artificial Sequence: Synthetic oligonucleotide
  Target: LAMA2; (+) strand; PAM type: YTN; PAM sequence: CTG
ctgcctatttcttacagctt

SEQ ID NO: 379454 - DNA, 20 bp, Artificial Sequence
  Description of Artificial Sequence: Synthetic oligonucleotide
  Target: LAMA2; (+) strand; PAM type: YTN; PAM sequence: CTG
cctatttcttacagcttaca

SEQ ID NO: 379455 - DNA, 20 bp, Artificial Sequence
  Description of Artificial Sequence: Synthetic oligonucleotide
  Target: LAMA2; (+) strand; PAM type: YTN; PAM sequence: CTA
tttcttacagcttacaatag

SEQ ID NO: 379456 - DNA, 20 bp, Artificial Sequence
  Description of Artificial Sequence: Synthetic oligonucleotide
  Target: LAMA2; (+) strand; PAM type: YTN; PAM sequence: TTT
cttacagcttacaatagcac

SEQ ID NO: 379457 - DNA, 20 bp, Artificial Sequence
  Description of Artificial Sequence: Synthetic oligonucleotide
  Target: LAMA2; (+) strand; PAM type: YTN; PAM sequence: TTC
ttacagcttacaatagcacc

SEQ ID NO: 379458 - DNA, 20 bp, Artificial Sequence
  Description of Artificial Sequence: Synthetic oligonucleotide
  Target: LAMA2; (+) strand; PAM type: YTN; PAM sequence: CTT
acagcttacaatagcaccac

SEQ ID NO: 379459 - DNA, 20 bp, Artificial Sequence
  Description of Artificial Sequence: Synthetic oligonucleotide
  Target: LAMA2; (+) strand; PAM type: YTN; PAM sequence: TTA
cagcttacaatagcaccact

SEQ ID NO: 379460 - DNA, 20 bp, Artificial Sequence
  Description of Artificial Sequence: Synthetic oligonucleotide
  Target: LAMA2; (+) strand; PAM type: YTN; PAM sequence: CTT
acaatagcaccactgtttaa

SEQ ID NO: 379461 - DNA, 20 bp, Artificial Sequence
  Description of Artificial Sequence: Synthetic oligonucleotide
  Target: LAMA2; (+) strand; PAM type: YTN; PAM sequence: TTA
caatagcaccactgtttaag

SEQ ID NO: 379462 - DNA, 20 bp, Artificial Sequence
  Description of Artificial Sequence: Synthetic oligonucleotide
  Target: LAMA2; (+) strand; PAM type: YTN; PAM sequence: CTG
tttaagactcaatgttttta

SEQ ID NO: 379463 - DNA, 20 bp, Artificial Sequence
  Description of Artificial Sequence: Synthetic oligonucleotide
  Target: LAMA2; (+) strand; PAM type: YTN; PAM sequence: TTT
aagactcaatgtttttatgt

SEQ ID NO: 379464 - DNA, 20 bp, Artificial Sequence
  Description of Artificial Sequence: Synthetic oligonucleotide
  Target: LAMA2; (+) strand; PAM type: YTN; PAM sequence: TTA
agactcaatgtttttatgtt

SEQ ID NO: 379465 - DNA, 20 bp, Artificial Sequence
  Description of Artificial Sequence: Synthetic oligonucleotide
  Target: LAMA2; (+) strand; PAM type: YTN; PAM sequence: CTC
aatgtttttatgttgctttt

SEQ ID NO: 379466 - DNA, 20 bp, Artificial Sequence
  Description of Artificial Sequence: Synthetic oligonucleotide
  Target: LAMA2; (+) strand; PAM type: YTN; PAM sequence: TTT
ttatgttgcttttgaaattt

SEQ ID NO: 379467 - DNA, 20 bp, Artificial Sequence
  Description of Artificial Sequence: Synthetic oligonucleotide
  Target: LAMA2; (+) strand; PAM type: YTN; PAM sequence: TTT
tatgttgcttttgaaatttt

SEQ ID NO: 379468 - DNA, 20 bp, Artificial Sequence
  Description of Artificial Sequence: Synthetic oligonucleotide
  Target: LAMA2; (+) strand; PAM type: YTN; PAM sequence: TTT
atgttgcttttgaaattttc

SEQ ID NO: 379469 - DNA, 20 bp, Artificial Sequence
  Description of Artificial Sequence: Synthetic oligonucleotide
  Target: LAMA2; (+) strand; PAM type: YTN; PAM sequence: TTA
tgttgcttttgaaattttca

SEQ ID NO: 379470 - DNA, 20 bp, Artificial Sequence
  Description of Artificial Sequence: Synthetic oligonucleotide
  Target: LAMA2; (+) strand; PAM type: YTN; PAM sequence: TTG
cttttgaaattttcatgagt

SEQ ID NO: 379471 - DNA, 20 bp, Artificial Sequence
  Description of Artificial Sequence: Synthetic oligonucleotide
  Target: LAMA2; (+) strand; PAM type: YTN; PAM sequence: CTT
ttgaaattttcatgagtctt

SEQ ID NO: 379472 - DNA, 20 bp, Artificial Sequence
  Description of Artificial Sequence: Synthetic oligonucleotide
  Target: LAMA2; (+) strand; PAM type: YTN; PAM sequence: TTT
tgaaattttcatgagtcttt

SEQ ID NO: 379473 - DNA, 20 bp, Artificial Sequence
  Description of Artificial Sequence: Synthetic oligonucleotide
  Target: LAMA2; (+) strand; PAM type: YTN; PAM sequence: TTT
gaaattttcatgagtctttc

SEQ ID NO: 379474 - DNA, 20 bp, Artificial Sequence
  Description of Artificial Sequence: Synthetic oligonucleotide
  Target: LAMA2; (+) strand; PAM type: YTN; PAM sequence: TTG
aaattttcatgagtctttca

SEQ ID NO: 379475 - DNA, 20 bp, Artificial Sequence
  Description of Artificial Sequence: Synthetic oligonucleotide
  Target: LAMA2; (+) strand; PAM type: YTN; PAM sequence: TTT
tcatgagtctttcatattgc

SEQ ID NO: 379476 - DNA, 20 bp, Artificial Sequence
  Description of Artificial Sequence: Synthetic oligonucleotide
  Target: LAMA2; (+) strand; PAM type: YTN; PAM sequence: TTT
catgagtctttcatattgct

SEQ ID NO: 379477 - DNA, 20 bp, Artificial Sequence
  Description of Artificial Sequence: Synthetic oligonucleotide
  Target: LAMA2; (+) strand; PAM type: YTN; PAM sequence: TTC
atgagtctttcatattgctc

SEQ ID NO: 379478 - DNA, 20 bp, Artificial Sequence
  Description of Artificial Sequence: Synthetic oligonucleotide
  Target: LAMA2; (+) strand; PAM type: YTN; PAM sequence: CTT
tcatattgctcagagcagaa

SEQ ID NO: 379479 - DNA, 20 bp, Artificial Sequence
  Description of Artificial Sequence: Synthetic oligonucleotide
  Target: LAMA2; (+) strand; PAM type: YTN; PAM sequence: TTT
catattgctcagagcagaac

SEQ ID NO: 379480 - DNA, 20 bp, Artificial Sequence
  Description of Artificial Sequence: Synthetic oligonucleotide
  Target: LAMA2; (+) strand; PAM type: YTN; PAM sequence: TTC
atattgctcagagcagaact

SEQ ID NO: 379481 - DNA, 20 bp, Artificial Sequence
  Description of Artificial Sequence: Synthetic oligonucleotide
  Target: LAMA2; (+) strand; PAM type: YTN; PAM sequence: TTG
ctcagagcagaactgtagaa

SEQ ID NO: 379482 - DNA, 20 bp, Artificial Sequence
  Description of Artificial Sequence: Synthetic oligonucleotide
  Target: LAMA2; (+) strand; PAM type: YTN; PAM sequence: CTC
agagcagaactgtagaaaat

SEQ ID NO: 379483 - DNA, 20 bp, Artificial Sequence
  Description of Artificial Sequence: Synthetic oligonucleotide
  Target: LAMA2; (+) strand; PAM type: YTN; PAM sequence: CTG
tagaaaatgtaccacttaca

SEQ ID NO: 379484 - DNA, 20 bp, Artificial Sequence
  Description of Artificial Sequence: Synthetic oligonucleotide
  Target: LAMA2; (+) strand; PAM type: YTN; PAM sequence: CTT
acatttaagaaacaatgtac

SEQ ID NO: 379485 - DNA, 20 bp, Artificial Sequence
  Description of Artificial Sequence: Synthetic oligonucleotide
  Target: LAMA2; (+) strand; PAM type: YTN; PAM sequence: TTA
catttaagaaacaatgtaca

SEQ ID NO: 379486 - DNA, 20 bp, Artificial Sequence
  Description of Artificial Sequence: Synthetic oligonucleotide
  Target: LAMA2; (+) strand; PAM type: YTN; PAM sequence: TTT
aagaaacaatgtacaggccg

SEQ ID NO: 379487 - DNA, 20 bp, Artificial Sequence
  Description of Artificial Sequence: Synthetic oligonucleotide
  Target: LAMA2; (+) strand; PAM type: YTN; PAM sequence: TTA
agaaacaatgtacaggccgg

SEQ ID NO: 379488 - DNA, 20 bp, Artificial Sequence
  Description of Artificial Sequence: Synthetic oligonucleotide
  Target: LAMA2; (+) strand; PAM type: YTN; PAM sequence: CTC
acgcctgtaatcccaccact

SEQ ID NO: 379489 - DNA, 20 bp, Artificial Sequence
  Description of Artificial Sequence: Synthetic oligonucleotide
  Target: LAMA2; (+) strand; PAM type: YTN; PAM sequence: CTG
taatcccaccactttgggag

SEQ ID NO: 379490 - DNA, 20 bp, Artificial Sequence
  Description of Artificial Sequence: Synthetic oligonucleotide
  Target: LAMA2; (+) strand; PAM type: YTN; PAM sequence: CTT
tgggaggccgaggcgggcgg

SEQ ID NO: 379491 - DNA, 20 bp, Artificial Sequence
  Description of Artificial Sequence: Synthetic oligonucleotide
  Target: LAMA2; (+) strand; PAM type: YTN; PAM sequence: TTT
gggaggccgaggcgggcgga

SEQ ID NO: 379492 - DNA, 20 bp, Artificial Sequence
  Description of Artificial Sequence: Synthetic oligonucleotide
  Target: LAMA2; (+) strand; PAM type: YTN; PAM sequence: TTG
ggaggccgaggcgggcggat

SEQ ID NO: 379493 - DNA, 20 bp, Artificial Sequence
  Description of Artificial Sequence: Synthetic oligonucleotide
  Target: LAMA2; (+) strand; PAM type: YTN; PAM sequence: CTG
gctaacacggtgaaaccccg

SEQ ID NO: 379494 - DNA, 20 bp, Artificial Sequence
  Description of Artificial Sequence: Synthetic oligonucleotide
  Target: LAMA2; (+) strand; PAM type: YTN; PAM sequence: CTA
acacggtgaaaccccgtctc

SEQ ID NO: 379495 - DNA, 20 bp, Artificial Sequence
  Description of Artificial Sequence: Synthetic oligonucleotide
  Target: LAMA2; (+) strand; PAM type: YTN; PAM sequence: CTC
tactaaaaatacaaaaatta

SEQ ID NO: 379496 - DNA, 20 bp, Artificial Sequence
  Description of Artificial Sequence: Synthetic oligonucleotide
  Target: LAMA2; (+) strand; PAM type: YTN; PAM sequence: CTA
ctaaaaatacaaaaattagc

SEQ ID NO: 379497 - DNA, 20 bp, Artificial Sequence
  Description of Artificial Sequence: Synthetic oligonucleotide
  Target: LAMA2; (+) strand; PAM type: YTN; PAM sequence: CTA
aaaatacaaaaattagctgg

SEQ ID NO: 379498 - DNA, 20 bp, Artificial Sequence
  Description of Artificial Sequence: Synthetic oligonucleotide
  Target: LAMA2; (+) strand; PAM type: YTN; PAM sequence: TTA
gctgggcgcggtggcgggcg

SEQ ID NO: 379499 - DNA, 20 bp, Artificial Sequence
  Description of Artificial Sequence: Synthetic oligonucleotide
  Target: LAMA2; (+) strand; PAM type: YTN; PAM sequence: CTG
ggcgcggtggcgggcgcctg

SEQ ID NO: 379500 - DNA, 20 bp, Artificial Sequence
  Description of Artificial Sequence: Synthetic oligonucleotide
  Target: LAMA2; (+) strand; PAM type: YTN; PAM sequence: CTG
tagtcccatctactcggaag

SEQ ID NO: 379501 - DNA, 20 bp, Artificial Sequence
  Description of Artificial Sequence: Synthetic oligonucleotide
  Target: LAMA2; (+) strand; PAM type: YTN; PAM sequence: CTA
ctcggaaggctgaggccgga

SEQ ID NO: 379502 - DNA, 20 bp, Artificial Sequence
  Description of Artificial Sequence: Synthetic oligonucleotide
  Target: LAMA2; (+) strand; PAM type: YTN; PAM sequence: CTC
ggaaggctgaggccggagaa

SEQ ID NO: 379503 - DNA, 20 bp, Artificial Sequence
  Description of Artificial Sequence: Synthetic oligonucleotide
  Target: LAMA2; (+) strand; PAM type: YTN; PAM sequence: CTG
aggccggagaatggtgtgaa

SEQ ID NO: 379504 - DNA, 20 bp, Artificial Sequence
  Description of Artificial Sequence: Synthetic oligonucleotide
  Target: LAMA2; (+) strand; PAM type: YTN; PAM sequence: CTG
ggaggcggagcttgcagtga

SEQ ID NO: 379505 - DNA, 20 bp, Artificial Sequence
  Description of Artificial Sequence: Synthetic oligonucleotide
  Target: LAMA2; (+) strand; PAM type: YTN; PAM sequence: CTT
gcagtgagcagagatagcgc

SEQ ID NO: 379506 - DNA, 20 bp, Artificial Sequence
  Description of Artificial Sequence: Synthetic oligonucleotide
  Target: LAMA2; (+) strand; PAM type: YTN; PAM sequence: TTG
cagtgagcagagatagcgcc

SEQ ID NO: 379507 - DNA, 20 bp, Artificial Sequence
  Description of Artificial Sequence: Synthetic oligonucleotide
  Target: LAMA2; (+) strand; PAM type: YTN; PAM sequence: CTG
cactctggcctgggcgaaag

SEQ ID NO: 379508 - DNA, 20 bp, Artificial Sequence
  Description of Artificial Sequence: Synthetic oligonucleotide
  Target: LAMA2; (+) strand; PAM type: YTN; PAM sequence: CTC
tggcctgggcgaaagagcga

SEQ ID NO: 379509 - DNA, 20 bp, Artificial Sequence
  Description of Artificial Sequence: Synthetic oligonucleotide
  Target: LAMA2; (+) strand; PAM type: YTN; PAM sequence: CTG
gcctgggcgaaagagcgaga

SEQ ID NO: 379510 - DNA, 20 bp, Artificial Sequence
  Description of Artificial Sequence: Synthetic oligonucleotide
  Target: LAMA2; (+) strand; PAM type: YTN; PAM sequence: CTG
ggcgaaagagcgagactccg

SEQ ID NO: 379511 - DNA, 20 bp, Artificial Sequence
  Description of Artificial Sequence: Synthetic oligonucleotide
  Target: LAMA2; (+) strand; PAM type: YTN; PAM sequence: CTC
cgtctcaaaaaaaaaaaaaa

SEQ ID NO: 379512 - DNA, 20 bp, Artificial Sequence
  Description of Artificial Sequence: Synthetic oligonucleotide
  Target: LAMA2; (+) strand; PAM type: YTN; PAM sequence: CTC
aaaaaaaaaaaaaaaaaaaa

SEQ ID NO: 379513 - DNA, 20 bp, Artificial Sequence
  Description of Artificial Sequence: Synthetic oligonucleotide
  Target: LAMA2; (+) strand; PAM type: YTN; PAM sequence: CTT
tagtcttatatctatttaaa

SEQ ID NO: 379514 - DNA, 20 bp, Artificial Sequence
  Description of Artificial Sequence: Synthetic oligonucleotide
  Target: LAMA2; (+) strand; PAM type: YTN; PAM sequence: TTT
agtcttatatctatttaaaa

SEQ ID NO: 379515 - DNA, 20 bp, Artificial Sequence
  Description of Artificial Sequence: Synthetic oligonucleotide
  Target: LAMA2; (+) strand; PAM type: YTN; PAM sequence: TTA
gtcttatatctatttaaaaa

SEQ ID NO: 379516 - DNA, 20 bp, Artificial Sequence
  Description of Artificial Sequence: Synthetic oligonucleotide
  Target: LAMA2; (+) strand; PAM type: YTN; PAM sequence: CTT
atatctatttaaaaataaag

SEQ ID NO: 379517 - DNA, 20 bp, Artificial Sequence
  Description of Artificial Sequence: Synthetic oligonucleotide
  Target: LAMA2; (+) strand; PAM type: YTN; PAM sequence: TTA
tatctatttaaaaataaagc

SEQ ID NO: 379518 - DNA, 20 bp, Artificial Sequence
  Description of Artificial Sequence: Synthetic oligonucleotide
  Target: LAMA2; (+) strand; PAM type: YTN; PAM sequence: CTA
tttaaaaataaagcattttt

SEQ ID NO: 379519 - DNA, 20 bp, Artificial Sequence
  Description of Artificial Sequence: Synthetic oligonucleotide
  Target: LAMA2; (+) strand; PAM type: YTN; PAM sequence: TTT
aaaaataaagcatttttaaa

SEQ ID NO: 379520 - DNA, 20 bp, Artificial Sequence
  Description of Artificial Sequence: Synthetic oligonucleotide
  Target: LAMA2; (+) strand; PAM type: YTN; PAM sequence: TTA
aaaataaagcatttttaaaa

SEQ ID NO: 379521 - DNA, 20 bp, Artificial Sequence
  Description of Artificial Sequence: Synthetic oligonucleotide
  Target: LAMA2; (+) strand; PAM type: YTN; PAM sequence: TTT
ttaaaagatccatgaactcc

SEQ ID NO: 379522 - DNA, 20 bp, Artificial Sequence
  Description of Artificial Sequence: Synthetic oligonucleotide
  Target: LAMA2; (+) strand; PAM type: YTN; PAM sequence: TTT
taaaagatccatgaactcct

SEQ ID NO: 379523 - DNA, 20 bp, Artificial Sequence
  Description of Artificial Sequence: Synthetic oligonucleotide
  Target: LAMA2; (+) strand; PAM type: YTN; PAM sequence: TTT
aaaagatccatgaactccta

SEQ ID NO: 379524 - DNA, 20 bp, Artificial Sequence
  Description of Artificial Sequence: Synthetic oligonucleotide
  Target: LAMA2; (+) strand; PAM type: YTN; PAM sequence: TTA
aaagatccatgaactcctaa

SEQ ID NO: 379525 - DNA, 20 bp, Artificial Sequence
  Description of Artificial Sequence: Synthetic oligonucleotide
  Target: LAMA2; (+) strand; PAM type: YTN; PAM sequence: CTC
ctaacaatgaggttaactac

SEQ ID NO: 379526 - DNA, 20 bp, Artificial Sequence
  Description of Artificial Sequence: Synthetic oligonucleotide
  Target: LAMA2; (+) strand; PAM type: YTN; PAM sequence: CTA
acaatgaggttaactacatg

SEQ ID NO: 379527 - DNA, 20 bp, Artificial Sequence
  Description of Artificial Sequence: Synthetic oligonucleotide
  Target: LAMA2; (+) strand; PAM type: YTN; PAM sequence: TTA
actacatgtgccatttgaga

SEQ ID NO: 379528 - DNA, 20 bp, Artificial Sequence
  Description of Artificial Sequence: Synthetic oligonucleotide
  Target: LAMA2; (+) strand; PAM type: YTN; PAM sequence: CTA
catgtgccatttgagatgtg

SEQ ID NO: 379529 - DNA, 20 bp, Artificial Sequence
  Description of Artificial Sequence: Synthetic oligonucleotide
  Target: LAMA2; (+) strand; PAM type: YTN; PAM sequence: TTT
gagatgtgagtctaatactc

SEQ ID NO: 379530 - DNA, 20 bp, Artificial Sequence
  Description of Artificial Sequence: Synthetic oligonucleotide
  Target: LAMA2; (+) strand; PAM type: YTN; PAM sequence: TTG
agatgtgagtctaatactca

SEQ ID NO: 379531 - DNA, 20 bp, Artificial Sequence
  Description of Artificial Sequence: Synthetic oligonucleotide
  Target: LAMA2; (+) strand; PAM type: YTN; PAM sequence: CTA
atactcagtgttcttctgtt

SEQ ID NO: 379532 - DNA, 20 bp, Artificial Sequence
  Description of Artificial Sequence: Synthetic oligonucleotide
  Target: LAMA2; (+) strand; PAM type: YTN; PAM sequence: CTC
agtgttcttctgttttgttt

SEQ ID NO: 379533 - DNA, 20 bp, Artificial Sequence
  Description of Artificial Sequence: Synthetic oligonucleotide
  Target: LAMA2; (+) strand; PAM type: YTN; PAM sequence: TTC
ttctgttttgttttaaattt

SEQ ID NO: 379534 - DNA, 20 bp, Artificial Sequence
  Description of Artificial Sequence: Synthetic oligonucleotide
  Target: LAMA2; (+) strand; PAM type: YTN; PAM sequence: CTT
ctgttttgttttaaattttt

SEQ ID NO: 379535 - DNA, 20 bp, Artificial Sequence
  Description of Artificial Sequence: Synthetic oligonucleotide
  Target: LAMA2; (+) strand; PAM type: YTN; PAM sequence: TTC
tgttttgttttaaatttttt

SEQ ID NO: 379536 - DNA, 20 bp, Artificial Sequence
  Description of Artificial Sequence: Synthetic oligonucleotide
  Target: LAMA2; (+) strand; PAM type: YTN; PAM sequence: CTG
ttttgttttaaattttttaa

SEQ ID NO: 379537 - DNA, 20 bp, Artificial Sequence
  Description of Artificial Sequence: Synthetic oligonucleotide
  Target: LAMA2; (+) strand; PAM type: YTN; PAM sequence: TTT
tgttttaaattttttaaaaa

SEQ ID NO: 379538 - DNA, 20 bp, Artificial Sequence
  Description of Artificial Sequence: Synthetic oligonucleotide
  Target: LAMA2; (+) strand; PAM type: YTN; PAM sequence: TTT
gttttaaattttttaaaaag

SEQ ID NO: 379539 - DNA, 20 bp, Artificial Sequence
  Description of Artificial Sequence: Synthetic oligonucleotide
  Target: LAMA2; (+) strand; PAM type: YTN; PAM sequence: TTG
ttttaaattttttaaaaaga

SEQ ID NO: 379540 - DNA, 20 bp, Artificial Sequence
  Description of Artificial Sequence: Synthetic oligonucleotide
  Target: LAMA2; (+) strand; PAM type: YTN; PAM sequence: TTT
taaattttttaaaaagagta

SEQ ID NO: 379541 - DNA, 20 bp, Artificial Sequence
  Description of Artificial Sequence: Synthetic oligonucleotide
  Target: LAMA2; (+) strand; PAM type: YTN; PAM sequence: TTT
aaattttttaaaaagagtat

SEQ ID NO: 379542 - DNA, 20 bp, Artificial Sequence
  Description of Artificial Sequence: Synthetic oligonucleotide
  Target: LAMA2; (+) strand; PAM type: YTN; PAM sequence: TTA
aattttttaaaaagagtatg

SEQ ID NO: 379543 - DNA, 20 bp, Artificial Sequence
  Description of Artificial Sequence: Synthetic oligonucleotide
  Target: LAMA2; (+) strand; PAM type: YTN; PAM sequence: TTT
tttaaaaagagtatgctccc

SEQ ID NO: 379544 - DNA, 20 bp, Artificial Sequence
  Description of Artificial Sequence: Synthetic oligonucleotide
  Target: LAMA2; (+) strand; PAM type: YTN; PAM sequence: TTT
ttaaaaagagtatgctcccg

SEQ ID NO: 379545 - DNA, 20 bp, Artificial Sequence
  Description of Artificial Sequence: Synthetic oligonucleotide
  Target: LAMA2; (+) strand; PAM type: YTN; PAM sequence: TTT
taaaaagagtatgctcccgt

SEQ ID NO: 379546 - DNA, 20 bp, Artificial Sequence
  Description of Artificial Sequence: Synthetic oligonucleotide
  Target: LAMA2; (+) strand; PAM type: YTN; PAM sequence: TTT
aaaaagagtatgctcccgtt

SEQ ID NO: 379547 - DNA, 20 bp, Artificial Sequence
  Description of Artificial Sequence: Synthetic oligonucleotide
  Target: LAMA2; (+) strand; PAM type: YTN; PAM sequence: TTA
aaaagagtatgctcccgtta

SEQ ID NO: 379548 - DNA, 20 bp, Artificial Sequence
  Description of Artificial Sequence: Synthetic oligonucleotide
  Target: LAMA2; (+) strand; PAM type: YTN; PAM sequence: CTC
ccgttatgcattctcagggt

SEQ ID NO: 379549 - DNA, 20 bp, Artificial Sequence
  Description of Artificial Sequence: Synthetic oligonucleotide
  Target: LAMA2; (+) strand; PAM type: YTN; PAM sequence: TTA
tgcattctcagggtgatttc

SEQ ID NO: 379550 - DNA, 20 bp, Artificial Sequence
  Description of Artificial Sequence: Synthetic oligonucleotide
  Target: LAMA2; (+) strand; PAM type: YTN; PAM sequence: TTC
tcagggtgatttctccccta

SEQ ID NO: 379551 - DNA, 20 bp, Artificial Sequence
  Description of Artificial Sequence: Synthetic oligonucleotide
  Target: LAMA2; (+) strand; PAM type: YTN; PAM sequence: CTC
agggtgatttctcccctaac

SEQ ID NO: 379552 - DNA, 20 bp, Artificial Sequence
  Description of Artificial Sequence: Synthetic oligonucleotide
  Target: LAMA2; (+) strand; PAM type: YTN; PAM sequence: TTT
ctcccctaactttgccgtta

SEQ ID NO: 379553 - DNA, 20 bp, Artificial Sequence
  Description of Artificial Sequence: Synthetic oligonucleotide
  Target: LAMA2; (+) strand; PAM type: YTN; PAM sequence: TTC
tcccctaactttgccgttat

SEQ ID NO: 379554 - DNA, 20 bp, Artificial Sequence
  Description of Artificial Sequence: Synthetic oligonucleotide
  Target: LAMA2; (+) strand; PAM type: YTN; PAM sequence: CTC
ccctaactttgccgttataa

SEQ ID NO: 379555 - DNA, 20 bp, Artificial Sequence
  Description of Artificial Sequence: Synthetic oligonucleotide
  Target: LAMA2; (+) strand; PAM type: YTN; PAM sequence: CTA
actttgccgttataaactct

SEQ ID NO: 379556 - DNA, 20 bp, Artificial Sequence
  Description of Artificial Sequence: Synthetic oligonucleotide
  Target: LAMA2; (+) strand; PAM type: YTN; PAM sequence: CTT
tgccgttataaactctgagg

SEQ ID NO: 379557 - DNA, 20 bp, Artificial Sequence
  Description of Artificial Sequence: Synthetic oligonucleotide
  Target: LAMA2; (+) strand; PAM type: YTN; PAM sequence: TTT
gccgttataaactctgaggg

SEQ ID NO: 379558 - DNA, 20 bp, Artificial Sequence
  Description of Artificial Sequence: Synthetic oligonucleotide
  Target: LAMA2; (+) strand; PAM type: YTN; PAM sequence: TTG
ccgttataaactctgagggt

SEQ ID NO: 379559 - DNA, 20 bp, Artificial Sequence
  Description of Artificial Sequence: Synthetic oligonucleotide
  Target: LAMA2; (+) strand; PAM type: YTN; PAM sequence: TTA
taaactctgagggtctcttg

SEQ ID NO: 379560 - DNA, 20 bp, Artificial Sequence
  Description of Artificial Sequence: Synthetic oligonucleotide
  Target: LAMA2; (+) strand; PAM type: YTN; PAM sequence: CTC
tgagggtctcttgtctttcc

SEQ ID NO: 379561 - DNA, 20 bp, Artificial Sequence
  Description of Artificial Sequence: Synthetic oligonucleotide
  Target: LAMA2; (+) strand; PAM type: YTN; PAM sequence: CTG
agggtctcttgtctttcctc

SEQ ID NO: 379562 - DNA, 20 bp, Artificial Sequence
  Description of Artificial Sequence: Synthetic oligonucleotide
  Target: LAMA2; (+) strand; PAM type: YTN; PAM sequence: CTC
ttgtctttcctcaggtgaat

SEQ ID NO: 379563 - DNA, 20 bp, Artificial Sequence
  Description of Artificial Sequence: Synthetic oligonucleotide
  Target: LAMA2; (+) strand; PAM type: YTN; PAM sequence: CTT
gtctttcctcaggtgaatgt

SEQ ID NO: 379564 - DNA, 20 bp, Artificial Sequence
  Description of Artificial Sequence: Synthetic oligonucleotide
  Target: LAMA2; (+) strand; PAM type: YTN; PAM sequence: TTG
tctttcctcaggtgaatgtg

SEQ ID NO: 379565 - DNA, 20 bp, Artificial Sequence
  Description of Artificial Sequence: Synthetic oligonucleotide
  Target: LAMA2; (+) strand; PAM type: YTN; PAM sequence: CTT
tcctcaggtgaatgtggaag

SEQ ID NO: 379566 - DNA, 20 bp, Artificial Sequence
  Description of Artificial Sequence: Synthetic oligonucleotide
  Target: LAMA2; (+) strand; PAM type: YTN; PAM sequence: TTT
cctcaggtgaatgtggaagg

SEQ ID NO: 379567 - DNA, 20 bp, Artificial Sequence
  Description of Artificial Sequence: Synthetic oligonucleotide
  Target: LAMA2; (+) strand; PAM type: YTN; PAM sequence: TTC
ctcaggtgaatgtggaaggc

SEQ ID NO: 379568 - DNA, 20 bp, Artificial Sequence
  Description of Artificial Sequence: Synthetic oligonucleotide
  Target: LAMA2; (+) strand; PAM type: YTN; PAM sequence: CTC
aggtgaatgtggaaggcatc

SEQ ID NO: 379569 - DNA, 20 bp, Artificial Sequence
  Description of Artificial Sequence: Synthetic oligonucleotide
  Target: LAMA2; (+) strand; PAM type: YTN; PAM sequence: CTG
tgacagatgccggcctggca

SEQ ID NO: 379570 - DNA, 20 bp, Artificial Sequence
  Description of Artificial Sequence: Synthetic oligonucleotide
  Target: LAMA2; (+) strand; PAM type: YTN; PAM sequence: CTG
gcaaattcggactcgatgcc

SEQ ID NO: 379571 - DNA, 20 bp, Artificial Sequence
  Description of Artificial Sequence: Synthetic oligonucleotide
  Target: LAMA2; (+) strand; PAM type: YTN; PAM sequence: TTC
ggactcgatgccaagaatcc

SEQ ID NO: 379572 - DNA, 20 bp, Artificial Sequence
  Description of Artificial Sequence: Synthetic oligonucleotide
  Target: LAMA2; (+) strand; PAM type: YTN; PAM sequence: CTC
gatgccaagaatccacttgg

SEQ ID NO: 379573 - DNA, 20 bp, Artificial Sequence
  Description of Artificial Sequence: Synthetic oligonucleotide
  Target: LAMA2; (+) strand; PAM type: YTN; PAM sequence: CTT
ggctgcagcagctgctattg

SEQ ID NO: 379574 - DNA, 20 bp, Artificial Sequence
  Description of Artificial Sequence: Synthetic oligonucleotide
  Target: LAMA2; (+) strand; PAM type: YTN; PAM sequence: TTG
gctgcagcagctgctattgc

SEQ ID NO: 379575 - DNA, 20 bp, Artificial Sequence
  Description of Artificial Sequence: Synthetic oligonucleotide
  Target: LAMA2; (+) strand; PAM type: YTN; PAM sequence: CTG
cagcagctgctattgcttcg

SEQ ID NO: 379576 - DNA, 20 bp, Artificial Sequence
  Description of Artificial Sequence: Synthetic oligonucleotide
  Target: LAMA2; (+) strand; PAM type: YTN; PAM sequence: CTG
ctattgcttcggcactacta

SEQ ID NO: 379577 - DNA, 20 bp, Artificial Sequence
  Description of Artificial Sequence: Synthetic oligonucleotide
  Target: LAMA2; (+) strand; PAM type: YTN; PAM sequence: CTA
ttgcttcggcactactaccc

SEQ ID NO: 379578 - DNA, 20 bp, Artificial Sequence
  Description of Artificial Sequence: Synthetic oligonucleotide
  Target: LAMA2; (+) strand; PAM type: YTN; PAM sequence: TTG
cttcggcactactacccagt

SEQ ID NO: 379579 - DNA, 20 bp, Artificial Sequence
  Description of Artificial Sequence: Synthetic oligonucleotide
  Target: LAMA2; (+) strand; PAM type: YTN; PAM sequence: CTT
cggcactactacccagtgct

SEQ ID NO: 379580 - DNA, 20 bp, Artificial Sequence
  Description of Artificial Sequence: Synthetic oligonucleotide
  Target: LAMA2; (+) strand; PAM type: YTN; PAM sequence: TTC
ggcactactacccagtgctc

SEQ ID NO: 379581 - DNA, 20 bp, Artificial Sequence
  Description of Artificial Sequence: Synthetic oligonucleotide
  Target: LAMA2; (+) strand; PAM type: YTN; PAM sequence: CTA
ctacccagtgctctgaagca

SEQ ID NO: 379582 - DNA, 20 bp, Artificial Sequence
  Description of Artificial Sequence: Synthetic oligonucleotide
  Target: LAMA2; (+) strand; PAM type: YTN; PAM sequence: CTA
cccagtgctctgaagcaaaa

SEQ ID NO: 379583 - DNA, 20 bp, Artificial Sequence
  Description of Artificial Sequence: Synthetic oligonucleotide
  Target: LAMA2; (+) strand; PAM type: YTN; PAM sequence: CTC
tgaagcaaaaggactgatcc

SEQ ID NO: 379584 - DNA, 20 bp, Artificial Sequence
  Description of Artificial Sequence: Synthetic oligonucleotide
  Target: LAMA2; (+) strand; PAM type: YTN; PAM sequence: CTG
aagcaaaaggactgatccgg

SEQ ID NO: 379585 - DNA, 20 bp, Artificial Sequence
  Description of Artificial Sequence: Synthetic oligonucleotide
  Target: LAMA2; (+) strand; PAM type: YTN; PAM sequence: CTG
atccggacgtgggtgagtag

SEQ ID NO: 379586 - DNA, 20 bp, Artificial Sequence
  Description of Artificial Sequence: Synthetic oligonucleotide
  Target: LAMA2; (+) strand; PAM type: YTN; PAM sequence: CTG
ctgagccatgtaatggtata

SEQ ID NO: 379587 - DNA, 20 bp, Artificial Sequence
  Description of Artificial Sequence: Synthetic oligonucleotide
  Target: LAMA2; (+) strand; PAM type: YTN; PAM sequence: CTG
agccatgtaatggtataatg

SEQ ID NO: 379588 - DNA, 20 bp, Artificial Sequence
  Description of Artificial Sequence: Synthetic oligonucleotide
  Target: LAMA2; (+) strand; PAM type: YTN; PAM sequence: TTA
gttcctgctggtgtctttta

SEQ ID NO: 379589 - DNA, 20 bp, Artificial Sequence
  Description of Artificial Sequence: Synthetic oligonucleotide
  Target: LAMA2; (+) strand; PAM type: YTN; PAM sequence: TTC
ctgctggtgtcttttagtca

SEQ ID NO: 379590 - DNA, 20 bp, Artificial Sequence
  Description of Artificial Sequence: Synthetic oligonucleotide
  Target: LAMA2; (+) strand; PAM type: YTN; PAM sequence: CTG
ctggtgtcttttagtcaggc

SEQ ID NO: 379591 - DNA, 20 bp, Artificial Sequence
  Description of Artificial Sequence: Synthetic oligonucleotide
  Target: LAMA2; (+) strand; PAM type: YTN; PAM sequence: CTG
gtgtcttttagtcaggcact

SEQ ID NO: 379592 - DNA, 20 bp, Artificial Sequence
  Description of Artificial Sequence: Synthetic oligonucleotide
  Target: LAMA2; (+) strand; PAM type: YTN; PAM sequence: CTT
ttagtcaggcactgaggggt

SEQ ID NO: 379593 - DNA, 20 bp, Artificial Sequence
  Description of Artificial Sequence: Synthetic oligonucleotide
  Target: LAMA2; (+) strand; PAM type: YTN; PAM sequence: TTT
tagtcaggcactgaggggta

SEQ ID NO: 379594 - DNA, 20 bp, Artificial Sequence
  Description of Artificial Sequence: Synthetic oligonucleotide
  Target: LAMA2; (+) strand; PAM type: YTN; PAM sequence: TTT
agtcaggcactgaggggtag

SEQ ID NO: 379595 - DNA, 20 bp, Artificial Sequence
  Description of Artificial Sequence: Synthetic oligonucleotide
  Target: LAMA2; (+) strand; PAM type: YTN; PAM sequence: TTA
gtcaggcactgaggggtagt

SEQ ID NO: 379596 - DNA, 20 bp, Artificial Sequence
  Description of Artificial Sequence: Synthetic oligonucleotide
  Target: LAMA2; (+) strand; PAM type: YTN; PAM sequence: CTG
aggggtagtagaaaatggca

SEQ ID NO: 379597 - DNA, 20 bp, Artificial Sequence
  Description of Artificial Sequence: Synthetic oligonucleotide
  Target: LAMA2; (+) strand; PAM type: YTN; PAM sequence: TTT
aagtaaccttttcctctgtg

SEQ ID NO: 379598 - DNA, 20 bp, Artificial Sequence
  Description of Artificial Sequence: Synthetic oligonucleotide
  Target: LAMA2; (+) strand; PAM type: YTN; PAM sequence: TTA
agtaaccttttcctctgtga

SEQ ID NO: 379599 - DNA, 20 bp, Artificial Sequence
  Description of Artificial Sequence: Synthetic oligonucleotide
  Target: LAMA2; (+) strand; PAM type: YTN; PAM sequence: CTT
ttcctctgtgaacatttagg

SEQ ID NO: 379600 - DNA, 20 bp, Artificial Sequence
  Description of Artificial Sequence: Synthetic oligonucleotide
  Target: LAMA2; (+) strand; PAM type: YTN; PAM sequence: TTT
tcctctgtgaacatttagga

SEQ ID NO: 379601 - DNA, 20 bp, Artificial Sequence
  Description of Artificial Sequence: Synthetic oligonucleotide
  Target: LAMA2; (+) strand; PAM type: YTN; PAM sequence: TTT
cctctgtgaacatttaggaa

SEQ ID NO: 379602 - DNA, 20 bp, Artificial Sequence
  Description of Artificial Sequence: Synthetic oligonucleotide
  Target: LAMA2; (+) strand; PAM type: YTN; PAM sequence: TTC
ctctgtgaacatttaggaac

SEQ ID NO: 379603 - DNA, 20 bp, Artificial Sequence
  Description of Artificial Sequence: Synthetic oligonucleotide
  Target: LAMA2; (+) strand; PAM type: YTN; PAM sequence: CTC
tgtgaacatttaggaacagc

SEQ ID NO: 379604 - DNA, 20 bp, Artificial Sequence
  Description of Artificial Sequence: Synthetic oligonucleotide
  Target: LAMA2; (+) strand; PAM type: YTN; PAM sequence: CTG
tgaacatttaggaacagcaa

SEQ ID NO: 379605 - DNA, 20 bp, Artificial Sequence
  Description of Artificial Sequence: Synthetic oligonucleotide
  Target: LAMA2; (+) strand; PAM type: YTN; PAM sequence: TTT
aggaacagcaaaggggtcac

SEQ ID NO: 379606 - DNA, 20 bp, Artificial Sequence
  Description of Artificial Sequence: Synthetic oligonucleotide
  Target: LAMA2; (+) strand; PAM type: YTN; PAM sequence: TTA
ggaacagcaaaggggtcacg

SEQ ID NO: 379607 - DNA, 20 bp, Artificial Sequence
  Description of Artificial Sequence: Synthetic oligonucleotide
  Target: LAMA2; (+) strand; PAM type: YTN; PAM sequence: TTA
gagagttggagtaaatgcct

SEQ ID NO: 379608 - DNA, 20 bp, Artificial Sequence
  Description of Artificial Sequence: Synthetic oligonucleotide
  Target: LAMA2; (+) strand; PAM type: YTN; PAM sequence: TTG
gagtaaatgcctttcttatt

SEQ ID NO: 379609 - DNA, 20 bp, Artificial Sequence
  Description of Artificial Sequence: Synthetic oligonucleotide
  Target: LAMA2; (+) strand; PAM type: YTN; PAM sequence: CTT
tcttatttgttcttaaaagt

SEQ ID NO: 379610 - DNA, 20 bp, Artificial Sequence
  Description of Artificial Sequence: Synthetic oligonucleotide
  Target: LAMA2; (+) strand; PAM type: YTN; PAM sequence: TTT
cttatttgttcttaaaagta

SEQ ID NO: 379611 - DNA, 20 bp, Artificial Sequence
  Description of Artificial Sequence: Synthetic oligonucleotide
  Target: LAMA2; (+) strand; PAM type: YTN; PAM sequence: TTC
ttatttgttcttaaaagtag

SEQ ID NO: 379612 - DNA, 20 bp, Artificial Sequence
  Description of Artificial Sequence: Synthetic oligonucleotide
  Target: LAMA2; (+) strand; PAM type: YTN; PAM sequence: CTT
atttgttcttaaaagtagtt

SEQ ID NO: 379613 - DNA, 20 bp, Artificial Sequence
  Description of Artificial Sequence: Synthetic oligonucleotide
  Target: LAMA2; (+) strand; PAM type: YTN; PAM sequence: TTA
tttgttcttaaaagtagttc

SEQ ID NO: 379614 - DNA, 20 bp, Artificial Sequence
  Description of Artificial Sequence: Synthetic oligonucleotide
  Target: LAMA2; (+) strand; PAM type: YTN; PAM sequence: TTT
gttcttaaaagtagttcact

SEQ ID NO: 379615 - DNA, 20 bp, Artificial Sequence
  Description of Artificial Sequence: Synthetic oligonucleotide
  Target: LAMA2; (+) strand; PAM type: YTN; PAM sequence: TTG
ttcttaaaagtagttcactt

SEQ ID NO: 379616 - DNA, 20 bp, Artificial Sequence
  Description of Artificial Sequence: Synthetic oligonucleotide
  Target: LAMA2; (+) strand; PAM type: YTN; PAM sequence: TTC
ttaaaagtagttcacttatt

SEQ ID NO: 379617 - DNA, 20 bp, Artificial Sequence
  Description of Artificial Sequence: Synthetic oligonucleotide
  Target: LAMA2; (+) strand; PAM type: YTN; PAM sequence: CTT
aaaagtagttcacttattga

SEQ ID NO: 379618 - DNA, 20 bp, Artificial Sequence
  Description of Artificial Sequence: Synthetic oligonucleotide
  Target: LAMA2; (+) strand; PAM type: YTN; PAM sequence: TTA
aaagtagttcacttattgat

SEQ ID NO: 379619 - DNA, 20 bp, Artificial Sequence
  Description of Artificial Sequence: Synthetic oligonucleotide
  Target: LAMA2; (+) strand; PAM type: YTN; PAM sequence: TTC
acttattgataaggaaatag

SEQ ID NO: 379620 - DNA, 20 bp, Artificial Sequence
  Description of Artificial Sequence: Synthetic oligonucleotide
  Target: LAMA2; (+) strand; PAM type: YTN; PAM sequence: CTT
attgataaggaaatagatgc

SEQ ID NO: 379621 - DNA, 20 bp, Artificial Sequence
  Description of Artificial Sequence: Synthetic oligonucleotide
  Target: LAMA2; (+) strand; PAM type: YTN; PAM sequence: TTA
ttgataaggaaatagatgcc

SEQ ID NO: 379622 - DNA, 20 bp, Artificial Sequence
  Description of Artificial Sequence: Synthetic oligonucleotide
  Target: LAMA2; (+) strand; PAM type: YTN; PAM sequence: TTG
ataaggaaatagatgccaag

SEQ ID NO: 379623 - DNA, 20 bp, Artificial Sequence
  Description of Artificial Sequence: Synthetic oligonucleotide
  Target: LAMA2; (+) strand; PAM type: YTN; PAM sequence: CTT
gtccgggaagcattatgttt

SEQ ID NO: 379624 - DNA, 20 bp, Artificial Sequence
  Description of Artificial Sequence: Synthetic oligonucleotide
  Target: LAMA2; (+) strand; PAM type: YTN; PAM sequence: TTG
tccgggaagcattatgtttt

SEQ ID NO: 379625 - DNA, 20 bp, Artificial Sequence
  Description of Artificial Sequence: Synthetic oligonucleotide
  Target: LAMA2; (+) strand; PAM type: YTN; PAM sequence: TTA
tgttttgagatgggaagagt

SEQ ID NO: 379626 - DNA, 20 bp, Artificial Sequence
  Description of Artificial Sequence: Synthetic oligonucleotide
  Target: LAMA2; (+) strand; PAM type: YTN; PAM sequence: TTT
tgagatgggaagagtgaggg

SEQ ID NO: 379627 - DNA, 20 bp, Artificial Sequence
  Description of Artificial Sequence: Synthetic oligonucleotide
  Target: LAMA2; (+) strand; PAM type: YTN; PAM sequence: TTT
gagatgggaagagtgagggc

SEQ ID NO: 379628 - DNA, 20 bp, Artificial Sequence
  Description of Artificial Sequence: Synthetic oligonucleotide
  Target: LAMA2; (+) strand; PAM type: YTN; PAM sequence: TTG
agatgggaagagtgagggca

SEQ ID NO: 379629 - DNA, 20 bp, Artificial Sequence
  Description of Artificial Sequence: Synthetic oligonucleotide
  Target: LAMA2; (+) strand; PAM type: YTN; PAM sequence: TTG
atatgagctaacacaccaat

SEQ ID NO: 379630 - DNA, 20 bp, Artificial Sequence
  Description of Artificial Sequence: Synthetic oligonucleotide
  Target: LAMA2; (+) strand; PAM type: YTN; PAM sequence: CTA
acacaccaatgagaaccagg

SEQ ID NO: 379631 - DNA, 20 bp, Artificial Sequence
  Description of Artificial Sequence: Synthetic oligonucleotide
  Target: LAMA2; (+) strand; PAM type: YTN; PAM sequence: CTT
gtcacacattcattccaacc

SEQ ID NO: 379632 - DNA, 20 bp, Artificial Sequence
  Description of Artificial Sequence: Synthetic oligonucleotide
  Target: LAMA2; (+) strand; PAM type: YTN; PAM sequence: TTG
tcacacattcattccaacca

SEQ ID NO: 379633 - DNA, 20 bp, Artificial Sequence
  Description of Artificial Sequence: Synthetic oligonucleotide
  Target: LAMA2; (+) strand; PAM type: YTN; PAM sequence: TTC
attccaaccaaccttaggca

SEQ ID NO: 379634 - DNA, 20 bp, Artificial Sequence
  Description of Artificial Sequence: Synthetic oligonucleotide
  Target: LAMA2; (+) strand; PAM type: YTN; PAM sequence: TTC
caaccaaccttaggcaatca

SEQ ID NO: 379635 - DNA, 20 bp, Artificial Sequence
  Description of Artificial Sequence: Synthetic oligonucleotide
  Target: LAMA2; (+) strand; PAM type: YTN; PAM sequence: CTT
aggcaatcatgatttttgga

SEQ ID NO: 379636 - DNA, 20 bp, Artificial Sequence
  Description of Artificial Sequence: Synthetic oligonucleotide
  Target: LAMA2; (+) strand; PAM type: YTN; PAM sequence: TTA
ggcaatcatgatttttggag

SEQ ID NO: 379637 - DNA, 20 bp, Artificial Sequence
  Description of Artificial Sequence: Synthetic oligonucleotide
  Target: LAMA2; (+) strand; PAM type: YTN; PAM sequence: TTT
ttggagtgaaaacatgttca

SEQ ID NO: 379638 - DNA, 20 bp, Artificial Sequence
  Description of Artificial Sequence: Synthetic oligonucleotide
  Target: LAMA2; (+) strand; PAM type: YTN; PAM sequence: TTT
tggagtgaaaacatgttcat

SEQ ID NO: 379639 - DNA, 20 bp, Artificial Sequence
  Description of Artificial Sequence: Synthetic oligonucleotide
  Target: LAMA2; (+) strand; PAM type: YTN; PAM sequence: TTT
ggagtgaaaacatgttcatt

SEQ ID NO: 379640 - DNA, 20 bp, Artificial Sequence
  Description of Artificial Sequence: Synthetic oligonucleotide
  Target: LAMA2; (+) strand; PAM type: YTN; PAM sequence: TTG
gagtgaaaacatgttcattt

SEQ ID NO: 379641 - DNA, 20 bp, Artificial Sequence
  Description of Artificial Sequence: Synthetic oligonucleotide
  Target: LAMA2; (+) strand; PAM type: YTN; PAM sequence: TTC
atttttcattttcctttaac

SEQ ID NO: 379642 - DNA, 20 bp, Artificial Sequence
  Description of Artificial Sequence: Synthetic oligonucleotide
  Target: LAMA2; (+) strand; PAM type: YTN; PAM sequence: TTT
ttcattttcctttaactctt

SEQ ID NO: 379643 - DNA, 20 bp, Artificial Sequence
  Description of Artificial Sequence: Synthetic oligonucleotide
  Target: LAMA2; (+) strand; PAM type: YTN; PAM sequence: TTT
tcattttcctttaactcttt

SEQ ID NO: 379644 - DNA, 20 bp, Artificial Sequence
  Description of Artificial Sequence: Synthetic oligonucleotide
  Target: LAMA2; (+) strand; PAM type: YTN; PAM sequence: TTT
cattttcctttaactctttc

SEQ ID NO: 379645 - DNA, 20 bp, Artificial Sequence
  Description of Artificial Sequence: Synthetic oligonucleotide
  Target: LAMA2; (+) strand; PAM type: YTN; PAM sequence: TTC
attttcctttaactctttct

SEQ ID NO: 379646 - DNA, 20 bp, Artificial Sequence
  Description of Artificial Sequence: Synthetic oligonucleotide
  Target: LAMA2; (+) strand; PAM type: YTN; PAM sequence: TTT
tcctttaactctttctacat

SEQ ID NO: 379647 - DNA, 20 bp, Artificial Sequence
  Description of Artificial Sequence: Synthetic oligonucleotide
  Target: LAMA2; (+) strand; PAM type: YTN; PAM sequence: TTT
cctttaactctttctacatt

SEQ ID NO: 379648 - DNA, 20 bp, Artificial Sequence
  Description of Artificial Sequence: Synthetic oligonucleotide
  Target: LAMA2; (+) strand; PAM type: YTN; PAM sequence: TTC
ctttaactctttctacattt

SEQ ID NO: 379649 - DNA, 20 bp, Artificial Sequence
  Description of Artificial Sequence: Synthetic oligonucleotide
  Target: LAMA2; (+) strand; PAM type: YTN; PAM sequence: CTT
taactctttctacatttaga

SEQ ID NO: 379650 - DNA, 20 bp, Artificial Sequence
  Description of Artificial Sequence: Synthetic oligonucleotide
  Target: LAMA2; (+) strand; PAM type: YTN; PAM sequence: TTT
aactctttctacatttagat

SEQ ID NO: 379651 - DNA, 20 bp, Artificial Sequence
  Description of Artificial Sequence: Synthetic oligonucleotide
  Target: LAMA2; (+) strand; PAM type: YTN; PAM sequence: TTA
actctttctacatttagatt

SEQ ID NO: 379652 - DNA, 20 bp, Artificial Sequence
  Description of Artificial Sequence: Synthetic oligonucleotide
  Target: LAMA2; (+) strand; PAM type: YTN; PAM sequence: CTC
tttctacatttagattcaat

SEQ ID NO: 379653 - DNA, 20 bp, Artificial Sequence
  Description of Artificial Sequence: Synthetic oligonucleotide
  Target: LAMA2; (+) strand; PAM type: YTN; PAM sequence: CTT
tctacatttagattcaattt

SEQ ID NO: 379654 - DNA, 20 bp, Artificial Sequence
  Description of Artificial Sequence: Synthetic oligonucleotide
  Target: LAMA2; (+) strand; PAM type: YTN; PAM sequence: TTT
ctacatttagattcaatttg

SEQ ID NO: 379655 - DNA, 20 bp, Artificial Sequence
  Description of Artificial Sequence: Synthetic oligonucleotide
  Target: LAMA2; (+) strand; PAM type: YTN; PAM sequence: TTC
tacatttagattcaatttgt

SEQ ID NO: 379656 - DNA, 20 bp, Artificial Sequence
  Description of Artificial Sequence: Synthetic oligonucleotide
  Target: LAMA2; (+) strand; PAM type: YTN; PAM sequence: CTA
catttagattcaatttgtgt

SEQ ID NO: 379657 - DNA, 20 bp, Artificial Sequence
  Description of Artificial Sequence: Synthetic oligonucleotide
  Target: LAMA2; (+) strand; PAM type: YTN; PAM sequence: TTT
agattcaatttgtgttagtg

SEQ ID NO: 379658 - DNA, 20 bp, Artificial Sequence
  Description of Artificial Sequence: Synthetic oligonucleotide
  Target: LAMA2; (+) strand; PAM type: YTN; PAM sequence: TTA
gattcaatttgtgttagtgt

SEQ ID NO: 379659 - DNA, 20 bp, Artificial Sequence
  Description of Artificial Sequence: Synthetic oligonucleotide
  Target: LAMA2; (+) strand; PAM type: YTN; PAM sequence: TTC
aatttgtgttagtgtgaaag

SEQ ID NO: 379660 - DNA, 20 bp, Artificial Sequence
  Description of Artificial Sequence: Synthetic oligonucleotide
  Target: LAMA2; (+) strand; PAM type: YTN; PAM sequence: TTT
gtgttagtgtgaaaggctcc

SEQ ID NO: 379661 - DNA, 20 bp, Artificial Sequence
  Description of Artificial Sequence: Synthetic oligonucleotide
  Target: LAMA2; (+) strand; PAM type: YTN; PAM sequence: TTG
tgttagtgtgaaaggctcca

SEQ ID NO: 379662 - DNA, 20 bp, Artificial Sequence
  Description of Artificial Sequence: Synthetic oligonucleotide
  Target: LAMA2; (+) strand; PAM type: YTN; PAM sequence: TTA
gtgtgaaaggctccagtgtc

SEQ ID NO: 379663 - DNA, 20 bp, Artificial Sequence
  Description of Artificial Sequence: Synthetic oligonucleotide
  Target: LAMA2; (+) strand; PAM type: YTN; PAM sequence: CTC
cagtgtccacagatattgtg

SEQ ID NO: 379664 - DNA, 20 bp, Artificial Sequence
  Description of Artificial Sequence: Synthetic oligonucleotide
  Target: LAMA2; (+) strand; PAM type: YTN; PAM sequence: TTG
tggctttcactatgtgaatt

SEQ ID NO: 379665 - DNA, 20 bp, Artificial Sequence
  Description of Artificial Sequence: Synthetic oligonucleotide
  Target: LAMA2; (+) strand; PAM type: YTN; PAM sequence: CTT
tcactatgtgaattagtcaa

SEQ ID NO: 379666 - DNA, 20 bp, Artificial Sequence
  Description of Artificial Sequence: Synthetic oligonucleotide
  Target: LAMA2; (+) strand; PAM type: YTN; PAM sequence: TTT
cactatgtgaattagtcaaa

SEQ ID NO: 379667 - DNA, 20 bp, Artificial Sequence
  Description of Artificial Sequence: Synthetic oligonucleotide
  Target: LAMA2; (+) strand; PAM type: YTN; PAM sequence: TTC
actatgtgaattagtcaaaa

SEQ ID NO: 379668 - DNA, 20 bp, Artificial Sequence
  Description of Artificial Sequence: Synthetic oligonucleotide
  Target: LAMA2; (+) strand; PAM type: YTN; PAM sequence: CTA
tgtgaattagtcaaaaagat

SEQ ID NO: 379669 - DNA, 20 bp, Artificial Sequence
  Description of Artificial Sequence: Synthetic oligonucleotide
  Target: LAMA2; (+) strand; PAM type: YTN; PAM sequence: TTA
gtcaaaaagatttacgtcct

SEQ ID NO: 379670 - DNA, 20 bp, Artificial Sequence
  Description of Artificial Sequence: Synthetic oligonucleotide
  Target: LAMA2; (+) strand; PAM type: YTN; PAM sequence: TTT
acgtcctgccatgcttgccc

SEQ ID NO: 379671 - DNA, 20 bp, Artificial Sequence
  Description of Artificial Sequence: Synthetic oligonucleotide
  Target: LAMA2; (+) strand; PAM type: YTN; PAM sequence: TTA
cgtcctgccatgcttgccca

SEQ ID NO: 379672 - DNA, 20 bp, Artificial Sequence
  Description of Artificial Sequence: Synthetic oligonucleotide
  Target: LAMA2; (+) strand; PAM type: YTN; PAM sequence: CTG
ccatgcttgcccactgcgtg

SEQ ID NO: 379673 - DNA, 20 bp, Artificial Sequence
  Description of Artificial Sequence: Synthetic oligonucleotide
  Target: LAMA2; (+) strand; PAM type: YTN; PAM sequence: CTT
gcccactgcgtgtgagttct

SEQ ID NO: 379674 - DNA, 20 bp, Artificial Sequence
  Description of Artificial Sequence: Synthetic oligonucleotide
  Target: LAMA2; (+) strand; PAM type: YTN; PAM sequence: TTG
cccactgcgtgtgagttctg

SEQ ID NO: 379675 - DNA, 20 bp, Artificial Sequence
  Description of Artificial Sequence: Synthetic oligonucleotide
  Target: LAMA2; (+) strand; PAM type: YTN; PAM sequence: CTG
cgtgtgagttctgttgcttg

SEQ ID NO: 379676 - DNA, 20 bp, Artificial Sequence
  Description of Artificial Sequence: Synthetic oligonucleotide
  Target: LAMA2; (+) strand; PAM type: YTN; PAM sequence: TTC
tgttgcttgtgagaacatca

SEQ ID NO: 379677 - DNA, 20 bp, Artificial Sequence
  Description of Artificial Sequence: Synthetic oligonucleotide
  Target: LAMA2; (+) strand; PAM type: YTN; PAM sequence: CTG
ttgcttgtgagaacatcatc

SEQ ID NO: 379678 - DNA, 20 bp, Artificial Sequence
  Description of Artificial Sequence: Synthetic oligonucleotide
  Target: LAMA2; (+) strand; PAM type: YTN; PAM sequence: TTG
cttgtgagaacatcatcaga

SEQ ID NO: 379679 - DNA, 20 bp, Artificial Sequence
  Description of Artificial Sequence: Synthetic oligonucleotide
  Target: LAMA2; (+) strand; PAM type: YTN; PAM sequence: CTT
gtgagaacatcatcagaatg

SEQ ID NO: 379680 - DNA, 20 bp, Artificial Sequence
  Description of Artificial Sequence: Synthetic oligonucleotide
  Target: LAMA2; (+) strand; PAM type: YTN; PAM sequence: TTG
tgagaacatcatcagaatgg

SEQ ID NO: 379681 - DNA, 20 bp, Artificial Sequence
  Description of Artificial Sequence: Synthetic oligonucleotide
  Target: LAMA2; (+) strand; PAM type: YTN; PAM sequence: CTG
cagatagacatgcagttcgt

SEQ ID NO: 379682 - DNA, 20 bp, Artificial Sequence
  Description of Artificial Sequence: Synthetic oligonucleotide
  Target: LAMA2; (+) strand; PAM type: YTN; PAM sequence: TTC
gtaacttagttttaaagaaa

SEQ ID NO: 379683 - DNA, 20 bp, Artificial Sequence
  Description of Artificial Sequence: Synthetic oligonucleotide
  Target: LAMA2; (+) strand; PAM type: YTN; PAM sequence: CTT
agttttaaagaaatgtccaa

SEQ ID NO: 379684 - DNA, 20 bp, Artificial Sequence
  Description of Artificial Sequence: Synthetic oligonucleotide
  Target: LAMA2; (+) strand; PAM type: YTN; PAM sequence: TTA
gttttaaagaaatgtccaaa

SEQ ID NO: 379685 - DNA, 20 bp, Artificial Sequence
  Description of Artificial Sequence: Synthetic oligonucleotide
  Target: LAMA2; (+) strand; PAM type: YTN; PAM sequence: TTT
taaagaaatgtccaaagcgt

SEQ ID NO: 379686 - DNA, 20 bp, Artificial Sequence
  Description of Artificial Sequence: Synthetic oligonucleotide
  Target: LAMA2; (+) strand; PAM type: YTN; PAM sequence: TTT
aaagaaatgtccaaagcgta

SEQ ID NO: 379687 - DNA, 20 bp, Artificial Sequence
  Description of Artificial Sequence: Synthetic oligonucleotide
  Target: LAMA2; (+) strand; PAM type: YTN; PAM sequence: TTA
aagaaatgtccaaagcgtaa

SEQ ID NO: 379688 - DNA, 20 bp, Artificial Sequence
  Description of Artificial Sequence: Synthetic oligonucleotide
  Target: LAMA2; (+) strand; PAM type: YTN; PAM sequence: TTC
agccttctgctgtattttga

SEQ ID NO: 379689 - DNA, 20 bp, Artificial Sequence
  Description of Artificial Sequence: Synthetic oligonucleotide
  Target: LAMA2; (+) strand; PAM type: YTN; PAM sequence: CTT
ctgctgtattttgacccctt

SEQ ID NO: 379690 - DNA, 20 bp, Artificial Sequence
  Description of Artificial Sequence: Synthetic oligonucleotide
  Target: LAMA2; (+) strand; PAM type: YTN; PAM sequence: TTC
tgctgtattttgaccccttg

SEQ ID NO: 379691 - DNA, 20 bp, Artificial Sequence
  Description of Artificial Sequence: Synthetic oligonucleotide
  Target: LAMA2; (+) strand; PAM type: YTN; PAM sequence: CTG
ctgtattttgaccccttgca

SEQ ID NO: 379692 - DNA, 20 bp, Artificial Sequence
  Description of Artificial Sequence: Synthetic oligonucleotide
  Target: LAMA2; (+) strand; PAM type: YTN; PAM sequence: CTG
tattttgaccccttgcaggt

SEQ ID NO: 379693 - DNA, 20 bp, Artificial Sequence
  Description of Artificial Sequence: Synthetic oligonucleotide
  Target: LAMA2; (+) strand; PAM type: YTN; PAM sequence: TTT
tgaccccttgcaggtgactc

SEQ ID NO: 379694 - DNA, 20 bp, Artificial Sequence
  Description of Artificial Sequence: Synthetic oligonucleotide
  Target: LAMA2; (+) strand; PAM type: YTN; PAM sequence: TTT
gaccccttgcaggtgactct

SEQ ID NO: 379695 - DNA, 20 bp, Artificial Sequence
  Description of Artificial Sequence: Synthetic oligonucleotide
  Target: LAMA2; (+) strand; PAM type: YTN; PAM sequence: TTG
accccttgcaggtgactctg

SEQ ID NO: 379696 - DNA, 20 bp, Artificial Sequence
  Description of Artificial Sequence: Synthetic oligonucleotide
  Target: LAMA2; (+) strand; PAM type: YTN; PAM sequence: CTT
gcaggtgactctgaaggctg

SEQ ID NO: 379697 - DNA, 20 bp, Artificial Sequence
  Description of Artificial Sequence: Synthetic oligonucleotide
  Target: LAMA2; (+) strand; PAM type: YTN; PAM sequence: TTG
caggtgactctgaaggctga

SEQ ID NO: 379698 - DNA, 20 bp, Artificial Sequence
  Description of Artificial Sequence: Synthetic oligonucleotide
  Target: LAMA2; (+) strand; PAM type: YTN; PAM sequence: CTC
tgaaggctgagcagaccatt

SEQ ID NO: 379699 - DNA, 20 bp, Artificial Sequence
  Description of Artificial Sequence: Synthetic oligonucleotide
  Target: LAMA2; (+) strand; PAM type: YTN; PAM sequence: CTG
aaggctgagcagaccattct

SEQ ID NO: 379700 - DNA, 20 bp, Artificial Sequence
  Description of Artificial Sequence: Synthetic oligonucleotide
  Target: LAMA2; (+) strand; PAM type: YTN; PAM sequence: CTG
agcagaccattctacccctg

SEQ ID NO: 379701 - DNA, 20 bp, Artificial Sequence
  Description of Artificial Sequence: Synthetic oligonucleotide
  Target: LAMA2; (+) strand; PAM type: YTN; PAM sequence: TTC
tacccctggtagatgaggct

SEQ ID NO: 379702 - DNA, 20 bp, Artificial Sequence
  Description of Artificial Sequence: Synthetic oligonucleotide
  Target: LAMA2; (+) strand; PAM type: YTN; PAM sequence: CTA
cccctggtagatgaggctct

SEQ ID NO: 379703 - DNA, 20 bp, Artificial Sequence
  Description of Artificial Sequence: Synthetic oligonucleotide
  Target: LAMA2; (+) strand; PAM type: YTN; PAM sequence: CTG
gtagatgaggctctgcagca

SEQ ID NO: 379704 - DNA, 20 bp, Artificial Sequence
  Description of Artificial Sequence: Synthetic oligonucleotide
  Target: LAMA2; (+) strand; PAM type: YTN; PAM sequence: CTC
tgcagcacacgaccaccaag

SEQ ID NO: 379705 - DNA, 20 bp, Artificial Sequence
  Description of Artificial Sequence: Synthetic oligonucleotide
  Target: LAMA2; (+) strand; PAM type: YTN; PAM sequence: CTG
cagcacacgaccaccaaggg

SEQ ID NO: 379706 - DNA, 20 bp, Artificial Sequence
  Description of Artificial Sequence: Synthetic oligonucleotide
  Target: LAMA2; (+) strand; PAM type: YTN; PAM sequence: TTG
tttttcaacatccagagatt

SEQ ID NO: 379707 - DNA, 20 bp, Artificial Sequence
  Description of Artificial Sequence: Synthetic oligonucleotide
  Target: LAMA2; (+) strand; PAM type: YTN; PAM sequence: TTT
ttcaacatccagagattgtt

SEQ ID NO: 379708 - DNA, 20 bp, Artificial Sequence
  Description of Artificial Sequence: Synthetic oligonucleotide
  Target: LAMA2; (+) strand; PAM type: YTN; PAM sequence: TTT
tcaacatccagagattgttg

SEQ ID NO: 379709 - DNA, 20 bp, Artificial Sequence
  Description of Artificial Sequence: Synthetic oligonucleotide
  Target: LAMA2; (+) strand; PAM type: YTN; PAM sequence: TTT
caacatccagagattgttgc

SEQ ID NO: 379710 - DNA, 20 bp, Artificial Sequence
  Description of Artificial Sequence: Synthetic oligonucleotide
  Target: LAMA2; (+) strand; PAM type: YTN; PAM sequence: TTC
aacatccagagattgttgcc

SEQ ID NO: 379711 - DNA, 20 bp, Artificial Sequence
  Description of Artificial Sequence: Synthetic oligonucleotide
  Target: LAMA2; (+) strand; PAM type: YTN; PAM sequence: TTG
ttgcccacatggacctgatg

SEQ ID NO: 379712 - DNA, 20 bp, Artificial Sequence
  Description of Artificial Sequence: Synthetic oligonucleotide
  Target: LAMA2; (+) strand; PAM type: YTN; PAM sequence: TTG
cccacatggacctgatgaga

SEQ ID NO: 379713 - DNA, 20 bp, Artificial Sequence
  Description of Artificial Sequence: Synthetic oligonucleotide
  Target: LAMA2; (+) strand; PAM type: YTN; PAM sequence: CTG
atgagagaagatctccattt

SEQ ID NO: 379714 - DNA, 20 bp, Artificial Sequence
  Description of Artificial Sequence: Synthetic oligonucleotide
  Target: LAMA2; (+) strand; PAM type: YTN; PAM sequence: CTC
catttggaacctttttattg

SEQ ID NO: 379715 - DNA, 20 bp, Artificial Sequence
  Description of Artificial Sequence: Synthetic oligonucleotide
  Target: LAMA2; (+) strand; PAM type: YTN; PAM sequence: TTT
ggaacctttttattggaaac

SEQ ID NO: 379716 - DNA, 20 bp, Artificial Sequence
  Description of Artificial Sequence: Synthetic oligonucleotide
  Target: LAMA2; (+) strand; PAM type: YTN; PAM sequence: TTG
gaacctttttattggaaact

SEQ ID NO: 379717 - DNA, 20 bp, Artificial Sequence
  Description of Artificial Sequence: Synthetic oligonucleotide
  Target: LAMA2; (+) strand; PAM type: YTN; PAM sequence: CTT
tttattggaaacttccagaa

SEQ ID NO: 379718 - DNA, 20 bp, Artificial Sequence
  Description of Artificial Sequence: Synthetic oligonucleotide
  Target: LAMA2; (+) strand; PAM type: YTN; PAM sequence: TTT
ttattggaaacttccagaac

SEQ ID NO: 379719 - DNA, 20 bp, Artificial Sequence
  Description of Artificial Sequence: Synthetic oligonucleotide
  Target: LAMA2; (+) strand; PAM type: YTN; PAM sequence: TTT
tattggaaacttccagaaca

SEQ ID NO: 379720 - DNA, 20 bp, Artificial Sequence
  Description of Artificial Sequence: Synthetic oligonucleotide
  Target: LAMA2; (+) strand; PAM type: YTN; PAM sequence: TTT
attggaaacttccagaacaa

SEQ ID NO: 379721 - DNA, 20 bp, Artificial Sequence
  Description of Artificial Sequence: Synthetic oligonucleotide
  Target: LAMA2; (+) strand; PAM type: YTN; PAM sequence: TTA
ttggaaacttccagaacaat

SEQ ID NO: 379722 - DNA, 20 bp, Artificial Sequence
  Description of Artificial Sequence: Synthetic oligonucleotide
  Target: LAMA2; (+) strand; PAM type: YTN; PAM sequence: TTG
gaaacttccagaacaatttg

SEQ ID NO: 379723 - DNA, 20 bp, Artificial Sequence
  Description of Artificial Sequence: Synthetic oligonucleotide
  Target: LAMA2; (+) strand; PAM type: YTN; PAM sequence: CTT
ccagaacaatttgaaggaaa

SEQ ID NO: 379724 - DNA, 20 bp, Artificial Sequence
  Description of Artificial Sequence: Synthetic oligonucleotide
  Target: LAMA2; (+) strand; PAM type: YTN; PAM sequence: TTC
cagaacaatttgaaggaaag

SEQ ID NO: 379725 - DNA, 20 bp, Artificial Sequence
  Description of Artificial Sequence: Synthetic oligonucleotide
  Target: LAMA2; (+) strand; PAM type: YTN; PAM sequence: TTT
gaaggaaagaaggtaagcac

SEQ ID NO: 379726 - DNA, 20 bp, Artificial Sequence
  Description of Artificial Sequence: Synthetic oligonucleotide
  Target: LAMA2; (+) strand; PAM type: YTN; PAM sequence: TTG
aaggaaagaaggtaagcaca

SEQ ID NO: 379727 - DNA, 20 bp, Artificial Sequence
  Description of Artificial Sequence: Synthetic oligonucleotide
  Target: LAMA2; (+) strand; PAM type: YTN; PAM sequence: CTT
taatgtcaagtgagaacaag

SEQ ID NO: 379728 - DNA, 20 bp, Artificial Sequence
  Description of Artificial Sequence: Synthetic oligonucleotide
  Target: LAMA2; (+) strand; PAM type: YTN; PAM sequence: TTT
aatgtcaagtgagaacaaga

SEQ ID NO: 379729 - DNA, 20 bp, Artificial Sequence
  Description of Artificial Sequence: Synthetic oligonucleotide
  Target: LAMA2; (+) strand; PAM type: YTN; PAM sequence: TTA
atgtcaagtgagaacaagat

SEQ ID NO: 379730 - DNA, 20 bp, Artificial Sequence
  Description of Artificial Sequence: Synthetic oligonucleotide
  Target: LAMA2; (+) strand; PAM type: YTN; PAM sequence: CTT
tttagaatcacaccatttgg

SEQ ID NO: 379731 - DNA, 20 bp, Artificial Sequence
  Description of Artificial Sequence: Synthetic oligonucleotide
  Target: LAMA2; (+) strand; PAM type: YTN; PAM sequence: TTT
ttagaatcacaccatttgga

SEQ ID NO: 379732 - DNA, 20 bp, Artificial Sequence
  Description of Artificial Sequence: Synthetic oligonucleotide
  Target: LAMA2; (+) strand; PAM type: YTN; PAM sequence: TTT
tagaatcacaccatttggag

SEQ ID NO: 379733 - DNA, 20 bp, Artificial Sequence
  Description of Artificial Sequence: Synthetic oligonucleotide
  Target: LAMA2; (+) strand; PAM type: YTN; PAM sequence: TTT
agaatcacaccatttggaga

SEQ ID NO: 379734 - DNA, 20 bp, Artificial Sequence
  Description of Artificial Sequence: Synthetic oligonucleotide
  Target: LAMA2; (+) strand; PAM type: YTN; PAM sequence: TTA
gaatcacaccatttggagat

SEQ ID NO: 379735 - DNA, 20 bp, Artificial Sequence
  Description of Artificial Sequence: Synthetic oligonucleotide
  Target: LAMA2; (+) strand; PAM type: YTN; PAM sequence: TTT
ggagatttatccaattcctc

SEQ ID NO: 379736 - DNA, 20 bp, Artificial Sequence
  Description of Artificial Sequence: Synthetic oligonucleotide
  Target: LAMA2; (+) strand; PAM type: YTN; PAM sequence: TTG
gagatttatccaattcctca

SEQ ID NO: 379737 - DNA, 20 bp, Artificial Sequence
  Description of Artificial Sequence: Synthetic oligonucleotide
  Target: LAMA2; (+) strand; PAM type: YTN; PAM sequence: TTT
atccaattcctcattcttct

SEQ ID NO: 379738 - DNA, 20 bp, Artificial Sequence
  Description of Artificial Sequence: Synthetic oligonucleotide
  Target: LAMA2; (+) strand; PAM type: YTN; PAM sequence: TTA
tccaattcctcattcttctt

SEQ ID NO: 379739 - DNA, 20 bp, Artificial Sequence
  Description of Artificial Sequence: Synthetic oligonucleotide
  Target: LAMA2; (+) strand; PAM type: YTN; PAM sequence: TTC
ctcattcttctttttatttt

SEQ ID NO: 379740 - DNA, 20 bp, Artificial Sequence
  Description of Artificial Sequence: Synthetic oligonucleotide
  Target: LAMA2; (+) strand; PAM type: YTN; PAM sequence: CTC
attcttctttttattttgtc

SEQ ID NO: 379741 - DNA, 20 bp, Artificial Sequence
  Description of Artificial Sequence: Synthetic oligonucleotide
  Target: LAMA2; (+) strand; PAM type: YTN; PAM sequence: TTC
ttctttttattttgtcagtt

SEQ ID NO: 379742 - DNA, 20 bp, Artificial Sequence
  Description of Artificial Sequence: Synthetic oligonucleotide
  Target: LAMA2; (+) strand; PAM type: YTN; PAM sequence: CTT
ctttttattttgtcagttga

SEQ ID NO: 379743 - DNA, 20 bp, Artificial Sequence
  Description of Artificial Sequence: Synthetic oligonucleotide
  Target: LAMA2; (+) strand; PAM type: YTN; PAM sequence: TTC
tttttattttgtcagttgat

SEQ ID NO: 379744 - DNA, 20 bp, Artificial Sequence
  Description of Artificial Sequence: Synthetic oligonucleotide
  Target: LAMA2; (+) strand; PAM type: YTN; PAM sequence: CTT
tttattttgtcagttgatgg

SEQ ID NO: 379745 - DNA, 20 bp, Artificial Sequence
  Description of Artificial Sequence: Synthetic oligonucleotide
  Target: LAMA2; (+) strand; PAM type: YTN; PAM sequence: TTT
ttattttgtcagttgatggc

SEQ ID NO: 379746 - DNA, 20 bp, Artificial Sequence
  Description of Artificial Sequence: Synthetic oligonucleotide
  Target: LAMA2; (+) strand; PAM type: YTN; PAM sequence: TTT
tattttgtcagttgatggcc

SEQ ID NO: 379747 - DNA, 20 bp, Artificial Sequence
  Description of Artificial Sequence: Synthetic oligonucleotide
  Target: LAMA2; (+) strand; PAM type: YTN; PAM sequence: TTT
attttgtcagttgatggcct

SEQ ID NO: 379748 - DNA, 20 bp, Artificial Sequence
  Description of Artificial Sequence: Synthetic oligonucleotide
  Target: LAMA2; (+) strand; PAM type: YTN; PAM sequence: TTA
ttttgtcagttgatggccta

SEQ ID NO: 379749 - DNA, 20 bp, Artificial Sequence
  Description of Artificial Sequence: Synthetic oligonucleotide
  Target: LAMA2; (+) strand; PAM type: YTN; PAM sequence: TTT
tgtcagttgatggcctatgg

SEQ ID NO: 379750 - DNA, 20 bp, Artificial Sequence
  Description of Artificial Sequence: Synthetic oligonucleotide
  Target: LAMA2; (+) strand; PAM type: YTN; PAM sequence: TTT
gtcagttgatggcctatggg

SEQ ID NO: 379751 - DNA, 20 bp, Artificial Sequence
  Description of Artificial Sequence: Synthetic oligonucleotide
  Target: LAMA2; (+) strand; PAM type: YTN; PAM sequence: TTG
tcagttgatggcctatgggg

SEQ ID NO: 379752 - DNA, 20 bp, Artificial Sequence
  Description of Artificial Sequence: Synthetic oligonucleotide
  Target: LAMA2; (+) strand; PAM type: YTN; PAM sequence: TTG
atggcctatgggggcaaact

SEQ ID NO: 379753 - DNA, 20 bp, Artificial Sequence
  Description of Artificial Sequence: Synthetic oligonucleotide
  Target: LAMA2; (+) strand; PAM type: YTN; PAM sequence: CTA
tgggggcaaactcaagtatg

SEQ ID NO: 379754 - DNA, 20 bp, Artificial Sequence
  Description of Artificial Sequence: Synthetic oligonucleotide
  Target: LAMA2; (+) strand; PAM type: YTN; PAM sequence: CTC
aagtatgcaatctatttcga

SEQ ID NO: 379755 - DNA, 20 bp, Artificial Sequence
  Description of Artificial Sequence: Synthetic oligonucleotide
  Target: LAMA2; (+) strand; PAM type: YTN; PAM sequence: CTA
tttcgaggctcgggaagaaa

SEQ ID NO: 379756 - DNA, 20 bp, Artificial Sequence
  Description of Artificial Sequence: Synthetic oligonucleotide
  Target: LAMA2; (+) strand; PAM type: YTN; PAM sequence: TTT
cgaggctcgggaagaaacag

SEQ ID NO: 379757 - DNA, 20 bp, Artificial Sequence
  Description of Artificial Sequence: Synthetic oligonucleotide
  Target: LAMA2; (+) strand; PAM type: YTN; PAM sequence: TTC
gaggctcgggaagaaacagg

SEQ ID NO: 379758 - DNA, 20 bp, Artificial Sequence
  Description of Artificial Sequence: Synthetic oligonucleotide
  Target: LAMA2; (+) strand; PAM type: YTN; PAM sequence: CTC
gggaagaaacaggtttctct

SEQ ID NO: 379759 - DNA, 20 bp, Artificial Sequence
  Description of Artificial Sequence: Synthetic oligonucleotide
  Target: LAMA2; (+) strand; PAM type: YTN; PAM sequence: TTT
ctctacatataatcctcaag

SEQ ID NO: 379760 - DNA, 20 bp, Artificial Sequence
  Description of Artificial Sequence: Synthetic oligonucleotide
  Target: LAMA2; (+) strand; PAM type: YTN; PAM sequence: TTC
tctacatataatcctcaagt

SEQ ID NO: 379761 - DNA, 20 bp, Artificial Sequence
  Description of Artificial Sequence: Synthetic oligonucleotide
  Target: LAMA2; (+) strand; PAM type: YTN; PAM sequence: CTC
tacatataatcctcaagtga

SEQ ID NO: 379762 - DNA, 20 bp, Artificial Sequence
  Description of Artificial Sequence: Synthetic oligonucleotide
  Target: LAMA2; (+) strand; PAM type: YTN; PAM sequence: CTA
catataatcctcaagtgatc

SEQ ID NO: 379763 - DNA, 20 bp, Artificial Sequence
  Description of Artificial Sequence: Synthetic oligonucleotide
  Target: LAMA2; (+) strand; PAM type: YTN; PAM sequence: CTC
aagtgatcattcgaggtggg

SEQ ID NO: 379764 - DNA, 20 bp, Artificial Sequence
  Description of Artificial Sequence: Synthetic oligonucleotide
  Target: LAMA2; (+) strand; PAM type: YTN; PAM sequence: TTC
gaggtgggacacctactcat

SEQ ID NO: 379765 - DNA, 20 bp, Artificial Sequence
  Description of Artificial Sequence: Synthetic oligonucleotide
  Target: LAMA2; (+) strand; PAM type: YTN; PAM sequence: CTA
ctcatgctagaattatcgtc

SEQ ID NO: 379766 - DNA, 20 bp, Artificial Sequence
  Description of Artificial Sequence: Synthetic oligonucleotide
  Target: LAMA2; (+) strand; PAM type: YTN; PAM sequence: CTC
atgctagaattatcgtcagg

SEQ ID NO: 379767 - DNA, 20 bp, Artificial Sequence
  Description of Artificial Sequence: Synthetic oligonucleotide
  Target: LAMA2; (+) strand; PAM type: YTN; PAM sequence: CTA
gaattatcgtcaggcatatg

SEQ ID NO: 379768 - DNA, 20 bp, Artificial Sequence
  Description of Artificial Sequence: Synthetic oligonucleotide
  Target: LAMA2; (+) strand; PAM type: YTN; PAM sequence: TTA
tcgtcaggcatatggctgct

SEQ ID NO: 379769 - DNA, 20 bp, Artificial Sequence
  Description of Artificial Sequence: Synthetic oligonucleotide
  Target: LAMA2; (+) strand; PAM type: YTN; PAM sequence: CTG
ctcctctgattggccaattg

SEQ ID NO: 379770 - DNA, 20 bp, Artificial Sequence
  Description of Artificial Sequence: Synthetic oligonucleotide
  Target: LAMA2; (+) strand; PAM type: YTN; PAM sequence: CTC
ctctgattggccaattgaca

SEQ ID NO: 379771 - DNA, 20 bp, Artificial Sequence
  Description of Artificial Sequence: Synthetic oligonucleotide
  Target: LAMA2; (+) strand; PAM type: YTN; PAM sequence: CTC
tgattggccaattgacaagg

SEQ ID NO: 379772 - DNA, 20 bp, Artificial Sequence
  Description of Artificial Sequence: Synthetic oligonucleotide
  Target: LAMA2; (+) strand; PAM type: YTN; PAM sequence: CTG
attggccaattgacaaggca

SEQ ID NO: 379773 - DNA, 20 bp, Artificial Sequence
  Description of Artificial Sequence: Synthetic oligonucleotide
  Target: LAMA2; (+) strand; PAM type: YTN; PAM sequence: TTG
gccaattgacaaggcatgaa

SEQ ID NO: 379774 - DNA, 20 bp, Artificial Sequence
  Description of Artificial Sequence: Synthetic oligonucleotide
  Target: LAMA2; (+) strand; PAM type: YTN; PAM sequence: TTG
acaaggcatgaaattgaaat

SEQ ID NO: 379775 - DNA, 20 bp, Artificial Sequence
  Description of Artificial Sequence: Synthetic oligonucleotide
  Target: LAMA2; (+) strand; PAM type: YTN; PAM sequence: TTG
aaatgacagaggtaaagtta

SEQ ID NO: 379776 - DNA, 20 bp, Artificial Sequence
  Description of Artificial Sequence: Synthetic oligonucleotide
  Target: LAMA2; (+) strand; PAM type: YTN; PAM sequence: TTA
gtcattgtttggtgcaaaga

SEQ ID NO: 379777 - DNA, 20 bp, Artificial Sequence
  Description of Artificial Sequence: Synthetic oligonucleotide
  Target: LAMA2; (+) strand; PAM type: YTN; PAM sequence: TTG
tttggtgcaaagataccaat

SEQ ID NO: 379778 - DNA, 20 bp, Artificial Sequence
  Description of Artificial Sequence: Synthetic oligonucleotide
  Target: LAMA2; (+) strand; PAM type: YTN; PAM sequence: TTT
ggtgcaaagataccaatcaa

SEQ ID NO: 379779 - DNA, 20 bp, Artificial Sequence
  Description of Artificial Sequence: Synthetic oligonucleotide
  Target: LAMA2; (+) strand; PAM type: YTN; PAM sequence: TTG
gtgcaaagataccaatcaat

SEQ ID NO: 379780 - DNA, 20 bp, Artificial Sequence
  Description of Artificial Sequence: Synthetic oligonucleotide
  Target: LAMA2; (+) strand; PAM type: YTN; PAM sequence: TTT
tgcattcagttttgtcatag

SEQ ID NO: 379781 - DNA, 20 bp, Artificial Sequence
  Description of Artificial Sequence: Synthetic oligonucleotide
  Target: LAMA2; (+) strand; PAM type: YTN; PAM sequence: TTT
gcattcagttttgtcatagt

SEQ ID NO: 379782 - DNA, 20 bp, Artificial Sequence
  Description of Artificial Sequence: Synthetic oligonucleotide
  Target: LAMA2; (+) strand; PAM type: YTN; PAM sequence: TTG
cattcagttttgtcatagtg

SEQ ID NO: 379783 - DNA, 20 bp, Artificial Sequence
  Description of Artificial Sequence: Synthetic oligonucleotide
  Target: LAMA2; (+) strand; PAM type: YTN; PAM sequence: TTC
agttttgtcatagtgatttc

SEQ ID NO: 379784 - DNA, 20 bp, Artificial Sequence
  Description of Artificial Sequence: Synthetic oligonucleotide
  Target: LAMA2; (+) strand; PAM type: YTN; PAM sequence: TTT
tgtcatagtgatttctcttc

SEQ ID NO: 379785 - DNA, 20 bp, Artificial Sequence
  Description of Artificial Sequence: Synthetic oligonucleotide
  Target: LAMA2; (+) strand; PAM type: YTN; PAM sequence: TTT
gtcatagtgatttctcttct

SEQ ID NO: 379786 - DNA, 20 bp, Artificial Sequence
  Description of Artificial Sequence: Synthetic oligonucleotide
  Target: LAMA2; (+) strand; PAM type: YTN; PAM sequence: TTG
tcatagtgatttctcttctt

SEQ ID NO: 379787 - DNA, 20 bp, Artificial Sequence
  Description of Artificial Sequence: Synthetic oligonucleotide
  Target: LAMA2; (+) strand; PAM type: YTN; PAM sequence: TTT
ctcttcttgttaacagaaag

SEQ ID NO: 379788 - DNA, 20 bp, Artificial Sequence
  Description of Artificial Sequence: Synthetic oligonucleotide
  Target: LAMA2; (+) strand; PAM type: YTN; PAM sequence: TTC
tcttcttgttaacagaaaga

SEQ ID NO: 379789 - DNA, 20 bp, Artificial Sequence
  Description of Artificial Sequence: Synthetic oligonucleotide
  Target: LAMA2; (+) strand; PAM type: YTN; PAM sequence: CTC
ttcttgttaacagaaagaat

SEQ ID NO: 379790 - DNA, 20 bp, Artificial Sequence
  Description of Artificial Sequence: Synthetic oligonucleotide
  Target: LAMA2; (+) strand; PAM type: YTN; PAM sequence: CTT
cttgttaacagaaagaatgg

SEQ ID NO: 379791 - DNA, 20 bp, Artificial Sequence
  Description of Artificial Sequence: Synthetic oligonucleotide
  Target: LAMA2; (+) strand; PAM type: YTN; PAM sequence: TTC
ttgttaacagaaagaatgga

SEQ ID NO: 379792 - DNA, 20 bp, Artificial Sequence
  Description of Artificial Sequence: Synthetic oligonucleotide
  Target: LAMA2; (+) strand; PAM type: YTN; PAM sequence: CTT
gttaacagaaagaatggaaa

SEQ ID NO: 379793 - DNA, 20 bp, Artificial Sequence
  Description of Artificial Sequence: Synthetic oligonucleotide
  Target: LAMA2; (+) strand; PAM type: YTN; PAM sequence: TTG
ttaacagaaagaatggaaat

SEQ ID NO: 379794 - DNA, 20 bp, Artificial Sequence
  Description of Artificial Sequence: Synthetic oligonucleotide
  Target: LAMA2; (+) strand; PAM type: YTN; PAM sequence: TTA
acagaaagaatggaaatatt

SEQ ID NO: 379795 - DNA, 20 bp, Artificial Sequence
  Description of Artificial Sequence: Synthetic oligonucleotide
  Target: LAMA2; (+) strand; PAM type: YTN; PAM sequence: TTA
tggggatgatcctcgagtcc

SEQ ID NO: 379796 - DNA, 20 bp, Artificial Sequence
  Description of Artificial Sequence: Synthetic oligonucleotide
  Target: LAMA2; (+) strand; PAM type: YTN; PAM sequence: CTC
gagtccatagaactgtgacc

SEQ ID NO: 379797 - DNA, 20 bp, Artificial Sequence
  Description of Artificial Sequence: Synthetic oligonucleotide
  Target: LAMA2; (+) strand; PAM type: YTN; PAM sequence: CTG
tgacccgagaagacttcttg

SEQ ID NO: 379798 - DNA, 20 bp, Artificial Sequence
  Description of Artificial Sequence: Synthetic oligonucleotide
  Target: LAMA2; (+) strand; PAM type: YTN; PAM sequence: CTT
cttggatatactatatgata

SEQ ID NO: 379799 - DNA, 20 bp, Artificial Sequence
  Description of Artificial Sequence: Synthetic oligonucleotide
  Target: LAMA2; (+) strand; PAM type: YTN; PAM sequence: TTC
ttggatatactatatgatat

SEQ ID NO: 379800 - DNA, 20 bp, Artificial Sequence
  Description of Artificial Sequence: Synthetic oligonucleotide
  Target: LAMA2; (+) strand; PAM type: YTN; PAM sequence: CTT
ggatatactatatgatattc

SEQ ID NO: 379801 - DNA, 20 bp, Artificial Sequence
  Description of Artificial Sequence: Synthetic oligonucleotide
  Target: LAMA2; (+) strand; PAM type: YTN; PAM sequence: TTG
gatatactatatgatattca

SEQ ID NO: 379802 - DNA, 20 bp, Artificial Sequence
  Description of Artificial Sequence: Synthetic oligonucleotide
  Target: LAMA2; (+) strand; PAM type: YTN; PAM sequence: CTA
tatgatattcattacattct

SEQ ID NO: 379803 - DNA, 20 bp, Artificial Sequence
  Description of Artificial Sequence: Synthetic oligonucleotide
  Target: LAMA2; (+) strand; PAM type: YTN; PAM sequence: TTC
attacattcttatcaaagct

SEQ ID NO: 379804 - DNA, 20 bp, Artificial Sequence
  Description of Artificial Sequence: Synthetic oligonucleotide
  Target: LAMA2; (+) strand; PAM type: YTN; PAM sequence: TTA
cattcttatcaaagctactt

SEQ ID NO: 379805 - DNA, 20 bp, Artificial Sequence
  Description of Artificial Sequence: Synthetic oligonucleotide
  Target: LAMA2; (+) strand; PAM type: YTN; PAM sequence: TTC
ttatcaaagctacttatgga

SEQ ID NO: 379806 - DNA, 20 bp, Artificial Sequence
  Description of Artificial Sequence: Synthetic oligonucleotide
  Target: LAMA2; (+) strand; PAM type: YTN; PAM sequence: CTT
atcaaagctacttatggaaa

SEQ ID NO: 379807 - DNA, 20 bp, Artificial Sequence
  Description of Artificial Sequence: Synthetic oligonucleotide
  Target: LAMA2; (+) strand; PAM type: YTN; PAM sequence: TTA
tcaaagctacttatggaaat

SEQ ID NO: 379808 - DNA, 20 bp, Artificial Sequence
  Description of Artificial Sequence: Synthetic oligonucleotide
  Target: LAMA2; (+) strand; PAM type: YTN; PAM sequence: CTA
cttatggaaatttcatgcga

SEQ ID NO: 379809 - DNA, 20 bp, Artificial Sequence
  Description of Artificial Sequence: Synthetic oligonucleotide
  Target: LAMA2; (+) strand; PAM type: YTN; PAM sequence: CTT
atggaaatttcatgcgacaa

SEQ ID NO: 379810 - DNA, 20 bp, Artificial Sequence
  Description of Artificial Sequence: Synthetic oligonucleotide
  Target: LAMA2; (+) strand; PAM type: YTN; PAM sequence: TTA
tggaaatttcatgcgacaaa

SEQ ID NO: 379811 - DNA, 20 bp, Artificial Sequence
  Description of Artificial Sequence: Synthetic oligonucleotide
  Target: LAMA2; (+) strand; PAM type: YTN; PAM sequence: TTT
catgcgacaaagcaggtaaa

SEQ ID NO: 379812 - DNA, 20 bp, Artificial Sequence
  Description of Artificial Sequence: Synthetic oligonucleotide
  Target: LAMA2; (+) strand; PAM type: YTN; PAM sequence: TTC
atgcgacaaagcaggtaaac

SEQ ID NO: 379813 - DNA, 20 bp, Artificial Sequence
  Description of Artificial Sequence: Synthetic oligonucleotide
  Target: LAMA2; (+) strand; PAM type: YTN; PAM sequence: CTC
taatagaaaatattcaagct

SEQ ID NO: 379814 - DNA, 20 bp, Artificial Sequence
  Description of Artificial Sequence: Synthetic oligonucleotide
  Target: LAMA2; (+) strand; PAM type: YTN; PAM sequence: CTA
atagaaaatattcaagctct

SEQ ID NO: 379815 - DNA, 20 bp, Artificial Sequence
  Description of Artificial Sequence: Synthetic oligonucleotide
  Target: LAMA2; (+) strand; PAM type: YTN; PAM sequence: TTC
aagctcttattttagagtct

SEQ ID NO: 379816 - DNA, 20 bp, Artificial Sequence
  Description of Artificial Sequence: Synthetic oligonucleotide
  Target: LAMA2; (+) strand; PAM type: YTN; PAM sequence: CTC
ttattttagagtctgtaagg

SEQ ID NO: 379817 - DNA, 20 bp, Artificial Sequence
  Description of Artificial Sequence: Synthetic oligonucleotide
  Target: LAMA2; (+) strand; PAM type: YTN; PAM sequence: CTT
attttagagtctgtaaggaa

SEQ ID NO: 379818 - DNA, 20 bp, Artificial Sequence
  Description of Artificial Sequence: Synthetic oligonucleotide
  Target: LAMA2; (+) strand; PAM type: YTN; PAM sequence: TTA
ttttagagtctgtaaggaag

SEQ ID NO: 379819 - DNA, 20 bp, Artificial Sequence
  Description of Artificial Sequence: Synthetic oligonucleotide
  Target: LAMA2; (+) strand; PAM type: YTN; PAM sequence: TTT
tagagtctgtaaggaaggtt

SEQ ID NO: 379820 - DNA, 20 bp, Artificial Sequence
  Description of Artificial Sequence: Synthetic oligonucleotide
  Target: LAMA2; (+) strand; PAM type: YTN; PAM sequence: TTT
agagtctgtaaggaaggtta

SEQ ID NO: 379821 - DNA, 20 bp, Artificial Sequence
  Description of Artificial Sequence: Synthetic oligonucleotide
  Target: LAMA2; (+) strand; PAM type: YTN; PAM sequence: TTA
gagtctgtaaggaaggttat

SEQ ID NO: 379822 - DNA, 20 bp, Artificial Sequence
  Description of Artificial Sequence: Synthetic oligonucleotide
  Target: LAMA2; (+) strand; PAM type: YTN; PAM sequence: CTG
taaggaaggttattgaccta

SEQ ID NO: 379823 - DNA, 20 bp, Artificial Sequence
  Description of Artificial Sequence: Synthetic oligonucleotide
  Target: LAMA2; (+) strand; PAM type: YTN; PAM sequence: TTA
ttgacctacagatatcagat

SEQ ID NO: 379824 - DNA, 20 bp, Artificial Sequence
  Description of Artificial Sequence: Synthetic oligonucleotide
  Target: LAMA2; (+) strand; PAM type: YTN; PAM sequence: TTG
acctacagatatcagataag

SEQ ID NO: 379825 - DNA, 20 bp, Artificial Sequence
  Description of Artificial Sequence: Synthetic oligonucleotide
  Target: LAMA2; (+) strand; PAM type: YTN; PAM sequence: CTA
cagatatcagataagaaaga

SEQ ID NO: 379826 - DNA, 20 bp, Artificial Sequence
  Description of Artificial Sequence: Synthetic oligonucleotide
  Target: LAMA2; (+) strand; PAM type: YTN; PAM sequence: TTG
gaaagtgattggttttgcag

SEQ ID NO: 379827 - DNA, 20 bp, Artificial Sequence
  Description of Artificial Sequence: Synthetic oligonucleotide
  Target: LAMA2; (+) strand; PAM type: YTN; PAM sequence: TTG
gttttgcagtataatgatag

SEQ ID NO: 379828 - DNA, 20 bp, Artificial Sequence
  Description of Artificial Sequence: Synthetic oligonucleotide
  Target: LAMA2; (+) strand; PAM type: YTN; PAM sequence: TTT
tgcagtataatgatagaaga

SEQ ID NO: 379829 - DNA, 20 bp, Artificial Sequence
  Description of Artificial Sequence: Synthetic oligonucleotide
  Target: LAMA2; (+) strand; PAM type: YTN; PAM sequence: TTT
gcagtataatgatagaagat

SEQ ID NO: 379830 - DNA, 20 bp, Artificial Sequence
  Description of Artificial Sequence: Synthetic oligonucleotide
  Target: LAMA2; (+) strand; PAM type: YTN; PAM sequence: TTG
cagtataatgatagaagata

SEQ ID NO: 379831 - DNA, 20 bp, Artificial Sequence
  Description of Artificial Sequence: Synthetic oligonucleotide
  Target: LAMA2; (+) strand; PAM type: YTN; PAM sequence: CTT
ccctgtgacctggaagaagc

SEQ ID NO: 379832 - DNA, 20 bp, Artificial Sequence
  Description of Artificial Sequence: Synthetic oligonucleotide
  Target: LAMA2; (+) strand; PAM type: YTN; PAM sequence: TTC
cctgtgacctggaagaagct

SEQ ID NO: 379833 - DNA, 20 bp, Artificial Sequence
  Description of Artificial Sequence: Synthetic oligonucleotide
  Target: LAMA2; (+) strand; PAM type: YTN; PAM sequence: CTG
tgacctggaagaagctacta

SEQ ID NO: 379834 - DNA, 20 bp, Artificial Sequence
  Description of Artificial Sequence: Synthetic oligonucleotide
  Target: LAMA2; (+) strand; PAM type: YTN; PAM sequence: CTG
gaagaagctactaccattca

SEQ ID NO: 379835 - DNA, 20 bp, Artificial Sequence
  Description of Artificial Sequence: Synthetic oligonucleotide
  Target: LAMA2; (+) strand; PAM type: YTN; PAM sequence: CTA
ctaccattcatcagaaaaga

SEQ ID NO: 379836 - DNA, 20 bp, Artificial Sequence
  Description of Artificial Sequence: Synthetic oligonucleotide
  Target: LAMA2; (+) strand; PAM type: YTN; PAM sequence: CTA
ccattcatcagaaaagaaaa

SEQ ID NO: 379837 - DNA, 20 bp, Artificial Sequence
  Description of Artificial Sequence: Synthetic oligonucleotide
  Target: LAMA2; (+) strand; PAM type: YTN; PAM sequence: TTC
atcagaaaagaaaaatagca

SEQ ID NO: 379838 - DNA, 20 bp, Artificial Sequence
  Description of Artificial Sequence: Synthetic oligonucleotide
  Target: LAMA2; (+) strand; PAM type: YTN; PAM sequence: TTA
aagggaaaaaaaaatatgga

SEQ ID NO: 379839 - DNA, 20 bp, Artificial Sequence
  Description of Artificial Sequence: Synthetic oligonucleotide
  Target: LAMA2; (+) strand; PAM type: YTN; PAM sequence: TTC
actgcagacatagtgagttt

SEQ ID NO: 379840 - DNA, 20 bp, Artificial Sequence
  Description of Artificial Sequence: Synthetic oligonucleotide
  Target: LAMA2; (+) strand; PAM type: YTN; PAM sequence: CTG
cagacatagtgagtttaaga

SEQ ID NO: 379841 - DNA, 20 bp, Artificial Sequence
  Description of Artificial Sequence: Synthetic oligonucleotide
  Target: LAMA2; (+) strand; PAM type: YTN; PAM sequence: TTT
aagatgccagtcataaattc

SEQ ID NO: 379842 - DNA, 20 bp, Artificial Sequence
  Description of Artificial Sequence: Synthetic oligonucleotide
  Target: LAMA2; (+) strand; PAM type: YTN; PAM sequence: TTA
agatgccagtcataaattca

SEQ ID NO: 379843 - DNA, 20 bp, Artificial Sequence
  Description of Artificial Sequence: Synthetic oligonucleotide
  Target: LAMA2; (+) strand; PAM type: YTN; PAM sequence: TTC
aagagatcatatactgtaga

SEQ ID NO: 379844 - DNA, 20 bp, Artificial Sequence
  Description of Artificial Sequence: Synthetic oligonucleotide
  Target: LAMA2; (+) strand; PAM type: YTN; PAM sequence: CTG
tagatcaggtaaaattaact

SEQ ID NO: 379845 - DNA, 20 bp, Artificial Sequence
  Description of Artificial Sequence: Synthetic oligonucleotide
  Target: LAMA2; (+) strand; PAM type: YTN; PAM sequence: TTA
actgttgtggtataaatgga

SEQ ID NO: 379846 - DNA, 20 bp, Artificial Sequence
  Description of Artificial Sequence: Synthetic oligonucleotide
  Target: LAMA2; (+) strand; PAM type: YTN; PAM sequence: CTG
ttgtggtataaatggattat

SEQ ID NO: 379847 - DNA, 20 bp, Artificial Sequence
  Description of Artificial Sequence: Synthetic oligonucleotide
  Target: LAMA2; (+) strand; PAM type: YTN; PAM sequence: TTG
tggtataaatggattataaa

SEQ ID NO: 379848 - DNA, 20 bp, Artificial Sequence
  Description of Artificial Sequence: Synthetic oligonucleotide
  Target: LAMA2; (+) strand; PAM type: YTN; PAM sequence: TTA
taaaagtgctgagaaagtga

SEQ ID NO: 379849 - DNA, 20 bp, Artificial Sequence
  Description of Artificial Sequence: Synthetic oligonucleotide
  Target: LAMA2; (+) strand; PAM type: YTN; PAM sequence: CTG
agaaagtgacctcttcaccc

SEQ ID NO: 379850 - DNA, 20 bp, Artificial Sequence
  Description of Artificial Sequence: Synthetic oligonucleotide
  Target: LAMA2; (+) strand; PAM type: YTN; PAM sequence: CTC
ttcacccatcaggggaacca

SEQ ID NO: 379851 - DNA, 20 bp, Artificial Sequence
  Description of Artificial Sequence: Synthetic oligonucleotide
  Target: LAMA2; (+) strand; PAM type: YTN; PAM sequence: CTT
cacccatcaggggaaccagg

SEQ ID NO: 379852 - DNA, 20 bp, Artificial Sequence
  Description of Artificial Sequence: Synthetic oligonucleotide
  Target: LAMA2; (+) strand; PAM type: YTN; PAM sequence: TTC
acccatcaggggaaccaggc

SEQ ID NO: 379853 - DNA, 20 bp, Artificial Sequence
  Description of Artificial Sequence: Synthetic oligonucleotide
  Target: LAMA2; (+) strand; PAM type: YTN; PAM sequence: TTG
gtccagtctcctccaactgt

SEQ ID NO: 379854 - DNA, 20 bp, Artificial Sequence
  Description of Artificial Sequence: Synthetic oligonucleotide
  Target: LAMA2; (+) strand; PAM type: YTN; PAM sequence: CTC
ctccaactgtgagcattcta

SEQ ID NO: 379855 - DNA, 20 bp, Artificial Sequence
  Description of Artificial Sequence: Synthetic oligonucleotide
  Target: LAMA2; (+) strand; PAM type: YTN; PAM sequence: CTC
caactgtgagcattctaatc

SEQ ID NO: 379856 - DNA, 20 bp, Artificial Sequence
  Description of Artificial Sequence: Synthetic oligonucleotide
  Target: LAMA2; (+) strand; PAM type: YTN; PAM sequence: CTG
tgagcattctaatctgttca

SEQ ID NO: 379857 - DNA, 20 bp, Artificial Sequence
  Description of Artificial Sequence: Synthetic oligonucleotide
  Target: LAMA2; (+) strand; PAM type: YTN; PAM sequence: TTC
taatctgttcaccccagtgt

SEQ ID NO: 379858 - DNA, 20 bp, Artificial Sequence
  Description of Artificial Sequence: Synthetic oligonucleotide
  Target: LAMA2; (+) strand; PAM type: YTN; PAM sequence: CTA
atctgttcaccccagtgtgc

SEQ ID NO: 379859 - DNA, 20 bp, Artificial Sequence
  Description of Artificial Sequence: Synthetic oligonucleotide
  Target: LAMA2; (+) strand; PAM type: YTN; PAM sequence: CTG
ttcaccccagtgtgccatac

SEQ ID NO: 379860 - DNA, 20 bp, Artificial Sequence
  Description of Artificial Sequence: Synthetic oligonucleotide
  Target: LAMA2; (+) strand; PAM type: YTN; PAM sequence: TTC
accccagtgtgccatacaat

SEQ ID NO: 379861 - DNA, 20 bp, Artificial Sequence
  Description of Artificial Sequence: Synthetic oligonucleotide
  Target: LAMA2; (+) strand; PAM type: YTN; PAM sequence: TTG
tcattttccctatgcatcat

SEQ ID NO: 379862 - DNA, 20 bp, Artificial Sequence
  Description of Artificial Sequence: Synthetic oligonucleotide
  Target: LAMA2; (+) strand; PAM type: YTN; PAM sequence: TTT
tccctatgcatcatgttgag

SEQ ID NO: 379863 - DNA, 20 bp, Artificial Sequence
  Description of Artificial Sequence: Synthetic oligonucleotide
  Target: LAMA2; (+) strand; PAM type: YTN; PAM sequence: TTT
ccctatgcatcatgttgaga

SEQ ID NO: 379864 - DNA, 20 bp, Artificial Sequence
  Description of Artificial Sequence: Synthetic oligonucleotide
  Target: LAMA2; (+) strand; PAM type: YTN; PAM sequence: TTC
cctatgcatcatgttgagaa

SEQ ID NO: 379865 - DNA, 20 bp, Artificial Sequence
  Description of Artificial Sequence: Synthetic oligonucleotide
  Target: LAMA2; (+) strand; PAM type: YTN; PAM sequence: CTA
tgcatcatgttgagaaatga

SEQ ID NO: 379866 - DNA, 20 bp, Artificial Sequence
  Description of Artificial Sequence: Synthetic oligonucleotide
  Target: LAMA2; (+) strand; PAM type: YTN; PAM sequence: TTG
agaaatgattctgaatcact

SEQ ID NO: 379867 - DNA, 20 bp, Artificial Sequence
  Description of Artificial Sequence: Synthetic oligonucleotide
  Target: LAMA2; (+) strand; PAM type: YTN; PAM sequence: TTC
tgaatcactttgaaaaaaat

SEQ ID NO: 379868 - DNA, 20 bp, Artificial Sequence
  Description of Artificial Sequence: Synthetic oligonucleotide
  Target: LAMA2; (+) strand; PAM type: YTN; PAM sequence: CTG
aatcactttgaaaaaaatca

SEQ ID NO: 379869 - DNA, 20 bp, Artificial Sequence
  Description of Artificial Sequence: Synthetic oligonucleotide
  Target: LAMA2; (+) strand; PAM type: YTN; PAM sequence: CTT
tgaaaaaaatcacacagaac

SEQ ID NO: 379870 - DNA, 20 bp, Artificial Sequence
  Description of Artificial Sequence: Synthetic oligonucleotide
  Target: LAMA2; (+) strand; PAM type: YTN; PAM sequence: TTT
gaaaaaaatcacacagaaca

SEQ ID NO: 379871 - DNA, 20 bp, Artificial Sequence
  Description of Artificial Sequence: Synthetic oligonucleotide
  Target: LAMA2; (+) strand; PAM type: YTN; PAM sequence: TTG
aaaaaaatcacacagaacag

SEQ ID NO: 379872 - DNA, 20 bp, Artificial Sequence
  Description of Artificial Sequence: Synthetic oligonucleotide
  Target: LAMA2; (+) strand; PAM type: YTN; PAM sequence: TTG
tcgaacctacatgatgggaa

SEQ ID NO: 379873 - DNA, 20 bp, Artificial Sequence
  Description of Artificial Sequence: Synthetic oligonucleotide
  Target: LAMA2; (+) strand; PAM type: YTN; PAM sequence: CTA
catgatgggaatacttcaag

SEQ ID NO: 379874 - DNA, 20 bp, Artificial Sequence
  Description of Artificial Sequence: Synthetic oligonucleotide
  Target: LAMA2; (+) strand; PAM type: YTN; PAM sequence: CTT
caagggagtattccgtgttt

SEQ ID NO: 379875 - DNA, 20 bp, Artificial Sequence
  Description of Artificial Sequence: Synthetic oligonucleotide
  Target: LAMA2; (+) strand; PAM type: YTN; PAM sequence: TTC
aagggagtattccgtgtttt

SEQ ID NO: 379876 - DNA, 20 bp, Artificial Sequence
  Description of Artificial Sequence: Synthetic oligonucleotide
  Target: LAMA2; (+) strand; PAM type: YTN; PAM sequence: TTC
cgtgttttcttatgaccaaa

SEQ ID NO: 379877 - DNA, 20 bp, Artificial Sequence
  Description of Artificial Sequence: Synthetic oligonucleotide
  Target: LAMA2; (+) strand; PAM type: YTN; PAM sequence: TTT
tcttatgaccaaaattggcc

SEQ ID NO: 379878 - DNA, 20 bp, Artificial Sequence
  Description of Artificial Sequence: Synthetic oligonucleotide
  Target: LAMA2; (+) strand; PAM type: YTN; PAM sequence: TTT
cttatgaccaaaattggcca

SEQ ID NO: 379879 - DNA, 20 bp, Artificial Sequence
  Description of Artificial Sequence: Synthetic oligonucleotide
  Target: LAMA2; (+) strand; PAM type: YTN; PAM sequence: TTC
ttatgaccaaaattggccaa

SEQ ID NO: 379880 - DNA, 20 bp, Artificial Sequence
  Description of Artificial Sequence: Synthetic oligonucleotide
  Target: LAMA2; (+) strand; PAM type: YTN; PAM sequence: CTT
atgaccaaaattggccaact

SEQ ID NO: 379881 - DNA, 20 bp, Artificial Sequence
  Description of Artificial Sequence: Synthetic oligonucleotide
  Target: LAMA2; (+) strand; PAM type: YTN; PAM sequence: TTA
tgaccaaaattggccaactg

SEQ ID NO: 379882 - DNA, 20 bp, Artificial Sequence
  Description of Artificial Sequence: Synthetic oligonucleotide
  Target: LAMA2; (+) strand; PAM type: YTN; PAM sequence: TTG
gccaactgaaatgaggcttg

SEQ ID NO: 379883 - DNA, 20 bp, Artificial Sequence
  Description of Artificial Sequence: Synthetic oligonucleotide
  Target: LAMA2; (+) strand; PAM type: YTN; PAM sequence: CTG
aaatgaggcttgttgggtct

SEQ ID NO: 379884 - DNA, 20 bp, Artificial Sequence
  Description of Artificial Sequence: Synthetic oligonucleotide
  Target: LAMA2; (+) strand; PAM type: YTN; PAM sequence: CTT
gttgggtctgacacttagga

SEQ ID NO: 379885 - DNA, 20 bp, Artificial Sequence
  Description of Artificial Sequence: Synthetic oligonucleotide
  Target: LAMA2; (+) strand; PAM type: YTN; PAM sequence: TTG
ttgggtctgacacttaggac

SEQ ID NO: 379886 - DNA, 20 bp, Artificial Sequence
  Description of Artificial Sequence: Synthetic oligonucleotide
  Target: LAMA2; (+) strand; PAM type: YTN; PAM sequence: TTG
ggtctgacacttaggaccac

SEQ ID NO: 379887 - DNA, 20 bp, Artificial Sequence
  Description of Artificial Sequence: Synthetic oligonucleotide
  Target: LAMA2; (+) strand; PAM type: YTN; PAM sequence: CTG
acacttaggaccacactggt

SEQ ID NO: 379888 - DNA, 20 bp, Artificial Sequence
  Description of Artificial Sequence: Synthetic oligonucleotide
  Target: LAMA2; (+) strand; PAM type: YTN; PAM sequence: CTT
aggaccacactggtaacatt

SEQ ID NO: 379889 - DNA, 20 bp, Artificial Sequence
  Description of Artificial Sequence: Synthetic oligonucleotide
  Target: LAMA2; (+) strand; PAM type: YTN; PAM sequence: TTA
ggaccacactggtaacattc

SEQ ID NO: 379890 - DNA, 20 bp, Artificial Sequence
  Description of Artificial Sequence: Synthetic oligonucleotide
  Target: LAMA2; (+) strand; PAM type: YTN; PAM sequence: CTG
gtaacattcatgataccggt

SEQ ID NO: 379891 - DNA, 20 bp, Artificial Sequence
  Description of Artificial Sequence: Synthetic oligonucleotide
  Target: LAMA2; (+) strand; PAM type: YTN; PAM sequence: TTC
atgataccggtctcagtgtc

SEQ ID NO: 379892 - DNA, 20 bp, Artificial Sequence
  Description of Artificial Sequence: Synthetic oligonucleotide
  Target: LAMA2; (+) strand; PAM type: YTN; PAM sequence: CTC
agtgtcctggggcagaatta

SEQ ID NO: 379893 - DNA, 20 bp, Artificial Sequence
  Description of Artificial Sequence: Synthetic oligonucleotide
  Target: LAMA2; (+) strand; PAM type: YTN; PAM sequence: CTG
gggcagaattaatctcaagc

SEQ ID NO: 379894 - DNA, 20 bp, Artificial Sequence
  Description of Artificial Sequence: Synthetic oligonucleotide
  Target: LAMA2; (+) strand; PAM type: YTN; PAM sequence: TTA
atctcaagcttttaaagaaa

SEQ ID NO: 379895 - DNA, 20 bp, Artificial Sequence
  Description of Artificial Sequence: Synthetic oligonucleotide
  Target: LAMA2; (+) strand; PAM type: YTN; PAM sequence: CTC
aagcttttaaagaaagaatg

SEQ ID NO: 379896 - DNA, 20 bp, Artificial Sequence
  Description of Artificial Sequence: Synthetic oligonucleotide
  Target: LAMA2; (+) strand; PAM type: YTN; PAM sequence: CTT
ttaaagaaagaatgtgacac

SEQ ID NO: 379897 - DNA, 20 bp, Artificial Sequence
  Description of Artificial Sequence: Synthetic oligonucleotide
  Target: LAMA2; (+) strand; PAM type: YTN; PAM sequence: TTT
taaagaaagaatgtgacaca

SEQ ID NO: 379898 - DNA, 20 bp, Artificial Sequence
  Description of Artificial Sequence: Synthetic oligonucleotide
  Target: LAMA2; (+) strand; PAM type: YTN; PAM sequence: TTT
aaagaaagaatgtgacacat

SEQ ID NO: 379899 - DNA, 20 bp, Artificial Sequence
  Description of Artificial Sequence: Synthetic oligonucleotide
  Target: LAMA2; (+) strand; PAM type: YTN; PAM sequence: TTA
aagaaagaatgtgacacatg

SEQ ID NO: 379900 - DNA, 20 bp, Artificial Sequence
  Description of Artificial Sequence: Synthetic oligonucleotide
  Target: LAMA2; (+) strand; PAM type: YTN; PAM sequence: TTA
tgagtgtaaactattatttt

SEQ ID NO: 379901 - DNA, 20 bp, Artificial Sequence
  Description of Artificial Sequence: Synthetic oligonucleotide
  Target: LAMA2; (+) strand; PAM type: YTN; PAM sequence: CTA
ttattttccatgaatataat

SEQ ID NO: 379902 - DNA, 20 bp, Artificial Sequence
  Description of Artificial Sequence: Synthetic oligonucleotide
  Target: LAMA2; (+) strand; PAM type: YTN; PAM sequence: TTA
ttttccatgaatataattgt

SEQ ID NO: 379903 - DNA, 20 bp, Artificial Sequence
  Description of Artificial Sequence: Synthetic oligonucleotide
  Target: LAMA2; (+) strand; PAM type: YTN; PAM sequence: TTT
tccatgaatataattgtaaa

SEQ ID NO: 379904 - DNA, 20 bp, Artificial Sequence
  Description of Artificial Sequence: Synthetic oligonucleotide
  Target: LAMA2; (+) strand; PAM type: YTN; PAM sequence: TTT
ccatgaatataattgtaaaa

SEQ ID NO: 379905 - DNA, 20 bp, Artificial Sequence
  Description of Artificial Sequence: Synthetic oligonucleotide
  Target: LAMA2; (+) strand; PAM type: YTN; PAM sequence: TTC
catgaatataattgtaaaaa

SEQ ID NO: 379906 - DNA, 20 bp, Artificial Sequence
  Description of Artificial Sequence: Synthetic oligonucleotide
  Target: LAMA2; (+) strand; PAM type: YTN; PAM sequence: TTG
taaaaagaaggaataacata

SEQ ID NO: 379907 - DNA, 20 bp, Artificial Sequence
  Description of Artificial Sequence: Synthetic oligonucleotide
  Target: LAMA2; (+) strand; PAM type: YTN; PAM sequence: TTG
tcaaaagtaaaaagatgatt

SEQ ID NO: 379908 - DNA, 20 bp, Artificial Sequence
  Description of Artificial Sequence: Synthetic oligonucleotide
  Target: LAMA2; (+) strand; PAM type: YTN; PAM sequence: TTG
tttaatttgaaagagtatgt

SEQ ID NO: 379909 - DNA, 20 bp, Artificial Sequence
  Description of Artificial Sequence: Synthetic oligonucleotide
  Target: LAMA2; (+) strand; PAM type: YTN; PAM sequence: TTT
aatttgaaagagtatgttta

SEQ ID NO: 379910 - DNA, 20 bp, Artificial Sequence
  Description of Artificial Sequence: Synthetic oligonucleotide
  Target: LAMA2; (+) strand; PAM type: YTN; PAM sequence: TTA
atttgaaagagtatgtttac

SEQ ID NO: 379911 - DNA, 20 bp, Artificial Sequence
  Description of Artificial Sequence: Synthetic oligonucleotide
  Target: LAMA2; (+) strand; PAM type: YTN; PAM sequence: TTT
gaaagagtatgtttacagaa

SEQ ID NO: 379912 - DNA, 20 bp, Artificial Sequence
  Description of Artificial Sequence: Synthetic oligonucleotide
  Target: LAMA2; (+) strand; PAM type: YTN; PAM sequence: TTG
aaagagtatgtttacagaac

SEQ ID NO: 379913 - DNA, 20 bp, Artificial Sequence
  Description of Artificial Sequence: Synthetic oligonucleotide
  Target: LAMA2; (+) strand; PAM type: YTN; PAM sequence: TTT
acagaacatgggaatggatt

SEQ ID NO: 379914 - DNA, 20 bp, Artificial Sequence
  Description of Artificial Sequence: Synthetic oligonucleotide
  Target: LAMA2; (+) strand; PAM type: YTN; PAM sequence: TTA
cagaacatgggaatggatta

SEQ ID NO: 379915 - DNA, 20 bp, Artificial Sequence
  Description of Artificial Sequence: Synthetic oligonucleotide
  Target: LAMA2; (+) strand; PAM type: YTN; PAM sequence: TTA
gtaatgaggaaaatattgaa

SEQ ID NO: 379916 - DNA, 20 bp, Artificial Sequence
  Description of Artificial Sequence: Synthetic oligonucleotide
  Target: LAMA2; (+) strand; PAM type: YTN; PAM sequence: TTG
aaatataaaataaagagaga

SEQ ID NO: 379917 - DNA, 20 bp, Artificial Sequence
  Description of Artificial Sequence: Synthetic oligonucleotide
  Target: LAMA2; (+) strand; PAM type: YTN; PAM sequence: CTA
atagaggaaccaggagactt

SEQ ID NO: 379918 - DNA, 20 bp, Artificial Sequence
  Description of Artificial Sequence: Synthetic oligonucleotide
  Target: LAMA2; (+) strand; PAM type: YTN; PAM sequence: CTT
ccacatcatggaccctcatg

SEQ ID NO: 379919 - DNA, 20 bp, Artificial Sequence
  Description of Artificial Sequence: Synthetic oligonucleotide
  Target: LAMA2; (+) strand; PAM type: YTN; PAM sequence: TTC
cacatcatggaccctcatgg

SEQ ID NO: 379920 - DNA, 20 bp, Artificial Sequence
  Description of Artificial Sequence: Synthetic oligonucleotide
  Target: LAMA2; (+) strand; PAM type: YTN; PAM sequence: CTC
atggtcatattctttgagta

SEQ ID NO: 379921 - DNA, 20 bp, Artificial Sequence
  Description of Artificial Sequence: Synthetic oligonucleotide
  Target: LAMA2; (+) strand; PAM type: YTN; PAM sequence: TTC
tttgagtagacggttcacct

SEQ ID NO: 379922 - DNA, 20 bp, Artificial Sequence
  Description of Artificial Sequence: Synthetic oligonucleotide
  Target: LAMA2; (+) strand; PAM type: YTN; PAM sequence: CTT
tgagtagacggttcacctta

SEQ ID NO: 379923 - DNA, 20 bp, Artificial Sequence
  Description of Artificial Sequence: Synthetic oligonucleotide
  Target: LAMA2; (+) strand; PAM type: YTN; PAM sequence: TTT
gagtagacggttcaccttat

SEQ ID NO: 379924 - DNA, 20 bp, Artificial Sequence
  Description of Artificial Sequence: Synthetic oligonucleotide
  Target: LAMA2; (+) strand; PAM type: YTN; PAM sequence: TTG
agtagacggttcaccttatc

SEQ ID NO: 379925 - DNA, 20 bp, Artificial Sequence
  Description of Artificial Sequence: Synthetic oligonucleotide
  Target: LAMA2; (+) strand; PAM type: YTN; PAM sequence: TTC
accttatccaatgggataaa

SEQ ID NO: 379926 - DNA, 20 bp, Artificial Sequence
  Description of Artificial Sequence: Synthetic oligonucleotide
  Target: LAMA2; (+) strand; PAM type: YTN; PAM sequence: CTT
atccaatgggataaaatgag

SEQ ID NO: 379927 - DNA, 20 bp, Artificial Sequence
  Description of Artificial Sequence: Synthetic oligonucleotide
  Target: LAMA2; (+) strand; PAM type: YTN; PAM sequence: TTA
tccaatgggataaaatgaga

SEQ ID NO: 379928 - DNA, 20 bp, Artificial Sequence
  Description of Artificial Sequence: Synthetic oligonucleotide
  Target: LAMA2; (+) strand; PAM type: YTN; PAM sequence: TTT
aggtaagtttcataccatgg

SEQ ID NO: 379929 - DNA, 20 bp, Artificial Sequence
  Description of Artificial Sequence: Synthetic oligonucleotide
  Target: LAMA2; (+) strand; PAM type: YTN; PAM sequence: TTA
ggtaagtttcataccatgga

SEQ ID NO: 379930 - DNA, 20 bp, Artificial Sequence
  Description of Artificial Sequence: Synthetic oligonucleotide
  Target: LAMA2; (+) strand; PAM type: YTN; PAM sequence: TTT
cataccatggaggcagaaag

SEQ ID NO: 379931 - DNA, 20 bp, Artificial Sequence
  Description of Artificial Sequence: Synthetic oligonucleotide
  Target: LAMA2; (+) strand; PAM type: YTN; PAM sequence: TTC
ataccatggaggcagaaagt

SEQ ID NO: 379932 - DNA, 20 bp, Artificial Sequence
  Description of Artificial Sequence: Synthetic oligonucleotide
  Target: LAMA2; (+) strand; PAM type: YTN; PAM sequence: TTG
aactgagttcatataggaga

SEQ ID NO: 379933 - DNA, 20 bp, Artificial Sequence
  Description of Artificial Sequence: Synthetic oligonucleotide
  Target: LAMA2; (+) strand; PAM type: YTN; PAM sequence: CTG
agttcatataggagacctca

SEQ ID NO: 379934 - DNA, 20 bp, Artificial Sequence
  Description of Artificial Sequence: Synthetic oligonucleotide
  Target: LAMA2; (+) strand; PAM type: YTN; PAM sequence: TTC
atataggagacctcaatttc

SEQ ID NO: 379935 - DNA, 20 bp, Artificial Sequence
  Description of Artificial Sequence: Synthetic oligonucleotide
  Target: LAMA2; (+) strand; PAM type: YTN; PAM sequence: CTC
aatttctctttcatgtcagt

SEQ ID NO: 379936 - DNA, 20 bp, Artificial Sequence
  Description of Artificial Sequence: Synthetic oligonucleotide
  Target: LAMA2; (+) strand; PAM type: YTN; PAM sequence: TTT
ctctttcatgtcagtctctg

SEQ ID NO: 379937 - DNA, 20 bp, Artificial Sequence
  Description of Artificial Sequence: Synthetic oligonucleotide
  Target: LAMA2; (+) strand; PAM type: YTN; PAM sequence: TTC
tctttcatgtcagtctctgt

SEQ ID NO: 379938 - DNA, 20 bp, Artificial Sequence
  Description of Artificial Sequence: Synthetic oligonucleotide
  Target: LAMA2; (+) strand; PAM type: YTN; PAM sequence: CTC
tttcatgtcagtctctgtta

SEQ ID NO: 379939 - DNA, 20 bp, Artificial Sequence
  Description of Artificial Sequence: Synthetic oligonucleotide
  Target: LAMA2; (+) strand; PAM type: YTN; PAM sequence: CTT
tcatgtcagtctctgttaca

SEQ ID NO: 379940 - DNA, 20 bp, Artificial Sequence
  Description of Artificial Sequence: Synthetic oligonucleotide
  Target: LAMA2; (+) strand; PAM type: YTN; PAM sequence: TTT
catgtcagtctctgttacat

SEQ ID NO: 379941 - DNA, 20 bp, Artificial Sequence
  Description of Artificial Sequence: Synthetic oligonucleotide
  Target: LAMA2; (+) strand; PAM type: YTN; PAM sequence: TTC
atgtcagtctctgttacatt

SEQ ID NO: 379942 - DNA, 20 bp, Artificial Sequence
  Description of Artificial Sequence: Synthetic oligonucleotide
  Target: LAMA2; (+) strand; PAM type: YTN; PAM sequence: CTC
tgttacattctatgagaata

SEQ ID NO: 379943 - DNA, 20 bp, Artificial Sequence
  Description of Artificial Sequence: Synthetic oligonucleotide
  Target: LAMA2; (+) strand; PAM type: YTN; PAM sequence: CTG
ttacattctatgagaatata

SEQ ID NO: 379944 - DNA, 20 bp, Artificial Sequence
  Description of Artificial Sequence: Synthetic oligonucleotide
  Target: LAMA2; (+) strand; PAM type: YTN; PAM sequence: TTA
cattctatgagaatatagaa

SEQ ID NO: 379945 - DNA, 20 bp, Artificial Sequence
  Description of Artificial Sequence: Synthetic oligonucleotide
  Target: LAMA2; (+) strand; PAM type: YTN; PAM sequence: TTC
tatgagaatatagaatcgat

SEQ ID NO: 379946 - DNA, 20 bp, Artificial Sequence
  Description of Artificial Sequence: Synthetic oligonucleotide
  Target: LAMA2; (+) strand; PAM type: YTN; PAM sequence: CTA
tgagaatatagaatcgatat

SEQ ID NO: 379947 - DNA, 20 bp, Artificial Sequence
  Description of Artificial Sequence: Synthetic oligonucleotide
  Target: LAMA2; (+) strand; PAM type: YTN; PAM sequence: TTT
gtaaatagtcttatataata

SEQ ID NO: 379948 - DNA, 20 bp, Artificial Sequence
  Description of Artificial Sequence: Synthetic oligonucleotide
  Target: LAMA2; (+) strand; PAM type: YTN; PAM sequence: TTG
taaatagtcttatataataa

SEQ ID NO: 379949 - DNA, 20 bp, Artificial Sequence
  Description of Artificial Sequence: Synthetic oligonucleotide
  Target: LAMA2; (+) strand; PAM type: YTN; PAM sequence: CTT
atataataaattattagacc

SEQ ID NO: 379950 - DNA, 20 bp, Artificial Sequence
  Description of Artificial Sequence: Synthetic oligonucleotide
  Target: LAMA2; (+) strand; PAM type: YTN; PAM sequence: TTA
tataataaattattagacct

SEQ ID NO: 379951 - DNA, 20 bp, Artificial Sequence
  Description of Artificial Sequence: Synthetic oligonucleotide
  Target: LAMA2; (+) strand; PAM type: YTN; PAM sequence: TTA
ttagacctgcctaggaaagc

SEQ ID NO: 379952 - DNA, 20 bp, Artificial Sequence
  Description of Artificial Sequence: Synthetic oligonucleotide
  Target: LAMA2; (+) strand; PAM type: YTN; PAM sequence: TTA
gacctgcctaggaaagcaaa

SEQ ID NO: 379953 - DNA, 20 bp, Artificial Sequence
  Description of Artificial Sequence: Synthetic oligonucleotide
  Target: LAMA2; (+) strand; PAM type: YTN; PAM sequence: CTG
cctaggaaagcaaaacagaa

SEQ ID NO: 379954 - DNA, 20 bp, Artificial Sequence
  Description of Artificial Sequence: Synthetic oligonucleotide
  Target: LAMA2; (+) strand; PAM type: YTN; PAM sequence: CTA
ggaaagcaaaacagaaaaat

SEQ ID NO: 379955 - DNA, 20 bp, Artificial Sequence
  Description of Artificial Sequence: Synthetic oligonucleotide
  Target: LAMA2; (+) strand; PAM type: YTN; PAM sequence: TTA
tgaagtctctcaatggccaa

SEQ ID NO: 379956 - DNA, 20 bp, Artificial Sequence
  Description of Artificial Sequence: Synthetic oligonucleotide
  Target: LAMA2; (+) strand; PAM type: YTN; PAM sequence: CTC
tcaatggccaactaatgaat

SEQ ID NO: 379957 - DNA, 20 bp, Artificial Sequence
  Description of Artificial Sequence: Synthetic oligonucleotide
  Target: LAMA2; (+) strand; PAM type: YTN; PAM sequence: CTC
aatggccaactaatgaatat

SEQ ID NO: 379958 - DNA, 20 bp, Artificial Sequence
  Description of Artificial Sequence: Synthetic oligonucleotide
  Target: LAMA2; (+) strand; PAM type: YTN; PAM sequence: CTA
atgaatataaaaatactatt

SEQ ID NO: 379959 - DNA, 20 bp, Artificial Sequence
  Description of Artificial Sequence: Synthetic oligonucleotide
  Target: LAMA2; (+) strand; PAM type: YTN; PAM sequence: CTA
tttttcaaatgtttatactg

SEQ ID NO: 379960 - DNA, 20 bp, Artificial Sequence
  Description of Artificial Sequence: Synthetic oligonucleotide
  Target: LAMA2; (+) strand; PAM type: YTN; PAM sequence: TTT
ttcaaatgtttatactggaa

SEQ ID NO: 379961 - DNA, 20 bp, Artificial Sequence
  Description of Artificial Sequence: Synthetic oligonucleotide
  Target: LAMA2; (+) strand; PAM type: YTN; PAM sequence: TTT
tcaaatgtttatactggaat

SEQ ID NO: 379962 - DNA, 20 bp, Artificial Sequence
  Description of Artificial Sequence: Synthetic oligonucleotide
  Target: LAMA2; (+) strand; PAM type: YTN; PAM sequence: TTT
caaatgtttatactggaata

SEQ ID NO: 379963 - DNA, 20 bp, Artificial Sequence
  Description of Artificial Sequence: Synthetic oligonucleotide
  Target: LAMA2; (+) strand; PAM type: YTN; PAM sequence: TTC
aaatgtttatactggaataa

SEQ ID NO: 379964 - DNA, 20 bp, Artificial Sequence
  Description of Artificial Sequence: Synthetic oligonucleotide
  Target: LAMA2; (+) strand; PAM type: YTN; PAM sequence: TTT
atactggaataagcacacaa

SEQ ID NO: 379965 - DNA, 20 bp, Artificial Sequence
  Description of Artificial Sequence: Synthetic oligonucleotide
  Target: LAMA2; (+) strand; PAM type: YTN; PAM sequence: TTA
tactggaataagcacacaag

SEQ ID NO: 379966 - DNA, 20 bp, Artificial Sequence
  Description of Artificial Sequence: Synthetic oligonucleotide
  Target: LAMA2; (+) strand; PAM type: YTN; PAM sequence: CTG
gaataagcacacaagacagc

SEQ ID NO: 379967 - DNA, 20 bp, Artificial Sequence
  Description of Artificial Sequence: Synthetic oligonucleotide
  Target: LAMA2; (+) strand; PAM type: YTN; PAM sequence: CTT
ttatttcatgcagaagatcc

SEQ ID NO: 379968 - DNA, 20 bp, Artificial Sequence
  Description of Artificial Sequence: Synthetic oligonucleotide
  Target: LAMA2; (+) strand; PAM type: YTN; PAM sequence: TTT
tatttcatgcagaagatcca

SEQ ID NO: 379969 - DNA, 20 bp, Artificial Sequence
  Description of Artificial Sequence: Synthetic oligonucleotide
  Target: LAMA2; (+) strand; PAM type: YTN; PAM sequence: TTT
atttcatgcagaagatccat

SEQ ID NO: 379970 - DNA, 20 bp, Artificial Sequence
  Description of Artificial Sequence: Synthetic oligonucleotide
  Target: LAMA2; (+) strand; PAM type: YTN; PAM sequence: TTA
tttcatgcagaagatccata

SEQ ID NO: 379971 - DNA, 20 bp, Artificial Sequence
  Description of Artificial Sequence: Synthetic oligonucleotide
  Target: LAMA2; (+) strand; PAM type: YTN; PAM sequence: TTT
catgcagaagatccataatg

SEQ ID NO: 379972 - DNA, 20 bp, Artificial Sequence
  Description of Artificial Sequence: Synthetic oligonucleotide
  Target: LAMA2; (+) strand; PAM type: YTN; PAM sequence: TTC
atgcagaagatccataatgc

SEQ ID NO: 379973 - DNA, 20 bp, Artificial Sequence
  Description of Artificial Sequence: Synthetic oligonucleotide
  Target: LAMA2; (+) strand; PAM type: YTN; PAM sequence: CTT
ttctgattgatgtagagact

SEQ ID NO: 379974 - DNA, 20 bp, Artificial Sequence
  Description of Artificial Sequence: Synthetic oligonucleotide
  Target: LAMA2; (+) strand; PAM type: YTN; PAM sequence: TTT
tctgattgatgtagagactt

SEQ ID NO: 379975 - DNA, 20 bp, Artificial Sequence
  Description of Artificial Sequence: Synthetic oligonucleotide
  Target: LAMA2; (+) strand; PAM type: YTN; PAM sequence: TTT
ctgattgatgtagagacttt

SEQ ID NO: 379976 - DNA, 20 bp, Artificial Sequence
  Description of Artificial Sequence: Synthetic oligonucleotide
  Target: LAMA2; (+) strand; PAM type: YTN; PAM sequence: TTC
tgattgatgtagagactttt

SEQ ID NO: 379977 - DNA, 20 bp, Artificial Sequence
  Description of Artificial Sequence: Synthetic oligonucleotide
  Target: LAMA2; (+) strand; PAM type: YTN; PAM sequence: CTG
attgatgtagagacttttag

SEQ ID NO: 379978 - DNA, 20 bp, Artificial Sequence
  Description of Artificial Sequence: Synthetic oligonucleotide
  Target: LAMA2; (+) strand; PAM type: YTN; PAM sequence: TTG
atgtagagacttttagtaaa

SEQ ID NO: 379979 - DNA, 20 bp, Artificial Sequence
  Description of Artificial Sequence: Synthetic oligonucleotide
  Target: LAMA2; (+) strand; PAM type: YTN; PAM sequence: CTT
ttagtaaaagagtaaattaa

SEQ ID NO: 379980 - DNA, 20 bp, Artificial Sequence
  Description of Artificial Sequence: Synthetic oligonucleotide
  Target: LAMA2; (+) strand; PAM type: YTN; PAM sequence: TTT
tagtaaaagagtaaattaag

SEQ ID NO: 379981 - DNA, 20 bp, Artificial Sequence
  Description of Artificial Sequence: Synthetic oligonucleotide
  Target: LAMA2; (+) strand; PAM type: YTN; PAM sequence: TTT
agtaaaagagtaaattaagg

SEQ ID NO: 379982 - DNA, 20 bp, Artificial Sequence
  Description of Artificial Sequence: Synthetic oligonucleotide
  Target: LAMA2; (+) strand; PAM type: YTN; PAM sequence: TTA
gtaaaagagtaaattaagga

SEQ ID NO: 379983 - DNA, 20 bp, Artificial Sequence
  Description of Artificial Sequence: Synthetic oligonucleotide
  Target: LAMA2; (+) strand; PAM type: YTN; PAM sequence: TTA
aggaccaaaattcactttta

SEQ ID NO: 379984 - DNA, 20 bp, Artificial Sequence
  Description of Artificial Sequence: Synthetic oligonucleotide
  Target: LAMA2; (+) strand; PAM type: YTN; PAM sequence: TTC
acttttatatatgtattcct

SEQ ID NO: 379985 - DNA, 20 bp, Artificial Sequence
  Description of Artificial Sequence: Synthetic oligonucleotide
  Target: LAMA2; (+) strand; PAM type: YTN; PAM sequence: CTT
ttatatatgtattccttggg

SEQ ID NO: 379986 - DNA, 20 bp, Artificial Sequence
  Description of Artificial Sequence: Synthetic oligonucleotide
  Target: LAMA2; (+) strand; PAM type: YTN; PAM sequence: TTT
tatatatgtattccttgggt

SEQ ID NO: 379987 - DNA, 20 bp, Artificial Sequence
  Description of Artificial Sequence: Synthetic oligonucleotide
  Target: LAMA2; (+) strand; PAM type: YTN; PAM sequence: TTT
atatatgtattccttgggtt

SEQ ID NO: 379988 - DNA, 20 bp, Artificial Sequence
  Description of Artificial Sequence: Synthetic oligonucleotide
  Target: LAMA2; (+) strand; PAM type: YTN; PAM sequence: TTA
tatatgtattccttgggttt

SEQ ID NO: 379989 - DNA, 20 bp, Artificial Sequence
  Description of Artificial Sequence: Synthetic oligonucleotide
  Target: LAMA2; (+) strand; PAM type: YTN; PAM sequence: TTC
cttgggtttccttttgatat

SEQ ID NO: 379990 - DNA, 20 bp, Artificial Sequence
  Description of Artificial Sequence: Synthetic oligonucleotide
  Target: LAMA2; (+) strand; PAM type: YTN; PAM sequence: CTT
gggtttccttttgatatttc

SEQ ID NO: 379991 - DNA, 20 bp, Artificial Sequence
  Description of Artificial Sequence: Synthetic oligonucleotide
  Target: LAMA2; (+) strand; PAM type: YTN; PAM sequence: TTG
ggtttccttttgatatttct

SEQ ID NO: 379992 - DNA, 20 bp, Artificial Sequence
  Description of Artificial Sequence: Synthetic oligonucleotide
  Target: LAMA2; (+) strand; PAM type: YTN; PAM sequence: TTT
ccttttgatatttctcacta

SEQ ID NO: 379993 - DNA, 20 bp, Artificial Sequence
  Description of Artificial Sequence: Synthetic oligonucleotide
  Target: LAMA2; (+) strand; PAM type: YTN; PAM sequence: TTC
cttttgatatttctcactat

SEQ ID NO: 379994 - DNA, 20 bp, Artificial Sequence
  Description of Artificial Sequence: Synthetic oligonucleotide
  Target: LAMA2; (+) strand; PAM type: YTN; PAM sequence: CTT
ttgatatttctcactataac

SEQ ID NO: 379995 - DNA, 20 bp, Artificial Sequence
  Description of Artificial Sequence: Synthetic oligonucleotide
  Target: LAMA2; (+) strand; PAM type: YTN; PAM sequence: TTT
tgatatttctcactataaca

SEQ ID NO: 379996 - DNA, 20 bp, Artificial Sequence
  Description of Artificial Sequence: Synthetic oligonucleotide
  Target: LAMA2; (+) strand; PAM type: YTN; PAM sequence: TTT
gatatttctcactataacag

SEQ ID NO: 379997 - DNA, 20 bp, Artificial Sequence
  Description of Artificial Sequence: Synthetic oligonucleotide
  Target: LAMA2; (+) strand; PAM type: YTN; PAM sequence: TTG
atatttctcactataacagg

SEQ ID NO: 379998 - DNA, 20 bp, Artificial Sequence
  Description of Artificial Sequence: Synthetic oligonucleotide
  Target: LAMA2; (+) strand; PAM type: YTN; PAM sequence: TTT
ctcactataacaggagatta

SEQ ID NO: 379999 - DNA, 20 bp, Artificial Sequence
  Description of Artificial Sequence: Synthetic oligonucleotide
  Target: LAMA2; (+) strand; PAM type: YTN; PAM sequence: TTC
tcactataacaggagattat

SEQ ID NO: 380000 - DNA, 20 bp, Artificial Sequence
  Description of Artificial Sequence: Synthetic oligonucleotide
  Target: LAMA2; (+) strand; PAM type: YTN; PAM sequence: CTC
actataacaggagattattt

SEQ ID NO: 380001 - DNA, 20 bp, Artificial Sequence
  Description of Artificial Sequence: Synthetic oligonucleotide
  Target: LAMA2; (+) strand; PAM type: YTN; PAM sequence: CTA
taacaggagattatttttat

SEQ ID NO: 380002 - DNA, 20 bp, Artificial Sequence
  Description of Artificial Sequence: Synthetic oligonucleotide
  Target: LAMA2; (+) strand; PAM type: YTN; PAM sequence: TTA
tttttatatgaaataataaa

SEQ ID NO: 380003 - DNA, 20 bp, Artificial Sequence
  Description of Artificial Sequence: Synthetic oligonucleotide
  Target: LAMA2; (+) strand; PAM type: YTN; PAM sequence: TTT
ttatatgaaataataaaaaa

SEQ ID NO: 380004 - DNA, 20 bp, Artificial Sequence
  Description of Artificial Sequence: Synthetic oligonucleotide
  Target: LAMA2; (+) strand; PAM type: YTN; PAM sequence: TTT
tatatgaaataataaaaaaa

SEQ ID NO: 380005 - DNA, 20 bp, Artificial Sequence
  Description of Artificial Sequence: Synthetic oligonucleotide
  Target: LAMA2; (+) strand; PAM type: YTN; PAM sequence: TTT
atatgaaataataaaaaaaa

SEQ ID NO: 380006 - DNA, 20 bp, Artificial Sequence
  Description of Artificial Sequence: Synthetic oligonucleotide
  Target: LAMA2; (+) strand; PAM type: YTN; PAM sequence: TTA
tatgaaataataaaaaaaat

SEQ ID NO: 380007 - DNA, 20 bp, Artificial Sequence
  Description of Artificial Sequence: Synthetic oligonucleotide
  Target: LAMA2; (+) strand; PAM type: YTN; PAM sequence: CTT
aaaaaacgctgttatctata

SEQ ID NO: 380008 - DNA, 20 bp, Artificial Sequence
  Description of Artificial Sequence: Synthetic oligonucleotide
  Target: LAMA2; (+) strand; PAM type: YTN; PAM sequence: TTA
aaaaacgctgttatctatac

SEQ ID NO: 380009 - DNA, 20 bp, Artificial Sequence
  Description of Artificial Sequence: Synthetic oligonucleotide
  Target: LAMA2; (+) strand; PAM type: YTN; PAM sequence: CTG
ttatctatactgttaattat

SEQ ID NO: 380010 - DNA, 20 bp, Artificial Sequence
  Description of Artificial Sequence: Synthetic oligonucleotide
  Target: LAMA2; (+) strand; PAM type: YTN; PAM sequence: TTA
tctatactgttaattatttt

SEQ ID NO: 380011 - DNA, 20 bp, Artificial Sequence
  Description of Artificial Sequence: Synthetic oligonucleotide
  Target: LAMA2; (+) strand; PAM type: YTN; PAM sequence: CTA
tactgttaattattttagaa

SEQ ID NO: 380012 - DNA, 20 bp, Artificial Sequence
  Description of Artificial Sequence: Synthetic oligonucleotide
  Target: LAMA2; (+) strand; PAM type: YTN; PAM sequence: CTG
ttaattattttagaatatca

SEQ ID NO: 380013 - DNA, 20 bp, Artificial Sequence
  Description of Artificial Sequence: Synthetic oligonucleotide
  Target: LAMA2; (+) strand; PAM type: YTN; PAM sequence: TTA
attattttagaatatcacat

SEQ ID NO: 380014 - DNA, 20 bp, Artificial Sequence
  Description of Artificial Sequence: Synthetic oligonucleotide
  Target: LAMA2; (+) strand; PAM type: YTN; PAM sequence: TTA
ttttagaatatcacatgtaa

SEQ ID NO: 380015 - DNA, 20 bp, Artificial Sequence
  Description of Artificial Sequence: Synthetic oligonucleotide
  Target: LAMA2; (+) strand; PAM type: YTN; PAM sequence: TTT
tagaatatcacatgtaaatt

SEQ ID NO: 380016 - DNA, 20 bp, Artificial Sequence
  Description of Artificial Sequence: Synthetic oligonucleotide
  Target: LAMA2; (+) strand; PAM type: YTN; PAM sequence: TTT
agaatatcacatgtaaatta

SEQ ID NO: 380017 - DNA, 20 bp, Artificial Sequence
  Description of Artificial Sequence: Synthetic oligonucleotide
  Target: LAMA2; (+) strand; PAM type: YTN; PAM sequence: TTA
gaatatcacatgtaaattag

SEQ ID NO: 380018 - DNA, 20 bp, Artificial Sequence
  Description of Artificial Sequence: Synthetic oligonucleotide
  Target: LAMA2; (+) strand; PAM type: YTN; PAM sequence: TTA
ggtggcagaagccatagcag

SEQ ID NO: 380019 - DNA, 20 bp, Artificial Sequence
  Description of Artificial Sequence: Synthetic oligonucleotide
  Target: LAMA2; (+) strand; PAM type: YTN; PAM sequence: TTT
gcatgtcttagaaaatagca

SEQ ID NO: 380020 - DNA, 20 bp, Artificial Sequence
  Description of Artificial Sequence: Synthetic oligonucleotide
  Target: LAMA2; (+) strand; PAM type: YTN; PAM sequence: TTG
catgtcttagaaaatagcag

SEQ ID NO: 380021 - DNA, 20 bp, Artificial Sequence
  Description of Artificial Sequence: Synthetic oligonucleotide
  Target: LAMA2; (+) strand; PAM type: YTN; PAM sequence: CTT
agaaaatagcaggtaatttc

SEQ ID NO: 380022 - DNA, 20 bp, Artificial Sequence
  Description of Artificial Sequence: Synthetic oligonucleotide
  Target: LAMA2; (+) strand; PAM type: YTN; PAM sequence: TTA
gaaaatagcaggtaatttcg

SEQ ID NO: 380023 - DNA, 20 bp, Artificial Sequence
  Description of Artificial Sequence: Synthetic oligonucleotide
  Target: LAMA2; (+) strand; PAM type: YTN; PAM sequence: TTT
cgtgagtttgcaaatagatt

SEQ ID NO: 380024 - DNA, 20 bp, Artificial Sequence
  Description of Artificial Sequence: Synthetic oligonucleotide
  Target: LAMA2; (+) strand; PAM type: YTN; PAM sequence: TTC
gtgagtttgcaaatagatta

SEQ ID NO: 380025 - DNA, 20 bp, Artificial Sequence
  Description of Artificial Sequence: Synthetic oligonucleotide
  Target: LAMA2; (+) strand; PAM type: YTN; PAM sequence: TTT
gcaaatagattattttgcaa

SEQ ID NO: 380026 - DNA, 20 bp, Artificial Sequence
  Description of Artificial Sequence: Synthetic oligonucleotide
  Target: LAMA2; (+) strand; PAM type: YTN; PAM sequence: TTG
caaatagattattttgcaaa

SEQ ID NO: 380027 - DNA, 20 bp, Artificial Sequence
  Description of Artificial Sequence: Synthetic oligonucleotide
  Target: LAMA2; (+) strand; PAM type: YTN; PAM sequence: TTA
ttttgcaaatggttctgtac

SEQ ID NO: 380028 - DNA, 20 bp, Artificial Sequence
  Description of Artificial Sequence: Synthetic oligonucleotide
  Target: LAMA2; (+) strand; PAM type: YTN; PAM sequence: TTT
tgcaaatggttctgtactgc

SEQ ID NO: 380029 - DNA, 20 bp, Artificial Sequence
  Description of Artificial Sequence: Synthetic oligonucleotide
  Target: LAMA2; (+) strand; PAM type: YTN; PAM sequence: TTT
gcaaatggttctgtactgca

SEQ ID NO: 380030 - DNA, 20 bp, Artificial Sequence
  Description of Artificial Sequence: Synthetic oligonucleotide
  Target: LAMA2; (+) strand; PAM type: YTN; PAM sequence: TTG
caaatggttctgtactgcag

SEQ ID NO: 380031 - DNA, 20 bp, Artificial Sequence
  Description of Artificial Sequence: Synthetic oligonucleotide
  Target: LAMA2; (+) strand; PAM type: YTN; PAM sequence: TTC
tgtactgcagtaaaagagtt

SEQ ID NO: 380032 - DNA, 20 bp, Artificial Sequence
  Description of Artificial Sequence: Synthetic oligonucleotide
  Target: LAMA2; (+) strand; PAM type: YTN; PAM sequence: CTG
tactgcagtaaaagagtttg

SEQ ID NO: 380033 - DNA, 20 bp, Artificial Sequence
  Description of Artificial Sequence: Synthetic oligonucleotide
  Target: LAMA2; (+) strand; PAM type: YTN; PAM sequence: CTG
cagtaaaagagtttggtagt

SEQ ID NO: 380034 - DNA, 20 bp, Artificial Sequence
  Description of Artificial Sequence: Synthetic oligonucleotide
  Target: LAMA2; (+) strand; PAM type: YTN; PAM sequence: TTT
ggtagtaaacagaacatctt

SEQ ID NO: 380035 - DNA, 20 bp, Artificial Sequence
  Description of Artificial Sequence: Synthetic oligonucleotide
  Target: LAMA2; (+) strand; PAM type: YTN; PAM sequence: TTG
gtagtaaacagaacatcttg

SEQ ID NO: 380036 - DNA, 20 bp, Artificial Sequence
  Description of Artificial Sequence: Synthetic oligonucleotide
  Target: LAMA2; (+) strand; PAM type: YTN; PAM sequence: CTT
gttagtggaactgatagaaa

SEQ ID NO: 380037 - DNA, 20 bp, Artificial Sequence
  Description of Artificial Sequence: Synthetic oligonucleotide
  Target: LAMA2; (+) strand; PAM type: YTN; PAM sequence: TTG
ttagtggaactgatagaaac

SEQ ID NO: 380038 - DNA, 20 bp, Artificial Sequence
  Description of Artificial Sequence: Synthetic oligonucleotide
  Target: LAMA2; (+) strand; PAM type: YTN; PAM sequence: TTA
gtggaactgatagaaacaat

SEQ ID NO: 380039 - DNA, 20 bp, Artificial Sequence
  Description of Artificial Sequence: Synthetic oligonucleotide
  Target: LAMA2; (+) strand; PAM type: YTN; PAM sequence: CTG
atagaaacaatattgtcatt

SEQ ID NO: 380040 - DNA, 20 bp, Artificial Sequence
  Description of Artificial Sequence: Synthetic oligonucleotide
  Target: LAMA2; (+) strand; PAM type: YTN; PAM sequence: TTG
tcattcatctttaattatac

SEQ ID NO: 380041 - DNA, 20 bp, Artificial Sequence
  Description of Artificial Sequence: Synthetic oligonucleotide
  Target: LAMA2; (+) strand; PAM type: YTN; PAM sequence: TTC
atctttaattatactttctt

SEQ ID NO: 380042 - DNA, 20 bp, Artificial Sequence
  Description of Artificial Sequence: Synthetic oligonucleotide
  Target: LAMA2; (+) strand; PAM type: YTN; PAM sequence: CTT
taattatactttctttgctt

SEQ ID NO: 380043 - DNA, 20 bp, Artificial Sequence
  Description of Artificial Sequence: Synthetic oligonucleotide
  Target: LAMA2; (+) strand; PAM type: YTN; PAM sequence: TTT
aattatactttctttgcttc

SEQ ID NO: 380044 - DNA, 20 bp, Artificial Sequence
  Description of Artificial Sequence: Synthetic oligonucleotide
  Target: LAMA2; (+) strand; PAM type: YTN; PAM sequence: TTA
attatactttctttgcttct

SEQ ID NO: 380045 - DNA, 20 bp, Artificial Sequence
  Description of Artificial Sequence: Synthetic oligonucleotide
  Target: LAMA2; (+) strand; PAM type: YTN; PAM sequence: TTA
tactttctttgcttctctca

SEQ ID NO: 380046 - DNA, 20 bp, Artificial Sequence
  Description of Artificial Sequence: Synthetic oligonucleotide
  Target: LAMA2; (+) strand; PAM type: YTN; PAM sequence: CTT
tctttgcttctctcacacca

SEQ ID NO: 380047 - DNA, 20 bp, Artificial Sequence
  Description of Artificial Sequence: Synthetic oligonucleotide
  Target: LAMA2; (+) strand; PAM type: YTN; PAM sequence: TTT
ctttgcttctctcacaccaa

SEQ ID NO: 380048 - DNA, 20 bp, Artificial Sequence
  Description of Artificial Sequence: Synthetic oligonucleotide
  Target: LAMA2; (+) strand; PAM type: YTN; PAM sequence: TTC
tttgcttctctcacaccaat

SEQ ID NO: 380049 - DNA, 20 bp, Artificial Sequence
  Description of Artificial Sequence: Synthetic oligonucleotide
  Target: LAMA2; (+) strand; PAM type: YTN; PAM sequence: CTT
tgcttctctcacaccaattt

SEQ ID NO: 380050 - DNA, 20 bp, Artificial Sequence
  Description of Artificial Sequence: Synthetic oligonucleotide
  Target: LAMA2; (+) strand; PAM type: YTN; PAM sequence: TTT
gcttctctcacaccaatttc

SEQ ID NO: 380051 - DNA, 20 bp, Artificial Sequence
  Description of Artificial Sequence: Synthetic oligonucleotide
  Target: LAMA2; (+) strand; PAM type: YTN; PAM sequence: TTG
cttctctcacaccaatttca

SEQ ID NO: 380052 - DNA, 20 bp, Artificial Sequence
  Description of Artificial Sequence: Synthetic oligonucleotide
  Target: LAMA2; (+) strand; PAM type: YTN; PAM sequence: CTT
ctctcacaccaatttcacct

SEQ ID NO: 380053 - DNA, 20 bp, Artificial Sequence
  Description of Artificial Sequence: Synthetic oligonucleotide
  Target: LAMA2; (+) strand; PAM type: YTN; PAM sequence: TTC
tctcacaccaatttcacctt

SEQ ID NO: 380054 - DNA, 20 bp, Artificial Sequence
  Description of Artificial Sequence: Synthetic oligonucleotide
  Target: LAMA2; (+) strand; PAM type: YTN; PAM sequence: CTC
tcacaccaatttcaccttcc

SEQ ID NO: 380055 - DNA, 20 bp, Artificial Sequence
  Description of Artificial Sequence: Synthetic oligonucleotide
  Target: LAMA2; (+) strand; PAM type: YTN; PAM sequence: CTC
acaccaatttcaccttccta

SEQ ID NO: 380056 - DNA, 20 bp, Artificial Sequence
  Description of Artificial Sequence: Synthetic oligonucleotide
  Target: LAMA2; (+) strand; PAM type: YTN; PAM sequence: TTT
caccttcctacactgtgaca

SEQ ID NO: 380057 - DNA, 20 bp, Artificial Sequence
  Description of Artificial Sequence: Synthetic oligonucleotide
  Target: LAMA2; (+) strand; PAM type: YTN; PAM sequence: TTC
accttcctacactgtgacac

SEQ ID NO: 380058 - DNA, 20 bp, Artificial Sequence
  Description of Artificial Sequence: Synthetic oligonucleotide
  Target: LAMA2; (+) strand; PAM type: YTN; PAM sequence: CTT
cctacactgtgacactttgt

SEQ ID NO: 380059 - DNA, 20 bp, Artificial Sequence
  Description of Artificial Sequence: Synthetic oligonucleotide
  Target: LAMA2; (+) strand; PAM type: YTN; PAM sequence: TTC
ctacactgtgacactttgtc

SEQ ID NO: 380060 - DNA, 20 bp, Artificial Sequence
  Description of Artificial Sequence: Synthetic oligonucleotide
  Target: LAMA2; (+) strand; PAM type: YTN; PAM sequence: CTA
cactgtgacactttgtcttt

SEQ ID NO: 380061 - DNA, 20 bp, Artificial Sequence
  Description of Artificial Sequence: Synthetic oligonucleotide
  Target: LAMA2; (+) strand; PAM type: YTN; PAM sequence: CTG
tgacactttgtctttttttt

SEQ ID NO: 380062 - DNA, 20 bp, Artificial Sequence
  Description of Artificial Sequence: Synthetic oligonucleotide
  Target: LAMA2; (+) strand; PAM type: YTN; PAM sequence: CTT
tgtcttttttttttttcccg

SEQ ID NO: 380063 - DNA, 20 bp, Artificial Sequence
  Description of Artificial Sequence: Synthetic oligonucleotide
  Target: LAMA2; (+) strand; PAM type: YTN; PAM sequence: TTT
gtcttttttttttttcccgc

SEQ ID NO: 380064 - DNA, 20 bp, Artificial Sequence
  Description of Artificial Sequence: Synthetic oligonucleotide
  Target: LAMA2; (+) strand; PAM type: YTN; PAM sequence: TTG
tcttttttttttttcccgcc

SEQ ID NO: 380065 - DNA, 20 bp, Artificial Sequence
  Description of Artificial Sequence: Synthetic oligonucleotide
  Target: LAMA2; (+) strand; PAM type: YTN; PAM sequence: CTT
ttttttttttcccgccctat

SEQ ID NO: 380066 - DNA, 20 bp, Artificial Sequence
  Description of Artificial Sequence: Synthetic oligonucleotide
  Target: LAMA2; (+) strand; PAM type: YTN; PAM sequence: TTT
tttttttttcccgccctatg

SEQ ID NO: 380067 - DNA, 20 bp, Artificial Sequence
  Description of Artificial Sequence: Synthetic oligonucleotide
  Target: LAMA2; (+) strand; PAM type: YTN; PAM sequence: TTT
ttttttttcccgccctatgt

SEQ ID NO: 380068 - DNA, 20 bp, Artificial Sequence
  Description of Artificial Sequence: Synthetic oligonucleotide
  Target: LAMA2; (+) strand; PAM type: YTN; PAM sequence: TTT
tttttttcccgccctatgtc

SEQ ID NO: 380069 - DNA, 20 bp, Artificial Sequence
  Description of Artificial Sequence: Synthetic oligonucleotide
  Target: LAMA2; (+) strand; PAM type: YTN; PAM sequence: TTT
ttttttcccgccctatgtct

SEQ ID NO: 380070 - DNA, 20 bp, Artificial Sequence
  Description of Artificial Sequence: Synthetic oligonucleotide
  Target: LAMA2; (+) strand; PAM type: YTN; PAM sequence: TTT
tttttcccgccctatgtctt

SEQ ID NO: 380071 - DNA, 20 bp, Artificial Sequence
  Description of Artificial Sequence: Synthetic oligonucleotide
  Target: LAMA2; (+) strand; PAM type: YTN; PAM sequence: TTT
ttttcccgccctatgtcttt

SEQ ID NO: 380072 - DNA, 20 bp, Artificial Sequence
  Description of Artificial Sequence: Synthetic oligonucleotide
  Target: LAMA2; (+) strand; PAM type: YTN; PAM sequence: TTT
tttcccgccctatgtctttt

SEQ ID NO: 380073 - DNA, 20 bp, Artificial Sequence
  Description of Artificial Sequence: Synthetic oligonucleotide
  Target: LAMA2; (+) strand; PAM type: YTN; PAM sequence: TTT
ttcccgccctatgtcttttt

SEQ ID NO: 380074 - DNA, 20 bp, Artificial Sequence
  Description of Artificial Sequence: Synthetic oligonucleotide
  Target: LAMA2; (+) strand; PAM type: YTN; PAM sequence: TTT
tcccgccctatgtctttttc

SEQ ID NO: 380075 - DNA, 20 bp, Artificial Sequence
  Description of Artificial Sequence: Synthetic oligonucleotide
  Target: LAMA2; (+) strand; PAM type: YTN; PAM sequence: TTT
cccgccctatgtctttttct

SEQ ID NO: 380076 - DNA, 20 bp, Artificial Sequence
  Description of Artificial Sequence: Synthetic oligonucleotide
  Target: LAMA2; (+) strand; PAM type: YTN; PAM sequence: TTC
ccgccctatgtctttttctt

SEQ ID NO: 380077 - DNA, 20 bp, Artificial Sequence
  Description of Artificial Sequence: Synthetic oligonucleotide
  Target: LAMA2; (+) strand; PAM type: YTN; PAM sequence: CTA
tgtctttttcttttgtcaca

SEQ ID NO: 380078 - DNA, 20 bp, Artificial Sequence
  Description of Artificial Sequence: Synthetic oligonucleotide
  Target: LAMA2; (+) strand; PAM type: YTN; PAM sequence: CTT
tttcttttgtcacactgttt

SEQ ID NO: 380079 - DNA, 20 bp, Artificial Sequence
  Description of Artificial Sequence: Synthetic oligonucleotide
  Target: LAMA2; (+) strand; PAM type: YTN; PAM sequence: TTT
ttcttttgtcacactgtttt

SEQ ID NO: 380080 - DNA, 20 bp, Artificial Sequence
  Description of Artificial Sequence: Synthetic oligonucleotide
  Target: LAMA2; (+) strand; PAM type: YTN; PAM sequence: TTT
tcttttgtcacactgtttta

SEQ ID NO: 380081 - DNA, 20 bp, Artificial Sequence
  Description of Artificial Sequence: Synthetic oligonucleotide
  Target: LAMA2; (+) strand; PAM type: YTN; PAM sequence: TTT
cttttgtcacactgttttac

SEQ ID NO: 380082 - DNA, 20 bp, Artificial Sequence
  Description of Artificial Sequence: Synthetic oligonucleotide
  Target: LAMA2; (+) strand; PAM type: YTN; PAM sequence: TTC
ttttgtcacactgttttaca

SEQ ID NO: 380083 - DNA, 20 bp, Artificial Sequence
  Description of Artificial Sequence: Synthetic oligonucleotide
  Target: LAMA2; (+) strand; PAM type: YTN; PAM sequence: CTT
ttgtcacactgttttacata

SEQ ID NO: 380084 - DNA, 20 bp, Artificial Sequence
  Description of Artificial Sequence: Synthetic oligonucleotide
  Target: LAMA2; (+) strand; PAM type: YTN; PAM sequence: TTT
tgtcacactgttttacatac

SEQ ID NO: 380085 - DNA, 20 bp, Artificial Sequence
  Description of Artificial Sequence: Synthetic oligonucleotide
  Target: LAMA2; (+) strand; PAM type: YTN; PAM sequence: TTT
gtcacactgttttacatacc

SEQ ID NO: 380086 - DNA, 20 bp, Artificial Sequence
  Description of Artificial Sequence: Synthetic oligonucleotide
  Target: LAMA2; (+) strand; PAM type: YTN; PAM sequence: TTG
tcacactgttttacatacct

SEQ ID NO: 380087 - DNA, 20 bp, Artificial Sequence
  Description of Artificial Sequence: Synthetic oligonucleotide
  Target: LAMA2; (+) strand; PAM type: YTN; PAM sequence: CTG
ttttacatacctcaccaaat

SEQ ID NO: 380088 - DNA, 20 bp, Artificial Sequence
  Description of Artificial Sequence: Synthetic oligonucleotide
  Target: LAMA2; (+) strand; PAM type: YTN; PAM sequence: TTT
tacatacctcaccaaatgag

SEQ ID NO: 380089 - DNA, 20 bp, Artificial Sequence
  Description of Artificial Sequence: Synthetic oligonucleotide
  Target: LAMA2; (+) strand; PAM type: YTN; PAM sequence: TTT
acatacctcaccaaatgaga

SEQ ID NO: 380090 - DNA, 20 bp, Artificial Sequence
  Description of Artificial Sequence: Synthetic oligonucleotide
  Target: LAMA2; (+) strand; PAM type: YTN; PAM sequence: TTA
catacctcaccaaatgagat

SEQ ID NO: 380091 - DNA, 20 bp, Artificial Sequence
  Description of Artificial Sequence: Synthetic oligonucleotide
  Target: LAMA2; (+) strand; PAM type: YTN; PAM sequence: CTC
accaaatgagatcttttggt

SEQ ID NO: 380092 - DNA, 20 bp, Artificial Sequence
  Description of Artificial Sequence: Synthetic oligonucleotide
  Target: LAMA2; (+) strand; PAM type: YTN; PAM sequence: CTT
ttggtttaagtgaccgtttt

SEQ ID NO: 380093 - DNA, 20 bp, Artificial Sequence
  Description of Artificial Sequence: Synthetic oligonucleotide
  Target: LAMA2; (+) strand; PAM type: YTN; PAM sequence: TTT
tggtttaagtgaccgttttt

SEQ ID NO: 380094 - DNA, 20 bp, Artificial Sequence
  Description of Artificial Sequence: Synthetic oligonucleotide
  Target: LAMA2; (+) strand; PAM type: YTN; PAM sequence: TTT
ggtttaagtgaccgtttttt

SEQ ID NO: 380095 - DNA, 20 bp, Artificial Sequence
  Description of Artificial Sequence: Synthetic oligonucleotide
  Target: LAMA2; (+) strand; PAM type: YTN; PAM sequence: TTG
gtttaagtgaccgttttttt

SEQ ID NO: 380096 - DNA, 20 bp, Artificial Sequence
  Description of Artificial Sequence: Synthetic oligonucleotide
  Target: LAMA2; (+) strand; PAM type: YTN; PAM sequence: TTT
aagtgaccgtttttttgaaa

SEQ ID NO: 380097 - DNA, 20 bp, Artificial Sequence
  Description of Artificial Sequence: Synthetic oligonucleotide
  Target: LAMA2; (+) strand; PAM type: YTN; PAM sequence: TTA
agtgaccgtttttttgaaac

SEQ ID NO: 380098 - DNA, 20 bp, Artificial Sequence
  Description of Artificial Sequence: Synthetic oligonucleotide
  Target: LAMA2; (+) strand; PAM type: YTN; PAM sequence: TTT
ttttgaaactttagaataca

SEQ ID NO: 380099 - DNA, 20 bp, Artificial Sequence
  Description of Artificial Sequence: Synthetic oligonucleotide
  Target: LAMA2; (+) strand; PAM type: YTN; PAM sequence: TTT
tttgaaactttagaatacat

SEQ ID NO: 380100 - DNA, 20 bp, Artificial Sequence
  Description of Artificial Sequence: Synthetic oligonucleotide
  Target: LAMA2; (+) strand; PAM type: YTN; PAM sequence: TTT
ttgaaactttagaatacatt

SEQ ID NO: 380101 - DNA, 20 bp, Artificial Sequence
  Description of Artificial Sequence: Synthetic oligonucleotide
  Target: LAMA2; (+) strand; PAM type: YTN; PAM sequence: TTT
tgaaactttagaatacattt

SEQ ID NO: 380102 - DNA, 20 bp, Artificial Sequence
  Description of Artificial Sequence: Synthetic oligonucleotide
  Target: LAMA2; (+) strand; PAM type: YTN; PAM sequence: TTT
gaaactttagaatacatttt

SEQ ID NO: 380103 - DNA, 20 bp, Artificial Sequence
  Description of Artificial Sequence: Synthetic oligonucleotide
  Target: LAMA2; (+) strand; PAM type: YTN; PAM sequence: TTG
aaactttagaatacattttt

SEQ ID NO: 380104 - DNA, 20 bp, Artificial Sequence
  Description of Artificial Sequence: Synthetic oligonucleotide
  Target: LAMA2; (+) strand; PAM type: YTN; PAM sequence: CTT
tagaatacatttttcctaat

SEQ ID NO: 380105 - DNA, 20 bp, Artificial Sequence
  Description of Artificial Sequence: Synthetic oligonucleotide
  Target: LAMA2; (+) strand; PAM type: YTN; PAM sequence: TTT
agaatacatttttcctaatc

SEQ ID NO: 380106 - DNA, 20 bp, Artificial Sequence
  Description of Artificial Sequence: Synthetic oligonucleotide
  Target: LAMA2; (+) strand; PAM type: YTN; PAM sequence: TTA
gaatacatttttcctaatct

SEQ ID NO: 380107 - DNA, 20 bp, Artificial Sequence
  Description of Artificial Sequence: Synthetic oligonucleotide
  Target: LAMA2; (+) strand; PAM type: YTN; PAM sequence: TTT
ttcctaatctcagtaaaaac

SEQ ID NO: 380108 - DNA, 20 bp, Artificial Sequence
  Description of Artificial Sequence: Synthetic oligonucleotide
  Target: LAMA2; (+) strand; PAM type: YTN; PAM sequence: TTT
tcctaatctcagtaaaaact

SEQ ID NO: 380109 - DNA, 20 bp, Artificial Sequence
  Description of Artificial Sequence: Synthetic oligonucleotide
  Target: LAMA2; (+) strand; PAM type: YTN; PAM sequence: TTT
cctaatctcagtaaaaactg

SEQ ID NO: 380110 - DNA, 20 bp, Artificial Sequence
  Description of Artificial Sequence: Synthetic oligonucleotide
  Target: LAMA2; (+) strand; PAM type: YTN; PAM sequence: TTC
ctaatctcagtaaaaactgg

SEQ ID NO: 380111 - DNA, 20 bp, Artificial Sequence
  Description of Artificial Sequence: Synthetic oligonucleotide
  Target: LAMA2; (+) strand; PAM type: YTN; PAM sequence: CTA
atctcagtaaaaactggggt

SEQ ID NO: 380112 - DNA, 20 bp, Artificial Sequence
  Description of Artificial Sequence: Synthetic oligonucleotide
  Target: LAMA2; (+) strand; PAM type: YTN; PAM sequence: CTC
agtaaaaactggggtcatag

SEQ ID NO: 380113 - DNA, 20 bp, Artificial Sequence
  Description of Artificial Sequence: Synthetic oligonucleotide
  Target: LAMA2; (+) strand; PAM type: YTN; PAM sequence: CTG
gggtcatagtctcacaatgc

SEQ ID NO: 380114 - DNA, 20 bp, Artificial Sequence
  Description of Artificial Sequence: Synthetic oligonucleotide
  Target: LAMA2; (+) strand; PAM type: YTN; PAM sequence: CTC
acaatgctaagaacaaataa

SEQ ID NO: 380115 - DNA, 20 bp, Artificial Sequence
  Description of Artificial Sequence: Synthetic oligonucleotide
  Target: LAMA2; (+) strand; PAM type: YTN; PAM sequence: CTA
agaacaaataaagctgtcat

SEQ ID NO: 380116 - DNA, 20 bp, Artificial Sequence
  Description of Artificial Sequence: Synthetic oligonucleotide
  Target: LAMA2; (+) strand; PAM type: YTN; PAM sequence: CTG
tcatcagcatttgattttgt

SEQ ID NO: 380117 - DNA, 20 bp, Artificial Sequence
  Description of Artificial Sequence: Synthetic oligonucleotide
  Target: LAMA2; (+) strand; PAM type: YTN; PAM sequence: TTT
gattttgtaaggcagtggaa

SEQ ID NO: 380118 - DNA, 20 bp, Artificial Sequence
  Description of Artificial Sequence: Synthetic oligonucleotide
  Target: LAMA2; (+) strand; PAM type: YTN; PAM sequence: TTG
attttgtaaggcagtggaat

SEQ ID NO: 380119 - DNA, 20 bp, Artificial Sequence
  Description of Artificial Sequence: Synthetic oligonucleotide
  Target: LAMA2; (+) strand; PAM type: YTN; PAM sequence: TTT
tgtaaggcagtggaattgtg

SEQ ID NO: 380120 - DNA, 20 bp, Artificial Sequence
  Description of Artificial Sequence: Synthetic oligonucleotide
  Target: LAMA2; (+) strand; PAM type: YTN; PAM sequence: TTT
gtaaggcagtggaattgtgg

SEQ ID NO: 380121 - DNA, 20 bp, Artificial Sequence
  Description of Artificial Sequence: Synthetic oligonucleotide
  Target: LAMA2; (+) strand; PAM type: YTN; PAM sequence: TTG
taaggcagtggaattgtggc

SEQ ID NO: 380122 - DNA, 20 bp, Artificial Sequence
  Description of Artificial Sequence: Synthetic oligonucleotide
  Target: LAMA2; (+) strand; PAM type: YTN; PAM sequence: TTG
tggcaaaggtttttaaaagg

SEQ ID NO: 380123 - DNA, 20 bp, Artificial Sequence
  Description of Artificial Sequence: Synthetic oligonucleotide
  Target: LAMA2; (+) strand; PAM type: YTN; PAM sequence: TTT
ttaaaaggtttgaatagtcc

SEQ ID NO: 380124 - DNA, 20 bp, Artificial Sequence
  Description of Artificial Sequence: Synthetic oligonucleotide
  Target: LAMA2; (+) strand; PAM type: YTN; PAM sequence: TTT
taaaaggtttgaatagtccc

SEQ ID NO: 380125 - DNA, 20 bp, Artificial Sequence
  Description of Artificial Sequence: Synthetic oligonucleotide
  Target: LAMA2; (+) strand; PAM type: YTN; PAM sequence: TTT
aaaaggtttgaatagtcccc

SEQ ID NO: 380126 - DNA, 20 bp, Artificial Sequence
  Description of Artificial Sequence: Synthetic oligonucleotide
  Target: LAMA2; (+) strand; PAM type: YTN; PAM sequence: TTA
aaaggtttgaatagtccccc

SEQ ID NO: 380127 - DNA, 20 bp, Artificial Sequence
  Description of Artificial Sequence: Synthetic oligonucleotide
  Target: LAMA2; (+) strand; PAM type: YTN; PAM sequence: TTT
gaatagtccccctaaagtaa

SEQ ID NO: 380128 - DNA, 20 bp, Artificial Sequence
  Description of Artificial Sequence: Synthetic oligonucleotide
  Target: LAMA2; (+) strand; PAM type: YTN; PAM sequence: TTG
aatagtccccctaaagtaat

SEQ ID NO: 380129 - DNA, 20 bp, Artificial Sequence
  Description of Artificial Sequence: Synthetic oligonucleotide
  Target: LAMA2; (+) strand; PAM type: YTN; PAM sequence: CTA
aagtaattaaaataaccttg

SEQ ID NO: 380130 - DNA, 20 bp, Artificial Sequence
  Description of Artificial Sequence: Synthetic oligonucleotide
  Target: LAMA2; (+) strand; PAM type: YTN; PAM sequence: TTA
aaataaccttgtatctttat

SEQ ID NO: 380131 - DNA, 20 bp, Artificial Sequence
  Description of Artificial Sequence: Synthetic oligonucleotide
  Target: LAMA2; (+) strand; PAM type: YTN; PAM sequence: CTT
gtatctttatttattcaatt

SEQ ID NO: 380132 - DNA, 20 bp, Artificial Sequence
  Description of Artificial Sequence: Synthetic oligonucleotide
  Target: LAMA2; (+) strand; PAM type: YTN; PAM sequence: TTG
tatctttatttattcaatta

SEQ ID NO: 380133 - DNA, 20 bp, Artificial Sequence
  Description of Artificial Sequence: Synthetic oligonucleotide
  Target: LAMA2; (+) strand; PAM type: YTN; PAM sequence: CTT
tatttattcaattataaatt

SEQ ID NO: 380134 - DNA, 20 bp, Artificial Sequence
  Description of Artificial Sequence: Synthetic oligonucleotide
  Target: LAMA2; (+) strand; PAM type: YTN; PAM sequence: TTT
atttattcaattataaattt

SEQ ID NO: 380135 - DNA, 20 bp, Artificial Sequence
  Description of Artificial Sequence: Synthetic oligonucleotide
  Target: LAMA2; (+) strand; PAM type: YTN; PAM sequence: TTA
tttattcaattataaattta

SEQ ID NO: 380136 - DNA, 20 bp, Artificial Sequence
  Description of Artificial Sequence: Synthetic oligonucleotide
  Target: LAMA2; (+) strand; PAM type: YTN; PAM sequence: TTT
attcaattataaatttaaat

SEQ ID NO: 380137 - DNA, 20 bp, Artificial Sequence
  Description of Artificial Sequence: Synthetic oligonucleotide
  Target: LAMA2; (+) strand; PAM type: YTN; PAM sequence: TTA
ttcaattataaatttaaatc

SEQ ID NO: 380138 - DNA, 20 bp, Artificial Sequence
  Description of Artificial Sequence: Synthetic oligonucleotide
  Target: LAMA2; (+) strand; PAM type: YTN; PAM sequence: TTC
aattataaatttaaatctca

SEQ ID NO: 380139 - DNA, 20 bp, Artificial Sequence
  Description of Artificial Sequence: Synthetic oligonucleotide
  Target: LAMA2; (+) strand; PAM type: YTN; PAM sequence: TTA
taaatttaaatctcaaaagc

SEQ ID NO: 380140 - DNA, 20 bp, Artificial Sequence
  Description of Artificial Sequence: Synthetic oligonucleotide
  Target: LAMA2; (+) strand; PAM type: YTN; PAM sequence: TTT
aaatctcaaaagcagagagt

SEQ ID NO: 380141 - DNA, 20 bp, Artificial Sequence
  Description of Artificial Sequence: Synthetic oligonucleotide
  Target: LAMA2; (+) strand; PAM type: YTN; PAM sequence: TTA
aatctcaaaagcagagagtt

SEQ ID NO: 380142 - DNA, 20 bp, Artificial Sequence
  Description of Artificial Sequence: Synthetic oligonucleotide
  Target: LAMA2; (+) strand; PAM type: YTN; PAM sequence: CTC
aaaagcagagagtttaagag

SEQ ID NO: 380143 - DNA, 20 bp, Artificial Sequence
  Description of Artificial Sequence: Synthetic oligonucleotide
  Target: LAMA2; (+) strand; PAM type: YTN; PAM sequence: TTT
aagagtttatattctgtttg

SEQ ID NO: 380144 - DNA, 20 bp, Artificial Sequence
  Description of Artificial Sequence: Synthetic oligonucleotide
  Target: LAMA2; (+) strand; PAM type: YTN; PAM sequence: TTA
agagtttatattctgtttga

SEQ ID NO: 380145 - DNA, 20 bp, Artificial Sequence
  Description of Artificial Sequence: Synthetic oligonucleotide
  Target: LAMA2; (+) strand; PAM type: YTN; PAM sequence: TTT
atattctgtttgaggtttga

SEQ ID NO: 380146 - DNA, 20 bp, Artificial Sequence
  Description of Artificial Sequence: Synthetic oligonucleotide
  Target: LAMA2; (+) strand; PAM type: YTN; PAM sequence: TTA
tattctgtttgaggtttgaa

SEQ ID NO: 380147 - DNA, 20 bp, Artificial Sequence
  Description of Artificial Sequence: Synthetic oligonucleotide
  Target: LAMA2; (+) strand; PAM type: YTN; PAM sequence: TTC
tgtttgaggtttgaactttg

SEQ ID NO: 380148 - DNA, 20 bp, Artificial Sequence
  Description of Artificial Sequence: Synthetic oligonucleotide
  Target: LAMA2; (+) strand; PAM type: YTN; PAM sequence: CTG
tttgaggtttgaactttgta

SEQ ID NO: 380149 - DNA, 20 bp, Artificial Sequence
  Description of Artificial Sequence: Synthetic oligonucleotide
  Target: LAMA2; (+) strand; PAM type: YTN; PAM sequence: TTT
gaggtttgaactttgtacat

SEQ ID NO: 380150 - DNA, 20 bp, Artificial Sequence
  Description of Artificial Sequence: Synthetic oligonucleotide
  Target: LAMA2; (+) strand; PAM type: YTN; PAM sequence: TTG
aggtttgaactttgtacatt

SEQ ID NO: 380151 - DNA, 20 bp, Artificial Sequence
  Description of Artificial Sequence: Synthetic oligonucleotide
  Target: LAMA2; (+) strand; PAM type: YTN; PAM sequence: TTT
gaactttgtacattgtatca

SEQ ID NO: 380152 - DNA, 20 bp, Artificial Sequence
  Description of Artificial Sequence: Synthetic oligonucleotide
  Target: LAMA2; (+) strand; PAM type: YTN; PAM sequence: TTG
aactttgtacattgtatcag

SEQ ID NO: 380153 - DNA, 20 bp, Artificial Sequence
  Description of Artificial Sequence: Synthetic oligonucleotide
  Target: LAMA2; (+) strand; PAM type: YTN; PAM sequence: CTT
tgtacattgtatcagtgctg

SEQ ID NO: 380154 - DNA, 20 bp, Artificial Sequence
  Description of Artificial Sequence: Synthetic oligonucleotide
  Target: LAMA2; (+) strand; PAM type: YTN; PAM sequence: TTT
gtacattgtatcagtgctgg

SEQ ID NO: 380155 - DNA, 20 bp, Artificial Sequence
  Description of Artificial Sequence: Synthetic oligonucleotide
  Target: LAMA2; (+) strand; PAM type: YTN; PAM sequence: TTG
tacattgtatcagtgctggc

SEQ ID NO: 380156 - DNA, 20 bp, Artificial Sequence
  Description of Artificial Sequence: Synthetic oligonucleotide
  Target: LAMA2; (+) strand; PAM type: YTN; PAM sequence: TTG
tatcagtgctggcattatct

SEQ ID NO: 380157 - DNA, 20 bp, Artificial Sequence
  Description of Artificial Sequence: Synthetic oligonucleotide
  Target: LAMA2; (+) strand; PAM type: YTN; PAM sequence: CTG
gcattatcttttttctttgc

SEQ ID NO: 380158 - DNA, 20 bp, Artificial Sequence
  Description of Artificial Sequence: Synthetic oligonucleotide
  Target: LAMA2; (+) strand; PAM type: YTN; PAM sequence: TTA
tcttttttctttgcttttgt

SEQ ID NO: 380159 - DNA, 20 bp, Artificial Sequence
  Description of Artificial Sequence: Synthetic oligonucleotide
  Target: LAMA2; (+) strand; PAM type: YTN; PAM sequence: CTT
ttttctttgcttttgtttcc

SEQ ID NO: 380160 - DNA, 20 bp, Artificial Sequence
  Description of Artificial Sequence: Synthetic oligonucleotide
  Target: LAMA2; (+) strand; PAM type: YTN; PAM sequence: TTT
tttctttgcttttgtttcct

SEQ ID NO: 380161 - DNA, 20 bp, Artificial Sequence
  Description of Artificial Sequence: Synthetic oligonucleotide
  Target: LAMA2; (+) strand; PAM type: YTN; PAM sequence: TTT
ttctttgcttttgtttcctt

SEQ ID NO: 380162 - DNA, 20 bp, Artificial Sequence
  Description of Artificial Sequence: Synthetic oligonucleotide
  Target: LAMA2; (+) strand; PAM type: YTN; PAM sequence: TTT
tctttgcttttgtttccttt

SEQ ID NO: 380163 - DNA, 20 bp, Artificial Sequence
  Description of Artificial Sequence: Synthetic oligonucleotide
  Target: LAMA2; (+) strand; PAM type: YTN; PAM sequence: TTT
ctttgcttttgtttcctttt

SEQ ID NO: 380164 - DNA, 20 bp, Artificial Sequence
  Description of Artificial Sequence: Synthetic oligonucleotide
  Target: LAMA2; (+) strand; PAM type: YTN; PAM sequence: TTC
tttgcttttgtttcctttta

SEQ ID NO: 380165 - DNA, 20 bp, Artificial Sequence
  Description of Artificial Sequence: Synthetic oligonucleotide
  Target: LAMA2; (+) strand; PAM type: YTN; PAM sequence: CTT
tgcttttgtttccttttata

SEQ ID NO: 380166 - DNA, 20 bp, Artificial Sequence
  Description of Artificial Sequence: Synthetic oligonucleotide
  Target: LAMA2; (+) strand; PAM type: YTN; PAM sequence: TTT
gcttttgtttccttttataa

SEQ ID NO: 380167 - DNA, 20 bp, Artificial Sequence
  Description of Artificial Sequence: Synthetic oligonucleotide
  Target: LAMA2; (+) strand; PAM type: YTN; PAM sequence: TTG
cttttgtttccttttataaa

SEQ ID NO: 380168 - DNA, 20 bp, Artificial Sequence
  Description of Artificial Sequence: Synthetic oligonucleotide
  Target: LAMA2; (+) strand; PAM type: YTN; PAM sequence: CTT
ttgtttccttttataaagtt

SEQ ID NO: 380169 - DNA, 20 bp, Artificial Sequence
  Description of Artificial Sequence: Synthetic oligonucleotide
  Target: LAMA2; (+) strand; PAM type: YTN; PAM sequence: TTT
tgtttccttttataaagttt

SEQ ID NO: 380170 - DNA, 20 bp, Artificial Sequence
  Description of Artificial Sequence: Synthetic oligonucleotide
  Target: LAMA2; (+) strand; PAM type: YTN; PAM sequence: TTT
gtttccttttataaagttta

SEQ ID NO: 380171 - DNA, 20 bp, Artificial Sequence
  Description of Artificial Sequence: Synthetic oligonucleotide
  Target: LAMA2; (+) strand; PAM type: YTN; PAM sequence: TTG
tttccttttataaagtttaa

SEQ ID NO: 380172 - DNA, 20 bp, Artificial Sequence
  Description of Artificial Sequence: Synthetic oligonucleotide
  Target: LAMA2; (+) strand; PAM type: YTN; PAM sequence: TTT
ccttttataaagtttaattt

SEQ ID NO: 380173 - DNA, 20 bp, Artificial Sequence
  Description of Artificial Sequence: Synthetic oligonucleotide
  Target: LAMA2; (+) strand; PAM type: YTN; PAM sequence: TTC
cttttataaagtttaattta

SEQ ID NO: 380174 - DNA, 20 bp, Artificial Sequence
  Description of Artificial Sequence: Synthetic oligonucleotide
  Target: LAMA2; (+) strand; PAM type: YTN; PAM sequence: CTT
ttataaagtttaatttaagg

SEQ ID NO: 380175 - DNA, 20 bp, Artificial Sequence
  Description of Artificial Sequence: Synthetic oligonucleotide
  Target: LAMA2; (+) strand; PAM type: YTN; PAM sequence: TTT
tataaagtttaatttaagga

SEQ ID NO: 380176 - DNA, 20 bp, Artificial Sequence
  Description of Artificial Sequence: Synthetic oligonucleotide
  Target: LAMA2; (+) strand; PAM type: YTN; PAM sequence: TTT
ataaagtttaatttaaggaa

SEQ ID NO: 380177 - DNA, 20 bp, Artificial Sequence
  Description of Artificial Sequence: Synthetic oligonucleotide
  Target: LAMA2; (+) strand; PAM type: YTN; PAM sequence: TTA
taaagtttaatttaaggaaa

SEQ ID NO: 380178 - DNA, 20 bp, Artificial Sequence
  Description of Artificial Sequence: Synthetic oligonucleotide
  Target: LAMA2; (+) strand; PAM type: YTN; PAM sequence: TTT
aatttaaggaaatagcaact

SEQ ID NO: 380179 - DNA, 20 bp, Artificial Sequence
  Description of Artificial Sequence: Synthetic oligonucleotide
  Target: LAMA2; (+) strand; PAM type: YTN; PAM sequence: TTA
atttaaggaaatagcaactt

SEQ ID NO: 380180 - DNA, 20 bp, Artificial Sequence
  Description of Artificial Sequence: Synthetic oligonucleotide
  Target: LAMA2; (+) strand; PAM type: YTN; PAM sequence: TTT
aaggaaatagcaacttttgc

SEQ ID NO: 380181 - DNA, 20 bp, Artificial Sequence
  Description of Artificial Sequence: Synthetic oligonucleotide
  Target: LAMA2; (+) strand; PAM type: YTN; PAM sequence: TTA
aggaaatagcaacttttgca

SEQ ID NO: 380182 - DNA, 20 bp, Artificial Sequence
  Description of Artificial Sequence: Synthetic oligonucleotide
  Target: LAMA2; (+) strand; PAM type: YTN; PAM sequence: CTT
ttgcatttcagtagttattt

SEQ ID NO: 380183 - DNA, 20 bp, Artificial Sequence
  Description of Artificial Sequence: Synthetic oligonucleotide
  Target: LAMA2; (+) strand; PAM type: YTN; PAM sequence: TTT
tgcatttcagtagttattta

SEQ ID NO: 380184 - DNA, 20 bp, Artificial Sequence
  Description of Artificial Sequence: Synthetic oligonucleotide
  Target: LAMA2; (+) strand; PAM type: YTN; PAM sequence: TTT
gcatttcagtagttatttaa

SEQ ID NO: 380185 - DNA, 20 bp, Artificial Sequence
  Description of Artificial Sequence: Synthetic oligonucleotide
  Target: LAMA2; (+) strand; PAM type: YTN; PAM sequence: TTG
catttcagtagttatttaaa

SEQ ID NO: 380186 - DNA, 20 bp, Artificial Sequence
  Description of Artificial Sequence: Synthetic oligonucleotide
  Target: LAMA2; (+) strand; PAM type: YTN; PAM sequence: TTT
cagtagttatttaaatggaa

SEQ ID NO: 380187 - DNA, 20 bp, Artificial Sequence
  Description of Artificial Sequence: Synthetic oligonucleotide
  Target: LAMA2; (+) strand; PAM type: YTN; PAM sequence: TTC
agtagttatttaaatggaag

SEQ ID NO: 380188 - DNA, 20 bp, Artificial Sequence
  Description of Artificial Sequence: Synthetic oligonucleotide
  Target: LAMA2; (+) strand; PAM type: YTN; PAM sequence: TTA
tttaaatggaagctggagtt

SEQ ID NO: 380189 - DNA, 20 bp, Artificial Sequence
  Description of Artificial Sequence: Synthetic oligonucleotide
  Target: LAMA2; (+) strand; PAM type: YTN; PAM sequence: TTT
aaatggaagctggagtttgg

SEQ ID NO: 380190 - DNA, 20 bp, Artificial Sequence
  Description of Artificial Sequence: Synthetic oligonucleotide
  Target: LAMA2; (+) strand; PAM type: YTN; PAM sequence: TTA
aatggaagctggagtttggc

SEQ ID NO: 380191 - DNA, 20 bp, Artificial Sequence
  Description of Artificial Sequence: Synthetic oligonucleotide
  Target: LAMA2; (+) strand; PAM type: YTN; PAM sequence: CTG
gagtttggccaaatccctga

SEQ ID NO: 380192 - DNA, 20 bp, Artificial Sequence
  Description of Artificial Sequence: Synthetic oligonucleotide
  Target: LAMA2; (+) strand; PAM type: YTN; PAM sequence: TTT
ggccaaatccctgatgcaat

SEQ ID NO: 380193 - DNA, 20 bp, Artificial Sequence
  Description of Artificial Sequence: Synthetic oligonucleotide
  Target: LAMA2; (+) strand; PAM type: YTN; PAM sequence: TTG
gccaaatccctgatgcaatc

SEQ ID NO: 380194 - DNA, 20 bp, Artificial Sequence
  Description of Artificial Sequence: Synthetic oligonucleotide
  Target: LAMA2; (+) strand; PAM type: YTN; PAM sequence: CTG
atgcaatcaaagccattgct

SEQ ID NO: 380195 - DNA, 20 bp, Artificial Sequence
  Description of Artificial Sequence: Synthetic oligonucleotide
  Target: LAMA2; (+) strand; PAM type: YTN; PAM sequence: TTG
ctctctaatcccctgaaaaa

SEQ ID NO: 380196 - DNA, 20 bp, Artificial Sequence
  Description of Artificial Sequence: Synthetic oligonucleotide
  Target: LAMA2; (+) strand; PAM type: YTN; PAM sequence: CTC
tctaatcccctgaaaaaaaa

SEQ ID NO: 380197 - DNA, 20 bp, Artificial Sequence
  Description of Artificial Sequence: Synthetic oligonucleotide
  Target: LAMA2; (+) strand; PAM type: YTN; PAM sequence: CTC
taatcccctgaaaaaaaaaa

SEQ ID NO: 380198 - DNA, 20 bp, Artificial Sequence
  Description of Artificial Sequence: Synthetic oligonucleotide
  Target: LAMA2; (+) strand; PAM type: YTN; PAM sequence: CTA
atcccctgaaaaaaaaaatg

SEQ ID NO: 380199 - DNA, 20 bp, Artificial Sequence
  Description of Artificial Sequence: Synthetic oligonucleotide
  Target: LAMA2; (+) strand; PAM type: YTN; PAM sequence: CTG
aaaaaaaaaatggtgtattg

SEQ ID NO: 380200 - DNA, 20 bp, Artificial Sequence
  Description of Artificial Sequence: Synthetic oligonucleotide
  Target: LAMA2; (+) strand; PAM type: YTN; PAM sequence: TTG
cagaaatatttgttgttgct

SEQ ID NO: 380201 - DNA, 20 bp, Artificial Sequence
  Description of Artificial Sequence: Synthetic oligonucleotide
  Target: LAMA2; (+) strand; PAM type: YTN; PAM sequence: TTT
gttgttgctgccattcaagc

SEQ ID NO: 380202 - DNA, 20 bp, Artificial Sequence
  Description of Artificial Sequence: Synthetic oligonucleotide
  Target: LAMA2; (+) strand; PAM type: YTN; PAM sequence: TTG
ttgttgctgccattcaagct

SEQ ID NO: 380203 - DNA, 20 bp, Artificial Sequence
  Description of Artificial Sequence: Synthetic oligonucleotide
  Target: LAMA2; (+) strand; PAM type: YTN; PAM sequence: TTG
ttgctgccattcaagcttca

SEQ ID NO: 380204 - DNA, 20 bp, Artificial Sequence
  Description of Artificial Sequence: Synthetic oligonucleotide
  Target: LAMA2; (+) strand; PAM type: YTN; PAM sequence: TTG
ctgccattcaagcttcactt

SEQ ID NO: 380205 - DNA, 20 bp, Artificial Sequence
  Description of Artificial Sequence: Synthetic oligonucleotide
  Target: LAMA2; (+) strand; PAM type: YTN; PAM sequence: CTG
ccattcaagcttcacttgat

SEQ ID NO: 380206 - DNA, 20 bp, Artificial Sequence
  Description of Artificial Sequence: Synthetic oligonucleotide
  Target: LAMA2; (+) strand; PAM type: YTN; PAM sequence: TTC
aagcttcacttgatttgtaa

SEQ ID NO: 380207 - DNA, 20 bp, Artificial Sequence
  Description of Artificial Sequence: Synthetic oligonucleotide
  Target: LAMA2; (+) strand; PAM type: YTN; PAM sequence: CTT
cacttgatttgtaaacactt

SEQ ID NO: 380208 - DNA, 20 bp, Artificial Sequence
  Description of Artificial Sequence: Synthetic oligonucleotide
  Target: LAMA2; (+) strand; PAM type: YTN; PAM sequence: TTC
acttgatttgtaaacacttg

SEQ ID NO: 380209 - DNA, 20 bp, Artificial Sequence
  Description of Artificial Sequence: Synthetic oligonucleotide
  Target: LAMA2; (+) strand; PAM type: YTN; PAM sequence: CTT
gatttgtaaacacttgcggg

SEQ ID NO: 380210 - DNA, 20 bp, Artificial Sequence
  Description of Artificial Sequence: Synthetic oligonucleotide
  Target: LAMA2; (+) strand; PAM type: YTN; PAM sequence: TTG
atttgtaaacacttgcgggt

SEQ ID NO: 380211 - DNA, 20 bp, Artificial Sequence
  Description of Artificial Sequence: Synthetic oligonucleotide
  Target: LAMA2; (+) strand; PAM type: YTN; PAM sequence: TTT
gtaaacacttgcgggtctgt

SEQ ID NO: 380212 - DNA, 20 bp, Artificial Sequence
  Description of Artificial Sequence: Synthetic oligonucleotide
  Target: LAMA2; (+) strand; PAM type: YTN; PAM sequence: TTG
taaacacttgcgggtctgtt

SEQ ID NO: 380213 - DNA, 20 bp, Artificial Sequence
  Description of Artificial Sequence: Synthetic oligonucleotide
  Target: LAMA2; (+) strand; PAM type: YTN; PAM sequence: CTT
gcgggtctgttatgtgcatt

SEQ ID NO: 380214 - DNA, 20 bp, Artificial Sequence
  Description of Artificial Sequence: Synthetic oligonucleotide
  Target: LAMA2; (+) strand; PAM type: YTN; PAM sequence: TTG
cgggtctgttatgtgcattc

SEQ ID NO: 380215 - DNA, 20 bp, Artificial Sequence
  Description of Artificial Sequence: Synthetic oligonucleotide
  Target: LAMA2; (+) strand; PAM type: YTN; PAM sequence: CTG
ttatgtgcattcatgtgcaa

SEQ ID NO: 380216 - DNA, 20 bp, Artificial Sequence
  Description of Artificial Sequence: Synthetic oligonucleotide
  Target: LAMA2; (+) strand; PAM type: YTN; PAM sequence: TTA
tgtgcattcatgtgcaagag

SEQ ID NO: 380217 - DNA, 20 bp, Artificial Sequence
  Description of Artificial Sequence: Synthetic oligonucleotide
  Target: LAMA2; (+) strand; PAM type: YTN; PAM sequence: TTC
atgtgcaagagaaaggagaa

SEQ ID NO: 380218 - DNA, 20 bp, Artificial Sequence
  Description of Artificial Sequence: Synthetic oligonucleotide
  Target: LAMA2; (+) strand; PAM type: YTN; PAM sequence: CTC
ctcgggctataaaattccat

SEQ ID NO: 380219 - DNA, 20 bp, Artificial Sequence
  Description of Artificial Sequence: Synthetic oligonucleotide
  Target: LAMA2; (+) strand; PAM type: YTN; PAM sequence: CTC
gggctataaaattccatgga

SEQ ID NO: 380220 - DNA, 20 bp, Artificial Sequence
  Description of Artificial Sequence: Synthetic oligonucleotide
  Target: LAMA2; (+) strand; PAM type: YTN; PAM sequence: CTA
taaaattccatggagatgcc

SEQ ID NO: 380221 - DNA, 20 bp, Artificial Sequence
  Description of Artificial Sequence: Synthetic oligonucleotide
  Target: LAMA2; (+) strand; PAM type: YTN; PAM sequence: TTC
catggagatgccaatgcaaa

SEQ ID NO: 380222 - DNA, 20 bp, Artificial Sequence
  Description of Artificial Sequence: Synthetic oligonucleotide
  Target: LAMA2; (+) strand; PAM type: YTN; PAM sequence: TTA
ccttcttactcccacagaga

SEQ ID NO: 380223 - DNA, 20 bp, Artificial Sequence
  Description of Artificial Sequence: Synthetic oligonucleotide
  Target: LAMA2; (+) strand; PAM type: YTN; PAM sequence: CTT
cttactcccacagagagccc

SEQ ID NO: 380224 - DNA, 20 bp, Artificial Sequence
  Description of Artificial Sequence: Synthetic oligonucleotide
  Target: LAMA2; (+) strand; PAM type: YTN; PAM sequence: TTC
ttactcccacagagagccca

SEQ ID NO: 380225 - DNA, 20 bp, Artificial Sequence
  Description of Artificial Sequence: Synthetic oligonucleotide
  Target: LAMA2; (+) strand; PAM type: YTN; PAM sequence: CTT
actcccacagagagcccaga

SEQ ID NO: 380226 - DNA, 20 bp, Artificial Sequence
  Description of Artificial Sequence: Synthetic oligonucleotide
  Target: LAMA2; (+) strand; PAM type: YTN; PAM sequence: TTA
ctcccacagagagcccagag

SEQ ID NO: 380227 - DNA, 20 bp, Artificial Sequence
  Description of Artificial Sequence: Synthetic oligonucleotide
  Target: LAMA2; (+) strand; PAM type: YTN; PAM sequence: CTC
ccacagagagcccagagaac

SEQ ID NO: 380228 - DNA, 20 bp, Artificial Sequence
  Description of Artificial Sequence: Synthetic oligonucleotide
  Target: LAMA2; (+) strand; PAM type: YTN; PAM sequence: TTT
ttcttgcagaaggggagtgg

SEQ ID NO: 380229 - DNA, 20 bp, Artificial Sequence
  Description of Artificial Sequence: Synthetic oligonucleotide
  Target: LAMA2; (+) strand; PAM type: YTN; PAM sequence: TTT
tcttgcagaaggggagtggt

SEQ ID NO: 380230 - DNA, 20 bp, Artificial Sequence
  Description of Artificial Sequence: Synthetic oligonucleotide
  Target: LAMA2; (+) strand; PAM type: YTN; PAM sequence: TTT
cttgcagaaggggagtggtt

SEQ ID NO: 380231 - DNA, 20 bp, Artificial Sequence
  Description of Artificial Sequence: Synthetic oligonucleotide
  Target: LAMA2; (+) strand; PAM type: YTN; PAM sequence: TTC
ttgcagaaggggagtggttt

SEQ ID NO: 380232 - DNA, 20 bp, Artificial Sequence
  Description of Artificial Sequence: Synthetic oligonucleotide
  Target: LAMA2; (+) strand; PAM type: YTN; PAM sequence: CTT
gcagaaggggagtggtttgc

SEQ ID NO: 380233 - DNA, 20 bp, Artificial Sequence
  Description of Artificial Sequence: Synthetic oligonucleotide
  Target: LAMA2; (+) strand; PAM type: YTN; PAM sequence: TTG
cagaaggggagtggtttgct

SEQ ID NO: 380234 - DNA, 20 bp, Artificial Sequence
  Description of Artificial Sequence: Synthetic oligonucleotide
  Target: LAMA2; (+) strand; PAM type: YTN; PAM sequence: TTT
gcttacagctcaccaccact

SEQ ID NO: 380235 - DNA, 20 bp, Artificial Sequence
  Description of Artificial Sequence: Synthetic oligonucleotide
  Target: LAMA2; (+) strand; PAM type: YTN; PAM sequence: TTG
cttacagctcaccaccactg

SEQ ID NO: 380236 - DNA, 20 bp, Artificial Sequence
  Description of Artificial Sequence: Synthetic oligonucleotide
  Target: LAMA2; (+) strand; PAM type: YTN; PAM sequence: CTT
acagctcaccaccactgtgt

SEQ ID NO: 380237 - DNA, 20 bp, Artificial Sequence
  Description of Artificial Sequence: Synthetic oligonucleotide
  Target: LAMA2; (+) strand; PAM type: YTN; PAM sequence: TTA
cagctcaccaccactgtgtg

SEQ ID NO: 380238 - DNA, 20 bp, Artificial Sequence
  Description of Artificial Sequence: Synthetic oligonucleotide
  Target: LAMA2; (+) strand; PAM type: YTN; PAM sequence: CTC
accaccactgtgtgtactta

SEQ ID NO: 380239 - DNA, 20 bp, Artificial Sequence
  Description of Artificial Sequence: Synthetic oligonucleotide
  Target: LAMA2; (+) strand; PAM type: YTN; PAM sequence: CTG
tgtgtacttacagggagcag

SEQ ID NO: 380240 - DNA, 20 bp, Artificial Sequence
  Description of Artificial Sequence: Synthetic oligonucleotide
  Target: LAMA2; (+) strand; PAM type: YTN; PAM sequence: CTT
acagggagcagagagtgaaa

SEQ ID NO: 380241 - DNA, 20 bp, Artificial Sequence
  Description of Artificial Sequence: Synthetic oligonucleotide
  Target: LAMA2; (+) strand; PAM type: YTN; PAM sequence: TTA
cagggagcagagagtgaaac

SEQ ID NO: 380242 - DNA, 20 bp, Artificial Sequence
  Description of Artificial Sequence: Synthetic oligonucleotide
  Target: LAMA2; (+) strand; PAM type: YTN; PAM sequence: CTG
aattttaattgaatgtgtgt

SEQ ID NO: 380243 - DNA, 20 bp, Artificial Sequence
  Description of Artificial Sequence: Synthetic oligonucleotide
  Target: LAMA2; (+) strand; PAM type: YTN; PAM sequence: TTT
taattgaatgtgtgtttcat

SEQ ID NO: 380244 - DNA, 20 bp, Artificial Sequence
  Description of Artificial Sequence: Synthetic oligonucleotide
  Target: LAMA2; (+) strand; PAM type: YTN; PAM sequence: TTT
aattgaatgtgtgtttcatc

SEQ ID NO: 380245 - DNA, 20 bp, Artificial Sequence
  Description of Artificial Sequence: Synthetic oligonucleotide
  Target: LAMA2; (+) strand; PAM type: YTN; PAM sequence: TTA
attgaatgtgtgtttcatca

SEQ ID NO: 380246 - DNA, 20 bp, Artificial Sequence
  Description of Artificial Sequence: Synthetic oligonucleotide
  Target: LAMA2; (+) strand; PAM type: YTN; PAM sequence: TTG
aatgtgtgtttcatcaagac

SEQ ID NO: 380247 - DNA, 20 bp, Artificial Sequence
  Description of Artificial Sequence: Synthetic oligonucleotide
  Target: LAMA2; (+) strand; PAM type: YTN; PAM sequence: TTT
catcaagaccaatcttcaga

SEQ ID NO: 380248 - DNA, 20 bp, Artificial Sequence
  Description of Artificial Sequence: Synthetic oligonucleotide
  Target: LAMA2; (+) strand; PAM type: YTN; PAM sequence: TTC
atcaagaccaatcttcagag

SEQ ID NO: 380249 - DNA, 20 bp, Artificial Sequence
  Description of Artificial Sequence: Synthetic oligonucleotide
  Target: LAMA2; (+) strand; PAM type: YTN; PAM sequence: CTT
cagagtgcagattacaatgc

SEQ ID NO: 380250 - DNA, 20 bp, Artificial Sequence
  Description of Artificial Sequence: Synthetic oligonucleotide
  Target: LAMA2; (+) strand; PAM type: YTN; PAM sequence: TTC
agagtgcagattacaatgct

SEQ ID NO: 380251 - DNA, 20 bp, Artificial Sequence
  Description of Artificial Sequence: Synthetic oligonucleotide
  Target: LAMA2; (+) strand; PAM type: YTN; PAM sequence: TTA
caatgctagcaaagaacatg

SEQ ID NO: 380252 - DNA, 20 bp, Artificial Sequence
  Description of Artificial Sequence: Synthetic oligonucleotide
  Target: LAMA2; (+) strand; PAM type: YTN; PAM sequence: CTA
gcaaagaacatgcattcata

SEQ ID NO: 380253 - DNA, 20 bp, Artificial Sequence
  Description of Artificial Sequence: Synthetic oligonucleotide
  Target: LAMA2; (+) strand; PAM type: YTN; PAM sequence: TTC
ataattcagtttcaataaaa

SEQ ID NO: 380254 - DNA, 20 bp, Artificial Sequence
  Description of Artificial Sequence: Synthetic oligonucleotide
  Target: LAMA2; (+) strand; PAM type: YTN; PAM sequence: TTC
agtttcaataaaacctacct

SEQ ID NO: 380255 - DNA, 20 bp, Artificial Sequence
  Description of Artificial Sequence: Synthetic oligonucleotide
  Target: LAMA2; (+) strand; PAM type: YTN; PAM sequence: TTT
caataaaacctacctatgct

SEQ ID NO: 380256 - DNA, 20 bp, Artificial Sequence
  Description of Artificial Sequence: Synthetic oligonucleotide
  Target: LAMA2; (+) strand; PAM type: YTN; PAM sequence: TTC
aataaaacctacctatgctt

SEQ ID NO: 380257 - DNA, 20 bp, Artificial Sequence
  Description of Artificial Sequence: Synthetic oligonucleotide
  Target: LAMA2; (+) strand; PAM type: YTN; PAM sequence: CTA
cctatgcttgttataaagtt

SEQ ID NO: 380258 - DNA, 20 bp, Artificial Sequence
  Description of Artificial Sequence: Synthetic oligonucleotide
  Target: LAMA2; (+) strand; PAM type: YTN; PAM sequence: CTA
tgcttgttataaagtttatg

SEQ ID NO: 380259 - DNA, 20 bp, Artificial Sequence
  Description of Artificial Sequence: Synthetic oligonucleotide
  Target: LAMA2; (+) strand; PAM type: YTN; PAM sequence: CTT
gttataaagtttatgactca

SEQ ID NO: 380260 - DNA, 20 bp, Artificial Sequence
  Description of Artificial Sequence: Synthetic oligonucleotide
  Target: LAMA2; (+) strand; PAM type: YTN; PAM sequence: TTG
ttataaagtttatgactcaa

SEQ ID NO: 380261 - DNA, 20 bp, Artificial Sequence
  Description of Artificial Sequence: Synthetic oligonucleotide
  Target: LAMA2; (+) strand; PAM type: YTN; PAM sequence: TTA
taaagtttatgactcaaact

SEQ ID NO: 380262 - DNA, 20 bp, Artificial Sequence
  Description of Artificial Sequence: Synthetic oligonucleotide
  Target: LAMA2; (+) strand; PAM type: YTN; PAM sequence: TTT
atgactcaaactccttaaac

SEQ ID NO: 380263 - DNA, 20 bp, Artificial Sequence
  Description of Artificial Sequence: Synthetic oligonucleotide
  Target: LAMA2; (+) strand; PAM type: YTN; PAM sequence: TTA
tgactcaaactccttaaact

SEQ ID NO: 380264 - DNA, 20 bp, Artificial Sequence
  Description of Artificial Sequence: Synthetic oligonucleotide
  Target: LAMA2; (+) strand; PAM type: YTN; PAM sequence: CTC
aaactccttaaactcctgga

SEQ ID NO: 380265 - DNA, 20 bp, Artificial Sequence
  Description of Artificial Sequence: Synthetic oligonucleotide
  Target: LAMA2; (+) strand; PAM type: YTN; PAM sequence: CTC
cttaaactcctggaggtaac

SEQ ID NO: 380266 - DNA, 20 bp, Artificial Sequence
  Description of Artificial Sequence: Synthetic oligonucleotide
  Target: LAMA2; (+) strand; PAM type: YTN; PAM sequence: CTT
aaactcctggaggtaacttt

SEQ ID NO: 380267 - DNA, 20 bp, Artificial Sequence
  Description of Artificial Sequence: Synthetic oligonucleotide
  Target: LAMA2; (+) strand; PAM type: YTN; PAM sequence: TTA
aactcctggaggtaactttt

SEQ ID NO: 380268 - DNA, 20 bp, Artificial Sequence
  Description of Artificial Sequence: Synthetic oligonucleotide
  Target: LAMA2; (+) strand; PAM type: YTN; PAM sequence: CTC
ctggaggtaacttttatttg

SEQ ID NO: 380269 - DNA, 20 bp, Artificial Sequence
  Description of Artificial Sequence: Synthetic oligonucleotide
  Target: LAMA2; (+) strand; PAM type: YTN; PAM sequence: CTG
gaggtaacttttatttgaag

SEQ ID NO: 380270 - DNA, 20 bp, Artificial Sequence
  Description of Artificial Sequence: Synthetic oligonucleotide
  Target: LAMA2; (+) strand; PAM type: YTN; PAM sequence: CTT
ttatttgaagcaaaactatt

SEQ ID NO: 380271 - DNA, 20 bp, Artificial Sequence
  Description of Artificial Sequence: Synthetic oligonucleotide
  Target: LAMA2; (+) strand; PAM type: YTN; PAM sequence: TTT
tatttgaagcaaaactattc

SEQ ID NO: 380272 - DNA, 20 bp, Artificial Sequence
  Description of Artificial Sequence: Synthetic oligonucleotide
  Target: LAMA2; (+) strand; PAM type: YTN; PAM sequence: TTT
atttgaagcaaaactattca

SEQ ID NO: 380273 - DNA, 20 bp, Artificial Sequence
  Description of Artificial Sequence: Synthetic oligonucleotide
  Target: LAMA2; (+) strand; PAM type: YTN; PAM sequence: TTA
tttgaagcaaaactattcat

SEQ ID NO: 380274 - DNA, 20 bp, Artificial Sequence
  Description of Artificial Sequence: Synthetic oligonucleotide
  Target: LAMA2; (+) strand; PAM type: YTN; PAM sequence: TTT
gaagcaaaactattcattgt

SEQ ID NO: 380275 - DNA, 20 bp, Artificial Sequence
  Description of Artificial Sequence: Synthetic oligonucleotide
  Target: LAMA2; (+) strand; PAM type: YTN; PAM sequence: TTG
aagcaaaactattcattgtc

SEQ ID NO: 380276 - DNA, 20 bp, Artificial Sequence
  Description of Artificial Sequence: Synthetic oligonucleotide
  Target: LAMA2; (+) strand; PAM type: YTN; PAM sequence: CTA
ttcattgtcacattttaaag

SEQ ID NO: 380277 - DNA, 20 bp, Artificial Sequence
  Description of Artificial Sequence: Synthetic oligonucleotide
  Target: LAMA2; (+) strand; PAM type: YTN; PAM sequence: TTC
attgtcacattttaaagttt

SEQ ID NO: 380278 - DNA, 20 bp, Artificial Sequence
  Description of Artificial Sequence: Synthetic oligonucleotide
  Target: LAMA2; (+) strand; PAM type: YTN; PAM sequence: TTG
tcacattttaaagtttattt

SEQ ID NO: 380279 - DNA, 20 bp, Artificial Sequence
  Description of Artificial Sequence: Synthetic oligonucleotide
  Target: LAMA2; (+) strand; PAM type: YTN; PAM sequence: TTT
taaagtttatttcccaaaca

SEQ ID NO: 380280 - DNA, 20 bp, Artificial Sequence
  Description of Artificial Sequence: Synthetic oligonucleotide
  Target: LAMA2; (+) strand; PAM type: YTN; PAM sequence: TTT
aaagtttatttcccaaacat

SEQ ID NO: 380281 - DNA, 20 bp, Artificial Sequence
  Description of Artificial Sequence: Synthetic oligonucleotide
  Target: LAMA2; (+) strand; PAM type: YTN; PAM sequence: TTA
aagtttatttcccaaacatg

SEQ ID NO: 380282 - DNA, 20 bp, Artificial Sequence
  Description of Artificial Sequence: Synthetic oligonucleotide
  Target: LAMA2; (+) strand; PAM type: YTN; PAM sequence: TTT
atttcccaaacatgtttgtg

SEQ ID NO: 380283 - DNA, 20 bp, Artificial Sequence
  Description of Artificial Sequence: Synthetic oligonucleotide
  Target: LAMA2; (+) strand; PAM type: YTN; PAM sequence: TTA
tttcccaaacatgtttgtgt

SEQ ID NO: 380284 - DNA, 20 bp, Artificial Sequence
  Description of Artificial Sequence: Synthetic oligonucleotide
  Target: LAMA2; (+) strand; PAM type: YTN; PAM sequence: TTT
cccaaacatgtttgtgttac

SEQ ID NO: 380285 - DNA, 20 bp, Artificial Sequence
  Description of Artificial Sequence: Synthetic oligonucleotide
  Target: LAMA2; (+) strand; PAM type: YTN; PAM sequence: TTC
ccaaacatgtttgtgttacc

SEQ ID NO: 380286 - DNA, 20 bp, Artificial Sequence
  Description of Artificial Sequence: Synthetic oligonucleotide
  Target: LAMA2; (+) strand; PAM type: YTN; PAM sequence: TTT
gtgttaccagttagtccatc

SEQ ID NO: 380287 - DNA, 20 bp, Artificial Sequence
  Description of Artificial Sequence: Synthetic oligonucleotide
  Target: LAMA2; (+) strand; PAM type: YTN; PAM sequence: TTG
tgttaccagttagtccatca

SEQ ID NO: 380288 - DNA, 20 bp, Artificial Sequence
  Description of Artificial Sequence: Synthetic oligonucleotide
  Target: LAMA2; (+) strand; PAM type: YTN; PAM sequence: TTA
ccagttagtccatcataaaa

SEQ ID NO: 380289 - DNA, 20 bp, Artificial Sequence
  Description of Artificial Sequence: Synthetic oligonucleotide
  Target: LAMA2; (+) strand; PAM type: YTN; PAM sequence: TTA
gtccatcataaaatagtccc

SEQ ID NO: 380290 - DNA, 20 bp, Artificial Sequence
  Description of Artificial Sequence: Synthetic oligonucleotide
  Target: LAMA2; (+) strand; PAM type: YTN; PAM sequence: TTT
atggactacatttatttttt

SEQ ID NO: 380291 - DNA, 20 bp, Artificial Sequence
  Description of Artificial Sequence: Synthetic oligonucleotide
  Target: LAMA2; (+) strand; PAM type: YTN; PAM sequence: TTA
tggactacatttatttttta

SEQ ID NO: 380292 - DNA, 20 bp, Artificial Sequence
  Description of Artificial Sequence: Synthetic oligonucleotide
  Target: LAMA2; (+) strand; PAM type: YTN; PAM sequence: CTA
catttattttttaatgaaaa

SEQ ID NO: 380293 - DNA, 20 bp, Artificial Sequence
  Description of Artificial Sequence: Synthetic oligonucleotide
  Target: LAMA2; (+) strand; PAM type: YTN; PAM sequence: TTT
attttttaatgaaaagggta

SEQ ID NO: 380294 - DNA, 20 bp, Artificial Sequence
  Description of Artificial Sequence: Synthetic oligonucleotide
  Target: LAMA2; (+) strand; PAM type: YTN; PAM sequence: TTA
ttttttaatgaaaagggtat

SEQ ID NO: 380295 - DNA, 20 bp, Artificial Sequence
  Description of Artificial Sequence: Synthetic oligonucleotide
  Target: LAMA2; (+) strand; PAM type: YTN; PAM sequence: TTT
tttaatgaaaagggtattaa

SEQ ID NO: 380296 - DNA, 20 bp, Artificial Sequence
  Description of Artificial Sequence: Synthetic oligonucleotide
  Target: LAMA2; (+) strand; PAM type: YTN; PAM sequence: TTT
ttaatgaaaagggtattaat

SEQ ID NO: 380297 - DNA, 20 bp, Artificial Sequence
  Description of Artificial Sequence: Synthetic oligonucleotide
  Target: LAMA2; (+) strand; PAM type: YTN; PAM sequence: TTT
taatgaaaagggtattaata

SEQ ID NO: 380298 - DNA, 20 bp, Artificial Sequence
  Description of Artificial Sequence: Synthetic oligonucleotide
  Target: LAMA2; (+) strand; PAM type: YTN; PAM sequence: TTT
aatgaaaagggtattaatat

SEQ ID NO: 380299 - DNA, 20 bp, Artificial Sequence
  Description of Artificial Sequence: Synthetic oligonucleotide
  Target: LAMA2; (+) strand; PAM type: YTN; PAM sequence: TTA
atgaaaagggtattaatatg

SEQ ID NO: 380300 - DNA, 20 bp, Artificial Sequence
  Description of Artificial Sequence: Synthetic oligonucleotide
  Target: LAMA2; (+) strand; PAM type: YTN; PAM sequence: TTA
atatgttattttcaattatg

SEQ ID NO: 380301 - DNA, 20 bp, Artificial Sequence
  Description of Artificial Sequence: Synthetic oligonucleotide
  Target: LAMA2; (+) strand; PAM type: YTN; PAM sequence: TTA
ttttcaattatgattttctt

SEQ ID NO: 380302 - DNA, 20 bp, Artificial Sequence
  Description of Artificial Sequence: Synthetic oligonucleotide
  Target: LAMA2; (+) strand; PAM type: YTN; PAM sequence: TTT
tcaattatgattttcttttc

SEQ ID NO: 380303 - DNA, 20 bp, Artificial Sequence
  Description of Artificial Sequence: Synthetic oligonucleotide
  Target: LAMA2; (+) strand; PAM type: YTN; PAM sequence: TTT
caattatgattttcttttca

SEQ ID NO: 380304 - DNA, 20 bp, Artificial Sequence
  Description of Artificial Sequence: Synthetic oligonucleotide
  Target: LAMA2; (+) strand; PAM type: YTN; PAM sequence: TTC
aattatgattttcttttcaa

SEQ ID NO: 380305 - DNA, 20 bp, Artificial Sequence
  Description of Artificial Sequence: Synthetic oligonucleotide
  Target: LAMA2; (+) strand; PAM type: YTN; PAM sequence: TTA
tgattttcttttcaattata

SEQ ID NO: 380306 - DNA, 20 bp, Artificial Sequence
  Description of Artificial Sequence: Synthetic oligonucleotide
  Target: LAMA2; (+) strand; PAM type: YTN; PAM sequence: TTT
tcttttcaattataatgact

SEQ ID NO: 380307 - DNA, 20 bp, Artificial Sequence
  Description of Artificial Sequence: Synthetic oligonucleotide
  Target: LAMA2; (+) strand; PAM type: YTN; PAM sequence: TTT
cttttcaattataatgacta

SEQ ID NO: 380308 - DNA, 20 bp, Artificial Sequence
  Description of Artificial Sequence: Synthetic oligonucleotide
  Target: LAMA2; (+) strand; PAM type: YTN; PAM sequence: TTC
ttttcaattataatgactat

SEQ ID NO: 380309 - DNA, 20 bp, Artificial Sequence
  Description of Artificial Sequence: Synthetic oligonucleotide
  Target: LAMA2; (+) strand; PAM type: YTN; PAM sequence: CTT
ttcaattataatgactattt

SEQ ID NO: 380310 - DNA, 20 bp, Artificial Sequence
  Description of Artificial Sequence: Synthetic oligonucleotide
  Target: LAMA2; (+) strand; PAM type: YTN; PAM sequence: TTT
tcaattataatgactatttc

SEQ ID NO: 380311 - DNA, 20 bp, Artificial Sequence
  Description of Artificial Sequence: Synthetic oligonucleotide
  Target: LAMA2; (+) strand; PAM type: YTN; PAM sequence: TTT
caattataatgactatttca

SEQ ID NO: 380312 - DNA, 20 bp, Artificial Sequence
  Description of Artificial Sequence: Synthetic oligonucleotide
  Target: LAMA2; (+) strand; PAM type: YTN; PAM sequence: TTC
aattataatgactatttcac

SEQ ID NO: 380313 - DNA, 20 bp, Artificial Sequence
  Description of Artificial Sequence: Synthetic oligonucleotide
  Target: LAMA2; (+) strand; PAM type: YTN; PAM sequence: TTA
taatgactatttcaccatca

SEQ ID NO: 380314 - DNA, 20 bp, Artificial Sequence
  Description of Artificial Sequence: Synthetic oligonucleotide
  Target: LAMA2; (+) strand; PAM type: YTN; PAM sequence: CTA
tttcaccatcagaaaaggtg

SEQ ID NO: 380315 - DNA, 20 bp, Artificial Sequence
  Description of Artificial Sequence: Synthetic oligonucleotide
  Target: LAMA2; (+) strand; PAM type: YTN; PAM sequence: TTT
caccatcagaaaaggtgagt

SEQ ID NO: 380316 - DNA, 20 bp, Artificial Sequence
  Description of Artificial Sequence: Synthetic oligonucleotide
  Target: LAMA2; (+) strand; PAM type: YTN; PAM sequence: TTC
accatcagaaaaggtgagtt

SEQ ID NO: 380317 - DNA, 20 bp, Artificial Sequence
  Description of Artificial Sequence: Synthetic oligonucleotide
  Target: LAMA2; (+) strand; PAM type: YTN; PAM sequence: TTA
agttacttgaaggaattatt

SEQ ID NO: 380318 - DNA, 20 bp, Artificial Sequence
  Description of Artificial Sequence: Synthetic oligonucleotide
  Target: LAMA2; (+) strand; PAM type: YTN; PAM sequence: TTA
cttgaaggaattatttaata

SEQ ID NO: 380319 - DNA, 20 bp, Artificial Sequence
  Description of Artificial Sequence: Synthetic oligonucleotide
  Target: LAMA2; (+) strand; PAM type: YTN; PAM sequence: CTT
gaaggaattatttaataaag

SEQ ID NO: 380320 - DNA, 20 bp, Artificial Sequence
  Description of Artificial Sequence: Synthetic oligonucleotide
  Target: LAMA2; (+) strand; PAM type: YTN; PAM sequence: TTG
aaggaattatttaataaagt

SEQ ID NO: 380321 - DNA, 20 bp, Artificial Sequence
  Description of Artificial Sequence: Synthetic oligonucleotide
  Target: LAMA2; (+) strand; PAM type: YTN; PAM sequence: TTA
tttaataaagttaagaaaat

SEQ ID NO: 380322 - DNA, 20 bp, Artificial Sequence
  Description of Artificial Sequence: Synthetic oligonucleotide
  Target: LAMA2; (+) strand; PAM type: YTN; PAM sequence: TTT
aataaagttaagaaaatatt

SEQ ID NO: 380323 - DNA, 20 bp, Artificial Sequence
  Description of Artificial Sequence: Synthetic oligonucleotide
  Target: LAMA2; (+) strand; PAM type: YTN; PAM sequence: TTA
ataaagttaagaaaatatta

SEQ ID NO: 380324 - DNA, 20 bp, Artificial Sequence
  Description of Artificial Sequence: Synthetic oligonucleotide
  Target: LAMA2; (+) strand; PAM type: YTN; PAM sequence: TTA
agaaaatattattttgaaac

SEQ ID NO: 380325 - DNA, 20 bp, Artificial Sequence
  Description of Artificial Sequence: Synthetic oligonucleotide
  Target: LAMA2; (+) strand; PAM type: YTN; PAM sequence: TTA
ttttgaaacattatcctcag

SEQ ID NO: 380326 - DNA, 20 bp, Artificial Sequence
  Description of Artificial Sequence: Synthetic oligonucleotide
  Target: LAMA2; (+) strand; PAM type: YTN; PAM sequence: TTT
tgaaacattatcctcagaaa

SEQ ID NO: 380327 - DNA, 20 bp, Artificial Sequence
  Description of Artificial Sequence: Synthetic oligonucleotide
  Target: LAMA2; (+) strand; PAM type: YTN; PAM sequence: TTT
gaaacattatcctcagaaag

SEQ ID NO: 380328 - DNA, 20 bp, Artificial Sequence
  Description of Artificial Sequence: Synthetic oligonucleotide
  Target: LAMA2; (+) strand; PAM type: YTN; PAM sequence: TTG
aaacattatcctcagaaaga

SEQ ID NO: 380329 - DNA, 20 bp, Artificial Sequence
  Description of Artificial Sequence: Synthetic oligonucleotide
  Target: LAMA2; (+) strand; PAM type: YTN; PAM sequence: TTA
tcctcagaaagaaatcaata

SEQ ID NO: 380330 - DNA, 20 bp, Artificial Sequence
  Description of Artificial Sequence: Synthetic oligonucleotide
  Target: LAMA2; (+) strand; PAM type: YTN; PAM sequence: CTC
agaaagaaatcaatattatt

SEQ ID NO: 380331 - DNA, 20 bp, Artificial Sequence
  Description of Artificial Sequence: Synthetic oligonucleotide
  Target: LAMA2; (+) strand; PAM type: YTN; PAM sequence: TTA
ttagattatgcgtgatcatt

SEQ ID NO: 380332 - DNA, 20 bp, Artificial Sequence
  Description of Artificial Sequence: Synthetic oligonucleotide
  Target: LAMA2; (+) strand; PAM type: YTN; PAM sequence: TTA
gattatgcgtgatcattatt

SEQ ID NO: 380333 - DNA, 20 bp, Artificial Sequence
  Description of Artificial Sequence: Synthetic oligonucleotide
  Target: LAMA2; (+) strand; PAM type: YTN; PAM sequence: TTA
tgcgtgatcattattttcta

SEQ ID NO: 380334 - DNA, 20 bp, Artificial Sequence
  Description of Artificial Sequence: Synthetic oligonucleotide
  Target: LAMA2; (+) strand; PAM type: YTN; PAM sequence: TTA
ttttctaggtggttttctaa

SEQ ID NO: 380335 - DNA, 20 bp, Artificial Sequence
  Description of Artificial Sequence: Synthetic oligonucleotide
  Target: LAMA2; (+) strand; PAM type: YTN; PAM sequence: TTT
tctaggtggttttctaaagt

SEQ ID NO: 380336 - DNA, 20 bp, Artificial Sequence
  Description of Artificial Sequence: Synthetic oligonucleotide
  Target: LAMA2; (+) strand; PAM type: YTN; PAM sequence: TTT
ctaggtggttttctaaagtt

SEQ ID NO: 380337 - DNA, 20 bp, Artificial Sequence
  Description of Artificial Sequence: Synthetic oligonucleotide
  Target: LAMA2; (+) strand; PAM type: YTN; PAM sequence: TTC
taggtggttttctaaagttc

SEQ ID NO: 380338 - DNA, 20 bp, Artificial Sequence
  Description of Artificial Sequence: Synthetic oligonucleotide
  Target: LAMA2; (+) strand; PAM type: YTN; PAM sequence: CTA
ggtggttttctaaagttcct

SEQ ID NO: 380339 - DNA, 20 bp, Artificial Sequence
  Description of Artificial Sequence: Synthetic oligonucleotide
  Target: LAMA2; (+) strand; PAM type: YTN; PAM sequence: TTT
tctaaagttcctgaaaggtc

SEQ ID NO: 380340 - DNA, 20 bp, Artificial Sequence
  Description of Artificial Sequence: Synthetic oligonucleotide
  Target: LAMA2; (+) strand; PAM type: YTN; PAM sequence: TTT
ctaaagttcctgaaaggtca

SEQ ID NO: 380341 - DNA, 20 bp, Artificial Sequence
  Description of Artificial Sequence: Synthetic oligonucleotide
  Target: LAMA2; (+) strand; PAM type: YTN; PAM sequence: TTC
taaagttcctgaaaggtcat

SEQ ID NO: 380342 - DNA, 20 bp, Artificial Sequence
  Description of Artificial Sequence: Synthetic oligonucleotide
  Target: LAMA2; (+) strand; PAM type: YTN; PAM sequence: CTA
aagttcctgaaaggtcattc

SEQ ID NO: 380343 - DNA, 20 bp, Artificial Sequence
  Description of Artificial Sequence: Synthetic oligonucleotide
  Target: LAMA2; (+) strand; PAM type: YTN; PAM sequence: TTC
ctgaaaggtcattcagagca

SEQ ID NO: 380344 - DNA, 20 bp, Artificial Sequence
  Description of Artificial Sequence: Synthetic oligonucleotide
  Target: LAMA2; (+) strand; PAM type: YTN; PAM sequence: CTG
aaaggtcattcagagcattg

SEQ ID NO: 380345 - DNA, 20 bp, Artificial Sequence
  Description of Artificial Sequence: Synthetic oligonucleotide
  Target: LAMA2; (+) strand; PAM type: YTN; PAM sequence: TTC
agagcattgggaagaagaaa

SEQ ID NO: 380346 - DNA, 20 bp, Artificial Sequence
  Description of Artificial Sequence: Synthetic oligonucleotide
  Target: LAMA2; (+) strand; PAM type: YTN; PAM sequence: TTG
ggaagaagaaatttgggata

SEQ ID NO: 380347 - DNA, 20 bp, Artificial Sequence
  Description of Artificial Sequence: Synthetic oligonucleotide
  Target: LAMA2; (+) strand; PAM type: YTN; PAM sequence: TTT
gggatagtagtaaattcaaa

SEQ ID NO: 380348 - DNA, 20 bp, Artificial Sequence
  Description of Artificial Sequence: Synthetic oligonucleotide
  Target: LAMA2; (+) strand; PAM type: YTN; PAM sequence: TTG
ggatagtagtaaattcaaag

SEQ ID NO: 380349 - DNA, 20 bp, Artificial Sequence
  Description of Artificial Sequence: Synthetic oligonucleotide
  Target: LAMA2; (+) strand; PAM type: YTN; PAM sequence: TTC
aaagcaatttcaccagtgcc

SEQ ID NO: 380350 - DNA, 20 bp, Artificial Sequence
  Description of Artificial Sequence: Synthetic oligonucleotide
  Target: LAMA2; (+) strand; PAM type: YTN; PAM sequence: TTT
caccagtgcctgtacgaaat

SEQ ID NO: 380351 - DNA, 20 bp, Artificial Sequence
  Description of Artificial Sequence: Synthetic oligonucleotide
  Target: LAMA2; (+) strand; PAM type: YTN; PAM sequence: TTC
accagtgcctgtacgaaata

SEQ ID NO: 380352 - DNA, 20 bp, Artificial Sequence
  Description of Artificial Sequence: Synthetic oligonucleotide
  Target: LAMA2; (+) strand; PAM type: YTN; PAM sequence: CTG
tacgaaataattgaatgggg

SEQ ID NO: 380353 - DNA, 20 bp, Artificial Sequence
  Description of Artificial Sequence: Synthetic oligonucleotide
  Target: LAMA2; (+) strand; PAM type: YTN; PAM sequence: TTG
aatggggaatgaccttgggt

SEQ ID NO: 380354 - DNA, 20 bp, Artificial Sequence
  Description of Artificial Sequence: Synthetic oligonucleotide
  Target: LAMA2; (+) strand; PAM type: YTN; PAM sequence: CTT
gggttgtctgtttgcaagaa

SEQ ID NO: 380355 - DNA, 20 bp, Artificial Sequence
  Description of Artificial Sequence: Synthetic oligonucleotide
  Target: LAMA2; (+) strand; PAM type: YTN; PAM sequence: TTG
ggttgtctgtttgcaagaat

SEQ ID NO: 380356 - DNA, 20 bp, Artificial Sequence
  Description of Artificial Sequence: Synthetic oligonucleotide
  Target: LAMA2; (+) strand; PAM type: YTN; PAM sequence: TTG
tctgtttgcaagaatataaa

SEQ ID NO: 380357 - DNA, 20 bp, Artificial Sequence
  Description of Artificial Sequence: Synthetic oligonucleotide
  Target: LAMA2; (+) strand; PAM type: YTN; PAM sequence: CTG
tttgcaagaatataaatgtc

SEQ ID NO: 380358 - DNA, 20 bp, Artificial Sequence
  Description of Artificial Sequence: Synthetic oligonucleotide
  Target: LAMA2; (+) strand; PAM type: YTN; PAM sequence: TTT
gcaagaatataaatgtctaa

SEQ ID NO: 380359 - DNA, 20 bp, Artificial Sequence
  Description of Artificial Sequence: Synthetic oligonucleotide
  Target: LAMA2; (+) strand; PAM type: YTN; PAM sequence: TTG
caagaatataaatgtctaat

SEQ ID NO: 380360 - DNA, 20 bp, Artificial Sequence
  Description of Artificial Sequence: Synthetic oligonucleotide
  Target: LAMA2; (+) strand; PAM type: YTN; PAM sequence: CTA
attaattggccgtgtctacc

SEQ ID NO: 380361 - DNA, 20 bp, Artificial Sequence
  Description of Artificial Sequence: Synthetic oligonucleotide
  Target: LAMA2; (+) strand; PAM type: YTN; PAM sequence: TTA
attggccgtgtctacctgaa

SEQ ID NO: 380362 - DNA, 20 bp, Artificial Sequence
  Description of Artificial Sequence: Synthetic oligonucleotide
  Target: LAMA2; (+) strand; PAM type: YTN; PAM sequence: TTG
gccgtgtctacctgaagcca

SEQ ID NO: 380363 - DNA, 20 bp, Artificial Sequence
  Description of Artificial Sequence: Synthetic oligonucleotide
  Target: LAMA2; (+) strand; PAM type: YTN; PAM sequence: CTA
cctgaagccactcacatttt

SEQ ID NO: 380364 - DNA, 20 bp, Artificial Sequence
  Description of Artificial Sequence: Synthetic oligonucleotide
  Target: LAMA2; (+) strand; PAM type: YTN; PAM sequence: CTG
aagccactcacattttaaaa

SEQ ID NO: 380365 - DNA, 20 bp, Artificial Sequence
  Description of Artificial Sequence: Synthetic oligonucleotide
  Target: LAMA2; (+) strand; PAM type: YTN; PAM sequence: CTC
acattttaaaaagtgggggg

SEQ ID NO: 380366 - DNA, 20 bp, Artificial Sequence
  Description of Artificial Sequence: Synthetic oligonucleotide
  Target: LAMA2; (+) strand; PAM type: YTN; PAM sequence: TTT
taaaaagtggggggaatatc

SEQ ID NO: 380367 - DNA, 20 bp, Artificial Sequence
  Description of Artificial Sequence: Synthetic oligonucleotide
  Target: LAMA2; (+) strand; PAM type: YTN; PAM sequence: TTT
aaaaagtggggggaatatct

SEQ ID NO: 380368 - DNA, 20 bp, Artificial Sequence
  Description of Artificial Sequence: Synthetic oligonucleotide
  Target: LAMA2; (+) strand; PAM type: YTN; PAM sequence: TTA
aaaagtggggggaatatctt

SEQ ID NO: 380369 - DNA, 20 bp, Artificial Sequence
  Description of Artificial Sequence: Synthetic oligonucleotide
  Target: LAMA2; (+) strand; PAM type: YTN; PAM sequence: CTT
tataataacttttcaacagg

SEQ ID NO: 380370 - DNA, 20 bp, Artificial Sequence
  Description of Artificial Sequence: Synthetic oligonucleotide
  Target: LAMA2; (+) strand; PAM type: YTN; PAM sequence: TTT
ataataacttttcaacagga

SEQ ID NO: 380371 - DNA, 20 bp, Artificial Sequence
  Description of Artificial Sequence: Synthetic oligonucleotide
  Target: LAMA2; (+) strand; PAM type: YTN; PAM sequence: TTA
taataacttttcaacaggat

SEQ ID NO: 380372 - DNA, 20 bp, Artificial Sequence
  Description of Artificial Sequence: Synthetic oligonucleotide
  Target: LAMA2; (+) strand; PAM type: YTN; PAM sequence: CTT
ttcaacaggatatcagacat

SEQ ID NO: 380373 - DNA, 20 bp, Artificial Sequence
  Description of Artificial Sequence: Synthetic oligonucleotide
  Target: LAMA2; (+) strand; PAM type: YTN; PAM sequence: TTT
tcaacaggatatcagacatc

SEQ ID NO: 380374 - DNA, 20 bp, Artificial Sequence
  Description of Artificial Sequence: Synthetic oligonucleotide
  Target: LAMA2; (+) strand; PAM type: YTN; PAM sequence: TTT
caacaggatatcagacatcc

SEQ ID NO: 380375 - DNA, 20 bp, Artificial Sequence
  Description of Artificial Sequence: Synthetic oligonucleotide
  Target: LAMA2; (+) strand; PAM type: YTN; PAM sequence: TTC
aacaggatatcagacatcca

SEQ ID NO: 380376 - DNA, 20 bp, Artificial Sequence
  Description of Artificial Sequence: Synthetic oligonucleotide
  Target: LAMA2; (+) strand; PAM type: YTN; PAM sequence: CTA
aacttcttatgatttatgtg

SEQ ID NO: 380377 - DNA, 20 bp, Artificial Sequence
  Description of Artificial Sequence: Synthetic oligonucleotide
  Target: LAMA2; (+) strand; PAM type: YTN; PAM sequence: CTT
cttatgatttatgtgaatat

SEQ ID NO: 380378 - DNA, 20 bp, Artificial Sequence
  Description of Artificial Sequence: Synthetic oligonucleotide
  Target: LAMA2; (+) strand; PAM type: YTN; PAM sequence: TTC
ttatgatttatgtgaatatt

SEQ ID NO: 380379 - DNA, 20 bp, Artificial Sequence
  Description of Artificial Sequence: Synthetic oligonucleotide
  Target: LAMA2; (+) strand; PAM type: YTN; PAM sequence: CTT
atgatttatgtgaatatttt

SEQ ID NO: 380380 - DNA, 20 bp, Artificial Sequence
  Description of Artificial Sequence: Synthetic oligonucleotide
  Target: LAMA2; (+) strand; PAM type: YTN; PAM sequence: TTA
tgatttatgtgaatattttg

SEQ ID NO: 380381 - DNA, 20 bp, Artificial Sequence
  Description of Artificial Sequence: Synthetic oligonucleotide
  Target: LAMA2; (+) strand; PAM type: YTN; PAM sequence: TTT
atgtgaatattttgctaata

SEQ ID NO: 380382 - DNA, 20 bp, Artificial Sequence
  Description of Artificial Sequence: Synthetic oligonucleotide
  Target: LAMA2; (+) strand; PAM type: YTN; PAM sequence: TTA
tgtgaatattttgctaatat

SEQ ID NO: 380383 - DNA, 20 bp, Artificial Sequence
  Description of Artificial Sequence: Synthetic oligonucleotide
  Target: LAMA2; (+) strand; PAM type: YTN; PAM sequence: TTT
tgctaatatgtactcttaac

SEQ ID NO: 380384 - DNA, 20 bp, Artificial Sequence
  Description of Artificial Sequence: Synthetic oligonucleotide
  Target: LAMA2; (+) strand; PAM type: YTN; PAM sequence: TTT
gctaatatgtactcttaaca

SEQ ID NO: 380385 - DNA, 20 bp, Artificial Sequence
  Description of Artificial Sequence: Synthetic oligonucleotide
  Target: LAMA2; (+) strand; PAM type: YTN; PAM sequence: TTG
ctaatatgtactcttaacat

SEQ ID NO: 380386 - DNA, 20 bp, Artificial Sequence
  Description of Artificial Sequence: Synthetic oligonucleotide
  Target: LAMA2; (+) strand; PAM type: YTN; PAM sequence: CTA
atatgtactcttaacatttg

SEQ ID NO: 380387 - DNA, 20 bp, Artificial Sequence
  Description of Artificial Sequence: Synthetic oligonucleotide
  Target: LAMA2; (+) strand; PAM type: YTN; PAM sequence: CTC
ttaacatttgaggaagcaaa

SEQ ID NO: 380388 - DNA, 20 bp, Artificial Sequence
  Description of Artificial Sequence: Synthetic oligonucleotide
  Target: LAMA2; (+) strand; PAM type: YTN; PAM sequence: CTT
aacatttgaggaagcaaaaa

SEQ ID NO: 380389 - DNA, 20 bp, Artificial Sequence
  Description of Artificial Sequence: Synthetic oligonucleotide
  Target: LAMA2; (+) strand; PAM type: YTN; PAM sequence: TTA
acatttgaggaagcaaaaat

SEQ ID NO: 380390 - DNA, 20 bp, Artificial Sequence
  Description of Artificial Sequence: Synthetic oligonucleotide
  Target: LAMA2; (+) strand; PAM type: YTN; PAM sequence: TTT
gaggaagcaaaaatgcaata

SEQ ID NO: 380391 - DNA, 20 bp, Artificial Sequence
  Description of Artificial Sequence: Synthetic oligonucleotide
  Target: LAMA2; (+) strand; PAM type: YTN; PAM sequence: TTG
aggaagcaaaaatgcaatat

SEQ ID NO: 380392 - DNA, 20 bp, Artificial Sequence
  Description of Artificial Sequence: Synthetic oligonucleotide
  Target: LAMA2; (+) strand; PAM type: YTN; PAM sequence: TTA
ggatttggtacatgagcccc

SEQ ID NO: 380393 - DNA, 20 bp, Artificial Sequence
  Description of Artificial Sequence: Synthetic oligonucleotide
  Target: LAMA2; (+) strand; PAM type: YTN; PAM sequence: TTT
ggtacatgagccccagaaat

SEQ ID NO: 380394 - DNA, 20 bp, Artificial Sequence
  Description of Artificial Sequence: Synthetic oligonucleotide
  Target: LAMA2; (+) strand; PAM type: YTN; PAM sequence: TTG
gtacatgagccccagaaatt

SEQ ID NO: 380395 - DNA, 20 bp, Artificial Sequence
  Description of Artificial Sequence: Synthetic oligonucleotide
  Target: LAMA2; (+) strand; PAM type: YTN; PAM sequence: TTT
aaacagcttcaaaacaatgt

SEQ ID NO: 380396 - DNA, 20 bp, Artificial Sequence
  Description of Artificial Sequence: Synthetic oligonucleotide
  Target: LAMA2; (+) strand; PAM type: YTN; PAM sequence: TTA
aacagcttcaaaacaatgtt

SEQ ID NO: 380397 - DNA, 20 bp, Artificial Sequence
  Description of Artificial Sequence: Synthetic oligonucleotide
  Target: LAMA2; (+) strand; PAM type: YTN; PAM sequence: CTT
caaaacaatgttaattatct

SEQ ID NO: 380398 - DNA, 20 bp, Artificial Sequence
  Description of Artificial Sequence: Synthetic oligonucleotide
  Target: LAMA2; (+) strand; PAM type: YTN; PAM sequence: TTC
aaaacaatgttaattatctt

SEQ ID NO: 380399 - DNA, 20 bp, Artificial Sequence
  Description of Artificial Sequence: Synthetic oligonucleotide
  Target: LAMA2; (+) strand; PAM type: YTN; PAM sequence: TTA
attatcttgatttaatcatc

SEQ ID NO: 380400 - DNA, 20 bp, Artificial Sequence
  Description of Artificial Sequence: Synthetic oligonucleotide
  Target: LAMA2; (+) strand; PAM type: YTN; PAM sequence: TTA
tcttgatttaatcatcccac

SEQ ID NO: 380401 - DNA, 20 bp, Artificial Sequence
  Description of Artificial Sequence: Synthetic oligonucleotide
  Target: LAMA2; (+) strand; PAM type: YTN; PAM sequence: CTT
gatttaatcatcccacaact

SEQ ID NO: 380402 - DNA, 20 bp, Artificial Sequence
  Description of Artificial Sequence: Synthetic oligonucleotide
  Target: LAMA2; (+) strand; PAM type: YTN; PAM sequence: TTG
atttaatcatcccacaactt

SEQ ID NO: 380403 - DNA, 20 bp, Artificial Sequence
  Description of Artificial Sequence: Synthetic oligonucleotide
  Target: LAMA2; (+) strand; PAM type: YTN; PAM sequence: TTT
aatcatcccacaacttatct

SEQ ID NO: 380404 - DNA, 20 bp, Artificial Sequence
  Description of Artificial Sequence: Synthetic oligonucleotide
  Target: LAMA2; (+) strand; PAM type: YTN; PAM sequence: TTA
atcatcccacaacttatcta

SEQ ID NO: 380405 - DNA, 20 bp, Artificial Sequence
  Description of Artificial Sequence: Synthetic oligonucleotide
  Target: LAMA2; (+) strand; PAM type: YTN; PAM sequence: CTT
atctatgtatcaaaatatca

SEQ ID NO: 380406 - DNA, 20 bp, Artificial Sequence
  Description of Artificial Sequence: Synthetic oligonucleotide
  Target: LAMA2; (+) strand; PAM type: YTN; PAM sequence: TTA
tctatgtatcaaaatatcac

SEQ ID NO: 380407 - DNA, 20 bp, Artificial Sequence
  Description of Artificial Sequence: Synthetic oligonucleotide
  Target: LAMA2; (+) strand; PAM type: YTN; PAM sequence: CTA
tgtatcaaaatatcacattg

SEQ ID NO: 380408 - DNA, 20 bp, Artificial Sequence
  Description of Artificial Sequence: Synthetic oligonucleotide
  Target: LAMA2; (+) strand; PAM type: YTN; PAM sequence: TTG
tttaaataaatatagttgac

SEQ ID NO: 380409 - DNA, 20 bp, Artificial Sequence
  Description of Artificial Sequence: Synthetic oligonucleotide
  Target: LAMA2; (+) strand; PAM type: YTN; PAM sequence: TTT
aaataaatatagttgaccct

SEQ ID NO: 380410 - DNA, 20 bp, Artificial Sequence
  Description of Artificial Sequence: Synthetic oligonucleotide
  Target: LAMA2; (+) strand; PAM type: YTN; PAM sequence: TTA
aataaatatagttgaccctt

SEQ ID NO: 380411 - DNA, 20 bp, Artificial Sequence
  Description of Artificial Sequence: Synthetic oligonucleotide
  Target: LAMA2; (+) strand; PAM type: YTN; PAM sequence: TTG
acccttgaacaacatggtgg

SEQ ID NO: 380412 - DNA, 20 bp, Artificial Sequence
  Description of Artificial Sequence: Synthetic oligonucleotide
  Target: LAMA2; (+) strand; PAM type: YTN; PAM sequence: CTT
gaacaacatggtggttagga

SEQ ID NO: 380413 - DNA, 20 bp, Artificial Sequence
  Description of Artificial Sequence: Synthetic oligonucleotide
  Target: LAMA2; (+) strand; PAM type: YTN; PAM sequence: TTG
aacaacatggtggttaggag

SEQ ID NO: 380414 - DNA, 20 bp, Artificial Sequence
  Description of Artificial Sequence: Synthetic oligonucleotide
  Target: LAMA2; (+) strand; PAM type: YTN; PAM sequence: TTA
ggagcatcaaccccacctca

SEQ ID NO: 380415 - DNA, 20 bp, Artificial Sequence
  Description of Artificial Sequence: Synthetic oligonucleotide
  Target: LAMA2; (+) strand; PAM type: YTN; PAM sequence: CTC
atgcagtcagaaatccacat

SEQ ID NO: 380416 - DNA, 20 bp, Artificial Sequence
  Description of Artificial Sequence: Synthetic oligonucleotide
  Target: LAMA2; (+) strand; PAM type: YTN; PAM sequence: CTT
ttgataccttcaaaacttaa

SEQ ID NO: 380417 - DNA, 20 bp, Artificial Sequence
  Description of Artificial Sequence: Synthetic oligonucleotide
  Target: LAMA2; (+) strand; PAM type: YTN; PAM sequence: TTT
tgataccttcaaaacttaac

SEQ ID NO: 380418 - DNA, 20 bp, Artificial Sequence
  Description of Artificial Sequence: Synthetic oligonucleotide
  Target: LAMA2; (+) strand; PAM type: YTN; PAM sequence: TTT
gataccttcaaaacttaact

SEQ ID NO: 380419 - DNA, 20 bp, Artificial Sequence
  Description of Artificial Sequence: Synthetic oligonucleotide
  Target: LAMA2; (+) strand; PAM type: YTN; PAM sequence: TTG
ataccttcaaaacttaacta

SEQ ID NO: 380420 - DNA, 20 bp, Artificial Sequence
  Description of Artificial Sequence: Synthetic oligonucleotide
  Target: LAMA2; (+) strand; PAM type: YTN; PAM sequence: CTT
caaaacttaactactaatag

SEQ ID NO: 380421 - DNA, 20 bp, Artificial Sequence
  Description of Artificial Sequence: Synthetic oligonucleotide
  Target: LAMA2; (+) strand; PAM type: YTN; PAM sequence: TTC
aaaacttaactactaatagc

SEQ ID NO: 380422 - DNA, 20 bp, Artificial Sequence
  Description of Artificial Sequence: Synthetic oligonucleotide
  Target: LAMA2; (+) strand; PAM type: YTN; PAM sequence: CTT
aactactaatagcctcctgt

SEQ ID NO: 380423 - DNA, 20 bp, Artificial Sequence
  Description of Artificial Sequence: Synthetic oligonucleotide
  Target: LAMA2; (+) strand; PAM type: YTN; PAM sequence: TTA
actactaatagcctcctgtt

SEQ ID NO: 380424 - DNA, 20 bp, Artificial Sequence
  Description of Artificial Sequence: Synthetic oligonucleotide
  Target: LAMA2; (+) strand; PAM type: YTN; PAM sequence: CTA
ctaatagcctcctgttgaac

SEQ ID NO: 380425 - DNA, 20 bp, Artificial Sequence
  Description of Artificial Sequence: Synthetic oligonucleotide
  Target: LAMA2; (+) strand; PAM type: YTN; PAM sequence: CTA
atagcctcctgttgaacaga

SEQ ID NO: 380426 - DNA, 20 bp, Artificial Sequence
  Description of Artificial Sequence: Synthetic oligonucleotide
  Target: LAMA2; (+) strand; PAM type: YTN; PAM sequence: CTC
ctgttgaacagaagccatac

SEQ ID NO: 380427 - DNA, 20 bp, Artificial Sequence
  Description of Artificial Sequence: Synthetic oligonucleotide
  Target: LAMA2; (+) strand; PAM type: YTN; PAM sequence: CTG
ttgaacagaagccatactga

SEQ ID NO: 380428 - DNA, 20 bp, Artificial Sequence
  Description of Artificial Sequence: Synthetic oligonucleotide
  Target: LAMA2; (+) strand; PAM type: YTN; PAM sequence: TTG
aacagaagccatactgataa

SEQ ID NO: 380429 - DNA, 20 bp, Artificial Sequence
  Description of Artificial Sequence: Synthetic oligonucleotide
  Target: LAMA2; (+) strand; PAM type: YTN; PAM sequence: CTG
ataacatagtagattaacat

SEQ ID NO: 380430 - DNA, 20 bp, Artificial Sequence
  Description of Artificial Sequence: Synthetic oligonucleotide
  Target: LAMA2; (+) strand; PAM type: YTN; PAM sequence: TTA
acatatatttgtgtgggtat

SEQ ID NO: 380431 - DNA, 20 bp, Artificial Sequence
  Description of Artificial Sequence: Synthetic oligonucleotide
  Target: LAMA2; (+) strand; PAM type: YTN; PAM sequence: TTT
gtgtgggtattatatattgt

SEQ ID NO: 380432 - DNA, 20 bp, Artificial Sequence
  Description of Artificial Sequence: Synthetic oligonucleotide
  Target: LAMA2; (+) strand; PAM type: YTN; PAM sequence: TTG
tgtgggtattatatattgta

SEQ ID NO: 380433 - DNA, 20 bp, Artificial Sequence
  Description of Artificial Sequence: Synthetic oligonucleotide
  Target: LAMA2; (+) strand; PAM type: YTN; PAM sequence: TTA
tatattgtattcttataata

SEQ ID NO: 380434 - DNA, 20 bp, Artificial Sequence
  Description of Artificial Sequence: Synthetic oligonucleotide
  Target: LAMA2; (+) strand; PAM type: YTN; PAM sequence: TTG
tattcttataataaagtgag

SEQ ID NO: 380435 - DNA, 20 bp, Artificial Sequence
  Description of Artificial Sequence: Synthetic oligonucleotide
  Target: LAMA2; (+) strand; PAM type: YTN; PAM sequence: TTC
ttataataaagtgagctaga

SEQ ID NO: 380436 - DNA, 20 bp, Artificial Sequence
  Description of Artificial Sequence: Synthetic oligonucleotide
  Target: LAMA2; (+) strand; PAM type: YTN; PAM sequence: CTT
ataataaagtgagctagaga

SEQ ID NO: 380437 - DNA, 20 bp, Artificial Sequence
  Description of Artificial Sequence: Synthetic oligonucleotide
  Target: LAMA2; (+) strand; PAM type: YTN; PAM sequence: TTA
taataaagtgagctagagaa

SEQ ID NO: 380438 - DNA, 20 bp, Artificial Sequence
  Description of Artificial Sequence: Synthetic oligonucleotide
  Target: LAMA2; (+) strand; PAM type: YTN; PAM sequence: CTA
gagaaaagaaaatgttatta

SEQ ID NO: 380439 - DNA, 20 bp, Artificial Sequence
  Description of Artificial Sequence: Synthetic oligonucleotide
  Target: LAMA2; (+) strand; PAM type: YTN; PAM sequence: TTA
ttaagaaagtaataagggct

SEQ ID NO: 380440 - DNA, 20 bp, Artificial Sequence
  Description of Artificial Sequence: Synthetic oligonucleotide
  Target: LAMA2; (+) strand; PAM type: YTN; PAM sequence: TTA
agaaagtaataagggctggg

SEQ ID NO: 380441 - DNA, 20 bp, Artificial Sequence
  Description of Artificial Sequence: Synthetic oligonucleotide
  Target: LAMA2; (+) strand; PAM type: YTN; PAM sequence: CTG
ggctcagtggctcatgcctg

SEQ ID NO: 380442 - DNA, 20 bp, Artificial Sequence
  Description of Artificial Sequence: Synthetic oligonucleotide
  Target: LAMA2; (+) strand; PAM type: YTN; PAM sequence: CTC
agtggctcatgcctgtaatc

SEQ ID NO: 380443 - DNA, 20 bp, Artificial Sequence
  Description of Artificial Sequence: Synthetic oligonucleotide
  Target: LAMA2; (+) strand; PAM type: YTN; PAM sequence: CTC
atgcctgtaatcccagcact

SEQ ID NO: 380444 - DNA, 20 bp, Artificial Sequence
  Description of Artificial Sequence: Synthetic oligonucleotide
  Target: LAMA2; (+) strand; PAM type: YTN; PAM sequence: CTG
taatcccagcacttcgggag

SEQ ID NO: 380445 - DNA, 20 bp, Artificial Sequence
  Description of Artificial Sequence: Synthetic oligonucleotide
  Target: LAMA2; (+) strand; PAM type: YTN; PAM sequence: CTT
cgggaggccaaagcaggcag

SEQ ID NO: 380446 - DNA, 20 bp, Artificial Sequence
  Description of Artificial Sequence: Synthetic oligonucleotide
  Target: LAMA2; (+) strand; PAM type: YTN; PAM sequence: TTC
gggaggccaaagcaggcaga

SEQ ID NO: 380447 - DNA, 20 bp, Artificial Sequence
  Description of Artificial Sequence: Synthetic oligonucleotide
  Target: LAMA2; (+) strand; PAM type: YTN; PAM sequence: CTT
gaggtcaacagttcaagacc

SEQ ID NO: 380448 - DNA, 20 bp, Artificial Sequence
  Description of Artificial Sequence: Synthetic oligonucleotide
  Target: LAMA2; (+) strand; PAM type: YTN; PAM sequence: TTG
aggtcaacagttcaagacca

SEQ ID NO: 380449 - DNA, 20 bp, Artificial Sequence
  Description of Artificial Sequence: Synthetic oligonucleotide
  Target: LAMA2; (+) strand; PAM type: YTN; PAM sequence: TTC
aagaccagcctggccaacat

SEQ ID NO: 380450 - DNA, 20 bp, Artificial Sequence
  Description of Artificial Sequence: Synthetic oligonucleotide
  Target: LAMA2; (+) strand; PAM type: YTN; PAM sequence: CTG
gccaacatgatgaaacccag

SEQ ID NO: 380451 - DNA, 20 bp, Artificial Sequence
  Description of Artificial Sequence: Synthetic oligonucleotide
  Target: LAMA2; (+) strand; PAM type: YTN; PAM sequence: TTT
ctactaaaaatacaataatt

SEQ ID NO: 380452 - DNA, 20 bp, Artificial Sequence
  Description of Artificial Sequence: Synthetic oligonucleotide
  Target: LAMA2; (+) strand; PAM type: YTN; PAM sequence: TTC
tactaaaaatacaataatta

SEQ ID NO: 380453 - DNA, 20 bp, Artificial Sequence
  Description of Artificial Sequence: Synthetic oligonucleotide
  Target: LAMA2; (+) strand; PAM type: YTN; PAM sequence: CTA
ctaaaaatacaataattagc

SEQ ID NO: 380454 - DNA, 20 bp, Artificial Sequence
  Description of Artificial Sequence: Synthetic oligonucleotide
  Target: LAMA2; (+) strand; PAM type: YTN; PAM sequence: CTA
aaaatacaataattagctgg

SEQ ID NO: 380455 - DNA, 20 bp, Artificial Sequence
  Description of Artificial Sequence: Synthetic oligonucleotide
  Target: LAMA2; (+) strand; PAM type: YTN; PAM sequence: TTA
gctgggcgtggtgttgcaca

SEQ ID NO: 380456 - DNA, 20 bp, Artificial Sequence
  Description of Artificial Sequence: Synthetic oligonucleotide
  Target: LAMA2; (+) strand; PAM type: YTN; PAM sequence: CTG
ggcgtggtgttgcacacctg

SEQ ID NO: 380457 - DNA, 20 bp, Artificial Sequence
  Description of Artificial Sequence: Synthetic oligonucleotide
  Target: LAMA2; (+) strand; PAM type: YTN; PAM sequence: TTG
cacacctgtaatcccagcta

SEQ ID NO: 380458 - DNA, 20 bp, Artificial Sequence
  Description of Artificial Sequence: Synthetic oligonucleotide
  Target: LAMA2; (+) strand; PAM type: YTN; PAM sequence: CTG
taatcccagctactcaggag

SEQ ID NO: 380459 - DNA, 20 bp, Artificial Sequence
  Description of Artificial Sequence: Synthetic oligonucleotide
  Target: LAMA2; (+) strand; PAM type: YTN; PAM sequence: CTA
ctcaggaggctgaggcagga

SEQ ID NO: 380460 - DNA, 20 bp, Artificial Sequence
  Description of Artificial Sequence: Synthetic oligonucleotide
  Target: LAMA2; (+) strand; PAM type: YTN; PAM sequence: CTC
aggaggctgaggcaggagaa

SEQ ID NO: 380461 - DNA, 20 bp, Artificial Sequence
  Description of Artificial Sequence: Synthetic oligonucleotide
  Target: LAMA2; (+) strand; PAM type: YTN; PAM sequence: CTG
aggcaggagaatcacttgaa

SEQ ID NO: 380462 - DNA, 20 bp, Artificial Sequence
  Description of Artificial Sequence: Synthetic oligonucleotide
  Target: LAMA2; (+) strand; PAM type: YTN; PAM sequence: CTT
gaacctggtaggcggaggtt

SEQ ID NO: 380463 - DNA, 20 bp, Artificial Sequence
  Description of Artificial Sequence: Synthetic oligonucleotide
  Target: LAMA2; (+) strand; PAM type: YTN; PAM sequence: TTG
aacctggtaggcggaggttg

SEQ ID NO: 380464 - DNA, 20 bp, Artificial Sequence
  Description of Artificial Sequence: Synthetic oligonucleotide
  Target: LAMA2; (+) strand; PAM type: YTN; PAM sequence: CTG
gtaggcggaggttgtagtga

SEQ ID NO: 380465 - DNA, 20 bp, Artificial Sequence
  Description of Artificial Sequence: Synthetic oligonucleotide
  Target: LAMA2; (+) strand; PAM type: YTN; PAM sequence: TTG
tagtgagccaagattatgcc

SEQ ID NO: 380466 - DNA, 20 bp, Artificial Sequence
  Description of Artificial Sequence: Synthetic oligonucleotide
  Target: LAMA2; (+) strand; PAM type: YTN; PAM sequence: TTA
tgccactacactccagcctg

SEQ ID NO: 380467 - DNA, 20 bp, Artificial Sequence
  Description of Artificial Sequence: Synthetic oligonucleotide
  Target: LAMA2; (+) strand; PAM type: YTN; PAM sequence: CTA
cactccagcctgggtgacag

SEQ ID NO: 380468 - DNA, 20 bp, Artificial Sequence
  Description of Artificial Sequence: Synthetic oligonucleotide
  Target: LAMA2; (+) strand; PAM type: YTN; PAM sequence: CTC
cagcctgggtgacagagtga

SEQ ID NO: 380469 - DNA, 20 bp, Artificial Sequence
  Description of Artificial Sequence: Synthetic oligonucleotide
  Target: LAMA2; (+) strand; PAM type: YTN; PAM sequence: CTG
ggtgacagagtgagactctg

SEQ ID NO: 380470 - DNA, 20 bp, Artificial Sequence
  Description of Artificial Sequence: Synthetic oligonucleotide
  Target: LAMA2; (+) strand; PAM type: YTN; PAM sequence: CTC
tgtctcaaataaataaataa

SEQ ID NO: 380471 - DNA, 20 bp, Artificial Sequence
  Description of Artificial Sequence: Synthetic oligonucleotide
  Target: LAMA2; (+) strand; PAM type: YTN; PAM sequence: CTG
tctcaaataaataaataaat

SEQ ID NO: 380472 - DNA, 20 bp, Artificial Sequence
  Description of Artificial Sequence: Synthetic oligonucleotide
  Target: LAMA2; (+) strand; PAM type: YTN; PAM sequence: CTC
aaataaataaataaataaat

SEQ ID NO: 380473 - DNA, 20 bp, Artificial Sequence
  Description of Artificial Sequence: Synthetic oligonucleotide
  Target: LAMA2; (+) strand; PAM type: YTN; PAM sequence: TTA
agtggaagtggatcattgta

SEQ ID NO: 380474 - DNA, 20 bp, Artificial Sequence
  Description of Artificial Sequence: Synthetic oligonucleotide
  Target: LAMA2; (+) strand; PAM type: YTN; PAM sequence: TTG
taaaggtcttcatcctcgtt

SEQ ID NO: 380475 - DNA, 20 bp, Artificial Sequence
  Description of Artificial Sequence: Synthetic oligonucleotide
  Target: LAMA2; (+) strand; PAM type: YTN; PAM sequence: CTT
catcctcgttgtcttcattt

SEQ ID NO: 380476 - DNA, 20 bp, Artificial Sequence
  Description of Artificial Sequence: Synthetic oligonucleotide
  Target: LAMA2; (+) strand; PAM type: YTN; PAM sequence: TTC
atcctcgttgtcttcatttt

SEQ ID NO: 380477 - DNA, 20 bp, Artificial Sequence
  Description of Artificial Sequence: Synthetic oligonucleotide
  Target: LAMA2; (+) strand; PAM type: YTN; PAM sequence: CTC
gttgtcttcattttgagcag

SEQ ID NO: 380478 - DNA, 20 bp, Artificial Sequence
  Description of Artificial Sequence: Synthetic oligonucleotide
  Target: LAMA2; (+) strand; PAM type: YTN; PAM sequence: TTG
tcttcattttgagcagacta

SEQ ID NO: 380479 - DNA, 20 bp, Artificial Sequence
  Description of Artificial Sequence: Synthetic oligonucleotide
  Target: LAMA2; (+) strand; PAM type: YTN; PAM sequence: CTT
cattttgagcagactaaaga

SEQ ID NO: 380480 - DNA, 20 bp, Artificial Sequence
  Description of Artificial Sequence: Synthetic oligonucleotide
  Target: LAMA2; (+) strand; PAM type: YTN; PAM sequence: TTC
attttgagcagactaaagag

SEQ ID NO: 380481 - DNA, 20 bp, Artificial Sequence
  Description of Artificial Sequence: Synthetic oligonucleotide
  Target: LAMA2; (+) strand; PAM type: YTN; PAM sequence: TTT
tgagcagactaaagaggagg

SEQ ID NO: 380482 - DNA, 20 bp, Artificial Sequence
  Description of Artificial Sequence: Synthetic oligonucleotide
  Target: LAMA2; (+) strand; PAM type: YTN; PAM sequence: TTT
gagcagactaaagaggagga

SEQ ID NO: 380483 - DNA, 20 bp, Artificial Sequence
  Description of Artificial Sequence: Synthetic oligonucleotide
  Target: LAMA2; (+) strand; PAM type: YTN; PAM sequence: TTG
agcagactaaagaggaggag

SEQ ID NO: 380484 - DNA, 20 bp, Artificial Sequence
  Description of Artificial Sequence: Synthetic oligonucleotide
  Target: LAMA2; (+) strand; PAM type: YTN; PAM sequence: CTA
aagaggaggaggaagaagag

SEQ ID NO: 380485 - DNA, 20 bp, Artificial Sequence
  Description of Artificial Sequence: Synthetic oligonucleotide
  Target: LAMA2; (+) strand; PAM type: YTN; PAM sequence: TTG
gtcctgctatctctgggtag

SEQ ID NO: 380486 - DNA, 20 bp, Artificial Sequence
  Description of Artificial Sequence: Synthetic oligonucleotide
  Target: LAMA2; (+) strand; PAM type: YTN; PAM sequence: CTG
ctatctctgggtagcagacg

SEQ ID NO: 380487 - DNA, 20 bp, Artificial Sequence
  Description of Artificial Sequence: Synthetic oligonucleotide
  Target: LAMA2; (+) strand; PAM type: YTN; PAM sequence: CTA
tctctgggtagcagacgtgg

SEQ ID NO: 380488 - DNA, 20 bp, Artificial Sequence
  Description of Artificial Sequence: Synthetic oligonucleotide
  Target: LAMA2; (+) strand; PAM type: YTN; PAM sequence: CTC
tgggtagcagacgtggaaga

SEQ ID NO: 380489 - DNA, 20 bp, Artificial Sequence
  Description of Artificial Sequence: Synthetic oligonucleotide
  Target: LAMA2; (+) strand; PAM type: YTN; PAM sequence: CTG
ggtagcagacgtggaagaaa

SEQ ID NO: 380490 - DNA, 20 bp, Artificial Sequence
  Description of Artificial Sequence: Synthetic oligonucleotide
  Target: LAMA2; (+) strand; PAM type: YTN; PAM sequence: TTC
aagcccatattgttcaaggg

SEQ ID NO: 380491 - DNA, 20 bp, Artificial Sequence
  Description of Artificial Sequence: Synthetic oligonucleotide
  Target: LAMA2; (+) strand; PAM type: YTN; PAM sequence: TTG
ttcaagggtcaacttatgta

SEQ ID NO: 380492 - DNA, 20 bp, Artificial Sequence
  Description of Artificial Sequence: Synthetic oligonucleotide
  Target: LAMA2; (+) strand; PAM type: YTN; PAM sequence: TTC
aagggtcaacttatgtacaa

SEQ ID NO: 380493 - DNA, 20 bp, Artificial Sequence
  Description of Artificial Sequence: Synthetic oligonucleotide
  Target: LAMA2; (+) strand; PAM type: YTN; PAM sequence: CTT
atgtacaattattatttgtc

SEQ ID NO: 380494 - DNA, 20 bp, Artificial Sequence
  Description of Artificial Sequence: Synthetic oligonucleotide
  Target: LAMA2; (+) strand; PAM type: YTN; PAM sequence: TTA
tgtacaattattatttgtca

SEQ ID NO: 380495 - DNA, 20 bp, Artificial Sequence
  Description of Artificial Sequence: Synthetic oligonucleotide
  Target: LAMA2; (+) strand; PAM type: YTN; PAM sequence: TTA
ttatttgtcaattaaaaaca

SEQ ID NO: 380496 - DNA, 20 bp, Artificial Sequence
  Description of Artificial Sequence: Synthetic oligonucleotide
  Target: LAMA2; (+) strand; PAM type: YTN; PAM sequence: TTA
tttgtcaattaaaaacaaaa

SEQ ID NO: 380497 - DNA, 20 bp, Artificial Sequence
  Description of Artificial Sequence: Synthetic oligonucleotide
  Target: LAMA2; (+) strand; PAM type: YTN; PAM sequence: TTT
gtcaattaaaaacaaaaaga

SEQ ID NO: 380498 - DNA, 20 bp, Artificial Sequence
  Description of Artificial Sequence: Synthetic oligonucleotide
  Target: LAMA2; (+) strand; PAM type: YTN; PAM sequence: TTG
tcaattaaaaacaaaaagac

SEQ ID NO: 380499 - DNA, 20 bp, Artificial Sequence
  Description of Artificial Sequence: Synthetic oligonucleotide
  Target: LAMA2; (+) strand; PAM type: YTN; PAM sequence: TTA
aaaacaaaaagacaatagaa

SEQ ID NO: 380500 - DNA, 20 bp, Artificial Sequence
  Description of Artificial Sequence: Synthetic oligonucleotide
  Target: LAMA2; (+) strand; PAM type: YTN; PAM sequence: CTT
gaggttgacaaaaacgtgag

SEQ ID NO: 380501 - DNA, 20 bp, Artificial Sequence
  Description of Artificial Sequence: Synthetic oligonucleotide
  Target: LAMA2; (+) strand; PAM type: YTN; PAM sequence: TTG
aggttgacaaaaacgtgaga

SEQ ID NO: 380502 - DNA, 20 bp, Artificial Sequence
  Description of Artificial Sequence: Synthetic oligonucleotide
  Target: LAMA2; (+) strand; PAM type: YTN; PAM sequence: TTG
acaaaaacgtgagaaggata

SEQ ID NO: 380503 - DNA, 20 bp, Artificial Sequence
  Description of Artificial Sequence: Synthetic oligonucleotide
  Target: LAMA2; (+) strand; PAM type: YTN; PAM sequence: TTG
ctgtaggattgattgtttac

SEQ ID NO: 380504 - DNA, 20 bp, Artificial Sequence
  Description of Artificial Sequence: Synthetic oligonucleotide
  Target: LAMA2; (+) strand; PAM type: YTN; PAM sequence: CTG
taggattgattgtttactag

SEQ ID NO: 380505 - DNA, 20 bp, Artificial Sequence
  Description of Artificial Sequence: Synthetic oligonucleotide
  Target: LAMA2; (+) strand; PAM type: YTN; PAM sequence: TTG
attgtttactaggtgatctt

SEQ ID NO: 380506 - DNA, 20 bp, Artificial Sequence
  Description of Artificial Sequence: Synthetic oligonucleotide
  Target: LAMA2; (+) strand; PAM type: YTN; PAM sequence: TTG
tttactaggtgatcttaact

SEQ ID NO: 380507 - DNA, 20 bp, Artificial Sequence
  Description of Artificial Sequence: Synthetic oligonucleotide
  Target: LAMA2; (+) strand; PAM type: YTN; PAM sequence: TTT
actaggtgatcttaactgac

SEQ ID NO: 380508 - DNA, 20 bp, Artificial Sequence
  Description of Artificial Sequence: Synthetic oligonucleotide
  Target: LAMA2; (+) strand; PAM type: YTN; PAM sequence: TTA
ctaggtgatcttaactgact

SEQ ID NO: 380509 - DNA, 20 bp, Artificial Sequence
  Description of Artificial Sequence: Synthetic oligonucleotide
  Target: LAMA2; (+) strand; PAM type: YTN; PAM sequence: CTA
ggtgatcttaactgactgtc

SEQ ID NO: 380510 - DNA, 20 bp, Artificial Sequence
  Description of Artificial Sequence: Synthetic oligonucleotide
  Target: LAMA2; (+) strand; PAM type: YTN; PAM sequence: CTT
aactgactgtcatagtaatc

SEQ ID NO: 380511 - DNA, 20 bp, Artificial Sequence
  Description of Artificial Sequence: Synthetic oligonucleotide
  Target: LAMA2; (+) strand; PAM type: YTN; PAM sequence: TTA
actgactgtcatagtaatct

SEQ ID NO: 380512 - DNA, 20 bp, Artificial Sequence
  Description of Artificial Sequence: Synthetic oligonucleotide
  Target: LAMA2; (+) strand; PAM type: YTN; PAM sequence: CTG
actgtcatagtaatctaagt

SEQ ID NO: 380513 - DNA, 20 bp, Artificial Sequence
  Description of Artificial Sequence: Synthetic oligonucleotide
  Target: LAMA2; (+) strand; PAM type: YTN; PAM sequence: CTG
tcatagtaatctaagtacat

SEQ ID NO: 380514 - DNA, 20 bp, Artificial Sequence
  Description of Artificial Sequence: Synthetic oligonucleotide
  Target: LAMA2; (+) strand; PAM type: YTN; PAM sequence: CTA
agtacattctcgctgtttct

SEQ ID NO: 380515 - DNA, 20 bp, Artificial Sequence
  Description of Artificial Sequence: Synthetic oligonucleotide
  Target: LAMA2; (+) strand; PAM type: YTN; PAM sequence: TTC
tcgctgtttctaggatttct

SEQ ID NO: 380516 - DNA, 20 bp, Artificial Sequence
  Description of Artificial Sequence: Synthetic oligonucleotide
  Target: LAMA2; (+) strand; PAM type: YTN; PAM sequence: CTC
gctgtttctaggatttctga

SEQ ID NO: 380517 - DNA, 20 bp, Artificial Sequence
  Description of Artificial Sequence: Synthetic oligonucleotide
  Target: LAMA2; (+) strand; PAM type: YTN; PAM sequence: CTG
tttctaggatttctgaaatc

SEQ ID NO: 380518 - DNA, 20 bp, Artificial Sequence
  Description of Artificial Sequence: Synthetic oligonucleotide
  Target: LAMA2; (+) strand; PAM type: YTN; PAM sequence: TTT
ctaggatttctgaaatctca

SEQ ID NO: 380519 - DNA, 20 bp, Artificial Sequence
  Description of Artificial Sequence: Synthetic oligonucleotide
  Target: LAMA2; (+) strand; PAM type: YTN; PAM sequence: TTC
taggatttctgaaatctcaa

SEQ ID NO: 380520 - DNA, 20 bp, Artificial Sequence
  Description of Artificial Sequence: Synthetic oligonucleotide
  Target: LAMA2; (+) strand; PAM type: YTN; PAM sequence: CTA
ggatttctgaaatctcaatg

SEQ ID NO: 380521 - DNA, 20 bp, Artificial Sequence
  Description of Artificial Sequence: Synthetic oligonucleotide
  Target: LAMA2; (+) strand; PAM type: YTN; PAM sequence: TTT
ctgaaatctcaatggaggta

SEQ ID NO: 380522 - DNA, 20 bp, Artificial Sequence
  Description of Artificial Sequence: Synthetic oligonucleotide
  Target: LAMA2; (+) strand; PAM type: YTN; PAM sequence: TTC
tgaaatctcaatggaggtag

SEQ ID NO: 380523 - DNA, 20 bp, Artificial Sequence
  Description of Artificial Sequence: Synthetic oligonucleotide
  Target: LAMA2; (+) strand; PAM type: YTN; PAM sequence: CTG
aaatctcaatggaggtagct

SEQ ID NO: 380524 - DNA, 20 bp, Artificial Sequence
  Description of Artificial Sequence: Synthetic oligonucleotide
  Target: LAMA2; (+) strand; PAM type: YTN; PAM sequence: CTC
aatggaggtagctgaacaag

SEQ ID NO: 380525 - DNA, 20 bp, Artificial Sequence
  Description of Artificial Sequence: Synthetic oligonucleotide
  Target: LAMA2; (+) strand; PAM type: YTN; PAM sequence: CTG
aacaaggacgtggaacaaca

SEQ ID NO: 380526 - DNA, 20 bp, Artificial Sequence
  Description of Artificial Sequence: Synthetic oligonucleotide
  Target: LAMA2; (+) strand; PAM type: YTN; PAM sequence: CTC
ctccagctgacttgattgaa

SEQ ID NO: 380527 - DNA, 20 bp, Artificial Sequence
  Description of Artificial Sequence: Synthetic oligonucleotide
  Target: LAMA2; (+) strand; PAM type: YTN; PAM sequence: CTC
cagctgacttgattgaaaaa

SEQ ID NO: 380528 - DNA, 20 bp, Artificial Sequence
  Description of Artificial Sequence: Synthetic oligonucleotide
  Target: LAMA2; (+) strand; PAM type: YTN; PAM sequence: CTG
acttgattgaaaaatgtgat

SEQ ID NO: 380529 - DNA, 20 bp, Artificial Sequence
  Description of Artificial Sequence: Synthetic oligonucleotide
  Target: LAMA2; (+) strand; PAM type: YTN; PAM sequence: CTT
gattgaaaaatgtgattgtc

SEQ ID NO: 380530 - DNA, 20 bp, Artificial Sequence
  Description of Artificial Sequence: Synthetic oligonucleotide
  Target: LAMA2; (+) strand; PAM type: YTN; PAM sequence: TTG
attgaaaaatgtgattgtcc

SEQ ID NO: 380531 - DNA, 20 bp, Artificial Sequence
  Description of Artificial Sequence: Synthetic oligonucleotide
  Target: LAMA2; (+) strand; PAM type: YTN; PAM sequence: TTG
aaaaatgtgattgtcccctg

SEQ ID NO: 380532 - DNA, 20 bp, Artificial Sequence
  Description of Artificial Sequence: Synthetic oligonucleotide
  Target: LAMA2; (+) strand; PAM type: YTN; PAM sequence: TTG
tcccctgggctattctggcc

SEQ ID NO: 380533 - DNA, 20 bp, Artificial Sequence
  Description of Artificial Sequence: Synthetic oligonucleotide
  Target: LAMA2; (+) strand; PAM type: YTN; PAM sequence: CTG
ggctattctggcctgtcctg

SEQ ID NO: 380534 - DNA, 20 bp, Artificial Sequence
  Description of Artificial Sequence: Synthetic oligonucleotide
  Target: LAMA2; (+) strand; PAM type: YTN; PAM sequence: CTA
ttctggcctgtcctgtgagg

SEQ ID NO: 380535 - DNA, 20 bp, Artificial Sequence
  Description of Artificial Sequence: Synthetic oligonucleotide
  Target: LAMA2; (+) strand; PAM type: YTN; PAM sequence: TTC
tggcctgtcctgtgaggtaa

SEQ ID NO: 380536 - DNA, 20 bp, Artificial Sequence
  Description of Artificial Sequence: Synthetic oligonucleotide
  Target: LAMA2; (+) strand; PAM type: YTN; PAM sequence: CTG
gcctgtcctgtgaggtaagc

SEQ ID NO: 380537 - DNA, 20 bp, Artificial Sequence
  Description of Artificial Sequence: Synthetic oligonucleotide
  Target: LAMA2; (+) strand; PAM type: YTN; PAM sequence: CTG
tcctgtgaggtaagctacct

SEQ ID NO: 380538 - DNA, 20 bp, Artificial Sequence
  Description of Artificial Sequence: Synthetic oligonucleotide
  Target: LAMA2; (+) strand; PAM type: YTN; PAM sequence: CTG
tgaggtaagctacctcctac

SEQ ID NO: 380539 - DNA, 20 bp, Artificial Sequence
  Description of Artificial Sequence: Synthetic oligonucleotide
  Target: LAMA2; (+) strand; PAM type: YTN; PAM sequence: CTA
cctcctactaacctgcttaa

SEQ ID NO: 380540 - DNA, 20 bp, Artificial Sequence
  Description of Artificial Sequence: Synthetic oligonucleotide
  Target: LAMA2; (+) strand; PAM type: YTN; PAM sequence: CTC
ctactaacctgcttaatctc

SEQ ID NO: 380541 - DNA, 20 bp, Artificial Sequence
  Description of Artificial Sequence: Synthetic oligonucleotide
  Target: LAMA2; (+) strand; PAM type: YTN; PAM sequence: CTA
ctaacctgcttaatctcaag

SEQ ID NO: 380542 - DNA, 20 bp, Artificial Sequence
  Description of Artificial Sequence: Synthetic oligonucleotide
  Target: LAMA2; (+) strand; PAM type: YTN; PAM sequence: CTA
acctgcttaatctcaagtca

SEQ ID NO: 380543 - DNA, 20 bp, Artificial Sequence
  Description of Artificial Sequence: Synthetic oligonucleotide
  Target: LAMA2; (+) strand; PAM type: YTN; PAM sequence: CTG
cttaatctcaagtcacttca

SEQ ID NO: 380544 - DNA, 20 bp, Artificial Sequence
  Description of Artificial Sequence: Synthetic oligonucleotide
  Target: LAMA2; (+) strand; PAM type: YTN; PAM sequence: CTT
aatctcaagtcacttcagga

SEQ ID NO: 380545 - DNA, 20 bp, Artificial Sequence
  Description of Artificial Sequence: Synthetic oligonucleotide
  Target: LAMA2; (+) strand; PAM type: YTN; PAM sequence: TTA
atctcaagtcacttcaggag

SEQ ID NO: 380546 - DNA, 20 bp, Artificial Sequence
  Description of Artificial Sequence: Synthetic oligonucleotide
  Target: LAMA2; (+) strand; PAM type: YTN; PAM sequence: CTC
aagtcacttcaggagctaaa

SEQ ID NO: 380547 - DNA, 20 bp, Artificial Sequence
  Description of Artificial Sequence: Synthetic oligonucleotide
  Target: LAMA2; (+) strand; PAM type: YTN; PAM sequence: CTT
caggagctaaatggaaatac

SEQ ID NO: 380548 - DNA, 20 bp, Artificial Sequence
  Description of Artificial Sequence: Synthetic oligonucleotide
  Target: LAMA2; (+) strand; PAM type: YTN; PAM sequence: TTC
aggagctaaatggaaatact

SEQ ID NO: 380549 - DNA, 20 bp, Artificial Sequence
  Description of Artificial Sequence: Synthetic oligonucleotide
  Target: LAMA2; (+) strand; PAM type: YTN; PAM sequence: CTA
aatggaaatactcccagaag

SEQ ID NO: 380550 - DNA, 20 bp, Artificial Sequence
  Description of Artificial Sequence: Synthetic oligonucleotide
  Target: LAMA2; (+) strand; PAM type: YTN; PAM sequence: CTC
ccagaagtacctttactgca

SEQ ID NO: 380551 - DNA, 20 bp, Artificial Sequence
  Description of Artificial Sequence: Synthetic oligonucleotide
  Target: LAMA2; (+) strand; PAM type: YTN; PAM sequence: CTT
tactgcatacatattcttaa

SEQ ID NO: 380552 - DNA, 20 bp, Artificial Sequence
  Description of Artificial Sequence: Synthetic oligonucleotide
  Target: LAMA2; (+) strand; PAM type: YTN; PAM sequence: TTT
actgcatacatattcttaat

SEQ ID NO: 380553 - DNA, 20 bp, Artificial Sequence
  Description of Artificial Sequence: Synthetic oligonucleotide
  Target: LAMA2; (+) strand; PAM type: YTN; PAM sequence: TTA
ctgcatacatattcttaatc

SEQ ID NO: 380554 - DNA, 20 bp, Artificial Sequence
  Description of Artificial Sequence: Synthetic oligonucleotide
  Target: LAMA2; (+) strand; PAM type: YTN; PAM sequence: CTG
catacatattcttaatctat

SEQ ID NO: 380555 - DNA, 20 bp, Artificial Sequence
  Description of Artificial Sequence: Synthetic oligonucleotide
  Target: LAMA2; (+) strand; PAM type: YTN; PAM sequence: TTC
ttaatctattttatttaatc

SEQ ID NO: 380556 - DNA, 20 bp, Artificial Sequence
  Description of Artificial Sequence: Synthetic oligonucleotide
  Target: LAMA2; (+) strand; PAM type: YTN; PAM sequence: CTT
aatctattttatttaatctt

SEQ ID NO: 380557 - DNA, 20 bp, Artificial Sequence
  Description of Artificial Sequence: Synthetic oligonucleotide
  Target: LAMA2; (+) strand; PAM type: YTN; PAM sequence: TTA
atctattttatttaatcttc

SEQ ID NO: 380558 - DNA, 20 bp, Artificial Sequence
  Description of Artificial Sequence: Synthetic oligonucleotide
  Target: LAMA2; (+) strand; PAM type: YTN; PAM sequence: CTA
ttttatttaatcttccactc

SEQ ID NO: 380559 - DNA, 20 bp, Artificial Sequence
  Description of Artificial Sequence: Synthetic oligonucleotide
  Target: LAMA2; (+) strand; PAM type: YTN; PAM sequence: TTT
tatttaatcttccactcaca

SEQ ID NO: 380560 - DNA, 20 bp, Artificial Sequence
  Description of Artificial Sequence: Synthetic oligonucleotide
  Target: LAMA2; (+) strand; PAM type: YTN; PAM sequence: TTT
atttaatcttccactcacag

SEQ ID NO: 380561 - DNA, 20 bp, Artificial Sequence
  Description of Artificial Sequence: Synthetic oligonucleotide
  Target: LAMA2; (+) strand; PAM type: YTN; PAM sequence: TTA
tttaatcttccactcacagt

SEQ ID NO: 380562 - DNA, 20 bp, Artificial Sequence
  Description of Artificial Sequence: Synthetic oligonucleotide
  Target: LAMA2; (+) strand; PAM type: YTN; PAM sequence: TTT
aatcttccactcacagtgtg

SEQ ID NO: 380563 - DNA, 20 bp, Artificial Sequence
  Description of Artificial Sequence: Synthetic oligonucleotide
  Target: LAMA2; (+) strand; PAM type: YTN; PAM sequence: TTA
atcttccactcacagtgtga

SEQ ID NO: 380564 - DNA, 20 bp, Artificial Sequence
  Description of Artificial Sequence: Synthetic oligonucleotide
  Target: LAMA2; (+) strand; PAM type: YTN; PAM sequence: CTT
ccactcacagtgtgagacac

SEQ ID NO: 380565 - DNA, 20 bp, Artificial Sequence
  Description of Artificial Sequence: Synthetic oligonucleotide
  Target: LAMA2; (+) strand; PAM type: YTN; PAM sequence: TTC
cactcacagtgtgagacaca

SEQ ID NO: 380566 - DNA, 20 bp, Artificial Sequence
  Description of Artificial Sequence: Synthetic oligonucleotide
  Target: LAMA2; (+) strand; PAM type: YTN; PAM sequence: CTC
acagtgtgagacacagtggc

SEQ ID NO: 380567 - DNA, 20 bp, Artificial Sequence
  Description of Artificial Sequence: Synthetic oligonucleotide
  Target: LAMA2; (+) strand; PAM type: YTN; PAM sequence: TTA
ttgatatttagtacaaatca

SEQ ID NO: 380568 - DNA, 20 bp, Artificial Sequence
  Description of Artificial Sequence: Synthetic oligonucleotide
  Target: LAMA2; (+) strand; PAM type: YTN; PAM sequence: TTG
atatttagtacaaatcatac

SEQ ID NO: 380569 - DNA, 20 bp, Artificial Sequence
  Description of Artificial Sequence: Synthetic oligonucleotide
  Target: LAMA2; (+) strand; PAM type: YTN; PAM sequence: TTT
agtacaaatcatacctgaag

SEQ ID NO: 380570 - DNA, 20 bp, Artificial Sequence
  Description of Artificial Sequence: Synthetic oligonucleotide
  Target: LAMA2; (+) strand; PAM type: YTN; PAM sequence: TTA
gtacaaatcatacctgaagg

SEQ ID NO: 380571 - DNA, 20 bp, Artificial Sequence
  Description of Artificial Sequence: Synthetic oligonucleotide
  Target: LAMA2; (+) strand; PAM type: YTN; PAM sequence: CTG
aagggaaatagttgatcaaa

SEQ ID NO: 380572 - DNA, 20 bp, Artificial Sequence
  Description of Artificial Sequence: Synthetic oligonucleotide
  Target: LAMA2; (+) strand; PAM type: YTN; PAM sequence: TTG
atcaaaaatttaaagatttg

SEQ ID NO: 380573 - DNA, 20 bp, Artificial Sequence
  Description of Artificial Sequence: Synthetic oligonucleotide
  Target: LAMA2; (+) strand; PAM type: YTN; PAM sequence: TTT
aaagatttgtgaaaatattt

SEQ ID NO: 380574 - DNA, 20 bp, Artificial Sequence
  Description of Artificial Sequence: Synthetic oligonucleotide
  Target: LAMA2; (+) strand; PAM type: YTN; PAM sequence: TTA
aagatttgtgaaaatattta

SEQ ID NO: 380575 - DNA, 20 bp, Artificial Sequence
  Description of Artificial Sequence: Synthetic oligonucleotide
  Target: LAMA2; (+) strand; PAM type: YTN; PAM sequence: TTT
gtgaaaatatttaacaatca

SEQ ID NO: 380576 - DNA, 20 bp, Artificial Sequence
  Description of Artificial Sequence: Synthetic oligonucleotide
  Target: LAMA2; (+) strand; PAM type: YTN; PAM sequence: TTG
tgaaaatatttaacaatcag

SEQ ID NO: 380577 - DNA, 20 bp, Artificial Sequence
  Description of Artificial Sequence: Synthetic oligonucleotide
  Target: LAMA2; (+) strand; PAM type: YTN; PAM sequence: TTT
aacaatcaggaattaagaat

SEQ ID NO: 380578 - DNA, 20 bp, Artificial Sequence
  Description of Artificial Sequence: Synthetic oligonucleotide
  Target: LAMA2; (+) strand; PAM type: YTN; PAM sequence: TTA
acaatcaggaattaagaatg

SEQ ID NO: 380579 - DNA, 20 bp, Artificial Sequence
  Description of Artificial Sequence: Synthetic oligonucleotide
  Target: LAMA2; (+) strand; PAM type: YTN; PAM sequence: TTA
agaatgttttaataagccta

SEQ ID NO: 380580 - DNA, 20 bp, Artificial Sequence
  Description of Artificial Sequence: Synthetic oligonucleotide
  Target: LAMA2; (+) strand; PAM type: YTN; PAM sequence: TTT
taataagcctatttattata

SEQ ID NO: 380581 - DNA, 20 bp, Artificial Sequence
  Description of Artificial Sequence: Synthetic oligonucleotide
  Target: LAMA2; (+) strand; PAM type: YTN; PAM sequence: TTT
aataagcctatttattatag

SEQ ID NO: 380582 - DNA, 20 bp, Artificial Sequence
  Description of Artificial Sequence: Synthetic oligonucleotide
  Target: LAMA2; (+) strand; PAM type: YTN; PAM sequence: TTA
ataagcctatttattatagc

SEQ ID NO: 380583 - DNA, 20 bp, Artificial Sequence
  Description of Artificial Sequence: Synthetic oligonucleotide
  Target: LAMA2; (+) strand; PAM type: YTN; PAM sequence: CTA
tttattatagctgatctatt

SEQ ID NO: 380584 - DNA, 20 bp, Artificial Sequence
  Description of Artificial Sequence: Synthetic oligonucleotide
  Target: LAMA2; (+) strand; PAM type: YTN; PAM sequence: TTT
attatagctgatctattttc

SEQ ID NO: 380585 - DNA, 20 bp, Artificial Sequence
  Description of Artificial Sequence: Synthetic oligonucleotide
  Target: LAMA2; (+) strand; PAM type: YTN; PAM sequence: TTA
ttatagctgatctattttct

SEQ ID NO: 380586 - DNA, 20 bp, Artificial Sequence
  Description of Artificial Sequence: Synthetic oligonucleotide
  Target: LAMA2; (+) strand; PAM type: YTN; PAM sequence: TTA
tagctgatctattttcttgg

SEQ ID NO: 380587 - DNA, 20 bp, Artificial Sequence
  Description of Artificial Sequence: Synthetic oligonucleotide
  Target: LAMA2; (+) strand; PAM type: YTN; PAM sequence: CTG
atctattttcttggaccact

SEQ ID NO: 380588 - DNA, 20 bp, Artificial Sequence
  Description of Artificial Sequence: Synthetic oligonucleotide
  Target: LAMA2; (+) strand; PAM type: YTN; PAM sequence: CTA
ttttcttggaccacttctga

SEQ ID NO: 380589 - DNA, 20 bp, Artificial Sequence
  Description of Artificial Sequence: Synthetic oligonucleotide
  Target: LAMA2; (+) strand; PAM type: YTN; PAM sequence: TTT
tcttggaccacttctgaaga

SEQ ID NO: 380590 - DNA, 20 bp, Artificial Sequence
  Description of Artificial Sequence: Synthetic oligonucleotide
  Target: LAMA2; (+) strand; PAM type: YTN; PAM sequence: TTT
cttggaccacttctgaagag

SEQ ID NO: 380591 - DNA, 20 bp, Artificial Sequence
  Description of Artificial Sequence: Synthetic oligonucleotide
  Target: LAMA2; (+) strand; PAM type: YTN; PAM sequence: TTC
ttggaccacttctgaagagt

SEQ ID NO: 380592 - DNA, 20 bp, Artificial Sequence
  Description of Artificial Sequence: Synthetic oligonucleotide
  Target: LAMA2; (+) strand; PAM type: YTN; PAM sequence: CTT
ggaccacttctgaagagtta

SEQ ID NO: 380593 - DNA, 20 bp, Artificial Sequence
  Description of Artificial Sequence: Synthetic oligonucleotide
  Target: LAMA2; (+) strand; PAM type: YTN; PAM sequence: TTG
gaccacttctgaagagttag

SEQ ID NO: 380594 - DNA, 20 bp, Artificial Sequence
  Description of Artificial Sequence: Synthetic oligonucleotide
  Target: LAMA2; (+) strand; PAM type: YTN; PAM sequence: CTT
ctgaagagttagagacattt

SEQ ID NO: 380595 - DNA, 20 bp, Artificial Sequence
  Description of Artificial Sequence: Synthetic oligonucleotide
  Target: LAMA2; (+) strand; PAM type: YTN; PAM sequence: TTC
tgaagagttagagacattta

SEQ ID NO: 380596 - DNA, 20 bp, Artificial Sequence
  Description of Artificial Sequence: Synthetic oligonucleotide
  Target: LAMA2; (+) strand; PAM type: YTN; PAM sequence: CTG
aagagttagagacatttaaa

SEQ ID NO: 380597 - DNA, 20 bp, Artificial Sequence
  Description of Artificial Sequence: Synthetic oligonucleotide
  Target: LAMA2; (+) strand; PAM type: YTN; PAM sequence: TTA
gagacatttaaactgcaatg

SEQ ID NO: 380598 - DNA, 20 bp, Artificial Sequence
  Description of Artificial Sequence: Synthetic oligonucleotide
  Target: LAMA2; (+) strand; PAM type: YTN; PAM sequence: TTT
aaactgcaatgattaggaga

SEQ ID NO: 380599 - DNA, 20 bp, Artificial Sequence
  Description of Artificial Sequence: Synthetic oligonucleotide
  Target: LAMA2; (+) strand; PAM type: YTN; PAM sequence: TTA
aactgcaatgattaggagat

SEQ ID NO: 380600 - DNA, 20 bp, Artificial Sequence
  Description of Artificial Sequence: Synthetic oligonucleotide
  Target: LAMA2; (+) strand; PAM type: YTN; PAM sequence: CTG
caatgattaggagataggat

SEQ ID NO: 380601 - DNA, 20 bp, Artificial Sequence
  Description of Artificial Sequence: Synthetic oligonucleotide
  Target: LAMA2; (+) strand; PAM type: YTN; PAM sequence: TTA
ggagataggattatactggg

SEQ ID NO: 380602 - DNA, 20 bp, Artificial Sequence
  Description of Artificial Sequence: Synthetic oligonucleotide
  Target: LAMA2; (+) strand; PAM type: YTN; PAM sequence: TTA
tactgggttttgaaaatatt

SEQ ID NO: 380603 - DNA, 20 bp, Artificial Sequence
  Description of Artificial Sequence: Synthetic oligonucleotide
  Target: LAMA2; (+) strand; PAM type: YTN; PAM sequence: CTG
ggttttgaaaatatttttat

SEQ ID NO: 380604 - DNA, 20 bp, Artificial Sequence
  Description of Artificial Sequence: Synthetic oligonucleotide
  Target: LAMA2; (+) strand; PAM type: YTN; PAM sequence: TTT
tgaaaatatttttatataga

SEQ ID NO: 380605 - DNA, 20 bp, Artificial Sequence
  Description of Artificial Sequence: Synthetic oligonucleotide
  Target: LAMA2; (+) strand; PAM type: YTN; PAM sequence: TTT
gaaaatatttttatatagaa

SEQ ID NO: 380606 - DNA, 20 bp, Artificial Sequence
  Description of Artificial Sequence: Synthetic oligonucleotide
  Target: LAMA2; (+) strand; PAM type: YTN; PAM sequence: TTG
aaaatatttttatatagaac

SEQ ID NO: 380607 - DNA, 20 bp, Artificial Sequence
  Description of Artificial Sequence: Synthetic oligonucleotide
  Target: LAMA2; (+) strand; PAM type: YTN; PAM sequence: TTT
ttatatagaacacgacaaaa

SEQ ID NO: 380608 - DNA, 20 bp, Artificial Sequence
  Description of Artificial Sequence: Synthetic oligonucleotide
  Target: LAMA2; (+) strand; PAM type: YTN; PAM sequence: TTT
tatatagaacacgacaaaac

SEQ ID NO: 380609 - DNA, 20 bp, Artificial Sequence
  Description of Artificial Sequence: Synthetic oligonucleotide
  Target: LAMA2; (+) strand; PAM type: YTN; PAM sequence: TTT
atatagaacacgacaaaact

SEQ ID NO: 380610 - DNA, 20 bp, Artificial Sequence
  Description of Artificial Sequence: Synthetic oligonucleotide
  Target: LAMA2; (+) strand; PAM type: YTN; PAM sequence: TTA
tatagaacacgacaaaactt

SEQ ID NO: 380611 - DNA, 20 bp, Artificial Sequence
  Description of Artificial Sequence: Synthetic oligonucleotide
  Target: LAMA2; (+) strand; PAM type: YTN; PAM sequence: CTT
gtacactaaatagcaggctg

SEQ ID NO: 380612 - DNA, 20 bp, Artificial Sequence
  Description of Artificial Sequence: Synthetic oligonucleotide
  Target: LAMA2; (+) strand; PAM type: YTN; PAM sequence: TTG
tacactaaatagcaggctgt

SEQ ID NO: 380613 - DNA, 20 bp, Artificial Sequence
  Description of Artificial Sequence: Synthetic oligonucleotide
  Target: LAMA2; (+) strand; PAM type: YTN; PAM sequence: CTA
aatagcaggctgttcccttt

SEQ ID NO: 380614 - DNA, 20 bp, Artificial Sequence
  Description of Artificial Sequence: Synthetic oligonucleotide
  Target: LAMA2; (+) strand; PAM type: YTN; PAM sequence: CTG
ttccctttaacataagcttc

SEQ ID NO: 380615 - DNA, 20 bp, Artificial Sequence
  Description of Artificial Sequence: Synthetic oligonucleotide
  Target: LAMA2; (+) strand; PAM type: YTN; PAM sequence: TTC
cctttaacataagcttctca

SEQ ID NO: 380616 - DNA, 20 bp, Artificial Sequence
  Description of Artificial Sequence: Synthetic oligonucleotide
  Target: LAMA2; (+) strand; PAM type: YTN; PAM sequence: CTT
taacataagcttctcaggga

SEQ ID NO: 380617 - DNA, 20 bp, Artificial Sequence
  Description of Artificial Sequence: Synthetic oligonucleotide
  Target: LAMA2; (+) strand; PAM type: YTN; PAM sequence: TTT
aacataagcttctcagggaa

SEQ ID NO: 380618 - DNA, 20 bp, Artificial Sequence
  Description of Artificial Sequence: Synthetic oligonucleotide
  Target: LAMA2; (+) strand; PAM type: YTN; PAM sequence: TTA
acataagcttctcagggaaa

SEQ ID NO: 380619 - DNA, 20 bp, Artificial Sequence
  Description of Artificial Sequence: Synthetic oligonucleotide
  Target: LAMA2; (+) strand; PAM type: YTN; PAM sequence: CTT
ctcagggaaacatatctttg

SEQ ID NO: 380620 - DNA, 20 bp, Artificial Sequence
  Description of Artificial Sequence: Synthetic oligonucleotide
  Target: LAMA2; (+) strand; PAM type: YTN; PAM sequence: TTC
tcagggaaacatatctttgt

SEQ ID NO: 380621 - DNA, 20 bp, Artificial Sequence
  Description of Artificial Sequence: Synthetic oligonucleotide
  Target: LAMA2; (+) strand; PAM type: YTN; PAM sequence: CTC
agggaaacatatctttgttc

SEQ ID NO: 380622 - DNA, 20 bp, Artificial Sequence
  Description of Artificial Sequence: Synthetic oligonucleotide
  Target: LAMA2; (+) strand; PAM type: YTN; PAM sequence: CTT
tgttccaacagtgctgctat

SEQ ID NO: 380623 - DNA, 20 bp, Artificial Sequence
  Description of Artificial Sequence: Synthetic oligonucleotide
  Target: LAMA2; (+) strand; PAM type: YTN; PAM sequence: TTT
gttccaacagtgctgctatg

SEQ ID NO: 380624 - DNA, 20 bp, Artificial Sequence
  Description of Artificial Sequence: Synthetic oligonucleotide
  Target: LAMA2; (+) strand; PAM type: YTN; PAM sequence: TTG
ttccaacagtgctgctatga

SEQ ID NO: 380625 - DNA, 20 bp, Artificial Sequence
  Description of Artificial Sequence: Synthetic oligonucleotide
  Target: LAMA2; (+) strand; PAM type: YTN; PAM sequence: TTC
caacagtgctgctatgagtc

SEQ ID NO: 380626 - DNA, 20 bp, Artificial Sequence
  Description of Artificial Sequence: Synthetic oligonucleotide
  Target: LAMA2; (+) strand; PAM type: YTN; PAM sequence: CTG
ctatgagtcattacagttat

SEQ ID NO: 380627 - DNA, 20 bp, Artificial Sequence
  Description of Artificial Sequence: Synthetic oligonucleotide
  Target: LAMA2; (+) strand; PAM type: YTN; PAM sequence: CTA
tgagtcattacagttataaa

SEQ ID NO: 380628 - DNA, 20 bp, Artificial Sequence
  Description of Artificial Sequence: Synthetic oligonucleotide
  Target: LAMA2; (+) strand; PAM type: YTN; PAM sequence: TTA
cagttataaaactatctttt

SEQ ID NO: 380629 - DNA, 20 bp, Artificial Sequence
  Description of Artificial Sequence: Synthetic oligonucleotide
  Target: LAMA2; (+) strand; PAM type: YTN; PAM sequence: TTA
taaaactatctttttttttt

SEQ ID NO: 380630 - DNA, 20 bp, Artificial Sequence
  Description of Artificial Sequence: Synthetic oligonucleotide
  Target: LAMA2; (+) strand; PAM type: YTN; PAM sequence: CTA
tcttttttttttacatttta

SEQ ID NO: 380631 - DNA, 20 bp, Artificial Sequence
  Description of Artificial Sequence: Synthetic oligonucleotide
  Target: LAMA2; (+) strand; PAM type: YTN; PAM sequence: CTT
ttttttttacattttaaaag

SEQ ID NO: 380632 - DNA, 20 bp, Artificial Sequence
  Description of Artificial Sequence: Synthetic oligonucleotide
  Target: LAMA2; (+) strand; PAM type: YTN; PAM sequence: TTT
tttttttacattttaaaagt

SEQ ID NO: 380633 - DNA, 20 bp, Artificial Sequence
  Description of Artificial Sequence: Synthetic oligonucleotide
  Target: LAMA2; (+) strand; PAM type: YTN; PAM sequence: TTT
ttttttacattttaaaagta

SEQ ID NO: 380634 - DNA, 20 bp, Artificial Sequence
  Description of Artificial Sequence: Synthetic oligonucleotide
  Target: LAMA2; (+) strand; PAM type: YTN; PAM sequence: TTT
tttttacattttaaaagtaa

SEQ ID NO: 380635 - DNA, 20 bp, Artificial Sequence
  Description of Artificial Sequence: Synthetic oligonucleotide
  Target: LAMA2; (+) strand; PAM type: YTN; PAM sequence: TTT
ttttacattttaaaagtaat

SEQ ID NO: 380636 - DNA, 20 bp, Artificial Sequence
  Description of Artificial Sequence: Synthetic oligonucleotide
  Target: LAMA2; (+) strand; PAM type: YTN; PAM sequence: TTT
tttacattttaaaagtaatt

SEQ ID NO: 380637 - DNA, 20 bp, Artificial Sequence
  Description of Artificial Sequence: Synthetic oligonucleotide
  Target: LAMA2; (+) strand; PAM type: YTN; PAM sequence: TTT
ttacattttaaaagtaattt

SEQ ID NO: 380638 - DNA, 20 bp, Artificial Sequence
  Description of Artificial Sequence: Synthetic oligonucleotide
  Target: LAMA2; (+) strand; PAM type: YTN; PAM sequence: TTT
tacattttaaaagtaatttt

SEQ ID NO: 380639 - DNA, 20 bp, Artificial Sequence
  Description of Artificial Sequence: Synthetic oligonucleotide
  Target: LAMA2; (+) strand; PAM type: YTN; PAM sequence: TTT
acattttaaaagtaatttta

SEQ ID NO: 380640 - DNA, 20 bp, Artificial Sequence
  Description of Artificial Sequence: Synthetic oligonucleotide
  Target: LAMA2; (+) strand; PAM type: YTN; PAM sequence: TTA
cattttaaaagtaattttaa

SEQ ID NO: 380641 - DNA, 20 bp, Artificial Sequence
  Description of Artificial Sequence: Synthetic oligonucleotide
  Target: LAMA2; (+) strand; PAM type: YTN; PAM sequence: TTT
taaaagtaattttaaaactg

SEQ ID NO: 380642 - DNA, 20 bp, Artificial Sequence
  Description of Artificial Sequence: Synthetic oligonucleotide
  Target: LAMA2; (+) strand; PAM type: YTN; PAM sequence: TTT
aaaagtaattttaaaactgc

SEQ ID NO: 380643 - DNA, 20 bp, Artificial Sequence
  Description of Artificial Sequence: Synthetic oligonucleotide
  Target: LAMA2; (+) strand; PAM type: YTN; PAM sequence: TTA
aaagtaattttaaaactgct

SEQ ID NO: 380644 - DNA, 20 bp, Artificial Sequence
  Description of Artificial Sequence: Synthetic oligonucleotide
  Target: LAMA2; (+) strand; PAM type: YTN; PAM sequence: TTT
taaaactgcttttcaataaa

SEQ ID NO: 380645 - DNA, 20 bp, Artificial Sequence
  Description of Artificial Sequence: Synthetic oligonucleotide
  Target: LAMA2; (+) strand; PAM type: YTN; PAM sequence: TTT
aaaactgcttttcaataaac

SEQ ID NO: 380646 - DNA, 20 bp, Artificial Sequence
  Description of Artificial Sequence: Synthetic oligonucleotide
  Target: LAMA2; (+) strand; PAM type: YTN; PAM sequence: TTA
aaactgcttttcaataaact

SEQ ID NO: 380647 - DNA, 20 bp, Artificial Sequence
  Description of Artificial Sequence: Synthetic oligonucleotide
  Target: LAMA2; (+) strand; PAM type: YTN; PAM sequence: CTG
cttttcaataaacttgctga

SEQ ID NO: 380648 - DNA, 20 bp, Artificial Sequence
  Description of Artificial Sequence: Synthetic oligonucleotide
  Target: LAMA2; (+) strand; PAM type: YTN; PAM sequence: CTT
ttcaataaacttgctgagat

SEQ ID NO: 380649 - DNA, 20 bp, Artificial Sequence
  Description of Artificial Sequence: Synthetic oligonucleotide
  Target: LAMA2; (+) strand; PAM type: YTN; PAM sequence: TTT
tcaataaacttgctgagata

SEQ ID NO: 380650 - DNA, 20 bp, Artificial Sequence
  Description of Artificial Sequence: Synthetic oligonucleotide
  Target: LAMA2; (+) strand; PAM type: YTN; PAM sequence: TTT
caataaacttgctgagatat

SEQ ID NO: 380651 - DNA, 20 bp, Artificial Sequence
  Description of Artificial Sequence: Synthetic oligonucleotide
  Target: LAMA2; (+) strand; PAM type: YTN; PAM sequence: TTC
aataaacttgctgagatatt

SEQ ID NO: 380652 - DNA, 20 bp, Artificial Sequence
  Description of Artificial Sequence: Synthetic oligonucleotide
  Target: LAMA2; (+) strand; PAM type: YTN; PAM sequence: CTT
gctgagatattctcttgtct

SEQ ID NO: 380653 - DNA, 20 bp, Artificial Sequence
  Description of Artificial Sequence: Synthetic oligonucleotide
  Target: LAMA2; (+) strand; PAM type: YTN; PAM sequence: TTG
ctgagatattctcttgtctg

SEQ ID NO: 380654 - DNA, 20 bp, Artificial Sequence
  Description of Artificial Sequence: Synthetic oligonucleotide
  Target: LAMA2; (+) strand; PAM type: YTN; PAM sequence: CTG
agatattctcttgtctgcct

SEQ ID NO: 380655 - DNA, 20 bp, Artificial Sequence
  Description of Artificial Sequence: Synthetic oligonucleotide
  Target: LAMA2; (+) strand; PAM type: YTN; PAM sequence: TTC
tcttgtctgccttcaagatt

SEQ ID NO: 380656 - DNA, 20 bp, Artificial Sequence
  Description of Artificial Sequence: Synthetic oligonucleotide
  Target: LAMA2; (+) strand; PAM type: YTN; PAM sequence: CTC
ttgtctgccttcaagattgt

SEQ ID NO: 380657 - DNA, 20 bp, Artificial Sequence
  Description of Artificial Sequence: Synthetic oligonucleotide
  Target: LAMA2; (+) strand; PAM type: YTN; PAM sequence: CTT
gtctgccttcaagattgtca

SEQ ID NO: 380658 - DNA, 20 bp, Artificial Sequence
  Description of Artificial Sequence: Synthetic oligonucleotide
  Target: LAMA2; (+) strand; PAM type: YTN; PAM sequence: TTG
tctgccttcaagattgtcaa

SEQ ID NO: 380659 - DNA, 20 bp, Artificial Sequence
  Description of Artificial Sequence: Synthetic oligonucleotide
  Target: LAMA2; (+) strand; PAM type: YTN; PAM sequence: CTG
ccttcaagattgtcaaattt

SEQ ID NO: 380660 - DNA, 20 bp, Artificial Sequence
  Description of Artificial Sequence: Synthetic oligonucleotide
  Target: LAMA2; (+) strand; PAM type: YTN; PAM sequence: CTT
caagattgtcaaatttctta

SEQ ID NO: 380661 - DNA, 20 bp, Artificial Sequence
  Description of Artificial Sequence: Synthetic oligonucleotide
  Target: LAMA2; (+) strand; PAM type: YTN; PAM sequence: TTC
aagattgtcaaatttcttag

SEQ ID NO: 380662 - DNA, 20 bp, Artificial Sequence
  Description of Artificial Sequence: Synthetic oligonucleotide
  Target: LAMA2; (+) strand; PAM type: YTN; PAM sequence: TTG
tcaaatttcttaggatctaa

SEQ ID NO: 380663 - DNA, 20 bp, Artificial Sequence
  Description of Artificial Sequence: Synthetic oligonucleotide
  Target: LAMA2; (+) strand; PAM type: YTN; PAM sequence: TTT
cttaggatctaatttctata

SEQ ID NO: 380664 - DNA, 20 bp, Artificial Sequence
  Description of Artificial Sequence: Synthetic oligonucleotide
  Target: LAMA2; (+) strand; PAM type: YTN; PAM sequence: TTC
ttaggatctaatttctataa

SEQ ID NO: 380665 - DNA, 20 bp, Artificial Sequence
  Description of Artificial Sequence: Synthetic oligonucleotide
  Target: LAMA2; (+) strand; PAM type: YTN; PAM sequence: CTT
aggatctaatttctataatt

SEQ ID NO: 380666 - DNA, 20 bp, Artificial Sequence
  Description of Artificial Sequence: Synthetic oligonucleotide
  Target: LAMA2; (+) strand; PAM type: YTN; PAM sequence: TTA
ggatctaatttctataattg

SEQ ID NO: 380667 - DNA, 20 bp, Artificial Sequence
  Description of Artificial Sequence: Synthetic oligonucleotide
  Target: LAMA2; (+) strand; PAM type: YTN; PAM sequence: CTA
atttctataattgtgaaata

SEQ ID NO: 380668 - DNA, 20 bp, Artificial Sequence
  Description of Artificial Sequence: Synthetic oligonucleotide
  Target: LAMA2; (+) strand; PAM type: YTN; PAM sequence: TTT
ctataattgtgaaatattaa

SEQ ID NO: 380669 - DNA, 20 bp, Artificial Sequence
  Description of Artificial Sequence: Synthetic oligonucleotide
  Target: LAMA2; (+) strand; PAM type: YTN; PAM sequence: TTC
tataattgtgaaatattaat

SEQ ID NO: 380670 - DNA, 20 bp, Artificial Sequence
  Description of Artificial Sequence: Synthetic oligonucleotide
  Target: LAMA2; (+) strand; PAM type: YTN; PAM sequence: CTA
taattgtgaaatattaatag

SEQ ID NO: 380671 - DNA, 20 bp, Artificial Sequence
  Description of Artificial Sequence: Synthetic oligonucleotide
  Target: LAMA2; (+) strand; PAM type: YTN; PAM sequence: TTG
tgaaatattaataggaacag

SEQ ID NO: 380672 - DNA, 20 bp, Artificial Sequence
  Description of Artificial Sequence: Synthetic oligonucleotide
  Target: LAMA2; (+) strand; PAM type: YTN; PAM sequence: TTA
ataggaacagtacgacttaa

SEQ ID NO: 380673 - DNA, 20 bp, Artificial Sequence
  Description of Artificial Sequence: Synthetic oligonucleotide
  Target: LAMA2; (+) strand; PAM type: YTN; PAM sequence: CTT
aagggaggtggaatgaatag

SEQ ID NO: 380674 - DNA, 20 bp, Artificial Sequence
  Description of Artificial Sequence: Synthetic oligonucleotide
  Target: LAMA2; (+) strand; PAM type: YTN; PAM sequence: TTA
agggaggtggaatgaataga

SEQ ID NO: 380675 - DNA, 20 bp, Artificial Sequence
  Description of Artificial Sequence: Synthetic oligonucleotide
  Target: LAMA2; (+) strand; PAM type: YTN; PAM sequence: CTG
gcctgggtttgaatctcgac

SEQ ID NO: 380676 - DNA, 20 bp, Artificial Sequence
  Description of Artificial Sequence: Synthetic oligonucleotide
  Target: LAMA2; (+) strand; PAM type: YTN; PAM sequence: CTG
ggtttgaatctcgacttcac

SEQ ID NO: 380677 - DNA, 20 bp, Artificial Sequence
  Description of Artificial Sequence: Synthetic oligonucleotide
  Target: LAMA2; (+) strand; PAM type: YTN; PAM sequence: TTT
gaatctcgacttcaccatac

SEQ ID NO: 380678 - DNA, 20 bp, Artificial Sequence
  Description of Artificial Sequence: Synthetic oligonucleotide
  Target: LAMA2; (+) strand; PAM type: YTN; PAM sequence: TTG
aatctcgacttcaccataca

SEQ ID NO: 380679 - DNA, 20 bp, Artificial Sequence
  Description of Artificial Sequence: Synthetic oligonucleotide
  Target: LAMA2; (+) strand; PAM type: YTN; PAM sequence: CTC
gacttcaccatacagtaagc

SEQ ID NO: 380680 - DNA, 20 bp, Artificial Sequence
  Description of Artificial Sequence: Synthetic oligonucleotide
  Target: LAMA2; (+) strand; PAM type: YTN; PAM sequence: CTT
caccatacagtaagcctgag

SEQ ID NO: 380681 - DNA, 20 bp, Artificial Sequence
  Description of Artificial Sequence: Synthetic oligonucleotide
  Target: LAMA2; (+) strand; PAM type: YTN; PAM sequence: TTC
accatacagtaagcctgaga

SEQ ID NO: 380682 - DNA, 20 bp, Artificial Sequence
  Description of Artificial Sequence: Synthetic oligonucleotide
  Target: LAMA2; (+) strand; PAM type: YTN; PAM sequence: CTG
agaccctgcactgggtgcta

SEQ ID NO: 380683 - DNA, 20 bp, Artificial Sequence
  Description of Artificial Sequence: Synthetic oligonucleotide
  Target: LAMA2; (+) strand; PAM type: YTN; PAM sequence: CTG
cactgggtgctacacctctt

SEQ ID NO: 380684 - DNA, 20 bp, Artificial Sequence
  Description of Artificial Sequence: Synthetic oligonucleotide
  Target: LAMA2; (+) strand; PAM type: YTN; PAM sequence: CTG
ggtgctacacctctttaggc

SEQ ID NO: 380685 - DNA, 20 bp, Artificial Sequence
  Description of Artificial Sequence: Synthetic oligonucleotide
  Target: LAMA2; (+) strand; PAM type: YTN; PAM sequence: CTA
cacctctttaggctttagca

SEQ ID NO: 380686 - DNA, 20 bp, Artificial Sequence
  Description of Artificial Sequence: Synthetic oligonucleotide
  Target: LAMA2; (+) strand; PAM type: YTN; PAM sequence: CTC
tttaggctttagcaggtaaa

SEQ ID NO: 380687 - DNA, 20 bp, Artificial Sequence
  Description of Artificial Sequence: Synthetic oligonucleotide
  Target: LAMA2; (+) strand; PAM type: YTN; PAM sequence: CTT
taggctttagcaggtaaaca

SEQ ID NO: 380688 - DNA, 20 bp, Artificial Sequence
  Description of Artificial Sequence: Synthetic oligonucleotide
  Target: LAMA2; (+) strand; PAM type: YTN; PAM sequence: TTT
aggctttagcaggtaaacac

SEQ ID NO: 380689 - DNA, 20 bp, Artificial Sequence
  Description of Artificial Sequence: Synthetic oligonucleotide
  Target: LAMA2; (+) strand; PAM type: YTN; PAM sequence: TTA
ggctttagcaggtaaacacc

SEQ ID NO: 380690 - DNA, 20 bp, Artificial Sequence
  Description of Artificial Sequence: Synthetic oligonucleotide
  Target: LAMA2; (+) strand; PAM type: YTN; PAM sequence: CTT
tagcaggtaaacaccaagtc

SEQ ID NO: 380691 - DNA, 20 bp, Artificial Sequence
  Description of Artificial Sequence: Synthetic oligonucleotide
  Target: LAMA2; (+) strand; PAM type: YTN; PAM sequence: TTT
agcaggtaaacaccaagtcc

SEQ ID NO: 380692 - DNA, 20 bp, Artificial Sequence
  Description of Artificial Sequence: Synthetic oligonucleotide
  Target: LAMA2; (+) strand; PAM type: YTN; PAM sequence: TTA
gcaggtaaacaccaagtccc

SEQ ID NO: 380693 - DNA, 20 bp, Artificial Sequence
  Description of Artificial Sequence: Synthetic oligonucleotide
  Target: LAMA2; (+) strand; PAM type: YTN; PAM sequence: CTG
agtaactaccactacacttt

SEQ ID NO: 380694 - DNA, 20 bp, Artificial Sequence
  Description of Artificial Sequence: Synthetic oligonucleotide
  Target: LAMA2; (+) strand; PAM type: YTN; PAM sequence: CTA
ccactacactttcacctctc

SEQ ID NO: 380695 - DNA, 20 bp, Artificial Sequence
  Description of Artificial Sequence: Synthetic oligonucleotide
  Target: LAMA2; (+) strand; PAM type: YTN; PAM sequence: CTA
cactttcacctctcccgcag

SEQ ID NO: 380696 - DNA, 20 bp, Artificial Sequence
  Description of Artificial Sequence: Synthetic oligonucleotide
  Target: LAMA2; (+) strand; PAM type: YTN; PAM sequence: CTT
tcacctctcccgcagacccc

SEQ ID NO: 380697 - DNA, 20 bp, Artificial Sequence
  Description of Artificial Sequence: Synthetic oligonucleotide
  Target: LAMA2; (+) strand; PAM type: YTN; PAM sequence: TTT
cacctctcccgcagacccca

SEQ ID NO: 380698 - DNA, 20 bp, Artificial Sequence
  Description of Artificial Sequence: Synthetic oligonucleotide
  Target: LAMA2; (+) strand; PAM type: YTN; PAM sequence: TTC
acctctcccgcagaccccac

SEQ ID NO: 380699 - DNA, 20 bp, Artificial Sequence
  Description of Artificial Sequence: Synthetic oligonucleotide
  Target: LAMA2; (+) strand; PAM type: YTN; PAM sequence: CTC
tcccgcagaccccacagtct

SEQ ID NO: 380700 - DNA, 20 bp, Artificial Sequence
  Description of Artificial Sequence: Synthetic oligonucleotide
  Target: LAMA2; (+) strand; PAM type: YTN; PAM sequence: CTC
ccgcagaccccacagtctga

SEQ ID NO: 380701 - DNA, 20 bp, Artificial Sequence
  Description of Artificial Sequence: Synthetic oligonucleotide
  Target: LAMA2; (+) strand; PAM type: YTN; PAM sequence: CTG
aagcctggcatgcatggggc

SEQ ID NO: 380702 - DNA, 20 bp, Artificial Sequence
  Description of Artificial Sequence: Synthetic oligonucleotide
  Target: LAMA2; (+) strand; PAM type: YTN; PAM sequence: CTG
gcatgcatggggcctccagg

SEQ ID NO: 380703 - DNA, 20 bp, Artificial Sequence
  Description of Artificial Sequence: Synthetic oligonucleotide
  Target: LAMA2; (+) strand; PAM type: YTN; PAM sequence: CTC
caggactgctccagccctac

SEQ ID NO: 380704 - DNA, 20 bp, Artificial Sequence
  Description of Artificial Sequence: Synthetic oligonucleotide
  Target: LAMA2; (+) strand; PAM type: YTN; PAM sequence: CTG
ctccagccctacagctggga

SEQ ID NO: 380705 - DNA, 20 bp, Artificial Sequence
  Description of Artificial Sequence: Synthetic oligonucleotide
  Target: LAMA2; (+) strand; PAM type: YTN; PAM sequence: CTC
cagccctacagctgggattc

SEQ ID NO: 380706 - DNA, 20 bp, Artificial Sequence
  Description of Artificial Sequence: Synthetic oligonucleotide
  Target: LAMA2; (+) strand; PAM type: YTN; PAM sequence: CTA
cagctgggattctttctcat

SEQ ID NO: 380707 - DNA, 20 bp, Artificial Sequence
  Description of Artificial Sequence: Synthetic oligonucleotide
  Target: LAMA2; (+) strand; PAM type: YTN; PAM sequence: CTG
ggattctttctcattagtca

SEQ ID NO: 380708 - DNA, 20 bp, Artificial Sequence
  Description of Artificial Sequence: Synthetic oligonucleotide
  Target: LAMA2; (+) strand; PAM type: YTN; PAM sequence: TTC
tttctcattagtcaggctgg

SEQ ID NO: 380709 - DNA, 20 bp, Artificial Sequence
  Description of Artificial Sequence: Synthetic oligonucleotide
  Target: LAMA2; (+) strand; PAM type: YTN; PAM sequence: CTT
tctcattagtcaggctggct

SEQ ID NO: 380710 - DNA, 20 bp, Artificial Sequence
  Description of Artificial Sequence: Synthetic oligonucleotide
  Target: LAMA2; (+) strand; PAM type: YTN; PAM sequence: TTT
ctcattagtcaggctggctg

SEQ ID NO: 380711 - DNA, 20 bp, Artificial Sequence
  Description of Artificial Sequence: Synthetic oligonucleotide
  Target: LAMA2; (+) strand; PAM type: YTN; PAM sequence: TTC
tcattagtcaggctggctgg

SEQ ID NO: 380712 - DNA, 20 bp, Artificial Sequence
  Description of Artificial Sequence: Synthetic oligonucleotide
  Target: LAMA2; (+) strand; PAM type: YTN; PAM sequence: CTC
attagtcaggctggctggtg

SEQ ID NO: 380713 - DNA, 20 bp, Artificial Sequence
  Description of Artificial Sequence: Synthetic oligonucleotide
  Target: LAMA2; (+) strand; PAM type: YTN; PAM sequence: TTA
gtcaggctggctggtgctca

SEQ ID NO: 380714 - DNA, 20 bp, Artificial Sequence
  Description of Artificial Sequence: Synthetic oligonucleotide
  Target: LAMA2; (+) strand; PAM type: YTN; PAM sequence: CTG
gctggtgctcacagcatacc

SEQ ID NO: 380715 - DNA, 20 bp, Artificial Sequence
  Description of Artificial Sequence: Synthetic oligonucleotide
  Target: LAMA2; (+) strand; PAM type: YTN; PAM sequence: CTG
gtgctcacagcataccagtt

SEQ ID NO: 380716 - DNA, 20 bp, Artificial Sequence
  Description of Artificial Sequence: Synthetic oligonucleotide
  Target: LAMA2; (+) strand; PAM type: YTN; PAM sequence: CTC
acagcataccagttagatat

SEQ ID NO: 380717 - DNA, 20 bp, Artificial Sequence
  Description of Artificial Sequence: Synthetic oligonucleotide
  Target: LAMA2; (+) strand; PAM type: YTN; PAM sequence: TTA
gatattattaaatctccctc

SEQ ID NO: 380718 - DNA, 20 bp, Artificial Sequence
  Description of Artificial Sequence: Synthetic oligonucleotide
  Target: LAMA2; (+) strand; PAM type: YTN; PAM sequence: TTA
ttaaatctccctcacctaca

SEQ ID NO: 380719 - DNA, 20 bp, Artificial Sequence
  Description of Artificial Sequence: Synthetic oligonucleotide
  Target: LAMA2; (+) strand; PAM type: YTN; PAM sequence: TTA
aatctccctcacctacagcc

SEQ ID NO: 380720 - DNA, 20 bp, Artificial Sequence
  Description of Artificial Sequence: Synthetic oligonucleotide
  Target: LAMA2; (+) strand; PAM type: YTN; PAM sequence: CTC
cctcacctacagcctgagtc

SEQ ID NO: 380721 - DNA, 20 bp, Artificial Sequence
  Description of Artificial Sequence: Synthetic oligonucleotide
  Target: LAMA2; (+) strand; PAM type: YTN; PAM sequence: CTC
acctacagcctgagtcttat

SEQ ID NO: 380722 - DNA, 20 bp, Artificial Sequence
  Description of Artificial Sequence: Synthetic oligonucleotide
  Target: LAMA2; (+) strand; PAM type: YTN; PAM sequence: CTA
cagcctgagtcttatgaaga

SEQ ID NO: 380723 - DNA, 20 bp, Artificial Sequence
  Description of Artificial Sequence: Synthetic oligonucleotide
  Target: LAMA2; (+) strand; PAM type: YTN; PAM sequence: CTG
agtcttatgaagactaaatg

SEQ ID NO: 380724 - DNA, 20 bp, Artificial Sequence
  Description of Artificial Sequence: Synthetic oligonucleotide
  Target: LAMA2; (+) strand; PAM type: YTN; PAM sequence: CTT
atgaagactaaatgagctgt

SEQ ID NO: 380725 - DNA, 20 bp, Artificial Sequence
  Description of Artificial Sequence: Synthetic oligonucleotide
  Target: LAMA2; (+) strand; PAM type: YTN; PAM sequence: TTA
tgaagactaaatgagctgtt

SEQ ID NO: 380726 - DNA, 20 bp, Artificial Sequence
  Description of Artificial Sequence: Synthetic oligonucleotide
  Target: LAMA2; (+) strand; PAM type: YTN; PAM sequence: CTA
aatgagctgttaatgttaag

SEQ ID NO: 380727 - DNA, 20 bp, Artificial Sequence
  Description of Artificial Sequence: Synthetic oligonucleotide
  Target: LAMA2; (+) strand; PAM type: YTN; PAM sequence: CTG
ttaatgttaaggattcatca

SEQ ID NO: 380728 - DNA, 20 bp, Artificial Sequence
  Description of Artificial Sequence: Synthetic oligonucleotide
  Target: LAMA2; (+) strand; PAM type: YTN; PAM sequence: TTA
atgttaaggattcatcacag

SEQ ID NO: 380729 - DNA, 20 bp, Artificial Sequence
  Description of Artificial Sequence: Synthetic oligonucleotide
  Target: LAMA2; (+) strand; PAM type: YTN; PAM sequence: TTA
aggattcatcacagcacctg

SEQ ID NO: 380730 - DNA, 20 bp, Artificial Sequence
  Description of Artificial Sequence: Synthetic oligonucleotide
  Target: LAMA2; (+) strand; PAM type: YTN; PAM sequence: TTC
atcacagcacctggtgtgta

SEQ ID NO: 380731 - DNA, 20 bp, Artificial Sequence
  Description of Artificial Sequence: Synthetic oligonucleotide
  Target: LAMA2; (+) strand; PAM type: YTN; PAM sequence: CTG
gtgtgtagatgatgtaagtt

SEQ ID NO: 380732 - DNA, 20 bp, Artificial Sequence
  Description of Artificial Sequence: Synthetic oligonucleotide
  Target: LAMA2; (+) strand; PAM type: YTN; PAM sequence: TTT
tgatggttaatattattatt

SEQ ID NO: 380733 - DNA, 20 bp, Artificial Sequence
  Description of Artificial Sequence: Synthetic oligonucleotide
  Target: LAMA2; (+) strand; PAM type: YTN; PAM sequence: TTT
gatggttaatattattatta

SEQ ID NO: 380734 - DNA, 20 bp, Artificial Sequence
  Description of Artificial Sequence: Synthetic oligonucleotide
  Target: LAMA2; (+) strand; PAM type: YTN; PAM sequence: TTG
atggttaatattattattaa

SEQ ID NO: 380735 - DNA, 20 bp, Artificial Sequence
  Description of Artificial Sequence: Synthetic oligonucleotide
  Target: LAMA2; (+) strand; PAM type: YTN; PAM sequence: TTA
atattattattaatgtaatc

SEQ ID NO: 380736 - DNA, 20 bp, Artificial Sequence
  Description of Artificial Sequence: Synthetic oligonucleotide
  Target: LAMA2; (+) strand; PAM type: YTN; PAM sequence: TTA
ttattaatgtaatcactagt

SEQ ID NO: 380737 - DNA, 20 bp, Artificial Sequence
  Description of Artificial Sequence: Synthetic oligonucleotide
  Target: LAMA2; (+) strand; PAM type: YTN; PAM sequence: TTA
ttaatgtaatcactagttat

SEQ ID NO: 380738 - DNA, 20 bp, Artificial Sequence
  Description of Artificial Sequence: Synthetic oligonucleotide
  Target: LAMA2; (+) strand; PAM type: YTN; PAM sequence: TTA
atgtaatcactagttatata

SEQ ID NO: 380739 - DNA, 20 bp, Artificial Sequence
  Description of Artificial Sequence: Synthetic oligonucleotide
  Target: LAMA2; (+) strand; PAM type: YTN; PAM sequence: CTA
gttatatacccatgtattga

SEQ ID NO: 380740 - DNA, 20 bp, Artificial Sequence
  Description of Artificial Sequence: Synthetic oligonucleotide
  Target: LAMA2; (+) strand; PAM type: YTN; PAM sequence: TTA
tatacccatgtattgattca

SEQ ID NO: 380741 - DNA, 20 bp, Artificial Sequence
  Description of Artificial Sequence: Synthetic oligonucleotide
  Target: LAMA2; (+) strand; PAM type: YTN; PAM sequence: TTG
attcagttataaataatttt

SEQ ID NO: 380742 - DNA, 20 bp, Artificial Sequence
  Description of Artificial Sequence: Synthetic oligonucleotide
  Target: LAMA2; (+) strand; PAM type: YTN; PAM sequence: TTC
agttataaataattttatac

SEQ ID NO: 380743 - DNA, 20 bp, Artificial Sequence
  Description of Artificial Sequence: Synthetic oligonucleotide
  Target: LAMA2; (+) strand; PAM type: YTN; PAM sequence: TTA
taaataattttatacatctt

SEQ ID NO: 380744 - DNA, 20 bp, Artificial Sequence
  Description of Artificial Sequence: Synthetic oligonucleotide
  Target: LAMA2; (+) strand; PAM type: YTN; PAM sequence: TTT
tatacatcttattttgtaaa

SEQ ID NO: 380745 - DNA, 20 bp, Artificial Sequence
  Description of Artificial Sequence: Synthetic oligonucleotide
  Target: LAMA2; (+) strand; PAM type: YTN; PAM sequence: TTT
atacatcttattttgtaaat

SEQ ID NO: 380746 - DNA, 20 bp, Artificial Sequence
  Description of Artificial Sequence: Synthetic oligonucleotide
  Target: LAMA2; (+) strand; PAM type: YTN; PAM sequence: TTA
tacatcttattttgtaaata

SEQ ID NO: 380747 - DNA, 20 bp, Artificial Sequence
  Description of Artificial Sequence: Synthetic oligonucleotide
  Target: LAMA2; (+) strand; PAM type: YTN; PAM sequence: CTT
attttgtaaataggatttga

SEQ ID NO: 380748 - DNA, 20 bp, Artificial Sequence
  Description of Artificial Sequence: Synthetic oligonucleotide
  Target: LAMA2; (+) strand; PAM type: YTN; PAM sequence: TTA
ttttgtaaataggatttgag

SEQ ID NO: 380749 - DNA, 20 bp, Artificial Sequence
  Description of Artificial Sequence: Synthetic oligonucleotide
  Target: LAMA2; (+) strand; PAM type: YTN; PAM sequence: TTT
tgtaaataggatttgagaag

SEQ ID NO: 380750 - DNA, 20 bp, Artificial Sequence
  Description of Artificial Sequence: Synthetic oligonucleotide
  Target: LAMA2; (+) strand; PAM type: YTN; PAM sequence: TTT
gtaaataggatttgagaagt

SEQ ID NO: 380751 - DNA, 20 bp, Artificial Sequence
  Description of Artificial Sequence: Synthetic oligonucleotide
  Target: LAMA2; (+) strand; PAM type: YTN; PAM sequence: TTG
taaataggatttgagaagtt

SEQ ID NO: 380752 - DNA, 20 bp, Artificial Sequence
  Description of Artificial Sequence: Synthetic oligonucleotide
  Target: LAMA2; (+) strand; PAM type: YTN; PAM sequence: TTT
gagaagttgtattaagtatg

SEQ ID NO: 380753 - DNA, 20 bp, Artificial Sequence
  Description of Artificial Sequence: Synthetic oligonucleotide
  Target: LAMA2; (+) strand; PAM type: YTN; PAM sequence: TTG
agaagttgtattaagtatgg

SEQ ID NO: 380754 - DNA, 20 bp, Artificial Sequence
  Description of Artificial Sequence: Synthetic oligonucleotide
  Target: LAMA2; (+) strand; PAM type: YTN; PAM sequence: TTG
tattaagtatggtacatgag

SEQ ID NO: 380755 - DNA, 20 bp, Artificial Sequence
  Description of Artificial Sequence: Synthetic oligonucleotide
  Target: LAMA2; (+) strand; PAM type: YTN; PAM sequence: TTA
agtatggtacatgagacaga

SEQ ID NO: 380756 - DNA, 20 bp, Artificial Sequence
  Description of Artificial Sequence: Synthetic oligonucleotide
  Target: LAMA2; (+) strand; PAM type: YTN; PAM sequence: TTC
cactaggtcaaaactgaagt

SEQ ID NO: 380757 - DNA, 20 bp, Artificial Sequence
  Description of Artificial Sequence: Synthetic oligonucleotide
  Target: LAMA2; (+) strand; PAM type: YTN; PAM sequence: CTA
ggtcaaaactgaagtgcaac

SEQ ID NO: 380758 - DNA, 20 bp, Artificial Sequence
  Description of Artificial Sequence: Synthetic oligonucleotide
  Target: LAMA2; (+) strand; PAM type: YTN; PAM sequence: CTG
aagtgcaacttaaaaataat

SEQ ID NO: 380759 - DNA, 20 bp, Artificial Sequence
  Description of Artificial Sequence: Synthetic oligonucleotide
  Target: LAMA2; (+) strand; PAM type: YTN; PAM sequence: CTT
aaaaataatgagtatacatt

SEQ ID NO: 380760 - DNA, 20 bp, Artificial Sequence
  Description of Artificial Sequence: Synthetic oligonucleotide
  Target: LAMA2; (+) strand; PAM type: YTN; PAM sequence: TTA
aaaataatgagtatacattt

SEQ ID NO: 380761 - DNA, 20 bp, Artificial Sequence
  Description of Artificial Sequence: Synthetic oligonucleotide
  Target: LAMA2; (+) strand; PAM type: YTN; PAM sequence: TTT
cttgagagggacatggcatc

SEQ ID NO: 380762 - DNA, 20 bp, Artificial Sequence
  Description of Artificial Sequence: Synthetic oligonucleotide
  Target: LAMA2; (+) strand; PAM type: YTN; PAM sequence: TTC
ttgagagggacatggcatca

SEQ ID NO: 380763 - DNA, 20 bp, Artificial Sequence
  Description of Artificial Sequence: Synthetic oligonucleotide
  Target: LAMA2; (+) strand; PAM type: YTN; PAM sequence: CTT
gagagggacatggcatcatg

SEQ ID NO: 380764 - DNA, 20 bp, Artificial Sequence
  Description of Artificial Sequence: Synthetic oligonucleotide
  Target: LAMA2; (+) strand; PAM type: YTN; PAM sequence: TTG
agagggacatggcatcatga

SEQ ID NO: 380765 - DNA, 20 bp, Artificial Sequence
  Description of Artificial Sequence: Synthetic oligonucleotide
  Target: LAMA2; (+) strand; PAM type: YTN; PAM sequence: TTT
ggtttcagtgaatcctacct

SEQ ID NO: 380766 - DNA, 20 bp, Artificial Sequence
  Description of Artificial Sequence: Synthetic oligonucleotide
  Target: LAMA2; (+) strand; PAM type: YTN; PAM sequence: TTG
gtttcagtgaatcctaccta

SEQ ID NO: 380767 - DNA, 20 bp, Artificial Sequence
  Description of Artificial Sequence: Synthetic oligonucleotide
  Target: LAMA2; (+) strand; PAM type: YTN; PAM sequence: TTT
cagtgaatcctacctagctg

SEQ ID NO: 380768 - DNA, 20 bp, Artificial Sequence
  Description of Artificial Sequence: Synthetic oligonucleotide
  Target: LAMA2; (+) strand; PAM type: YTN; PAM sequence: TTC
agtgaatcctacctagctgc

SEQ ID NO: 380769 - DNA, 20 bp, Artificial Sequence
  Description of Artificial Sequence: Synthetic oligonucleotide
  Target: LAMA2; (+) strand; PAM type: YTN; PAM sequence: CTA
cctagctgcactacttggac

SEQ ID NO: 380770 - DNA, 20 bp, Artificial Sequence
  Description of Artificial Sequence: Synthetic oligonucleotide
  Target: LAMA2; (+) strand; PAM type: YTN; PAM sequence: CTA
gctgcactacttggacaggt

SEQ ID NO: 380771 - DNA, 20 bp, Artificial Sequence
  Description of Artificial Sequence: Synthetic oligonucleotide
  Target: LAMA2; (+) strand; PAM type: YTN; PAM sequence: CTG
cactacttggacaggttact

SEQ ID NO: 380772 - DNA, 20 bp, Artificial Sequence
  Description of Artificial Sequence: Synthetic oligonucleotide
  Target: LAMA2; (+) strand; PAM type: YTN; PAM sequence: CTA
cttggacaggttacttgctc

SEQ ID NO: 380773 - DNA, 20 bp, Artificial Sequence
  Description of Artificial Sequence: Synthetic oligonucleotide
  Target: LAMA2; (+) strand; PAM type: YTN; PAM sequence: CTT
ggacaggttacttgctctgt

SEQ ID NO: 380774 - DNA, 20 bp, Artificial Sequence
  Description of Artificial Sequence: Synthetic oligonucleotide
  Target: LAMA2; (+) strand; PAM type: YTN; PAM sequence: TTG
gacaggttacttgctctgtt

SEQ ID NO: 380775 - DNA, 20 bp, Artificial Sequence
  Description of Artificial Sequence: Synthetic oligonucleotide
  Target: LAMA2; (+) strand; PAM type: YTN; PAM sequence: TTA
cttgctctgtttttgctaaa

SEQ ID NO: 380776 - DNA, 20 bp, Artificial Sequence
  Description of Artificial Sequence: Synthetic oligonucleotide
  Target: LAMA2; (+) strand; PAM type: YTN; PAM sequence: CTT
gctctgtttttgctaaatct

SEQ ID NO: 380777 - DNA, 20 bp, Artificial Sequence
  Description of Artificial Sequence: Synthetic oligonucleotide
  Target: LAMA2; (+) strand; PAM type: YTN; PAM sequence: TTG
ctctgtttttgctaaatctt

SEQ ID NO: 380778 - DNA, 20 bp, Artificial Sequence
  Description of Artificial Sequence: Synthetic oligonucleotide
  Target: LAMA2; (+) strand; PAM type: YTN; PAM sequence: CTC
tgtttttgctaaatcttggg

SEQ ID NO: 380779 - DNA, 20 bp, Artificial Sequence
  Description of Artificial Sequence: Synthetic oligonucleotide
  Target: LAMA2; (+) strand; PAM type: YTN; PAM sequence: CTG
tttttgctaaatcttgggtt

SEQ ID NO: 380780 - DNA, 20 bp, Artificial Sequence
  Description of Artificial Sequence: Synthetic oligonucleotide
  Target: LAMA2; (+) strand; PAM type: YTN; PAM sequence: TTT
ttgctaaatcttgggttttt

SEQ ID NO: 380781 - DNA, 20 bp, Artificial Sequence
  Description of Artificial Sequence: Synthetic oligonucleotide
  Target: LAMA2; (+) strand; PAM type: YTN; PAM sequence: TTT
tgctaaatcttgggttttta

SEQ ID NO: 380782 - DNA, 20 bp, Artificial Sequence
  Description of Artificial Sequence: Synthetic oligonucleotide
  Target: LAMA2; (+) strand; PAM type: YTN; PAM sequence: TTT
gctaaatcttgggtttttac

SEQ ID NO: 380783 - DNA, 20 bp, Artificial Sequence
  Description of Artificial Sequence: Synthetic oligonucleotide
  Target: LAMA2; (+) strand; PAM type: YTN; PAM sequence: TTG
ctaaatcttgggtttttacc

SEQ ID NO: 380784 - DNA, 20 bp, Artificial Sequence
  Description of Artificial Sequence: Synthetic oligonucleotide
  Target: LAMA2; (+) strand; PAM type: YTN; PAM sequence: CTA
aatcttgggtttttacctat

SEQ ID NO: 380785 - DNA, 20 bp, Artificial Sequence
  Description of Artificial Sequence: Synthetic oligonucleotide
  Target: LAMA2; (+) strand; PAM type: YTN; PAM sequence: CTT
gggtttttacctatacatcc

SEQ ID NO: 380786 - DNA, 20 bp, Artificial Sequence
  Description of Artificial Sequence: Synthetic oligonucleotide
  Target: LAMA2; (+) strand; PAM type: YTN; PAM sequence: TTG
ggtttttacctatacatcct

SEQ ID NO: 380787 - DNA, 20 bp, Artificial Sequence
  Description of Artificial Sequence: Synthetic oligonucleotide
  Target: LAMA2; (+) strand; PAM type: YTN; PAM sequence: TTT
ttacctatacatcctaagga

SEQ ID NO: 380788 - DNA, 20 bp, Artificial Sequence
  Description of Artificial Sequence: Synthetic oligonucleotide
  Target: LAMA2; (+) strand; PAM type: YTN; PAM sequence: TTT
tacctatacatcctaaggat

SEQ ID NO: 380789 - DNA, 20 bp, Artificial Sequence
  Description of Artificial Sequence: Synthetic oligonucleotide
  Target: LAMA2; (+) strand; PAM type: YTN; PAM sequence: TTT
acctatacatcctaaggatt

SEQ ID NO: 380790 - DNA, 20 bp, Artificial Sequence
  Description of Artificial Sequence: Synthetic oligonucleotide
  Target: LAMA2; (+) strand; PAM type: YTN; PAM sequence: TTA
cctatacatcctaaggattg

SEQ ID NO: 380791 - DNA, 20 bp, Artificial Sequence
  Description of Artificial Sequence: Synthetic oligonucleotide
  Target: LAMA2; (+) strand; PAM type: YTN; PAM sequence: CTA
tacatcctaaggattgattt

SEQ ID NO: 380792 - DNA, 20 bp, Artificial Sequence
  Description of Artificial Sequence: Synthetic oligonucleotide
  Target: LAMA2; (+) strand; PAM type: YTN; PAM sequence: CTA
aggattgatttaaatggaaa

SEQ ID NO: 380793 - DNA, 20 bp, Artificial Sequence
  Description of Artificial Sequence: Synthetic oligonucleotide
  Target: LAMA2; (+) strand; PAM type: YTN; PAM sequence: TTG
atttaaatggaaacgtatgt

SEQ ID NO: 380794 - DNA, 20 bp, Artificial Sequence
  Description of Artificial Sequence: Synthetic oligonucleotide
  Target: LAMA2; (+) strand; PAM type: YTN; PAM sequence: TTT
aaatggaaacgtatgtgtga

SEQ ID NO: 380795 - DNA, 20 bp, Artificial Sequence
  Description of Artificial Sequence: Synthetic oligonucleotide
  Target: LAMA2; (+) strand; PAM type: YTN; PAM sequence: TTA
aatggaaacgtatgtgtgaa

SEQ ID NO: 380796 - DNA, 20 bp, Artificial Sequence
  Description of Artificial Sequence: Synthetic oligonucleotide
  Target: LAMA2; (+) strand; PAM type: YTN; PAM sequence: CTT
tacaaactgacatgccattc

SEQ ID NO: 380797 - DNA, 20 bp, Artificial Sequence
  Description of Artificial Sequence: Synthetic oligonucleotide
  Target: LAMA2; (+) strand; PAM type: YTN; PAM sequence: TTT
acaaactgacatgccattca

SEQ ID NO: 380798 - DNA, 20 bp, Artificial Sequence
  Description of Artificial Sequence: Synthetic oligonucleotide
  Target: LAMA2; (+) strand; PAM type: YTN; PAM sequence: TTA
caaactgacatgccattcag

SEQ ID NO: 380799 - DNA, 20 bp, Artificial Sequence
  Description of Artificial Sequence: Synthetic oligonucleotide
  Target: LAMA2; (+) strand; PAM type: YTN; PAM sequence: CTG
acatgccattcagcttagtt

SEQ ID NO: 380800 - DNA, 20 bp, Artificial Sequence
  Description of Artificial Sequence: Synthetic oligonucleotide
  Target: LAMA2; (+) strand; PAM type: YTN; PAM sequence: TTC
agcttagttaccatcacatg

SEQ ID NO: 380801 - DNA, 20 bp, Artificial Sequence
  Description of Artificial Sequence: Synthetic oligonucleotide
  Target: LAMA2; (+) strand; PAM type: YTN; PAM sequence: CTT
agttaccatcacatggattc

SEQ ID NO: 380802 - DNA, 20 bp, Artificial Sequence
  Description of Artificial Sequence: Synthetic oligonucleotide
  Target: LAMA2; (+) strand; PAM type: YTN; PAM sequence: TTA
gttaccatcacatggattcc

SEQ ID NO: 380803 - DNA, 20 bp, Artificial Sequence
  Description of Artificial Sequence: Synthetic oligonucleotide
  Target: LAMA2; (+) strand; PAM type: YTN; PAM sequence: TTA
ccatcacatggattccatat

SEQ ID NO: 380804 - DNA, 20 bp, Artificial Sequence
  Description of Artificial Sequence: Synthetic oligonucleotide
  Target: LAMA2; (+) strand; PAM type: YTN; PAM sequence: TTC
catatagttcaaggaaaaag

SEQ ID NO: 380805 - DNA, 20 bp, Artificial Sequence
  Description of Artificial Sequence: Synthetic oligonucleotide
  Target: LAMA2; (+) strand; PAM type: YTN; PAM sequence: TTC
aaggaaaaagtttataaaat

SEQ ID NO: 380806 - DNA, 20 bp, Artificial Sequence
  Description of Artificial Sequence: Synthetic oligonucleotide
  Target: LAMA2; (+) strand; PAM type: YTN; PAM sequence: TTT
ataaaataactgcaactgtt

SEQ ID NO: 380807 - DNA, 20 bp, Artificial Sequence
  Description of Artificial Sequence: Synthetic oligonucleotide
  Target: LAMA2; (+) strand; PAM type: YTN; PAM sequence: TTA
taaaataactgcaactgttt

SEQ ID NO: 380808 - DNA, 20 bp, Artificial Sequence
  Description of Artificial Sequence: Synthetic oligonucleotide
  Target: LAMA2; (+) strand; PAM type: YTN; PAM sequence: CTG
caactgttttgtgacacatg

SEQ ID NO: 380809 - DNA, 20 bp, Artificial Sequence
  Description of Artificial Sequence: Synthetic oligonucleotide
  Target: LAMA2; (+) strand; PAM type: YTN; PAM sequence: CTG
ttttgtgacacatgcttaaa

SEQ ID NO: 380810 - DNA, 20 bp, Artificial Sequence
  Description of Artificial Sequence: Synthetic oligonucleotide
  Target: LAMA2; (+) strand; PAM type: YTN; PAM sequence: TTT
tgtgacacatgcttaaaatg

SEQ ID NO: 380811 - DNA, 20 bp, Artificial Sequence
  Description of Artificial Sequence: Synthetic oligonucleotide
  Target: LAMA2; (+) strand; PAM type: YTN; PAM sequence: TTT
gtgacacatgcttaaaatga

SEQ ID NO: 380812 - DNA, 20 bp, Artificial Sequence
  Description of Artificial Sequence: Synthetic oligonucleotide
  Target: LAMA2; (+) strand; PAM type: YTN; PAM sequence: TTG
tgacacatgcttaaaatgat

SEQ ID NO: 380813 - DNA, 20 bp, Artificial Sequence
  Description of Artificial Sequence: Synthetic oligonucleotide
  Target: LAMA2; (+) strand; PAM type: YTN; PAM sequence: CTT
aaaatgattttctactcttt

SEQ ID NO: 380814 - DNA, 20 bp, Artificial Sequence
  Description of Artificial Sequence: Synthetic oligonucleotide
  Target: LAMA2; (+) strand; PAM type: YTN; PAM sequence: TTA
aaatgattttctactctttc

SEQ ID NO: 380815 - DNA, 20 bp, Artificial Sequence
  Description of Artificial Sequence: Synthetic oligonucleotide
  Target: LAMA2; (+) strand; PAM type: YTN; PAM sequence: TTT
tctactctttcctgtgactt

SEQ ID NO: 380816 - DNA, 20 bp, Artificial Sequence
  Description of Artificial Sequence: Synthetic oligonucleotide
  Target: LAMA2; (+) strand; PAM type: YTN; PAM sequence: TTT
ctactctttcctgtgacttc

SEQ ID NO: 380817 - DNA, 20 bp, Artificial Sequence
  Description of Artificial Sequence: Synthetic oligonucleotide
  Target: LAMA2; (+) strand; PAM type: YTN; PAM sequence: TTC
tactctttcctgtgacttct

SEQ ID NO: 380818 - DNA, 20 bp, Artificial Sequence
  Description of Artificial Sequence: Synthetic oligonucleotide
  Target: LAMA2; (+) strand; PAM type: YTN; PAM sequence: CTA
ctctttcctgtgacttctct

SEQ ID NO: 380819 - DNA, 20 bp, Artificial Sequence
  Description of Artificial Sequence: Synthetic oligonucleotide
  Target: LAMA2; (+) strand; PAM type: YTN; PAM sequence: CTC
tttcctgtgacttctctgaa

SEQ ID NO: 380820 - DNA, 20 bp, Artificial Sequence
  Description of Artificial Sequence: Synthetic oligonucleotide
  Target: LAMA2; (+) strand; PAM type: YTN; PAM sequence: CTT
tcctgtgacttctctgaagg

SEQ ID NO: 380821 - DNA, 20 bp, Artificial Sequence
  Description of Artificial Sequence: Synthetic oligonucleotide
  Target: LAMA2; (+) strand; PAM type: YTN; PAM sequence: TTT
cctgtgacttctctgaaggg

SEQ ID NO: 380822 - DNA, 20 bp, Artificial Sequence
  Description of Artificial Sequence: Synthetic oligonucleotide
  Target: LAMA2; (+) strand; PAM type: YTN; PAM sequence: TTC
ctgtgacttctctgaagggc

SEQ ID NO: 380823 - DNA, 20 bp, Artificial Sequence
  Description of Artificial Sequence: Synthetic oligonucleotide
  Target: LAMA2; (+) strand; PAM type: YTN; PAM sequence: CTG
tgacttctctgaagggcaat

SEQ ID NO: 380824 - DNA, 20 bp, Artificial Sequence
  Description of Artificial Sequence: Synthetic oligonucleotide
  Target: LAMA2; (+) strand; PAM type: YTN; PAM sequence: CTT
ctctgaagggcaatatttat

SEQ ID NO: 380825 - DNA, 20 bp, Artificial Sequence
  Description of Artificial Sequence: Synthetic oligonucleotide
  Target: LAMA2; (+) strand; PAM type: YTN; PAM sequence: TTC
tctgaagggcaatatttatt

SEQ ID NO: 380826 - DNA, 20 bp, Artificial Sequence
  Description of Artificial Sequence: Synthetic oligonucleotide
  Target: LAMA2; (+) strand; PAM type: YTN; PAM sequence: CTC
tgaagggcaatatttattta

SEQ ID NO: 380827 - DNA, 20 bp, Artificial Sequence
  Description of Artificial Sequence: Synthetic oligonucleotide
  Target: LAMA2; (+) strand; PAM type: YTN; PAM sequence: CTG
aagggcaatatttatttaca

SEQ ID NO: 380828 - DNA, 20 bp, Artificial Sequence
  Description of Artificial Sequence: Synthetic oligonucleotide
  Target: LAMA2; (+) strand; PAM type: YTN; PAM sequence: TTT
atttacatgtgtccattttg

SEQ ID NO: 380829 - DNA, 20 bp, Artificial Sequence
  Description of Artificial Sequence: Synthetic oligonucleotide
  Target: LAMA2; (+) strand; PAM type: YTN; PAM sequence: TTA
tttacatgtgtccattttga

SEQ ID NO: 380830 - DNA, 20 bp, Artificial Sequence
  Description of Artificial Sequence: Synthetic oligonucleotide
  Target: LAMA2; (+) strand; PAM type: YTN; PAM sequence: TTT
acatgtgtccattttgagct

SEQ ID NO: 380831 - DNA, 20 bp, Artificial Sequence
  Description of Artificial Sequence: Synthetic oligonucleotide
  Target: LAMA2; (+) strand; PAM type: YTN; PAM sequence: TTA
catgtgtccattttgagcta

SEQ ID NO: 380832 - DNA, 20 bp, Artificial Sequence
  Description of Artificial Sequence: Synthetic oligonucleotide
  Target: LAMA2; (+) strand; PAM type: YTN; PAM sequence: TTT
tgagctaataaataatcaag

SEQ ID NO: 380833 - DNA, 20 bp, Artificial Sequence
  Description of Artificial Sequence: Synthetic oligonucleotide
  Target: LAMA2; (+) strand; PAM type: YTN; PAM sequence: TTT
gagctaataaataatcaagt

SEQ ID NO: 380834 - DNA, 20 bp, Artificial Sequence
  Description of Artificial Sequence: Synthetic oligonucleotide
  Target: LAMA2; (+) strand; PAM type: YTN; PAM sequence: TTG
agctaataaataatcaagta

SEQ ID NO: 380835 - DNA, 20 bp, Artificial Sequence
  Description of Artificial Sequence: Synthetic oligonucleotide
  Target: LAMA2; (+) strand; PAM type: YTN; PAM sequence: CTA
ataaataatcaagtaatcca

SEQ ID NO: 380836 - DNA, 20 bp, Artificial Sequence
  Description of Artificial Sequence: Synthetic oligonucleotide
  Target: LAMA2; (+) strand; PAM type: YTN; PAM sequence: CTC
cttattaaattgtatttcct

SEQ ID NO: 380837 - DNA, 20 bp, Artificial Sequence
  Description of Artificial Sequence: Synthetic oligonucleotide
  Target: LAMA2; (+) strand; PAM type: YTN; PAM sequence: CTT
attaaattgtatttcctaca

SEQ ID NO: 380838 - DNA, 20 bp, Artificial Sequence
  Description of Artificial Sequence: Synthetic oligonucleotide
  Target: LAMA2; (+) strand; PAM type: YTN; PAM sequence: TTA
ttaaattgtatttcctacat

SEQ ID NO: 380839 - DNA, 20 bp, Artificial Sequence
  Description of Artificial Sequence: Synthetic oligonucleotide
  Target: LAMA2; (+) strand; PAM type: YTN; PAM sequence: TTA
aattgtatttcctacatcta

SEQ ID NO: 380840 - DNA, 20 bp, Artificial Sequence
  Description of Artificial Sequence: Synthetic oligonucleotide
  Target: LAMA2; (+) strand; PAM type: YTN; PAM sequence: TTG
tatttcctacatctatttat

SEQ ID NO: 380841 - DNA, 20 bp, Artificial Sequence
  Description of Artificial Sequence: Synthetic oligonucleotide
  Target: LAMA2; (+) strand; PAM type: YTN; PAM sequence: TTT
cctacatctatttatacaca

SEQ ID NO: 380842 - DNA, 20 bp, Artificial Sequence
  Description of Artificial Sequence: Synthetic oligonucleotide
  Target: LAMA2; (+) strand; PAM type: YTN; PAM sequence: TTC
ctacatctatttatacacac

SEQ ID NO: 380843 - DNA, 20 bp, Artificial Sequence
  Description of Artificial Sequence: Synthetic oligonucleotide
  Target: LAMA2; (+) strand; PAM type: YTN; PAM sequence: CTA
catctatttatacacacact

SEQ ID NO: 380844 - DNA, 20 bp, Artificial Sequence
  Description of Artificial Sequence: Synthetic oligonucleotide
  Target: LAMA2; (+) strand; PAM type: YTN; PAM sequence: CTA
tttatacacacactagtaaa

SEQ ID NO: 380845 - DNA, 20 bp, Artificial Sequence
  Description of Artificial Sequence: Synthetic oligonucleotide
  Target: LAMA2; (+) strand; PAM type: YTN; PAM sequence: TTT
atacacacactagtaaactt

SEQ ID NO: 380846 - DNA, 20 bp, Artificial Sequence
  Description of Artificial Sequence: Synthetic oligonucleotide
  Target: LAMA2; (+) strand; PAM type: YTN; PAM sequence: TTA
tacacacactagtaaactta

SEQ ID NO: 380847 - DNA, 20 bp, Artificial Sequence
  Description of Artificial Sequence: Synthetic oligonucleotide
  Target: LAMA2; (+) strand; PAM type: YTN; PAM sequence: CTA
gtaaacttatactggtaagc

SEQ ID NO: 380848 - DNA, 20 bp, Artificial Sequence
  Description of Artificial Sequence: Synthetic oligonucleotide
  Target: LAMA2; (+) strand; PAM type: YTN; PAM sequence: CTT
atactggtaagcactgctta

SEQ ID NO: 380849 - DNA, 20 bp, Artificial Sequence
  Description of Artificial Sequence: Synthetic oligonucleotide
  Target: LAMA2; (+) strand; PAM type: YTN; PAM sequence: TTA
tactggtaagcactgcttat

SEQ ID NO: 380850 - DNA, 20 bp, Artificial Sequence
  Description of Artificial Sequence: Synthetic oligonucleotide
  Target: LAMA2; (+) strand; PAM type: YTN; PAM sequence: CTG
gtaagcactgcttatacagt

SEQ ID NO: 380851 - DNA, 20 bp, Artificial Sequence
  Description of Artificial Sequence: Synthetic oligonucleotide
  Target: LAMA2; (+) strand; PAM type: YTN; PAM sequence: CTG
cttatacagtaagcactgct

SEQ ID NO: 380852 - DNA, 20 bp, Artificial Sequence
  Description of Artificial Sequence: Synthetic oligonucleotide
  Target: LAMA2; (+) strand; PAM type: YTN; PAM sequence: CTT
atacagtaagcactgctctt

SEQ ID NO: 380853 - DNA, 20 bp, Artificial Sequence
  Description of Artificial Sequence: Synthetic oligonucleotide
  Target: LAMA2; (+) strand; PAM type: YTN; PAM sequence: TTA
tacagtaagcactgctcttt

SEQ ID NO: 380854 - DNA, 20 bp, Artificial Sequence
  Description of Artificial Sequence: Synthetic oligonucleotide
  Target: LAMA2; (+) strand; PAM type: YTN; PAM sequence: CTG
ctctttccaatatacatatg

SEQ ID NO: 380855 - DNA, 20 bp, Artificial Sequence
  Description of Artificial Sequence: Synthetic oligonucleotide
  Target: LAMA2; (+) strand; PAM type: YTN; PAM sequence: CTC
tttccaatatacatatgtac

SEQ ID NO: 380856 - DNA, 20 bp, Artificial Sequence
  Description of Artificial Sequence: Synthetic oligonucleotide
  Target: LAMA2; (+) strand; PAM type: YTN; PAM sequence: CTT
tccaatatacatatgtacac

SEQ ID NO: 380857 - DNA, 20 bp, Artificial Sequence
  Description of Artificial Sequence: Synthetic oligonucleotide
  Target: LAMA2; (+) strand; PAM type: YTN; PAM sequence: TTT
ccaatatacatatgtacaca

SEQ ID NO: 380858 - DNA, 20 bp, Artificial Sequence
  Description of Artificial Sequence: Synthetic oligonucleotide
  Target: LAMA2; (+) strand; PAM type: YTN; PAM sequence: TTC
caatatacatatgtacacat

SEQ ID NO: 380859 - DNA, 20 bp, Artificial Sequence
  Description of Artificial Sequence: Synthetic oligonucleotide
  Target: LAMA2; (+) strand; PAM type: YTN; PAM sequence: CTG
agactgtgtggcacatatga

SEQ ID NO: 380860 - DNA, 20 bp, Artificial Sequence
  Description of Artificial Sequence: Synthetic oligonucleotide
  Target: LAMA2; (+) strand; PAM type: YTN; PAM sequence: CTG
tgtggcacatatgaaatgag

SEQ ID NO: 380861 - DNA, 20 bp, Artificial Sequence
  Description of Artificial Sequence: Synthetic oligonucleotide
  Target: LAMA2; (+) strand; PAM type: YTN; PAM sequence: CTT
tccagtgagcattgaagatt

SEQ ID NO: 380862 - DNA, 20 bp, Artificial Sequence
  Description of Artificial Sequence: Synthetic oligonucleotide
  Target: LAMA2; (+) strand; PAM type: YTN; PAM sequence: TTT
ccagtgagcattgaagattt

SEQ ID NO: 380863 - DNA, 20 bp, Artificial Sequence
  Description of Artificial Sequence: Synthetic oligonucleotide
  Target: LAMA2; (+) strand; PAM type: YTN; PAM sequence: TTC
cagtgagcattgaagatttt

SEQ ID NO: 380864 - DNA, 20 bp, Artificial Sequence
  Description of Artificial Sequence: Synthetic oligonucleotide
  Target: LAMA2; (+) strand; PAM type: YTN; PAM sequence: TTG
aagattttaaaatggaggac

SEQ ID NO: 380865 - DNA, 20 bp, Artificial Sequence
  Description of Artificial Sequence: Synthetic oligonucleotide
  Target: LAMA2; (+) strand; PAM type: YTN; PAM sequence: TTT
taaaatggaggacagaaaga

SEQ ID NO: 380866 - DNA, 20 bp, Artificial Sequence
  Description of Artificial Sequence: Synthetic oligonucleotide
  Target: LAMA2; (+) strand; PAM type: YTN; PAM sequence: TTT
aaaatggaggacagaaagaa

SEQ ID NO: 380867 - DNA, 20 bp, Artificial Sequence
  Description of Artificial Sequence: Synthetic oligonucleotide
  Target: LAMA2; (+) strand; PAM type: YTN; PAM sequence: TTA
aaatggaggacagaaagaat

SEQ ID NO: 380868 - DNA, 20 bp, Artificial Sequence
  Description of Artificial Sequence: Synthetic oligonucleotide
  Target: LAMA2; (+) strand; PAM type: YTN; PAM sequence: TTT
ttctagacaagagatggaat

SEQ ID NO: 380869 - DNA, 20 bp, Artificial Sequence
  Description of Artificial Sequence: Synthetic oligonucleotide
  Target: LAMA2; (+) strand; PAM type: YTN; PAM sequence: TTT
tctagacaagagatggaatt

SEQ ID NO: 380870 - DNA, 20 bp, Artificial Sequence
  Description of Artificial Sequence: Synthetic oligonucleotide
  Target: LAMA2; (+) strand; PAM type: YTN; PAM sequence: TTT
ctagacaagagatggaattt

SEQ ID NO: 380871 - DNA, 20 bp, Artificial Sequence
  Description of Artificial Sequence: Synthetic oligonucleotide
  Target: LAMA2; (+) strand; PAM type: YTN; PAM sequence: TTC
tagacaagagatggaatttc

SEQ ID NO: 380872 - DNA, 20 bp, Artificial Sequence
  Description of Artificial Sequence: Synthetic oligonucleotide
  Target: LAMA2; (+) strand; PAM type: YTN; PAM sequence: CTA
gacaagagatggaatttcct

SEQ ID NO: 380873 - DNA, 20 bp, Artificial Sequence
  Description of Artificial Sequence: Synthetic oligonucleotide
  Target: LAMA2; (+) strand; PAM type: YTN; PAM sequence: TTT
cctttatcccaggtagcgtt

SEQ ID NO: 380874 - DNA, 20 bp, Artificial Sequence
  Description of Artificial Sequence: Synthetic oligonucleotide
  Target: LAMA2; (+) strand; PAM type: YTN; PAM sequence: TTC
ctttatcccaggtagcgttt

SEQ ID NO: 380875 - DNA, 20 bp, Artificial Sequence
  Description of Artificial Sequence: Synthetic oligonucleotide
  Target: LAMA2; (+) strand; PAM type: YTN; PAM sequence: CTT
tatcccaggtagcgtttggt

SEQ ID NO: 380876 - DNA, 20 bp, Artificial Sequence
  Description of Artificial Sequence: Synthetic oligonucleotide
  Target: LAMA2; (+) strand; PAM type: YTN; PAM sequence: TTT
atcccaggtagcgtttggtt

SEQ ID NO: 380877 - DNA, 20 bp, Artificial Sequence
  Description of Artificial Sequence: Synthetic oligonucleotide
  Target: LAMA2; (+) strand; PAM type: YTN; PAM sequence: TTA
tcccaggtagcgtttggttt

SEQ ID NO: 380878 - DNA, 20 bp, Artificial Sequence
  Description of Artificial Sequence: Synthetic oligonucleotide
  Target: LAMA2; (+) strand; PAM type: YTN; PAM sequence: TTT
ggttttacttttaactgtgt

SEQ ID NO: 380879 - DNA, 20 bp, Artificial Sequence
  Description of Artificial Sequence: Synthetic oligonucleotide
  Target: LAMA2; (+) strand; PAM type: YTN; PAM sequence: TTG
gttttacttttaactgtgtg

SEQ ID NO: 380880 - DNA, 20 bp, Artificial Sequence
  Description of Artificial Sequence: Synthetic oligonucleotide
  Target: LAMA2; (+) strand; PAM type: YTN; PAM sequence: TTT
tacttttaactgtgtgcact

SEQ ID NO: 380881 - DNA, 20 bp, Artificial Sequence
  Description of Artificial Sequence: Synthetic oligonucleotide
  Target: LAMA2; (+) strand; PAM type: YTN; PAM sequence: TTT
acttttaactgtgtgcactt

SEQ ID NO: 380882 - DNA, 20 bp, Artificial Sequence
  Description of Artificial Sequence: Synthetic oligonucleotide
  Target: LAMA2; (+) strand; PAM type: YTN; PAM sequence: TTA
cttttaactgtgtgcacttg

SEQ ID NO: 380883 - DNA, 20 bp, Artificial Sequence
  Description of Artificial Sequence: Synthetic oligonucleotide
  Target: LAMA2; (+) strand; PAM type: YTN; PAM sequence: CTT
ttaactgtgtgcacttgatc

SEQ ID NO: 380884 - DNA, 20 bp, Artificial Sequence
  Description of Artificial Sequence: Synthetic oligonucleotide
  Target: LAMA2; (+) strand; PAM type: YTN; PAM sequence: TTT
taactgtgtgcacttgatca

SEQ ID NO: 380885 - DNA, 20 bp, Artificial Sequence
  Description of Artificial Sequence: Synthetic oligonucleotide
  Target: LAMA2; (+) strand; PAM type: YTN; PAM sequence: TTT
aactgtgtgcacttgatcaa

SEQ ID NO: 380886 - DNA, 20 bp, Artificial Sequence
  Description of Artificial Sequence: Synthetic oligonucleotide
  Target: LAMA2; (+) strand; PAM type: YTN; PAM sequence: TTA
actgtgtgcacttgatcaat

SEQ ID NO: 380887 - DNA, 20 bp, Artificial Sequence
  Description of Artificial Sequence: Synthetic oligonucleotide
  Target: LAMA2; (+) strand; PAM type: YTN; PAM sequence: CTG
tgtgcacttgatcaatgctc

SEQ ID NO: 380888 - DNA, 20 bp, Artificial Sequence
  Description of Artificial Sequence: Synthetic oligonucleotide
  Target: LAMA2; (+) strand; PAM type: YTN; PAM sequence: CTT
gatcaatgctcttaattgct

SEQ ID NO: 380889 - DNA, 20 bp, Artificial Sequence
  Description of Artificial Sequence: Synthetic oligonucleotide
  Target: LAMA2; (+) strand; PAM type: YTN; PAM sequence: TTG
atcaatgctcttaattgctg

SEQ ID NO: 380890 - DNA, 20 bp, Artificial Sequence
  Description of Artificial Sequence: Synthetic oligonucleotide
  Target: LAMA2; (+) strand; PAM type: YTN; PAM sequence: CTC
ttaattgctgtagaccttcg

SEQ ID NO: 380891 - DNA, 20 bp, Artificial Sequence
  Description of Artificial Sequence: Synthetic oligonucleotide
  Target: LAMA2; (+) strand; PAM type: YTN; PAM sequence: CTT
aattgctgtagaccttcgtt

SEQ ID NO: 380892 - DNA, 20 bp, Artificial Sequence
  Description of Artificial Sequence: Synthetic oligonucleotide
  Target: LAMA2; (+) strand; PAM type: YTN; PAM sequence: TTA
attgctgtagaccttcgtta

SEQ ID NO: 380893 - DNA, 20 bp, Artificial Sequence
  Description of Artificial Sequence: Synthetic oligonucleotide
  Target: LAMA2; (+) strand; PAM type: YTN; PAM sequence: TTG
ctgtagaccttcgttattat

SEQ ID NO: 380894 - DNA, 20 bp, Artificial Sequence
  Description of Artificial Sequence: Synthetic oligonucleotide
  Target: LAMA2; (+) strand; PAM type: YTN; PAM sequence: CTG
tagaccttcgttattatata

SEQ ID NO: 380895 - DNA, 20 bp, Artificial Sequence
  Description of Artificial Sequence: Synthetic oligonucleotide
  Target: LAMA2; (+) strand; PAM type: YTN; PAM sequence: CTT
cgttattatatagctatcca

SEQ ID NO: 380896 - DNA, 20 bp, Artificial Sequence
  Description of Artificial Sequence: Synthetic oligonucleotide
  Target: LAMA2; (+) strand; PAM type: YTN; PAM sequence: TTC
gttattatatagctatccaa

SEQ ID NO: 380897 - DNA, 20 bp, Artificial Sequence
  Description of Artificial Sequence: Synthetic oligonucleotide
  Target: LAMA2; (+) strand; PAM type: YTN; PAM sequence: TTA
ttatatagctatccaatcta

SEQ ID NO: 380898 - DNA, 20 bp, Artificial Sequence
  Description of Artificial Sequence: Synthetic oligonucleotide
  Target: LAMA2; (+) strand; PAM type: YTN; PAM sequence: TTA
tatagctatccaatctataa

SEQ ID NO: 380899 - DNA, 20 bp, Artificial Sequence
  Description of Artificial Sequence: Synthetic oligonucleotide
  Target: LAMA2; (+) strand; PAM type: YTN; PAM sequence: CTA
tccaatctataaaatgacag

SEQ ID NO: 380900 - DNA, 20 bp, Artificial Sequence
  Description of Artificial Sequence: Synthetic oligonucleotide
  Target: LAMA2; (+) strand; PAM type: YTN; PAM sequence: CTA
taaaatgacagattgagttg

SEQ ID NO: 380901 - DNA, 20 bp, Artificial Sequence
  Description of Artificial Sequence: Synthetic oligonucleotide
  Target: LAMA2; (+) strand; PAM type: YTN; PAM sequence: TTG
agttgaagttctaaaattct

SEQ ID NO: 380902 - DNA, 20 bp, Artificial Sequence
  Description of Artificial Sequence: Synthetic oligonucleotide
  Target: LAMA2; (+) strand; PAM type: YTN; PAM sequence: TTG
aagttctaaaattctctgat

SEQ ID NO: 380903 - DNA, 20 bp, Artificial Sequence
  Description of Artificial Sequence: Synthetic oligonucleotide
  Target: LAMA2; (+) strand; PAM type: YTN; PAM sequence: TTC
taaaattctctgattctgca

SEQ ID NO: 380904 - DNA, 20 bp, Artificial Sequence
  Description of Artificial Sequence: Synthetic oligonucleotide
  Target: LAMA2; (+) strand; PAM type: YTN; PAM sequence: CTA
aaattctctgattctgcaat

SEQ ID NO: 380905 - DNA, 20 bp, Artificial Sequence
  Description of Artificial Sequence: Synthetic oligonucleotide
  Target: LAMA2; (+) strand; PAM type: YTN; PAM sequence: TTC
tctgattctgcaatattatt

SEQ ID NO: 380906 - DNA, 20 bp, Artificial Sequence
  Description of Artificial Sequence: Synthetic oligonucleotide
  Target: LAMA2; (+) strand; PAM type: YTN; PAM sequence: CTC
tgattctgcaatattatttt

SEQ ID NO: 380907 - DNA, 20 bp, Artificial Sequence
  Description of Artificial Sequence: Synthetic oligonucleotide
  Target: LAMA2; (+) strand; PAM type: YTN; PAM sequence: CTG
attctgcaatattattttgc

SEQ ID NO: 380908 - DNA, 20 bp, Artificial Sequence
  Description of Artificial Sequence: Synthetic oligonucleotide
  Target: LAMA2; (+) strand; PAM type: YTN; PAM sequence: TTC
tgcaatattattttgctata

SEQ ID NO: 380909 - DNA, 20 bp, Artificial Sequence
  Description of Artificial Sequence: Synthetic oligonucleotide
  Target: LAMA2; (+) strand; PAM type: YTN; PAM sequence: CTG
caatattattttgctataga

SEQ ID NO: 380910 - DNA, 20 bp, Artificial Sequence
  Description of Artificial Sequence: Synthetic oligonucleotide
  Target: LAMA2; (+) strand; PAM type: YTN; PAM sequence: TTA
ttttgctatagaaaatattc

SEQ ID NO: 380911 - DNA, 20 bp, Artificial Sequence
  Description of Artificial Sequence: Synthetic oligonucleotide
  Target: LAMA2; (+) strand; PAM type: YTN; PAM sequence: TTT
tgctatagaaaatattctgt

SEQ ID NO: 380912 - DNA, 20 bp, Artificial Sequence
  Description of Artificial Sequence: Synthetic oligonucleotide
  Target: LAMA2; (+) strand; PAM type: YTN; PAM sequence: TTT
gctatagaaaatattctgta

SEQ ID NO: 380913 - DNA, 20 bp, Artificial Sequence
  Description of Artificial Sequence: Synthetic oligonucleotide
  Target: LAMA2; (+) strand; PAM type: YTN; PAM sequence: TTG
ctatagaaaatattctgtaa

SEQ ID NO: 380914 - DNA, 20 bp, Artificial Sequence
  Description of Artificial Sequence: Synthetic oligonucleotide
  Target: LAMA2; (+) strand; PAM type: YTN; PAM sequence: CTA
tagaaaatattctgtaagta

SEQ ID NO: 380915 - DNA, 20 bp, Artificial Sequence
  Description of Artificial Sequence: Synthetic oligonucleotide
  Target: LAMA2; (+) strand; PAM type: YTN; PAM sequence: TTC
tgtaagtagtcaaggttgac

SEQ ID NO: 380916 - DNA, 20 bp, Artificial Sequence
  Description of Artificial Sequence: Synthetic oligonucleotide
  Target: LAMA2; (+) strand; PAM type: YTN; PAM sequence: CTG
taagtagtcaaggttgacct

SEQ ID NO: 380917 - DNA, 20 bp, Artificial Sequence
  Description of Artificial Sequence: Synthetic oligonucleotide
  Target: LAMA2; (+) strand; PAM type: YTN; PAM sequence: TTG
acctttagatatcttgaaga

SEQ ID NO: 380918 - DNA, 20 bp, Artificial Sequence
  Description of Artificial Sequence: Synthetic oligonucleotide
  Target: LAMA2; (+) strand; PAM type: YTN; PAM sequence: CTT
tagatatcttgaagagaagg

SEQ ID NO: 380919 - DNA, 20 bp, Artificial Sequence
  Description of Artificial Sequence: Synthetic oligonucleotide
  Target: LAMA2; (+) strand; PAM type: YTN; PAM sequence: TTT
agatatcttgaagagaaggt

SEQ ID NO: 380920 - DNA, 20 bp, Artificial Sequence
  Description of Artificial Sequence: Synthetic oligonucleotide
  Target: LAMA2; (+) strand; PAM type: YTN; PAM sequence: TTA
gatatcttgaagagaaggtt

SEQ ID NO: 380921 - DNA, 20 bp, Artificial Sequence
  Description of Artificial Sequence: Synthetic oligonucleotide
  Target: LAMA2; (+) strand; PAM type: YTN; PAM sequence: CTT
gaagagaaggttattacagc

SEQ ID NO: 380922 - DNA, 20 bp, Artificial Sequence
  Description of Artificial Sequence: Synthetic oligonucleotide
  Target: LAMA2; (+) strand; PAM type: YTN; PAM sequence: TTG
aagagaaggttattacagct

SEQ ID NO: 380923 - DNA, 20 bp, Artificial Sequence
  Description of Artificial Sequence: Synthetic oligonucleotide
  Target: LAMA2; (+) strand; PAM type: YTN; PAM sequence: TTA
ttacagctatatttttctgc

SEQ ID NO: 380924 - DNA, 20 bp, Artificial Sequence
  Description of Artificial Sequence: Synthetic oligonucleotide
  Target: LAMA2; (+) strand; PAM type: YTN; PAM sequence: TTA
cagctatatttttctgcatt

SEQ ID NO: 380925 - DNA, 20 bp, Artificial Sequence
  Description of Artificial Sequence: Synthetic oligonucleotide
  Target: LAMA2; (+) strand; PAM type: YTN; PAM sequence: CTA
tatttttctgcatttatttg

SEQ ID NO: 380926 - DNA, 20 bp, Artificial Sequence
  Description of Artificial Sequence: Synthetic oligonucleotide
  Target: LAMA2; (+) strand; PAM type: YTN; PAM sequence: TTT
ttctgcatttatttgaaata

SEQ ID NO: 380927 - DNA, 20 bp, Artificial Sequence
  Description of Artificial Sequence: Synthetic oligonucleotide
  Target: LAMA2; (+) strand; PAM type: YTN; PAM sequence: TTT
tctgcatttatttgaaataa

SEQ ID NO: 380928 - DNA, 20 bp, Artificial Sequence
  Description of Artificial Sequence: Synthetic oligonucleotide
  Target: LAMA2; (+) strand; PAM type: YTN; PAM sequence: TTT
ctgcatttatttgaaataat

SEQ ID NO: 380929 - DNA, 20 bp, Artificial Sequence
  Description of Artificial Sequence: Synthetic oligonucleotide
  Target: LAMA2; (+) strand; PAM type: YTN; PAM sequence: TTC
tgcatttatttgaaataata

SEQ ID NO: 380930 - DNA, 20 bp, Artificial Sequence
  Description of Artificial Sequence: Synthetic oligonucleotide
  Target: LAMA2; (+) strand; PAM type: YTN; PAM sequence: CTG
catttatttgaaataatact

SEQ ID NO: 380931 - DNA, 20 bp, Artificial Sequence
  Description of Artificial Sequence: Synthetic oligonucleotide
  Target: LAMA2; (+) strand; PAM type: YTN; PAM sequence: TTT
atttgaaataatactgttca

SEQ ID NO: 380932 - DNA, 20 bp, Artificial Sequence
  Description of Artificial Sequence: Synthetic oligonucleotide
  Target: LAMA2; (+) strand; PAM type: YTN; PAM sequence: TTA
tttgaaataatactgttcac

SEQ ID NO: 380933 - DNA, 20 bp, Artificial Sequence
  Description of Artificial Sequence: Synthetic oligonucleotide
  Target: LAMA2; (+) strand; PAM type: YTN; PAM sequence: TTT
gaaataatactgttcacttg

SEQ ID NO: 380934 - DNA, 20 bp, Artificial Sequence
  Description of Artificial Sequence: Synthetic oligonucleotide
  Target: LAMA2; (+) strand; PAM type: YTN; PAM sequence: TTG
aaataatactgttcacttgt

SEQ ID NO: 380935 - DNA, 20 bp, Artificial Sequence
  Description of Artificial Sequence: Synthetic oligonucleotide
  Target: LAMA2; (+) strand; PAM type: YTN; PAM sequence: CTG
ttcacttgtgaacaaaaatg

SEQ ID NO: 380936 - DNA, 20 bp, Artificial Sequence
  Description of Artificial Sequence: Synthetic oligonucleotide
  Target: LAMA2; (+) strand; PAM type: YTN; PAM sequence: TTC
acttgtgaacaaaaatgtta

SEQ ID NO: 380937 - DNA, 20 bp, Artificial Sequence
  Description of Artificial Sequence: Synthetic oligonucleotide
  Target: LAMA2; (+) strand; PAM type: YTN; PAM sequence: CTT
gtgaacaaaaatgttagtag

SEQ ID NO: 380938 - DNA, 20 bp, Artificial Sequence
  Description of Artificial Sequence: Synthetic oligonucleotide
  Target: LAMA2; (+) strand; PAM type: YTN; PAM sequence: TTG
tgaacaaaaatgttagtaga

SEQ ID NO: 380939 - DNA, 20 bp, Artificial Sequence
  Description of Artificial Sequence: Synthetic oligonucleotide
  Target: LAMA2; (+) strand; PAM type: YTN; PAM sequence: TTA
gtagaatagcaaattatttt

SEQ ID NO: 380940 - DNA, 20 bp, Artificial Sequence
  Description of Artificial Sequence: Synthetic oligonucleotide
  Target: LAMA2; (+) strand; PAM type: YTN; PAM sequence: TTA
ttttcatgcaaccaaccttc

SEQ ID NO: 380941 - DNA, 20 bp, Artificial Sequence
  Description of Artificial Sequence: Synthetic oligonucleotide
  Target: LAMA2; (+) strand; PAM type: YTN; PAM sequence: TTT
tcatgcaaccaaccttccat

SEQ ID NO: 380942 - DNA, 20 bp, Artificial Sequence
  Description of Artificial Sequence: Synthetic oligonucleotide
  Target: LAMA2; (+) strand; PAM type: YTN; PAM sequence: TTT
catgcaaccaaccttccatt

SEQ ID NO: 380943 - DNA, 20 bp, Artificial Sequence
  Description of Artificial Sequence: Synthetic oligonucleotide
  Target: LAMA2; (+) strand; PAM type: YTN; PAM sequence: TTC
atgcaaccaaccttccattc

SEQ ID NO: 380944 - DNA, 20 bp, Artificial Sequence
  Description of Artificial Sequence: Synthetic oligonucleotide
  Target: LAMA2; (+) strand; PAM type: YTN; PAM sequence: CTT
ccattctggatttaaaatgt

SEQ ID NO: 380945 - DNA, 20 bp, Artificial Sequence
  Description of Artificial Sequence: Synthetic oligonucleotide
  Target: LAMA2; (+) strand; PAM type: YTN; PAM sequence: TTC
cattctggatttaaaatgtt

SEQ ID NO: 380946 - DNA, 20 bp, Artificial Sequence
  Description of Artificial Sequence: Synthetic oligonucleotide
  Target: LAMA2; (+) strand; PAM type: YTN; PAM sequence: TTC
tggatttaaaatgttaaaaa

SEQ ID NO: 380947 - DNA, 20 bp, Artificial Sequence
  Description of Artificial Sequence: Synthetic oligonucleotide
  Target: LAMA2; (+) strand; PAM type: YTN; PAM sequence: CTG
gatttaaaatgttaaaaacc

SEQ ID NO: 380948 - DNA, 20 bp, Artificial Sequence
  Description of Artificial Sequence: Synthetic oligonucleotide
  Target: LAMA2; (+) strand; PAM type: YTN; PAM sequence: TTT
aaaatgttaaaaacctttct

SEQ ID NO: 380949 - DNA, 20 bp, Artificial Sequence
  Description of Artificial Sequence: Synthetic oligonucleotide
  Target: LAMA2; (+) strand; PAM type: YTN; PAM sequence: TTA
aaatgttaaaaacctttctt

SEQ ID NO: 380950 - DNA, 20 bp, Artificial Sequence
  Description of Artificial Sequence: Synthetic oligonucleotide
  Target: LAMA2; (+) strand; PAM type: YTN; PAM sequence: TTA
aaaacctttcttcatatgat

SEQ ID NO: 380951 - DNA, 20 bp, Artificial Sequence
  Description of Artificial Sequence: Synthetic oligonucleotide
  Target: LAMA2; (+) strand; PAM type: YTN; PAM sequence: CTT
tcttcatatgattgatagac

SEQ ID NO: 380952 - DNA, 20 bp, Artificial Sequence
  Description of Artificial Sequence: Synthetic oligonucleotide
  Target: LAMA2; (+) strand; PAM type: YTN; PAM sequence: TTT
cttcatatgattgatagact

SEQ ID NO: 380953 - DNA, 20 bp, Artificial Sequence
  Description of Artificial Sequence: Synthetic oligonucleotide
  Target: LAMA2; (+) strand; PAM type: YTN; PAM sequence: TTC
ttcatatgattgatagactt

SEQ ID NO: 380954 - DNA, 20 bp, Artificial Sequence
  Description of Artificial Sequence: Synthetic oligonucleotide
  Target: LAMA2; (+) strand; PAM type: YTN; PAM sequence: CTT
catatgattgatagactttt

SEQ ID NO: 380955 - DNA, 20 bp, Artificial Sequence
  Description of Artificial Sequence: Synthetic oligonucleotide
  Target: LAMA2; (+) strand; PAM type: YTN; PAM sequence: TTC
atatgattgatagacttttt

SEQ ID NO: 380956 - DNA, 20 bp, Artificial Sequence
  Description of Artificial Sequence: Synthetic oligonucleotide
  Target: LAMA2; (+) strand; PAM type: YTN; PAM sequence: TTG
atagactttttgaatagtac

SEQ ID NO: 380957 - DNA, 20 bp, Artificial Sequence
  Description of Artificial Sequence: Synthetic oligonucleotide
  Target: LAMA2; (+) strand; PAM type: YTN; PAM sequence: CTT
tttgaatagtacattcaaat

SEQ ID NO: 380958 - DNA, 20 bp, Artificial Sequence
  Description of Artificial Sequence: Synthetic oligonucleotide
  Target: LAMA2; (+) strand; PAM type: YTN; PAM sequence: TTT
ttgaatagtacattcaaata

SEQ ID NO: 380959 - DNA, 20 bp, Artificial Sequence
  Description of Artificial Sequence: Synthetic oligonucleotide
  Target: LAMA2; (+) strand; PAM type: YTN; PAM sequence: TTT
tgaatagtacattcaaatac

SEQ ID NO: 380960 - DNA, 20 bp, Artificial Sequence
  Description of Artificial Sequence: Synthetic oligonucleotide
  Target: LAMA2; (+) strand; PAM type: YTN; PAM sequence: TTT
gaatagtacattcaaataca

SEQ ID NO: 380961 - DNA, 20 bp, Artificial Sequence
  Description of Artificial Sequence: Synthetic oligonucleotide
  Target: LAMA2; (+) strand; PAM type: YTN; PAM sequence: TTG
aatagtacattcaaatacat

SEQ ID NO: 380962 - DNA, 20 bp, Artificial Sequence
  Description of Artificial Sequence: Synthetic oligonucleotide
  Target: LAMA2; (+) strand; PAM type: YTN; PAM sequence: TTC
aaatacatgctttcccatta

SEQ ID NO: 380963 - DNA, 20 bp, Artificial Sequence
  Description of Artificial Sequence: Synthetic oligonucleotide
  Target: LAMA2; (+) strand; PAM type: YTN; PAM sequence: CTT
tcccattaatttgagtcatt

SEQ ID NO: 380964 - DNA, 20 bp, Artificial Sequence
  Description of Artificial Sequence: Synthetic oligonucleotide
  Target: LAMA2; (+) strand; PAM type: YTN; PAM sequence: TTT
cccattaatttgagtcattt

SEQ ID NO: 380965 - DNA, 20 bp, Artificial Sequence
  Description of Artificial Sequence: Synthetic oligonucleotide
  Target: LAMA2; (+) strand; PAM type: YTN; PAM sequence: TTC
ccattaatttgagtcatttt

SEQ ID NO: 380966 - DNA, 20 bp, Artificial Sequence
  Description of Artificial Sequence: Synthetic oligonucleotide
  Target: LAMA2; (+) strand; PAM type: YTN; PAM sequence: TTA
atttgagtcattttccatca

SEQ ID NO: 380967 - DNA, 20 bp, Artificial Sequence
  Description of Artificial Sequence: Synthetic oligonucleotide
  Target: LAMA2; (+) strand; PAM type: YTN; PAM sequence: TTT
gagtcattttccatcattat

SEQ ID NO: 380968 - DNA, 20 bp, Artificial Sequence
  Description of Artificial Sequence: Synthetic oligonucleotide
  Target: LAMA2; (+) strand; PAM type: YTN; PAM sequence: TTG
agtcattttccatcattata

SEQ ID NO: 380969 - DNA, 20 bp, Artificial Sequence
  Description of Artificial Sequence: Synthetic oligonucleotide
  Target: LAMA2; (+) strand; PAM type: YTN; PAM sequence: TTT
tccatcattatatgaaaatg

SEQ ID NO: 380970 - DNA, 20 bp, Artificial Sequence
  Description of Artificial Sequence: Synthetic oligonucleotide
  Target: LAMA2; (+) strand; PAM type: YTN; PAM sequence: TTT
ccatcattatatgaaaatgt

SEQ ID NO: 380971 - DNA, 20 bp, Artificial Sequence
  Description of Artificial Sequence: Synthetic oligonucleotide
  Target: LAMA2; (+) strand; PAM type: YTN; PAM sequence: TTC
catcattatatgaaaatgta

SEQ ID NO: 380972 - DNA, 20 bp, Artificial Sequence
  Description of Artificial Sequence: Synthetic oligonucleotide
  Target: LAMA2; (+) strand; PAM type: YTN; PAM sequence: TTA
tatgaaaatgtaaatgagca

SEQ ID NO: 380973 - DNA, 20 bp, Artificial Sequence
  Description of Artificial Sequence: Synthetic oligonucleotide
  Target: LAMA2; (+) strand; PAM type: YTN; PAM sequence: CTA
agaatatgtacaaattgtca

SEQ ID NO: 380974 - DNA, 20 bp, Artificial Sequence
  Description of Artificial Sequence: Synthetic oligonucleotide
  Target: LAMA2; (+) strand; PAM type: YTN; PAM sequence: TTG
tcatctgcattagtggcttc

SEQ ID NO: 380975 - DNA, 20 bp, Artificial Sequence
  Description of Artificial Sequence: Synthetic oligonucleotide
  Target: LAMA2; (+) strand; PAM type: YTN; PAM sequence: CTG
cattagtggcttcaccgtcc

SEQ ID NO: 380976 - DNA, 20 bp, Artificial Sequence
  Description of Artificial Sequence: Synthetic oligonucleotide
  Target: LAMA2; (+) strand; PAM type: YTN; PAM sequence: TTA
gtggcttcaccgtcccatga

SEQ ID NO: 380977 - DNA, 20 bp, Artificial Sequence
  Description of Artificial Sequence: Synthetic oligonucleotide
  Target: LAMA2; (+) strand; PAM type: YTN; PAM sequence: CTT
caccgtcccatgactttcac

SEQ ID NO: 380978 - DNA, 20 bp, Artificial Sequence
  Description of Artificial Sequence: Synthetic oligonucleotide
  Target: LAMA2; (+) strand; PAM type: YTN; PAM sequence: TTC
accgtcccatgactttcact

SEQ ID NO: 380979 - DNA, 20 bp, Artificial Sequence
  Description of Artificial Sequence: Synthetic oligonucleotide
  Target: LAMA2; (+) strand; PAM type: YTN; PAM sequence: CTT
tcacttaagcatctatttac

SEQ ID NO: 380980 - DNA, 20 bp, Artificial Sequence
  Description of Artificial Sequence: Synthetic oligonucleotide
  Target: LAMA2; (+) strand; PAM type: YTN; PAM sequence: TTT
cacttaagcatctatttaca

SEQ ID NO: 380981 - DNA, 20 bp, Artificial Sequence
  Description of Artificial Sequence: Synthetic oligonucleotide
  Target: LAMA2; (+) strand; PAM type: YTN; PAM sequence: TTC
acttaagcatctatttacag

SEQ ID NO: 380982 - DNA, 20 bp, Artificial Sequence
  Description of Artificial Sequence: Synthetic oligonucleotide
  Target: LAMA2; (+) strand; PAM type: YTN; PAM sequence: CTT
aagcatctatttacagacag

SEQ ID NO: 380983 - DNA, 20 bp, Artificial Sequence
  Description of Artificial Sequence: Synthetic oligonucleotide
  Target: LAMA2; (+) strand; PAM type: YTN; PAM sequence: TTA
agcatctatttacagacagt

SEQ ID NO: 380984 - DNA, 20 bp, Artificial Sequence
  Description of Artificial Sequence: Synthetic oligonucleotide
  Target: LAMA2; (+) strand; PAM type: YTN; PAM sequence: CTA
tttacagacagtaattgcag

SEQ ID NO: 380985 - DNA, 20 bp, Artificial Sequence
  Description of Artificial Sequence: Synthetic oligonucleotide
  Target: LAMA2; (+) strand; PAM type: YTN; PAM sequence: TTT
acagacagtaattgcagtaa

SEQ ID NO: 380986 - DNA, 20 bp, Artificial Sequence
  Description of Artificial Sequence: Synthetic oligonucleotide
  Target: LAMA2; (+) strand; PAM type: YTN; PAM sequence: TTA
cagacagtaattgcagtaat

SEQ ID NO: 380987 - DNA, 20 bp, Artificial Sequence
  Description of Artificial Sequence: Synthetic oligonucleotide
  Target: LAMA2; (+) strand; PAM type: YTN; PAM sequence: TTG
cagtaatatcttagtagaga

SEQ ID NO: 380988 - DNA, 20 bp, Artificial Sequence
  Description of Artificial Sequence: Synthetic oligonucleotide
  Target: LAMA2; (+) strand; PAM type: YTN; PAM sequence: CTT
agtagagagattacagagat

SEQ ID NO: 380989 - DNA, 20 bp, Artificial Sequence
  Description of Artificial Sequence: Synthetic oligonucleotide
  Target: LAMA2; (+) strand; PAM type: YTN; PAM sequence: TTA
gtagagagattacagagata

SEQ ID NO: 380990 - DNA, 20 bp, Artificial Sequence
  Description of Artificial Sequence: Synthetic oligonucleotide
  Target: LAMA2; (+) strand; PAM type: YTN; PAM sequence: TTA
cagagataaagacctatctc

SEQ ID NO: 380991 - DNA, 20 bp, Artificial Sequence
  Description of Artificial Sequence: Synthetic oligonucleotide
  Target: LAMA2; (+) strand; PAM type: YTN; PAM sequence: CTA
tctctcataataatgtacct

SEQ ID NO: 380992 - DNA, 20 bp, Artificial Sequence
  Description of Artificial Sequence: Synthetic oligonucleotide
  Target: LAMA2; (+) strand; PAM type: YTN; PAM sequence: CTC
tcataataatgtacctgaag

SEQ ID NO: 380993 - DNA, 20 bp, Artificial Sequence
  Description of Artificial Sequence: Synthetic oligonucleotide
  Target: LAMA2; (+) strand; PAM type: YTN; PAM sequence: CTC
ataataatgtacctgaagtg

SEQ ID NO: 380994 - DNA, 20 bp, Artificial Sequence
  Description of Artificial Sequence: Synthetic oligonucleotide
  Target: LAMA2; (+) strand; PAM type: YTN; PAM sequence: CTG
aagtgttttccacaacccat

SEQ ID NO: 380995 - DNA, 20 bp, Artificial Sequence
  Description of Artificial Sequence: Synthetic oligonucleotide
  Target: LAMA2; (+) strand; PAM type: YTN; PAM sequence: TTT
tccacaacccatggcctcta

SEQ ID NO: 380996 - DNA, 20 bp, Artificial Sequence
  Description of Artificial Sequence: Synthetic oligonucleotide
  Target: LAMA2; (+) strand; PAM type: YTN; PAM sequence: TTT
ccacaacccatggcctctaa

SEQ ID NO: 380997 - DNA, 20 bp, Artificial Sequence
  Description of Artificial Sequence: Synthetic oligonucleotide
  Target: LAMA2; (+) strand; PAM type: YTN; PAM sequence: TTC
cacaacccatggcctctaat

SEQ ID NO: 380998 - DNA, 20 bp, Artificial Sequence
  Description of Artificial Sequence: Synthetic oligonucleotide
  Target: LAMA2; (+) strand; PAM type: YTN; PAM sequence: CTC
taatccattatacctcttat

SEQ ID NO: 380999 - DNA, 20 bp, Artificial Sequence
  Description of Artificial Sequence: Synthetic oligonucleotide
  Target: LAMA2; (+) strand; PAM type: YTN; PAM sequence: CTA
atccattatacctcttattt

SEQ ID NO: 381000 - DNA, 20 bp, Artificial Sequence
  Description of Artificial Sequence: Synthetic oligonucleotide
  Target: LAMA2; (+) strand; PAM type: YTN; PAM sequence: TTA
tacctcttatttataattca

SEQ ID NO: 381001 - DNA, 20 bp, Artificial Sequence
  Description of Artificial Sequence: Synthetic oligonucleotide
  Target: LAMA2; (+) strand; PAM type: YTN; PAM sequence: CTC
ttatttataattcatcttga

SEQ ID NO: 381002 - DNA, 20 bp, Artificial Sequence
  Description of Artificial Sequence: Synthetic oligonucleotide
  Target: LAMA2; (+) strand; PAM type: YTN; PAM sequence: CTT
atttataattcatcttgatt

SEQ ID NO: 381003 - DNA, 20 bp, Artificial Sequence
  Description of Artificial Sequence: Synthetic oligonucleotide
  Target: LAMA2; (+) strand; PAM type: YTN; PAM sequence: TTA
tttataattcatcttgattc

SEQ ID NO: 381004 - DNA, 20 bp, Artificial Sequence
  Description of Artificial Sequence: Synthetic oligonucleotide
  Target: LAMA2; (+) strand; PAM type: YTN; PAM sequence: TTT
ataattcatcttgattccta

SEQ ID NO: 381005 - DNA, 20 bp, Artificial Sequence
  Description of Artificial Sequence: Synthetic oligonucleotide
  Target: LAMA2; (+) strand; PAM type: YTN; PAM sequence: TTA
taattcatcttgattcctaa

SEQ ID NO: 381006 - DNA, 20 bp, Artificial Sequence
  Description of Artificial Sequence: Synthetic oligonucleotide
  Target: LAMA2; (+) strand; PAM type: YTN; PAM sequence: TTC
atcttgattcctaagtgtaa

SEQ ID NO: 381007 - DNA, 20 bp, Artificial Sequence
  Description of Artificial Sequence: Synthetic oligonucleotide
  Target: LAMA2; (+) strand; PAM type: YTN; PAM sequence: CTT
gattcctaagtgtaattacc

SEQ ID NO: 381008 - DNA, 20 bp, Artificial Sequence
  Description of Artificial Sequence: Synthetic oligonucleotide
  Target: LAMA2; (+) strand; PAM type: YTN; PAM sequence: TTG
attcctaagtgtaattaccc

SEQ ID NO: 381009 - DNA, 20 bp, Artificial Sequence
  Description of Artificial Sequence: Synthetic oligonucleotide
  Target: LAMA2; (+) strand; PAM type: YTN; PAM sequence: TTC
ctaagtgtaattacccaggc

SEQ ID NO: 381010 - DNA, 20 bp, Artificial Sequence
  Description of Artificial Sequence: Synthetic oligonucleotide
  Target: LAMA2; (+) strand; PAM type: YTN; PAM sequence: CTA
agtgtaattacccaggcata

SEQ ID NO: 381011 - DNA, 20 bp, Artificial Sequence
  Description of Artificial Sequence: Synthetic oligonucleotide
  Target: LAMA2; (+) strand; PAM type: YTN; PAM sequence: TTA
cccaggcataaaatcttatc

SEQ ID NO: 381012 - DNA, 20 bp, Artificial Sequence
  Description of Artificial Sequence: Synthetic oligonucleotide
  Target: LAMA2; (+) strand; PAM type: YTN; PAM sequence: CTT
atcatcaaagcaagagctaa

SEQ ID NO: 381013 - DNA, 20 bp, Artificial Sequence
  Description of Artificial Sequence: Synthetic oligonucleotide
  Target: LAMA2; (+) strand; PAM type: YTN; PAM sequence: TTA
tcatcaaagcaagagctaag

SEQ ID NO: 381014 - DNA, 20 bp, Artificial Sequence
  Description of Artificial Sequence: Synthetic oligonucleotide
  Target: LAMA2; (+) strand; PAM type: YTN; PAM sequence: CTA
agggcagttttgaaataata

SEQ ID NO: 381015 - DNA, 20 bp, Artificial Sequence
  Description of Artificial Sequence: Synthetic oligonucleotide
  Target: LAMA2; (+) strand; PAM type: YTN; PAM sequence: TTT
tgaaataatacatcccattc

SEQ ID NO: 381016 - DNA, 20 bp, Artificial Sequence
  Description of Artificial Sequence: Synthetic oligonucleotide
  Target: LAMA2; (+) strand; PAM type: YTN; PAM sequence: TTT
gaaataatacatcccattcc

SEQ ID NO: 381017 - DNA, 20 bp, Artificial Sequence
  Description of Artificial Sequence: Synthetic oligonucleotide
  Target: LAMA2; (+) strand; PAM type: YTN; PAM sequence: TTG
aaataatacatcccattcca

SEQ ID NO: 381018 - DNA, 20 bp, Artificial Sequence
  Description of Artificial Sequence: Synthetic oligonucleotide
  Target: LAMA2; (+) strand; PAM type: YTN; PAM sequence: TTC
cagtaacatatgctttgggt

SEQ ID NO: 381019 - DNA, 20 bp, Artificial Sequence
  Description of Artificial Sequence: Synthetic oligonucleotide
  Target: LAMA2; (+) strand; PAM type: YTN; PAM sequence: CTT
tgggtcatgaatacacaaag

SEQ ID NO: 381020 - DNA, 20 bp, Artificial Sequence
  Description of Artificial Sequence: Synthetic oligonucleotide
  Target: LAMA2; (+) strand; PAM type: YTN; PAM sequence: TTT
gggtcatgaatacacaaagc

SEQ ID NO: 381021 - DNA, 20 bp, Artificial Sequence
  Description of Artificial Sequence: Synthetic oligonucleotide
  Target: LAMA2; (+) strand; PAM type: YTN; PAM sequence: TTG
ggtcatgaatacacaaagca

SEQ ID NO: 381022 - DNA, 20 bp, Artificial Sequence
  Description of Artificial Sequence: Synthetic oligonucleotide
  Target: LAMA2; (+) strand; PAM type: YTN; PAM sequence: TTC
ctctacaatatttttacaaa

SEQ ID NO: 381023 - DNA, 20 bp, Artificial Sequence
  Description of Artificial Sequence: Synthetic oligonucleotide
  Target: LAMA2; (+) strand; PAM type: YTN; PAM sequence: CTC
tacaatatttttacaaaatg

SEQ ID NO: 381024 - DNA, 20 bp, Artificial Sequence
  Description of Artificial Sequence: Synthetic oligonucleotide
  Target: LAMA2; (+) strand; PAM type: YTN; PAM sequence: CTA
caatatttttacaaaatgta

SEQ ID NO: 381025 - DNA, 20 bp, Artificial Sequence
  Description of Artificial Sequence: Synthetic oligonucleotide
  Target: LAMA2; (+) strand; PAM type: YTN; PAM sequence: TTT
ttacaaaatgtatagtattc

SEQ ID NO: 381026 - DNA, 20 bp, Artificial Sequence
  Description of Artificial Sequence: Synthetic oligonucleotide
  Target: LAMA2; (+) strand; PAM type: YTN; PAM sequence: TTT
tacaaaatgtatagtattct

SEQ ID NO: 381027 - DNA, 20 bp, Artificial Sequence
  Description of Artificial Sequence: Synthetic oligonucleotide
  Target: LAMA2; (+) strand; PAM type: YTN; PAM sequence: TTT
acaaaatgtatagtattcta

SEQ ID NO: 381028 - DNA, 20 bp, Artificial Sequence
  Description of Artificial Sequence: Synthetic oligonucleotide
  Target: LAMA2; (+) strand; PAM type: YTN; PAM sequence: TTA
caaaatgtatagtattctag

SEQ ID NO: 381029 - DNA, 20 bp, Artificial Sequence
  Description of Artificial Sequence: Synthetic oligonucleotide
  Target: LAMA2; (+) strand; PAM type: YTN; PAM sequence: TTC
tagagacatctgcatctaca

SEQ ID NO: 381030 - DNA, 20 bp, Artificial Sequence
  Description of Artificial Sequence: Synthetic oligonucleotide
  Target: LAMA2; (+) strand; PAM type: YTN; PAM sequence: CTA
gagacatctgcatctacagg

SEQ ID NO: 381031 - DNA, 20 bp, Artificial Sequence
  Description of Artificial Sequence: Synthetic oligonucleotide
  Target: LAMA2; (+) strand; PAM type: YTN; PAM sequence: CTG
catctacaggctattttatt

SEQ ID NO: 381032 - DNA, 20 bp, Artificial Sequence
  Description of Artificial Sequence: Synthetic oligonucleotide
  Target: LAMA2; (+) strand; PAM type: YTN; PAM sequence: CTA
caggctattttatttcatgt

SEQ ID NO: 381033 - DNA, 20 bp, Artificial Sequence
  Description of Artificial Sequence: Synthetic oligonucleotide
  Target: LAMA2; (+) strand; PAM type: YTN; PAM sequence: CTA
ttttatttcatgtttttatc

SEQ ID NO: 381034 - DNA, 20 bp, Artificial Sequence
  Description of Artificial Sequence: Synthetic oligonucleotide
  Target: LAMA2; (+) strand; PAM type: YTN; PAM sequence: TTT
tatttcatgtttttatccac

SEQ ID NO: 381035 - DNA, 20 bp, Artificial Sequence
  Description of Artificial Sequence: Synthetic oligonucleotide
  Target: LAMA2; (+) strand; PAM type: YTN; PAM sequence: TTT
atttcatgtttttatccaca

SEQ ID NO: 381036 - DNA, 20 bp, Artificial Sequence
  Description of Artificial Sequence: Synthetic oligonucleotide
  Target: LAMA2; (+) strand; PAM type: YTN; PAM sequence: TTA
tttcatgtttttatccacaa

SEQ ID NO: 381037 - DNA, 20 bp, Artificial Sequence
  Description of Artificial Sequence: Synthetic oligonucleotide
  Target: LAMA2; (+) strand; PAM type: YTN; PAM sequence: TTT
catgtttttatccacaatat

SEQ ID NO: 381038 - DNA, 20 bp, Artificial Sequence
  Description of Artificial Sequence: Synthetic oligonucleotide
  Target: LAMA2; (+) strand; PAM type: YTN; PAM sequence: TTC
atgtttttatccacaatatg

SEQ ID NO: 381039 - DNA, 20 bp, Artificial Sequence
  Description of Artificial Sequence: Synthetic oligonucleotide
  Target: LAMA2; (+) strand; PAM type: YTN; PAM sequence: TTT
ttatccacaatatggttgca

SEQ ID NO: 381040 - DNA, 20 bp, Artificial Sequence
  Description of Artificial Sequence: Synthetic oligonucleotide
  Target: LAMA2; (+) strand; PAM type: YTN; PAM sequence: TTT
tatccacaatatggttgcaa

SEQ ID NO: 381041 - DNA, 20 bp, Artificial Sequence
  Description of Artificial Sequence: Synthetic oligonucleotide
  Target: LAMA2; (+) strand; PAM type: YTN; PAM sequence: TTT
atccacaatatggttgcaag

SEQ ID NO: 381042 - DNA, 20 bp, Artificial Sequence
  Description of Artificial Sequence: Synthetic oligonucleotide
  Target: LAMA2; (+) strand; PAM type: YTN; PAM sequence: TTA
tccacaatatggttgcaagt

SEQ ID NO: 381043 - DNA, 20 bp, Artificial Sequence
  Description of Artificial Sequence: Synthetic oligonucleotide
  Target: LAMA2; (+) strand; PAM type: YTN; PAM sequence: TTG
caagtaaacaaaattaagta

SEQ ID NO: 381044 - DNA, 20 bp, Artificial Sequence
  Description of Artificial Sequence: Synthetic oligonucleotide
  Target: LAMA2; (+) strand; PAM type: YTN; PAM sequence: TTA
agtatcagttactgctaaaa

SEQ ID NO: 381045 - DNA, 20 bp, Artificial Sequence
  Description of Artificial Sequence: Synthetic oligonucleotide
  Target: LAMA2; (+) strand; PAM type: YTN; PAM sequence: TTA
ctgctaaaatatagccagtt

SEQ ID NO: 381046 - DNA, 20 bp, Artificial Sequence
  Description of Artificial Sequence: Synthetic oligonucleotide
  Target: LAMA2; (+) strand; PAM type: YTN; PAM sequence: CTG
ctaaaatatagccagttgta

SEQ ID NO: 381047 - DNA, 20 bp, Artificial Sequence
  Description of Artificial Sequence: Synthetic oligonucleotide
  Target: LAMA2; (+) strand; PAM type: YTN; PAM sequence: CTA
aaatatagccagttgtaaag

SEQ ID NO: 381048 - DNA, 20 bp, Artificial Sequence
  Description of Artificial Sequence: Synthetic oligonucleotide
  Target: LAMA2; (+) strand; PAM type: YTN; PAM sequence: TTG
taaagactcttagcctttgc

SEQ ID NO: 381049 - DNA, 20 bp, Artificial Sequence
  Description of Artificial Sequence: Synthetic oligonucleotide
  Target: LAMA2; (+) strand; PAM type: YTN; PAM sequence: CTC
ttagcctttgcttgttacct

SEQ ID NO: 381050 - DNA, 20 bp, Artificial Sequence
  Description of Artificial Sequence: Synthetic oligonucleotide
  Target: LAMA2; (+) strand; PAM type: YTN; PAM sequence: CTT
agcctttgcttgttacctgc

SEQ ID NO: 381051 - DNA, 20 bp, Artificial Sequence
  Description of Artificial Sequence: Synthetic oligonucleotide
  Target: LAMA2; (+) strand; PAM type: YTN; PAM sequence: TTA
gcctttgcttgttacctgca

SEQ ID NO: 381052 - DNA, 20 bp, Artificial Sequence
  Description of Artificial Sequence: Synthetic oligonucleotide
  Target: LAMA2; (+) strand; PAM type: YTN; PAM sequence: CTT
tgcttgttacctgcactgtt

SEQ ID NO: 381053 - DNA, 20 bp, Artificial Sequence
  Description of Artificial Sequence: Synthetic oligonucleotide
  Target: LAMA2; (+) strand; PAM type: YTN; PAM sequence: TTT
gcttgttacctgcactgtta

SEQ ID NO: 381054 - DNA, 20 bp, Artificial Sequence
  Description of Artificial Sequence: Synthetic oligonucleotide
  Target: LAMA2; (+) strand; PAM type: YTN; PAM sequence: TTG
cttgttacctgcactgttat

SEQ ID NO: 381055 - DNA, 20 bp, Artificial Sequence
  Description of Artificial Sequence: Synthetic oligonucleotide
  Target: LAMA2; (+) strand; PAM type: YTN; PAM sequence: CTT
gttacctgcactgttatgac

SEQ ID NO: 381056 - DNA, 20 bp, Artificial Sequence
  Description of Artificial Sequence: Synthetic oligonucleotide
  Target: LAMA2; (+) strand; PAM type: YTN; PAM sequence: TTG
ttacctgcactgttatgaca

SEQ ID NO: 381057 - DNA, 20 bp, Artificial Sequence
  Description of Artificial Sequence: Synthetic oligonucleotide
  Target: LAMA2; (+) strand; PAM type: YTN; PAM sequence: TTA
cctgcactgttatgacagtg

SEQ ID NO: 381058 - DNA, 20 bp, Artificial Sequence
  Description of Artificial Sequence: Synthetic oligonucleotide
  Target: LAMA2; (+) strand; PAM type: YTN; PAM sequence: CTG
cactgttatgacagtgcagg

SEQ ID NO: 381059 - DNA, 20 bp, Artificial Sequence
  Description of Artificial Sequence: Synthetic oligonucleotide
  Target: LAMA2; (+) strand; PAM type: YTN; PAM sequence: CTG
ttatgacagtgcaggcctgg

SEQ ID NO: 381060 - DNA, 20 bp, Artificial Sequence
  Description of Artificial Sequence: Synthetic oligonucleotide
  Target: LAMA2; (+) strand; PAM type: YTN; PAM sequence: TTA
tgacagtgcaggcctggtca

SEQ ID NO: 381061 - DNA, 20 bp, Artificial Sequence
  Description of Artificial Sequence: Synthetic oligonucleotide
  Target: LAMA2; (+) strand; PAM type: YTN; PAM sequence: CTG
gtcattaaaaatgttagttt

SEQ ID NO: 381062 - DNA, 20 bp, Artificial Sequence
  Description of Artificial Sequence: Synthetic oligonucleotide
  Target: LAMA2; (+) strand; PAM type: YTN; PAM sequence: TTA
aaaatgttagttttagaaat

SEQ ID NO: 381063 - DNA, 20 bp, Artificial Sequence
  Description of Artificial Sequence: Synthetic oligonucleotide
  Target: LAMA2; (+) strand; PAM type: YTN; PAM sequence: TTA
gttttagaaatgcctaatta

SEQ ID NO: 381064 - DNA, 20 bp, Artificial Sequence
  Description of Artificial Sequence: Synthetic oligonucleotide
  Target: LAMA2; (+) strand; PAM type: YTN; PAM sequence: TTT
tagaaatgcctaattattat

SEQ ID NO: 381065 - DNA, 20 bp, Artificial Sequence
  Description of Artificial Sequence: Synthetic oligonucleotide
  Target: LAMA2; (+) strand; PAM type: YTN; PAM sequence: TTT
agaaatgcctaattattata

SEQ ID NO: 381066 - DNA, 20 bp, Artificial Sequence
  Description of Artificial Sequence: Synthetic oligonucleotide
  Target: LAMA2; (+) strand; PAM type: YTN; PAM sequence: TTA
gaaatgcctaattattataa

SEQ ID NO: 381067 - DNA, 20 bp, Artificial Sequence
  Description of Artificial Sequence: Synthetic oligonucleotide
  Target: LAMA2; (+) strand; PAM type: YTN; PAM sequence: CTA
attattataatttactattt

SEQ ID NO: 381068 - DNA, 20 bp, Artificial Sequence
  Description of Artificial Sequence: Synthetic oligonucleotide
  Target: LAMA2; (+) strand; PAM type: YTN; PAM sequence: TTA
ttataatttactatttgcag

SEQ ID NO: 381069 - DNA, 20 bp, Artificial Sequence
  Description of Artificial Sequence: Synthetic oligonucleotide
  Target: LAMA2; (+) strand; PAM type: YTN; PAM sequence: TTA
taatttactatttgcagaag

SEQ ID NO: 381070 - DNA, 20 bp, Artificial Sequence
  Description of Artificial Sequence: Synthetic oligonucleotide
  Target: LAMA2; (+) strand; PAM type: YTN; PAM sequence: TTT
actatttgcagaaggggcca

SEQ ID NO: 381071 - DNA, 20 bp, Artificial Sequence
  Description of Artificial Sequence: Synthetic oligonucleotide
  Target: LAMA2; (+) strand; PAM type: YTN; PAM sequence: TTA
ctatttgcagaaggggccag

SEQ ID NO: 381072 - DNA, 20 bp, Artificial Sequence
  Description of Artificial Sequence: Synthetic oligonucleotide
  Target: LAMA2; (+) strand; PAM type: YTN; PAM sequence: CTA
tttgcagaaggggccagatt

SEQ ID NO: 381073 - DNA, 20 bp, Artificial Sequence
  Description of Artificial Sequence: Synthetic oligonucleotide
  Target: LAMA2; (+) strand; PAM type: YTN; PAM sequence: TTT
gcagaaggggccagattacc

SEQ ID NO: 381074 - DNA, 20 bp, Artificial Sequence
  Description of Artificial Sequence: Synthetic oligonucleotide
  Target: LAMA2; (+) strand; PAM type: YTN; PAM sequence: TTG
cagaaggggccagattacct

SEQ ID NO: 381075 - DNA, 20 bp, Artificial Sequence
  Description of Artificial Sequence: Synthetic oligonucleotide
  Target: LAMA2; (+) strand; PAM type: YTN; PAM sequence: TTA
ccttcaggagtcaaacaaag

SEQ ID NO: 381076 - DNA, 20 bp, Artificial Sequence
  Description of Artificial Sequence: Synthetic oligonucleotide
  Target: LAMA2; (+) strand; PAM type: YTN; PAM sequence: CTT
caggagtcaaacaaaggaca

SEQ ID NO: 381077 - DNA, 20 bp, Artificial Sequence
  Description of Artificial Sequence: Synthetic oligonucleotide
  Target: LAMA2; (+) strand; PAM type: YTN; PAM sequence: TTC
aggagtcaaacaaaggacac

SEQ ID NO: 381078 - DNA, 20 bp, Artificial Sequence
  Description of Artificial Sequence: Synthetic oligonucleotide
  Target: LAMA2; (+) strand; PAM type: YTN; PAM sequence: TTT
cctcaccagatttcttggtg

SEQ ID NO: 381079 - DNA, 20 bp, Artificial Sequence
  Description of Artificial Sequence: Synthetic oligonucleotide
  Target: LAMA2; (+) strand; PAM type: YTN; PAM sequence: TTC
ctcaccagatttcttggtgt

SEQ ID NO: 381080 - DNA, 20 bp, Artificial Sequence
  Description of Artificial Sequence: Synthetic oligonucleotide
  Target: LAMA2; (+) strand; PAM type: YTN; PAM sequence: CTC
accagatttcttggtgttgg

SEQ ID NO: 381081 - DNA, 20 bp, Artificial Sequence
  Description of Artificial Sequence: Synthetic oligonucleotide
  Target: LAMA2; (+) strand; PAM type: YTN; PAM sequence: TTT
cttggtgttggagccattga

SEQ ID NO: 381082 - DNA, 20 bp, Artificial Sequence
  Description of Artificial Sequence: Synthetic oligonucleotide
  Target: LAMA2; (+) strand; PAM type: YTN; PAM sequence: TTC
ttggtgttggagccattgag

SEQ ID NO: 381083 - DNA, 20 bp, Artificial Sequence
  Description of Artificial Sequence: Synthetic oligonucleotide
  Target: LAMA2; (+) strand; PAM type: YTN; PAM sequence: CTT
ggtgttggagccattgagtt

SEQ ID NO: 381084 - DNA, 20 bp, Artificial Sequence
  Description of Artificial Sequence: Synthetic oligonucleotide
  Target: LAMA2; (+) strand; PAM type: YTN; PAM sequence: TTG
gtgttggagccattgagttt

SEQ ID NO: 381085 - DNA, 20 bp, Artificial Sequence
  Description of Artificial Sequence: Synthetic oligonucleotide
  Target: LAMA2; (+) strand; PAM type: YTN; PAM sequence: TTG
gagccattgagtttgttata

SEQ ID NO: 381086 - DNA, 20 bp, Artificial Sequence
  Description of Artificial Sequence: Synthetic oligonucleotide
  Target: LAMA2; (+) strand; PAM type: YTN; PAM sequence: TTG
agtttgttatactttattta

SEQ ID NO: 381087 - DNA, 20 bp, Artificial Sequence
  Description of Artificial Sequence: Synthetic oligonucleotide
  Target: LAMA2; (+) strand; PAM type: YTN; PAM sequence: TTT
gttatactttatttaacctg

SEQ ID NO: 381088 - DNA, 20 bp, Artificial Sequence
  Description of Artificial Sequence: Synthetic oligonucleotide
  Target: LAMA2; (+) strand; PAM type: YTN; PAM sequence: TTG
ttatactttatttaacctgt

SEQ ID NO: 381089 - DNA, 20 bp, Artificial Sequence
  Description of Artificial Sequence: Synthetic oligonucleotide
  Target: LAMA2; (+) strand; PAM type: YTN; PAM sequence: TTA
tactttatttaacctgtctt

SEQ ID NO: 381090 - DNA, 20 bp, Artificial Sequence
  Description of Artificial Sequence: Synthetic oligonucleotide
  Target: LAMA2; (+) strand; PAM type: YTN; PAM sequence: CTT
tatttaacctgtctttgagt

SEQ ID NO: 381091 - DNA, 20 bp, Artificial Sequence
  Description of Artificial Sequence: Synthetic oligonucleotide
  Target: LAMA2; (+) strand; PAM type: YTN; PAM sequence: TTT
atttaacctgtctttgagtg

SEQ ID NO: 381092 - DNA, 20 bp, Artificial Sequence
  Description of Artificial Sequence: Synthetic oligonucleotide
  Target: LAMA2; (+) strand; PAM type: YTN; PAM sequence: TTA
tttaacctgtctttgagtga

SEQ ID NO: 381093 - DNA, 20 bp, Artificial Sequence
  Description of Artificial Sequence: Synthetic oligonucleotide
  Target: LAMA2; (+) strand; PAM type: YTN; PAM sequence: TTT
aacctgtctttgagtgacat

SEQ ID NO: 381094 - DNA, 20 bp, Artificial Sequence
  Description of Artificial Sequence: Synthetic oligonucleotide
  Target: LAMA2; (+) strand; PAM type: YTN; PAM sequence: TTA
acctgtctttgagtgacatt

SEQ ID NO: 381095 - DNA, 20 bp, Artificial Sequence
  Description of Artificial Sequence: Synthetic oligonucleotide
  Target: LAMA2; (+) strand; PAM type: YTN; PAM sequence: CTG
tctttgagtgacattaaata

SEQ ID NO: 381096 - DNA, 20 bp, Artificial Sequence
  Description of Artificial Sequence: Synthetic oligonucleotide
  Target: LAMA2; (+) strand; PAM type: YTN; PAM sequence: CTT
tgagtgacattaaatatagg

SEQ ID NO: 381097 - DNA, 20 bp, Artificial Sequence
  Description of Artificial Sequence: Synthetic oligonucleotide
  Target: LAMA2; (+) strand; PAM type: YTN; PAM sequence: TTT
gagtgacattaaatataggt

SEQ ID NO: 381098 - DNA, 20 bp, Artificial Sequence
  Description of Artificial Sequence: Synthetic oligonucleotide
  Target: LAMA2; (+) strand; PAM type: YTN; PAM sequence: TTG
agtgacattaaatataggtt

SEQ ID NO: 381099 - DNA, 20 bp, Artificial Sequence
  Description of Artificial Sequence: Synthetic oligonucleotide
  Target: LAMA2; (+) strand; PAM type: YTN; PAM sequence: TTA
aatataggttattgcccaaa

SEQ ID NO: 381100 - DNA, 20 bp, Artificial Sequence
  Description of Artificial Sequence: Synthetic oligonucleotide
  Target: LAMA2; (+) strand; PAM type: YTN; PAM sequence: TTA
ttgcccaaactgacctaaac

SEQ ID NO: 381101 - DNA, 20 bp, Artificial Sequence
  Description of Artificial Sequence: Synthetic oligonucleotide
  Target: LAMA2; (+) strand; PAM type: YTN; PAM sequence: TTG
cccaaactgacctaaactga

SEQ ID NO: 381102 - DNA, 20 bp, Artificial Sequence
  Description of Artificial Sequence: Synthetic oligonucleotide
  Target: LAMA2; (+) strand; PAM type: YTN; PAM sequence: CTG
acctaaactgagctttatgc

SEQ ID NO: 381103 - DNA, 20 bp, Artificial Sequence
  Description of Artificial Sequence: Synthetic oligonucleotide
  Target: LAMA2; (+) strand; PAM type: YTN; PAM sequence: CTA
aactgagctttatgcagttg

SEQ ID NO: 381104 - DNA, 20 bp, Artificial Sequence
  Description of Artificial Sequence: Synthetic oligonucleotide
  Target: LAMA2; (+) strand; PAM type: YTN; PAM sequence: CTG
agctttatgcagttgaaagg

SEQ ID NO: 381105 - DNA, 20 bp, Artificial Sequence
  Description of Artificial Sequence: Synthetic oligonucleotide
  Target: LAMA2; (+) strand; PAM type: YTN; PAM sequence: CTT
tatgcagttgaaaggttata

SEQ ID NO: 381106 - DNA, 20 bp, Artificial Sequence
  Description of Artificial Sequence: Synthetic oligonucleotide
  Target: LAMA2; (+) strand; PAM type: YTN; PAM sequence: TTT
atgcagttgaaaggttatat

SEQ ID NO: 381107 - DNA, 20 bp, Artificial Sequence
  Description of Artificial Sequence: Synthetic oligonucleotide
  Target: LAMA2; (+) strand; PAM type: YTN; PAM sequence: TTA
tgcagttgaaaggttatatg

SEQ ID NO: 381108 - DNA, 20 bp, Artificial Sequence
  Description of Artificial Sequence: Synthetic oligonucleotide
  Target: LAMA2; (+) strand; PAM type: YTN; PAM sequence: TTG
aaaggttatatgcaggtacc

SEQ ID NO: 381109 - DNA, 20 bp, Artificial Sequence
  Description of Artificial Sequence: Synthetic oligonucleotide
  Target: LAMA2; (+) strand; PAM type: YTN; PAM sequence: TTA
tatgcaggtaccattcttac

SEQ ID NO: 381110 - DNA, 20 bp, Artificial Sequence
  Description of Artificial Sequence: Synthetic oligonucleotide
  Target: LAMA2; (+) strand; PAM type: YTN; PAM sequence: TTC
ttacttatgactttctttct

SEQ ID NO: 381111 - DNA, 20 bp, Artificial Sequence
  Description of Artificial Sequence: Synthetic oligonucleotide
  Target: LAMA2; (+) strand; PAM type: YTN; PAM sequence: CTT
acttatgactttctttctta

SEQ ID NO: 381112 - DNA, 20 bp, Artificial Sequence
  Description of Artificial Sequence: Synthetic oligonucleotide
  Target: LAMA2; (+) strand; PAM type: YTN; PAM sequence: TTA
cttatgactttctttcttaa

SEQ ID NO: 381113 - DNA, 20 bp, Artificial Sequence
  Description of Artificial Sequence: Synthetic oligonucleotide
  Target: LAMA2; (+) strand; PAM type: YTN; PAM sequence: CTT
atgactttctttcttaaata

SEQ ID NO: 381114 - DNA, 20 bp, Artificial Sequence
  Description of Artificial Sequence: Synthetic oligonucleotide
  Target: LAMA2; (+) strand; PAM type: YTN; PAM sequence: TTA
tgactttctttcttaaatat

SEQ ID NO: 381115 - DNA, 20 bp, Artificial Sequence
  Description of Artificial Sequence: Synthetic oligonucleotide
  Target: LAMA2; (+) strand; PAM type: YTN; PAM sequence: CTT
tctttcttaaatatggaaaa

SEQ ID NO: 381116 - DNA, 20 bp, Artificial Sequence
  Description of Artificial Sequence: Synthetic oligonucleotide
  Target: LAMA2; (+) strand; PAM type: YTN; PAM sequence: TTT
ctttcttaaatatggaaaat

SEQ ID NO: 381117 - DNA, 20 bp, Artificial Sequence
  Description of Artificial Sequence: Synthetic oligonucleotide
  Target: LAMA2; (+) strand; PAM type: YTN; PAM sequence: TTC
tttcttaaatatggaaaata

SEQ ID NO: 381118 - DNA, 20 bp, Artificial Sequence
  Description of Artificial Sequence: Synthetic oligonucleotide
  Target: LAMA2; (+) strand; PAM type: YTN; PAM sequence: CTT
tcttaaatatggaaaatatt

SEQ ID NO: 381119 - DNA, 20 bp, Artificial Sequence
  Description of Artificial Sequence: Synthetic oligonucleotide
  Target: LAMA2; (+) strand; PAM type: YTN; PAM sequence: TTT
cttaaatatggaaaatattc

SEQ ID NO: 381120 - DNA, 20 bp, Artificial Sequence
  Description of Artificial Sequence: Synthetic oligonucleotide
  Target: LAMA2; (+) strand; PAM type: YTN; PAM sequence: TTC
ttaaatatggaaaatattca

SEQ ID NO: 381121 - DNA, 20 bp, Artificial Sequence
  Description of Artificial Sequence: Synthetic oligonucleotide
  Target: LAMA2; (+) strand; PAM type: YTN; PAM sequence: CTT
aaatatggaaaatattcagc

SEQ ID NO: 381122 - DNA, 20 bp, Artificial Sequence
  Description of Artificial Sequence: Synthetic oligonucleotide
  Target: LAMA2; (+) strand; PAM type: YTN; PAM sequence: TTA
aatatggaaaatattcagcc

SEQ ID NO: 381123 - DNA, 20 bp, Artificial Sequence
  Description of Artificial Sequence: Synthetic oligonucleotide
  Target: LAMA2; (+) strand; PAM type: YTN; PAM sequence: TTC
agccttgcgtgtgcagctct

SEQ ID NO: 381124 - DNA, 20 bp, Artificial Sequence
  Description of Artificial Sequence: Synthetic oligonucleotide
  Target: LAMA2; (+) strand; PAM type: YTN; PAM sequence: CTT
gcgtgtgcagctctctgcag

SEQ ID NO: 381125 - DNA, 20 bp, Artificial Sequence
  Description of Artificial Sequence: Synthetic oligonucleotide
  Target: LAMA2; (+) strand; PAM type: YTN; PAM sequence: TTG
cgtgtgcagctctctgcagt

SEQ ID NO: 381126 - DNA, 20 bp, Artificial Sequence
  Description of Artificial Sequence: Synthetic oligonucleotide
  Target: LAMA2; (+) strand; PAM type: YTN; PAM sequence: CTC
tctgcagtaatacggaaatc

SEQ ID NO: 381127 - DNA, 20 bp, Artificial Sequence
  Description of Artificial Sequence: Synthetic oligonucleotide
  Target: LAMA2; (+) strand; PAM type: YTN; PAM sequence: CTC
tgcagtaatacggaaatcag

SEQ ID NO: 381128 - DNA, 20 bp, Artificial Sequence
  Description of Artificial Sequence: Synthetic oligonucleotide
  Target: LAMA2; (+) strand; PAM type: YTN; PAM sequence: CTG
cagtaatacggaaatcagaa

SEQ ID NO: 381129 - DNA, 20 bp, Artificial Sequence
  Description of Artificial Sequence: Synthetic oligonucleotide
  Target: LAMA2; (+) strand; PAM type: YTN; PAM sequence: TTT
gtcaatgatctctaggtcat

SEQ ID NO: 381130 - DNA, 20 bp, Artificial Sequence
  Description of Artificial Sequence: Synthetic oligonucleotide
  Target: LAMA2; (+) strand; PAM type: YTN; PAM sequence: TTG
tcaatgatctctaggtcatg

SEQ ID NO: 381131 - DNA, 20 bp, Artificial Sequence
  Description of Artificial Sequence: Synthetic oligonucleotide
  Target: LAMA2; (+) strand; PAM type: YTN; PAM sequence: CTC
taggtcatgttttgatagtt

SEQ ID NO: 381132 - DNA, 20 bp, Artificial Sequence
  Description of Artificial Sequence: Synthetic oligonucleotide
  Target: LAMA2; (+) strand; PAM type: YTN; PAM sequence: CTA
ggtcatgttttgatagtttc

SEQ ID NO: 381133 - DNA, 20 bp, Artificial Sequence
  Description of Artificial Sequence: Synthetic oligonucleotide
  Target: LAMA2; (+) strand; PAM type: YTN; PAM sequence: TTT
tgatagtttcagcttctatc

SEQ ID NO: 381134 - DNA, 20 bp, Artificial Sequence
  Description of Artificial Sequence: Synthetic oligonucleotide
  Target: LAMA2; (+) strand; PAM type: YTN; PAM sequence: TTT
gatagtttcagcttctatcc

SEQ ID NO: 381135 - DNA, 20 bp, Artificial Sequence
  Description of Artificial Sequence: Synthetic oligonucleotide
  Target: LAMA2; (+) strand; PAM type: YTN; PAM sequence: TTG
atagtttcagcttctatcct

SEQ ID NO: 381136 - DNA, 20 bp, Artificial Sequence
  Description of Artificial Sequence: Synthetic oligonucleotide
  Target: LAMA2; (+) strand; PAM type: YTN; PAM sequence: TTT
cagcttctatcctgtcttcc

SEQ ID NO: 381137 - DNA, 20 bp, Artificial Sequence
  Description of Artificial Sequence: Synthetic oligonucleotide
  Target: LAMA2; (+) strand; PAM type: YTN; PAM sequence: TTC
agcttctatcctgtcttccc

SEQ ID NO: 381138 - DNA, 20 bp, Artificial Sequence
  Description of Artificial Sequence: Synthetic oligonucleotide
  Target: LAMA2; (+) strand; PAM type: YTN; PAM sequence: CTT
ctatcctgtcttcccatatt

SEQ ID NO: 381139 - DNA, 20 bp, Artificial Sequence
  Description of Artificial Sequence: Synthetic oligonucleotide
  Target: LAMA2; (+) strand; PAM type: YTN; PAM sequence: TTC
tatcctgtcttcccatattt

SEQ ID NO: 381140 - DNA, 20 bp, Artificial Sequence
  Description of Artificial Sequence: Synthetic oligonucleotide
  Target: LAMA2; (+) strand; PAM type: YTN; PAM sequence: CTA
tcctgtcttcccatatttta

SEQ ID NO: 381141 - DNA, 20 bp, Artificial Sequence
  Description of Artificial Sequence: Synthetic oligonucleotide
  Target: LAMA2; (+) strand; PAM type: YTN; PAM sequence: CTG
tcttcccatattttaaaagg

SEQ ID NO: 381142 - DNA, 20 bp, Artificial Sequence
  Description of Artificial Sequence: Synthetic oligonucleotide
  Target: LAMA2; (+) strand; PAM type: YTN; PAM sequence: CTT
cccatattttaaaagggctt

SEQ ID NO: 381143 - DNA, 20 bp, Artificial Sequence
  Description of Artificial Sequence: Synthetic oligonucleotide
  Target: LAMA2; (+) strand; PAM type: YTN; PAM sequence: TTC
ccatattttaaaagggcttt

SEQ ID NO: 381144 - DNA, 20 bp, Artificial Sequence
  Description of Artificial Sequence: Synthetic oligonucleotide
  Target: LAMA2; (+) strand; PAM type: YTN; PAM sequence: TTT
taaaagggctttaggcttgc

SEQ ID NO: 381145 - DNA, 20 bp, Artificial Sequence
  Description of Artificial Sequence: Synthetic oligonucleotide
  Target: LAMA2; (+) strand; PAM type: YTN; PAM sequence: TTT
aaaagggctttaggcttgca

SEQ ID NO: 381146 - DNA, 20 bp, Artificial Sequence
  Description of Artificial Sequence: Synthetic oligonucleotide
  Target: LAMA2; (+) strand; PAM type: YTN; PAM sequence: TTA
aaagggctttaggcttgcag

SEQ ID NO: 381147 - DNA, 20 bp, Artificial Sequence
  Description of Artificial Sequence: Synthetic oligonucleotide
  Target: LAMA2; (+) strand; PAM type: YTN; PAM sequence: CTT
taggcttgcagttgaatggc

SEQ ID NO: 381148 - DNA, 20 bp, Artificial Sequence
  Description of Artificial Sequence: Synthetic oligonucleotide
  Target: LAMA2; (+) strand; PAM type: YTN; PAM sequence: TTT
aggcttgcagttgaatggcc

SEQ ID NO: 381149 - DNA, 20 bp, Artificial Sequence
  Description of Artificial Sequence: Synthetic oligonucleotide
  Target: LAMA2; (+) strand; PAM type: YTN; PAM sequence: TTA
ggcttgcagttgaatggccg

SEQ ID NO: 381150 - DNA, 20 bp, Artificial Sequence
  Description of Artificial Sequence: Synthetic oligonucleotide
  Target: LAMA2; (+) strand; PAM type: YTN; PAM sequence: CTT
gcagttgaatggccggtgtc

SEQ ID NO: 381151 - DNA, 20 bp, Artificial Sequence
  Description of Artificial Sequence: Synthetic oligonucleotide
  Target: LAMA2; (+) strand; PAM type: YTN; PAM sequence: TTG
cagttgaatggccggtgtct

SEQ ID NO: 381152 - DNA, 20 bp, Artificial Sequence
  Description of Artificial Sequence: Synthetic oligonucleotide
  Target: LAMA2; (+) strand; PAM type: YTN; PAM sequence: TTG
aatggccggtgtctattgga

SEQ ID NO: 381153 - DNA, 20 bp, Artificial Sequence
  Description of Artificial Sequence: Synthetic oligonucleotide
  Target: LAMA2; (+) strand; PAM type: YTN; PAM sequence: CTA
ttggatcgccactcagaagc

SEQ ID NO: 381154 - DNA, 20 bp, Artificial Sequence
  Description of Artificial Sequence: Synthetic oligonucleotide
  Target: LAMA2; (+) strand; PAM type: YTN; PAM sequence: TTG
gatcgccactcagaagctgt

SEQ ID NO: 381155 - DNA, 20 bp, Artificial Sequence
  Description of Artificial Sequence: Synthetic oligonucleotide
  Target: LAMA2; (+) strand; PAM type: YTN; PAM sequence: CTC
agaagctgtcccttgtggct

SEQ ID NO: 381156 - DNA, 20 bp, Artificial Sequence
  Description of Artificial Sequence: Synthetic oligonucleotide
  Target: LAMA2; (+) strand; PAM type: YTN; PAM sequence: CTG
tcccttgtggctattaaaac

SEQ ID NO: 381157 - DNA, 20 bp, Artificial Sequence
  Description of Artificial Sequence: Synthetic oligonucleotide
  Target: LAMA2; (+) strand; PAM type: YTN; PAM sequence: CTT
gtggctattaaaactgattt

SEQ ID NO: 381158 - DNA, 20 bp, Artificial Sequence
  Description of Artificial Sequence: Synthetic oligonucleotide
  Target: LAMA2; (+) strand; PAM type: YTN; PAM sequence: TTG
tggctattaaaactgatttt

SEQ ID NO: 381159 - DNA, 20 bp, Artificial Sequence
  Description of Artificial Sequence: Synthetic oligonucleotide
  Target: LAMA2; (+) strand; PAM type: YTN; PAM sequence: CTA
ttaaaactgatttttttaaa

SEQ ID NO: 381160 - DNA, 20 bp, Artificial Sequence
  Description of Artificial Sequence: Synthetic oligonucleotide
  Target: LAMA2; (+) strand; PAM type: YTN; PAM sequence: TTA
aaactgatttttttaaatct

SEQ ID NO: 381161 - DNA, 20 bp, Artificial Sequence
  Description of Artificial Sequence: Synthetic oligonucleotide
  Target: LAMA2; (+) strand; PAM type: YTN; PAM sequence: CTG
atttttttaaatctccaaat

SEQ ID NO: 381162 - DNA, 20 bp, Artificial Sequence
  Description of Artificial Sequence: Synthetic oligonucleotide
  Target: LAMA2; (+) strand; PAM type: YTN; PAM sequence: TTT
ttttaaatctccaaataatt

SEQ ID NO: 381163 - DNA, 20 bp, Artificial Sequence
  Description of Artificial Sequence: Synthetic oligonucleotide
  Target: LAMA2; (+) strand; PAM type: YTN; PAM sequence: TTT
tttaaatctccaaataattt

SEQ ID NO: 381164 - DNA, 20 bp, Artificial Sequence
  Description of Artificial Sequence: Synthetic oligonucleotide
  Target: LAMA2; (+) strand; PAM type: YTN; PAM sequence: TTT
ttaaatctccaaataattta

SEQ ID NO: 381165 - DNA, 20 bp, Artificial Sequence
  Description of Artificial Sequence: Synthetic oligonucleotide
  Target: LAMA2; (+) strand; PAM type: YTN; PAM sequence: TTT
taaatctccaaataatttat

SEQ ID NO: 381166 - DNA, 20 bp, Artificial Sequence
  Description of Artificial Sequence: Synthetic oligonucleotide
  Target: LAMA2; (+) strand; PAM type: YTN; PAM sequence: TTT
aaatctccaaataatttata

SEQ ID NO: 381167 - DNA, 20 bp, Artificial Sequence
  Description of Artificial Sequence: Synthetic oligonucleotide
  Target: LAMA2; (+) strand; PAM type: YTN; PAM sequence: TTA
aatctccaaataatttatac

SEQ ID NO: 381168 - DNA, 20 bp, Artificial Sequence
  Description of Artificial Sequence: Synthetic oligonucleotide
  Target: LAMA2; (+) strand; PAM type: YTN; PAM sequence: CTC
caaataatttatacctatcg

SEQ ID NO: 381169 - DNA, 20 bp, Artificial Sequence
  Description of Artificial Sequence: Synthetic oligonucleotide
  Target: LAMA2; (+) strand; PAM type: YTN; PAM sequence: TTT
atacctatcgtcaacacata

SEQ ID NO: 381170 - DNA, 20 bp, Artificial Sequence
  Description of Artificial Sequence: Synthetic oligonucleotide
  Target: LAMA2; (+) strand; PAM type: YTN; PAM sequence: TTA
tacctatcgtcaacacataa

SEQ ID NO: 381171 - DNA, 20 bp, Artificial Sequence
  Description of Artificial Sequence: Synthetic oligonucleotide
  Target: LAMA2; (+) strand; PAM type: YTN; PAM sequence: CTA
tcgtcaacacataaagccca

SEQ ID NO: 381172 - DNA, 20 bp, Artificial Sequence
  Description of Artificial Sequence: Synthetic oligonucleotide
  Target: LAMA2; (+) strand; PAM type: YTN; PAM sequence: CTT
agctacttacatatgcacac

SEQ ID NO: 381173 - DNA, 20 bp, Artificial Sequence
  Description of Artificial Sequence: Synthetic oligonucleotide
  Target: LAMA2; (+) strand; PAM type: YTN; PAM sequence: TTA
gctacttacatatgcacaca

SEQ ID NO: 381174 - DNA, 20 bp, Artificial Sequence
  Description of Artificial Sequence: Synthetic oligonucleotide
  Target: LAMA2; (+) strand; PAM type: YTN; PAM sequence: CTA
cttacatatgcacacatcta

SEQ ID NO: 381175 - DNA, 20 bp, Artificial Sequence
  Description of Artificial Sequence: Synthetic oligonucleotide
  Target: LAMA2; (+) strand; PAM type: YTN; PAM sequence: CTT
acatatgcacacatctatcc

SEQ ID NO: 381176 - DNA, 20 bp, Artificial Sequence
  Description of Artificial Sequence: Synthetic oligonucleotide
  Target: LAMA2; (+) strand; PAM type: YTN; PAM sequence: TTA
catatgcacacatctatcct

SEQ ID NO: 381177 - DNA, 20 bp, Artificial Sequence
  Description of Artificial Sequence: Synthetic oligonucleotide
  Target: LAMA2; (+) strand; PAM type: YTN; PAM sequence: CTA
tcctttatcacttctgttgc

SEQ ID NO: 381178 - DNA, 20 bp, Artificial Sequence
  Description of Artificial Sequence: Synthetic oligonucleotide
  Target: LAMA2; (+) strand; PAM type: YTN; PAM sequence: CTT
tatcacttctgttgcacacc

SEQ ID NO: 381179 - DNA, 20 bp, Artificial Sequence
  Description of Artificial Sequence: Synthetic oligonucleotide
  Target: LAMA2; (+) strand; PAM type: YTN; PAM sequence: TTT
atcacttctgttgcacacca

SEQ ID NO: 381180 - DNA, 20 bp, Artificial Sequence
  Description of Artificial Sequence: Synthetic oligonucleotide
  Target: LAMA2; (+) strand; PAM type: YTN; PAM sequence: TTA
tcacttctgttgcacaccag

SEQ ID NO: 381181 - DNA, 20 bp, Artificial Sequence
  Description of Artificial Sequence: Synthetic oligonucleotide
  Target: LAMA2; (+) strand; PAM type: YTN; PAM sequence: CTT
ctgttgcacaccagagaccc

SEQ ID NO: 381182 - DNA, 20 bp, Artificial Sequence
  Description of Artificial Sequence: Synthetic oligonucleotide
  Target: LAMA2; (+) strand; PAM type: YTN; PAM sequence: TTC
tgttgcacaccagagaccca

SEQ ID NO: 381183 - DNA, 20 bp, Artificial Sequence
  Description of Artificial Sequence: Synthetic oligonucleotide
  Target: LAMA2; (+) strand; PAM type: YTN; PAM sequence: CTG
ttgcacaccagagacccaaa

SEQ ID NO: 381184 - DNA, 20 bp, Artificial Sequence
  Description of Artificial Sequence: Synthetic oligonucleotide
  Target: LAMA2; (+) strand; PAM type: YTN; PAM sequence: TTG
cacaccagagacccaaagtc

SEQ ID NO: 381185 - DNA, 20 bp, Artificial Sequence
  Description of Artificial Sequence: Synthetic oligonucleotide
  Target: LAMA2; (+) strand; PAM type: YTN; PAM sequence: CTC
tgttttcatgtacagacaag

SEQ ID NO: 381186 - DNA, 20 bp, Artificial Sequence
  Description of Artificial Sequence: Synthetic oligonucleotide
  Target: LAMA2; (+) strand; PAM type: YTN; PAM sequence: CTG
ttttcatgtacagacaagtg

SEQ ID NO: 381187 - DNA, 20 bp, Artificial Sequence
  Description of Artificial Sequence: Synthetic oligonucleotide
  Target: LAMA2; (+) strand; PAM type: YTN; PAM sequence: TTT
tcatgtacagacaagtgttg

SEQ ID NO: 381188 - DNA, 20 bp, Artificial Sequence
  Description of Artificial Sequence: Synthetic oligonucleotide
  Target: LAMA2; (+) strand; PAM type: YTN; PAM sequence: TTT
catgtacagacaagtgttga

SEQ ID NO: 381189 - DNA, 20 bp, Artificial Sequence
  Description of Artificial Sequence: Synthetic oligonucleotide
  Target: LAMA2; (+) strand; PAM type: YTN; PAM sequence: TTC
atgtacagacaagtgttgag

SEQ ID NO: 381190 - DNA, 20 bp, Artificial Sequence
  Description of Artificial Sequence: Synthetic oligonucleotide
  Target: LAMA2; (+) strand; PAM type: YTN; PAM sequence: TTG
aggaacatggcatgggtaag

SEQ ID NO: 381191 - DNA, 20 bp, Artificial Sequence
  Description of Artificial Sequence: Synthetic oligonucleotide
  Target: LAMA2; (+) strand; PAM type: YTN; PAM sequence: TTA
tgttataattttgtttacaa

SEQ ID NO: 381192 - DNA, 20 bp, Artificial Sequence
  Description of Artificial Sequence: Synthetic oligonucleotide
  Target: LAMA2; (+) strand; PAM type: YTN; PAM sequence: TTA
taattttgtttacaaatata

SEQ ID NO: 381193 - DNA, 20 bp, Artificial Sequence
  Description of Artificial Sequence: Synthetic oligonucleotide
  Target: LAMA2; (+) strand; PAM type: YTN; PAM sequence: TTT
tgtttacaaatataacctaa

SEQ ID NO: 381194 - DNA, 20 bp, Artificial Sequence
  Description of Artificial Sequence: Synthetic oligonucleotide
  Target: LAMA2; (+) strand; PAM type: YTN; PAM sequence: TTT
gtttacaaatataacctaaa

SEQ ID NO: 381195 - DNA, 20 bp, Artificial Sequence
  Description of Artificial Sequence: Synthetic oligonucleotide
  Target: LAMA2; (+) strand; PAM type: YTN; PAM sequence: TTG
tttacaaatataacctaaaa

SEQ ID NO: 381196 - DNA, 20 bp, Artificial Sequence
  Description of Artificial Sequence: Synthetic oligonucleotide
  Target: LAMA2; (+) strand; PAM type: YTN; PAM sequence: TTT
acaaatataacctaaaacaa

SEQ ID NO: 381197 - DNA, 20 bp, Artificial Sequence
  Description of Artificial Sequence: Synthetic oligonucleotide
  Target: LAMA2; (+) strand; PAM type: YTN; PAM sequence: TTA
caaatataacctaaaacaat

SEQ ID NO: 381198 - DNA, 20 bp, Artificial Sequence
  Description of Artificial Sequence: Synthetic oligonucleotide
  Target: LAMA2; (+) strand; PAM type: YTN; PAM sequence: CTA
aaacaatcatggtatcttta

SEQ ID NO: 381199 - DNA, 20 bp, Artificial Sequence
  Description of Artificial Sequence: Synthetic oligonucleotide
  Target: LAMA2; (+) strand; PAM type: YTN; PAM sequence: CTT
tatttttagtttatttccag

SEQ ID NO: 381200 - DNA, 20 bp, Artificial Sequence
  Description of Artificial Sequence: Synthetic oligonucleotide
  Target: LAMA2; (+) strand; PAM type: YTN; PAM sequence: TTT
atttttagtttatttccagc

SEQ ID NO: 381201 - DNA, 20 bp, Artificial Sequence
  Description of Artificial Sequence: Synthetic oligonucleotide
  Target: LAMA2; (+) strand; PAM type: YTN; PAM sequence: TTA
tttttagtttatttccagca

SEQ ID NO: 381202 - DNA, 20 bp, Artificial Sequence
  Description of Artificial Sequence: Synthetic oligonucleotide
  Target: LAMA2; (+) strand; PAM type: YTN; PAM sequence: TTT
ttagtttatttccagcaaac

SEQ ID NO: 381203 - DNA, 20 bp, Artificial Sequence
  Description of Artificial Sequence: Synthetic oligonucleotide
  Target: LAMA2; (+) strand; PAM type: YTN; PAM sequence: TTT
tagtttatttccagcaaaca

SEQ ID NO: 381204 - DNA, 20 bp, Artificial Sequence
  Description of Artificial Sequence: Synthetic oligonucleotide
  Target: LAMA2; (+) strand; PAM type: YTN; PAM sequence: TTT
agtttatttccagcaaacat

SEQ ID NO: 381205 - DNA, 20 bp, Artificial Sequence
  Description of Artificial Sequence: Synthetic oligonucleotide
  Target: LAMA2; (+) strand; PAM type: YTN; PAM sequence: TTA
gtttatttccagcaaacata

SEQ ID NO: 381206 - DNA, 20 bp, Artificial Sequence
  Description of Artificial Sequence: Synthetic oligonucleotide
  Target: LAMA2; (+) strand; PAM type: YTN; PAM sequence: TTT
atttccagcaaacatagaaa

SEQ ID NO: 381207 - DNA, 20 bp, Artificial Sequence
  Description of Artificial Sequence: Synthetic oligonucleotide
  Target: LAMA2; (+) strand; PAM type: YTN; PAM sequence: TTA
tttccagcaaacatagaaaa

SEQ ID NO: 381208 - DNA, 20 bp, Artificial Sequence
  Description of Artificial Sequence: Synthetic oligonucleotide
  Target: LAMA2; (+) strand; PAM type: YTN; PAM sequence: TTT
ccagcaaacatagaaaaaac

SEQ ID NO: 381209 - DNA, 20 bp, Artificial Sequence
  Description of Artificial Sequence: Synthetic oligonucleotide
  Target: LAMA2; (+) strand; PAM type: YTN; PAM sequence: TTC
cagcaaacatagaaaaaact

SEQ ID NO: 381210 - DNA, 20 bp, Artificial Sequence
  Description of Artificial Sequence: Synthetic oligonucleotide
  Target: LAMA2; (+) strand; PAM type: YTN; PAM sequence: CTA
tttgagatagagaaacctat

SEQ ID NO: 381211 - DNA, 20 bp, Artificial Sequence
  Description of Artificial Sequence: Synthetic oligonucleotide
  Target: LAMA2; (+) strand; PAM type: YTN; PAM sequence: TTT
gagatagagaaacctattga

SEQ ID NO: 381212 - DNA, 20 bp, Artificial Sequence
  Description of Artificial Sequence: Synthetic oligonucleotide
  Target: LAMA2; (+) strand; PAM type: YTN; PAM sequence: TTG
agatagagaaacctattgat

SEQ ID NO: 381213 - DNA, 20 bp, Artificial Sequence
  Description of Artificial Sequence: Synthetic oligonucleotide
  Target: LAMA2; (+) strand; PAM type: YTN; PAM sequence: CTA
ttgatttatgtatgacaatt

SEQ ID NO: 381214 - DNA, 20 bp, Artificial Sequence
  Description of Artificial Sequence: Synthetic oligonucleotide
  Target: LAMA2; (+) strand; PAM type: YTN; PAM sequence: TTG
atttatgtatgacaattatt

SEQ ID NO: 381215 - DNA, 20 bp, Artificial Sequence
  Description of Artificial Sequence: Synthetic oligonucleotide
  Target: LAMA2; (+) strand; PAM type: YTN; PAM sequence: TTT
atgtatgacaattattaaac

SEQ ID NO: 381216 - DNA, 20 bp, Artificial Sequence
  Description of Artificial Sequence: Synthetic oligonucleotide
  Target: LAMA2; (+) strand; PAM type: YTN; PAM sequence: TTA
tgtatgacaattattaaaca

SEQ ID NO: 381217 - DNA, 20 bp, Artificial Sequence
  Description of Artificial Sequence: Synthetic oligonucleotide
  Target: LAMA2; (+) strand; PAM type: YTN; PAM sequence: TTA
ttaaacatgctttatctcaa

SEQ ID NO: 381218 - DNA, 20 bp, Artificial Sequence
  Description of Artificial Sequence: Synthetic oligonucleotide
  Target: LAMA2; (+) strand; PAM type: YTN; PAM sequence: TTA
aacatgctttatctcaagta

SEQ ID NO: 381219 - DNA, 20 bp, Artificial Sequence
  Description of Artificial Sequence: Synthetic oligonucleotide
  Target: LAMA2; (+) strand; PAM type: YTN; PAM sequence: CTT
tatctcaagtaatcctcaga

SEQ ID NO: 381220 - DNA, 20 bp, Artificial Sequence
  Description of Artificial Sequence: Synthetic oligonucleotide
  Target: LAMA2; (+) strand; PAM type: YTN; PAM sequence: TTT
atctcaagtaatcctcagat

SEQ ID NO: 381221 - DNA, 20 bp, Artificial Sequence
  Description of Artificial Sequence: Synthetic oligonucleotide
  Target: LAMA2; (+) strand; PAM type: YTN; PAM sequence: TTA
tctcaagtaatcctcagatc

SEQ ID NO: 381222 - DNA, 20 bp, Artificial Sequence
  Description of Artificial Sequence: Synthetic oligonucleotide
  Target: LAMA2; (+) strand; PAM type: YTN; PAM sequence: CTC
aagtaatcctcagatccacc

SEQ ID NO: 381223 - DNA, 20 bp, Artificial Sequence
  Description of Artificial Sequence: Synthetic oligonucleotide
  Target: LAMA2; (+) strand; PAM type: YTN; PAM sequence: CTC
agatccaccctatgaaaagc

SEQ ID NO: 381224 - DNA, 20 bp, Artificial Sequence
  Description of Artificial Sequence: Synthetic oligonucleotide
  Target: LAMA2; (+) strand; PAM type: YTN; PAM sequence: CTA
tgaaaagcagaacctaccat

SEQ ID NO: 381225 - DNA, 20 bp, Artificial Sequence
  Description of Artificial Sequence: Synthetic oligonucleotide
  Target: LAMA2; (+) strand; PAM type: YTN; PAM sequence: CTA
ccattgattgagtgcttact

SEQ ID NO: 381226 - DNA, 20 bp, Artificial Sequence
  Description of Artificial Sequence: Synthetic oligonucleotide
  Target: LAMA2; (+) strand; PAM type: YTN; PAM sequence: TTG
attgagtgcttactatctcc

SEQ ID NO: 381227 - DNA, 20 bp, Artificial Sequence
  Description of Artificial Sequence: Synthetic oligonucleotide
  Target: LAMA2; (+) strand; PAM type: YTN; PAM sequence: TTG
agtgcttactatctcctgta

SEQ ID NO: 381228 - DNA, 20 bp, Artificial Sequence
  Description of Artificial Sequence: Synthetic oligonucleotide
  Target: LAMA2; (+) strand; PAM type: YTN; PAM sequence: CTT
actatctcctgtacacttcc

SEQ ID NO: 381229 - DNA, 20 bp, Artificial Sequence
  Description of Artificial Sequence: Synthetic oligonucleotide
  Target: LAMA2; (+) strand; PAM type: YTN; PAM sequence: TTA
ctatctcctgtacacttcct

SEQ ID NO: 381230 - DNA, 20 bp, Artificial Sequence
  Description of Artificial Sequence: Synthetic oligonucleotide
  Target: LAMA2; (+) strand; PAM type: YTN; PAM sequence: CTA
tctcctgtacacttcctaat

SEQ ID NO: 381231 - DNA, 20 bp, Artificial Sequence
  Description of Artificial Sequence: Synthetic oligonucleotide
  Target: LAMA2; (+) strand; PAM type: YTN; PAM sequence: CTC
ctgtacacttcctaatacag

SEQ ID NO: 381232 - DNA, 20 bp, Artificial Sequence
  Description of Artificial Sequence: Synthetic oligonucleotide
  Target: LAMA2; (+) strand; PAM type: YTN; PAM sequence: CTG
tacacttcctaatacagtta

SEQ ID NO: 381233 - DNA, 20 bp, Artificial Sequence
  Description of Artificial Sequence: Synthetic oligonucleotide
  Target: LAMA2; (+) strand; PAM type: YTN; PAM sequence: CTT
cctaatacagttacaccaac

SEQ ID NO: 381234 - DNA, 20 bp, Artificial Sequence
  Description of Artificial Sequence: Synthetic oligonucleotide
  Target: LAMA2; (+) strand; PAM type: YTN; PAM sequence: TTC
ctaatacagttacaccaaca

SEQ ID NO: 381235 - DNA, 20 bp, Artificial Sequence
  Description of Artificial Sequence: Synthetic oligonucleotide
  Target: LAMA2; (+) strand; PAM type: YTN; PAM sequence: CTA
atacagttacaccaacatca

SEQ ID NO: 381236 - DNA, 20 bp, Artificial Sequence
  Description of Artificial Sequence: Synthetic oligonucleotide
  Target: LAMA2; (+) strand; PAM type: YTN; PAM sequence: TTA
caccaacatcatcgactata

SEQ ID NO: 381237 - DNA, 20 bp, Artificial Sequence
  Description of Artificial Sequence: Synthetic oligonucleotide
  Target: LAMA2; (+) strand; PAM type: YTN; PAM sequence: CTA
taatttatgatccccatttt

SEQ ID NO: 381238 - DNA, 20 bp, Artificial Sequence
  Description of Artificial Sequence: Synthetic oligonucleotide
  Target: LAMA2; (+) strand; PAM type: YTN; PAM sequence: TTT
atgatccccattttacgggt

SEQ ID NO: 381239 - DNA, 20 bp, Artificial Sequence
  Description of Artificial Sequence: Synthetic oligonucleotide
  Target: LAMA2; (+) strand; PAM type: YTN; PAM sequence: TTA
tgatccccattttacgggtg

SEQ ID NO: 381240 - DNA, 20 bp, Artificial Sequence
  Description of Artificial Sequence: Synthetic oligonucleotide
  Target: LAMA2; (+) strand; PAM type: YTN; PAM sequence: TTT
tacgggtgagagaattgagg

SEQ ID NO: 381241 - DNA, 20 bp, Artificial Sequence
  Description of Artificial Sequence: Synthetic oligonucleotide
  Target: LAMA2; (+) strand; PAM type: YTN; PAM sequence: TTT
acgggtgagagaattgaggc

SEQ ID NO: 381242 - DNA, 20 bp, Artificial Sequence
  Description of Artificial Sequence: Synthetic oligonucleotide
  Target: LAMA2; (+) strand; PAM type: YTN; PAM sequence: TTA
cgggtgagagaattgaggcc

SEQ ID NO: 381243 - DNA, 20 bp, Artificial Sequence
  Description of Artificial Sequence: Synthetic oligonucleotide
  Target: LAMA2; (+) strand; PAM type: YTN; PAM sequence: TTG
aggcccatgatcacacacct

SEQ ID NO: 381244 - DNA, 20 bp, Artificial Sequence
  Description of Artificial Sequence: Synthetic oligonucleotide
  Target: LAMA2; (+) strand; PAM type: YTN; PAM sequence: CTA
cacagcaattcaaacctcaa

SEQ ID NO: 381245 - DNA, 20 bp, Artificial Sequence
  Description of Artificial Sequence: Synthetic oligonucleotide
  Target: LAMA2; (+) strand; PAM type: YTN; PAM sequence: TTC
aaacctcaatgaatctgttt

SEQ ID NO: 381246 - DNA, 20 bp, Artificial Sequence
  Description of Artificial Sequence: Synthetic oligonucleotide
  Target: LAMA2; (+) strand; PAM type: YTN; PAM sequence: CTC
aatgaatctgtttccaaaac

SEQ ID NO: 381247 - DNA, 20 bp, Artificial Sequence
  Description of Artificial Sequence: Synthetic oligonucleotide
  Target: LAMA2; (+) strand; PAM type: YTN; PAM sequence: CTG
tttccaaaacctaggtaaac

SEQ ID NO: 381248 - DNA, 20 bp, Artificial Sequence
  Description of Artificial Sequence: Synthetic oligonucleotide
  Target: LAMA2; (+) strand; PAM type: YTN; PAM sequence: TTT
ccaaaacctaggtaaacttg

SEQ ID NO: 381249 - DNA, 20 bp, Artificial Sequence
  Description of Artificial Sequence: Synthetic oligonucleotide
  Target: LAMA2; (+) strand; PAM type: YTN; PAM sequence: TTC
caaaacctaggtaaacttgt

SEQ ID NO: 381250 - DNA, 20 bp, Artificial Sequence
  Description of Artificial Sequence: Synthetic oligonucleotide
  Target: LAMA2; (+) strand; PAM type: YTN; PAM sequence: CTA
ggtaaacttgtactcaacta

SEQ ID NO: 381251 - DNA, 20 bp, Artificial Sequence
  Description of Artificial Sequence: Synthetic oligonucleotide
  Target: LAMA2; (+) strand; PAM type: YTN; PAM sequence: CTT
gtactcaactattatattat

SEQ ID NO: 381252 - DNA, 20 bp, Artificial Sequence
  Description of Artificial Sequence: Synthetic oligonucleotide
  Target: LAMA2; (+) strand; PAM type: YTN; PAM sequence: TTG
tactcaactattatattatg

SEQ ID NO: 381253 - DNA, 20 bp, Artificial Sequence
  Description of Artificial Sequence: Synthetic oligonucleotide
  Target: LAMA2; (+) strand; PAM type: YTN; PAM sequence: CTC
aactattatattatgcagtc

SEQ ID NO: 381254 - DNA, 20 bp, Artificial Sequence
  Description of Artificial Sequence: Synthetic oligonucleotide
  Target: LAMA2; (+) strand; PAM type: YTN; PAM sequence: CTA
ttatattatgcagtcatgtg

SEQ ID NO: 381255 - DNA, 20 bp, Artificial Sequence
  Description of Artificial Sequence: Synthetic oligonucleotide
  Target: LAMA2; (+) strand; PAM type: YTN; PAM sequence: TTA
tattatgcagtcatgtgctg

SEQ ID NO: 381256 - DNA, 20 bp, Artificial Sequence
  Description of Artificial Sequence: Synthetic oligonucleotide
  Target: LAMA2; (+) strand; PAM type: YTN; PAM sequence: TTA
tgcagtcatgtgctgcttaa

SEQ ID NO: 381257 - DNA, 20 bp, Artificial Sequence
  Description of Artificial Sequence: Synthetic oligonucleotide
  Target: LAMA2; (+) strand; PAM type: YTN; PAM sequence: CTG
cttaacgacagggatacgtt

SEQ ID NO: 381258 - DNA, 20 bp, Artificial Sequence
  Description of Artificial Sequence: Synthetic oligonucleotide
  Target: LAMA2; (+) strand; PAM type: YTN; PAM sequence: CTT
aacgacagggatacgttctg

SEQ ID NO: 381259 - DNA, 20 bp, Artificial Sequence
  Description of Artificial Sequence: Synthetic oligonucleotide
  Target: LAMA2; (+) strand; PAM type: YTN; PAM sequence: TTA
acgacagggatacgttctga

SEQ ID NO: 381260 - DNA, 20 bp, Artificial Sequence
  Description of Artificial Sequence: Synthetic oligonucleotide
  Target: LAMA2; (+) strand; PAM type: YTN; PAM sequence: TTC
tgagaaatgtgtcgttaggt

SEQ ID NO: 381261 - DNA, 20 bp, Artificial Sequence
  Description of Artificial Sequence: Synthetic oligonucleotide
  Target: LAMA2; (+) strand; PAM type: YTN; PAM sequence: CTG
agaaatgtgtcgttaggtga

SEQ ID NO: 381262 - DNA, 20 bp, Artificial Sequence
  Description of Artificial Sequence: Synthetic oligonucleotide
  Target: LAMA2; (+) strand; PAM type: YTN; PAM sequence: TTA
ggtgatctcctcattgtgca

SEQ ID NO: 381263 - DNA, 20 bp, Artificial Sequence
  Description of Artificial Sequence: Synthetic oligonucleotide
  Target: LAMA2; (+) strand; PAM type: YTN; PAM sequence: CTC
ctcattgtgcaaacatcata

SEQ ID NO: 381264 - DNA, 20 bp, Artificial Sequence
  Description of Artificial Sequence: Synthetic oligonucleotide
  Target: LAMA2; (+) strand; PAM type: YTN; PAM sequence: CTC
attgtgcaaacatcatagag

SEQ ID NO: 381265 - DNA, 20 bp, Artificial Sequence
  Description of Artificial Sequence: Synthetic oligonucleotide
  Target: LAMA2; (+) strand; PAM type: YTN; PAM sequence: TTG
tgcaaacatcatagagtgta

SEQ ID NO: 381266 - DNA, 20 bp, Artificial Sequence
  Description of Artificial Sequence: Synthetic oligonucleotide
  Target: LAMA2; (+) strand; PAM type: YTN; PAM sequence: CTA
aatggtgtagcctactacac

SEQ ID NO: 381267 - DNA, 20 bp, Artificial Sequence
  Description of Artificial Sequence: Synthetic oligonucleotide
  Target: LAMA2; (+) strand; PAM type: YTN; PAM sequence: CTA
ctacacacctaggctacatg

SEQ ID NO: 381268 - DNA, 20 bp, Artificial Sequence
  Description of Artificial Sequence: Synthetic oligonucleotide
  Target: LAMA2; (+) strand; PAM type: YTN; PAM sequence: CTA
cacacctaggctacatggga

SEQ ID NO: 381269 - DNA, 20 bp, Artificial Sequence
  Description of Artificial Sequence: Synthetic oligonucleotide
  Target: LAMA2; (+) strand; PAM type: YTN; PAM sequence: CTA
ggctacatgggatagcctgt

SEQ ID NO: 381270 - DNA, 20 bp, Artificial Sequence
  Description of Artificial Sequence: Synthetic oligonucleotide
  Target: LAMA2; (+) strand; PAM type: YTN; PAM sequence: CTA
catgggatagcctgttgctc

SEQ ID NO: 381271 - DNA, 20 bp, Artificial Sequence
  Description of Artificial Sequence: Synthetic oligonucleotide
  Target: LAMA2; (+) strand; PAM type: YTN; PAM sequence: CTG
ttgctcctaggctacagacc

SEQ ID NO: 381272 - DNA, 20 bp, Artificial Sequence
  Description of Artificial Sequence: Synthetic oligonucleotide
  Target: LAMA2; (+) strand; PAM type: YTN; PAM sequence: TTG
ctcctaggctacagacctgc

SEQ ID NO: 381273 - DNA, 20 bp, Artificial Sequence
  Description of Artificial Sequence: Synthetic oligonucleotide
  Target: LAMA2; (+) strand; PAM type: YTN; PAM sequence: CTC
ctaggctacagacctgcaca

SEQ ID NO: 381274 - DNA, 20 bp, Artificial Sequence
  Description of Artificial Sequence: Synthetic oligonucleotide
  Target: LAMA2; (+) strand; PAM type: YTN; PAM sequence: CTA
ggctacagacctgcacagca

SEQ ID NO: 381275 - DNA, 20 bp, Artificial Sequence
  Description of Artificial Sequence: Synthetic oligonucleotide
  Target: LAMA2; (+) strand; PAM type: YTN; PAM sequence: CTA
cagacctgcacagcatgtta

SEQ ID NO: 381276 - DNA, 20 bp, Artificial Sequence
  Description of Artificial Sequence: Synthetic oligonucleotide
  Target: LAMA2; (+) strand; PAM type: YTN; PAM sequence: CTG
cacagcatgttattggtact

SEQ ID NO: 381277 - DNA, 20 bp, Artificial Sequence
  Description of Artificial Sequence: Synthetic oligonucleotide
  Target: LAMA2; (+) strand; PAM type: YTN; PAM sequence: TTA
ttggtactgaatacagtagg

SEQ ID NO: 381278 - DNA, 20 bp, Artificial Sequence
  Description of Artificial Sequence: Synthetic oligonucleotide
  Target: LAMA2; (+) strand; PAM type: YTN; PAM sequence: TTG
gtactgaatacagtaggcaa

SEQ ID NO: 381279 - DNA, 20 bp, Artificial Sequence
  Description of Artificial Sequence: Synthetic oligonucleotide
  Target: LAMA2; (+) strand; PAM type: YTN; PAM sequence: CTG
aatacagtaggcaattgtaa

SEQ ID NO: 381280 - DNA, 20 bp, Artificial Sequence
  Description of Artificial Sequence: Synthetic oligonucleotide
  Target: LAMA2; (+) strand; PAM type: YTN; PAM sequence: TTG
taacataatggtaagtattt

SEQ ID NO: 381281 - DNA, 20 bp, Artificial Sequence
  Description of Artificial Sequence: Synthetic oligonucleotide
  Target: LAMA2; (+) strand; PAM type: YTN; PAM sequence: TTT
gcatatctaaacatatttaa

SEQ ID NO: 381282 - DNA, 20 bp, Artificial Sequence
  Description of Artificial Sequence: Synthetic oligonucleotide
  Target: LAMA2; (+) strand; PAM type: YTN; PAM sequence: TTG
catatctaaacatatttaaa

SEQ ID NO: 381283 - DNA, 20 bp, Artificial Sequence
  Description of Artificial Sequence: Synthetic oligonucleotide
  Target: LAMA2; (+) strand; PAM type: YTN; PAM sequence: CTA
aacatatttaaacatagcaa

SEQ ID NO: 381284 - DNA, 20 bp, Artificial Sequence
  Description of Artificial Sequence: Synthetic oligonucleotide
  Target: LAMA2; (+) strand; PAM type: YTN; PAM sequence: TTT
aaacatagcaaaggtacatt

SEQ ID NO: 381285 - DNA, 20 bp, Artificial Sequence
  Description of Artificial Sequence: Synthetic oligonucleotide
  Target: LAMA2; (+) strand; PAM type: YTN; PAM sequence: TTA
aacatagcaaaggtacatta

SEQ ID NO: 381286 - DNA, 20 bp, Artificial Sequence
  Description of Artificial Sequence: Synthetic oligonucleotide
  Target: LAMA2; (+) strand; PAM type: YTN; PAM sequence: TTA
aaaatatagttttataatct

SEQ ID NO: 381287 - DNA, 20 bp, Artificial Sequence
  Description of Artificial Sequence: Synthetic oligonucleotide
  Target: LAMA2; (+) strand; PAM type: YTN; PAM sequence: TTT
tataatcttatgggaccact

SEQ ID NO: 381288 - DNA, 20 bp, Artificial Sequence
  Description of Artificial Sequence: Synthetic oligonucleotide
  Target: LAMA2; (+) strand; PAM type: YTN; PAM sequence: TTT
ataatcttatgggaccactg

SEQ ID NO: 381289 - DNA, 20 bp, Artificial Sequence
  Description of Artificial Sequence: Synthetic oligonucleotide
  Target: LAMA2; (+) strand; PAM type: YTN; PAM sequence: TTA
taatcttatgggaccactgt

SEQ ID NO: 381290 - DNA, 20 bp, Artificial Sequence
  Description of Artificial Sequence: Synthetic oligonucleotide
  Target: LAMA2; (+) strand; PAM type: YTN; PAM sequence: CTT
atgggaccactgtcgtacac

SEQ ID NO: 381291 - DNA, 20 bp, Artificial Sequence
  Description of Artificial Sequence: Synthetic oligonucleotide
  Target: LAMA2; (+) strand; PAM type: YTN; PAM sequence: TTA
tgggaccactgtcgtacaca

SEQ ID NO: 381292 - DNA, 20 bp, Artificial Sequence
  Description of Artificial Sequence: Synthetic oligonucleotide
  Target: LAMA2; (+) strand; PAM type: YTN; PAM sequence: CTG
tcgtacacatggtcctatca

SEQ ID NO: 381293 - DNA, 20 bp, Artificial Sequence
  Description of Artificial Sequence: Synthetic oligonucleotide
  Target: LAMA2; (+) strand; PAM type: YTN; PAM sequence: CTA
tcattgaccaaaatgtcatt

SEQ ID NO: 381294 - DNA, 20 bp, Artificial Sequence
  Description of Artificial Sequence: Synthetic oligonucleotide
  Target: LAMA2; (+) strand; PAM type: YTN; PAM sequence: TTG
accaaaatgtcattatgcag

SEQ ID NO: 381295 - DNA, 20 bp, Artificial Sequence
  Description of Artificial Sequence: Synthetic oligonucleotide
  Target: LAMA2; (+) strand; PAM type: YTN; PAM sequence: TTA
tgcagcagcacatgactgta

SEQ ID NO: 381296 - DNA, 20 bp, Artificial Sequence
  Description of Artificial Sequence: Synthetic oligonucleotide
  Target: LAMA2; (+) strand; PAM type: YTN; PAM sequence: CTG
tacaatattcctacattcca

SEQ ID NO: 381297 - DNA, 20 bp, Artificial Sequence
  Description of Artificial Sequence: Synthetic oligonucleotide
  Target: LAMA2; (+) strand; PAM type: YTN; PAM sequence: TTC
ctacattccaggtgaggaaa

SEQ ID NO: 381298 - DNA, 20 bp, Artificial Sequence
  Description of Artificial Sequence: Synthetic oligonucleotide
  Target: LAMA2; (+) strand; PAM type: YTN; PAM sequence: CTA
cattccaggtgaggaaacca

SEQ ID NO: 381299 - DNA, 20 bp, Artificial Sequence
  Description of Artificial Sequence: Synthetic oligonucleotide
  Target: LAMA2; (+) strand; PAM type: YTN; PAM sequence: TTC
caggtgaggaaaccaaggca

SEQ ID NO: 381300 - DNA, 20 bp, Artificial Sequence
  Description of Artificial Sequence: Synthetic oligonucleotide
  Target: LAMA2; (+) strand; PAM type: YTN; PAM sequence: TTC
agaaccttactacatacaaa

SEQ ID NO: 381301 - DNA, 20 bp, Artificial Sequence
  Description of Artificial Sequence: Synthetic oligonucleotide
  Target: LAMA2; (+) strand; PAM type: YTN; PAM sequence: CTT
actacatacaaagtggtgaa

SEQ ID NO: 381302 - DNA, 20 bp, Artificial Sequence
  Description of Artificial Sequence: Synthetic oligonucleotide
  Target: LAMA2; (+) strand; PAM type: YTN; PAM sequence: TTA
ctacatacaaagtggtgaaa

SEQ ID NO: 381303 - DNA, 20 bp, Artificial Sequence
  Description of Artificial Sequence: Synthetic oligonucleotide
  Target: LAMA2; (+) strand; PAM type: YTN; PAM sequence: CTA
catacaaagtggtgaaacag

SEQ ID NO: 381304 - DNA, 20 bp, Artificial Sequence
  Description of Artificial Sequence: Synthetic oligonucleotide
  Target: LAMA2; (+) strand; PAM type: YTN; PAM sequence: TTA
aactcgggtctgcctgattg

SEQ ID NO: 381305 - DNA, 20 bp, Artificial Sequence
  Description of Artificial Sequence: Synthetic oligonucleotide
  Target: LAMA2; (+) strand; PAM type: YTN; PAM sequence: CTC
gggtctgcctgattgcaaaa

SEQ ID NO: 381306 - DNA, 20 bp, Artificial Sequence
  Description of Artificial Sequence: Synthetic oligonucleotide
  Target: LAMA2; (+) strand; PAM type: YTN; PAM sequence: CTG
cctgattgcaaaatccatgc

SEQ ID NO: 381307 - DNA, 20 bp, Artificial Sequence
  Description of Artificial Sequence: Synthetic oligonucleotide
  Target: LAMA2; (+) strand; PAM type: YTN; PAM sequence: CTG
attgcaaaatccatgcaaag

SEQ ID NO: 381308 - DNA, 20 bp, Artificial Sequence
  Description of Artificial Sequence: Synthetic oligonucleotide
  Target: LAMA2; (+) strand; PAM type: YTN; PAM sequence: TTG
caaaatccatgcaaagatac

SEQ ID NO: 381309 - DNA, 20 bp, Artificial Sequence
  Description of Artificial Sequence: Synthetic oligonucleotide
  Target: LAMA2; (+) strand; PAM type: YTN; PAM sequence: TTT
ttatgagctccagcacaagc

SEQ ID NO: 381310 - DNA, 20 bp, Artificial Sequence
  Description of Artificial Sequence: Synthetic oligonucleotide
  Target: LAMA2; (+) strand; PAM type: YTN; PAM sequence: TTT
tatgagctccagcacaagca

SEQ ID NO: 381311 - DNA, 20 bp, Artificial Sequence
  Description of Artificial Sequence: Synthetic oligonucleotide
  Target: LAMA2; (+) strand; PAM type: YTN; PAM sequence: TTT
atgagctccagcacaagcat

SEQ ID NO: 381312 - DNA, 20 bp, Artificial Sequence
  Description of Artificial Sequence: Synthetic oligonucleotide
  Target: LAMA2; (+) strand; PAM type: YTN; PAM sequence: TTA
tgagctccagcacaagcatc

SEQ ID NO: 381313 - DNA, 20 bp, Artificial Sequence
  Description of Artificial Sequence: Synthetic oligonucleotide
  Target: LAMA2; (+) strand; PAM type: YTN; PAM sequence: CTC
cagcacaagcatctattttt

SEQ ID NO: 381314 - DNA, 20 bp, Artificial Sequence
  Description of Artificial Sequence: Synthetic oligonucleotide
  Target: LAMA2; (+) strand; PAM type: YTN; PAM sequence: CTA
tttttattactaaactctga

SEQ ID NO: 381315 - DNA, 20 bp, Artificial Sequence
  Description of Artificial Sequence: Synthetic oligonucleotide
  Target: LAMA2; (+) strand; PAM type: YTN; PAM sequence: TTT
ttattactaaactctgaaga

SEQ ID NO: 381316 - DNA, 20 bp, Artificial Sequence
  Description of Artificial Sequence: Synthetic oligonucleotide
  Target: LAMA2; (+) strand; PAM type: YTN; PAM sequence: TTT
tattactaaactctgaagaa

SEQ ID NO: 381317 - DNA, 20 bp, Artificial Sequence
  Description of Artificial Sequence: Synthetic oligonucleotide
  Target: LAMA2; (+) strand; PAM type: YTN; PAM sequence: TTT
attactaaactctgaagaaa

SEQ ID NO: 381318 - DNA, 20 bp, Artificial Sequence
  Description of Artificial Sequence: Synthetic oligonucleotide
  Target: LAMA2; (+) strand; PAM type: YTN; PAM sequence: TTA
ttactaaactctgaagaaag

SEQ ID NO: 381319 - DNA, 20 bp, Artificial Sequence
  Description of Artificial Sequence: Synthetic oligonucleotide
  Target: LAMA2; (+) strand; PAM type: YTN; PAM sequence: TTA
ctaaactctgaagaaagaaa

SEQ ID NO: 381320 - DNA, 20 bp, Artificial Sequence
  Description of Artificial Sequence: Synthetic oligonucleotide
  Target: LAMA2; (+) strand; PAM type: YTN; PAM sequence: CTA
aactctgaagaaagaaagga

SEQ ID NO: 381321 - DNA, 20 bp, Artificial Sequence
  Description of Artificial Sequence: Synthetic oligonucleotide
  Target: LAMA2; (+) strand; PAM type: YTN; PAM sequence: CTC
tgaagaaagaaaggagcgca

SEQ ID NO: 381322 - DNA, 20 bp, Artificial Sequence
  Description of Artificial Sequence: Synthetic oligonucleotide
  Target: LAMA2; (+) strand; PAM type: YTN; PAM sequence: CTG
aagaaagaaaggagcgcagt

SEQ ID NO: 381323 - DNA, 20 bp, Artificial Sequence
  Description of Artificial Sequence: Synthetic oligonucleotide
  Target: LAMA2; (+) strand; PAM type: YTN; PAM sequence: CTG
agcctaggataggataggtc

SEQ ID NO: 381324 - DNA, 20 bp, Artificial Sequence
  Description of Artificial Sequence: Synthetic oligonucleotide
  Target: LAMA2; (+) strand; PAM type: YTN; PAM sequence: CTA
ggataggataggtctctaca

SEQ ID NO: 381325 - DNA, 20 bp, Artificial Sequence
  Description of Artificial Sequence: Synthetic oligonucleotide
  Target: LAMA2; (+) strand; PAM type: YTN; PAM sequence: CTC
tacagtctgcttcattctct

SEQ ID NO: 381326 - DNA, 20 bp, Artificial Sequence
  Description of Artificial Sequence: Synthetic oligonucleotide
  Target: LAMA2; (+) strand; PAM type: YTN; PAM sequence: CTA
cagtctgcttcattctctcc

SEQ ID NO: 381327 - DNA, 20 bp, Artificial Sequence
  Description of Artificial Sequence: Synthetic oligonucleotide
  Target: LAMA2; (+) strand; PAM type: YTN; PAM sequence: CTG
cttcattctctcctctctac

SEQ ID NO: 381328 - DNA, 20 bp, Artificial Sequence
  Description of Artificial Sequence: Synthetic oligonucleotide
  Target: LAMA2; (+) strand; PAM type: YTN; PAM sequence: CTT
cattctctcctctctaccct

SEQ ID NO: 381329 - DNA, 20 bp, Artificial Sequence
  Description of Artificial Sequence: Synthetic oligonucleotide
  Target: LAMA2; (+) strand; PAM type: YTN; PAM sequence: TTC
attctctcctctctaccctc

SEQ ID NO: 381330 - DNA, 20 bp, Artificial Sequence
  Description of Artificial Sequence: Synthetic oligonucleotide
  Target: LAMA2; (+) strand; PAM type: YTN; PAM sequence: TTC
tctcctctctaccctcccac

SEQ ID NO: 381331 - DNA, 20 bp, Artificial Sequence
  Description of Artificial Sequence: Synthetic oligonucleotide
  Target: LAMA2; (+) strand; PAM type: YTN; PAM sequence: CTC
tcctctctaccctcccacat

SEQ ID NO: 381332 - DNA, 20 bp, Artificial Sequence
  Description of Artificial Sequence: Synthetic oligonucleotide
  Target: LAMA2; (+) strand; PAM type: YTN; PAM sequence: CTC
ctctctaccctcccacattt

SEQ ID NO: 381333 - DNA, 20 bp, Artificial Sequence
  Description of Artificial Sequence: Synthetic oligonucleotide
  Target: LAMA2; (+) strand; PAM type: YTN; PAM sequence: CTC
tctaccctcccacatttttg

SEQ ID NO: 381334 - DNA, 20 bp, Artificial Sequence
  Description of Artificial Sequence: Synthetic oligonucleotide
  Target: LAMA2; (+) strand; PAM type: YTN; PAM sequence: CTC
taccctcccacatttttgtg

SEQ ID NO: 381335 - DNA, 20 bp, Artificial Sequence
  Description of Artificial Sequence: Synthetic oligonucleotide
  Target: LAMA2; (+) strand; PAM type: YTN; PAM sequence: CTA
ccctcccacatttttgtgta

SEQ ID NO: 381336 - DNA, 20 bp, Artificial Sequence
  Description of Artificial Sequence: Synthetic oligonucleotide
  Target: LAMA2; (+) strand; PAM type: YTN; PAM sequence: CTC
ccacatttttgtgtaaattt

SEQ ID NO: 381337 - DNA, 20 bp, Artificial Sequence
  Description of Artificial Sequence: Synthetic oligonucleotide
  Target: LAMA2; (+) strand; PAM type: YTN; PAM sequence: TTT
ttgtgtaaatttaatctaat

SEQ ID NO: 381338 - DNA, 20 bp, Artificial Sequence
  Description of Artificial Sequence: Synthetic oligonucleotide
  Target: LAMA2; (+) strand; PAM type: YTN; PAM sequence: TTT
tgtgtaaatttaatctaatt

SEQ ID NO: 381339 - DNA, 20 bp, Artificial Sequence
  Description of Artificial Sequence: Synthetic oligonucleotide
  Target: LAMA2; (+) strand; PAM type: YTN; PAM sequence: TTT
gtgtaaatttaatctaattt

SEQ ID NO: 381340 - DNA, 20 bp, Artificial Sequence
  Description of Artificial Sequence: Synthetic oligonucleotide
  Target: LAMA2; (+) strand; PAM type: YTN; PAM sequence: TTG
tgtaaatttaatctaatttt

SEQ ID NO: 381341 - DNA, 20 bp, Artificial Sequence
  Description of Artificial Sequence: Synthetic oligonucleotide
  Target: LAMA2; (+) strand; PAM type: YTN; PAM sequence: TTT
aatctaattttttgatgaaa

SEQ ID NO: 381342 - DNA, 20 bp, Artificial Sequence
  Description of Artificial Sequence: Synthetic oligonucleotide
  Target: LAMA2; (+) strand; PAM type: YTN; PAM sequence: TTA
atctaattttttgatgaaac

SEQ ID NO: 381343 - DNA, 20 bp, Artificial Sequence
  Description of Artificial Sequence: Synthetic oligonucleotide
  Target: LAMA2; (+) strand; PAM type: YTN; PAM sequence: CTA
attttttgatgaaacaatat

SEQ ID NO: 381344 - DNA, 20 bp, Artificial Sequence
  Description of Artificial Sequence: Synthetic oligonucleotide
  Target: LAMA2; (+) strand; PAM type: YTN; PAM sequence: TTT
tttgatgaaacaatatatta

SEQ ID NO: 381345 - DNA, 20 bp, Artificial Sequence
  Description of Artificial Sequence: Synthetic oligonucleotide
  Target: LAMA2; (+) strand; PAM type: YTN; PAM sequence: TTT
ttgatgaaacaatatattat

SEQ ID NO: 381346 - DNA, 20 bp, Artificial Sequence
  Description of Artificial Sequence: Synthetic oligonucleotide
  Target: LAMA2; (+) strand; PAM type: YTN; PAM sequence: TTT
tgatgaaacaatatattatg

SEQ ID NO: 381347 - DNA, 20 bp, Artificial Sequence
  Description of Artificial Sequence: Synthetic oligonucleotide
  Target: LAMA2; (+) strand; PAM type: YTN; PAM sequence: TTT
gatgaaacaatatattatga

SEQ ID NO: 381348 - DNA, 20 bp, Artificial Sequence
  Description of Artificial Sequence: Synthetic oligonucleotide
  Target: LAMA2; (+) strand; PAM type: YTN; PAM sequence: TTG
atgaaacaatatattatgaa

SEQ ID NO: 381349 - DNA, 20 bp, Artificial Sequence
  Description of Artificial Sequence: Synthetic oligonucleotide
  Target: LAMA2; (+) strand; PAM type: YTN; PAM sequence: TTA
tgaaaataaattaaagatag

SEQ ID NO: 381350 - DNA, 20 bp, Artificial Sequence
  Description of Artificial Sequence: Synthetic oligonucleotide
  Target: LAMA2; (+) strand; PAM type: YTN; PAM sequence: TTA
aagatagacgagagcagaag

SEQ ID NO: 381351 - DNA, 20 bp, Artificial Sequence
  Description of Artificial Sequence: Synthetic oligonucleotide
  Target: LAMA2; (+) strand; PAM type: YTN; PAM sequence: TTG
agccatgaataatttcaaca

SEQ ID NO: 381352 - DNA, 20 bp, Artificial Sequence
  Description of Artificial Sequence: Synthetic oligonucleotide
  Target: LAMA2; (+) strand; PAM type: YTN; PAM sequence: TTT
caacagtggggaagagaact

SEQ ID NO: 381353 - DNA, 20 bp, Artificial Sequence
  Description of Artificial Sequence: Synthetic oligonucleotide
  Target: LAMA2; (+) strand; PAM type: YTN; PAM sequence: TTC
aacagtggggaagagaactt

SEQ ID NO: 381354 - DNA, 20 bp, Artificial Sequence
  Description of Artificial Sequence: Synthetic oligonucleotide
  Target: LAMA2; (+) strand; PAM type: YTN; PAM sequence: CTT
tggaaaagtttaaattagag

SEQ ID NO: 381355 - DNA, 20 bp, Artificial Sequence
  Description of Artificial Sequence: Synthetic oligonucleotide
  Target: LAMA2; (+) strand; PAM type: YTN; PAM sequence: TTT
ggaaaagtttaaattagagt

SEQ ID NO: 381356 - DNA, 20 bp, Artificial Sequence
  Description of Artificial Sequence: Synthetic oligonucleotide
  Target: LAMA2; (+) strand; PAM type: YTN; PAM sequence: TTG
gaaaagtttaaattagagta

SEQ ID NO: 381357 - DNA, 20 bp, Artificial Sequence
  Description of Artificial Sequence: Synthetic oligonucleotide
  Target: LAMA2; (+) strand; PAM type: YTN; PAM sequence: TTT
aaattagagtagaaatgggt

SEQ ID NO: 381358 - DNA, 20 bp, Artificial Sequence
  Description of Artificial Sequence: Synthetic oligonucleotide
  Target: LAMA2; (+) strand; PAM type: YTN; PAM sequence: TTA
aattagagtagaaatgggta

SEQ ID NO: 381359 - DNA, 20 bp, Artificial Sequence
  Description of Artificial Sequence: Synthetic oligonucleotide
  Target: LAMA2; (+) strand; PAM type: YTN; PAM sequence: TTA
gagtagaaatgggtaagagg

SEQ ID NO: 381360 - DNA, 20 bp, Artificial Sequence
  Description of Artificial Sequence: Synthetic oligonucleotide
  Target: LAMA2; (+) strand; PAM type: YTN; PAM sequence: CTC
aggaaagtatttatttgctt

SEQ ID NO: 381361 - DNA, 20 bp, Artificial Sequence
  Description of Artificial Sequence: Synthetic oligonucleotide
  Target: LAMA2; (+) strand; PAM type: YTN; PAM sequence: TTT
atttgcttttctttaattcc

SEQ ID NO: 381362 - DNA, 20 bp, Artificial Sequence
  Description of Artificial Sequence: Synthetic oligonucleotide
  Target: LAMA2; (+) strand; PAM type: YTN; PAM sequence: TTA
tttgcttttctttaattccc

SEQ ID NO: 381363 - DNA, 20 bp, Artificial Sequence
  Description of Artificial Sequence: Synthetic oligonucleotide
  Target: LAMA2; (+) strand; PAM type: YTN; PAM sequence: TTT
gcttttctttaattccccat

SEQ ID NO: 381364 - DNA, 20 bp, Artificial Sequence
  Description of Artificial Sequence: Synthetic oligonucleotide
  Target: LAMA2; (+) strand; PAM type: YTN; PAM sequence: TTG
cttttctttaattccccatt

SEQ ID NO: 381365 - DNA, 20 bp, Artificial Sequence
  Description of Artificial Sequence: Synthetic oligonucleotide
  Target: LAMA2; (+) strand; PAM type: YTN; PAM sequence: CTT
ttctttaattccccattgtg

SEQ ID NO: 381366 - DNA, 20 bp, Artificial Sequence
  Description of Artificial Sequence: Synthetic oligonucleotide
  Target: LAMA2; (+) strand; PAM type: YTN; PAM sequence: TTT
tctttaattccccattgtgt

SEQ ID NO: 381367 - DNA, 20 bp, Artificial Sequence
  Description of Artificial Sequence: Synthetic oligonucleotide
  Target: LAMA2; (+) strand; PAM type: YTN; PAM sequence: TTT
ctttaattccccattgtgtt

SEQ ID NO: 381368 - DNA, 20 bp, Artificial Sequence
  Description of Artificial Sequence: Synthetic oligonucleotide
  Target: LAMA2; (+) strand; PAM type: YTN; PAM sequence: TTC
tttaattccccattgtgttc

SEQ ID NO: 381369 - DNA, 20 bp, Artificial Sequence
  Description of Artificial Sequence: Synthetic oligonucleotide
  Target: LAMA2; (+) strand; PAM type: YTN; PAM sequence: CTT
taattccccattgtgttcca

SEQ ID NO: 381370 - DNA, 20 bp, Artificial Sequence
  Description of Artificial Sequence: Synthetic oligonucleotide
  Target: LAMA2; (+) strand; PAM type: YTN; PAM sequence: TTT
aattccccattgtgttccag

SEQ ID NO: 381371 - DNA, 20 bp, Artificial Sequence
  Description of Artificial Sequence: Synthetic oligonucleotide
  Target: LAMA2; (+) strand; PAM type: YTN; PAM sequence: TTA
attccccattgtgttccaga

SEQ ID NO: 381372 - DNA, 20 bp, Artificial Sequence
  Description of Artificial Sequence: Synthetic oligonucleotide
  Target: LAMA2; (+) strand; PAM type: YTN; PAM sequence: TTC
cccattgtgttccagaaagg

SEQ ID NO: 381373 - DNA, 20 bp, Artificial Sequence
  Description of Artificial Sequence: Synthetic oligonucleotide
  Target: LAMA2; (+) strand; PAM type: YTN; PAM sequence: TTG
tgttccagaaaggattttag

SEQ ID NO: 381374 - DNA, 20 bp, Artificial Sequence
  Description of Artificial Sequence: Synthetic oligonucleotide
  Target: LAMA2; (+) strand; PAM type: YTN; PAM sequence: TTC
cagaaaggattttagatggg

SEQ ID NO: 381375 - DNA, 20 bp, Artificial Sequence
  Description of Artificial Sequence: Synthetic oligonucleotide
  Target: LAMA2; (+) strand; PAM type: YTN; PAM sequence: TTT
tagatgggactcaaaaagta

SEQ ID NO: 381376 - DNA, 20 bp, Artificial Sequence
  Description of Artificial Sequence: Synthetic oligonucleotide
  Target: LAMA2; (+) strand; PAM type: YTN; PAM sequence: TTT
agatgggactcaaaaagtaa

SEQ ID NO: 381377 - DNA, 20 bp, Artificial Sequence
  Description of Artificial Sequence: Synthetic oligonucleotide
  Target: LAMA2; (+) strand; PAM type: YTN; PAM sequence: TTA
gatgggactcaaaaagtaac

SEQ ID NO: 381378 - DNA, 20 bp, Artificial Sequence
  Description of Artificial Sequence: Synthetic oligonucleotide
  Target: LAMA2; (+) strand; PAM type: YTN; PAM sequence: CTC
aaaaagtaacttttttgctt

SEQ ID NO: 381379 - DNA, 20 bp, Artificial Sequence
  Description of Artificial Sequence: Synthetic oligonucleotide
  Target: LAMA2; (+) strand; PAM type: YTN; PAM sequence: CTT
ttttgcttccaattccaaca

SEQ ID NO: 381380 - DNA, 20 bp, Artificial Sequence
  Description of Artificial Sequence: Synthetic oligonucleotide
  Target: LAMA2; (+) strand; PAM type: YTN; PAM sequence: TTT
tttgcttccaattccaacat

SEQ ID NO: 381381 - DNA, 20 bp, Artificial Sequence
  Description of Artificial Sequence: Synthetic oligonucleotide
  Target: LAMA2; (+) strand; PAM type: YTN; PAM sequence: TTT
ttgcttccaattccaacata

SEQ ID NO: 381382 - DNA, 20 bp, Artificial Sequence
  Description of Artificial Sequence: Synthetic oligonucleotide
  Target: LAMA2; (+) strand; PAM type: YTN; PAM sequence: TTT
tgcttccaattccaacataa

SEQ ID NO: 381383 - DNA, 20 bp, Artificial Sequence
  Description of Artificial Sequence: Synthetic oligonucleotide
  Target: LAMA2; (+) strand; PAM type: YTN; PAM sequence: TTT
gcttccaattccaacataat

SEQ ID NO: 381384 - DNA, 20 bp, Artificial Sequence
  Description of Artificial Sequence: Synthetic oligonucleotide
  Target: LAMA2; (+) strand; PAM type: YTN; PAM sequence: TTG
cttccaattccaacataatc

SEQ ID NO: 381385 - DNA, 20 bp, Artificial Sequence
  Description of Artificial Sequence: Synthetic oligonucleotide
  Target: LAMA2; (+) strand; PAM type: YTN; PAM sequence: CTT
ccaattccaacataatcatt

SEQ ID NO: 381386 - DNA, 20 bp, Artificial Sequence
  Description of Artificial Sequence: Synthetic oligonucleotide
  Target: LAMA2; (+) strand; PAM type: YTN; PAM sequence: TTC
caattccaacataatcattc

SEQ ID NO: 381387 - DNA, 20 bp, Artificial Sequence
  Description of Artificial Sequence: Synthetic oligonucleotide
  Target: LAMA2; (+) strand; PAM type: YTN; PAM sequence: TTC
caacataatcattctcacaa

SEQ ID NO: 381388 - DNA, 20 bp, Artificial Sequence
  Description of Artificial Sequence: Synthetic oligonucleotide
  Target: LAMA2; (+) strand; PAM type: YTN; PAM sequence: TTC
tcacaaacttttgtctcagt

SEQ ID NO: 381389 - DNA, 20 bp, Artificial Sequence
  Description of Artificial Sequence: Synthetic oligonucleotide
  Target: LAMA2; (+) strand; PAM type: YTN; PAM sequence: CTC
acaaacttttgtctcagttc

SEQ ID NO: 381390 - DNA, 20 bp, Artificial Sequence
  Description of Artificial Sequence: Synthetic oligonucleotide
  Target: LAMA2; (+) strand; PAM type: YTN; PAM sequence: CTT
ttgtctcagttcaccaagag

SEQ ID NO: 381391 - DNA, 20 bp, Artificial Sequence
  Description of Artificial Sequence: Synthetic oligonucleotide
  Target: LAMA2; (+) strand; PAM type: YTN; PAM sequence: TTT
tgtctcagttcaccaagagg

SEQ ID NO: 381392 - DNA, 20 bp, Artificial Sequence
  Description of Artificial Sequence: Synthetic oligonucleotide
  Target: LAMA2; (+) strand; PAM type: YTN; PAM sequence: TTT
gtctcagttcaccaagagga

SEQ ID NO: 381393 - DNA, 20 bp, Artificial Sequence
  Description of Artificial Sequence: Synthetic oligonucleotide
  Target: LAMA2; (+) strand; PAM type: YTN; PAM sequence: TTG
tctcagttcaccaagaggaa

SEQ ID NO: 381394 - DNA, 20 bp, Artificial Sequence
  Description of Artificial Sequence: Synthetic oligonucleotide
  Target: LAMA2; (+) strand; PAM type: YTN; PAM sequence: CTC
agttcaccaagaggaaaaac

SEQ ID NO: 381395 - DNA, 20 bp, Artificial Sequence
  Description of Artificial Sequence: Synthetic oligonucleotide
  Target: LAMA2; (+) strand; PAM type: YTN; PAM sequence: TTC
accaagaggaaaaacattca

SEQ ID NO: 381396 - DNA, 20 bp, Artificial Sequence
  Description of Artificial Sequence: Synthetic oligonucleotide
  Target: LAMA2; (+) strand; PAM type: YTN; PAM sequence: TTC
aatattgacaaacaccctaa

SEQ ID NO: 381397 - DNA, 20 bp, Artificial Sequence
  Description of Artificial Sequence: Synthetic oligonucleotide
  Target: LAMA2; (+) strand; PAM type: YTN; PAM sequence: TTG
acaaacaccctaaaaattat

SEQ ID NO: 381398 - DNA, 20 bp, Artificial Sequence
  Description of Artificial Sequence: Synthetic oligonucleotide
  Target: LAMA2; (+) strand; PAM type: YTN; PAM sequence: CTA
aaaattatttaaattgaaag

SEQ ID NO: 381399 - DNA, 20 bp, Artificial Sequence
  Description of Artificial Sequence: Synthetic oligonucleotide
  Target: LAMA2; (+) strand; PAM type: YTN; PAM sequence: TTA
tttaaattgaaagaatagtg

SEQ ID NO: 381400 - DNA, 20 bp, Artificial Sequence
  Description of Artificial Sequence: Synthetic oligonucleotide
  Target: LAMA2; (+) strand; PAM type: YTN; PAM sequence: TTT
aaattgaaagaatagtgcaa

SEQ ID NO: 381401 - DNA, 20 bp, Artificial Sequence
  Description of Artificial Sequence: Synthetic oligonucleotide
  Target: LAMA2; (+) strand; PAM type: YTN; PAM sequence: TTA
aattgaaagaatagtgcaaa

SEQ ID NO: 381402 - DNA, 20 bp, Artificial Sequence
  Description of Artificial Sequence: Synthetic oligonucleotide
  Target: LAMA2; (+) strand; PAM type: YTN; PAM sequence: TTG
aaagaatagtgcaaaataat

SEQ ID NO: 381403 - DNA, 20 bp, Artificial Sequence
  Description of Artificial Sequence: Synthetic oligonucleotide
  Target: LAMA2; (+) strand; PAM type: YTN; PAM sequence: TTT
ctgtttttttttttaaaaaa

SEQ ID NO: 381404 - DNA, 20 bp, Artificial Sequence
  Description of Artificial Sequence: Synthetic oligonucleotide
  Target: LAMA2; (+) strand; PAM type: YTN; PAM sequence: TTC
tgtttttttttttaaaaaaa

SEQ ID NO: 381405 - DNA, 20 bp, Artificial Sequence
  Description of Artificial Sequence: Synthetic oligonucleotide
  Target: LAMA2; (+) strand; PAM type: YTN; PAM sequence: CTG
tttttttttttaaaaaaaac

SEQ ID NO: 381406 - DNA, 20 bp, Artificial Sequence
  Description of Artificial Sequence: Synthetic oligonucleotide
  Target: LAMA2; (+) strand; PAM type: YTN; PAM sequence: TTT
ttttttttaaaaaaaacagc

SEQ ID NO: 381407 - DNA, 20 bp, Artificial Sequence
  Description of Artificial Sequence: Synthetic oligonucleotide
  Target: LAMA2; (+) strand; PAM type: YTN; PAM sequence: TTT
tttttttaaaaaaaacagca

SEQ ID NO: 381408 - DNA, 20 bp, Artificial Sequence
  Description of Artificial Sequence: Synthetic oligonucleotide
  Target: LAMA2; (+) strand; PAM type: YTN; PAM sequence: TTT
ttttttaaaaaaaacagcac

SEQ ID NO: 381409 - DNA, 20 bp, Artificial Sequence
  Description of Artificial Sequence: Synthetic oligonucleotide
  Target: LAMA2; (+) strand; PAM type: YTN; PAM sequence: TTT
tttttaaaaaaaacagcacg

SEQ ID NO: 381410 - DNA, 20 bp, Artificial Sequence
  Description of Artificial Sequence: Synthetic oligonucleotide
  Target: LAMA2; (+) strand; PAM type: YTN; PAM sequence: TTT
ttttaaaaaaaacagcacgt

SEQ ID NO: 381411 - DNA, 20 bp, Artificial Sequence
  Description of Artificial Sequence: Synthetic oligonucleotide
  Target: LAMA2; (+) strand; PAM type: YTN; PAM sequence: TTT
tttaaaaaaaacagcacgtt

SEQ ID NO: 381412 - DNA, 20 bp, Artificial Sequence
  Description of Artificial Sequence: Synthetic oligonucleotide
  Target: LAMA2; (+) strand; PAM type: YTN; PAM sequence: TTT
ttaaaaaaaacagcacgttt

SEQ ID NO: 381413 - DNA, 20 bp, Artificial Sequence
  Description of Artificial Sequence: Synthetic oligonucleotide
  Target: LAMA2; (+) strand; PAM type: YTN; PAM sequence: TTT
taaaaaaaacagcacgtttt

SEQ ID NO: 381414 - DNA, 20 bp, Artificial Sequence
  Description of Artificial Sequence: Synthetic oligonucleotide
  Target: LAMA2; (+) strand; PAM type: YTN; PAM sequence: TTT
aaaaaaaacagcacgtttta

SEQ ID NO: 381415 - DNA, 20 bp, Artificial Sequence
  Description of Artificial Sequence: Synthetic oligonucleotide
  Target: LAMA2; (+) strand; PAM type: YTN; PAM sequence: TTA
aaaaaaacagcacgttttaa

SEQ ID NO: 381416 - DNA, 20 bp, Artificial Sequence
  Description of Artificial Sequence: Synthetic oligonucleotide
  Target: LAMA2; (+) strand; PAM type: YTN; PAM sequence: TTT
taagtttctaatctttgcgt

SEQ ID NO: 381417 - DNA, 20 bp, Artificial Sequence
  Description of Artificial Sequence: Synthetic oligonucleotide
  Target: LAMA2; (+) strand; PAM type: YTN; PAM sequence: TTT
aagtttctaatctttgcgtt

SEQ ID NO: 381418 - DNA, 20 bp, Artificial Sequence
  Description of Artificial Sequence: Synthetic oligonucleotide
  Target: LAMA2; (+) strand; PAM type: YTN; PAM sequence: TTA
agtttctaatctttgcgttg

SEQ ID NO: 381419 - DNA, 20 bp, Artificial Sequence
  Description of Artificial Sequence: Synthetic oligonucleotide
  Target: LAMA2; (+) strand; PAM type: YTN; PAM sequence: TTT
ctaatctttgcgttgtcaaa

SEQ ID NO: 381420 - DNA, 20 bp, Artificial Sequence
  Description of Artificial Sequence: Synthetic oligonucleotide
  Target: LAMA2; (+) strand; PAM type: YTN; PAM sequence: TTC
taatctttgcgttgtcaaat

SEQ ID NO: 381421 - DNA, 20 bp, Artificial Sequence
  Description of Artificial Sequence: Synthetic oligonucleotide
  Target: LAMA2; (+) strand; PAM type: YTN; PAM sequence: CTA
atctttgcgttgtcaaatac

SEQ ID NO: 381422 - DNA, 20 bp, Artificial Sequence
  Description of Artificial Sequence: Synthetic oligonucleotide
  Target: LAMA2; (+) strand; PAM type: YTN; PAM sequence: CTT
tgcgttgtcaaatactctct

SEQ ID NO: 381423 - DNA, 20 bp, Artificial Sequence
  Description of Artificial Sequence: Synthetic oligonucleotide
  Target: LAMA2; (+) strand; PAM type: YTN; PAM sequence: TTT
gcgttgtcaaatactctctc

SEQ ID NO: 381424 - DNA, 20 bp, Artificial Sequence
  Description of Artificial Sequence: Synthetic oligonucleotide
  Target: LAMA2; (+) strand; PAM type: YTN; PAM sequence: TTG
cgttgtcaaatactctctct

SEQ ID NO: 381425 - DNA, 20 bp, Artificial Sequence
  Description of Artificial Sequence: Synthetic oligonucleotide
  Target: LAMA2; (+) strand; PAM type: YTN; PAM sequence: TTG
tcaaatactctctctctctc

SEQ ID NO: 381426 - DNA, 20 bp, Artificial Sequence
  Description of Artificial Sequence: Synthetic oligonucleotide
  Target: LAMA2; (+) strand; PAM type: YTN; PAM sequence: CTC
tctctctctcttttgctacc

SEQ ID NO: 381427 - DNA, 20 bp, Artificial Sequence
  Description of Artificial Sequence: Synthetic oligonucleotide
  Target: LAMA2; (+) strand; PAM type: YTN; PAM sequence: CTC
tctctctcttttgctacctc

SEQ ID NO: 381428 - DNA, 20 bp, Artificial Sequence
  Description of Artificial Sequence: Synthetic oligonucleotide
  Target: LAMA2; (+) strand; PAM type: YTN; PAM sequence: CTC
tctctcttttgctacctcat

SEQ ID NO: 381429 - DNA, 20 bp, Artificial Sequence
  Description of Artificial Sequence: Synthetic oligonucleotide
  Target: LAMA2; (+) strand; PAM type: YTN; PAM sequence: CTC
tctcttttgctacctcatag

SEQ ID NO: 381430 - DNA, 20 bp, Artificial Sequence
  Description of Artificial Sequence: Synthetic oligonucleotide
  Target: LAMA2; (+) strand; PAM type: YTN; PAM sequence: CTC
tcttttgctacctcatagaa

SEQ ID NO: 381431 - DNA, 20 bp, Artificial Sequence
  Description of Artificial Sequence: Synthetic oligonucleotide
  Target: LAMA2; (+) strand; PAM type: YTN; PAM sequence: CTC
ttttgctacctcatagaaat

SEQ ID NO: 381432 - DNA, 20 bp, Artificial Sequence
  Description of Artificial Sequence: Synthetic oligonucleotide
  Target: LAMA2; (+) strand; PAM type: YTN; PAM sequence: CTT
ttgctacctcatagaaattt

SEQ ID NO: 381433 - DNA, 20 bp, Artificial Sequence
  Description of Artificial Sequence: Synthetic oligonucleotide
  Target: LAMA2; (+) strand; PAM type: YTN; PAM sequence: TTT
tgctacctcatagaaattta

SEQ ID NO: 381434 - DNA, 20 bp, Artificial Sequence
  Description of Artificial Sequence: Synthetic oligonucleotide
  Target: LAMA2; (+) strand; PAM type: YTN; PAM sequence: TTT
gctacctcatagaaatttaa

SEQ ID NO: 381435 - DNA, 20 bp, Artificial Sequence
  Description of Artificial Sequence: Synthetic oligonucleotide
  Target: LAMA2; (+) strand; PAM type: YTN; PAM sequence: TTG
ctacctcatagaaatttaat

SEQ ID NO: 381436 - DNA, 20 bp, Artificial Sequence
  Description of Artificial Sequence: Synthetic oligonucleotide
  Target: LAMA2; (+) strand; PAM type: YTN; PAM sequence: CTA
cctcatagaaatttaatcca

SEQ ID NO: 381437 - DNA, 20 bp, Artificial Sequence
  Description of Artificial Sequence: Synthetic oligonucleotide
  Target: LAMA2; (+) strand; PAM type: YTN; PAM sequence: CTC
atagaaatttaatccatcag

SEQ ID NO: 381438 - DNA, 20 bp, Artificial Sequence
  Description of Artificial Sequence: Synthetic oligonucleotide
  Target: LAMA2; (+) strand; PAM type: YTN; PAM sequence: TTT
aatccatcaggatacgaaat

SEQ ID NO: 381439 - DNA, 20 bp, Artificial Sequence
  Description of Artificial Sequence: Synthetic oligonucleotide
  Target: LAMA2; (+) strand; PAM type: YTN; PAM sequence: TTA
atccatcaggatacgaaata

SEQ ID NO: 381440 - DNA, 20 bp, Artificial Sequence
  Description of Artificial Sequence: Synthetic oligonucleotide
  Target: LAMA2; (+) strand; PAM type: YTN; PAM sequence: CTA
atctaaaatgttaaaactga

SEQ ID NO: 381441 - DNA, 20 bp, Artificial Sequence
  Description of Artificial Sequence: Synthetic oligonucleotide
  Target: LAMA2; (+) strand; PAM type: YTN; PAM sequence: CTA
aaatgttaaaactgaaagac

SEQ ID NO: 381442 - DNA, 20 bp, Artificial Sequence
  Description of Artificial Sequence: Synthetic oligonucleotide
  Target: LAMA2; (+) strand; PAM type: YTN; PAM sequence: TTA
aaactgaaagacactttaga

SEQ ID NO: 381443 - DNA, 20 bp, Artificial Sequence
  Description of Artificial Sequence: Synthetic oligonucleotide
  Target: LAMA2; (+) strand; PAM type: YTN; PAM sequence: CTG
aaagacactttagaagtcat

SEQ ID NO: 381444 - DNA, 20 bp, Artificial Sequence
  Description of Artificial Sequence: Synthetic oligonucleotide
  Target: LAMA2; (+) strand; PAM type: YTN; PAM sequence: CTT
tagaagtcatctgagttaac

SEQ ID NO: 381445 - DNA, 20 bp, Artificial Sequence
  Description of Artificial Sequence: Synthetic oligonucleotide
  Target: LAMA2; (+) strand; PAM type: YTN; PAM sequence: TTT
agaagtcatctgagttaacc

SEQ ID NO: 381446 - DNA, 20 bp, Artificial Sequence
  Description of Artificial Sequence: Synthetic oligonucleotide
  Target: LAMA2; (+) strand; PAM type: YTN; PAM sequence: TTA
gaagtcatctgagttaacct

SEQ ID NO: 381447 - DNA, 20 bp, Artificial Sequence
  Description of Artificial Sequence: Synthetic oligonucleotide
  Target: LAMA2; (+) strand; PAM type: YTN; PAM sequence: CTG
agttaacctactcatttgtg

SEQ ID NO: 381448 - DNA, 20 bp, Artificial Sequence
  Description of Artificial Sequence: Synthetic oligonucleotide
  Target: LAMA2; (+) strand; PAM type: YTN; PAM sequence: TTA
acctactcatttgtgggatg

SEQ ID NO: 381449 - DNA, 20 bp, Artificial Sequence
  Description of Artificial Sequence: Synthetic oligonucleotide
  Target: LAMA2; (+) strand; PAM type: YTN; PAM sequence: CTA
ctcatttgtgggatgaggaa

SEQ ID NO: 381450 - DNA, 20 bp, Artificial Sequence
  Description of Artificial Sequence: Synthetic oligonucleotide
  Target: LAMA2; (+) strand; PAM type: YTN; PAM sequence: CTC
atttgtgggatgaggaaact

SEQ ID NO: 381451 - DNA, 20 bp, Artificial Sequence
  Description of Artificial Sequence: Synthetic oligonucleotide
  Target: LAMA2; (+) strand; PAM type: YTN; PAM sequence: TTT
gtgggatgaggaaactgggt

SEQ ID NO: 381452 - DNA, 20 bp, Artificial Sequence
  Description of Artificial Sequence: Synthetic oligonucleotide
  Target: LAMA2; (+) strand; PAM type: YTN; PAM sequence: TTG
tgggatgaggaaactgggtc

SEQ ID NO: 381453 - DNA, 20 bp, Artificial Sequence
  Description of Artificial Sequence: Synthetic oligonucleotide
  Target: LAMA2; (+) strand; PAM type: YTN; PAM sequence: CTG
ggtctcaaagtaacttgccc

SEQ ID NO: 381454 - DNA, 20 bp, Artificial Sequence
  Description of Artificial Sequence: Synthetic oligonucleotide
  Target: LAMA2; (+) strand; PAM type: YTN; PAM sequence: CTC
aaagtaacttgcccatatct

SEQ ID NO: 381455 - DNA, 20 bp, Artificial Sequence
  Description of Artificial Sequence: Synthetic oligonucleotide
  Target: LAMA2; (+) strand; PAM type: YTN; PAM sequence: CTT
gcccatatctctcagacaaa

SEQ ID NO: 381456 - DNA, 20 bp, Artificial Sequence
  Description of Artificial Sequence: Synthetic oligonucleotide
  Target: LAMA2; (+) strand; PAM type: YTN; PAM sequence: TTG
cccatatctctcagacaaaa

SEQ ID NO: 381457 - DNA, 20 bp, Artificial Sequence
  Description of Artificial Sequence: Synthetic oligonucleotide
  Target: LAMA2; (+) strand; PAM type: YTN; PAM sequence: CTC
tcagacaaaactaacataaa

SEQ ID NO: 381458 - DNA, 20 bp, Artificial Sequence
  Description of Artificial Sequence: Synthetic oligonucleotide
  Target: LAMA2; (+) strand; PAM type: YTN; PAM sequence: CTC
agacaaaactaacataaaat

SEQ ID NO: 381459 - DNA, 20 bp, Artificial Sequence
  Description of Artificial Sequence: Synthetic oligonucleotide
  Target: LAMA2; (+) strand; PAM type: YTN; PAM sequence: CTA
acataaaatcaaggcttccc

SEQ ID NO: 381460 - DNA, 20 bp, Artificial Sequence
  Description of Artificial Sequence: Synthetic oligonucleotide
  Target: LAMA2; (+) strand; PAM type: YTN; PAM sequence: CTT
ccctattcattccttttata

SEQ ID NO: 381461 - DNA, 20 bp, Artificial Sequence
  Description of Artificial Sequence: Synthetic oligonucleotide
  Target: LAMA2; (+) strand; PAM type: YTN; PAM sequence: TTC
cctattcattccttttatag

SEQ ID NO: 381462 - DNA, 20 bp, Artificial Sequence
  Description of Artificial Sequence: Synthetic oligonucleotide
  Target: LAMA2; (+) strand; PAM type: YTN; PAM sequence: CTA
ttcattccttttatagtacc

SEQ ID NO: 381463 - DNA, 20 bp, Artificial Sequence
  Description of Artificial Sequence: Synthetic oligonucleotide
  Target: LAMA2; (+) strand; PAM type: YTN; PAM sequence: TTC
attccttttatagtaccaag

SEQ ID NO: 381464 - DNA, 20 bp, Artificial Sequence
  Description of Artificial Sequence: Synthetic oligonucleotide
  Target: LAMA2; (+) strand; PAM type: YTN; PAM sequence: TTC
cttttatagtaccaaggagt

SEQ ID NO: 381465 - DNA, 20 bp, Artificial Sequence
  Description of Artificial Sequence: Synthetic oligonucleotide
  Target: LAMA2; (+) strand; PAM type: YTN; PAM sequence: CTT
ttatagtaccaaggagtggt

SEQ ID NO: 381466 - DNA, 20 bp, Artificial Sequence
  Description of Artificial Sequence: Synthetic oligonucleotide
  Target: LAMA2; (+) strand; PAM type: YTN; PAM sequence: TTT
tatagtaccaaggagtggta

SEQ ID NO: 381467 - DNA, 20 bp, Artificial Sequence
  Description of Artificial Sequence: Synthetic oligonucleotide
  Target: LAMA2; (+) strand; PAM type: YTN; PAM sequence: TTT
atagtaccaaggagtggtat

SEQ ID NO: 381468 - DNA, 20 bp, Artificial Sequence
  Description of Artificial Sequence: Synthetic oligonucleotide
  Target: LAMA2; (+) strand; PAM type: YTN; PAM sequence: TTA
tagtaccaaggagtggtatg

SEQ ID NO: 381469 - DNA, 20 bp, Artificial Sequence
  Description of Artificial Sequence: Synthetic oligonucleotide
  Target: LAMA2; (+) strand; PAM type: YTN; PAM sequence: CTT
tttatgtatttatttatttt

SEQ ID NO: 381470 - DNA, 20 bp, Artificial Sequence
  Description of Artificial Sequence: Synthetic oligonucleotide
  Target: LAMA2; (+) strand; PAM type: YTN; PAM sequence: TTT
ttatgtatttatttattttt

SEQ ID NO: 381471 - DNA, 20 bp, Artificial Sequence
  Description of Artificial Sequence: Synthetic oligonucleotide
  Target: LAMA2; (+) strand; PAM type: YTN; PAM sequence: TTT
tatgtatttatttatttttt

SEQ ID NO: 381472 - DNA, 20 bp, Artificial Sequence
  Description of Artificial Sequence: Synthetic oligonucleotide
  Target: LAMA2; (+) strand; PAM type: YTN; PAM sequence: TTT
atgtatttatttattttttt

SEQ ID NO: 381473 - DNA, 20 bp, Artificial Sequence
  Description of Artificial Sequence: Synthetic oligonucleotide
  Target: LAMA2; (+) strand; PAM type: YTN; PAM sequence: TTA
tgtatttatttatttttttg

SEQ ID NO: 381474 - DNA, 20 bp, Artificial Sequence
  Description of Artificial Sequence: Synthetic oligonucleotide
  Target: LAMA2; (+) strand; PAM type: YTN; PAM sequence: TTT
atttatttttttgagatgga

SEQ ID NO: 381475 - DNA, 20 bp, Artificial Sequence
  Description of Artificial Sequence: Synthetic oligonucleotide
  Target: LAMA2; (+) strand; PAM type: YTN; PAM sequence: TTA
tttatttttttgagatggag

SEQ ID NO: 381476 - DNA, 20 bp, Artificial Sequence
  Description of Artificial Sequence: Synthetic oligonucleotide
  Target: LAMA2; (+) strand; PAM type: YTN; PAM sequence: TTT
atttttttgagatggagtct

SEQ ID NO: 381477 - DNA, 20 bp, Artificial Sequence
  Description of Artificial Sequence: Synthetic oligonucleotide
  Target: LAMA2; (+) strand; PAM type: YTN; PAM sequence: TTA
tttttttgagatggagtctc

SEQ ID NO: 381478 - DNA, 20 bp, Artificial Sequence
  Description of Artificial Sequence: Synthetic oligonucleotide
  Target: LAMA2; (+) strand; PAM type: YTN; PAM sequence: TTT
ttttgagatggagtctcgct

SEQ ID NO: 381479 - DNA, 20 bp, Artificial Sequence
  Description of Artificial Sequence: Synthetic oligonucleotide
  Target: LAMA2; (+) strand; PAM type: YTN; PAM sequence: TTT
tttgagatggagtctcgctt

SEQ ID NO: 381480 - DNA, 20 bp, Artificial Sequence
  Description of Artificial Sequence: Synthetic oligonucleotide
  Target: LAMA2; (+) strand; PAM type: YTN; PAM sequence: TTT
ttgagatggagtctcgcttt

SEQ ID NO: 381481 - DNA, 20 bp, Artificial Sequence
  Description of Artificial Sequence: Synthetic oligonucleotide
  Target: LAMA2; (+) strand; PAM type: YTN; PAM sequence: TTT
tgagatggagtctcgctttg

SEQ ID NO: 381482 - DNA, 20 bp, Artificial Sequence
  Description of Artificial Sequence: Synthetic oligonucleotide
  Target: LAMA2; (+) strand; PAM type: YTN; PAM sequence: TTT
gagatggagtctcgctttgt

SEQ ID NO: 381483 - DNA, 20 bp, Artificial Sequence
  Description of Artificial Sequence: Synthetic oligonucleotide
  Target: LAMA2; (+) strand; PAM type: YTN; PAM sequence: TTG
agatggagtctcgctttgtc

SEQ ID NO: 381484 - DNA, 20 bp, Artificial Sequence
  Description of Artificial Sequence: Synthetic oligonucleotide
  Target: LAMA2; (+) strand; PAM type: YTN; PAM sequence: CTC
gctttgtcactcaggctgga

SEQ ID NO: 381485 - DNA, 20 bp, Artificial Sequence
  Description of Artificial Sequence: Synthetic oligonucleotide
  Target: LAMA2; (+) strand; PAM type: YTN; PAM sequence: CTT
tgtcactcaggctggagtgc

SEQ ID NO: 381486 - DNA, 20 bp, Artificial Sequence
  Description of Artificial Sequence: Synthetic oligonucleotide
  Target: LAMA2; (+) strand; PAM type: YTN; PAM sequence: TTT
gtcactcaggctggagtgca

SEQ ID NO: 381487 - DNA, 20 bp, Artificial Sequence
  Description of Artificial Sequence: Synthetic oligonucleotide
  Target: LAMA2; (+) strand; PAM type: YTN; PAM sequence: TTG
tcactcaggctggagtgcag

SEQ ID NO: 381488 - DNA, 20 bp, Artificial Sequence
  Description of Artificial Sequence: Synthetic oligonucleotide
  Target: LAMA2; (+) strand; PAM type: YTN; PAM sequence: CTC
aggctggagtgcagtggcca

SEQ ID NO: 381489 - DNA, 20 bp, Artificial Sequence
  Description of Artificial Sequence: Synthetic oligonucleotide
  Target: LAMA2; (+) strand; PAM type: YTN; PAM sequence: CTG
gagtgcagtggccagatctc

SEQ ID NO: 381490 - DNA, 20 bp, Artificial Sequence
  Description of Artificial Sequence: Synthetic oligonucleotide
  Target: LAMA2; (+) strand; PAM type: YTN; PAM sequence: CTC
agcttactgcaacctccact

SEQ ID NO: 381491 - DNA, 20 bp, Artificial Sequence
  Description of Artificial Sequence: Synthetic oligonucleotide
  Target: LAMA2; (+) strand; PAM type: YTN; PAM sequence: CTT
actgcaacctccacttccca

SEQ ID NO: 381492 - DNA, 20 bp, Artificial Sequence
  Description of Artificial Sequence: Synthetic oligonucleotide
  Target: LAMA2; (+) strand; PAM type: YTN; PAM sequence: TTA
ctgcaacctccacttcccag

SEQ ID NO: 381493 - DNA, 20 bp, Artificial Sequence
  Description of Artificial Sequence: Synthetic oligonucleotide
  Target: LAMA2; (+) strand; PAM type: YTN; PAM sequence: CTG
caacctccacttcccaggtt

SEQ ID NO: 381494 - DNA, 20 bp, Artificial Sequence
  Description of Artificial Sequence: Synthetic oligonucleotide
  Target: LAMA2; (+) strand; PAM type: YTN; PAM sequence: CTC
cacttcccaggttcaagcga

SEQ ID NO: 381495 - DNA, 20 bp, Artificial Sequence
  Description of Artificial Sequence: Synthetic oligonucleotide
  Target: LAMA2; (+) strand; PAM type: YTN; PAM sequence: CTT
cccaggttcaagcgatgctc

SEQ ID NO: 381496 - DNA, 20 bp, Artificial Sequence
  Description of Artificial Sequence: Synthetic oligonucleotide
  Target: LAMA2; (+) strand; PAM type: YTN; PAM sequence: TTC
ccaggttcaagcgatgctcg

SEQ ID NO: 381497 - DNA, 20 bp, Artificial Sequence
  Description of Artificial Sequence: Synthetic oligonucleotide
  Target: LAMA2; (+) strand; PAM type: YTN; PAM sequence: TTC
aagcgatgctcgtgcctcag

SEQ ID NO: 381498 - DNA, 20 bp, Artificial Sequence
  Description of Artificial Sequence: Synthetic oligonucleotide
  Target: LAMA2; (+) strand; PAM type: YTN; PAM sequence: CTC
gtgcctcagcctccagagta

SEQ ID NO: 381499 - DNA, 20 bp, Artificial Sequence
  Description of Artificial Sequence: Synthetic oligonucleotide
  Target: LAMA2; (+) strand; PAM type: YTN; PAM sequence: CTC
agcctccagagtagttggga

SEQ ID NO: 381500 - DNA, 20 bp, Artificial Sequence
  Description of Artificial Sequence: Synthetic oligonucleotide
  Target: LAMA2; (+) strand; PAM type: YTN; PAM sequence: CTC
cagagtagttgggactacag

SEQ ID NO: 381501 - DNA, 20 bp, Artificial Sequence
  Description of Artificial Sequence: Synthetic oligonucleotide
  Target: LAMA2; (+) strand; PAM type: YTN; PAM sequence: TTG
ggactacagacacgcatcac

SEQ ID NO: 381502 - DNA, 20 bp, Artificial Sequence
  Description of Artificial Sequence: Synthetic oligonucleotide
  Target: LAMA2; (+) strand; PAM type: YTN; PAM sequence: CTA
cagacacgcatcaccacgcc

SEQ ID NO: 381503 - DNA, 20 bp, Artificial Sequence
  Description of Artificial Sequence: Synthetic oligonucleotide
  Target: LAMA2; (+) strand; PAM type: YTN; PAM sequence: CTG
gctaatttttgtatttttag

SEQ ID NO: 381504 - DNA, 20 bp, Artificial Sequence
  Description of Artificial Sequence: Synthetic oligonucleotide
  Target: LAMA2; (+) strand; PAM type: YTN; PAM sequence: CTA
atttttgtatttttagtcaa

SEQ ID NO: 381505 - DNA, 20 bp, Artificial Sequence
  Description of Artificial Sequence: Synthetic oligonucleotide
  Target: LAMA2; (+) strand; PAM type: YTN; PAM sequence: TTT
ttgtatttttagtcaagaca

SEQ ID NO: 381506 - DNA, 20 bp, Artificial Sequence
  Description of Artificial Sequence: Synthetic oligonucleotide
  Target: LAMA2; (+) strand; PAM type: YTN; PAM sequence: TTT
tgtatttttagtcaagacat

SEQ ID NO: 381507 - DNA, 20 bp, Artificial Sequence
  Description of Artificial Sequence: Synthetic oligonucleotide
  Target: LAMA2; (+) strand; PAM type: YTN; PAM sequence: TTT
gtatttttagtcaagacatg

SEQ ID NO: 381508 - DNA, 20 bp, Artificial Sequence
  Description of Artificial Sequence: Synthetic oligonucleotide
  Target: LAMA2; (+) strand; PAM type: YTN; PAM sequence: TTG
tatttttagtcaagacatgg

SEQ ID NO: 381509 - DNA, 20 bp, Artificial Sequence
  Description of Artificial Sequence: Synthetic oligonucleotide
  Target: LAMA2; (+) strand; PAM type: YTN; PAM sequence: TTT
ttagtcaagacatggtttca

SEQ ID NO: 381510 - DNA, 20 bp, Artificial Sequence
  Description of Artificial Sequence: Synthetic oligonucleotide
  Target: LAMA2; (+) strand; PAM type: YTN; PAM sequence: TTT
tagtcaagacatggtttcac

SEQ ID NO: 381511 - DNA, 20 bp, Artificial Sequence
  Description of Artificial Sequence: Synthetic oligonucleotide
  Target: LAMA2; (+) strand; PAM type: YTN; PAM sequence: TTT
agtcaagacatggtttcacc

SEQ ID NO: 381512 - DNA, 20 bp, Artificial Sequence
  Description of Artificial Sequence: Synthetic oligonucleotide
  Target: LAMA2; (+) strand; PAM type: YTN; PAM sequence: TTA
gtcaagacatggtttcacca

SEQ ID NO: 381513 - DNA, 20 bp, Artificial Sequence
  Description of Artificial Sequence: Synthetic oligonucleotide
  Target: LAMA2; (+) strand; PAM type: YTN; PAM sequence: TTT
caccatgttggccaggctgg

SEQ ID NO: 381514 - DNA, 20 bp, Artificial Sequence
  Description of Artificial Sequence: Synthetic oligonucleotide
  Target: LAMA2; (+) strand; PAM type: YTN; PAM sequence: TTC
accatgttggccaggctggt

SEQ ID NO: 381515 - DNA, 20 bp, Artificial Sequence
  Description of Artificial Sequence: Synthetic oligonucleotide
  Target: LAMA2; (+) strand; PAM type: YTN; PAM sequence: TTG
gccaggctggtctggaactc

SEQ ID NO: 381516 - DNA, 20 bp, Artificial Sequence
  Description of Artificial Sequence: Synthetic oligonucleotide
  Target: LAMA2; (+) strand; PAM type: YTN; PAM sequence: CTG
gtctggaactcctgacctca

SEQ ID NO: 381517 - DNA, 20 bp, Artificial Sequence
  Description of Artificial Sequence: Synthetic oligonucleotide
  Target: LAMA2; (+) strand; PAM type: YTN; PAM sequence: CTG
gaactcctgacctcaagtaa

SEQ ID NO: 381518 - DNA, 20 bp, Artificial Sequence
  Description of Artificial Sequence: Synthetic oligonucleotide
  Target: LAMA2; (+) strand; PAM type: YTN; PAM sequence: CTC
ctgacctcaagtaatccagc

SEQ ID NO: 381519 - DNA, 20 bp, Artificial Sequence
  Description of Artificial Sequence: Synthetic oligonucleotide
  Target: LAMA2; (+) strand; PAM type: YTN; PAM sequence: CTG
acctcaagtaatccagccac

SEQ ID NO: 381520 - DNA, 20 bp, Artificial Sequence
  Description of Artificial Sequence: Synthetic oligonucleotide
  Target: LAMA2; (+) strand; PAM type: YTN; PAM sequence: CTC
aagtaatccagccacctcag

SEQ ID NO: 381521 - DNA, 20 bp, Artificial Sequence
  Description of Artificial Sequence: Synthetic oligonucleotide
  Target: LAMA2; (+) strand; PAM type: YTN; PAM sequence: CTC
agcctcccaaaatgctggga

SEQ ID NO: 381522 - DNA, 20 bp, Artificial Sequence
  Description of Artificial Sequence: Synthetic oligonucleotide
  Target: LAMA2; (+) strand; PAM type: YTN; PAM sequence: CTC
ccaaaatgctgggattacag

SEQ ID NO: 381523 - DNA, 20 bp, Artificial Sequence
  Description of Artificial Sequence: Synthetic oligonucleotide
  Target: LAMA2; (+) strand; PAM type: YTN; PAM sequence: CTG
ggattacaggcgtgagccac

SEQ ID NO: 381524 - DNA, 20 bp, Artificial Sequence
  Description of Artificial Sequence: Synthetic oligonucleotide
  Target: LAMA2; (+) strand; PAM type: YTN; PAM sequence: TTA
caggcgtgagccaccatgtc

SEQ ID NO: 381525 - DNA, 20 bp, Artificial Sequence
  Description of Artificial Sequence: Synthetic oligonucleotide
  Target: LAMA2; (+) strand; PAM type: YTN; PAM sequence: CTC
gccttttccatgtgcccttt

SEQ ID NO: 381526 - DNA, 20 bp, Artificial Sequence
  Description of Artificial Sequence: Synthetic oligonucleotide
  Target: LAMA2; (+) strand; PAM type: YTN; PAM sequence: CTT
ttccatgtgcccttttaaat

SEQ ID NO: 381527 - DNA, 20 bp, Artificial Sequence
  Description of Artificial Sequence: Synthetic oligonucleotide
  Target: LAMA2; (+) strand; PAM type: YTN; PAM sequence: TTT
tccatgtgcccttttaaatg

SEQ ID NO: 381528 - DNA, 20 bp, Artificial Sequence
  Description of Artificial Sequence: Synthetic oligonucleotide
  Target: LAMA2; (+) strand; PAM type: YTN; PAM sequence: TTT
ccatgtgcccttttaaatgc

SEQ ID NO: 381529 - DNA, 20 bp, Artificial Sequence
  Description of Artificial Sequence: Synthetic oligonucleotide
  Target: LAMA2; (+) strand; PAM type: YTN; PAM sequence: TTC
catgtgcccttttaaatgca

SEQ ID NO: 381530 - DNA, 20 bp, Artificial Sequence
  Description of Artificial Sequence: Synthetic oligonucleotide
  Target: LAMA2; (+) strand; PAM type: YTN; PAM sequence: CTT
ttaaatgcacacatacacaa

SEQ ID NO: 381531 - DNA, 20 bp, Artificial Sequence
  Description of Artificial Sequence: Synthetic oligonucleotide
  Target: LAMA2; (+) strand; PAM type: YTN; PAM sequence: TTT
taaatgcacacatacacaac

SEQ ID NO: 381532 - DNA, 20 bp, Artificial Sequence
  Description of Artificial Sequence: Synthetic oligonucleotide
  Target: LAMA2; (+) strand; PAM type: YTN; PAM sequence: TTT
aaatgcacacatacacaaca

SEQ ID NO: 381533 - DNA, 20 bp, Artificial Sequence
  Description of Artificial Sequence: Synthetic oligonucleotide
  Target: LAMA2; (+) strand; PAM type: YTN; PAM sequence: TTA
aatgcacacatacacaacag

SEQ ID NO: 381534 - DNA, 20 bp, Artificial Sequence
  Description of Artificial Sequence: Synthetic oligonucleotide
  Target: LAMA2; (+) strand; PAM type: YTN; PAM sequence: CTT
gccagtgacgctgcgctcta

SEQ ID NO: 381535 - DNA, 20 bp, Artificial Sequence
  Description of Artificial Sequence: Synthetic oligonucleotide
  Target: LAMA2; (+) strand; PAM type: YTN; PAM sequence: TTG
ccagtgacgctgcgctctaa

SEQ ID NO: 381536 - DNA, 20 bp, Artificial Sequence
  Description of Artificial Sequence: Synthetic oligonucleotide
  Target: LAMA2; (+) strand; PAM type: YTN; PAM sequence: CTG
cgctctaattgtctgttaga

SEQ ID NO: 381537 - DNA, 20 bp, Artificial Sequence
  Description of Artificial Sequence: Synthetic oligonucleotide
  Target: LAMA2; (+) strand; PAM type: YTN; PAM sequence: CTC
taattgtctgttagactttt

SEQ ID NO: 381538 - DNA, 20 bp, Artificial Sequence
  Description of Artificial Sequence: Synthetic oligonucleotide
  Target: LAMA2; (+) strand; PAM type: YTN; PAM sequence: CTA
attgtctgttagacttttct

SEQ ID NO: 381539 - DNA, 20 bp, Artificial Sequence
  Description of Artificial Sequence: Synthetic oligonucleotide
  Target: LAMA2; (+) strand; PAM type: YTN; PAM sequence: TTG
tctgttagacttttctaaga

SEQ ID NO: 381540 - DNA, 20 bp, Artificial Sequence
  Description of Artificial Sequence: Synthetic oligonucleotide
  Target: LAMA2; (+) strand; PAM type: YTN; PAM sequence: CTG
ttagacttttctaagagttt

SEQ ID NO: 381541 - DNA, 20 bp, Artificial Sequence
  Description of Artificial Sequence: Synthetic oligonucleotide
  Target: LAMA2; (+) strand; PAM type: YTN; PAM sequence: TTA
gacttttctaagagttttaa

SEQ ID NO: 381542 - DNA, 20 bp, Artificial Sequence
  Description of Artificial Sequence: Synthetic oligonucleotide
  Target: LAMA2; (+) strand; PAM type: YTN; PAM sequence: CTT
ttctaagagttttaaaacaa

SEQ ID NO: 381543 - DNA, 20 bp, Artificial Sequence
  Description of Artificial Sequence: Synthetic oligonucleotide
  Target: LAMA2; (+) strand; PAM type: YTN; PAM sequence: TTT
tctaagagttttaaaacaaa

SEQ ID NO: 381544 - DNA, 20 bp, Artificial Sequence
  Description of Artificial Sequence: Synthetic oligonucleotide
  Target: LAMA2; (+) strand; PAM type: YTN; PAM sequence: TTT
ctaagagttttaaaacaaac

SEQ ID NO: 381545 - DNA, 20 bp, Artificial Sequence
  Description of Artificial Sequence: Synthetic oligonucleotide
  Target: LAMA2; (+) strand; PAM type: YTN; PAM sequence: TTC
taagagttttaaaacaaact

SEQ ID NO: 381546 - DNA, 20 bp, Artificial Sequence
  Description of Artificial Sequence: Synthetic oligonucleotide
  Target: LAMA2; (+) strand; PAM type: YTN; PAM sequence: CTA
agagttttaaaacaaactcg

SEQ ID NO: 381547 - DNA, 20 bp, Artificial Sequence
  Description of Artificial Sequence: Synthetic oligonucleotide
  Target: LAMA2; (+) strand; PAM type: YTN; PAM sequence: TTT
taaaacaaactcgggcctca

SEQ ID NO: 381548 - DNA, 20 bp, Artificial Sequence
  Description of Artificial Sequence: Synthetic oligonucleotide
  Target: LAMA2; (+) strand; PAM type: YTN; PAM sequence: TTT
aaaacaaactcgggcctcaa

SEQ ID NO: 381549 - DNA, 20 bp, Artificial Sequence
  Description of Artificial Sequence: Synthetic oligonucleotide
  Target: LAMA2; (+) strand; PAM type: YTN; PAM sequence: TTA
aaacaaactcgggcctcaac

SEQ ID NO: 381550 - DNA, 20 bp, Artificial Sequence
  Description of Artificial Sequence: Synthetic oligonucleotide
  Target: LAMA2; (+) strand; PAM type: YTN; PAM sequence: CTC
gggcctcaactctcccccag

SEQ ID NO: 381551 - DNA, 20 bp, Artificial Sequence
  Description of Artificial Sequence: Synthetic oligonucleotide
  Target: LAMA2; (+) strand; PAM type: YTN; PAM sequence: CTC
aactctcccccagaggaatt

SEQ ID NO: 381552 - DNA, 20 bp, Artificial Sequence
  Description of Artificial Sequence: Synthetic oligonucleotide
  Target: LAMA2; (+) strand; PAM type: YTN; PAM sequence: CTC
tcccccagaggaattgactc

SEQ ID NO: 381553 - DNA, 20 bp, Artificial Sequence
  Description of Artificial Sequence: Synthetic oligonucleotide
  Target: LAMA2; (+) strand; PAM type: YTN; PAM sequence: CTC
ccccagaggaattgactcca

SEQ ID NO: 381554 - DNA, 20 bp, Artificial Sequence
  Description of Artificial Sequence: Synthetic oligonucleotide
  Target: LAMA2; (+) strand; PAM type: YTN; PAM sequence: TTG
actccacctcctctagggct

SEQ ID NO: 381555 - DNA, 20 bp, Artificial Sequence
  Description of Artificial Sequence: Synthetic oligonucleotide
  Target: LAMA2; (+) strand; PAM type: YTN; PAM sequence: CTC
cacctcctctagggctggac

SEQ ID NO: 381556 - DNA, 20 bp, Artificial Sequence
  Description of Artificial Sequence: Synthetic oligonucleotide
  Target: LAMA2; (+) strand; PAM type: YTN; PAM sequence: CTC
ctctagggctggaccggacc

SEQ ID NO: 381557 - DNA, 20 bp, Artificial Sequence
  Description of Artificial Sequence: Synthetic oligonucleotide
  Target: LAMA2; (+) strand; PAM type: YTN; PAM sequence: CTC
tagggctggaccggaccaca

SEQ ID NO: 381558 - DNA, 20 bp, Artificial Sequence
  Description of Artificial Sequence: Synthetic oligonucleotide
  Target: LAMA2; (+) strand; PAM type: YTN; PAM sequence: CTA
gggctggaccggaccacaga

SEQ ID NO: 381559 - DNA, 20 bp, Artificial Sequence
  Description of Artificial Sequence: Synthetic oligonucleotide
  Target: LAMA2; (+) strand; PAM type: YTN; PAM sequence: CTG
gaccggaccacagactccca

SEQ ID NO: 381560 - DNA, 20 bp, Artificial Sequence
  Description of Artificial Sequence: Synthetic oligonucleotide
  Target: LAMA2; (+) strand; PAM type: YTN; PAM sequence: CTC
ccactatgggcgcttgtcta

SEQ ID NO: 381561 - DNA, 20 bp, Artificial Sequence
  Description of Artificial Sequence: Synthetic oligonucleotide
  Target: LAMA2; (+) strand; PAM type: YTN; PAM sequence: CTA
tgggcgcttgtctattgtgt

SEQ ID NO: 381562 - DNA, 20 bp, Artificial Sequence
  Description of Artificial Sequence: Synthetic oligonucleotide
  Target: LAMA2; (+) strand; PAM type: YTN; PAM sequence: CTT
gtctattgtgtcaggctgcc

SEQ ID NO: 381563 - DNA, 20 bp, Artificial Sequence
  Description of Artificial Sequence: Synthetic oligonucleotide
  Target: LAMA2; (+) strand; PAM type: YTN; PAM sequence: TTG
tctattgtgtcaggctgcct

SEQ ID NO: 381564 - DNA, 20 bp, Artificial Sequence
  Description of Artificial Sequence: Synthetic oligonucleotide
  Target: LAMA2; (+) strand; PAM type: YTN; PAM sequence: CTA
ttgtgtcaggctgcctgtcg

SEQ ID NO: 381565 - DNA, 20 bp, Artificial Sequence
  Description of Artificial Sequence: Synthetic oligonucleotide
  Target: LAMA2; (+) strand; PAM type: YTN; PAM sequence: TTG
tgtcaggctgcctgtcgggg

SEQ ID NO: 381566 - DNA, 20 bp, Artificial Sequence
  Description of Artificial Sequence: Synthetic oligonucleotide
  Target: LAMA2; (+) strand; PAM type: YTN; PAM sequence: CTG
cctgtcggggaaaaccacag

SEQ ID NO: 381567 - DNA, 20 bp, Artificial Sequence
  Description of Artificial Sequence: Synthetic oligonucleotide
  Target: LAMA2; (+) strand; PAM type: YTN; PAM sequence: CTG
tcggggaaaaccacagtaat

SEQ ID NO: 381568 - DNA, 20 bp, Artificial Sequence
  Description of Artificial Sequence: Synthetic oligonucleotide
  Target: LAMA2; (+) strand; PAM type: YTN; PAM sequence: TTG
tgcgttagagtagacttcac

SEQ ID NO: 381569 - DNA, 20 bp, Artificial Sequence
  Description of Artificial Sequence: Synthetic oligonucleotide
  Target: LAMA2; (+) strand; PAM type: YTN; PAM sequence: TTA
gagtagacttcaccttaggg

SEQ ID NO: 381570 - DNA, 20 bp, Artificial Sequence
  Description of Artificial Sequence: Synthetic oligonucleotide
  Target: LAMA2; (+) strand; PAM type: YTN; PAM sequence: CTT
caccttagggctcgccttca

SEQ ID NO: 381571 - DNA, 20 bp, Artificial Sequence
  Description of Artificial Sequence: Synthetic oligonucleotide
  Target: LAMA2; (+) strand; PAM type: YTN; PAM sequence: TTC
accttagggctcgccttcac

SEQ ID NO: 381572 - DNA, 20 bp, Artificial Sequence
  Description of Artificial Sequence: Synthetic oligonucleotide
  Target: LAMA2; (+) strand; PAM type: YTN; PAM sequence: CTT
agggctcgccttcacatttg

SEQ ID NO: 381573 - DNA, 20 bp, Artificial Sequence
  Description of Artificial Sequence: Synthetic oligonucleotide
  Target: LAMA2; (+) strand; PAM type: YTN; PAM sequence: TTA
gggctcgccttcacatttgg

SEQ ID NO: 381574 - DNA, 20 bp, Artificial Sequence
  Description of Artificial Sequence: Synthetic oligonucleotide
  Target: LAMA2; (+) strand; PAM type: YTN; PAM sequence: CTC
gccttcacatttggacctac

SEQ ID NO: 381575 - DNA, 20 bp, Artificial Sequence
  Description of Artificial Sequence: Synthetic oligonucleotide
  Target: LAMA2; (+) strand; PAM type: YTN; PAM sequence: CTT
cacatttggacctacaacgc

SEQ ID NO: 381576 - DNA, 20 bp, Artificial Sequence
  Description of Artificial Sequence: Synthetic oligonucleotide
  Target: LAMA2; (+) strand; PAM type: YTN; PAM sequence: TTC
acatttggacctacaacgct

SEQ ID NO: 381577 - DNA, 20 bp, Artificial Sequence
  Description of Artificial Sequence: Synthetic oligonucleotide
  Target: LAMA2; (+) strand; PAM type: YTN; PAM sequence: TTT
ggacctacaacgctaaactg

SEQ ID NO: 381578 - DNA, 20 bp, Artificial Sequence
  Description of Artificial Sequence: Synthetic oligonucleotide
  Target: LAMA2; (+) strand; PAM type: YTN; PAM sequence: TTG
gacctacaacgctaaactgt

SEQ ID NO: 381579 - DNA, 20 bp, Artificial Sequence
  Description of Artificial Sequence: Synthetic oligonucleotide
  Target: LAMA2; (+) strand; PAM type: YTN; PAM sequence: CTA
caacgctaaactgtacaatt

SEQ ID NO: 381580 - DNA, 20 bp, Artificial Sequence
  Description of Artificial Sequence: Synthetic oligonucleotide
  Target: LAMA2; (+) strand; PAM type: YTN; PAM sequence: CTA
aactgtacaattcctcgatg

SEQ ID NO: 381581 - DNA, 20 bp, Artificial Sequence
  Description of Artificial Sequence: Synthetic oligonucleotide
  Target: LAMA2; (+) strand; PAM type: YTN; PAM sequence: CTG
tacaattcctcgatgaggag

SEQ ID NO: 381582 - DNA, 20 bp, Artificial Sequence
  Description of Artificial Sequence: Synthetic oligonucleotide
  Target: LAMA2; (+) strand; PAM type: YTN; PAM sequence: TTC
ctcgatgaggagtattactt

SEQ ID NO: 381583 - DNA, 20 bp, Artificial Sequence
  Description of Artificial Sequence: Synthetic oligonucleotide
  Target: LAMA2; (+) strand; PAM type: YTN; PAM sequence: CTC
gatgaggagtattacttctt

SEQ ID NO: 381584 - DNA, 20 bp, Artificial Sequence
  Description of Artificial Sequence: Synthetic oligonucleotide
  Target: LAMA2; (+) strand; PAM type: YTN; PAM sequence: TTA
cttcttgtgtttctttttct

SEQ ID NO: 381585 - DNA, 20 bp, Artificial Sequence
  Description of Artificial Sequence: Synthetic oligonucleotide
  Target: LAMA2; (+) strand; PAM type: YTN; PAM sequence: CTT
cttgtgtttctttttcttct

SEQ ID NO: 381586 - DNA, 20 bp, Artificial Sequence
  Description of Artificial Sequence: Synthetic oligonucleotide
  Target: LAMA2; (+) strand; PAM type: YTN; PAM sequence: TTC
ttgtgtttctttttcttcta

SEQ ID NO: 381587 - DNA, 20 bp, Artificial Sequence
  Description of Artificial Sequence: Synthetic oligonucleotide
  Target: LAMA2; (+) strand; PAM type: YTN; PAM sequence: CTT
gtgtttctttttcttctaag

SEQ ID NO: 381588 - DNA, 20 bp, Artificial Sequence
  Description of Artificial Sequence: Synthetic oligonucleotide
  Target: LAMA2; (+) strand; PAM type: YTN; PAM sequence: TTG
tgtttctttttcttctaaga

SEQ ID NO: 381589 - DNA, 20 bp, Artificial Sequence
  Description of Artificial Sequence: Synthetic oligonucleotide
  Target: LAMA2; (+) strand; PAM type: YTN; PAM sequence: TTT
ctttttcttctaagatttat

SEQ ID NO: 381590 - DNA, 20 bp, Artificial Sequence
  Description of Artificial Sequence: Synthetic oligonucleotide
  Target: LAMA2; (+) strand; PAM type: YTN; PAM sequence: TTC
tttttcttctaagatttatt

SEQ ID NO: 381591 - DNA, 20 bp, Artificial Sequence
  Description of Artificial Sequence: Synthetic oligonucleotide
  Target: LAMA2; (+) strand; PAM type: YTN; PAM sequence: CTT
tttcttctaagatttatttt

SEQ ID NO: 381592 - DNA, 20 bp, Artificial Sequence
  Description of Artificial Sequence: Synthetic oligonucleotide
  Target: LAMA2; (+) strand; PAM type: YTN; PAM sequence: TTT
ttcttctaagatttatttta

SEQ ID NO: 381593 - DNA, 20 bp, Artificial Sequence
  Description of Artificial Sequence: Synthetic oligonucleotide
  Target: LAMA2; (+) strand; PAM type: YTN; PAM sequence: TTT
tcttctaagatttattttaa

SEQ ID NO: 381594 - DNA, 20 bp, Artificial Sequence
  Description of Artificial Sequence: Synthetic oligonucleotide
  Target: LAMA2; (+) strand; PAM type: YTN; PAM sequence: TTT
cttctaagatttattttaaa

SEQ ID NO: 381595 - DNA, 20 bp, Artificial Sequence
  Description of Artificial Sequence: Synthetic oligonucleotide
  Target: LAMA2; (+) strand; PAM type: YTN; PAM sequence: TTC
ttctaagatttattttaaac

SEQ ID NO: 381596 - DNA, 20 bp, Artificial Sequence
  Description of Artificial Sequence: Synthetic oligonucleotide
  Target: LAMA2; (+) strand; PAM type: YTN; PAM sequence: CTT
ctaagatttattttaaactt

SEQ ID NO: 381597 - DNA, 20 bp, Artificial Sequence
  Description of Artificial Sequence: Synthetic oligonucleotide
  Target: LAMA2; (+) strand; PAM type: YTN; PAM sequence: TTC
taagatttattttaaacttt

SEQ ID NO: 381598 - DNA, 20 bp, Artificial Sequence
  Description of Artificial Sequence: Synthetic oligonucleotide
  Target: LAMA2; (+) strand; PAM type: YTN; PAM sequence: CTA
agatttattttaaacttttg

SEQ ID NO: 381599 - DNA, 20 bp, Artificial Sequence
  Description of Artificial Sequence: Synthetic oligonucleotide
  Target: LAMA2; (+) strand; PAM type: YTN; PAM sequence: TTT
attttaaacttttgtttgag

SEQ ID NO: 381600 - DNA, 20 bp, Artificial Sequence
  Description of Artificial Sequence: Synthetic oligonucleotide
  Target: LAMA2; (+) strand; PAM type: YTN; PAM sequence: TTA
ttttaaacttttgtttgagc

SEQ ID NO: 381601 - DNA, 20 bp, Artificial Sequence
  Description of Artificial Sequence: Synthetic oligonucleotide
  Target: LAMA2; (+) strand; PAM type: YTN; PAM sequence: TTT
taaacttttgtttgagcttc

SEQ ID NO: 381602 - DNA, 20 bp, Artificial Sequence
  Description of Artificial Sequence: Synthetic oligonucleotide
  Target: LAMA2; (+) strand; PAM type: YTN; PAM sequence: TTT
aaacttttgtttgagcttca

SEQ ID NO: 381603 - DNA, 20 bp, Artificial Sequence
  Description of Artificial Sequence: Synthetic oligonucleotide
  Target: LAMA2; (+) strand; PAM type: YTN; PAM sequence: TTA
aacttttgtttgagcttcaa

SEQ ID NO: 381604 - DNA, 20 bp, Artificial Sequence
  Description of Artificial Sequence: Synthetic oligonucleotide
  Target: LAMA2; (+) strand; PAM type: YTN; PAM sequence: CTT
ttgtttgagcttcaaggaaa

SEQ ID NO: 381605 - DNA, 20 bp, Artificial Sequence
  Description of Artificial Sequence: Synthetic oligonucleotide
  Target: LAMA2; (+) strand; PAM type: YTN; PAM sequence: TTT
tgtttgagcttcaaggaaac

SEQ ID NO: 381606 - DNA, 20 bp, Artificial Sequence
  Description of Artificial Sequence: Synthetic oligonucleotide
  Target: LAMA2; (+) strand; PAM type: YTN; PAM sequence: TTT
gtttgagcttcaaggaaact

SEQ ID NO: 381607 - DNA, 20 bp, Artificial Sequence
  Description of Artificial Sequence: Synthetic oligonucleotide
  Target: LAMA2; (+) strand; PAM type: YTN; PAM sequence: TTG
tttgagcttcaaggaaactt

SEQ ID NO: 381608 - DNA, 20 bp, Artificial Sequence
  Description of Artificial Sequence: Synthetic oligonucleotide
  Target: LAMA2; (+) strand; PAM type: YTN; PAM sequence: TTT
gagcttcaaggaaacttcct

SEQ ID NO: 381609 - DNA, 20 bp, Artificial Sequence
  Description of Artificial Sequence: Synthetic oligonucleotide
  Target: LAMA2; (+) strand; PAM type: YTN; PAM sequence: TTG
agcttcaaggaaacttcctc

SEQ ID NO: 381610 - DNA, 20 bp, Artificial Sequence
  Description of Artificial Sequence: Synthetic oligonucleotide
  Target: LAMA2; (+) strand; PAM type: YTN; PAM sequence: CTT
caaggaaacttcctctcaat

SEQ ID NO: 381611 - DNA, 20 bp, Artificial Sequence
  Description of Artificial Sequence: Synthetic oligonucleotide
  Target: LAMA2; (+) strand; PAM type: YTN; PAM sequence: TTC
aaggaaacttcctctcaatt

SEQ ID NO: 381612 - DNA, 20 bp, Artificial Sequence
  Description of Artificial Sequence: Synthetic oligonucleotide
  Target: LAMA2; (+) strand; PAM type: YTN; PAM sequence: CTT
cctctcaatttgtgtgattt

SEQ ID NO: 381613 - DNA, 20 bp, Artificial Sequence
  Description of Artificial Sequence: Synthetic oligonucleotide
  Target: LAMA2; (+) strand; PAM type: YTN; PAM sequence: TTC
ctctcaatttgtgtgatttt

SEQ ID NO: 381614 - DNA, 20 bp, Artificial Sequence
  Description of Artificial Sequence: Synthetic oligonucleotide
  Target: LAMA2; (+) strand; PAM type: YTN; PAM sequence: CTC
tcaatttgtgtgatttttta

SEQ ID NO: 381615 - DNA, 20 bp, Artificial Sequence
  Description of Artificial Sequence: Synthetic oligonucleotide
  Target: LAMA2; (+) strand; PAM type: YTN; PAM sequence: CTC
aatttgtgtgattttttaca

SEQ ID NO: 381616 - DNA, 20 bp, Artificial Sequence
  Description of Artificial Sequence: Synthetic oligonucleotide
  Target: LAMA2; (+) strand; PAM type: YTN; PAM sequence: TTT
gtgtgattttttacacaaat

SEQ ID NO: 381617 - DNA, 20 bp, Artificial Sequence
  Description of Artificial Sequence: Synthetic oligonucleotide
  Target: LAMA2; (+) strand; PAM type: YTN; PAM sequence: TTG
tgtgattttttacacaaatt

SEQ ID NO: 381618 - DNA, 20 bp, Artificial Sequence
  Description of Artificial Sequence: Synthetic oligonucleotide
  Target: LAMA2; (+) strand; PAM type: YTN; PAM sequence: TTT
tttacacaaatttttacaga

SEQ ID NO: 381619 - DNA, 20 bp, Artificial Sequence
  Description of Artificial Sequence: Synthetic oligonucleotide
  Target: LAMA2; (+) strand; PAM type: YTN; PAM sequence: TTT
ttacacaaatttttacagac

SEQ ID NO: 381620 - DNA, 20 bp, Artificial Sequence
  Description of Artificial Sequence: Synthetic oligonucleotide
  Target: LAMA2; (+) strand; PAM type: YTN; PAM sequence: TTT
tacacaaatttttacagaca

SEQ ID NO: 381621 - DNA, 20 bp, Artificial Sequence
  Description of Artificial Sequence: Synthetic oligonucleotide
  Target: LAMA2; (+) strand; PAM type: YTN; PAM sequence: TTT
acacaaatttttacagacag

SEQ ID NO: 381622 - DNA, 20 bp, Artificial Sequence
  Description of Artificial Sequence: Synthetic oligonucleotide
  Target: LAMA2; (+) strand; PAM type: YTN; PAM sequence: TTA
cacaaatttttacagacagt

SEQ ID NO: 381623 - DNA, 20 bp, Artificial Sequence
  Description of Artificial Sequence: Synthetic oligonucleotide
  Target: LAMA2; (+) strand; PAM type: YTN; PAM sequence: TTT
ttacagacagtaattacagt

SEQ ID NO: 381624 - DNA, 20 bp, Artificial Sequence
  Description of Artificial Sequence: Synthetic oligonucleotide
  Target: LAMA2; (+) strand; PAM type: YTN; PAM sequence: TTT
tacagacagtaattacagta

SEQ ID NO: 381625 - DNA, 20 bp, Artificial Sequence
  Description of Artificial Sequence: Synthetic oligonucleotide
  Target: LAMA2; (+) strand; PAM type: YTN; PAM sequence: TTT
acagacagtaattacagtaa

SEQ ID NO: 381626 - DNA, 20 bp, Artificial Sequence
  Description of Artificial Sequence: Synthetic oligonucleotide
  Target: LAMA2; (+) strand; PAM type: YTN; PAM sequence: TTA
cagacagtaattacagtaat

SEQ ID NO: 381627 - DNA, 20 bp, Artificial Sequence
  Description of Artificial Sequence: Synthetic oligonucleotide
  Target: LAMA2; (+) strand; PAM type: YTN; PAM sequence: TTA
cagtaataacttagtagaga

SEQ ID NO: 381628 - DNA, 20 bp, Artificial Sequence
  Description of Artificial Sequence: Synthetic oligonucleotide
  Target: LAMA2; (+) strand; PAM type: YTN; PAM sequence: CTT
agtagagagattacagagat

SEQ ID NO: 381629 - DNA, 20 bp, Artificial Sequence
  Description of Artificial Sequence: Synthetic oligonucleotide
  Target: LAMA2; (+) strand; PAM type: YTN; PAM sequence: TTA
gtagagagattacagagata

SEQ ID NO: 381630 - DNA, 20 bp, Artificial Sequence
  Description of Artificial Sequence: Synthetic oligonucleotide
  Target: LAMA2; (+) strand; PAM type: YTN; PAM sequence: TTA
cagagataaagtcctatctc

SEQ ID NO: 381631 - DNA, 20 bp, Artificial Sequence
  Description of Artificial Sequence: Synthetic oligonucleotide
  Target: LAMA2; (+) strand; PAM type: YTN; PAM sequence: CTA
tctctcatagtaacacacat

SEQ ID NO: 381632 - DNA, 20 bp, Artificial Sequence
  Description of Artificial Sequence: Synthetic oligonucleotide
  Target: LAMA2; (+) strand; PAM type: YTN; PAM sequence: CTC
tcatagtaacacacatgcat

SEQ ID NO: 381633 - DNA, 20 bp, Artificial Sequence
  Description of Artificial Sequence: Synthetic oligonucleotide
  Target: LAMA2; (+) strand; PAM type: YTN; PAM sequence: CTC
atagtaacacacatgcatgc

SEQ ID NO: 381634 - DNA, 20 bp, Artificial Sequence
  Description of Artificial Sequence: Synthetic oligonucleotide
  Target: LAMA2; (+) strand; PAM type: YTN; PAM sequence: CTA
gcaagtatgtcaataacaca

SEQ ID NO: 381635 - DNA, 20 bp, Artificial Sequence
  Description of Artificial Sequence: Synthetic oligonucleotide
  Target: LAMA2; (+) strand; PAM type: YTN; PAM sequence: TTT
tatatatatataattttata

SEQ ID NO: 381636 - DNA, 20 bp, Artificial Sequence
  Description of Artificial Sequence: Synthetic oligonucleotide
  Target: LAMA2; (+) strand; PAM type: YTN; PAM sequence: TTT
atatatatataattttatat

SEQ ID NO: 381637 - DNA, 20 bp, Artificial Sequence
  Description of Artificial Sequence: Synthetic oligonucleotide
  Target: LAMA2; (+) strand; PAM type: YTN; PAM sequence: TTA
tatatatataattttatata

SEQ ID NO: 381638 - DNA, 20 bp, Artificial Sequence
  Description of Artificial Sequence: Synthetic oligonucleotide
  Target: LAMA2; (+) strand; PAM type: YTN; PAM sequence: TTT
tatatacatatttatatatt

SEQ ID NO: 381639 - DNA, 20 bp, Artificial Sequence
  Description of Artificial Sequence: Synthetic oligonucleotide
  Target: LAMA2; (+) strand; PAM type: YTN; PAM sequence: TTT
atatacatatttatatatta

SEQ ID NO: 381640 - DNA, 20 bp, Artificial Sequence
  Description of Artificial Sequence: Synthetic oligonucleotide
  Target: LAMA2; (+) strand; PAM type: YTN; PAM sequence: TTA
tatacatatttatatattat

SEQ ID NO: 381641 - DNA, 20 bp, Artificial Sequence
  Description of Artificial Sequence: Synthetic oligonucleotide
  Target: LAMA2; (+) strand; PAM type: YTN; PAM sequence: TTT
atatattatatatattttat

SEQ ID NO: 381642 - DNA, 20 bp, Artificial Sequence
  Description of Artificial Sequence: Synthetic oligonucleotide
  Target: LAMA2; (+) strand; PAM type: YTN; PAM sequence: TTA
tatattatatatattttata

SEQ ID NO: 381643 - DNA, 20 bp, Artificial Sequence
  Description of Artificial Sequence: Synthetic oligonucleotide
  Target: LAMA2; (+) strand; PAM type: YTN; PAM sequence: TTA
tatatattttatatattata

SEQ ID NO: 381644 - DNA, 20 bp, Artificial Sequence
  Description of Artificial Sequence: Synthetic oligonucleotide
  Target: LAMA2; (+) strand; PAM type: YTN; PAM sequence: TTT
tatatattatatatataatt

SEQ ID NO: 381645 - DNA, 20 bp, Artificial Sequence
  Description of Artificial Sequence: Synthetic oligonucleotide
  Target: LAMA2; (+) strand; PAM type: YTN; PAM sequence: TTT
atatattatatatataattt

SEQ ID NO: 381646 - DNA, 20 bp, Artificial Sequence
  Description of Artificial Sequence: Synthetic oligonucleotide
  Target: LAMA2; (+) strand; PAM type: YTN; PAM sequence: TTA
tatattatatatataattta

SEQ ID NO: 381647 - DNA, 20 bp, Artificial Sequence
  Description of Artificial Sequence: Synthetic oligonucleotide
  Target: LAMA2; (+) strand; PAM type: YTN; PAM sequence: TTA
tatatataatttatatatat

SEQ ID NO: 381648 - DNA, 20 bp, Artificial Sequence
  Description of Artificial Sequence: Synthetic oligonucleotide
  Target: LAMA2; (+) strand; PAM type: YTN; PAM sequence: TTT
atatatataatatataattt

SEQ ID NO: 381649 - DNA, 20 bp, Artificial Sequence
  Description of Artificial Sequence: Synthetic oligonucleotide
  Target: LAMA2; (+) strand; PAM type: YTN; PAM sequence: TTA
tatatataatatataattta

SEQ ID NO: 381650 - DNA, 20 bp, Artificial Sequence
  Description of Artificial Sequence: Synthetic oligonucleotide
  Target: LAMA2; (+) strand; PAM type: YTN; PAM sequence: TTT
atatattatatatatataat

SEQ ID NO: 381651 - DNA, 20 bp, Artificial Sequence
  Description of Artificial Sequence: Synthetic oligonucleotide
  Target: LAMA2; (+) strand; PAM type: YTN; PAM sequence: TTA
tatattatatatatataatt

SEQ ID NO: 381652 - DNA, 20 bp, Artificial Sequence
  Description of Artificial Sequence: Synthetic oligonucleotide
  Target: LAMA2; (+) strand; PAM type: YTN; PAM sequence: TTA
tatatatataattaatatat

SEQ ID NO: 381653 - DNA, 20 bp, Artificial Sequence
  Description of Artificial Sequence: Synthetic oligonucleotide
  Target: LAMA2; (+) strand; PAM type: YTN; PAM sequence: TTA
atatatatattcaaggatga

SEQ ID NO: 381654 - DNA, 20 bp, Artificial Sequence
  Description of Artificial Sequence: Synthetic oligonucleotide
  Target: LAMA2; (+) strand; PAM type: YTN; PAM sequence: TTC
aaggatgaaatccatgcaca

SEQ ID NO: 381655 - DNA, 20 bp, Artificial Sequence
  Description of Artificial Sequence: Synthetic oligonucleotide
  Target: LAMA2; (+) strand; PAM type: YTN; PAM sequence: TTT
tattcagtggtcagcttgct

SEQ ID NO: 381656 - DNA, 20 bp, Artificial Sequence
  Description of Artificial Sequence: Synthetic oligonucleotide
  Target: LAMA2; (+) strand; PAM type: YTN; PAM sequence: TTT
attcagtggtcagcttgcta

SEQ ID NO: 381657 - DNA, 20 bp, Artificial Sequence
  Description of Artificial Sequence: Synthetic oligonucleotide
  Target: LAMA2; (+) strand; PAM type: YTN; PAM sequence: TTA
ttcagtggtcagcttgctaa

SEQ ID NO: 381658 - DNA, 20 bp, Artificial Sequence
  Description of Artificial Sequence: Synthetic oligonucleotide
  Target: LAMA2; (+) strand; PAM type: YTN; PAM sequence: TTC
agtggtcagcttgctaaaga

SEQ ID NO: 381659 - DNA, 20 bp, Artificial Sequence
  Description of Artificial Sequence: Synthetic oligonucleotide
  Target: LAMA2; (+) strand; PAM type: YTN; PAM sequence: CTT
gctaaagaattggaataacc

SEQ ID NO: 381660 - DNA, 20 bp, Artificial Sequence
  Description of Artificial Sequence: Synthetic oligonucleotide
  Target: LAMA2; (+) strand; PAM type: YTN; PAM sequence: TTG
ctaaagaattggaataaccc

SEQ ID NO: 381661 - DNA, 20 bp, Artificial Sequence
  Description of Artificial Sequence: Synthetic oligonucleotide
  Target: LAMA2; (+) strand; PAM type: YTN; PAM sequence: CTA
aagaattggaataacccaca

SEQ ID NO: 381662 - DNA, 20 bp, Artificial Sequence
  Description of Artificial Sequence: Synthetic oligonucleotide
  Target: LAMA2; (+) strand; PAM type: YTN; PAM sequence: TTG
gaataacccacactatgaac

SEQ ID NO: 381663 - DNA, 20 bp, Artificial Sequence
  Description of Artificial Sequence: Synthetic oligonucleotide
  Target: LAMA2; (+) strand; PAM type: YTN; PAM sequence: CTA
tgaaccacttttaaatagat

SEQ ID NO: 381664 - DNA, 20 bp, Artificial Sequence
  Description of Artificial Sequence: Synthetic oligonucleotide
  Target: LAMA2; (+) strand; PAM type: YTN; PAM sequence: CTT
ttaaatagatcttggtttat

SEQ ID NO: 381665 - DNA, 20 bp, Artificial Sequence
  Description of Artificial Sequence: Synthetic oligonucleotide
  Target: LAMA2; (+) strand; PAM type: YTN; PAM sequence: TTT
taaatagatcttggtttatt

SEQ ID NO: 381666 - DNA, 20 bp, Artificial Sequence
  Description of Artificial Sequence: Synthetic oligonucleotide
  Target: LAMA2; (+) strand; PAM type: YTN; PAM sequence: TTT
aaatagatcttggtttattt

SEQ ID NO: 381667 - DNA, 20 bp, Artificial Sequence
  Description of Artificial Sequence: Synthetic oligonucleotide
  Target: LAMA2; (+) strand; PAM type: YTN; PAM sequence: TTA
aatagatcttggtttatttc

SEQ ID NO: 381668 - DNA, 20 bp, Artificial Sequence
  Description of Artificial Sequence: Synthetic oligonucleotide
  Target: LAMA2; (+) strand; PAM type: YTN; PAM sequence: CTT
ggtttatttcttcagttatg

SEQ ID NO: 381669 - DNA, 20 bp, Artificial Sequence
  Description of Artificial Sequence: Synthetic oligonucleotide
  Target: LAMA2; (+) strand; PAM type: YTN; PAM sequence: TTG
gtttatttcttcagttatgc

SEQ ID NO: 381670 - DNA, 20 bp, Artificial Sequence
  Description of Artificial Sequence: Synthetic oligonucleotide
  Target: LAMA2; (+) strand; PAM type: YTN; PAM sequence: TTT
atttcttcagttatgcttaa

SEQ ID NO: 381671 - DNA, 20 bp, Artificial Sequence
  Description of Artificial Sequence: Synthetic oligonucleotide
  Target: LAMA2; (+) strand; PAM type: YTN; PAM sequence: TTA
tttcttcagttatgcttaaa

SEQ ID NO: 381672 - DNA, 20 bp, Artificial Sequence
  Description of Artificial Sequence: Synthetic oligonucleotide
  Target: LAMA2; (+) strand; PAM type: YTN; PAM sequence: TTT
cttcagttatgcttaaacta

SEQ ID NO: 381673 - DNA, 20 bp, Artificial Sequence
  Description of Artificial Sequence: Synthetic oligonucleotide
  Target: LAMA2; (+) strand; PAM type: YTN; PAM sequence: TTC
ttcagttatgcttaaactaa

SEQ ID NO: 381674 - DNA, 20 bp, Artificial Sequence
  Description of Artificial Sequence: Synthetic oligonucleotide
  Target: LAMA2; (+) strand; PAM type: YTN; PAM sequence: CTT
cagttatgcttaaactaatt

SEQ ID NO: 381675 - DNA, 20 bp, Artificial Sequence
  Description of Artificial Sequence: Synthetic oligonucleotide
  Target: LAMA2; (+) strand; PAM type: YTN; PAM sequence: TTC
agttatgcttaaactaattc

SEQ ID NO: 381676 - DNA, 20 bp, Artificial Sequence
  Description of Artificial Sequence: Synthetic oligonucleotide
  Target: LAMA2; (+) strand; PAM type: YTN; PAM sequence: TTA
tgcttaaactaattcttcaa

SEQ ID NO: 381677 - DNA, 20 bp, Artificial Sequence
  Description of Artificial Sequence: Synthetic oligonucleotide
  Target: LAMA2; (+) strand; PAM type: YTN; PAM sequence: CTT
aaactaattcttcaaccatc

SEQ ID NO: 381678 - DNA, 20 bp, Artificial Sequence
  Description of Artificial Sequence: Synthetic oligonucleotide
  Target: LAMA2; (+) strand; PAM type: YTN; PAM sequence: TTA
aactaattcttcaaccatca

SEQ ID NO: 381679 - DNA, 20 bp, Artificial Sequence
  Description of Artificial Sequence: Synthetic oligonucleotide
  Target: LAMA2; (+) strand; PAM type: YTN; PAM sequence: CTA
attcttcaaccatcatttcc

SEQ ID NO: 381680 - DNA, 20 bp, Artificial Sequence
  Description of Artificial Sequence: Synthetic oligonucleotide
  Target: LAMA2; (+) strand; PAM type: YTN; PAM sequence: TTC
ttcaaccatcatttccagga

SEQ ID NO: 381681 - DNA, 20 bp, Artificial Sequence
  Description of Artificial Sequence: Synthetic oligonucleotide
  Target: LAMA2; (+) strand; PAM type: YTN; PAM sequence: CTT
caaccatcatttccaggact

SEQ ID NO: 381682 - DNA, 20 bp, Artificial Sequence
  Description of Artificial Sequence: Synthetic oligonucleotide
  Target: LAMA2; (+) strand; PAM type: YTN; PAM sequence: TTC
aaccatcatttccaggactt

SEQ ID NO: 381683 - DNA, 20 bp, Artificial Sequence
  Description of Artificial Sequence: Synthetic oligonucleotide
  Target: LAMA2; (+) strand; PAM type: YTN; PAM sequence: TTT
ccaggacttattcaataata

SEQ ID NO: 381684 - DNA, 20 bp, Artificial Sequence
  Description of Artificial Sequence: Synthetic oligonucleotide
  Target: LAMA2; (+) strand; PAM type: YTN; PAM sequence: TTC
caggacttattcaataataa

SEQ ID NO: 381685 - DNA, 20 bp, Artificial Sequence
  Description of Artificial Sequence: Synthetic oligonucleotide
  Target: LAMA2; (+) strand; PAM type: YTN; PAM sequence: CTT
attcaataataatggcaaaa

SEQ ID NO: 381686 - DNA, 20 bp, Artificial Sequence
  Description of Artificial Sequence: Synthetic oligonucleotide
  Target: LAMA2; (+) strand; PAM type: YTN; PAM sequence: TTA
ttcaataataatggcaaaaa

SEQ ID NO: 381687 - DNA, 20 bp, Artificial Sequence
  Description of Artificial Sequence: Synthetic oligonucleotide
  Target: LAMA2; (+) strand; PAM type: YTN; PAM sequence: TTC
aataataatggcaaaaatga

SEQ ID NO: 381688 - DNA, 20 bp, Artificial Sequence
  Description of Artificial Sequence: Synthetic oligonucleotide
  Target: LAMA2; (+) strand; PAM type: YTN; PAM sequence: CTT
gctttttaaataatatgtat

SEQ ID NO: 381689 - DNA, 20 bp, Artificial Sequence
  Description of Artificial Sequence: Synthetic oligonucleotide
  Target: LAMA2; (+) strand; PAM type: YTN; PAM sequence: TTG
ctttttaaataatatgtata

SEQ ID NO: 381690 - DNA, 20 bp, Artificial Sequence
  Description of Artificial Sequence: Synthetic oligonucleotide
  Target: LAMA2; (+) strand; PAM type: YTN; PAM sequence: CTT
tttaaataatatgtataaac

SEQ ID NO: 381691 - DNA, 20 bp, Artificial Sequence
  Description of Artificial Sequence: Synthetic oligonucleotide
  Target: LAMA2; (+) strand; PAM type: YTN; PAM sequence: TTT
ttaaataatatgtataaact

SEQ ID NO: 381692 - DNA, 20 bp, Artificial Sequence
  Description of Artificial Sequence: Synthetic oligonucleotide
  Target: LAMA2; (+) strand; PAM type: YTN; PAM sequence: TTT
taaataatatgtataaactt

SEQ ID NO: 381693 - DNA, 20 bp, Artificial Sequence
  Description of Artificial Sequence: Synthetic oligonucleotide
  Target: LAMA2; (+) strand; PAM type: YTN; PAM sequence: TTT
aaataatatgtataaacttt

SEQ ID NO: 381694 - DNA, 20 bp, Artificial Sequence
  Description of Artificial Sequence: Synthetic oligonucleotide
  Target: LAMA2; (+) strand; PAM type: YTN; PAM sequence: TTA
aataatatgtataaacttta

SEQ ID NO: 381695 - DNA, 20 bp, Artificial Sequence
  Description of Artificial Sequence: Synthetic oligonucleotide
  Target: LAMA2; (+) strand; PAM type: YTN; PAM sequence: CTT
tattaaattatatgattatg

SEQ ID NO: 381696 - DNA, 20 bp, Artificial Sequence
  Description of Artificial Sequence: Synthetic oligonucleotide
  Target: LAMA2; (+) strand; PAM type: YTN; PAM sequence: TTT
attaaattatatgattatgt

SEQ ID NO: 381697 - DNA, 20 bp, Artificial Sequence
  Description of Artificial Sequence: Synthetic oligonucleotide
  Target: LAMA2; (+) strand; PAM type: YTN; PAM sequence: TTA
ttaaattatatgattatgtc

SEQ ID NO: 381698 - DNA, 20 bp, Artificial Sequence
  Description of Artificial Sequence: Synthetic oligonucleotide
  Target: LAMA2; (+) strand; PAM type: YTN; PAM sequence: TTA
aattatatgattatgtccac

SEQ ID NO: 381699 - DNA, 20 bp, Artificial Sequence
  Description of Artificial Sequence: Synthetic oligonucleotide
  Target: LAMA2; (+) strand; PAM type: YTN; PAM sequence: TTA
tatgattatgtccaccataa

SEQ ID NO: 381700 - DNA, 20 bp, Artificial Sequence
  Description of Artificial Sequence: Synthetic oligonucleotide
  Target: LAMA2; (+) strand; PAM type: YTN; PAM sequence: TTA
tgtccaccataagacaaata

SEQ ID NO: 381701 - DNA, 20 bp, Artificial Sequence
  Description of Artificial Sequence: Synthetic oligonucleotide
  Target: LAMA2; (+) strand; PAM type: YTN; PAM sequence: CTC
aaaatagtttgaatactatt

SEQ ID NO: 381702 - DNA, 20 bp, Artificial Sequence
  Description of Artificial Sequence: Synthetic oligonucleotide
  Target: LAMA2; (+) strand; PAM type: YTN; PAM sequence: TTT
gaatactattctcagtttta

SEQ ID NO: 381703 - DNA, 20 bp, Artificial Sequence
  Description of Artificial Sequence: Synthetic oligonucleotide
  Target: LAMA2; (+) strand; PAM type: YTN; PAM sequence: TTG
aatactattctcagttttat

SEQ ID NO: 381704 - DNA, 20 bp, Artificial Sequence
  Description of Artificial Sequence: Synthetic oligonucleotide
  Target: LAMA2; (+) strand; PAM type: YTN; PAM sequence: CTA
ttctcagttttatcagcttg

SEQ ID NO: 381705 - DNA, 20 bp, Artificial Sequence
  Description of Artificial Sequence: Synthetic oligonucleotide
  Target: LAMA2; (+) strand; PAM type: YTN; PAM sequence: TTC
tcagttttatcagcttgctc

SEQ ID NO: 381706 - DNA, 20 bp, Artificial Sequence
  Description of Artificial Sequence: Synthetic oligonucleotide
  Target: LAMA2; (+) strand; PAM type: YTN; PAM sequence: CTC
agttttatcagcttgctcaa

SEQ ID NO: 381707 - DNA, 20 bp, Artificial Sequence
  Description of Artificial Sequence: Synthetic oligonucleotide
  Target: LAMA2; (+) strand; PAM type: YTN; PAM sequence: TTT
tatcagcttgctcaaagttg

SEQ ID NO: 381708 - DNA, 20 bp, Artificial Sequence
  Description of Artificial Sequence: Synthetic oligonucleotide
  Target: LAMA2; (+) strand; PAM type: YTN; PAM sequence: TTT
atcagcttgctcaaagttgg

SEQ ID NO: 381709 - DNA, 20 bp, Artificial Sequence
  Description of Artificial Sequence: Synthetic oligonucleotide
  Target: LAMA2; (+) strand; PAM type: YTN; PAM sequence: TTA
tcagcttgctcaaagttggg

SEQ ID NO: 381710 - DNA, 20 bp, Artificial Sequence
  Description of Artificial Sequence: Synthetic oligonucleotide
  Target: LAMA2; (+) strand; PAM type: YTN; PAM sequence: CTT
gctcaaagttgggacattat

SEQ ID NO: 381711 - DNA, 20 bp, Artificial Sequence
  Description of Artificial Sequence: Synthetic oligonucleotide
  Target: LAMA2; (+) strand; PAM type: YTN; PAM sequence: TTG
ctcaaagttgggacattatt

SEQ ID NO: 381712 - DNA, 20 bp, Artificial Sequence
  Description of Artificial Sequence: Synthetic oligonucleotide
  Target: LAMA2; (+) strand; PAM type: YTN; PAM sequence: CTC
aaagttgggacattattaaa

SEQ ID NO: 381713 - DNA, 20 bp, Artificial Sequence
  Description of Artificial Sequence: Synthetic oligonucleotide
  Target: LAMA2; (+) strand; PAM type: YTN; PAM sequence: TTG
ggacattattaaatctcatt

SEQ ID NO: 381714 - DNA, 20 bp, Artificial Sequence
  Description of Artificial Sequence: Synthetic oligonucleotide
  Target: LAMA2; (+) strand; PAM type: YTN; PAM sequence: TTA
ttaaatctcattagaattta

SEQ ID NO: 381715 - DNA, 20 bp, Artificial Sequence
  Description of Artificial Sequence: Synthetic oligonucleotide
  Target: LAMA2; (+) strand; PAM type: YTN; PAM sequence: TTA
aatctcattagaatttattt

SEQ ID NO: 381716 - DNA, 20 bp, Artificial Sequence
  Description of Artificial Sequence: Synthetic oligonucleotide
  Target: LAMA2; (+) strand; PAM type: YTN; PAM sequence: CTC
attagaatttattttaggct

SEQ ID NO: 381717 - DNA, 20 bp, Artificial Sequence
  Description of Artificial Sequence: Synthetic oligonucleotide
  Target: LAMA2; (+) strand; PAM type: YTN; PAM sequence: TTA
gaatttattttaggctgtga

SEQ ID NO: 381718 - DNA, 20 bp, Artificial Sequence
  Description of Artificial Sequence: Synthetic oligonucleotide
  Target: LAMA2; (+) strand; PAM type: YTN; PAM sequence: TTT
attttaggctgtgataaaag

SEQ ID NO: 381719 - DNA, 20 bp, Artificial Sequence
  Description of Artificial Sequence: Synthetic oligonucleotide
  Target: LAMA2; (+) strand; PAM type: YTN; PAM sequence: TTA
ttttaggctgtgataaaagc

SEQ ID NO: 381720 - DNA, 20 bp, Artificial Sequence
  Description of Artificial Sequence: Synthetic oligonucleotide
  Target: LAMA2; (+) strand; PAM type: YTN; PAM sequence: TTT
taggctgtgataaaagcaga

SEQ ID NO: 381721 - DNA, 20 bp, Artificial Sequence
  Description of Artificial Sequence: Synthetic oligonucleotide
  Target: LAMA2; (+) strand; PAM type: YTN; PAM sequence: TTT
aggctgtgataaaagcagag

SEQ ID NO: 381722 - DNA, 20 bp, Artificial Sequence
  Description of Artificial Sequence: Synthetic oligonucleotide
  Target: LAMA2; (+) strand; PAM type: YTN; PAM sequence: TTA
ggctgtgataaaagcagaga

SEQ ID NO: 381723 - DNA, 20 bp, Artificial Sequence
  Description of Artificial Sequence: Synthetic oligonucleotide
  Target: LAMA2; (+) strand; PAM type: YTN; PAM sequence: CTG
tgataaaagcagagagtctc

SEQ ID NO: 381724 - DNA, 20 bp, Artificial Sequence
  Description of Artificial Sequence: Synthetic oligonucleotide
  Target: LAMA2; (+) strand; PAM type: YTN; PAM sequence: CTC
ttgattaagtgcttaattga

SEQ ID NO: 381725 - DNA, 20 bp, Artificial Sequence
  Description of Artificial Sequence: Synthetic oligonucleotide
  Target: LAMA2; (+) strand; PAM type: YTN; PAM sequence: CTT
gattaagtgcttaattgaag

SEQ ID NO: 381726 - DNA, 20 bp, Artificial Sequence
  Description of Artificial Sequence: Synthetic oligonucleotide
  Target: LAMA2; (+) strand; PAM type: YTN; PAM sequence: TTG
attaagtgcttaattgaagt

SEQ ID NO: 381727 - DNA, 20 bp, Artificial Sequence
  Description of Artificial Sequence: Synthetic oligonucleotide
  Target: LAMA2; (+) strand; PAM type: YTN; PAM sequence: TTA
agtgcttaattgaagtactt

SEQ ID NO: 381728 - DNA, 20 bp, Artificial Sequence
  Description of Artificial Sequence: Synthetic oligonucleotide
  Target: LAMA2; (+) strand; PAM type: YTN; PAM sequence: CTT
aattgaagtacttttgcatt

SEQ ID NO: 381729 - DNA, 20 bp, Artificial Sequence
  Description of Artificial Sequence: Synthetic oligonucleotide
  Target: LAMA2; (+) strand; PAM type: YTN; PAM sequence: TTA
attgaagtacttttgcatta

SEQ ID NO: 381730 - DNA, 20 bp, Artificial Sequence
  Description of Artificial Sequence: Synthetic oligonucleotide
  Target: LAMA2; (+) strand; PAM type: YTN; PAM sequence: TTG
aagtacttttgcattatcca

SEQ ID NO: 381731 - DNA, 20 bp, Artificial Sequence
  Description of Artificial Sequence: Synthetic oligonucleotide
  Target: LAMA2; (+) strand; PAM type: YTN; PAM sequence: CTT
ttgcattatccaaatcaaaa

SEQ ID NO: 381732 - DNA, 20 bp, Artificial Sequence
  Description of Artificial Sequence: Synthetic oligonucleotide
  Target: LAMA2; (+) strand; PAM type: YTN; PAM sequence: TTT
tgcattatccaaatcaaaat

SEQ ID NO: 381733 - DNA, 20 bp, Artificial Sequence
  Description of Artificial Sequence: Synthetic oligonucleotide
  Target: LAMA2; (+) strand; PAM type: YTN; PAM sequence: TTT
gcattatccaaatcaaaata

SEQ ID NO: 381734 - DNA, 20 bp, Artificial Sequence
  Description of Artificial Sequence: Synthetic oligonucleotide
  Target: LAMA2; (+) strand; PAM type: YTN; PAM sequence: TTG
cattatccaaatcaaaataa

SEQ ID NO: 381735 - DNA, 20 bp, Artificial Sequence
  Description of Artificial Sequence: Synthetic oligonucleotide
  Target: LAMA2; (+) strand; PAM type: YTN; PAM sequence: TTA
tccaaatcaaaataaacaag

SEQ ID NO: 381736 - DNA, 20 bp, Artificial Sequence
  Description of Artificial Sequence: Synthetic oligonucleotide
  Target: LAMA2; (+) strand; PAM type: YTN; PAM sequence: CTA
gctattaagctagatctttt

SEQ ID NO: 381737 - DNA, 20 bp, Artificial Sequence
  Description of Artificial Sequence: Synthetic oligonucleotide
  Target: LAMA2; (+) strand; PAM type: YTN; PAM sequence: CTA
ttaagctagatctttttaag

SEQ ID NO: 381738 - DNA, 20 bp, Artificial Sequence
  Description of Artificial Sequence: Synthetic oligonucleotide
  Target: LAMA2; (+) strand; PAM type: YTN; PAM sequence: TTA
agctagatctttttaaggag

SEQ ID NO: 381739 - DNA, 20 bp, Artificial Sequence
  Description of Artificial Sequence: Synthetic oligonucleotide
  Target: LAMA2; (+) strand; PAM type: YTN; PAM sequence: CTA
gatctttttaaggagcttct

SEQ ID NO: 381740 - DNA, 20 bp, Artificial Sequence
  Description of Artificial Sequence: Synthetic oligonucleotide
  Target: LAMA2; (+) strand; PAM type: YTN; PAM sequence: CTT
tttaaggagcttctttgtat

SEQ ID NO: 381741 - DNA, 20 bp, Artificial Sequence
  Description of Artificial Sequence: Synthetic oligonucleotide
  Target: LAMA2; (+) strand; PAM type: YTN; PAM sequence: TTT
ttaaggagcttctttgtata

SEQ ID NO: 381742 - DNA, 20 bp, Artificial Sequence
  Description of Artificial Sequence: Synthetic oligonucleotide
  Target: LAMA2; (+) strand; PAM type: YTN; PAM sequence: TTT
taaggagcttctttgtatat

SEQ ID NO: 381743 - DNA, 20 bp, Artificial Sequence
  Description of Artificial Sequence: Synthetic oligonucleotide
  Target: LAMA2; (+) strand; PAM type: YTN; PAM sequence: TTT
aaggagcttctttgtatatt

SEQ ID NO: 381744 - DNA, 20 bp, Artificial Sequence
  Description of Artificial Sequence: Synthetic oligonucleotide
  Target: LAMA2; (+) strand; PAM type: YTN; PAM sequence: TTA
aggagcttctttgtatattt

SEQ ID NO: 381745 - DNA, 20 bp, Artificial Sequence
  Description of Artificial Sequence: Synthetic oligonucleotide
  Target: LAMA2; (+) strand; PAM type: YTN; PAM sequence: CTT
ctttgtatatttgtctctgg

SEQ ID NO: 381746 - DNA, 20 bp, Artificial Sequence
  Description of Artificial Sequence: Synthetic oligonucleotide
  Target: LAMA2; (+) strand; PAM type: YTN; PAM sequence: TTC
tttgtatatttgtctctgga

SEQ ID NO: 381747 - DNA, 20 bp, Artificial Sequence
  Description of Artificial Sequence: Synthetic oligonucleotide
  Target: LAMA2; (+) strand; PAM type: YTN; PAM sequence: CTT
tgtatatttgtctctggact

SEQ ID NO: 381748 - DNA, 20 bp, Artificial Sequence
  Description of Artificial Sequence: Synthetic oligonucleotide
  Target: LAMA2; (+) strand; PAM type: YTN; PAM sequence: TTT
gtatatttgtctctggactg

SEQ ID NO: 381749 - DNA, 20 bp, Artificial Sequence
  Description of Artificial Sequence: Synthetic oligonucleotide
  Target: LAMA2; (+) strand; PAM type: YTN; PAM sequence: TTG
tatatttgtctctggactgt

SEQ ID NO: 381750 - DNA, 20 bp, Artificial Sequence
  Description of Artificial Sequence: Synthetic oligonucleotide
  Target: LAMA2; (+) strand; PAM type: YTN; PAM sequence: TTT
gtctctggactgtctaggcc

SEQ ID NO: 381751 - DNA, 20 bp, Artificial Sequence
  Description of Artificial Sequence: Synthetic oligonucleotide
  Target: LAMA2; (+) strand; PAM type: YTN; PAM sequence: TTG
tctctggactgtctaggcca

SEQ ID NO: 381752 - DNA, 20 bp, Artificial Sequence
  Description of Artificial Sequence: Synthetic oligonucleotide
  Target: LAMA2; (+) strand; PAM type: YTN; PAM sequence: CTC
tggactgtctaggccagaac

SEQ ID NO: 381753 - DNA, 20 bp, Artificial Sequence
  Description of Artificial Sequence: Synthetic oligonucleotide
  Target: LAMA2; (+) strand; PAM type: YTN; PAM sequence: CTG
gactgtctaggccagaacca

SEQ ID NO: 381754 - DNA, 20 bp, Artificial Sequence
  Description of Artificial Sequence: Synthetic oligonucleotide
  Target: LAMA2; (+) strand; PAM type: YTN; PAM sequence: CTG
tctaggccagaaccaaaggg

SEQ ID NO: 381755 - DNA, 20 bp, Artificial Sequence
  Description of Artificial Sequence: Synthetic oligonucleotide
  Target: LAMA2; (+) strand; PAM type: YTN; PAM sequence: CTA
ggccagaaccaaagggatgt

SEQ ID NO: 381756 - DNA, 20 bp, Artificial Sequence
  Description of Artificial Sequence: Synthetic oligonucleotide
  Target: LAMA2; (+) strand; PAM type: YTN; PAM sequence: CTA
gaaagttcttaatctgatat

SEQ ID NO: 381757 - DNA, 20 bp, Artificial Sequence
  Description of Artificial Sequence: Synthetic oligonucleotide
  Target: LAMA2; (+) strand; PAM type: YTN; PAM sequence: TTC
ttaatctgatattttttctg

SEQ ID NO: 381758 - DNA, 20 bp, Artificial Sequence
  Description of Artificial Sequence: Synthetic oligonucleotide
  Target: LAMA2; (+) strand; PAM type: YTN; PAM sequence: CTT
aatctgatattttttctggc

SEQ ID NO: 381759 - DNA, 20 bp, Artificial Sequence
  Description of Artificial Sequence: Synthetic oligonucleotide
  Target: LAMA2; (+) strand; PAM type: YTN; PAM sequence: TTA
atctgatattttttctggct

SEQ ID NO: 381760 - DNA, 20 bp, Artificial Sequence
  Description of Artificial Sequence: Synthetic oligonucleotide
  Target: LAMA2; (+) strand; PAM type: YTN; PAM sequence: CTG
atattttttctggcttagtc

SEQ ID NO: 381761 - DNA, 20 bp, Artificial Sequence
  Description of Artificial Sequence: Synthetic oligonucleotide
  Target: LAMA2; (+) strand; PAM type: YTN; PAM sequence: TTT
tttctggcttagtcagcaat

SEQ ID NO: 381762 - DNA, 20 bp, Artificial Sequence
  Description of Artificial Sequence: Synthetic oligonucleotide
  Target: LAMA2; (+) strand; PAM type: YTN; PAM sequence: TTT
ttctggcttagtcagcaatc

SEQ ID NO: 381763 - DNA, 20 bp, Artificial Sequence
  Description of Artificial Sequence: Synthetic oligonucleotide
  Target: LAMA2; (+) strand; PAM type: YTN; PAM sequence: TTT
tctggcttagtcagcaatca

SEQ ID NO: 381764 - DNA, 20 bp, Artificial Sequence
  Description of Artificial Sequence: Synthetic oligonucleotide
  Target: LAMA2; (+) strand; PAM type: YTN; PAM sequence: TTT
ctggcttagtcagcaatcac

SEQ ID NO: 381765 - DNA, 20 bp, Artificial Sequence
  Description of Artificial Sequence: Synthetic oligonucleotide
  Target: LAMA2; (+) strand; PAM type: YTN; PAM sequence: TTC
tggcttagtcagcaatcact

SEQ ID NO: 381766 - DNA, 20 bp, Artificial Sequence
  Description of Artificial Sequence: Synthetic oligonucleotide
  Target: LAMA2; (+) strand; PAM type: YTN; PAM sequence: CTG
gcttagtcagcaatcacttt

SEQ ID NO: 381767 - DNA, 20 bp, Artificial Sequence
  Description of Artificial Sequence: Synthetic oligonucleotide
  Target: LAMA2; (+) strand; PAM type: YTN; PAM sequence: CTT
agtcagcaatcacttttctt

SEQ ID NO: 381768 - DNA, 20 bp, Artificial Sequence
  Description of Artificial Sequence: Synthetic oligonucleotide
  Target: LAMA2; (+) strand; PAM type: YTN; PAM sequence: TTA
gtcagcaatcacttttcttt

SEQ ID NO: 381769 - DNA, 20 bp, Artificial Sequence
  Description of Artificial Sequence: Synthetic oligonucleotide
  Target: LAMA2; (+) strand; PAM type: YTN; PAM sequence: CTT
ttctttcatcaatgggcata

SEQ ID NO: 381770 - DNA, 20 bp, Artificial Sequence
  Description of Artificial Sequence: Synthetic oligonucleotide
  Target: LAMA2; (+) strand; PAM type: YTN; PAM sequence: TTT
tctttcatcaatgggcataa

SEQ ID NO: 381771 - DNA, 20 bp, Artificial Sequence
  Description of Artificial Sequence: Synthetic oligonucleotide
  Target: LAMA2; (+) strand; PAM type: YTN; PAM sequence: TTT
ctttcatcaatgggcataag

SEQ ID NO: 381772 - DNA, 20 bp, Artificial Sequence
  Description of Artificial Sequence: Synthetic oligonucleotide
  Target: LAMA2; (+) strand; PAM type: YTN; PAM sequence: TTC
tttcatcaatgggcataaga

SEQ ID NO: 381773 - DNA, 20 bp, Artificial Sequence
  Description of Artificial Sequence: Synthetic oligonucleotide
  Target: LAMA2; (+) strand; PAM type: YTN; PAM sequence: CTT
tcatcaatgggcataagatt

SEQ ID NO: 381774 - DNA, 20 bp, Artificial Sequence
  Description of Artificial Sequence: Synthetic oligonucleotide
  Target: LAMA2; (+) strand; PAM type: YTN; PAM sequence: TTT
catcaatgggcataagattt

SEQ ID NO: 381775 - DNA, 20 bp, Artificial Sequence
  Description of Artificial Sequence: Synthetic oligonucleotide
  Target: LAMA2; (+) strand; PAM type: YTN; PAM sequence: TTC
atcaatgggcataagatttt

SEQ ID NO: 381776 - DNA, 20 bp, Artificial Sequence
  Description of Artificial Sequence: Synthetic oligonucleotide
  Target: LAMA2; (+) strand; PAM type: YTN; PAM sequence: TTT
ttaagtgaaaaaaaaaaatt

SEQ ID NO: 381777 - DNA, 20 bp, Artificial Sequence
  Description of Artificial Sequence: Synthetic oligonucleotide
  Target: LAMA2; (+) strand; PAM type: YTN; PAM sequence: TTT
taagtgaaaaaaaaaaattc

SEQ ID NO: 381778 - DNA, 20 bp, Artificial Sequence
  Description of Artificial Sequence: Synthetic oligonucleotide
  Target: LAMA2; (+) strand; PAM type: YTN; PAM sequence: TTT
aagtgaaaaaaaaaaattct

SEQ ID NO: 381779 - DNA, 20 bp, Artificial Sequence
  Description of Artificial Sequence: Synthetic oligonucleotide
  Target: LAMA2; (+) strand; PAM type: YTN; PAM sequence: TTA
agtgaaaaaaaaaaattcta

SEQ ID NO: 381780 - DNA, 20 bp, Artificial Sequence
  Description of Artificial Sequence: Synthetic oligonucleotide
  Target: LAMA2; (+) strand; PAM type: YTN; PAM sequence: TTC
tacttaaccaaggtggtaaa

SEQ ID NO: 381781 - DNA, 20 bp, Artificial Sequence
  Description of Artificial Sequence: Synthetic oligonucleotide
  Target: LAMA2; (+) strand; PAM type: YTN; PAM sequence: CTA
cttaaccaaggtggtaaaat

SEQ ID NO: 381782 - DNA, 20 bp, Artificial Sequence
  Description of Artificial Sequence: Synthetic oligonucleotide
  Target: LAMA2; (+) strand; PAM type: YTN; PAM sequence: CTT
aaccaaggtggtaaaatagt

SEQ ID NO: 381783 - DNA, 20 bp, Artificial Sequence
  Description of Artificial Sequence: Synthetic oligonucleotide
  Target: LAMA2; (+) strand; PAM type: YTN; PAM sequence: TTA
accaaggtggtaaaatagtc

SEQ ID NO: 381784 - DNA, 20 bp, Artificial Sequence
  Description of Artificial Sequence: Synthetic oligonucleotide
  Target: LAMA2; (+) strand; PAM type: YTN; PAM sequence: CTT
gtaattctccatgggatttg

SEQ ID NO: 381785 - DNA, 20 bp, Artificial Sequence
  Description of Artificial Sequence: Synthetic oligonucleotide
  Target: LAMA2; (+) strand; PAM type: YTN; PAM sequence: TTG
taattctccatgggatttga

SEQ ID NO: 381786 - DNA, 20 bp, Artificial Sequence
  Description of Artificial Sequence: Synthetic oligonucleotide
  Target: LAMA2; (+) strand; PAM type: YTN; PAM sequence: TTC
tccatgggatttgaaaaact

SEQ ID NO: 381787 - DNA, 20 bp, Artificial Sequence
  Description of Artificial Sequence: Synthetic oligonucleotide
  Target: LAMA2; (+) strand; PAM type: YTN; PAM sequence: CTC
catgggatttgaaaaactga

SEQ ID NO: 381788 - DNA, 20 bp, Artificial Sequence
  Description of Artificial Sequence: Synthetic oligonucleotide
  Target: LAMA2; (+) strand; PAM type: YTN; PAM sequence: TTT
gaaaaactgactcctacctt

SEQ ID NO: 381789 - DNA, 20 bp, Artificial Sequence
  Description of Artificial Sequence: Synthetic oligonucleotide
  Target: LAMA2; (+) strand; PAM type: YTN; PAM sequence: TTG
aaaaactgactcctaccttt

SEQ ID NO: 381790 - DNA, 20 bp, Artificial Sequence
  Description of Artificial Sequence: Synthetic oligonucleotide
  Target: LAMA2; (+) strand; PAM type: YTN; PAM sequence: CTG
actcctaccttttattcata

SEQ ID NO: 381791 - DNA, 20 bp, Artificial Sequence
  Description of Artificial Sequence: Synthetic oligonucleotide
  Target: LAMA2; (+) strand; PAM type: YTN; PAM sequence: CTC
ctaccttttattcataaatc

SEQ ID NO: 381792 - DNA, 20 bp, Artificial Sequence
  Description of Artificial Sequence: Synthetic oligonucleotide
  Target: LAMA2; (+) strand; PAM type: YTN; PAM sequence: CTA
ccttttattcataaatcaag

SEQ ID NO: 381793 - DNA, 20 bp, Artificial Sequence
  Description of Artificial Sequence: Synthetic oligonucleotide
  Target: LAMA2; (+) strand; PAM type: YTN; PAM sequence: CTT
ttattcataaatcaagcaat

SEQ ID NO: 381794 - DNA, 20 bp, Artificial Sequence
  Description of Artificial Sequence: Synthetic oligonucleotide
  Target: LAMA2; (+) strand; PAM type: YTN; PAM sequence: TTT
tattcataaatcaagcaatg

SEQ ID NO: 381795 - DNA, 20 bp, Artificial Sequence
  Description of Artificial Sequence: Synthetic oligonucleotide
  Target: LAMA2; (+) strand; PAM type: YTN; PAM sequence: TTT
attcataaatcaagcaatgt

SEQ ID NO: 381796 - DNA, 20 bp, Artificial Sequence
  Description of Artificial Sequence: Synthetic oligonucleotide
  Target: LAMA2; (+) strand; PAM type: YTN; PAM sequence: TTA
ttcataaatcaagcaatgtc

SEQ ID NO: 381797 - DNA, 20 bp, Artificial Sequence
  Description of Artificial Sequence: Synthetic oligonucleotide
  Target: LAMA2; (+) strand; PAM type: YTN; PAM sequence: TTC
ataaatcaagcaatgtctgc

SEQ ID NO: 381798 - DNA, 20 bp, Artificial Sequence
  Description of Artificial Sequence: Synthetic oligonucleotide
  Target: LAMA2; (+) strand; PAM type: YTN; PAM sequence: CTG
cagctatgcatgaggagagg

SEQ ID NO: 381799 - DNA, 20 bp, Artificial Sequence
  Description of Artificial Sequence: Synthetic oligonucleotide
  Target: LAMA2; (+) strand; PAM type: YTN; PAM sequence: CTA
tgcatgaggagaggactgag

SEQ ID NO: 381800 - DNA, 20 bp, Artificial Sequence
  Description of Artificial Sequence: Synthetic oligonucleotide
  Target: LAMA2; (+) strand; PAM type: YTN; PAM sequence: CTG
agcctgaaacacaagacggt

SEQ ID NO: 381801 - DNA, 20 bp, Artificial Sequence
  Description of Artificial Sequence: Synthetic oligonucleotide
  Target: LAMA2; (+) strand; PAM type: YTN; PAM sequence: CTG
aaacacaagacggttttcat

SEQ ID NO: 381802 - DNA, 20 bp, Artificial Sequence
  Description of Artificial Sequence: Synthetic oligonucleotide
  Target: LAMA2; (+) strand; PAM type: YTN; PAM sequence: TTT
tcatcttcgtgccagagctg

SEQ ID NO: 381803 - DNA, 20 bp, Artificial Sequence
  Description of Artificial Sequence: Synthetic oligonucleotide
  Target: LAMA2; (+) strand; PAM type: YTN; PAM sequence: TTT
catcttcgtgccagagctgt

SEQ ID NO: 381804 - DNA, 20 bp, Artificial Sequence
  Description of Artificial Sequence: Synthetic oligonucleotide
  Target: LAMA2; (+) strand; PAM type: YTN; PAM sequence: TTC
atcttcgtgccagagctgtg

SEQ ID NO: 381805 - DNA, 20 bp, Artificial Sequence
  Description of Artificial Sequence: Synthetic oligonucleotide
  Target: LAMA2; (+) strand; PAM type: YTN; PAM sequence: CTT
cgtgccagagctgtggacta

SEQ ID NO: 381806 - DNA, 20 bp, Artificial Sequence
  Description of Artificial Sequence: Synthetic oligonucleotide
  Target: LAMA2; (+) strand; PAM type: YTN; PAM sequence: TTC
gtgccagagctgtggactac

SEQ ID NO: 381807 - DNA, 20 bp, Artificial Sequence
  Description of Artificial Sequence: Synthetic oligonucleotide
  Target: LAMA2; (+) strand; PAM type: YTN; PAM sequence: CTG
tggactaccttccagaaagc

SEQ ID NO: 381808 - DNA, 20 bp, Artificial Sequence
  Description of Artificial Sequence: Synthetic oligonucleotide
  Target: LAMA2; (+) strand; PAM type: YTN; PAM sequence: CTA
ccttccagaaagccagagat

SEQ ID NO: 381809 - DNA, 20 bp, Artificial Sequence
  Description of Artificial Sequence: Synthetic oligonucleotide
  Target: LAMA2; (+) strand; PAM type: YTN; PAM sequence: CTT
ccagaaagccagagatgttt

SEQ ID NO: 381810 - DNA, 20 bp, Artificial Sequence
  Description of Artificial Sequence: Synthetic oligonucleotide
  Target: LAMA2; (+) strand; PAM type: YTN; PAM sequence: TTC
cagaaagccagagatgtttg

SEQ ID NO: 381811 - DNA, 20 bp, Artificial Sequence
  Description of Artificial Sequence: Synthetic oligonucleotide
  Target: LAMA2; (+) strand; PAM type: YTN; PAM sequence: TTT
gttgatacattttcataata

SEQ ID NO: 381812 - DNA, 20 bp, Artificial Sequence
  Description of Artificial Sequence: Synthetic oligonucleotide
  Target: LAMA2; (+) strand; PAM type: YTN; PAM sequence: TTG
ttgatacattttcataataa

SEQ ID NO: 381813 - DNA, 20 bp, Artificial Sequence
  Description of Artificial Sequence: Synthetic oligonucleotide
  Target: LAMA2; (+) strand; PAM type: YTN; PAM sequence: TTG
atacattttcataataaacc

SEQ ID NO: 381814 - DNA, 20 bp, Artificial Sequence
  Description of Artificial Sequence: Synthetic oligonucleotide
  Target: LAMA2; (+) strand; PAM type: YTN; PAM sequence: TTT
tcataataaacccaaatgaa

SEQ ID NO: 381815 - DNA, 20 bp, Artificial Sequence
  Description of Artificial Sequence: Synthetic oligonucleotide
  Target: LAMA2; (+) strand; PAM type: YTN; PAM sequence: TTT
cataataaacccaaatgaag

SEQ ID NO: 381816 - DNA, 20 bp, Artificial Sequence
  Description of Artificial Sequence: Synthetic oligonucleotide
  Target: LAMA2; (+) strand; PAM type: YTN; PAM sequence: TTC
ataataaacccaaatgaaga

SEQ ID NO: 381817 - DNA, 20 bp, Artificial Sequence
  Description of Artificial Sequence: Synthetic oligonucleotide
  Target: LAMA2; (+) strand; PAM type: YTN; PAM sequence: CTT
gattttgcatatgtcagctt

SEQ ID NO: 381818 - DNA, 20 bp, Artificial Sequence
  Description of Artificial Sequence: Synthetic oligonucleotide
  Target: LAMA2; (+) strand; PAM type: YTN; PAM sequence: TTG
attttgcatatgtcagcttc

SEQ ID NO: 381819 - DNA, 20 bp, Artificial Sequence
  Description of Artificial Sequence: Synthetic oligonucleotide
  Target: LAMA2; (+) strand; PAM type: YTN; PAM sequence: TTT
tgcatatgtcagcttcacta

SEQ ID NO: 381820 - DNA, 20 bp, Artificial Sequence
  Description of Artificial Sequence: Synthetic oligonucleotide
  Target: LAMA2; (+) strand; PAM type: YTN; PAM sequence: TTT
gcatatgtcagcttcactag

SEQ ID NO: 381821 - DNA, 20 bp, Artificial Sequence
  Description of Artificial Sequence: Synthetic oligonucleotide
  Target: LAMA2; (+) strand; PAM type: YTN; PAM sequence: TTG
catatgtcagcttcactaga

SEQ ID NO: 381822 - DNA, 20 bp, Artificial Sequence
  Description of Artificial Sequence: Synthetic oligonucleotide
  Target: LAMA2; (+) strand; PAM type: YTN; PAM sequence: CTT
cactagaagttttctgtttg

SEQ ID NO: 381823 - DNA, 20 bp, Artificial Sequence
  Description of Artificial Sequence: Synthetic oligonucleotide
  Target: LAMA2; (+) strand; PAM type: YTN; PAM sequence: TTC
actagaagttttctgtttgc

SEQ ID NO: 381824 - DNA, 20 bp, Artificial Sequence
  Description of Artificial Sequence: Synthetic oligonucleotide
  Target: LAMA2; (+) strand; PAM type: YTN; PAM sequence: CTA
gaagttttctgtttgctttc

SEQ ID NO: 381825 - DNA, 20 bp, Artificial Sequence
  Description of Artificial Sequence: Synthetic oligonucleotide
  Target: LAMA2; (+) strand; PAM type: YTN; PAM sequence: TTT
tctgtttgctttcagatttt

SEQ ID NO: 381826 - DNA, 20 bp, Artificial Sequence
  Description of Artificial Sequence: Synthetic oligonucleotide
  Target: LAMA2; (+) strand; PAM type: YTN; PAM sequence: TTT
ctgtttgctttcagattttt

SEQ ID NO: 381827 - DNA, 20 bp, Artificial Sequence
  Description of Artificial Sequence: Synthetic oligonucleotide
  Target: LAMA2; (+) strand; PAM type: YTN; PAM sequence: TTC
tgtttgctttcagattttta

SEQ ID NO: 381828 - DNA, 20 bp, Artificial Sequence
  Description of Artificial Sequence: Synthetic oligonucleotide
  Target: LAMA2; (+) strand; PAM type: YTN; PAM sequence: CTG
tttgctttcagatttttatt

SEQ ID NO: 381829 - DNA, 20 bp, Artificial Sequence
  Description of Artificial Sequence: Synthetic oligonucleotide
  Target: LAMA2; (+) strand; PAM type: YTN; PAM sequence: TTT
gctttcagatttttattgca

SEQ ID NO: 381830 - DNA, 20 bp, Artificial Sequence
  Description of Artificial Sequence: Synthetic oligonucleotide
  Target: LAMA2; (+) strand; PAM type: YTN; PAM sequence: TTG
ctttcagatttttattgcaa

SEQ ID NO: 381831 - DNA, 20 bp, Artificial Sequence
  Description of Artificial Sequence: Synthetic oligonucleotide
  Target: LAMA2; (+) strand; PAM type: YTN; PAM sequence: CTT
tcagatttttattgcaaaaa

SEQ ID NO: 381832 - DNA, 20 bp, Artificial Sequence
  Description of Artificial Sequence: Synthetic oligonucleotide
  Target: LAMA2; (+) strand; PAM type: YTN; PAM sequence: TTT
cagatttttattgcaaaaag

SEQ ID NO: 381833 - DNA, 20 bp, Artificial Sequence
  Description of Artificial Sequence: Synthetic oligonucleotide
  Target: LAMA2; (+) strand; PAM type: YTN; PAM sequence: TTC
agatttttattgcaaaaaga

SEQ ID NO: 381834 - DNA, 20 bp, Artificial Sequence
  Description of Artificial Sequence: Synthetic oligonucleotide
  Target: LAMA2; (+) strand; PAM type: YTN; PAM sequence: TTT
ttattgcaaaaagaaaaaaa

SEQ ID NO: 381835 - DNA, 20 bp, Artificial Sequence
  Description of Artificial Sequence: Synthetic oligonucleotide
  Target: LAMA2; (+) strand; PAM type: YTN; PAM sequence: TTT
tattgcaaaaagaaaaaaat

SEQ ID NO: 381836 - DNA, 20 bp, Artificial Sequence
  Description of Artificial Sequence: Synthetic oligonucleotide
  Target: LAMA2; (+) strand; PAM type: YTN; PAM sequence: TTT
attgcaaaaagaaaaaaatt

SEQ ID NO: 381837 - DNA, 20 bp, Artificial Sequence
  Description of Artificial Sequence: Synthetic oligonucleotide
  Target: LAMA2; (+) strand; PAM type: YTN; PAM sequence: TTA
ttgcaaaaagaaaaaaatta

SEQ ID NO: 381838 - DNA, 20 bp, Artificial Sequence
  Description of Artificial Sequence: Synthetic oligonucleotide
  Target: LAMA2; (+) strand; PAM type: YTN; PAM sequence: TTG
caaaaagaaaaaaattatat

SEQ ID NO: 381839 - DNA, 20 bp, Artificial Sequence
  Description of Artificial Sequence: Synthetic oligonucleotide
  Target: LAMA2; (+) strand; PAM type: YTN; PAM sequence: TTA
tatcagggaaagataaattt

SEQ ID NO: 381840 - DNA, 20 bp, Artificial Sequence
  Description of Artificial Sequence: Synthetic oligonucleotide
  Target: LAMA2; (+) strand; PAM type: YTN; PAM sequence: TTT
tattggtggtctaatagtcg

SEQ ID NO: 381841 - DNA, 20 bp, Artificial Sequence
  Description of Artificial Sequence: Synthetic oligonucleotide
  Target: LAMA2; (+) strand; PAM type: YTN; PAM sequence: TTT
attggtggtctaatagtcgc

SEQ ID NO: 381842 - DNA, 20 bp, Artificial Sequence
  Description of Artificial Sequence: Synthetic oligonucleotide
  Target: LAMA2; (+) strand; PAM type: YTN; PAM sequence: TTA
ttggtggtctaatagtcgca

SEQ ID NO: 381843 - DNA, 20 bp, Artificial Sequence
  Description of Artificial Sequence: Synthetic oligonucleotide
  Target: LAMA2; (+) strand; PAM type: YTN; PAM sequence: TTG
gtggtctaatagtcgcaaga

SEQ ID NO: 381844 - DNA, 20 bp, Artificial Sequence
  Description of Artificial Sequence: Synthetic oligonucleotide
  Target: LAMA2; (+) strand; PAM type: YTN; PAM sequence: CTA
atagtcgcaagacatgtaca

SEQ ID NO: 381845 - DNA, 20 bp, Artificial Sequence
  Description of Artificial Sequence: Synthetic oligonucleotide
  Target: LAMA2; (+) strand; PAM type: YTN; PAM sequence: CTT
ttattattttggatttctta

SEQ ID NO: 381846 - DNA, 20 bp, Artificial Sequence
  Description of Artificial Sequence: Synthetic oligonucleotide
  Target: LAMA2; (+) strand; PAM type: YTN; PAM sequence: TTT
tattattttggatttcttac

SEQ ID NO: 381847 - DNA, 20 bp, Artificial Sequence
  Description of Artificial Sequence: Synthetic oligonucleotide
  Target: LAMA2; (+) strand; PAM type: YTN; PAM sequence: TTT
attattttggatttcttact

SEQ ID NO: 381848 - DNA, 20 bp, Artificial Sequence
  Description of Artificial Sequence: Synthetic oligonucleotide
  Target: LAMA2; (+) strand; PAM type: YTN; PAM sequence: TTA
ttattttggatttcttactt

SEQ ID NO: 381849 - DNA, 20 bp, Artificial Sequence
  Description of Artificial Sequence: Synthetic oligonucleotide
  Target: LAMA2; (+) strand; PAM type: YTN; PAM sequence: TTA
ttttggatttcttactttta

SEQ ID NO: 381850 - DNA, 20 bp, Artificial Sequence
  Description of Artificial Sequence: Synthetic oligonucleotide
  Target: LAMA2; (+) strand; PAM type: YTN; PAM sequence: TTT
tggatttcttacttttatag

SEQ ID NO: 381851 - DNA, 20 bp, Artificial Sequence
  Description of Artificial Sequence: Synthetic oligonucleotide
  Target: LAMA2; (+) strand; PAM type: YTN; PAM sequence: TTT
ggatttcttacttttatagt

SEQ ID NO: 381852 - DNA, 20 bp, Artificial Sequence
  Description of Artificial Sequence: Synthetic oligonucleotide
  Target: LAMA2; (+) strand; PAM type: YTN; PAM sequence: TTG
gatttcttacttttatagtc

SEQ ID NO: 381853 - DNA, 20 bp, Artificial Sequence
  Description of Artificial Sequence: Synthetic oligonucleotide
  Target: LAMA2; (+) strand; PAM type: YTN; PAM sequence: TTT
cttacttttatagtctttaa

SEQ ID NO: 381854 - DNA, 20 bp, Artificial Sequence
  Description of Artificial Sequence: Synthetic oligonucleotide
  Target: LAMA2; (+) strand; PAM type: YTN; PAM sequence: TTC
ttacttttatagtctttaaa

SEQ ID NO: 381855 - DNA, 20 bp, Artificial Sequence
  Description of Artificial Sequence: Synthetic oligonucleotide
  Target: LAMA2; (+) strand; PAM type: YTN; PAM sequence: CTT
acttttatagtctttaaatt

SEQ ID NO: 381856 - DNA, 20 bp, Artificial Sequence
  Description of Artificial Sequence: Synthetic oligonucleotide
  Target: LAMA2; (+) strand; PAM type: YTN; PAM sequence: TTA
cttttatagtctttaaatta

SEQ ID NO: 381857 - DNA, 20 bp, Artificial Sequence
  Description of Artificial Sequence: Synthetic oligonucleotide
  Target: LAMA2; (+) strand; PAM type: YTN; PAM sequence: CTT
ttatagtctttaaattatat

SEQ ID NO: 381858 - DNA, 20 bp, Artificial Sequence
  Description of Artificial Sequence: Synthetic oligonucleotide
  Target: LAMA2; (+) strand; PAM type: YTN; PAM sequence: TTT
tatagtctttaaattatatc

SEQ ID NO: 381859 - DNA, 20 bp, Artificial Sequence
  Description of Artificial Sequence: Synthetic oligonucleotide
  Target: LAMA2; (+) strand; PAM type: YTN; PAM sequence: TTT
atagtctttaaattatatca

SEQ ID NO: 381860 - DNA, 20 bp, Artificial Sequence
  Description of Artificial Sequence: Synthetic oligonucleotide
  Target: LAMA2; (+) strand; PAM type: YTN; PAM sequence: TTA
tagtctttaaattatatcag

SEQ ID NO: 381861 - DNA, 20 bp, Artificial Sequence
  Description of Artificial Sequence: Synthetic oligonucleotide
  Target: LAMA2; (+) strand; PAM type: YTN; PAM sequence: CTT
taaattatatcagtataaat

SEQ ID NO: 381862 - DNA, 20 bp, Artificial Sequence
  Description of Artificial Sequence: Synthetic oligonucleotide
  Target: LAMA2; (+) strand; PAM type: YTN; PAM sequence: TTT
aaattatatcagtataaata

SEQ ID NO: 381863 - DNA, 20 bp, Artificial Sequence
  Description of Artificial Sequence: Synthetic oligonucleotide
  Target: LAMA2; (+) strand; PAM type: YTN; PAM sequence: TTA
aattatatcagtataaataa

SEQ ID NO: 381864 - DNA, 20 bp, Artificial Sequence
  Description of Artificial Sequence: Synthetic oligonucleotide
  Target: LAMA2; (+) strand; PAM type: YTN; PAM sequence: TTA
tatcagtataaataatgcat

SEQ ID NO: 381865 - DNA, 20 bp, Artificial Sequence
  Description of Artificial Sequence: Synthetic oligonucleotide
  Target: LAMA2; (+) strand; PAM type: YTN; PAM sequence: CTT
tttatttagttttttgctgt

SEQ ID NO: 381866 - DNA, 20 bp, Artificial Sequence
  Description of Artificial Sequence: Synthetic oligonucleotide
  Target: LAMA2; (+) strand; PAM type: YTN; PAM sequence: TTT
ttatttagttttttgctgtg

SEQ ID NO: 381867 - DNA, 20 bp, Artificial Sequence
  Description of Artificial Sequence: Synthetic oligonucleotide
  Target: LAMA2; (+) strand; PAM type: YTN; PAM sequence: TTT
tatttagttttttgctgtgt

SEQ ID NO: 381868 - DNA, 20 bp, Artificial Sequence
  Description of Artificial Sequence: Synthetic oligonucleotide
  Target: LAMA2; (+) strand; PAM type: YTN; PAM sequence: TTT
atttagttttttgctgtgtt

SEQ ID NO: 381869 - DNA, 20 bp, Artificial Sequence
  Description of Artificial Sequence: Synthetic oligonucleotide
  Target: LAMA2; (+) strand; PAM type: YTN; PAM sequence: TTA
tttagttttttgctgtgttt

SEQ ID NO: 381870 - DNA, 20 bp, Artificial Sequence
  Description of Artificial Sequence: Synthetic oligonucleotide
  Target: LAMA2; (+) strand; PAM type: YTN; PAM sequence: TTT
agttttttgctgtgtttcat

SEQ ID NO: 381871 - DNA, 20 bp, Artificial Sequence
  Description of Artificial Sequence: Synthetic oligonucleotide
  Target: LAMA2; (+) strand; PAM type: YTN; PAM sequence: TTA
gttttttgctgtgtttcatt

SEQ ID NO: 381872 - DNA, 20 bp, Artificial Sequence
  Description of Artificial Sequence: Synthetic oligonucleotide
  Target: LAMA2; (+) strand; PAM type: YTN; PAM sequence: TTT
tttgctgtgtttcattggac

SEQ ID NO: 381873 - DNA, 20 bp, Artificial Sequence
  Description of Artificial Sequence: Synthetic oligonucleotide
  Target: LAMA2; (+) strand; PAM type: YTN; PAM sequence: TTT
ttgctgtgtttcattggaca

SEQ ID NO: 381874 - DNA, 20 bp, Artificial Sequence
  Description of Artificial Sequence: Synthetic oligonucleotide
  Target: LAMA2; (+) strand; PAM type: YTN; PAM sequence: TTT
tgctgtgtttcattggacat

SEQ ID NO: 381875 - DNA, 20 bp, Artificial Sequence
  Description of Artificial Sequence: Synthetic oligonucleotide
  Target: LAMA2; (+) strand; PAM type: YTN; PAM sequence: TTT
gctgtgtttcattggacatt

SEQ ID NO: 381876 - DNA, 20 bp, Artificial Sequence
  Description of Artificial Sequence: Synthetic oligonucleotide
  Target: LAMA2; (+) strand; PAM type: YTN; PAM sequence: TTG
ctgtgtttcattggacattt

SEQ ID NO: 381877 - DNA, 20 bp, Artificial Sequence
  Description of Artificial Sequence: Synthetic oligonucleotide
  Target: LAMA2; (+) strand; PAM type: YTN; PAM sequence: CTG
tgtttcattggacatttgct

SEQ ID NO: 381878 - DNA, 20 bp, Artificial Sequence
  Description of Artificial Sequence: Synthetic oligonucleotide
  Target: LAMA2; (+) strand; PAM type: YTN; PAM sequence: TTT
cattggacatttgctagtta

SEQ ID NO: 381879 - DNA, 20 bp, Artificial Sequence
  Description of Artificial Sequence: Synthetic oligonucleotide
  Target: LAMA2; (+) strand; PAM type: YTN; PAM sequence: TTC
attggacatttgctagttat

SEQ ID NO: 381880 - DNA, 20 bp, Artificial Sequence
  Description of Artificial Sequence: Synthetic oligonucleotide
  Target: LAMA2; (+) strand; PAM type: YTN; PAM sequence: TTG
gacatttgctagttatccat

SEQ ID NO: 381881 - DNA, 20 bp, Artificial Sequence
  Description of Artificial Sequence: Synthetic oligonucleotide
  Target: LAMA2; (+) strand; PAM type: YTN; PAM sequence: TTT
gctagttatccatcaagcac

SEQ ID NO: 381882 - DNA, 20 bp, Artificial Sequence
  Description of Artificial Sequence: Synthetic oligonucleotide
  Target: LAMA2; (+) strand; PAM type: YTN; PAM sequence: TTG
ctagttatccatcaagcaca

SEQ ID NO: 381883 - DNA, 20 bp, Artificial Sequence
  Description of Artificial Sequence: Synthetic oligonucleotide
  Target: LAMA2; (+) strand; PAM type: YTN; PAM sequence: CTA
gttatccatcaagcacagta

SEQ ID NO: 381884 - DNA, 20 bp, Artificial Sequence
  Description of Artificial Sequence: Synthetic oligonucleotide
  Target: LAMA2; (+) strand; PAM type: YTN; PAM sequence: TTA
tccatcaagcacagtaaaag

SEQ ID NO: 381885 - DNA, 20 bp, Artificial Sequence
  Description of Artificial Sequence: Synthetic oligonucleotide
  Target: LAMA2; (+) strand; PAM type: YTN; PAM sequence: TTT
taggtgttaaagacattgga

SEQ ID NO: 381886 - DNA, 20 bp, Artificial Sequence
  Description of Artificial Sequence: Synthetic oligonucleotide
  Target: LAMA2; (+) strand; PAM type: YTN; PAM sequence: TTT
aggtgttaaagacattggaa

SEQ ID NO: 381887 - DNA, 20 bp, Artificial Sequence
  Description of Artificial Sequence: Synthetic oligonucleotide
  Target: LAMA2; (+) strand; PAM type: YTN; PAM sequence: TTA
ggtgttaaagacattggaat

SEQ ID NO: 381888 - DNA, 20 bp, Artificial Sequence
  Description of Artificial Sequence: Synthetic oligonucleotide
  Target: LAMA2; (+) strand; PAM type: YTN; PAM sequence: TTA
aagacattggaattatcttt

SEQ ID NO: 381889 - DNA, 20 bp, Artificial Sequence
  Description of Artificial Sequence: Synthetic oligonucleotide
  Target: LAMA2; (+) strand; PAM type: YTN; PAM sequence: TTG
gaattatctttattccatat

SEQ ID NO: 381890 - DNA, 20 bp, Artificial Sequence
  Description of Artificial Sequence: Synthetic oligonucleotide
  Target: LAMA2; (+) strand; PAM type: YTN; PAM sequence: TTA
tctttattccatatgacaat

SEQ ID NO: 381891 - DNA, 20 bp, Artificial Sequence
  Description of Artificial Sequence: Synthetic oligonucleotide
  Target: LAMA2; (+) strand; PAM type: YTN; PAM sequence: CTT
tattccatatgacaatgtta

SEQ ID NO: 381892 - DNA, 20 bp, Artificial Sequence
  Description of Artificial Sequence: Synthetic oligonucleotide
  Target: LAMA2; (+) strand; PAM type: YTN; PAM sequence: TTT
attccatatgacaatgttat

SEQ ID NO: 381893 - DNA, 20 bp, Artificial Sequence
  Description of Artificial Sequence: Synthetic oligonucleotide
  Target: LAMA2; (+) strand; PAM type: YTN; PAM sequence: TTA
ttccatatgacaatgttatt

SEQ ID NO: 381894 - DNA, 20 bp, Artificial Sequence
  Description of Artificial Sequence: Synthetic oligonucleotide
  Target: LAMA2; (+) strand; PAM type: YTN; PAM sequence: TTC
catatgacaatgttatttaa

SEQ ID NO: 381895 - DNA, 20 bp, Artificial Sequence
  Description of Artificial Sequence: Synthetic oligonucleotide
  Target: LAMA2; (+) strand; PAM type: YTN; PAM sequence: TTA
tttaaaaacaaacatctttt

SEQ ID NO: 381896 - DNA, 20 bp, Artificial Sequence
  Description of Artificial Sequence: Synthetic oligonucleotide
  Target: LAMA2; (+) strand; PAM type: YTN; PAM sequence: TTT
aaaaacaaacatctttttca

SEQ ID NO: 381897 - DNA, 20 bp, Artificial Sequence
  Description of Artificial Sequence: Synthetic oligonucleotide
  Target: LAMA2; (+) strand; PAM type: YTN; PAM sequence: TTA
aaaacaaacatctttttcaa

SEQ ID NO: 381898 - DNA, 20 bp, Artificial Sequence
  Description of Artificial Sequence: Synthetic oligonucleotide
  Target: LAMA2; (+) strand; PAM type: YTN; PAM sequence: CTT
tttcaagaaaaatactcttt

SEQ ID NO: 381899 - DNA, 20 bp, Artificial Sequence
  Description of Artificial Sequence: Synthetic oligonucleotide
  Target: LAMA2; (+) strand; PAM type: YTN; PAM sequence: TTT
ttcaagaaaaatactctttg

SEQ ID NO: 381900 - DNA, 20 bp, Artificial Sequence
  Description of Artificial Sequence: Synthetic oligonucleotide
  Target: LAMA2; (+) strand; PAM type: YTN; PAM sequence: TTT
tcaagaaaaatactctttgg

SEQ ID NO: 381901 - DNA, 20 bp, Artificial Sequence
  Description of Artificial Sequence: Synthetic oligonucleotide
  Target: LAMA2; (+) strand; PAM type: YTN; PAM sequence: TTT
caagaaaaatactctttgga

SEQ ID NO: 381902 - DNA, 20 bp, Artificial Sequence
  Description of Artificial Sequence: Synthetic oligonucleotide
  Target: LAMA2; (+) strand; PAM type: YTN; PAM sequence: TTC
aagaaaaatactctttggag

SEQ ID NO: 381903 - DNA, 20 bp, Artificial Sequence
  Description of Artificial Sequence: Synthetic oligonucleotide
  Target: LAMA2; (+) strand; PAM type: YTN; PAM sequence: CTC
tttggagctttttcaggctg

SEQ ID NO: 381904 - DNA, 20 bp, Artificial Sequence
  Description of Artificial Sequence: Synthetic oligonucleotide
  Target: LAMA2; (+) strand; PAM type: YTN; PAM sequence: CTT
tggagctttttcaggctgaa

SEQ ID NO: 381905 - DNA, 20 bp, Artificial Sequence
  Description of Artificial Sequence: Synthetic oligonucleotide
  Target: LAMA2; (+) strand; PAM type: YTN; PAM sequence: TTT
ggagctttttcaggctgaat

SEQ ID NO: 381906 - DNA, 20 bp, Artificial Sequence
  Description of Artificial Sequence: Synthetic oligonucleotide
  Target: LAMA2; (+) strand; PAM type: YTN; PAM sequence: TTG
gagctttttcaggctgaatt

SEQ ID NO: 381907 - DNA, 20 bp, Artificial Sequence
  Description of Artificial Sequence: Synthetic oligonucleotide
  Target: LAMA2; (+) strand; PAM type: YTN; PAM sequence: CTT
tttcaggctgaattgtatct

SEQ ID NO: 381908 - DNA, 20 bp, Artificial Sequence
  Description of Artificial Sequence: Synthetic oligonucleotide
  Target: LAMA2; (+) strand; PAM type: YTN; PAM sequence: TTT
ttcaggctgaattgtatcta

SEQ ID NO: 381909 - DNA, 20 bp, Artificial Sequence
  Description of Artificial Sequence: Synthetic oligonucleotide
  Target: LAMA2; (+) strand; PAM type: YTN; PAM sequence: TTT
tcaggctgaattgtatctac

SEQ ID NO: 381910 - DNA, 20 bp, Artificial Sequence
  Description of Artificial Sequence: Synthetic oligonucleotide
  Target: LAMA2; (+) strand; PAM type: YTN; PAM sequence: TTT
caggctgaattgtatctaca

SEQ ID NO: 381911 - DNA, 20 bp, Artificial Sequence
  Description of Artificial Sequence: Synthetic oligonucleotide
  Target: LAMA2; (+) strand; PAM type: YTN; PAM sequence: TTC
aggctgaattgtatctacaa

SEQ ID NO: 381912 - DNA, 20 bp, Artificial Sequence
  Description of Artificial Sequence: Synthetic oligonucleotide
  Target: LAMA2; (+) strand; PAM type: YTN; PAM sequence: CTG
aattgtatctacaaataaaa

SEQ ID NO: 381913 - DNA, 20 bp, Artificial Sequence
  Description of Artificial Sequence: Synthetic oligonucleotide
  Target: LAMA2; (+) strand; PAM type: YTN; PAM sequence: TTG
tatctacaaataaaagcttt

SEQ ID NO: 381914 - DNA, 20 bp, Artificial Sequence
  Description of Artificial Sequence: Synthetic oligonucleotide
  Target: LAMA2; (+) strand; PAM type: YTN; PAM sequence: CTA
caaataaaagctttccttgg

SEQ ID NO: 381915 - DNA, 20 bp, Artificial Sequence
  Description of Artificial Sequence: Synthetic oligonucleotide
  Target: LAMA2; (+) strand; PAM type: YTN; PAM sequence: CTT
tccttggttaaaatctgatt

SEQ ID NO: 381916 - DNA, 20 bp, Artificial Sequence
  Description of Artificial Sequence: Synthetic oligonucleotide
  Target: LAMA2; (+) strand; PAM type: YTN; PAM sequence: TTT
ccttggttaaaatctgatta

SEQ ID NO: 381917 - DNA, 20 bp, Artificial Sequence
  Description of Artificial Sequence: Synthetic oligonucleotide
  Target: LAMA2; (+) strand; PAM type: YTN; PAM sequence: TTC
cttggttaaaatctgattac

SEQ ID NO: 381918 - DNA, 20 bp, Artificial Sequence
  Description of Artificial Sequence: Synthetic oligonucleotide
  Target: LAMA2; (+) strand; PAM type: YTN; PAM sequence: CTT
ggttaaaatctgattacaca

SEQ ID NO: 381919 - DNA, 20 bp, Artificial Sequence
  Description of Artificial Sequence: Synthetic oligonucleotide
  Target: LAMA2; (+) strand; PAM type: YTN; PAM sequence: TTG
gttaaaatctgattacacat

SEQ ID NO: 381920 - DNA, 20 bp, Artificial Sequence
  Description of Artificial Sequence: Synthetic oligonucleotide
  Target: LAMA2; (+) strand; PAM type: YTN; PAM sequence: TTA
aaatctgattacacatggat

SEQ ID NO: 381921 - DNA, 20 bp, Artificial Sequence
  Description of Artificial Sequence: Synthetic oligonucleotide
  Target: LAMA2; (+) strand; PAM type: YTN; PAM sequence: CTG
attacacatggatgccgccc

SEQ ID NO: 381922 - DNA, 20 bp, Artificial Sequence
  Description of Artificial Sequence: Synthetic oligonucleotide
  Target: LAMA2; (+) strand; PAM type: YTN; PAM sequence: TTA
cacatggatgccgcccgaac

SEQ ID NO: 381923 - DNA, 20 bp, Artificial Sequence
  Description of Artificial Sequence: Synthetic oligonucleotide
  Target: LAMA2; (+) strand; PAM type: YTN; PAM sequence: CTT
ggagaccaggaagaaataca

SEQ ID NO: 381924 - DNA, 20 bp, Artificial Sequence
  Description of Artificial Sequence: Synthetic oligonucleotide
  Target: LAMA2; (+) strand; PAM type: YTN; PAM sequence: TTG
gagaccaggaagaaatacac

SEQ ID NO: 381925 - DNA, 20 bp, Artificial Sequence
  Description of Artificial Sequence: Synthetic oligonucleotide
  Target: LAMA2; (+) strand; PAM type: YTN; PAM sequence: TTA
agtatcaaaatcggcacttg

SEQ ID NO: 381926 - DNA, 20 bp, Artificial Sequence
  Description of Artificial Sequence: Synthetic oligonucleotide
  Target: LAMA2; (+) strand; PAM type: YTN; PAM sequence: CTT
gcgtttgtaagtgatgttgc

SEQ ID NO: 381927 - DNA, 20 bp, Artificial Sequence
  Description of Artificial Sequence: Synthetic oligonucleotide
  Target: LAMA2; (+) strand; PAM type: YTN; PAM sequence: TTG
cgtttgtaagtgatgttgcc

SEQ ID NO: 381928 - DNA, 20 bp, Artificial Sequence
  Description of Artificial Sequence: Synthetic oligonucleotide
  Target: LAMA2; (+) strand; PAM type: YTN; PAM sequence: TTT
gtaagtgatgttgcccctgc

SEQ ID NO: 381929 - DNA, 20 bp, Artificial Sequence
  Description of Artificial Sequence: Synthetic oligonucleotide
  Target: LAMA2; (+) strand; PAM type: YTN; PAM sequence: TTG
taagtgatgttgcccctgcc

SEQ ID NO: 381930 - DNA, 20 bp, Artificial Sequence
  Description of Artificial Sequence: Synthetic oligonucleotide
  Target: LAMA2; (+) strand; PAM type: YTN; PAM sequence: TTG
cccctgccgcaggtggggga

SEQ ID NO: 381931 - DNA, 20 bp, Artificial Sequence
  Description of Artificial Sequence: Synthetic oligonucleotide
  Target: LAMA2; (+) strand; PAM type: YTN; PAM sequence: CTG
ccgcaggtgggggaaggcca

SEQ ID NO: 381932 - DNA, 20 bp, Artificial Sequence
  Description of Artificial Sequence: Synthetic oligonucleotide
  Target: LAMA2; (+) strand; PAM type: YTN; PAM sequence: CTG
tctttgcagccactgaagag

SEQ ID NO: 381933 - DNA, 20 bp, Artificial Sequence
  Description of Artificial Sequence: Synthetic oligonucleotide
  Target: LAMA2; (+) strand; PAM type: YTN; PAM sequence: CTT
tgcagccactgaagagctca

SEQ ID NO: 381934 - DNA, 20 bp, Artificial Sequence
  Description of Artificial Sequence: Synthetic oligonucleotide
  Target: LAMA2; (+) strand; PAM type: YTN; PAM sequence: TTT
gcagccactgaagagctcaa

SEQ ID NO: 381935 - DNA, 20 bp, Artificial Sequence
  Description of Artificial Sequence: Synthetic oligonucleotide
  Target: LAMA2; (+) strand; PAM type: YTN; PAM sequence: TTG
cagccactgaagagctcaag

SEQ ID NO: 381936 - DNA, 20 bp, Artificial Sequence
  Description of Artificial Sequence: Synthetic oligonucleotide
  Target: LAMA2; (+) strand; PAM type: YTN; PAM sequence: CTG
aagagctcaagcgttgctaa

SEQ ID NO: 381937 - DNA, 20 bp, Artificial Sequence
  Description of Artificial Sequence: Synthetic oligonucleotide
  Target: LAMA2; (+) strand; PAM type: YTN; PAM sequence: CTC
aagcgttgctaatgcagtat

SEQ ID NO: 381938 - DNA, 20 bp, Artificial Sequence
  Description of Artificial Sequence: Synthetic oligonucleotide
  Target: LAMA2; (+) strand; PAM type: YTN; PAM sequence: TTG
ctaatgcagtatttctaact

SEQ ID NO: 381939 - DNA, 20 bp, Artificial Sequence
  Description of Artificial Sequence: Synthetic oligonucleotide
  Target: LAMA2; (+) strand; PAM type: YTN; PAM sequence: CTA
atgcagtatttctaactttg

SEQ ID NO: 381940 - DNA, 20 bp, Artificial Sequence
  Description of Artificial Sequence: Synthetic oligonucleotide
  Target: LAMA2; (+) strand; PAM type: YTN; PAM sequence: TTT
ctaactttgctgtcctaatt

SEQ ID NO: 381941 - DNA, 20 bp, Artificial Sequence
  Description of Artificial Sequence: Synthetic oligonucleotide
  Target: LAMA2; (+) strand; PAM type: YTN; PAM sequence: TTC
taactttgctgtcctaattg

SEQ ID NO: 381942 - DNA, 20 bp, Artificial Sequence
  Description of Artificial Sequence: Synthetic oligonucleotide
  Target: LAMA2; (+) strand; PAM type: YTN; PAM sequence: CTA
actttgctgtcctaattggc

SEQ ID NO: 381943 - DNA, 20 bp, Artificial Sequence
  Description of Artificial Sequence: Synthetic oligonucleotide
  Target: LAMA2; (+) strand; PAM type: YTN; PAM sequence: CTT
tgctgtcctaattggcttcc

SEQ ID NO: 381944 - DNA, 20 bp, Artificial Sequence
  Description of Artificial Sequence: Synthetic oligonucleotide
  Target: LAMA2; (+) strand; PAM type: YTN; PAM sequence: TTT
gctgtcctaattggcttcct

SEQ ID NO: 381945 - DNA, 20 bp, Artificial Sequence
  Description of Artificial Sequence: Synthetic oligonucleotide
  Target: LAMA2; (+) strand; PAM type: YTN; PAM sequence: TTG
ctgtcctaattggcttcctt

SEQ ID NO: 381946 - DNA, 20 bp, Artificial Sequence
  Description of Artificial Sequence: Synthetic oligonucleotide
  Target: LAMA2; (+) strand; PAM type: YTN; PAM sequence: CTG
tcctaattggcttccttttc

SEQ ID NO: 381947 - DNA, 20 bp, Artificial Sequence
  Description of Artificial Sequence: Synthetic oligonucleotide
  Target: LAMA2; (+) strand; PAM type: YTN; PAM sequence: CTA
attggcttccttttctttca

SEQ ID NO: 381948 - DNA, 20 bp, Artificial Sequence
  Description of Artificial Sequence: Synthetic oligonucleotide
  Target: LAMA2; (+) strand; PAM type: YTN; PAM sequence: TTG
gcttccttttctttcaggca

SEQ ID NO: 381949 - DNA, 20 bp, Artificial Sequence
  Description of Artificial Sequence: Synthetic oligonucleotide
  Target: LAMA2; (+) strand; PAM type: YTN; PAM sequence: CTT
ccttttctttcaggcatgct

SEQ ID NO: 381950 - DNA, 20 bp, Artificial Sequence
  Description of Artificial Sequence: Synthetic oligonucleotide
  Target: LAMA2; (+) strand; PAM type: YTN; PAM sequence: TTC
cttttctttcaggcatgctt

SEQ ID NO: 381951 - DNA, 20 bp, Artificial Sequence
  Description of Artificial Sequence: Synthetic oligonucleotide
  Target: LAMA2; (+) strand; PAM type: YTN; PAM sequence: CTT
ttctttcaggcatgcttgcc

SEQ ID NO: 381952 - DNA, 20 bp, Artificial Sequence
  Description of Artificial Sequence: Synthetic oligonucleotide
  Target: LAMA2; (+) strand; PAM type: YTN; PAM sequence: TTT
tctttcaggcatgcttgccg

SEQ ID NO: 381953 - DNA, 20 bp, Artificial Sequence
  Description of Artificial Sequence: Synthetic oligonucleotide
  Target: LAMA2; (+) strand; PAM type: YTN; PAM sequence: TTT
ctttcaggcatgcttgccgg

SEQ ID NO: 381954 - DNA, 20 bp, Artificial Sequence
  Description of Artificial Sequence: Synthetic oligonucleotide
  Target: LAMA2; (+) strand; PAM type: YTN; PAM sequence: TTC
tttcaggcatgcttgccggg

SEQ ID NO: 381955 - DNA, 20 bp, Artificial Sequence
  Description of Artificial Sequence: Synthetic oligonucleotide
  Target: LAMA2; (+) strand; PAM type: YTN; PAM sequence: CTT
tcaggcatgcttgccgggat

SEQ ID NO: 381956 - DNA, 20 bp, Artificial Sequence
  Description of Artificial Sequence: Synthetic oligonucleotide
  Target: LAMA2; (+) strand; PAM type: YTN; PAM sequence: TTT
caggcatgcttgccgggatt

SEQ ID NO: 381957 - DNA, 20 bp, Artificial Sequence
  Description of Artificial Sequence: Synthetic oligonucleotide
  Target: LAMA2; (+) strand; PAM type: YTN; PAM sequence: TTC
aggcatgcttgccgggattt

SEQ ID NO: 381958 - DNA, 20 bp, Artificial Sequence
  Description of Artificial Sequence: Synthetic oligonucleotide
  Target: LAMA2; (+) strand; PAM type: YTN; PAM sequence: CTT
gccgggattttatcgactgc

SEQ ID NO: 381959 - DNA, 20 bp, Artificial Sequence
  Description of Artificial Sequence: Synthetic oligonucleotide
  Target: LAMA2; (+) strand; PAM type: YTN; PAM sequence: TTG
ccgggattttatcgactgcg

SEQ ID NO: 381960 - DNA, 20 bp, Artificial Sequence
  Description of Artificial Sequence: Synthetic oligonucleotide
  Target: LAMA2; (+) strand; PAM type: YTN; PAM sequence: TTT
tatcgactgcgttctcaacc

SEQ ID NO: 381961 - DNA, 20 bp, Artificial Sequence
  Description of Artificial Sequence: Synthetic oligonucleotide
  Target: LAMA2; (+) strand; PAM type: YTN; PAM sequence: TTT
atcgactgcgttctcaacca

SEQ ID NO: 381962 - DNA, 20 bp, Artificial Sequence
  Description of Artificial Sequence: Synthetic oligonucleotide
  Target: LAMA2; (+) strand; PAM type: YTN; PAM sequence: TTA
tcgactgcgttctcaaccag

SEQ ID NO: 381963 - DNA, 20 bp, Artificial Sequence
  Description of Artificial Sequence: Synthetic oligonucleotide
  Target: LAMA2; (+) strand; PAM type: YTN; PAM sequence: CTG
cgttctcaaccaggtggccg

SEQ ID NO: 381964 - DNA, 20 bp, Artificial Sequence
  Description of Artificial Sequence: Synthetic oligonucleotide
  Target: LAMA2; (+) strand; PAM type: YTN; PAM sequence: TTC
tcaaccaggtggccgcaccc

SEQ ID NO: 381965 - DNA, 20 bp, Artificial Sequence
  Description of Artificial Sequence: Synthetic oligonucleotide
  Target: LAMA2; (+) strand; PAM type: YTN; PAM sequence: CTC
aaccaggtggccgcacccct

SEQ ID NO: 381966 - DNA, 20 bp, Artificial Sequence
  Description of Artificial Sequence: Synthetic oligonucleotide
  Target: LAMA2; (+) strand; PAM type: YTN; PAM sequence: CTG
gaccaaccctgggcacctgt

SEQ ID NO: 381967 - DNA, 20 bp, Artificial Sequence
  Description of Artificial Sequence: Synthetic oligonucleotide
  Target: LAMA2; (+) strand; PAM type: YTN; PAM sequence: CTG
ggcacctgtgttccatgtca

SEQ ID NO: 381968 - DNA, 20 bp, Artificial Sequence
  Description of Artificial Sequence: Synthetic oligonucleotide
  Target: LAMA2; (+) strand; PAM type: YTN; PAM sequence: CTG
tgttccatgtcaatgtaatg

SEQ ID NO: 381969 - DNA, 20 bp, Artificial Sequence
  Description of Artificial Sequence: Synthetic oligonucleotide
  Target: LAMA2; (+) strand; PAM type: YTN; PAM sequence: TTC
catgtcaatgtaatggacac

SEQ ID NO: 381970 - DNA, 20 bp, Artificial Sequence
  Description of Artificial Sequence: Synthetic oligonucleotide
  Target: LAMA2; (+) strand; PAM type: YTN; PAM sequence: CTG
tgtgaccctgaaacatcgat

SEQ ID NO: 381971 - DNA, 20 bp, Artificial Sequence
  Description of Artificial Sequence: Synthetic oligonucleotide
  Target: LAMA2; (+) strand; PAM type: YTN; PAM sequence: CTG
aaacatcgatatgccaggta

SEQ ID NO: 381972 - DNA, 20 bp, Artificial Sequence
  Description of Artificial Sequence: Synthetic oligonucleotide
  Target: LAMA2; (+) strand; PAM type: YTN; PAM sequence: CTC
tgagccttccttgaacaagg

SEQ ID NO: 381973 - DNA, 20 bp, Artificial Sequence
  Description of Artificial Sequence: Synthetic oligonucleotide
  Target: LAMA2; (+) strand; PAM type: YTN; PAM sequence: CTG
agccttccttgaacaaggtc

SEQ ID NO: 381974 - DNA, 20 bp, Artificial Sequence
  Description of Artificial Sequence: Synthetic oligonucleotide
  Target: LAMA2; (+) strand; PAM type: YTN; PAM sequence: CTT
ccttgaacaaggtccatgtg

SEQ ID NO: 381975 - DNA, 20 bp, Artificial Sequence
  Description of Artificial Sequence: Synthetic oligonucleotide
  Target: LAMA2; (+) strand; PAM type: YTN; PAM sequence: TTC
cttgaacaaggtccatgtgc

SEQ ID NO: 381976 - DNA, 20 bp, Artificial Sequence
  Description of Artificial Sequence: Synthetic oligonucleotide
  Target: LAMA2; (+) strand; PAM type: YTN; PAM sequence: CTT
gaacaaggtccatgtgctca

SEQ ID NO: 381977 - DNA, 20 bp, Artificial Sequence
  Description of Artificial Sequence: Synthetic oligonucleotide
  Target: LAMA2; (+) strand; PAM type: YTN; PAM sequence: TTG
aacaaggtccatgtgctcat

SEQ ID NO: 381978 - DNA, 20 bp, Artificial Sequence
  Description of Artificial Sequence: Synthetic oligonucleotide
  Target: LAMA2; (+) strand; PAM type: YTN; PAM sequence: CTC
attcctctttacacatgctc

SEQ ID NO: 381979 - DNA, 20 bp, Artificial Sequence
  Description of Artificial Sequence: Synthetic oligonucleotide
  Target: LAMA2; (+) strand; PAM type: YTN; PAM sequence: TTC
ctctttacacatgctcagca

SEQ ID NO: 381980 - DNA, 20 bp, Artificial Sequence
  Description of Artificial Sequence: Synthetic oligonucleotide
  Target: LAMA2; (+) strand; PAM type: YTN; PAM sequence: CTC
tttacacatgctcagcatct

SEQ ID NO: 381981 - DNA, 20 bp, Artificial Sequence
  Description of Artificial Sequence: Synthetic oligonucleotide
  Target: LAMA2; (+) strand; PAM type: YTN; PAM sequence: CTT
tacacatgctcagcatctgc

SEQ ID NO: 381982 - DNA, 20 bp, Artificial Sequence
  Description of Artificial Sequence: Synthetic oligonucleotide
  Target: LAMA2; (+) strand; PAM type: YTN; PAM sequence: TTT
acacatgctcagcatctgca

SEQ ID NO: 381983 - DNA, 20 bp, Artificial Sequence
  Description of Artificial Sequence: Synthetic oligonucleotide
  Target: LAMA2; (+) strand; PAM type: YTN; PAM sequence: TTA
cacatgctcagcatctgcat

SEQ ID NO: 381984 - DNA, 20 bp, Artificial Sequence
  Description of Artificial Sequence: Synthetic oligonucleotide
  Target: LAMA2; (+) strand; PAM type: YTN; PAM sequence: CTC
agcatctgcatgcagaggcc

SEQ ID NO: 381985 - DNA, 20 bp, Artificial Sequence
  Description of Artificial Sequence: Synthetic oligonucleotide
  Target: LAMA2; (+) strand; PAM type: YTN; PAM sequence: CTG
catgcagaggccagctaaac

SEQ ID NO: 381986 - DNA, 20 bp, Artificial Sequence
  Description of Artificial Sequence: Synthetic oligonucleotide
  Target: LAMA2; (+) strand; PAM type: YTN; PAM sequence: CTA
aactgtaagggaatgcaact

SEQ ID NO: 381987 - DNA, 20 bp, Artificial Sequence
  Description of Artificial Sequence: Synthetic oligonucleotide
  Target: LAMA2; (+) strand; PAM type: YTN; PAM sequence: CTG
taagggaatgcaactgtgtg

SEQ ID NO: 381988 - DNA, 20 bp, Artificial Sequence
  Description of Artificial Sequence: Synthetic oligonucleotide
  Target: LAMA2; (+) strand; PAM type: YTN; PAM sequence: CTG
tgtgtgtgaaataaaatatg

SEQ ID NO: 381989 - DNA, 20 bp, Artificial Sequence
  Description of Artificial Sequence: Synthetic oligonucleotide
  Target: LAMA2; (+) strand; PAM type: YTN; PAM sequence: TTC
acagattctgcattttaaaa

SEQ ID NO: 381990 - DNA, 20 bp, Artificial Sequence
  Description of Artificial Sequence: Synthetic oligonucleotide
  Target: LAMA2; (+) strand; PAM type: YTN; PAM sequence: TTC
tgcattttaaaaagtaagga

SEQ ID NO: 381991 - DNA, 20 bp, Artificial Sequence
  Description of Artificial Sequence: Synthetic oligonucleotide
  Target: LAMA2; (+) strand; PAM type: YTN; PAM sequence: CTG
cattttaaaaagtaaggaaa

SEQ ID NO: 381992 - DNA, 20 bp, Artificial Sequence
  Description of Artificial Sequence: Synthetic oligonucleotide
  Target: LAMA2; (+) strand; PAM type: YTN; PAM sequence: TTT
taaaaagtaaggaaaaaata

SEQ ID NO: 381993 - DNA, 20 bp, Artificial Sequence
  Description of Artificial Sequence: Synthetic oligonucleotide
  Target: LAMA2; (+) strand; PAM type: YTN; PAM sequence: TTT
aaaaagtaaggaaaaaataa

SEQ ID NO: 381994 - DNA, 20 bp, Artificial Sequence
  Description of Artificial Sequence: Synthetic oligonucleotide
  Target: LAMA2; (+) strand; PAM type: YTN; PAM sequence: TTA
aaaagtaaggaaaaaataac

SEQ ID NO: 381995 - DNA, 20 bp, Artificial Sequence
  Description of Artificial Sequence: Synthetic oligonucleotide
  Target: LAMA2; (+) strand; PAM type: YTN; PAM sequence: CTG
ggagaaccactgagcatgtc

SEQ ID NO: 381996 - DNA, 20 bp, Artificial Sequence
  Description of Artificial Sequence: Synthetic oligonucleotide
  Target: LAMA2; (+) strand; PAM type: YTN; PAM sequence: CTG
agcatgtcaagaaatagaat

SEQ ID NO: 381997 - DNA, 20 bp, Artificial Sequence
  Description of Artificial Sequence: Synthetic oligonucleotide
  Target: LAMA2; (+) strand; PAM type: YTN; PAM sequence: TTT
tagcagcatcttagaagagc

SEQ ID NO: 381998 - DNA, 20 bp, Artificial Sequence
  Description of Artificial Sequence: Synthetic oligonucleotide
  Target: LAMA2; (+) strand; PAM type: YTN; PAM sequence: TTT
agcagcatcttagaagagca

SEQ ID NO: 381999 - DNA, 20 bp, Artificial Sequence
  Description of Artificial Sequence: Synthetic oligonucleotide
  Target: LAMA2; (+) strand; PAM type: YTN; PAM sequence: TTA
gcagcatcttagaagagcac

SEQ ID NO: 382000 - DNA, 20 bp, Artificial Sequence
  Description of Artificial Sequence: Synthetic oligonucleotide
  Target: LAMA2; (+) strand; PAM type: YTN; PAM sequence: CTT
agaagagcaccagaagacat

SEQ ID NO: 382001 - DNA, 20 bp, Artificial Sequence
  Description of Artificial Sequence: Synthetic oligonucleotide
  Target: LAMA2; (+) strand; PAM type: YTN; PAM sequence: TTA
gaagagcaccagaagacata

SEQ ID NO: 382002 - DNA, 20 bp, Artificial Sequence
  Description of Artificial Sequence: Synthetic oligonucleotide
  Target: LAMA2; (+) strand; PAM type: YTN; PAM sequence: CTA
tttaaaaattatgtgtgcct

SEQ ID NO: 382003 - DNA, 20 bp, Artificial Sequence
  Description of Artificial Sequence: Synthetic oligonucleotide
  Target: LAMA2; (+) strand; PAM type: YTN; PAM sequence: TTT
aaaaattatgtgtgcctttt

SEQ ID NO: 382004 - DNA, 20 bp, Artificial Sequence
  Description of Artificial Sequence: Synthetic oligonucleotide
  Target: LAMA2; (+) strand; PAM type: YTN; PAM sequence: TTA
aaaattatgtgtgccttttt

SEQ ID NO: 382005 - DNA, 20 bp, Artificial Sequence
  Description of Artificial Sequence: Synthetic oligonucleotide
  Target: LAMA2; (+) strand; PAM type: YTN; PAM sequence: TTA
tgtgtgcctttttttctgat

SEQ ID NO: 382006 - DNA, 20 bp, Artificial Sequence
  Description of Artificial Sequence: Synthetic oligonucleotide
  Target: LAMA2; (+) strand; PAM type: YTN; PAM sequence: CTT
tttttctgattattttctta

SEQ ID NO: 382007 - DNA, 20 bp, Artificial Sequence
  Description of Artificial Sequence: Synthetic oligonucleotide
  Target: LAMA2; (+) strand; PAM type: YTN; PAM sequence: TTT
ttttctgattattttcttat

SEQ ID NO: 382008 - DNA, 20 bp, Artificial Sequence
  Description of Artificial Sequence: Synthetic oligonucleotide
  Target: LAMA2; (+) strand; PAM type: YTN; PAM sequence: TTT
tttctgattattttcttata

SEQ ID NO: 382009 - DNA, 20 bp, Artificial Sequence
  Description of Artificial Sequence: Synthetic oligonucleotide
  Target: LAMA2; (+) strand; PAM type: YTN; PAM sequence: TTT
ttctgattattttcttataa

SEQ ID NO: 382010 - DNA, 20 bp, Artificial Sequence
  Description of Artificial Sequence: Synthetic oligonucleotide
  Target: LAMA2; (+) strand; PAM type: YTN; PAM sequence: TTT
tctgattattttcttataaa

SEQ ID NO: 382011 - DNA, 20 bp, Artificial Sequence
  Description of Artificial Sequence: Synthetic oligonucleotide
  Target: LAMA2; (+) strand; PAM type: YTN; PAM sequence: TTT
ctgattattttcttataaat

SEQ ID NO: 382012 - DNA, 20 bp, Artificial Sequence
  Description of Artificial Sequence: Synthetic oligonucleotide
  Target: LAMA2; (+) strand; PAM type: YTN; PAM sequence: TTC
tgattattttcttataaata

SEQ ID NO: 382013 - DNA, 20 bp, Artificial Sequence
  Description of Artificial Sequence: Synthetic oligonucleotide
  Target: LAMA2; (+) strand; PAM type: YTN; PAM sequence: CTG
attattttcttataaataaa

SEQ ID NO: 382014 - DNA, 20 bp, Artificial Sequence
  Description of Artificial Sequence: Synthetic oligonucleotide
  Target: LAMA2; (+) strand; PAM type: YTN; PAM sequence: TTA
ttttcttataaataaacttt

SEQ ID NO: 382015 - DNA, 20 bp, Artificial Sequence
  Description of Artificial Sequence: Synthetic oligonucleotide
  Target: LAMA2; (+) strand; PAM type: YTN; PAM sequence: TTT
tcttataaataaactttcta

SEQ ID NO: 382016 - DNA, 20 bp, Artificial Sequence
  Description of Artificial Sequence: Synthetic oligonucleotide
  Target: LAMA2; (+) strand; PAM type: YTN; PAM sequence: TTT
cttataaataaactttctat

SEQ ID NO: 382017 - DNA, 20 bp, Artificial Sequence
  Description of Artificial Sequence: Synthetic oligonucleotide
  Target: LAMA2; (+) strand; PAM type: YTN; PAM sequence: TTC
ttataaataaactttctata

SEQ ID NO: 382018 - DNA, 20 bp, Artificial Sequence
  Description of Artificial Sequence: Synthetic oligonucleotide
  Target: LAMA2; (+) strand; PAM type: YTN; PAM sequence: CTT
ataaataaactttctataaa

SEQ ID NO: 382019 - DNA, 20 bp, Artificial Sequence
  Description of Artificial Sequence: Synthetic oligonucleotide
  Target: LAMA2; (+) strand; PAM type: YTN; PAM sequence: TTA
taaataaactttctataaaa

SEQ ID NO: 382020 - DNA, 20 bp, Artificial Sequence
  Description of Artificial Sequence: Synthetic oligonucleotide
  Target: LAMA2; (+) strand; PAM type: YTN; PAM sequence: CTT
tctataaaatttggaaatta

SEQ ID NO: 382021 - DNA, 20 bp, Artificial Sequence
  Description of Artificial Sequence: Synthetic oligonucleotide
  Target: LAMA2; (+) strand; PAM type: YTN; PAM sequence: TTT
ctataaaatttggaaattac

SEQ ID NO: 382022 - DNA, 20 bp, Artificial Sequence
  Description of Artificial Sequence: Synthetic oligonucleotide
  Target: LAMA2; (+) strand; PAM type: YTN; PAM sequence: TTC
tataaaatttggaaattaca

SEQ ID NO: 382023 - DNA, 20 bp, Artificial Sequence
  Description of Artificial Sequence: Synthetic oligonucleotide
  Target: LAMA2; (+) strand; PAM type: YTN; PAM sequence: CTA
taaaatttggaaattacaga

SEQ ID NO: 382024 - DNA, 20 bp, Artificial Sequence
  Description of Artificial Sequence: Synthetic oligonucleotide
  Target: LAMA2; (+) strand; PAM type: YTN; PAM sequence: TTT
ggaaattacagaaaagaatt

SEQ ID NO: 382025 - DNA, 20 bp, Artificial Sequence
  Description of Artificial Sequence: Synthetic oligonucleotide
  Target: LAMA2; (+) strand; PAM type: YTN; PAM sequence: TTG
gaaattacagaaaagaatta

SEQ ID NO: 382026 - DNA, 20 bp, Artificial Sequence
  Description of Artificial Sequence: Synthetic oligonucleotide
  Target: LAMA2; (+) strand; PAM type: YTN; PAM sequence: TTA
cagaaaagaattaagaagaa

SEQ ID NO: 382027 - DNA, 20 bp, Artificial Sequence
  Description of Artificial Sequence: Synthetic oligonucleotide
  Target: LAMA2; (+) strand; PAM type: YTN; PAM sequence: TTA
agaagaaaaaattcacccaa

SEQ ID NO: 382028 - DNA, 20 bp, Artificial Sequence
  Description of Artificial Sequence: Synthetic oligonucleotide
  Target: LAMA2; (+) strand; PAM type: YTN; PAM sequence: TTC
acccaaaatgcaacataaca

SEQ ID NO: 382029 - DNA, 20 bp, Artificial Sequence
  Description of Artificial Sequence: Synthetic oligonucleotide
  Target: LAMA2; (+) strand; PAM type: YTN; PAM sequence: TTT
taatgttttaagtatttccc

SEQ ID NO: 382030 - DNA, 20 bp, Artificial Sequence
  Description of Artificial Sequence: Synthetic oligonucleotide
  Target: LAMA2; (+) strand; PAM type: YTN; PAM sequence: TTT
aatgttttaagtatttccca

SEQ ID NO: 382031 - DNA, 20 bp, Artificial Sequence
  Description of Artificial Sequence: Synthetic oligonucleotide
  Target: LAMA2; (+) strand; PAM type: YTN; PAM sequence: TTA
atgttttaagtatttcccac

SEQ ID NO: 382032 - DNA, 20 bp, Artificial Sequence
  Description of Artificial Sequence: Synthetic oligonucleotide
  Target: LAMA2; (+) strand; PAM type: YTN; PAM sequence: TTT
taagtatttcccaccaattt

SEQ ID NO: 382033 - DNA, 20 bp, Artificial Sequence
  Description of Artificial Sequence: Synthetic oligonucleotide
  Target: LAMA2; (+) strand; PAM type: YTN; PAM sequence: TTT
aagtatttcccaccaatttt

SEQ ID NO: 382034 - DNA, 20 bp, Artificial Sequence
  Description of Artificial Sequence: Synthetic oligonucleotide
  Target: LAMA2; (+) strand; PAM type: YTN; PAM sequence: TTA
agtatttcccaccaattttt

SEQ ID NO: 382035 - DNA, 20 bp, Artificial Sequence
  Description of Artificial Sequence: Synthetic oligonucleotide
  Target: LAMA2; (+) strand; PAM type: YTN; PAM sequence: TTT
cccaccaatttttacatgtg

SEQ ID NO: 382036 - DNA, 20 bp, Artificial Sequence
  Description of Artificial Sequence: Synthetic oligonucleotide
  Target: LAMA2; (+) strand; PAM type: YTN; PAM sequence: TTC
ccaccaatttttacatgtgt

SEQ ID NO: 382037 - DNA, 20 bp, Artificial Sequence
  Description of Artificial Sequence: Synthetic oligonucleotide
  Target: LAMA2; (+) strand; PAM type: YTN; PAM sequence: TTT
ttacatgtgtttatgaataa

SEQ ID NO: 382038 - DNA, 20 bp, Artificial Sequence
  Description of Artificial Sequence: Synthetic oligonucleotide
  Target: LAMA2; (+) strand; PAM type: YTN; PAM sequence: TTT
tacatgtgtttatgaataag

SEQ ID NO: 382039 - DNA, 20 bp, Artificial Sequence
  Description of Artificial Sequence: Synthetic oligonucleotide
  Target: LAMA2; (+) strand; PAM type: YTN; PAM sequence: TTT
acatgtgtttatgaataaga

SEQ ID NO: 382040 - DNA, 20 bp, Artificial Sequence
  Description of Artificial Sequence: Synthetic oligonucleotide
  Target: LAMA2; (+) strand; PAM type: YTN; PAM sequence: TTA
catgtgtttatgaataagat

SEQ ID NO: 382041 - DNA, 20 bp, Artificial Sequence
  Description of Artificial Sequence: Synthetic oligonucleotide
  Target: LAMA2; (+) strand; PAM type: YTN; PAM sequence: TTT
atgaataagatttatataac

SEQ ID NO: 382042 - DNA, 20 bp, Artificial Sequence
  Description of Artificial Sequence: Synthetic oligonucleotide
  Target: LAMA2; (+) strand; PAM type: YTN; PAM sequence: TTA
tgaataagatttatataaca

SEQ ID NO: 382043 - DNA, 20 bp, Artificial Sequence
  Description of Artificial Sequence: Synthetic oligonucleotide
  Target: LAMA2; (+) strand; PAM type: YTN; PAM sequence: TTT
atataacaccatggatgcag

SEQ ID NO: 382044 - DNA, 20 bp, Artificial Sequence
  Description of Artificial Sequence: Synthetic oligonucleotide
  Target: LAMA2; (+) strand; PAM type: YTN; PAM sequence: TTA
tataacaccatggatgcagt

SEQ ID NO: 382045 - DNA, 20 bp, Artificial Sequence
  Description of Artificial Sequence: Synthetic oligonucleotide
  Target: LAMA2; (+) strand; PAM type: YTN; PAM sequence: TTT
tatgtcttgtcctttacatt

SEQ ID NO: 382046 - DNA, 20 bp, Artificial Sequence
  Description of Artificial Sequence: Synthetic oligonucleotide
  Target: LAMA2; (+) strand; PAM type: YTN; PAM sequence: TTT
atgtcttgtcctttacattt

SEQ ID NO: 382047 - DNA, 20 bp, Artificial Sequence
  Description of Artificial Sequence: Synthetic oligonucleotide
  Target: LAMA2; (+) strand; PAM type: YTN; PAM sequence: TTA
tgtcttgtcctttacatttt

SEQ ID NO: 382048 - DNA, 20 bp, Artificial Sequence
  Description of Artificial Sequence: Synthetic oligonucleotide
  Target: LAMA2; (+) strand; PAM type: YTN; PAM sequence: CTT
gtcctttacatttttaccta

SEQ ID NO: 382049 - DNA, 20 bp, Artificial Sequence
  Description of Artificial Sequence: Synthetic oligonucleotide
  Target: LAMA2; (+) strand; PAM type: YTN; PAM sequence: TTG
tcctttacatttttacctat

SEQ ID NO: 382050 - DNA, 20 bp, Artificial Sequence
  Description of Artificial Sequence: Synthetic oligonucleotide
  Target: LAMA2; (+) strand; PAM type: YTN; PAM sequence: CTT
tacatttttacctatcatga

SEQ ID NO: 382051 - DNA, 20 bp, Artificial Sequence
  Description of Artificial Sequence: Synthetic oligonucleotide
  Target: LAMA2; (+) strand; PAM type: YTN; PAM sequence: TTT
acatttttacctatcatgag

SEQ ID NO: 382052 - DNA, 20 bp, Artificial Sequence
  Description of Artificial Sequence: Synthetic oligonucleotide
  Target: LAMA2; (+) strand; PAM type: YTN; PAM sequence: TTA
catttttacctatcatgagg

SEQ ID NO: 382053 - DNA, 20 bp, Artificial Sequence
  Description of Artificial Sequence: Synthetic oligonucleotide
  Target: LAMA2; (+) strand; PAM type: YTN; PAM sequence: TTT
ttacctatcatgaggttgta

SEQ ID NO: 382054 - DNA, 20 bp, Artificial Sequence
  Description of Artificial Sequence: Synthetic oligonucleotide
  Target: LAMA2; (+) strand; PAM type: YTN; PAM sequence: TTT
tacctatcatgaggttgtat

SEQ ID NO: 382055 - DNA, 20 bp, Artificial Sequence
  Description of Artificial Sequence: Synthetic oligonucleotide
  Target: LAMA2; (+) strand; PAM type: YTN; PAM sequence: TTT
acctatcatgaggttgtatt

SEQ ID NO: 382056 - DNA, 20 bp, Artificial Sequence
  Description of Artificial Sequence: Synthetic oligonucleotide
  Target: LAMA2; (+) strand; PAM type: YTN; PAM sequence: TTA
cctatcatgaggttgtatta

SEQ ID NO: 382057 - DNA, 20 bp, Artificial Sequence
  Description of Artificial Sequence: Synthetic oligonucleotide
  Target: LAMA2; (+) strand; PAM type: YTN; PAM sequence: CTA
tcatgaggttgtattatgtt

SEQ ID NO: 382058 - DNA, 20 bp, Artificial Sequence
  Description of Artificial Sequence: Synthetic oligonucleotide
  Target: LAMA2; (+) strand; PAM type: YTN; PAM sequence: TTG
tattatgttgttagatatta

SEQ ID NO: 382059 - DNA, 20 bp, Artificial Sequence
  Description of Artificial Sequence: Synthetic oligonucleotide
  Target: LAMA2; (+) strand; PAM type: YTN; PAM sequence: TTA
tgttgttagatattatttaa

SEQ ID NO: 382060 - DNA, 20 bp, Artificial Sequence
  Description of Artificial Sequence: Synthetic oligonucleotide
  Target: LAMA2; (+) strand; PAM type: YTN; PAM sequence: TTG
ttagatattatttaaaatct

SEQ ID NO: 382061 - DNA, 20 bp, Artificial Sequence
  Description of Artificial Sequence: Synthetic oligonucleotide
  Target: LAMA2; (+) strand; PAM type: YTN; PAM sequence: TTA
gatattatttaaaatcttta

SEQ ID NO: 382062 - DNA, 20 bp, Artificial Sequence
  Description of Artificial Sequence: Synthetic oligonucleotide
  Target: LAMA2; (+) strand; PAM type: YTN; PAM sequence: TTA
tttaaaatctttacgatctt

SEQ ID NO: 382063 - DNA, 20 bp, Artificial Sequence
  Description of Artificial Sequence: Synthetic oligonucleotide
  Target: LAMA2; (+) strand; PAM type: YTN; PAM sequence: TTT
aaaatctttacgatctttgt

SEQ ID NO: 382064 - DNA, 20 bp, Artificial Sequence
  Description of Artificial Sequence: Synthetic oligonucleotide
  Target: LAMA2; (+) strand; PAM type: YTN; PAM sequence: TTA
aaatctttacgatctttgtt

SEQ ID NO: 382065 - DNA, 20 bp, Artificial Sequence
  Description of Artificial Sequence: Synthetic oligonucleotide
  Target: LAMA2; (+) strand; PAM type: YTN; PAM sequence: CTT
tacgatctttgtttggatgt

SEQ ID NO: 382066 - DNA, 20 bp, Artificial Sequence
  Description of Artificial Sequence: Synthetic oligonucleotide
  Target: LAMA2; (+) strand; PAM type: YTN; PAM sequence: TTT
acgatctttgtttggatgtc

SEQ ID NO: 382067 - DNA, 20 bp, Artificial Sequence
  Description of Artificial Sequence: Synthetic oligonucleotide
  Target: LAMA2; (+) strand; PAM type: YTN; PAM sequence: TTA
cgatctttgtttggatgtcc

SEQ ID NO: 382068 - DNA, 20 bp, Artificial Sequence
  Description of Artificial Sequence: Synthetic oligonucleotide
  Target: LAMA2; (+) strand; PAM type: YTN; PAM sequence: CTT
tgtttggatgtcccataatt

SEQ ID NO: 382069 - DNA, 20 bp, Artificial Sequence
  Description of Artificial Sequence: Synthetic oligonucleotide
  Target: LAMA2; (+) strand; PAM type: YTN; PAM sequence: TTT
gtttggatgtcccataattt

SEQ ID NO: 382070 - DNA, 20 bp, Artificial Sequence
  Description of Artificial Sequence: Synthetic oligonucleotide
  Target: LAMA2; (+) strand; PAM type: YTN; PAM sequence: TTG
tttggatgtcccataattta

SEQ ID NO: 382071 - DNA, 20 bp, Artificial Sequence
  Description of Artificial Sequence: Synthetic oligonucleotide
  Target: LAMA2; (+) strand; PAM type: YTN; PAM sequence: TTT
ggatgtcccataatttaccc

SEQ ID NO: 382072 - DNA, 20 bp, Artificial Sequence
  Description of Artificial Sequence: Synthetic oligonucleotide
  Target: LAMA2; (+) strand; PAM type: YTN; PAM sequence: TTG
gatgtcccataatttaccca

SEQ ID NO: 382073 - DNA, 20 bp, Artificial Sequence
  Description of Artificial Sequence: Synthetic oligonucleotide
  Target: LAMA2; (+) strand; PAM type: YTN; PAM sequence: TTT
acccatttcccttagaattg

SEQ ID NO: 382074 - DNA, 20 bp, Artificial Sequence
  Description of Artificial Sequence: Synthetic oligonucleotide
  Target: LAMA2; (+) strand; PAM type: YTN; PAM sequence: TTA
cccatttcccttagaattga

SEQ ID NO: 382075 - DNA, 20 bp, Artificial Sequence
  Description of Artificial Sequence: Synthetic oligonucleotide
  Target: LAMA2; (+) strand; PAM type: YTN; PAM sequence: TTT
cccttagaattgaggtagct

SEQ ID NO: 382076 - DNA, 20 bp, Artificial Sequence
  Description of Artificial Sequence: Synthetic oligonucleotide
  Target: LAMA2; (+) strand; PAM type: YTN; PAM sequence: TTC
ccttagaattgaggtagctc

SEQ ID NO: 382077 - DNA, 20 bp, Artificial Sequence
  Description of Artificial Sequence: Synthetic oligonucleotide
  Target: LAMA2; (+) strand; PAM type: YTN; PAM sequence: CTT
agaattgaggtagctcttat

SEQ ID NO: 382078 - DNA, 20 bp, Artificial Sequence
  Description of Artificial Sequence: Synthetic oligonucleotide
  Target: LAMA2; (+) strand; PAM type: YTN; PAM sequence: TTA
gaattgaggtagctcttatt

SEQ ID NO: 382079 - DNA, 20 bp, Artificial Sequence
  Description of Artificial Sequence: Synthetic oligonucleotide
  Target: LAMA2; (+) strand; PAM type: YTN; PAM sequence: TTG
aggtagctcttattttttta

SEQ ID NO: 382080 - DNA, 20 bp, Artificial Sequence
  Description of Artificial Sequence: Synthetic oligonucleotide
  Target: LAMA2; (+) strand; PAM type: YTN; PAM sequence: CTC
ttatttttttatgtttctgc

SEQ ID NO: 382081 - DNA, 20 bp, Artificial Sequence
  Description of Artificial Sequence: Synthetic oligonucleotide
  Target: LAMA2; (+) strand; PAM type: YTN; PAM sequence: CTT
atttttttatgtttctgctg

SEQ ID NO: 382082 - DNA, 20 bp, Artificial Sequence
  Description of Artificial Sequence: Synthetic oligonucleotide
  Target: LAMA2; (+) strand; PAM type: YTN; PAM sequence: TTA
tttttttatgtttctgctgg

SEQ ID NO: 382083 - DNA, 20 bp, Artificial Sequence
  Description of Artificial Sequence: Synthetic oligonucleotide
  Target: LAMA2; (+) strand; PAM type: YTN; PAM sequence: TTT
ttttatgtttctgctggcac

SEQ ID NO: 382084 - DNA, 20 bp, Artificial Sequence
  Description of Artificial Sequence: Synthetic oligonucleotide
  Target: LAMA2; (+) strand; PAM type: YTN; PAM sequence: TTT
tttatgtttctgctggcacc

SEQ ID NO: 382085 - DNA, 20 bp, Artificial Sequence
  Description of Artificial Sequence: Synthetic oligonucleotide
  Target: LAMA2; (+) strand; PAM type: YTN; PAM sequence: TTT
ttatgtttctgctggcaccc

SEQ ID NO: 382086 - DNA, 20 bp, Artificial Sequence
  Description of Artificial Sequence: Synthetic oligonucleotide
  Target: LAMA2; (+) strand; PAM type: YTN; PAM sequence: TTT
tatgtttctgctggcaccct

SEQ ID NO: 382087 - DNA, 20 bp, Artificial Sequence
  Description of Artificial Sequence: Synthetic oligonucleotide
  Target: LAMA2; (+) strand; PAM type: YTN; PAM sequence: TTT
atgtttctgctggcaccctg

SEQ ID NO: 382088 - DNA, 20 bp, Artificial Sequence
  Description of Artificial Sequence: Synthetic oligonucleotide
  Target: LAMA2; (+) strand; PAM type: YTN; PAM sequence: TTA
tgtttctgctggcaccctgc

SEQ ID NO: 382089 - DNA, 20 bp, Artificial Sequence
  Description of Artificial Sequence: Synthetic oligonucleotide
  Target: LAMA2; (+) strand; PAM type: YTN; PAM sequence: TTT
ctgctggcaccctgcactct

SEQ ID NO: 382090 - DNA, 20 bp, Artificial Sequence
  Description of Artificial Sequence: Synthetic oligonucleotide
  Target: LAMA2; (+) strand; PAM type: YTN; PAM sequence: TTC
tgctggcaccctgcactctc

SEQ ID NO: 382091 - DNA, 20 bp, Artificial Sequence
  Description of Artificial Sequence: Synthetic oligonucleotide
  Target: LAMA2; (+) strand; PAM type: YTN; PAM sequence: CTG
ctggcaccctgcactctcta

SEQ ID NO: 382092 - DNA, 20 bp, Artificial Sequence
  Description of Artificial Sequence: Synthetic oligonucleotide
  Target: LAMA2; (+) strand; PAM type: YTN; PAM sequence: CTG
gcaccctgcactctctacca

SEQ ID NO: 382093 - DNA, 20 bp, Artificial Sequence
  Description of Artificial Sequence: Synthetic oligonucleotide
  Target: LAMA2; (+) strand; PAM type: YTN; PAM sequence: CTG
cactctctaccaccatctgc

SEQ ID NO: 382094 - DNA, 20 bp, Artificial Sequence
  Description of Artificial Sequence: Synthetic oligonucleotide
  Target: LAMA2; (+) strand; PAM type: YTN; PAM sequence: CTC
tctaccaccatctgcattag

SEQ ID NO: 382095 - DNA, 20 bp, Artificial Sequence
  Description of Artificial Sequence: Synthetic oligonucleotide
  Target: LAMA2; (+) strand; PAM type: YTN; PAM sequence: CTC
taccaccatctgcattagaa

SEQ ID NO: 382096 - DNA, 20 bp, Artificial Sequence
  Description of Artificial Sequence: Synthetic oligonucleotide
  Target: LAMA2; (+) strand; PAM type: YTN; PAM sequence: CTA
ccaccatctgcattagaaca

SEQ ID NO: 382097 - DNA, 20 bp, Artificial Sequence
  Description of Artificial Sequence: Synthetic oligonucleotide
  Target: LAMA2; (+) strand; PAM type: YTN; PAM sequence: CTG
cattagaacaatcagaacaa

SEQ ID NO: 382098 - DNA, 20 bp, Artificial Sequence
  Description of Artificial Sequence: Synthetic oligonucleotide
  Target: LAMA2; (+) strand; PAM type: YTN; PAM sequence: TTA
gaacaatcagaacaatcatg

SEQ ID NO: 382099 - DNA, 20 bp, Artificial Sequence
  Description of Artificial Sequence: Synthetic oligonucleotide
  Target: LAMA2; (+) strand; PAM type: YTN; PAM sequence: TTC
caccctttttatcgtagtca

SEQ ID NO: 382100 - DNA, 20 bp, Artificial Sequence
  Description of Artificial Sequence: Synthetic oligonucleotide
  Target: LAMA2; (+) strand; PAM type: YTN; PAM sequence: CTT
tttatcgtagtcactgtaag

SEQ ID NO: 382101 - DNA, 20 bp, Artificial Sequence
  Description of Artificial Sequence: Synthetic oligonucleotide
  Target: LAMA2; (+) strand; PAM type: YTN; PAM sequence: TTT
ttatcgtagtcactgtaaga

SEQ ID NO: 382102 - DNA, 20 bp, Artificial Sequence
  Description of Artificial Sequence: Synthetic oligonucleotide
  Target: LAMA2; (+) strand; PAM type: YTN; PAM sequence: TTT
tatcgtagtcactgtaagaa

SEQ ID NO: 382103 - DNA, 20 bp, Artificial Sequence
  Description of Artificial Sequence: Synthetic oligonucleotide
  Target: LAMA2; (+) strand; PAM type: YTN; PAM sequence: TTT
atcgtagtcactgtaagaaa

SEQ ID NO: 382104 - DNA, 20 bp, Artificial Sequence
  Description of Artificial Sequence: Synthetic oligonucleotide
  Target: LAMA2; (+) strand; PAM type: YTN; PAM sequence: TTA
tcgtagtcactgtaagaaat

SEQ ID NO: 382105 - DNA, 20 bp, Artificial Sequence
  Description of Artificial Sequence: Synthetic oligonucleotide
  Target: LAMA2; (+) strand; PAM type: YTN; PAM sequence: CTG
taagaaattcaggttgcccc

SEQ ID NO: 382106 - DNA, 20 bp, Artificial Sequence
  Description of Artificial Sequence: Synthetic oligonucleotide
  Target: LAMA2; (+) strand; PAM type: YTN; PAM sequence: TTC
aggttgcccctgtcaccact

SEQ ID NO: 382107 - DNA, 20 bp, Artificial Sequence
  Description of Artificial Sequence: Synthetic oligonucleotide
  Target: LAMA2; (+) strand; PAM type: YTN; PAM sequence: TTG
cccctgtcaccacttgtccc

SEQ ID NO: 382108 - DNA, 20 bp, Artificial Sequence
  Description of Artificial Sequence: Synthetic oligonucleotide
  Target: LAMA2; (+) strand; PAM type: YTN; PAM sequence: CTG
tcaccacttgtccctcaagc

SEQ ID NO: 382109 - DNA, 20 bp, Artificial Sequence
  Description of Artificial Sequence: Synthetic oligonucleotide
  Target: LAMA2; (+) strand; PAM type: YTN; PAM sequence: CTT
gtccctcaagctgtaatctg

SEQ ID NO: 382110 - DNA, 20 bp, Artificial Sequence
  Description of Artificial Sequence: Synthetic oligonucleotide
  Target: LAMA2; (+) strand; PAM type: YTN; PAM sequence: TTG
tccctcaagctgtaatctgc

SEQ ID NO: 382111 - DNA, 20 bp, Artificial Sequence
  Description of Artificial Sequence: Synthetic oligonucleotide
  Target: LAMA2; (+) strand; PAM type: YTN; PAM sequence: CTC
aagctgtaatctgcccacag

SEQ ID NO: 382112 - DNA, 20 bp, Artificial Sequence
  Description of Artificial Sequence: Synthetic oligonucleotide
  Target: LAMA2; (+) strand; PAM type: YTN; PAM sequence: CTG
taatctgcccacagctcatc

SEQ ID NO: 382113 - DNA, 20 bp, Artificial Sequence
  Description of Artificial Sequence: Synthetic oligonucleotide
  Target: LAMA2; (+) strand; PAM type: YTN; PAM sequence: CTG
cccacagctcatctttgtta

SEQ ID NO: 382114 - DNA, 20 bp, Artificial Sequence
  Description of Artificial Sequence: Synthetic oligonucleotide
  Target: LAMA2; (+) strand; PAM type: YTN; PAM sequence: CTC
atctttgttaagcccatctc

SEQ ID NO: 382115 - DNA, 20 bp, Artificial Sequence
  Description of Artificial Sequence: Synthetic oligonucleotide
  Target: LAMA2; (+) strand; PAM type: YTN; PAM sequence: CTT
tgttaagcccatctcccacc

SEQ ID NO: 382116 - DNA, 20 bp, Artificial Sequence
  Description of Artificial Sequence: Synthetic oligonucleotide
  Target: LAMA2; (+) strand; PAM type: YTN; PAM sequence: TTT
gttaagcccatctcccacct

SEQ ID NO: 382117 - DNA, 20 bp, Artificial Sequence
  Description of Artificial Sequence: Synthetic oligonucleotide
  Target: LAMA2; (+) strand; PAM type: YTN; PAM sequence: TTG
ttaagcccatctcccacctc

SEQ ID NO: 382118 - DNA, 20 bp, Artificial Sequence
  Description of Artificial Sequence: Synthetic oligonucleotide
  Target: LAMA2; (+) strand; PAM type: YTN; PAM sequence: TTA
agcccatctcccacctctgc

SEQ ID NO: 382119 - DNA, 20 bp, Artificial Sequence
  Description of Artificial Sequence: Synthetic oligonucleotide
  Target: LAMA2; (+) strand; PAM type: YTN; PAM sequence: CTC
ccacctctgctcaccttctg

SEQ ID NO: 382120 - DNA, 20 bp, Artificial Sequence
  Description of Artificial Sequence: Synthetic oligonucleotide
  Target: LAMA2; (+) strand; PAM type: YTN; PAM sequence: CTC
tgctcaccttctgaaaccat

SEQ ID NO: 382121 - DNA, 20 bp, Artificial Sequence
  Description of Artificial Sequence: Synthetic oligonucleotide
  Target: LAMA2; (+) strand; PAM type: YTN; PAM sequence: CTG
ctcaccttctgaaaccattc

SEQ ID NO: 382122 - DNA, 20 bp, Artificial Sequence
  Description of Artificial Sequence: Synthetic oligonucleotide
  Target: LAMA2; (+) strand; PAM type: YTN; PAM sequence: CTC
accttctgaaaccattctac

SEQ ID NO: 382123 - DNA, 20 bp, Artificial Sequence
  Description of Artificial Sequence: Synthetic oligonucleotide
  Target: LAMA2; (+) strand; PAM type: YTN; PAM sequence: CTT
ctgaaaccattctactgagc

SEQ ID NO: 382124 - DNA, 20 bp, Artificial Sequence
  Description of Artificial Sequence: Synthetic oligonucleotide
  Target: LAMA2; (+) strand; PAM type: YTN; PAM sequence: TTC
tgaaaccattctactgagcc

SEQ ID NO: 382125 - DNA, 20 bp, Artificial Sequence
  Description of Artificial Sequence: Synthetic oligonucleotide
  Target: LAMA2; (+) strand; PAM type: YTN; PAM sequence: CTG
aaaccattctactgagcctt

SEQ ID NO: 382126 - DNA, 20 bp, Artificial Sequence
  Description of Artificial Sequence: Synthetic oligonucleotide
  Target: LAMA2; (+) strand; PAM type: YTN; PAM sequence: TTC
tactgagccttgtggaactc

SEQ ID NO: 382127 - DNA, 20 bp, Artificial Sequence
  Description of Artificial Sequence: Synthetic oligonucleotide
  Target: LAMA2; (+) strand; PAM type: YTN; PAM sequence: CTA
ctgagccttgtggaactcat

SEQ ID NO: 382128 - DNA, 20 bp, Artificial Sequence
  Description of Artificial Sequence: Synthetic oligonucleotide
  Target: LAMA2; (+) strand; PAM type: YTN; PAM sequence: CTG
agccttgtggaactcatggt

SEQ ID NO: 382129 - DNA, 20 bp, Artificial Sequence
  Description of Artificial Sequence: Synthetic oligonucleotide
  Target: LAMA2; (+) strand; PAM type: YTN; PAM sequence: CTT
gtggaactcatggtcaaaac

SEQ ID NO: 382130 - DNA, 20 bp, Artificial Sequence
  Description of Artificial Sequence: Synthetic oligonucleotide
  Target: LAMA2; (+) strand; PAM type: YTN; PAM sequence: TTG
tggaactcatggtcaaaaca

SEQ ID NO: 382131 - DNA, 20 bp, Artificial Sequence
  Description of Artificial Sequence: Synthetic oligonucleotide
  Target: LAMA2; (+) strand; PAM type: YTN; PAM sequence: CTC
atggtcaaaacaggcaaaat

SEQ ID NO: 382132 - DNA, 20 bp, Artificial Sequence
  Description of Artificial Sequence: Synthetic oligonucleotide
  Target: LAMA2; (+) strand; PAM type: YTN; PAM sequence: CTC
ctcttccctcagtgttctct

SEQ ID NO: 382133 - DNA, 20 bp, Artificial Sequence
  Description of Artificial Sequence: Synthetic oligonucleotide
  Target: LAMA2; (+) strand; PAM type: YTN; PAM sequence: CTC
ttccctcagtgttctcttca

SEQ ID NO: 382134 - DNA, 20 bp, Artificial Sequence
  Description of Artificial Sequence: Synthetic oligonucleotide
  Target: LAMA2; (+) strand; PAM type: YTN; PAM sequence: CTT
ccctcagtgttctcttcatc

SEQ ID NO: 382135 - DNA, 20 bp, Artificial Sequence
  Description of Artificial Sequence: Synthetic oligonucleotide
  Target: LAMA2; (+) strand; PAM type: YTN; PAM sequence: TTC
cctcagtgttctcttcatca

SEQ ID NO: 382136 - DNA, 20 bp, Artificial Sequence
  Description of Artificial Sequence: Synthetic oligonucleotide
  Target: LAMA2; (+) strand; PAM type: YTN; PAM sequence: CTC
agtgttctcttcatcatgct

SEQ ID NO: 382137 - DNA, 20 bp, Artificial Sequence
  Description of Artificial Sequence: Synthetic oligonucleotide
  Target: LAMA2; (+) strand; PAM type: YTN; PAM sequence: TTC
tcttcatcatgctctgactg

SEQ ID NO: 382138 - DNA, 20 bp, Artificial Sequence
  Description of Artificial Sequence: Synthetic oligonucleotide
  Target: LAMA2; (+) strand; PAM type: YTN; PAM sequence: CTC
ttcatcatgctctgactgaa

SEQ ID NO: 382139 - DNA, 20 bp, Artificial Sequence
  Description of Artificial Sequence: Synthetic oligonucleotide
  Target: LAMA2; (+) strand; PAM type: YTN; PAM sequence: CTT
catcatgctctgactgaaac

SEQ ID NO: 382140 - DNA, 20 bp, Artificial Sequence
  Description of Artificial Sequence: Synthetic oligonucleotide
  Target: LAMA2; (+) strand; PAM type: YTN; PAM sequence: TTC
atcatgctctgactgaaacc

SEQ ID NO: 382141 - DNA, 20 bp, Artificial Sequence
  Description of Artificial Sequence: Synthetic oligonucleotide
  Target: LAMA2; (+) strand; PAM type: YTN; PAM sequence: CTC
tgactgaaacccaactctca

SEQ ID NO: 382142 - DNA, 20 bp, Artificial Sequence
  Description of Artificial Sequence: Synthetic oligonucleotide
  Target: LAMA2; (+) strand; PAM type: YTN; PAM sequence: CTG
actgaaacccaactctcact

SEQ ID NO: 382143 - DNA, 20 bp, Artificial Sequence
  Description of Artificial Sequence: Synthetic oligonucleotide
  Target: LAMA2; (+) strand; PAM type: YTN; PAM sequence: CTG
aaacccaactctcactttgc

SEQ ID NO: 382144 - DNA, 20 bp, Artificial Sequence
  Description of Artificial Sequence: Synthetic oligonucleotide
  Target: LAMA2; (+) strand; PAM type: YTN; PAM sequence: CTC
tcactttgcatgctgctacc

SEQ ID NO: 382145 - DNA, 20 bp, Artificial Sequence
  Description of Artificial Sequence: Synthetic oligonucleotide
  Target: LAMA2; (+) strand; PAM type: YTN; PAM sequence: CTC
actttgcatgctgctacccc

SEQ ID NO: 382146 - DNA, 20 bp, Artificial Sequence
  Description of Artificial Sequence: Synthetic oligonucleotide
  Target: LAMA2; (+) strand; PAM type: YTN; PAM sequence: CTT
tgcatgctgctaccccggca

SEQ ID NO: 382147 - DNA, 20 bp, Artificial Sequence
  Description of Artificial Sequence: Synthetic oligonucleotide
  Target: LAMA2; (+) strand; PAM type: YTN; PAM sequence: TTT
gcatgctgctaccccggcag

SEQ ID NO: 382148 - DNA, 20 bp, Artificial Sequence
  Description of Artificial Sequence: Synthetic oligonucleotide
  Target: LAMA2; (+) strand; PAM type: YTN; PAM sequence: TTG
catgctgctaccccggcagc

SEQ ID NO: 382149 - DNA, 20 bp, Artificial Sequence
  Description of Artificial Sequence: Synthetic oligonucleotide
  Target: LAMA2; (+) strand; PAM type: YTN; PAM sequence: CTG
ctaccccggcagccctctta

SEQ ID NO: 382150 - DNA, 20 bp, Artificial Sequence
  Description of Artificial Sequence: Synthetic oligonucleotide
  Target: LAMA2; (+) strand; PAM type: YTN; PAM sequence: CTA
ccccggcagccctcttaagg

SEQ ID NO: 382151 - DNA, 20 bp, Artificial Sequence
  Description of Artificial Sequence: Synthetic oligonucleotide
  Target: LAMA2; (+) strand; PAM type: YTN; PAM sequence: CTC
ttaaggagtagccatcacct

SEQ ID NO: 382152 - DNA, 20 bp, Artificial Sequence
  Description of Artificial Sequence: Synthetic oligonucleotide
  Target: LAMA2; (+) strand; PAM type: YTN; PAM sequence: CTT
aaggagtagccatcaccttt

SEQ ID NO: 382153 - DNA, 20 bp, Artificial Sequence
  Description of Artificial Sequence: Synthetic oligonucleotide
  Target: LAMA2; (+) strand; PAM type: YTN; PAM sequence: TTA
aggagtagccatcacctttt

SEQ ID NO: 382154 - DNA, 20 bp, Artificial Sequence
  Description of Artificial Sequence: Synthetic oligonucleotide
  Target: LAMA2; (+) strand; PAM type: YTN; PAM sequence: CTT
tttgttttttttttcccctg

SEQ ID NO: 382155 - DNA, 20 bp, Artificial Sequence
  Description of Artificial Sequence: Synthetic oligonucleotide
  Target: LAMA2; (+) strand; PAM type: YTN; PAM sequence: TTT
ttgttttttttttcccctga

SEQ ID NO: 382156 - DNA, 20 bp, Artificial Sequence
  Description of Artificial Sequence: Synthetic oligonucleotide
  Target: LAMA2; (+) strand; PAM type: YTN; PAM sequence: TTT
tgttttttttttcccctgag

SEQ ID NO: 382157 - DNA, 20 bp, Artificial Sequence
  Description of Artificial Sequence: Synthetic oligonucleotide
  Target: LAMA2; (+) strand; PAM type: YTN; PAM sequence: TTT
gttttttttttcccctgaga

SEQ ID NO: 382158 - DNA, 20 bp, Artificial Sequence
  Description of Artificial Sequence: Synthetic oligonucleotide
  Target: LAMA2; (+) strand; PAM type: YTN; PAM sequence: TTG
ttttttttttcccctgagat

SEQ ID NO: 382159 - DNA, 20 bp, Artificial Sequence
  Description of Artificial Sequence: Synthetic oligonucleotide
  Target: LAMA2; (+) strand; PAM type: YTN; PAM sequence: TTT
tttttttcccctgagatgct

SEQ ID NO: 382160 - DNA, 20 bp, Artificial Sequence
  Description of Artificial Sequence: Synthetic oligonucleotide
  Target: LAMA2; (+) strand; PAM type: YTN; PAM sequence: TTT
ttttttcccctgagatgctg

SEQ ID NO: 382161 - DNA, 20 bp, Artificial Sequence
  Description of Artificial Sequence: Synthetic oligonucleotide
  Target: LAMA2; (+) strand; PAM type: YTN; PAM sequence: TTT
tttttcccctgagatgctga

SEQ ID NO: 382162 - DNA, 20 bp, Artificial Sequence
  Description of Artificial Sequence: Synthetic oligonucleotide
  Target: LAMA2; (+) strand; PAM type: YTN; PAM sequence: TTT
ttttcccctgagatgctgac

SEQ ID NO: 382163 - DNA, 20 bp, Artificial Sequence
  Description of Artificial Sequence: Synthetic oligonucleotide
  Target: LAMA2; (+) strand; PAM type: YTN; PAM sequence: TTT
tttcccctgagatgctgact

SEQ ID NO: 382164 - DNA, 20 bp, Artificial Sequence
  Description of Artificial Sequence: Synthetic oligonucleotide
  Target: LAMA2; (+) strand; PAM type: YTN; PAM sequence: TTT
ttcccctgagatgctgactc

SEQ ID NO: 382165 - DNA, 20 bp, Artificial Sequence
  Description of Artificial Sequence: Synthetic oligonucleotide
  Target: LAMA2; (+) strand; PAM type: YTN; PAM sequence: TTT
tcccctgagatgctgactca

SEQ ID NO: 382166 - DNA, 20 bp, Artificial Sequence
  Description of Artificial Sequence: Synthetic oligonucleotide
  Target: LAMA2; (+) strand; PAM type: YTN; PAM sequence: TTT
cccctgagatgctgactcac

SEQ ID NO: 382167 - DNA, 20 bp, Artificial Sequence
  Description of Artificial Sequence: Synthetic oligonucleotide
  Target: LAMA2; (+) strand; PAM type: YTN; PAM sequence: TTC
ccctgagatgctgactcact

SEQ ID NO: 382168 - DNA, 20 bp, Artificial Sequence
  Description of Artificial Sequence: Synthetic oligonucleotide
  Target: LAMA2; (+) strand; PAM type: YTN; PAM sequence: CTG
agatgctgactcactctgtc

SEQ ID NO: 382169 - DNA, 20 bp, Artificial Sequence
  Description of Artificial Sequence: Synthetic oligonucleotide
  Target: LAMA2; (+) strand; PAM type: YTN; PAM sequence: CTG
actcactctgtcgtgcaggc

SEQ ID NO: 382170 - DNA, 20 bp, Artificial Sequence
  Description of Artificial Sequence: Synthetic oligonucleotide
  Target: LAMA2; (+) strand; PAM type: YTN; PAM sequence: CTC
actctgtcgtgcaggctgga

SEQ ID NO: 382171 - DNA, 20 bp, Artificial Sequence
  Description of Artificial Sequence: Synthetic oligonucleotide
  Target: LAMA2; (+) strand; PAM type: YTN; PAM sequence: CTC
tgtcgtgcaggctggagggc

SEQ ID NO: 382172 - DNA, 20 bp, Artificial Sequence
  Description of Artificial Sequence: Synthetic oligonucleotide
  Target: LAMA2; (+) strand; PAM type: YTN; PAM sequence: CTG
tcgtgcaggctggagggcag

SEQ ID NO: 382173 - DNA, 20 bp, Artificial Sequence
  Description of Artificial Sequence: Synthetic oligonucleotide
  Target: LAMA2; (+) strand; PAM type: YTN; PAM sequence: CTG
gagggcagtggcgatcctgg

SEQ ID NO: 382174 - DNA, 20 bp, Artificial Sequence
  Description of Artificial Sequence: Synthetic oligonucleotide
  Target: LAMA2; (+) strand; PAM type: YTN; PAM sequence: CTG
gctcactgcaacctccgact

SEQ ID NO: 382175 - DNA, 20 bp, Artificial Sequence
  Description of Artificial Sequence: Synthetic oligonucleotide
  Target: LAMA2; (+) strand; PAM type: YTN; PAM sequence: CTC
actgcaacctccgactcccg

SEQ ID NO: 382176 - DNA, 20 bp, Artificial Sequence
  Description of Artificial Sequence: Synthetic oligonucleotide
  Target: LAMA2; (+) strand; PAM type: YTN; PAM sequence: CTG
caacctccgactcccgggtt

SEQ ID NO: 382177 - DNA, 20 bp, Artificial Sequence
  Description of Artificial Sequence: Synthetic oligonucleotide
  Target: LAMA2; (+) strand; PAM type: YTN; PAM sequence: CTC
cgactcccgggttcaagtga

SEQ ID NO: 382178 - DNA, 20 bp, Artificial Sequence
  Description of Artificial Sequence: Synthetic oligonucleotide
  Target: LAMA2; (+) strand; PAM type: YTN; PAM sequence: CTC
ccgggttcaagtgattctca

SEQ ID NO: 382179 - DNA, 20 bp, Artificial Sequence
  Description of Artificial Sequence: Synthetic oligonucleotide
  Target: LAMA2; (+) strand; PAM type: YTN; PAM sequence: TTC
aagtgattctcatgcctcag

SEQ ID NO: 382180 - DNA, 20 bp, Artificial Sequence
  Description of Artificial Sequence: Synthetic oligonucleotide
  Target: LAMA2; (+) strand; PAM type: YTN; PAM sequence: TTC
tcatgcctcagcctcctgag

SEQ ID NO: 382181 - DNA, 20 bp, Artificial Sequence
  Description of Artificial Sequence: Synthetic oligonucleotide
  Target: LAMA2; (+) strand; PAM type: YTN; PAM sequence: CTC
atgcctcagcctcctgagta

SEQ ID NO: 382182 - DNA, 20 bp, Artificial Sequence
  Description of Artificial Sequence: Synthetic oligonucleotide
  Target: LAMA2; (+) strand; PAM type: YTN; PAM sequence: CTC
agcctcctgagtagctggga

SEQ ID NO: 382183 - DNA, 20 bp, Artificial Sequence
  Description of Artificial Sequence: Synthetic oligonucleotide
  Target: LAMA2; (+) strand; PAM type: YTN; PAM sequence: CTC
ctgagtagctgggactacag

SEQ ID NO: 382184 - DNA, 20 bp, Artificial Sequence
  Description of Artificial Sequence: Synthetic oligonucleotide
  Target: LAMA2; (+) strand; PAM type: YTN; PAM sequence: CTG
agtagctgggactacaggct

SEQ ID NO: 382185 - DNA, 20 bp, Artificial Sequence
  Description of Artificial Sequence: Synthetic oligonucleotide
  Target: LAMA2; (+) strand; PAM type: YTN; PAM sequence: CTG
ggactacaggctcacgccac

SEQ ID NO: 382186 - DNA, 20 bp, Artificial Sequence
  Description of Artificial Sequence: Synthetic oligonucleotide
  Target: LAMA2; (+) strand; PAM type: YTN; PAM sequence: CTA
caggctcacgccaccacacc

SEQ ID NO: 382187 - DNA, 20 bp, Artificial Sequence
  Description of Artificial Sequence: Synthetic oligonucleotide
  Target: LAMA2; (+) strand; PAM type: YTN; PAM sequence: CTC
acgccaccacacctggatat

SEQ ID NO: 382188 - DNA, 20 bp, Artificial Sequence
  Description of Artificial Sequence: Synthetic oligonucleotide
  Target: LAMA2; (+) strand; PAM type: YTN; PAM sequence: CTG
gatattttttttatttttag

SEQ ID NO: 382189 - DNA, 20 bp, Artificial Sequence
  Description of Artificial Sequence: Synthetic oligonucleotide
  Target: LAMA2; (+) strand; PAM type: YTN; PAM sequence: TTT
tttttatttttagtagagac

SEQ ID NO: 382190 - DNA, 20 bp, Artificial Sequence
  Description of Artificial Sequence: Synthetic oligonucleotide
  Target: LAMA2; (+) strand; PAM type: YTN; PAM sequence: TTT
ttttatttttagtagagacg

SEQ ID NO: 382191 - DNA, 20 bp, Artificial Sequence
  Description of Artificial Sequence: Synthetic oligonucleotide
  Target: LAMA2; (+) strand; PAM type: YTN; PAM sequence: TTT
tttatttttagtagagacgg

SEQ ID NO: 382192 - DNA, 20 bp, Artificial Sequence
  Description of Artificial Sequence: Synthetic oligonucleotide
  Target: LAMA2; (+) strand; PAM type: YTN; PAM sequence: TTT
ttatttttagtagagacggg

SEQ ID NO: 382193 - DNA, 20 bp, Artificial Sequence
  Description of Artificial Sequence: Synthetic oligonucleotide
  Target: LAMA2; (+) strand; PAM type: YTN; PAM sequence: TTT
tatttttagtagagacgggg

SEQ ID NO: 382194 - DNA, 20 bp, Artificial Sequence
  Description of Artificial Sequence: Synthetic oligonucleotide
  Target: LAMA2; (+) strand; PAM type: YTN; PAM sequence: TTT
atttttagtagagacggggt

SEQ ID NO: 382195 - DNA, 20 bp, Artificial Sequence
  Description of Artificial Sequence: Synthetic oligonucleotide
  Target: LAMA2; (+) strand; PAM type: YTN; PAM sequence: TTA
tttttagtagagacggggtt

SEQ ID NO: 382196 - DNA, 20 bp, Artificial Sequence
  Description of Artificial Sequence: Synthetic oligonucleotide
  Target: LAMA2; (+) strand; PAM type: YTN; PAM sequence: TTT
ttagtagagacggggtttca

SEQ ID NO: 382197 - DNA, 20 bp, Artificial Sequence
  Description of Artificial Sequence: Synthetic oligonucleotide
  Target: LAMA2; (+) strand; PAM type: YTN; PAM sequence: TTT
tagtagagacggggtttcac

SEQ ID NO: 382198 - DNA, 20 bp, Artificial Sequence
  Description of Artificial Sequence: Synthetic oligonucleotide
  Target: LAMA2; (+) strand; PAM type: YTN; PAM sequence: TTT
agtagagacggggtttcacc

SEQ ID NO: 382199 - DNA, 20 bp, Artificial Sequence
  Description of Artificial Sequence: Synthetic oligonucleotide
  Target: LAMA2; (+) strand; PAM type: YTN; PAM sequence: TTA
gtagagacggggtttcacca

SEQ ID NO: 382200 - DNA, 20 bp, Artificial Sequence
  Description of Artificial Sequence: Synthetic oligonucleotide
  Target: LAMA2; (+) strand; PAM type: YTN; PAM sequence: TTT
caccatgttgtctaggctgg

SEQ ID NO: 382201 - DNA, 20 bp, Artificial Sequence
  Description of Artificial Sequence: Synthetic oligonucleotide
  Target: LAMA2; (+) strand; PAM type: YTN; PAM sequence: TTC
accatgttgtctaggctggt

SEQ ID NO: 382202 - DNA, 20 bp, Artificial Sequence
  Description of Artificial Sequence: Synthetic oligonucleotide
  Target: LAMA2; (+) strand; PAM type: YTN; PAM sequence: TTG
tctaggctggtctcgaactc

SEQ ID NO: 382203 - DNA, 20 bp, Artificial Sequence
  Description of Artificial Sequence: Synthetic oligonucleotide
  Target: LAMA2; (+) strand; PAM type: YTN; PAM sequence: CTA
ggctggtctcgaactcctaa

SEQ ID NO: 382204 - DNA, 20 bp, Artificial Sequence
  Description of Artificial Sequence: Synthetic oligonucleotide
  Target: LAMA2; (+) strand; PAM type: YTN; PAM sequence: CTG
gtctcgaactcctaacctca

SEQ ID NO: 382205 - DNA, 20 bp, Artificial Sequence
  Description of Artificial Sequence: Synthetic oligonucleotide
  Target: LAMA2; (+) strand; PAM type: YTN; PAM sequence: CTC
gaactcctaacctcaggtaa

SEQ ID NO: 382206 - DNA, 20 bp, Artificial Sequence
  Description of Artificial Sequence: Synthetic oligonucleotide
  Target: LAMA2; (+) strand; PAM type: YTN; PAM sequence: CTC
ctaacctcaggtaatccacc

SEQ ID NO: 382207 - DNA, 20 bp, Artificial Sequence
  Description of Artificial Sequence: Synthetic oligonucleotide
  Target: LAMA2; (+) strand; PAM type: YTN; PAM sequence: CTA
acctcaggtaatccacccac

SEQ ID NO: 382208 - DNA, 20 bp, Artificial Sequence
  Description of Artificial Sequence: Synthetic oligonucleotide
  Target: LAMA2; (+) strand; PAM type: YTN; PAM sequence: CTC
aggtaatccacccaccttgg

SEQ ID NO: 382209 - DNA, 20 bp, Artificial Sequence
  Description of Artificial Sequence: Synthetic oligonucleotide
  Target: LAMA2; (+) strand; PAM type: YTN; PAM sequence: CTT
ggcctcccaaagtgctggga

SEQ ID NO: 382210 - DNA, 20 bp, Artificial Sequence
  Description of Artificial Sequence: Synthetic oligonucleotide
  Target: LAMA2; (+) strand; PAM type: YTN; PAM sequence: TTG
gcctcccaaagtgctgggat

SEQ ID NO: 382211 - DNA, 20 bp, Artificial Sequence
  Description of Artificial Sequence: Synthetic oligonucleotide
  Target: LAMA2; (+) strand; PAM type: YTN; PAM sequence: CTC
ccaaagtgctgggattacag

SEQ ID NO: 382212 - DNA, 20 bp, Artificial Sequence
  Description of Artificial Sequence: Synthetic oligonucleotide
  Target: LAMA2; (+) strand; PAM type: YTN; PAM sequence: CTG
ggattacaggcatgagccac

SEQ ID NO: 382213 - DNA, 20 bp, Artificial Sequence
  Description of Artificial Sequence: Synthetic oligonucleotide
  Target: LAMA2; (+) strand; PAM type: YTN; PAM sequence: TTA
caggcatgagccaccatgcc

SEQ ID NO: 382214 - DNA, 20 bp, Artificial Sequence
  Description of Artificial Sequence: Synthetic oligonucleotide
  Target: LAMA2; (+) strand; PAM type: YTN; PAM sequence: CTG
cagtcgccatcactttcttt

SEQ ID NO: 382215 - DNA, 20 bp, Artificial Sequence
  Description of Artificial Sequence: Synthetic oligonucleotide
  Target: LAMA2; (+) strand; PAM type: YTN; PAM sequence: CTT
tctttcactcccttcattcc

SEQ ID NO: 382216 - DNA, 20 bp, Artificial Sequence
  Description of Artificial Sequence: Synthetic oligonucleotide
  Target: LAMA2; (+) strand; PAM type: YTN; PAM sequence: TTT
ctttcactcccttcattccc

SEQ ID NO: 382217 - DNA, 20 bp, Artificial Sequence
  Description of Artificial Sequence: Synthetic oligonucleotide
  Target: LAMA2; (+) strand; PAM type: YTN; PAM sequence: TTC
tttcactcccttcattcccc

SEQ ID NO: 382218 - DNA, 20 bp, Artificial Sequence
  Description of Artificial Sequence: Synthetic oligonucleotide
  Target: LAMA2; (+) strand; PAM type: YTN; PAM sequence: CTT
tcactcccttcattcccctg

SEQ ID NO: 382219 - DNA, 20 bp, Artificial Sequence
  Description of Artificial Sequence: Synthetic oligonucleotide
  Target: LAMA2; (+) strand; PAM type: YTN; PAM sequence: TTT
cactcccttcattcccctga

SEQ ID NO: 382220 - DNA, 20 bp, Artificial Sequence
  Description of Artificial Sequence: Synthetic oligonucleotide
  Target: LAMA2; (+) strand; PAM type: YTN; PAM sequence: TTC
actcccttcattcccctgag

SEQ ID NO: 382221 - DNA, 20 bp, Artificial Sequence
  Description of Artificial Sequence: Synthetic oligonucleotide
  Target: LAMA2; (+) strand; PAM type: YTN; PAM sequence: CTC
ccttcattcccctgagtctg

SEQ ID NO: 382222 - DNA, 20 bp, Artificial Sequence
  Description of Artificial Sequence: Synthetic oligonucleotide
  Target: LAMA2; (+) strand; PAM type: YTN; PAM sequence: CTT
cattcccctgagtctgaagg

SEQ ID NO: 382223 - DNA, 20 bp, Artificial Sequence
  Description of Artificial Sequence: Synthetic oligonucleotide
  Target: LAMA2; (+) strand; PAM type: YTN; PAM sequence: TTC
attcccctgagtctgaaggt

SEQ ID NO: 382224 - DNA, 20 bp, Artificial Sequence
  Description of Artificial Sequence: Synthetic oligonucleotide
  Target: LAMA2; (+) strand; PAM type: YTN; PAM sequence: TTC
ccctgagtctgaaggtgggg

SEQ ID NO: 382225 - DNA, 20 bp, Artificial Sequence
  Description of Artificial Sequence: Synthetic oligonucleotide
  Target: LAMA2; (+) strand; PAM type: YTN; PAM sequence: CTG
agtctgaaggtgggggcagg

SEQ ID NO: 382226 - DNA, 20 bp, Artificial Sequence
  Description of Artificial Sequence: Synthetic oligonucleotide
  Target: LAMA2; (+) strand; PAM type: YTN; PAM sequence: CTG
aaggtgggggcaggttttcc

SEQ ID NO: 382227 - DNA, 20 bp, Artificial Sequence
  Description of Artificial Sequence: Synthetic oligonucleotide
  Target: LAMA2; (+) strand; PAM type: YTN; PAM sequence: TTT
tcctgctcctcgctgccagt

SEQ ID NO: 382228 - DNA, 20 bp, Artificial Sequence
  Description of Artificial Sequence: Synthetic oligonucleotide
  Target: LAMA2; (+) strand; PAM type: YTN; PAM sequence: TTT
cctgctcctcgctgccagtt

SEQ ID NO: 382229 - DNA, 20 bp, Artificial Sequence
  Description of Artificial Sequence: Synthetic oligonucleotide
  Target: LAMA2; (+) strand; PAM type: YTN; PAM sequence: TTC
ctgctcctcgctgccagttt

SEQ ID NO: 382230 - DNA, 20 bp, Artificial Sequence
  Description of Artificial Sequence: Synthetic oligonucleotide
  Target: LAMA2; (+) strand; PAM type: YTN; PAM sequence: CTG
ctcctcgctgccagtttcat

SEQ ID NO: 382231 - DNA, 20 bp, Artificial Sequence
  Description of Artificial Sequence: Synthetic oligonucleotide
  Target: LAMA2; (+) strand; PAM type: YTN; PAM sequence: CTC
ctcgctgccagtttcatatt

SEQ ID NO: 382232 - DNA, 20 bp, Artificial Sequence
  Description of Artificial Sequence: Synthetic oligonucleotide
  Target: LAMA2; (+) strand; PAM type: YTN; PAM sequence: CTC
gctgccagtttcatattatc

SEQ ID NO: 382233 - DNA, 20 bp, Artificial Sequence
  Description of Artificial Sequence: Synthetic oligonucleotide
  Target: LAMA2; (+) strand; PAM type: YTN; PAM sequence: CTG
ccagtttcatattatccatc

SEQ ID NO: 382234 - DNA, 20 bp, Artificial Sequence
  Description of Artificial Sequence: Synthetic oligonucleotide
  Target: LAMA2; (+) strand; PAM type: YTN; PAM sequence: TTT
catattatccatcctcctct

SEQ ID NO: 382235 - DNA, 20 bp, Artificial Sequence
  Description of Artificial Sequence: Synthetic oligonucleotide
  Target: LAMA2; (+) strand; PAM type: YTN; PAM sequence: TTC
atattatccatcctcctcta

SEQ ID NO: 382236 - DNA, 20 bp, Artificial Sequence
  Description of Artificial Sequence: Synthetic oligonucleotide
  Target: LAMA2; (+) strand; PAM type: YTN; PAM sequence: TTA
tccatcctcctctacatcag

SEQ ID NO: 382237 - DNA, 20 bp, Artificial Sequence
  Description of Artificial Sequence: Synthetic oligonucleotide
  Target: LAMA2; (+) strand; PAM type: YTN; PAM sequence: CTC
ctctacatcagggtccacaa

SEQ ID NO: 382238 - DNA, 20 bp, Artificial Sequence
  Description of Artificial Sequence: Synthetic oligonucleotide
  Target: LAMA2; (+) strand; PAM type: YTN; PAM sequence: CTC
tacatcagggtccacaaccc

SEQ ID NO: 382239 - DNA, 20 bp, Artificial Sequence
  Description of Artificial Sequence: Synthetic oligonucleotide
  Target: LAMA2; (+) strand; PAM type: YTN; PAM sequence: CTA
catcagggtccacaacccct

SEQ ID NO: 382240 - DNA, 20 bp, Artificial Sequence
  Description of Artificial Sequence: Synthetic oligonucleotide
  Target: LAMA2; (+) strand; PAM type: YTN; PAM sequence: CTG
ggccacaggaggatattggt

SEQ ID NO: 382241 - DNA, 20 bp, Artificial Sequence
  Description of Artificial Sequence: Synthetic oligonucleotide
  Target: LAMA2; (+) strand; PAM type: YTN; PAM sequence: TTG
gtccgtggccttttagaaac

SEQ ID NO: 382242 - DNA, 20 bp, Artificial Sequence
  Description of Artificial Sequence: Synthetic oligonucleotide
  Target: LAMA2; (+) strand; PAM type: YTN; PAM sequence: CTT
ttagaaaccagaccacacag

SEQ ID NO: 382243 - DNA, 20 bp, Artificial Sequence
  Description of Artificial Sequence: Synthetic oligonucleotide
  Target: LAMA2; (+) strand; PAM type: YTN; PAM sequence: TTT
tagaaaccagaccacacagc

SEQ ID NO: 382244 - DNA, 20 bp, Artificial Sequence
  Description of Artificial Sequence: Synthetic oligonucleotide
  Target: LAMA2; (+) strand; PAM type: YTN; PAM sequence: TTT
agaaaccagaccacacagca

SEQ ID NO: 382245 - DNA, 20 bp, Artificial Sequence
  Description of Artificial Sequence: Synthetic oligonucleotide
  Target: LAMA2; (+) strand; PAM type: YTN; PAM sequence: TTA
gaaaccagaccacacagcag

SEQ ID NO: 382246 - DNA, 20 bp, Artificial Sequence
  Description of Artificial Sequence: Synthetic oligonucleotide
  Target: LAMA2; (+) strand; PAM type: YTN; PAM sequence: CTT
cattagcatttacagctgct

SEQ ID NO: 382247 - DNA, 20 bp, Artificial Sequence
  Description of Artificial Sequence: Synthetic oligonucleotide
  Target: LAMA2; (+) strand; PAM type: YTN; PAM sequence: TTC
attagcatttacagctgctc

SEQ ID NO: 382248 - DNA, 20 bp, Artificial Sequence
  Description of Artificial Sequence: Synthetic oligonucleotide
  Target: LAMA2; (+) strand; PAM type: YTN; PAM sequence: TTA
gcatttacagctgctcctca

SEQ ID NO: 382249 - DNA, 20 bp, Artificial Sequence
  Description of Artificial Sequence: Synthetic oligonucleotide
  Target: LAMA2; (+) strand; PAM type: YTN; PAM sequence: TTT
acagctgctcctcattcctg

SEQ ID NO: 382250 - DNA, 20 bp, Artificial Sequence
  Description of Artificial Sequence: Synthetic oligonucleotide
  Target: LAMA2; (+) strand; PAM type: YTN; PAM sequence: TTA
cagctgctcctcattcctgg

SEQ ID NO: 382251 - DNA, 20 bp, Artificial Sequence
  Description of Artificial Sequence: Synthetic oligonucleotide
  Target: LAMA2; (+) strand; PAM type: YTN; PAM sequence: CTG
ctcctcattcctggtattac

SEQ ID NO: 382252 - DNA, 20 bp, Artificial Sequence
  Description of Artificial Sequence: Synthetic oligonucleotide
  Target: LAMA2; (+) strand; PAM type: YTN; PAM sequence: CTC
ctcattcctggtattactgt

SEQ ID NO: 382253 - DNA, 20 bp, Artificial Sequence
  Description of Artificial Sequence: Synthetic oligonucleotide
  Target: LAMA2; (+) strand; PAM type: YTN; PAM sequence: CTC
attcctggtattactgtact

SEQ ID NO: 382254 - DNA, 20 bp, Artificial Sequence
  Description of Artificial Sequence: Synthetic oligonucleotide
  Target: LAMA2; (+) strand; PAM type: YTN; PAM sequence: TTC
ctggtattactgtactgcct

SEQ ID NO: 382255 - DNA, 20 bp, Artificial Sequence
  Description of Artificial Sequence: Synthetic oligonucleotide
  Target: LAMA2; (+) strand; PAM type: YTN; PAM sequence: CTG
gtattactgtactgcctgag

SEQ ID NO: 382256 - DNA, 20 bp, Artificial Sequence
  Description of Artificial Sequence: Synthetic oligonucleotide
  Target: LAMA2; (+) strand; PAM type: YTN; PAM sequence: TTA
ctgtactgcctgagctccac

SEQ ID NO: 382257 - DNA, 20 bp, Artificial Sequence
  Description of Artificial Sequence: Synthetic oligonucleotide
  Target: LAMA2; (+) strand; PAM type: YTN; PAM sequence: CTG
tactgcctgagctccacctc

SEQ ID NO: 382258 - DNA, 20 bp, Artificial Sequence
  Description of Artificial Sequence: Synthetic oligonucleotide
  Target: LAMA2; (+) strand; PAM type: YTN; PAM sequence: CTG
cctgagctccacctcctgtc

SEQ ID NO: 382259 - DNA, 20 bp, Artificial Sequence
  Description of Artificial Sequence: Synthetic oligonucleotide
  Target: LAMA2; (+) strand; PAM type: YTN; PAM sequence: CTG
agctccacctcctgtcagat

SEQ ID NO: 382260 - DNA, 20 bp, Artificial Sequence
  Description of Artificial Sequence: Synthetic oligonucleotide
  Target: LAMA2; (+) strand; PAM type: YTN; PAM sequence: CTC
cacctcctgtcagatcagag

SEQ ID NO: 382261 - DNA, 20 bp, Artificial Sequence
  Description of Artificial Sequence: Synthetic oligonucleotide
  Target: LAMA2; (+) strand; PAM type: YTN; PAM sequence: CTC
ctgtcagatcagagacagca

SEQ ID NO: 382262 - DNA, 20 bp, Artificial Sequence
  Description of Artificial Sequence: Synthetic oligonucleotide
  Target: LAMA2; (+) strand; PAM type: YTN; PAM sequence: CTG
tcagatcagagacagcatta

SEQ ID NO: 382263 - DNA, 20 bp, Artificial Sequence
  Description of Artificial Sequence: Synthetic oligonucleotide
  Target: LAMA2; (+) strand; PAM type: YTN; PAM sequence: TTA
gattctcataggagcacaaa

SEQ ID NO: 382264 - DNA, 20 bp, Artificial Sequence
  Description of Artificial Sequence: Synthetic oligonucleotide
  Target: LAMA2; (+) strand; PAM type: YTN; PAM sequence: TTC
tcataggagcacaaacccta

SEQ ID NO: 382265 - DNA, 20 bp, Artificial Sequence
  Description of Artificial Sequence: Synthetic oligonucleotide
  Target: LAMA2; (+) strand; PAM type: YTN; PAM sequence: CTC
ataggagcacaaaccctatt

SEQ ID NO: 382266 - DNA, 20 bp, Artificial Sequence
  Description of Artificial Sequence: Synthetic oligonucleotide
  Target: LAMA2; (+) strand; PAM type: YTN; PAM sequence: CTA
ttgtgaactgcacatgtgag

SEQ ID NO: 382267 - DNA, 20 bp, Artificial Sequence
  Description of Artificial Sequence: Synthetic oligonucleotide
  Target: LAMA2; (+) strand; PAM type: YTN; PAM sequence: TTG
tgaactgcacatgtgaggga

SEQ ID NO: 382268 - DNA, 20 bp, Artificial Sequence
  Description of Artificial Sequence: Synthetic oligonucleotide
  Target: LAMA2; (+) strand; PAM type: YTN; PAM sequence: CTG
cacatgtgagggatctaggt

SEQ ID NO: 382269 - DNA, 20 bp, Artificial Sequence
  Description of Artificial Sequence: Synthetic oligonucleotide
  Target: LAMA2; (+) strand; PAM type: YTN; PAM sequence: CTA
ggttgtgcgctcctgagaat

SEQ ID NO: 382270 - DNA, 20 bp, Artificial Sequence
  Description of Artificial Sequence: Synthetic oligonucleotide
  Target: LAMA2; (+) strand; PAM type: YTN; PAM sequence: TTG
tgcgctcctgagaatctaat

SEQ ID NO: 382271 - DNA, 20 bp, Artificial Sequence
  Description of Artificial Sequence: Synthetic oligonucleotide
  Target: LAMA2; (+) strand; PAM type: YTN; PAM sequence: CTC
ctgagaatctaatgcctgat

SEQ ID NO: 382272 - DNA, 20 bp, Artificial Sequence
  Description of Artificial Sequence: Synthetic oligonucleotide
  Target: LAMA2; (+) strand; PAM type: YTN; PAM sequence: CTG
agaatctaatgcctgatgat

SEQ ID NO: 382273 - DNA, 20 bp, Artificial Sequence
  Description of Artificial Sequence: Synthetic oligonucleotide
  Target: LAMA2; (+) strand; PAM type: YTN; PAM sequence: CTA
atgcctgatgatcaatgatc

SEQ ID NO: 382274 - DNA, 20 bp, Artificial Sequence
  Description of Artificial Sequence: Synthetic oligonucleotide
  Target: LAMA2; (+) strand; PAM type: YTN; PAM sequence: CTG
atgatcaatgatctgtcact

SEQ ID NO: 382275 - DNA, 20 bp, Artificial Sequence
  Description of Artificial Sequence: Synthetic oligonucleotide
  Target: LAMA2; (+) strand; PAM type: YTN; PAM sequence: CTG
tcactgtctcccatcacccc

SEQ ID NO: 382276 - DNA, 20 bp, Artificial Sequence
  Description of Artificial Sequence: Synthetic oligonucleotide
  Target: LAMA2; (+) strand; PAM type: YTN; PAM sequence: CTG
tctcccatcaccccaagatg

SEQ ID NO: 382277 - DNA, 20 bp, Artificial Sequence
  Description of Artificial Sequence: Synthetic oligonucleotide
  Target: LAMA2; (+) strand; PAM type: YTN; PAM sequence: CTC
ccatcaccccaagatgggac

SEQ ID NO: 382278 - DNA, 20 bp, Artificial Sequence
  Description of Artificial Sequence: Synthetic oligonucleotide
  Target: LAMA2; (+) strand; PAM type: YTN; PAM sequence: CTA
tctagttgcaggaaaacaag

SEQ ID NO: 382279 - DNA, 20 bp, Artificial Sequence
  Description of Artificial Sequence: Synthetic oligonucleotide
  Target: LAMA2; (+) strand; PAM type: YTN; PAM sequence: CTA
gttgcaggaaaacaagctta

SEQ ID NO: 382280 - DNA, 20 bp, Artificial Sequence
  Description of Artificial Sequence: Synthetic oligonucleotide
  Target: LAMA2; (+) strand; PAM type: YTN; PAM sequence: TTG
caggaaaacaagcttagggc

SEQ ID NO: 382281 - DNA, 20 bp, Artificial Sequence
  Description of Artificial Sequence: Synthetic oligonucleotide
  Target: LAMA2; (+) strand; PAM type: YTN; PAM sequence: CTT
agggcttccactgattctat

SEQ ID NO: 382282 - DNA, 20 bp, Artificial Sequence
  Description of Artificial Sequence: Synthetic oligonucleotide
  Target: LAMA2; (+) strand; PAM type: YTN; PAM sequence: TTA
gggcttccactgattctatg

SEQ ID NO: 382283 - DNA, 20 bp, Artificial Sequence
  Description of Artificial Sequence: Synthetic oligonucleotide
  Target: LAMA2; (+) strand; PAM type: YTN; PAM sequence: CTT
ccactgattctatgttatgg

SEQ ID NO: 382284 - DNA, 20 bp, Artificial Sequence
  Description of Artificial Sequence: Synthetic oligonucleotide
  Target: LAMA2; (+) strand; PAM type: YTN; PAM sequence: TTC
cactgattctatgttatggt

SEQ ID NO: 382285 - DNA, 20 bp, Artificial Sequence
  Description of Artificial Sequence: Synthetic oligonucleotide
  Target: LAMA2; (+) strand; PAM type: YTN; PAM sequence: CTG
attctatgttatggtgagtt

SEQ ID NO: 382286 - DNA, 20 bp, Artificial Sequence
  Description of Artificial Sequence: Synthetic oligonucleotide
  Target: LAMA2; (+) strand; PAM type: YTN; PAM sequence: TTC
tatgttatggtgagttgtat

SEQ ID NO: 382287 - DNA, 20 bp, Artificial Sequence
  Description of Artificial Sequence: Synthetic oligonucleotide
  Target: LAMA2; (+) strand; PAM type: YTN; PAM sequence: CTA
tgttatggtgagttgtataa

SEQ ID NO: 382288 - DNA, 20 bp, Artificial Sequence
  Description of Artificial Sequence: Synthetic oligonucleotide
  Target: LAMA2; (+) strand; PAM type: YTN; PAM sequence: TTA
tggtgagttgtataattatt

SEQ ID NO: 382289 - DNA, 20 bp, Artificial Sequence
  Description of Artificial Sequence: Synthetic oligonucleotide
  Target: LAMA2; (+) strand; PAM type: YTN; PAM sequence: TTG
tataattatttcattatata

SEQ ID NO: 382290 - DNA, 20 bp, Artificial Sequence
  Description of Artificial Sequence: Synthetic oligonucleotide
  Target: LAMA2; (+) strand; PAM type: YTN; PAM sequence: TTA
tttcattatatattacaatg

SEQ ID NO: 382291 - DNA, 20 bp, Artificial Sequence
  Description of Artificial Sequence: Synthetic oligonucleotide
  Target: LAMA2; (+) strand; PAM type: YTN; PAM sequence: TTT
cattatatattacaatgtaa

SEQ ID NO: 382292 - DNA, 20 bp, Artificial Sequence
  Description of Artificial Sequence: Synthetic oligonucleotide
  Target: LAMA2; (+) strand; PAM type: YTN; PAM sequence: TTC
attatatattacaatgtaat

SEQ ID NO: 382293 - DNA, 20 bp, Artificial Sequence
  Description of Artificial Sequence: Synthetic oligonucleotide
  Target: LAMA2; (+) strand; PAM type: YTN; PAM sequence: TTA
tatattacaatgtaataata

SEQ ID NO: 382294 - DNA, 20 bp, Artificial Sequence
  Description of Artificial Sequence: Synthetic oligonucleotide
  Target: LAMA2; (+) strand; PAM type: YTN; PAM sequence: TTA
caatgtaataataatagata

SEQ ID NO: 382295 - DNA, 20 bp, Artificial Sequence
  Description of Artificial Sequence: Synthetic oligonucleotide
  Target: LAMA2; (+) strand; PAM type: YTN; PAM sequence: CTT
gcatcatcacaaaaccatcc

SEQ ID NO: 382296 - DNA, 20 bp, Artificial Sequence
  Description of Artificial Sequence: Synthetic oligonucleotide
  Target: LAMA2; (+) strand; PAM type: YTN; PAM sequence: TTG
catcatcacaaaaccatccc

SEQ ID NO: 382297 - DNA, 20 bp, Artificial Sequence
  Description of Artificial Sequence: Synthetic oligonucleotide
  Target: LAMA2; (+) strand; PAM type: YTN; PAM sequence: CTA
gtccatggaaaaattgcctt

SEQ ID NO: 382298 - DNA, 20 bp, Artificial Sequence
  Description of Artificial Sequence: Synthetic oligonucleotide
  Target: LAMA2; (+) strand; PAM type: YTN; PAM sequence: TTG
ccttccatgaaaccagtccc

SEQ ID NO: 382299 - DNA, 20 bp, Artificial Sequence
  Description of Artificial Sequence: Synthetic oligonucleotide
  Target: LAMA2; (+) strand; PAM type: YTN; PAM sequence: CTT
ccatgaaaccagtccctggt

SEQ ID NO: 382300 - DNA, 20 bp, Artificial Sequence
  Description of Artificial Sequence: Synthetic oligonucleotide
  Target: LAMA2; (+) strand; PAM type: YTN; PAM sequence: TTC
catgaaaccagtccctggtg

SEQ ID NO: 382301 - DNA, 20 bp, Artificial Sequence
  Description of Artificial Sequence: Synthetic oligonucleotide
  Target: LAMA2; (+) strand; PAM type: YTN; PAM sequence: CTG
gtgccaaaaacattggagac

SEQ ID NO: 382302 - DNA, 20 bp, Artificial Sequence
  Description of Artificial Sequence: Synthetic oligonucleotide
  Target: LAMA2; (+) strand; PAM type: YTN; PAM sequence: TTG
gagacgctgctctacagcac

SEQ ID NO: 382303 - DNA, 20 bp, Artificial Sequence
  Description of Artificial Sequence: Synthetic oligonucleotide
  Target: LAMA2; (+) strand; PAM type: YTN; PAM sequence: CTG
ctctacagcacccagctttg

SEQ ID NO: 382304 - DNA, 20 bp, Artificial Sequence
  Description of Artificial Sequence: Synthetic oligonucleotide
  Target: LAMA2; (+) strand; PAM type: YTN; PAM sequence: CTC
tacagcacccagctttgact

SEQ ID NO: 382305 - DNA, 20 bp, Artificial Sequence
  Description of Artificial Sequence: Synthetic oligonucleotide
  Target: LAMA2; (+) strand; PAM type: YTN; PAM sequence: CTA
cagcacccagctttgactct

SEQ ID NO: 382306 - DNA, 20 bp, Artificial Sequence
  Description of Artificial Sequence: Synthetic oligonucleotide
  Target: LAMA2; (+) strand; PAM type: YTN; PAM sequence: CTT
tgactctcatgcttccctct

SEQ ID NO: 382307 - DNA, 20 bp, Artificial Sequence
  Description of Artificial Sequence: Synthetic oligonucleotide
  Target: LAMA2; (+) strand; PAM type: YTN; PAM sequence: TTT
gactctcatgcttccctcta

SEQ ID NO: 382308 - DNA, 20 bp, Artificial Sequence
  Description of Artificial Sequence: Synthetic oligonucleotide
  Target: LAMA2; (+) strand; PAM type: YTN; PAM sequence: TTG
actctcatgcttccctctat

SEQ ID NO: 382309 - DNA, 20 bp, Artificial Sequence
  Description of Artificial Sequence: Synthetic oligonucleotide
  Target: LAMA2; (+) strand; PAM type: YTN; PAM sequence: CTC
tcatgcttccctctatgtgc

SEQ ID NO: 382310 - DNA, 20 bp, Artificial Sequence
  Description of Artificial Sequence: Synthetic oligonucleotide
  Target: LAMA2; (+) strand; PAM type: YTN; PAM sequence: CTC
atgcttccctctatgtgccc

SEQ ID NO: 382311 - DNA, 20 bp, Artificial Sequence
  Description of Artificial Sequence: Synthetic oligonucleotide
  Target: LAMA2; (+) strand; PAM type: YTN; PAM sequence: CTT
ccctctatgtgccccctctc

SEQ ID NO: 382312 - DNA, 20 bp, Artificial Sequence
  Description of Artificial Sequence: Synthetic oligonucleotide
  Target: LAMA2; (+) strand; PAM type: YTN; PAM sequence: TTC
cctctatgtgccccctctcc

SEQ ID NO: 382313 - DNA, 20 bp, Artificial Sequence
  Description of Artificial Sequence: Synthetic oligonucleotide
  Target: LAMA2; (+) strand; PAM type: YTN; PAM sequence: CTC
tatgtgccccctctccatct

SEQ ID NO: 382314 - DNA, 20 bp, Artificial Sequence
  Description of Artificial Sequence: Synthetic oligonucleotide
  Target: LAMA2; (+) strand; PAM type: YTN; PAM sequence: CTA
tgtgccccctctccatctgc

SEQ ID NO: 382315 - DNA, 20 bp, Artificial Sequence
  Description of Artificial Sequence: Synthetic oligonucleotide
  Target: LAMA2; (+) strand; PAM type: YTN; PAM sequence: CTC
tccatctgcttgtcgaagtc

SEQ ID NO: 382316 - DNA, 20 bp, Artificial Sequence
  Description of Artificial Sequence: Synthetic oligonucleotide
  Target: LAMA2; (+) strand; PAM type: YTN; PAM sequence: CTC
catctgcttgtcgaagtcac

SEQ ID NO: 382317 - DNA, 20 bp, Artificial Sequence
  Description of Artificial Sequence: Synthetic oligonucleotide
  Target: LAMA2; (+) strand; PAM type: YTN; PAM sequence: CTG
cttgtcgaagtcacctacta

SEQ ID NO: 382318 - DNA, 20 bp, Artificial Sequence
  Description of Artificial Sequence: Synthetic oligonucleotide
  Target: LAMA2; (+) strand; PAM type: YTN; PAM sequence: CTT
gtcgaagtcacctactaacc

SEQ ID NO: 382319 - DNA, 20 bp, Artificial Sequence
  Description of Artificial Sequence: Synthetic oligonucleotide
  Target: LAMA2; (+) strand; PAM type: YTN; PAM sequence: TTG
tcgaagtcacctactaacct

SEQ ID NO: 382320 - DNA, 20 bp, Artificial Sequence
  Description of Artificial Sequence: Synthetic oligonucleotide
  Target: LAMA2; (+) strand; PAM type: YTN; PAM sequence: CTA
ctaacctttaaataccccac

SEQ ID NO: 382321 - DNA, 20 bp, Artificial Sequence
  Description of Artificial Sequence: Synthetic oligonucleotide
  Target: LAMA2; (+) strand; PAM type: YTN; PAM sequence: CTA
acctttaaataccccacatc

SEQ ID NO: 382322 - DNA, 20 bp, Artificial Sequence
  Description of Artificial Sequence: Synthetic oligonucleotide
  Target: LAMA2; (+) strand; PAM type: YTN; PAM sequence: CTT
taaataccccacatcattcc

SEQ ID NO: 382323 - DNA, 20 bp, Artificial Sequence
  Description of Artificial Sequence: Synthetic oligonucleotide
  Target: LAMA2; (+) strand; PAM type: YTN; PAM sequence: TTT
aaataccccacatcattcct

SEQ ID NO: 382324 - DNA, 20 bp, Artificial Sequence
  Description of Artificial Sequence: Synthetic oligonucleotide
  Target: LAMA2; (+) strand; PAM type: YTN; PAM sequence: TTA
aataccccacatcattcctt

SEQ ID NO: 382325 - DNA, 20 bp, Artificial Sequence
  Description of Artificial Sequence: Synthetic oligonucleotide
  Target: LAMA2; (+) strand; PAM type: YTN; PAM sequence: TTC
cttgctgattttccctgtct

SEQ ID NO: 382326 - DNA, 20 bp, Artificial Sequence
  Description of Artificial Sequence: Synthetic oligonucleotide
  Target: LAMA2; (+) strand; PAM type: YTN; PAM sequence: CTT
gctgattttccctgtctaat

SEQ ID NO: 382327 - DNA, 20 bp, Artificial Sequence
  Description of Artificial Sequence: Synthetic oligonucleotide
  Target: LAMA2; (+) strand; PAM type: YTN; PAM sequence: TTG
ctgattttccctgtctaatt

SEQ ID NO: 382328 - DNA, 20 bp, Artificial Sequence
  Description of Artificial Sequence: Synthetic oligonucleotide
  Target: LAMA2; (+) strand; PAM type: YTN; PAM sequence: CTG
attttccctgtctaattgtc

SEQ ID NO: 382329 - DNA, 20 bp, Artificial Sequence
  Description of Artificial Sequence: Synthetic oligonucleotide
  Target: LAMA2; (+) strand; PAM type: YTN; PAM sequence: TTT
tccctgtctaattgtcattt

SEQ ID NO: 382330 - DNA, 20 bp, Artificial Sequence
  Description of Artificial Sequence: Synthetic oligonucleotide
  Target: LAMA2; (+) strand; PAM type: YTN; PAM sequence: TTT
ccctgtctaattgtcatttt

SEQ ID NO: 382331 - DNA, 20 bp, Artificial Sequence
  Description of Artificial Sequence: Synthetic oligonucleotide
  Target: LAMA2; (+) strand; PAM type: YTN; PAM sequence: TTC
cctgtctaattgtcattttc

SEQ ID NO: 382332 - DNA, 20 bp, Artificial Sequence
  Description of Artificial Sequence: Synthetic oligonucleotide
  Target: LAMA2; (+) strand; PAM type: YTN; PAM sequence: CTG
tctaattgtcattttcccta

SEQ ID NO: 382333 - DNA, 20 bp, Artificial Sequence
  Description of Artificial Sequence: Synthetic oligonucleotide
  Target: LAMA2; (+) strand; PAM type: YTN; PAM sequence: CTA
attgtcattttccctagcac

SEQ ID NO: 382334 - DNA, 20 bp, Artificial Sequence
  Description of Artificial Sequence: Synthetic oligonucleotide
  Target: LAMA2; (+) strand; PAM type: YTN; PAM sequence: TTG
tcattttccctagcactact

SEQ ID NO: 382335 - DNA, 20 bp, Artificial Sequence
  Description of Artificial Sequence: Synthetic oligonucleotide
  Target: LAMA2; (+) strand; PAM type: YTN; PAM sequence: TTT
tccctagcactactcctgtc

SEQ ID NO: 382336 - DNA, 20 bp, Artificial Sequence
  Description of Artificial Sequence: Synthetic oligonucleotide
  Target: LAMA2; (+) strand; PAM type: YTN; PAM sequence: TTT
ccctagcactactcctgtca

SEQ ID NO: 382337 - DNA, 20 bp, Artificial Sequence
  Description of Artificial Sequence: Synthetic oligonucleotide
  Target: LAMA2; (+) strand; PAM type: YTN; PAM sequence: TTC
cctagcactactcctgtcat

SEQ ID NO: 382338 - DNA, 20 bp, Artificial Sequence
  Description of Artificial Sequence: Synthetic oligonucleotide
  Target: LAMA2; (+) strand; PAM type: YTN; PAM sequence: CTA
gcactactcctgtcatcatt

SEQ ID NO: 382339 - DNA, 20 bp, Artificial Sequence
  Description of Artificial Sequence: Synthetic oligonucleotide
  Target: LAMA2; (+) strand; PAM type: YTN; PAM sequence: CTA
ctcctgtcatcattcttagt

SEQ ID NO: 382340 - DNA, 20 bp, Artificial Sequence
  Description of Artificial Sequence: Synthetic oligonucleotide
  Target: LAMA2; (+) strand; PAM type: YTN; PAM sequence: CTC
ctgtcatcattcttagtgat

SEQ ID NO: 382341 - DNA, 20 bp, Artificial Sequence
  Description of Artificial Sequence: Synthetic oligonucleotide
  Target: LAMA2; (+) strand; PAM type: YTN; PAM sequence: CTG
tcatcattcttagtgatttt

SEQ ID NO: 382342 - DNA, 20 bp, Artificial Sequence
  Description of Artificial Sequence: Synthetic oligonucleotide
  Target: LAMA2; (+) strand; PAM type: YTN; PAM sequence: TTC
ttagtgattttaatgtccat

SEQ ID NO: 382343 - DNA, 20 bp, Artificial Sequence
  Description of Artificial Sequence: Synthetic oligonucleotide
  Target: LAMA2; (+) strand; PAM type: YTN; PAM sequence: CTT
agtgattttaatgtccatga

SEQ ID NO: 382344 - DNA, 20 bp, Artificial Sequence
  Description of Artificial Sequence: Synthetic oligonucleotide
  Target: LAMA2; (+) strand; PAM type: YTN; PAM sequence: TTA
gtgattttaatgtccatgaa

SEQ ID NO: 382345 - DNA, 20 bp, Artificial Sequence
  Description of Artificial Sequence: Synthetic oligonucleotide
  Target: LAMA2; (+) strand; PAM type: YTN; PAM sequence: TTT
taatgtccatgaacttaact

SEQ ID NO: 382346 - DNA, 20 bp, Artificial Sequence
  Description of Artificial Sequence: Synthetic oligonucleotide
  Target: LAMA2; (+) strand; PAM type: YTN; PAM sequence: TTT
aatgtccatgaacttaactc

SEQ ID NO: 382347 - DNA, 20 bp, Artificial Sequence
  Description of Artificial Sequence: Synthetic oligonucleotide
  Target: LAMA2; (+) strand; PAM type: YTN; PAM sequence: TTA
atgtccatgaacttaactct

SEQ ID NO: 382348 - DNA, 20 bp, Artificial Sequence
  Description of Artificial Sequence: Synthetic oligonucleotide
  Target: LAMA2; (+) strand; PAM type: YTN; PAM sequence: CTT
aactcttccatactcttcac

SEQ ID NO: 382349 - DNA, 20 bp, Artificial Sequence
  Description of Artificial Sequence: Synthetic oligonucleotide
  Target: LAMA2; (+) strand; PAM type: YTN; PAM sequence: TTA
actcttccatactcttcact

SEQ ID NO: 382350 - DNA, 20 bp, Artificial Sequence
  Description of Artificial Sequence: Synthetic oligonucleotide
  Target: LAMA2; (+) strand; PAM type: YTN; PAM sequence: CTC
ttccatactcttcactttca

SEQ ID NO: 382351 - DNA, 20 bp, Artificial Sequence
  Description of Artificial Sequence: Synthetic oligonucleotide
  Target: LAMA2; (+) strand; PAM type: YTN; PAM sequence: CTT
ccatactcttcactttcagt

SEQ ID NO: 382352 - DNA, 20 bp, Artificial Sequence
  Description of Artificial Sequence: Synthetic oligonucleotide
  Target: LAMA2; (+) strand; PAM type: YTN; PAM sequence: TTC
catactcttcactttcagtt

SEQ ID NO: 382353 - DNA, 20 bp, Artificial Sequence
  Description of Artificial Sequence: Synthetic oligonucleotide
  Target: LAMA2; (+) strand; PAM type: YTN; PAM sequence: CTC
ttcactttcagtttcttgtg

SEQ ID NO: 382354 - DNA, 20 bp, Artificial Sequence
  Description of Artificial Sequence: Synthetic oligonucleotide
  Target: LAMA2; (+) strand; PAM type: YTN; PAM sequence: CTT
cactttcagtttcttgtgcc

SEQ ID NO: 382355 - DNA, 20 bp, Artificial Sequence
  Description of Artificial Sequence: Synthetic oligonucleotide
  Target: LAMA2; (+) strand; PAM type: YTN; PAM sequence: TTC
actttcagtttcttgtgcct

SEQ ID NO: 382356 - DNA, 20 bp, Artificial Sequence
  Description of Artificial Sequence: Synthetic oligonucleotide
  Target: LAMA2; (+) strand; PAM type: YTN; PAM sequence: CTT
tcagtttcttgtgcctctct

SEQ ID NO: 382357 - DNA, 20 bp, Artificial Sequence
  Description of Artificial Sequence: Synthetic oligonucleotide
  Target: LAMA2; (+) strand; PAM type: YTN; PAM sequence: TTT
cagtttcttgtgcctctctg

SEQ ID NO: 382358 - DNA, 20 bp, Artificial Sequence
  Description of Artificial Sequence: Synthetic oligonucleotide
  Target: LAMA2; (+) strand; PAM type: YTN; PAM sequence: TTC
agtttcttgtgcctctctgg

SEQ ID NO: 382359 - DNA, 20 bp, Artificial Sequence
  Description of Artificial Sequence: Synthetic oligonucleotide
  Target: LAMA2; (+) strand; PAM type: YTN; PAM sequence: TTT
cttgtgcctctctggtctcc

SEQ ID NO: 382360 - DNA, 20 bp, Artificial Sequence
  Description of Artificial Sequence: Synthetic oligonucleotide
  Target: LAMA2; (+) strand; PAM type: YTN; PAM sequence: TTC
ttgtgcctctctggtctcca

SEQ ID NO: 382361 - DNA, 20 bp, Artificial Sequence
  Description of Artificial Sequence: Synthetic oligonucleotide
  Target: LAMA2; (+) strand; PAM type: YTN; PAM sequence: CTT
gtgcctctctggtctccatt

SEQ ID NO: 382362 - DNA, 20 bp, Artificial Sequence
  Description of Artificial Sequence: Synthetic oligonucleotide
  Target: LAMA2; (+) strand; PAM type: YTN; PAM sequence: TTG
tgcctctctggtctccattt

SEQ ID NO: 382363 - DNA, 20 bp, Artificial Sequence
  Description of Artificial Sequence: Synthetic oligonucleotide
  Target: LAMA2; (+) strand; PAM type: YTN; PAM sequence: CTC
tctggtctccatttgaagcg

SEQ ID NO: 382364 - DNA, 20 bp, Artificial Sequence
  Description of Artificial Sequence: Synthetic oligonucleotide
  Target: LAMA2; (+) strand; PAM type: YTN; PAM sequence: CTC
tggtctccatttgaagcgtt

SEQ ID NO: 382365 - DNA, 20 bp, Artificial Sequence
  Description of Artificial Sequence: Synthetic oligonucleotide
  Target: LAMA2; (+) strand; PAM type: YTN; PAM sequence: CTG
gtctccatttgaagcgtttt

SEQ ID NO: 382366 - DNA, 20 bp, Artificial Sequence
  Description of Artificial Sequence: Synthetic oligonucleotide
  Target: LAMA2; (+) strand; PAM type: YTN; PAM sequence: CTC
catttgaagcgtttttttgt

SEQ ID NO: 382367 - DNA, 20 bp, Artificial Sequence
  Description of Artificial Sequence: Synthetic oligonucleotide
  Target: LAMA2; (+) strand; PAM type: YTN; PAM sequence: TTT
gaagcgtttttttgttgttg

SEQ ID NO: 382368 - DNA, 20 bp, Artificial Sequence
  Description of Artificial Sequence: Synthetic oligonucleotide
  Target: LAMA2; (+) strand; PAM type: YTN; PAM sequence: TTG
aagcgtttttttgttgttgt

SEQ ID NO: 382369 - DNA, 20 bp, Artificial Sequence
  Description of Artificial Sequence: Synthetic oligonucleotide
  Target: LAMA2; (+) strand; PAM type: YTN; PAM sequence: TTT
ttttgttgttgtttggtttt

SEQ ID NO: 382370 - DNA, 20 bp, Artificial Sequence
  Description of Artificial Sequence: Synthetic oligonucleotide
  Target: LAMA2; (+) strand; PAM type: YTN; PAM sequence: TTT
tttgttgttgtttggttttt

SEQ ID NO: 382371 - DNA, 20 bp, Artificial Sequence
  Description of Artificial Sequence: Synthetic oligonucleotide
  Target: LAMA2; (+) strand; PAM type: YTN; PAM sequence: TTT
ttgttgttgtttggtttttg

SEQ ID NO: 382372 - DNA, 20 bp, Artificial Sequence
  Description of Artificial Sequence: Synthetic oligonucleotide
  Target: LAMA2; (+) strand; PAM type: YTN; PAM sequence: TTT
tgttgttgtttggtttttgt

SEQ ID NO: 382373 - DNA, 20 bp, Artificial Sequence
  Description of Artificial Sequence: Synthetic oligonucleotide
  Target: LAMA2; (+) strand; PAM type: YTN; PAM sequence: TTT
gttgttgtttggtttttgtt

SEQ ID NO: 382374 - DNA, 20 bp, Artificial Sequence
  Description of Artificial Sequence: Synthetic oligonucleotide
  Target: LAMA2; (+) strand; PAM type: YTN; PAM sequence: TTG
ttgttgtttggtttttgttt

SEQ ID NO: 382375 - DNA, 20 bp, Artificial Sequence
  Description of Artificial Sequence: Synthetic oligonucleotide
  Target: LAMA2; (+) strand; PAM type: YTN; PAM sequence: TTG
ttgtttggtttttgtttttt

SEQ ID NO: 382376 - DNA, 20 bp, Artificial Sequence
  Description of Artificial Sequence: Synthetic oligonucleotide
  Target: LAMA2; (+) strand; PAM type: YTN; PAM sequence: TTG
tttggtttttgttttttttt

SEQ ID NO: 382377 - DNA, 20 bp, Artificial Sequence
  Description of Artificial Sequence: Synthetic oligonucleotide
  Target: LAMA2; (+) strand; PAM type: YTN; PAM sequence: TTT
ggtttttgtttttttttttt

SEQ ID NO: 382378 - DNA, 20 bp, Artificial Sequence
  Description of Artificial Sequence: Synthetic oligonucleotide
  Target: LAMA2; (+) strand; PAM type: YTN; PAM sequence: TTG
gtttttgttttttttttttt

SEQ ID NO: 382379 - DNA, 20 bp, Artificial Sequence
  Description of Artificial Sequence: Synthetic oligonucleotide
  Target: LAMA2; (+) strand; PAM type: YTN; PAM sequence: TTT
ttgttttttttttttttttt

SEQ ID NO: 382380 - DNA, 20 bp, Artificial Sequence
  Description of Artificial Sequence: Synthetic oligonucleotide
  Target: LAMA2; (+) strand; PAM type: YTN; PAM sequence: TTT
tgtttttttttttttttttc

SEQ ID NO: 382381 - DNA, 20 bp, Artificial Sequence
  Description of Artificial Sequence: Synthetic oligonucleotide
  Target: LAMA2; (+) strand; PAM type: YTN; PAM sequence: TTT
gtttttttttttttttttcc

SEQ ID NO: 382382 - DNA, 20 bp, Artificial Sequence
  Description of Artificial Sequence: Synthetic oligonucleotide
  Target: LAMA2; (+) strand; PAM type: YTN; PAM sequence: TTG
tttttttttttttttttccc

SEQ ID NO: 382383 - DNA, 20 bp, Artificial Sequence
  Description of Artificial Sequence: Synthetic oligonucleotide
  Target: LAMA2; (+) strand; PAM type: YTN; PAM sequence: TTT
ttttttttttttttcccact

SEQ ID NO: 382384 - DNA, 20 bp, Artificial Sequence
  Description of Artificial Sequence: Synthetic oligonucleotide
  Target: LAMA2; (+) strand; PAM type: YTN; PAM sequence: TTT
tttttttttttttcccactg

SEQ ID NO: 382385 - DNA, 20 bp, Artificial Sequence
  Description of Artificial Sequence: Synthetic oligonucleotide
  Target: LAMA2; (+) strand; PAM type: YTN; PAM sequence: TTT
ttttttttttttcccactgt

SEQ ID NO: 382386 - DNA, 20 bp, Artificial Sequence
  Description of Artificial Sequence: Synthetic oligonucleotide
  Target: LAMA2; (+) strand; PAM type: YTN; PAM sequence: TTT
tttttttttttcccactgtg

SEQ ID NO: 382387 - DNA, 20 bp, Artificial Sequence
  Description of Artificial Sequence: Synthetic oligonucleotide
  Target: LAMA2; (+) strand; PAM type: YTN; PAM sequence: TTT
ttttttttttcccactgtgt

SEQ ID NO: 382388 - DNA, 20 bp, Artificial Sequence
  Description of Artificial Sequence: Synthetic oligonucleotide
  Target: LAMA2; (+) strand; PAM type: YTN; PAM sequence: TTT
tttttttttcccactgtgtc

SEQ ID NO: 382389 - DNA, 20 bp, Artificial Sequence
  Description of Artificial Sequence: Synthetic oligonucleotide
  Target: LAMA2; (+) strand; PAM type: YTN; PAM sequence: TTT
ttttttttcccactgtgtcg

SEQ ID NO: 382390 - DNA, 20 bp, Artificial Sequence
  Description of Artificial Sequence: Synthetic oligonucleotide
  Target: LAMA2; (+) strand; PAM type: YTN; PAM sequence: TTT
tttttttcccactgtgtcgt

SEQ ID NO: 382391 - DNA, 20 bp, Artificial Sequence
  Description of Artificial Sequence: Synthetic oligonucleotide
  Target: LAMA2; (+) strand; PAM type: YTN; PAM sequence: TTT
ttttttcccactgtgtcgtt

SEQ ID NO: 382392 - DNA, 20 bp, Artificial Sequence
  Description of Artificial Sequence: Synthetic oligonucleotide
  Target: LAMA2; (+) strand; PAM type: YTN; PAM sequence: TTT
tttttcccactgtgtcgttt

SEQ ID NO: 382393 - DNA, 20 bp, Artificial Sequence
  Description of Artificial Sequence: Synthetic oligonucleotide
  Target: LAMA2; (+) strand; PAM type: YTN; PAM sequence: TTT
ttttcccactgtgtcgtttc

SEQ ID NO: 382394 - DNA, 20 bp, Artificial Sequence
  Description of Artificial Sequence: Synthetic oligonucleotide
  Target: LAMA2; (+) strand; PAM type: YTN; PAM sequence: TTT
tttcccactgtgtcgtttct

SEQ ID NO: 382395 - DNA, 20 bp, Artificial Sequence
  Description of Artificial Sequence: Synthetic oligonucleotide
  Target: LAMA2; (+) strand; PAM type: YTN; PAM sequence: TTT
ttcccactgtgtcgtttctc

SEQ ID NO: 382396 - DNA, 20 bp, Artificial Sequence
  Description of Artificial Sequence: Synthetic oligonucleotide
  Target: LAMA2; (+) strand; PAM type: YTN; PAM sequence: TTT
tcccactgtgtcgtttctct

SEQ ID NO: 382397 - DNA, 20 bp, Artificial Sequence
  Description of Artificial Sequence: Synthetic oligonucleotide
  Target: LAMA2; (+) strand; PAM type: YTN; PAM sequence: TTT
cccactgtgtcgtttctctc

SEQ ID NO: 382398 - DNA, 20 bp, Artificial Sequence
  Description of Artificial Sequence: Synthetic oligonucleotide
  Target: LAMA2; (+) strand; PAM type: YTN; PAM sequence: TTC
ccactgtgtcgtttctctct

SEQ ID NO: 382399 - DNA, 20 bp, Artificial Sequence
  Description of Artificial Sequence: Synthetic oligonucleotide
  Target: LAMA2; (+) strand; PAM type: YTN; PAM sequence: CTG
tgtcgtttctctctagttca

SEQ ID NO: 382400 - DNA, 20 bp, Artificial Sequence
  Description of Artificial Sequence: Synthetic oligonucleotide
  Target: LAMA2; (+) strand; PAM type: YTN; PAM sequence: TTT
ctctctagttcacttcttct

SEQ ID NO: 382401 - DNA, 20 bp, Artificial Sequence
  Description of Artificial Sequence: Synthetic oligonucleotide
  Target: LAMA2; (+) strand; PAM type: YTN; PAM sequence: TTC
tctctagttcacttcttcta

SEQ ID NO: 382402 - DNA, 20 bp, Artificial Sequence
  Description of Artificial Sequence: Synthetic oligonucleotide
  Target: LAMA2; (+) strand; PAM type: YTN; PAM sequence: CTC
tctagttcacttcttctaaa

SEQ ID NO: 382403 - DNA, 20 bp, Artificial Sequence
  Description of Artificial Sequence: Synthetic oligonucleotide
  Target: LAMA2; (+) strand; PAM type: YTN; PAM sequence: CTC
tagttcacttcttctaaata

SEQ ID NO: 382404 - DNA, 20 bp, Artificial Sequence
  Description of Artificial Sequence: Synthetic oligonucleotide
  Target: LAMA2; (+) strand; PAM type: YTN; PAM sequence: CTA
gttcacttcttctaaatact

SEQ ID NO: 382405 - DNA, 20 bp, Artificial Sequence
  Description of Artificial Sequence: Synthetic oligonucleotide
  Target: LAMA2; (+) strand; PAM type: YTN; PAM sequence: TTC
acttcttctaaatacttcca

SEQ ID NO: 382406 - DNA, 20 bp, Artificial Sequence
  Description of Artificial Sequence: Synthetic oligonucleotide
  Target: LAMA2; (+) strand; PAM type: YTN; PAM sequence: CTT
cttctaaatacttccacttc

SEQ ID NO: 382407 - DNA, 20 bp, Artificial Sequence
  Description of Artificial Sequence: Synthetic oligonucleotide
  Target: LAMA2; (+) strand; PAM type: YTN; PAM sequence: TTC
ttctaaatacttccacttca

SEQ ID NO: 382408 - DNA, 20 bp, Artificial Sequence
  Description of Artificial Sequence: Synthetic oligonucleotide
  Target: LAMA2; (+) strand; PAM type: YTN; PAM sequence: CTT
ctaaatacttccacttcaat

SEQ ID NO: 382409 - DNA, 20 bp, Artificial Sequence
  Description of Artificial Sequence: Synthetic oligonucleotide
  Target: LAMA2; (+) strand; PAM type: YTN; PAM sequence: TTC
taaatacttccacttcaatg

SEQ ID NO: 382410 - DNA, 20 bp, Artificial Sequence
  Description of Artificial Sequence: Synthetic oligonucleotide
  Target: LAMA2; (+) strand; PAM type: YTN; PAM sequence: CTA
aatacttccacttcaatgtg

SEQ ID NO: 382411 - DNA, 20 bp, Artificial Sequence
  Description of Artificial Sequence: Synthetic oligonucleotide
  Target: LAMA2; (+) strand; PAM type: YTN; PAM sequence: CTT
ccacttcaatgtgtgtaatc

SEQ ID NO: 382412 - DNA, 20 bp, Artificial Sequence
  Description of Artificial Sequence: Synthetic oligonucleotide
  Target: LAMA2; (+) strand; PAM type: YTN; PAM sequence: TTC
cacttcaatgtgtgtaatct

SEQ ID NO: 382413 - DNA, 20 bp, Artificial Sequence
  Description of Artificial Sequence: Synthetic oligonucleotide
  Target: LAMA2; (+) strand; PAM type: YTN; PAM sequence: CTT
caatgtgtgtaatctcacaa

SEQ ID NO: 382414 - DNA, 20 bp, Artificial Sequence
  Description of Artificial Sequence: Synthetic oligonucleotide
  Target: LAMA2; (+) strand; PAM type: YTN; PAM sequence: TTC
aatgtgtgtaatctcacaat

SEQ ID NO: 382415 - DNA, 20 bp, Artificial Sequence
  Description of Artificial Sequence: Synthetic oligonucleotide
  Target: LAMA2; (+) strand; PAM type: YTN; PAM sequence: CTC
acaattgatgcacacacttt

SEQ ID NO: 382416 - DNA, 20 bp, Artificial Sequence
  Description of Artificial Sequence: Synthetic oligonucleotide
  Target: LAMA2; (+) strand; PAM type: YTN; PAM sequence: TTG
atgcacacacttttttcttg

SEQ ID NO: 382417 - DNA, 20 bp, Artificial Sequence
  Description of Artificial Sequence: Synthetic oligonucleotide
  Target: LAMA2; (+) strand; PAM type: YTN; PAM sequence: CTT
ttttcttgttccttatctca

SEQ ID NO: 382418 - DNA, 20 bp, Artificial Sequence
  Description of Artificial Sequence: Synthetic oligonucleotide
  Target: LAMA2; (+) strand; PAM type: YTN; PAM sequence: TTT
tttcttgttccttatctcat

SEQ ID NO: 382419 - DNA, 20 bp, Artificial Sequence
  Description of Artificial Sequence: Synthetic oligonucleotide
  Target: LAMA2; (+) strand; PAM type: YTN; PAM sequence: TTT
ttcttgttccttatctcatg

SEQ ID NO: 382420 - DNA, 20 bp, Artificial Sequence
  Description of Artificial Sequence: Synthetic oligonucleotide
  Target: LAMA2; (+) strand; PAM type: YTN; PAM sequence: TTT
tcttgttccttatctcatgc

SEQ ID NO: 382421 - DNA, 20 bp, Artificial Sequence
  Description of Artificial Sequence: Synthetic oligonucleotide
  Target: LAMA2; (+) strand; PAM type: YTN; PAM sequence: TTT
cttgttccttatctcatgct

SEQ ID NO: 382422 - DNA, 20 bp, Artificial Sequence
  Description of Artificial Sequence: Synthetic oligonucleotide
  Target: LAMA2; (+) strand; PAM type: YTN; PAM sequence: TTC
ttgttccttatctcatgctt

SEQ ID NO: 382423 - DNA, 20 bp, Artificial Sequence
  Description of Artificial Sequence: Synthetic oligonucleotide
  Target: LAMA2; (+) strand; PAM type: YTN; PAM sequence: CTT
gttccttatctcatgctttc

SEQ ID NO: 382424 - DNA, 20 bp, Artificial Sequence
  Description of Artificial Sequence: Synthetic oligonucleotide
  Target: LAMA2; (+) strand; PAM type: YTN; PAM sequence: TTG
ttccttatctcatgctttca

SEQ ID NO: 382425 - DNA, 20 bp, Artificial Sequence
  Description of Artificial Sequence: Synthetic oligonucleotide
  Target: LAMA2; (+) strand; PAM type: YTN; PAM sequence: TTC
cttatctcatgctttcactg

SEQ ID NO: 382426 - DNA, 20 bp, Artificial Sequence
  Description of Artificial Sequence: Synthetic oligonucleotide
  Target: LAMA2; (+) strand; PAM type: YTN; PAM sequence: CTT
atctcatgctttcactgtag

SEQ ID NO: 382427 - DNA, 20 bp, Artificial Sequence
  Description of Artificial Sequence: Synthetic oligonucleotide
  Target: LAMA2; (+) strand; PAM type: YTN; PAM sequence: TTA
tctcatgctttcactgtagt

SEQ ID NO: 382428 - DNA, 20 bp, Artificial Sequence
  Description of Artificial Sequence: Synthetic oligonucleotide
  Target: LAMA2; (+) strand; PAM type: YTN; PAM sequence: CTC
atgctttcactgtagtaacc

SEQ ID NO: 382429 - DNA, 20 bp, Artificial Sequence
  Description of Artificial Sequence: Synthetic oligonucleotide
  Target: LAMA2; (+) strand; PAM type: YTN; PAM sequence: CTT
tcactgtagtaaccagctta

SEQ ID NO: 382430 - DNA, 20 bp, Artificial Sequence
  Description of Artificial Sequence: Synthetic oligonucleotide
  Target: LAMA2; (+) strand; PAM type: YTN; PAM sequence: TTT
cactgtagtaaccagcttaa

SEQ ID NO: 382431 - DNA, 20 bp, Artificial Sequence
  Description of Artificial Sequence: Synthetic oligonucleotide
  Target: LAMA2; (+) strand; PAM type: YTN; PAM sequence: TTC
actgtagtaaccagcttaat

SEQ ID NO: 382432 - DNA, 20 bp, Artificial Sequence
  Description of Artificial Sequence: Synthetic oligonucleotide
  Target: LAMA2; (+) strand; PAM type: YTN; PAM sequence: CTG
tagtaaccagcttaatagtc

SEQ ID NO: 382433 - DNA, 20 bp, Artificial Sequence
  Description of Artificial Sequence: Synthetic oligonucleotide
  Target: LAMA2; (+) strand; PAM type: YTN; PAM sequence: CTT
aatagtcatgatctttcatt

SEQ ID NO: 382434 - DNA, 20 bp, Artificial Sequence
  Description of Artificial Sequence: Synthetic oligonucleotide
  Target: LAMA2; (+) strand; PAM type: YTN; PAM sequence: TTA
atagtcatgatctttcattg

SEQ ID NO: 382435 - DNA, 20 bp, Artificial Sequence
  Description of Artificial Sequence: Synthetic oligonucleotide
  Target: LAMA2; (+) strand; PAM type: YTN; PAM sequence: CTT
tcattggtattactgctttg

SEQ ID NO: 382436 - DNA, 20 bp, Artificial Sequence
  Description of Artificial Sequence: Synthetic oligonucleotide
  Target: LAMA2; (+) strand; PAM type: YTN; PAM sequence: TTT
cattggtattactgctttgc

SEQ ID NO: 382437 - DNA, 20 bp, Artificial Sequence
  Description of Artificial Sequence: Synthetic oligonucleotide
  Target: LAMA2; (+) strand; PAM type: YTN; PAM sequence: TTC
attggtattactgctttgca

SEQ ID NO: 382438 - DNA, 20 bp, Artificial Sequence
  Description of Artificial Sequence: Synthetic oligonucleotide
  Target: LAMA2; (+) strand; PAM type: YTN; PAM sequence: TTG
gtattactgctttgcaacgc

SEQ ID NO: 382439 - DNA, 20 bp, Artificial Sequence
  Description of Artificial Sequence: Synthetic oligonucleotide
  Target: LAMA2; (+) strand; PAM type: YTN; PAM sequence: TTA
ctgctttgcaacgctcattt

SEQ ID NO: 382440 - DNA, 20 bp, Artificial Sequence
  Description of Artificial Sequence: Synthetic oligonucleotide
  Target: LAMA2; (+) strand; PAM type: YTN; PAM sequence: CTG
ctttgcaacgctcatttccc

SEQ ID NO: 382441 - DNA, 20 bp, Artificial Sequence
  Description of Artificial Sequence: Synthetic oligonucleotide
  Target: LAMA2; (+) strand; PAM type: YTN; PAM sequence: CTT
tgcaacgctcatttccctgg

SEQ ID NO: 382442 - DNA, 20 bp, Artificial Sequence
  Description of Artificial Sequence: Synthetic oligonucleotide
  Target: LAMA2; (+) strand; PAM type: YTN; PAM sequence: TTT
gcaacgctcatttccctggc

SEQ ID NO: 382443 - DNA, 20 bp, Artificial Sequence
  Description of Artificial Sequence: Synthetic oligonucleotide
  Target: LAMA2; (+) strand; PAM type: YTN; PAM sequence: TTG
caacgctcatttccctggct

SEQ ID NO: 382444 - DNA, 20 bp, Artificial Sequence
  Description of Artificial Sequence: Synthetic oligonucleotide
  Target: LAMA2; (+) strand; PAM type: YTN; PAM sequence: CTC
atttccctggctactccttt

SEQ ID NO: 382445 - DNA, 20 bp, Artificial Sequence
  Description of Artificial Sequence: Synthetic oligonucleotide
  Target: LAMA2; (+) strand; PAM type: YTN; PAM sequence: TTT
ccctggctactcctttactt

SEQ ID NO: 382446 - DNA, 20 bp, Artificial Sequence
  Description of Artificial Sequence: Synthetic oligonucleotide
  Target: LAMA2; (+) strand; PAM type: YTN; PAM sequence: TTC
cctggctactcctttactta

SEQ ID NO: 382447 - DNA, 20 bp, Artificial Sequence
  Description of Artificial Sequence: Synthetic oligonucleotide
  Target: LAMA2; (+) strand; PAM type: YTN; PAM sequence: CTG
gctactcctttacttatttt

SEQ ID NO: 382448 - DNA, 20 bp, Artificial Sequence
  Description of Artificial Sequence: Synthetic oligonucleotide
  Target: LAMA2; (+) strand; PAM type: YTN; PAM sequence: CTA
ctcctttacttattttttac

SEQ ID NO: 382449 - DNA, 20 bp, Artificial Sequence
  Description of Artificial Sequence: Synthetic oligonucleotide
  Target: LAMA2; (+) strand; PAM type: YTN; PAM sequence: CTC
ctttacttattttttactca

SEQ ID NO: 382450 - DNA, 20 bp, Artificial Sequence
  Description of Artificial Sequence: Synthetic oligonucleotide
  Target: LAMA2; (+) strand; PAM type: YTN; PAM sequence: CTT
tacttattttttactcaagt

SEQ ID NO: 382451 - DNA, 20 bp, Artificial Sequence
  Description of Artificial Sequence: Synthetic oligonucleotide
  Target: LAMA2; (+) strand; PAM type: YTN; PAM sequence: TTT
acttattttttactcaagtg

SEQ ID NO: 382452 - DNA, 20 bp, Artificial Sequence
  Description of Artificial Sequence: Synthetic oligonucleotide
  Target: LAMA2; (+) strand; PAM type: YTN; PAM sequence: TTA
cttattttttactcaagtga

SEQ ID NO: 382453 - DNA, 20 bp, Artificial Sequence
  Description of Artificial Sequence: Synthetic oligonucleotide
  Target: LAMA2; (+) strand; PAM type: YTN; PAM sequence: CTT
attttttactcaagtgaact

SEQ ID NO: 382454 - DNA, 20 bp, Artificial Sequence
  Description of Artificial Sequence: Synthetic oligonucleotide
  Target: LAMA2; (+) strand; PAM type: YTN; PAM sequence: TTA
ttttttactcaagtgaactc

SEQ ID NO: 382455 - DNA, 20 bp, Artificial Sequence
  Description of Artificial Sequence: Synthetic oligonucleotide
  Target: LAMA2; (+) strand; PAM type: YTN; PAM sequence: TTT
tttactcaagtgaactccaa

SEQ ID NO: 382456 - DNA, 20 bp, Artificial Sequence
  Description of Artificial Sequence: Synthetic oligonucleotide
  Target: LAMA2; (+) strand; PAM type: YTN; PAM sequence: TTT
ttactcaagtgaactccaac

SEQ ID NO: 382457 - DNA, 20 bp, Artificial Sequence
  Description of Artificial Sequence: Synthetic oligonucleotide
  Target: LAMA2; (+) strand; PAM type: YTN; PAM sequence: TTT
tactcaagtgaactccaaca

SEQ ID NO: 382458 - DNA, 20 bp, Artificial Sequence
  Description of Artificial Sequence: Synthetic oligonucleotide
  Target: LAMA2; (+) strand; PAM type: YTN; PAM sequence: TTT
actcaagtgaactccaacac

SEQ ID NO: 382459 - DNA, 20 bp, Artificial Sequence
  Description of Artificial Sequence: Synthetic oligonucleotide
  Target: LAMA2; (+) strand; PAM type: YTN; PAM sequence: TTA
ctcaagtgaactccaacact

SEQ ID NO: 382460 - DNA, 20 bp, Artificial Sequence
  Description of Artificial Sequence: Synthetic oligonucleotide
  Target: LAMA2; (+) strand; PAM type: YTN; PAM sequence: CTC
aagtgaactccaacactgtg

SEQ ID NO: 382461 - DNA, 20 bp, Artificial Sequence
  Description of Artificial Sequence: Synthetic oligonucleotide
  Target: LAMA2; (+) strand; PAM type: YTN; PAM sequence: CTC
caacactgtgagaatcctac

SEQ ID NO: 382462 - DNA, 20 bp, Artificial Sequence
  Description of Artificial Sequence: Synthetic oligonucleotide
  Target: LAMA2; (+) strand; PAM type: YTN; PAM sequence: CTG
tgagaatcctaccatctcct

SEQ ID NO: 382463 - DNA, 20 bp, Artificial Sequence
  Description of Artificial Sequence: Synthetic oligonucleotide
  Target: LAMA2; (+) strand; PAM type: YTN; PAM sequence: CTA
ccatctcctccatacctgca

SEQ ID NO: 382464 - DNA, 20 bp, Artificial Sequence
  Description of Artificial Sequence: Synthetic oligonucleotide
  Target: LAMA2; (+) strand; PAM type: YTN; PAM sequence: CTC
ctccatacctgcaccttctt

SEQ ID NO: 382465 - DNA, 20 bp, Artificial Sequence
  Description of Artificial Sequence: Synthetic oligonucleotide
  Target: LAMA2; (+) strand; PAM type: YTN; PAM sequence: CTC
catacctgcaccttcttttt

SEQ ID NO: 382466 - DNA, 20 bp, Artificial Sequence
  Description of Artificial Sequence: Synthetic oligonucleotide
  Target: LAMA2; (+) strand; PAM type: YTN; PAM sequence: CTG
caccttctttttttttttga

SEQ ID NO: 382467 - DNA, 20 bp, Artificial Sequence
  Description of Artificial Sequence: Synthetic oligonucleotide
  Target: LAMA2; (+) strand; PAM type: YTN; PAM sequence: CTT
ctttttttttttgagacgga

SEQ ID NO: 382468 - DNA, 20 bp, Artificial Sequence
  Description of Artificial Sequence: Synthetic oligonucleotide
  Target: LAMA2; (+) strand; PAM type: YTN; PAM sequence: TTC
tttttttttttgagacggag

SEQ ID NO: 382469 - DNA, 20 bp, Artificial Sequence
  Description of Artificial Sequence: Synthetic oligonucleotide
  Target: LAMA2; (+) strand; PAM type: YTN; PAM sequence: CTT
tttttttttgagacggagtc

SEQ ID NO: 382470 - DNA, 20 bp, Artificial Sequence
  Description of Artificial Sequence: Synthetic oligonucleotide
  Target: LAMA2; (+) strand; PAM type: YTN; PAM sequence: TTT
ttttttttgagacggagtct

SEQ ID NO: 382471 - DNA, 20 bp, Artificial Sequence
  Description of Artificial Sequence: Synthetic oligonucleotide
  Target: LAMA2; (+) strand; PAM type: YTN; PAM sequence: TTT
tttttttgagacggagtctt

SEQ ID NO: 382472 - DNA, 20 bp, Artificial Sequence
  Description of Artificial Sequence: Synthetic oligonucleotide
  Target: LAMA2; (+) strand; PAM type: YTN; PAM sequence: TTT
ttttttgagacggagtcttg

SEQ ID NO: 382473 - DNA, 20 bp, Artificial Sequence
  Description of Artificial Sequence: Synthetic oligonucleotide
  Target: LAMA2; (+) strand; PAM type: YTN; PAM sequence: TTT
tttttgagacggagtcttgc

SEQ ID NO: 382474 - DNA, 20 bp, Artificial Sequence
  Description of Artificial Sequence: Synthetic oligonucleotide
  Target: LAMA2; (+) strand; PAM type: YTN; PAM sequence: TTT
ttttgagacggagtcttgct

SEQ ID NO: 382475 - DNA, 20 bp, Artificial Sequence
  Description of Artificial Sequence: Synthetic oligonucleotide
  Target: LAMA2; (+) strand; PAM type: YTN; PAM sequence: TTT
tttgagacggagtcttgctc

SEQ ID NO: 382476 - DNA, 20 bp, Artificial Sequence
  Description of Artificial Sequence: Synthetic oligonucleotide
  Target: LAMA2; (+) strand; PAM type: YTN; PAM sequence: TTT
ttgagacggagtcttgctct

SEQ ID NO: 382477 - DNA, 20 bp, Artificial Sequence
  Description of Artificial Sequence: Synthetic oligonucleotide
  Target: LAMA2; (+) strand; PAM type: YTN; PAM sequence: TTT
tgagacggagtcttgctctg

SEQ ID NO: 382478 - DNA, 20 bp, Artificial Sequence
  Description of Artificial Sequence: Synthetic oligonucleotide
  Target: LAMA2; (+) strand; PAM type: YTN; PAM sequence: TTT
gagacggagtcttgctctgt

SEQ ID NO: 382479 - DNA, 20 bp, Artificial Sequence
  Description of Artificial Sequence: Synthetic oligonucleotide
  Target: LAMA2; (+) strand; PAM type: YTN; PAM sequence: TTG
agacggagtcttgctctgtc

SEQ ID NO: 382480 - DNA, 20 bp, Artificial Sequence
  Description of Artificial Sequence: Synthetic oligonucleotide
  Target: LAMA2; (+) strand; PAM type: YTN; PAM sequence: CTT
gctctgtcacccaggctgga

SEQ ID NO: 382481 - DNA, 20 bp, Artificial Sequence
  Description of Artificial Sequence: Synthetic oligonucleotide
  Target: LAMA2; (+) strand; PAM type: YTN; PAM sequence: TTG
ctctgtcacccaggctggag

SEQ ID NO: 382482 - DNA, 20 bp, Artificial Sequence
  Description of Artificial Sequence: Synthetic oligonucleotide
  Target: LAMA2; (+) strand; PAM type: YTN; PAM sequence: CTC
tgtcacccaggctggagtgc

SEQ ID NO: 382483 - DNA, 20 bp, Artificial Sequence
  Description of Artificial Sequence: Synthetic oligonucleotide
  Target: LAMA2; (+) strand; PAM type: YTN; PAM sequence: CTG
tcacccaggctggagtgcag

SEQ ID NO: 382484 - DNA, 20 bp, Artificial Sequence
  Description of Artificial Sequence: Synthetic oligonucleotide
  Target: LAMA2; (+) strand; PAM type: YTN; PAM sequence: CTG
gagtgcagtgacgcgatctc

SEQ ID NO: 382485 - DNA, 20 bp, Artificial Sequence
  Description of Artificial Sequence: Synthetic oligonucleotide
  Target: LAMA2; (+) strand; PAM type: YTN; PAM sequence: CTC
agctcactgcaagctccgcc

SEQ ID NO: 382486 - DNA, 20 bp, Artificial Sequence
  Description of Artificial Sequence: Synthetic oligonucleotide
  Target: LAMA2; (+) strand; PAM type: YTN; PAM sequence: CTC
actgcaagctccgcctctca

SEQ ID NO: 382487 - DNA, 20 bp, Artificial Sequence
  Description of Artificial Sequence: Synthetic oligonucleotide
  Target: LAMA2; (+) strand; PAM type: YTN; PAM sequence: CTG
caagctccgcctctcaggtt

SEQ ID NO: 382488 - DNA, 20 bp, Artificial Sequence
  Description of Artificial Sequence: Synthetic oligonucleotide
  Target: LAMA2; (+) strand; PAM type: YTN; PAM sequence: CTC
cgcctctcaggttcaagcca

SEQ ID NO: 382489 - DNA, 20 bp, Artificial Sequence
  Description of Artificial Sequence: Synthetic oligonucleotide
  Target: LAMA2; (+) strand; PAM type: YTN; PAM sequence: CTC
tcaggttcaagccattctcc

SEQ ID NO: 382490 - DNA, 20 bp, Artificial Sequence
  Description of Artificial Sequence: Synthetic oligonucleotide
  Target: LAMA2; (+) strand; PAM type: YTN; PAM sequence: CTC
aggttcaagccattctcctg

SEQ ID NO: 382491 - DNA, 20 bp, Artificial Sequence
  Description of Artificial Sequence: Synthetic oligonucleotide
  Target: LAMA2; (+) strand; PAM type: YTN; PAM sequence: TTC
aagccattctcctgcctcag

SEQ ID NO: 382492 - DNA, 20 bp, Artificial Sequence
  Description of Artificial Sequence: Synthetic oligonucleotide
  Target: LAMA2; (+) strand; PAM type: YTN; PAM sequence: TTC
tcctgcctcagcctcctgag

SEQ ID NO: 382493 - DNA, 20 bp, Artificial Sequence
  Description of Artificial Sequence: Synthetic oligonucleotide
  Target: LAMA2; (+) strand; PAM type: YTN; PAM sequence: CTC
ctgcctcagcctcctgagta

SEQ ID NO: 382494 - DNA, 20 bp, Artificial Sequence
  Description of Artificial Sequence: Synthetic oligonucleotide
  Target: LAMA2; (+) strand; PAM type: YTN; PAM sequence: CTG
cctcagcctcctgagtagct

SEQ ID NO: 382495 - DNA, 20 bp, Artificial Sequence
  Description of Artificial Sequence: Synthetic oligonucleotide
  Target: LAMA2; (+) strand; PAM type: YTN; PAM sequence: CTC
agcctcctgagtagctggaa

SEQ ID NO: 382496 - DNA, 20 bp, Artificial Sequence
  Description of Artificial Sequence: Synthetic oligonucleotide
  Target: LAMA2; (+) strand; PAM type: YTN; PAM sequence: CTC
ctgagtagctggaactacag

SEQ ID NO: 382497 - DNA, 20 bp, Artificial Sequence
  Description of Artificial Sequence: Synthetic oligonucleotide
  Target: LAMA2; (+) strand; PAM type: YTN; PAM sequence: CTG
agtagctggaactacaggtg

SEQ ID NO: 382498 - DNA, 20 bp, Artificial Sequence
  Description of Artificial Sequence: Synthetic oligonucleotide
  Target: LAMA2; (+) strand; PAM type: YTN; PAM sequence: CTG
gaactacaggtgcccaccac

SEQ ID NO: 382499 - DNA, 20 bp, Artificial Sequence
  Description of Artificial Sequence: Synthetic oligonucleotide
  Target: LAMA2; (+) strand; PAM type: YTN; PAM sequence: CTA
caggtgcccaccaccatgcc

SEQ ID NO: 382500 - DNA, 20 bp, Artificial Sequence
  Description of Artificial Sequence: Synthetic oligonucleotide
  Target: LAMA2; (+) strand; PAM type: YTN; PAM sequence: CTT
ctttttttgtatttttaata

SEQ ID NO: 382501 - DNA, 20 bp, Artificial Sequence
  Description of Artificial Sequence: Synthetic oligonucleotide
  Target: LAMA2; (+) strand; PAM type: YTN; PAM sequence: TTC
tttttttgtatttttaatag

SEQ ID NO: 382502 - DNA, 20 bp, Artificial Sequence
  Description of Artificial Sequence: Synthetic oligonucleotide
  Target: LAMA2; (+) strand; PAM type: YTN; PAM sequence: CTT
tttttgtatttttaatagag

SEQ ID NO: 382503 - DNA, 20 bp, Artificial Sequence
  Description of Artificial Sequence: Synthetic oligonucleotide
  Target: LAMA2; (+) strand; PAM type: YTN; PAM sequence: TTT
ttttgtatttttaatagaga

SEQ ID NO: 382504 - DNA, 20 bp, Artificial Sequence
  Description of Artificial Sequence: Synthetic oligonucleotide
  Target: LAMA2; (+) strand; PAM type: YTN; PAM sequence: TTT
tttgtatttttaatagagac

SEQ ID NO: 382505 - DNA, 20 bp, Artificial Sequence
  Description of Artificial Sequence: Synthetic oligonucleotide
  Target: LAMA2; (+) strand; PAM type: YTN; PAM sequence: TTT
ttgtatttttaatagagacg

SEQ ID NO: 382506 - DNA, 20 bp, Artificial Sequence
  Description of Artificial Sequence: Synthetic oligonucleotide
  Target: LAMA2; (+) strand; PAM type: YTN; PAM sequence: TTT
tgtatttttaatagagacgg

SEQ ID NO: 382507 - DNA, 20 bp, Artificial Sequence
  Description of Artificial Sequence: Synthetic oligonucleotide
  Target: LAMA2; (+) strand; PAM type: YTN; PAM sequence: TTT
gtatttttaatagagacggg

SEQ ID NO: 382508 - DNA, 20 bp, Artificial Sequence
  Description of Artificial Sequence: Synthetic oligonucleotide
  Target: LAMA2; (+) strand; PAM type: YTN; PAM sequence: TTG
tatttttaatagagacgggg

SEQ ID NO: 382509 - DNA, 20 bp, Artificial Sequence
  Description of Artificial Sequence: Synthetic oligonucleotide
  Target: LAMA2; (+) strand; PAM type: YTN; PAM sequence: TTT
ttaatagagacggggtttca

SEQ ID NO: 382510 - DNA, 20 bp, Artificial Sequence
  Description of Artificial Sequence: Synthetic oligonucleotide
  Target: LAMA2; (+) strand; PAM type: YTN; PAM sequence: TTT
taatagagacggggtttcac

SEQ ID NO: 382511 - DNA, 20 bp, Artificial Sequence
  Description of Artificial Sequence: Synthetic oligonucleotide
  Target: LAMA2; (+) strand; PAM type: YTN; PAM sequence: TTT
aatagagacggggtttcact

SEQ ID NO: 382512 - DNA, 20 bp, Artificial Sequence
  Description of Artificial Sequence: Synthetic oligonucleotide
  Target: LAMA2; (+) strand; PAM type: YTN; PAM sequence: TTA
atagagacggggtttcactg

SEQ ID NO: 382513 - DNA, 20 bp, Artificial Sequence
  Description of Artificial Sequence: Synthetic oligonucleotide
  Target: LAMA2; (+) strand; PAM type: YTN; PAM sequence: TTT
cactgtgttagccaggatgg

SEQ ID NO: 382514 - DNA, 20 bp, Artificial Sequence
  Description of Artificial Sequence: Synthetic oligonucleotide
  Target: LAMA2; (+) strand; PAM type: YTN; PAM sequence: TTC
actgtgttagccaggatgga

SEQ ID NO: 382515 - DNA, 20 bp, Artificial Sequence
  Description of Artificial Sequence: Synthetic oligonucleotide
  Target: LAMA2; (+) strand; PAM type: YTN; PAM sequence: CTG
tgttagccaggatggactcg

SEQ ID NO: 382516 - DNA, 20 bp, Artificial Sequence
  Description of Artificial Sequence: Synthetic oligonucleotide
  Target: LAMA2; (+) strand; PAM type: YTN; PAM sequence: TTA
gccaggatggactcgatctc

SEQ ID NO: 382517 - DNA, 20 bp, Artificial Sequence
  Description of Artificial Sequence: Synthetic oligonucleotide
  Target: LAMA2; (+) strand; PAM type: YTN; PAM sequence: CTC
gatctcctgacctcatgatc

SEQ ID NO: 382518 - DNA, 20 bp, Artificial Sequence
  Description of Artificial Sequence: Synthetic oligonucleotide
  Target: LAMA2; (+) strand; PAM type: YTN; PAM sequence: CTC
ctgacctcatgatccatgat

SEQ ID NO: 382519 - DNA, 20 bp, Artificial Sequence
  Description of Artificial Sequence: Synthetic oligonucleotide
  Target: LAMA2; (+) strand; PAM type: YTN; PAM sequence: CTG
acctcatgatccatgattcg

SEQ ID NO: 382520 - DNA, 20 bp, Artificial Sequence
  Description of Artificial Sequence: Synthetic oligonucleotide
  Target: LAMA2; (+) strand; PAM type: YTN; PAM sequence: CTC
atgatccatgattcgcctcc

SEQ ID NO: 382521 - DNA, 20 bp, Artificial Sequence
  Description of Artificial Sequence: Synthetic oligonucleotide
  Target: LAMA2; (+) strand; PAM type: YTN; PAM sequence: TTC
gcctccttcggcctcccaaa

SEQ ID NO: 382522 - DNA, 20 bp, Artificial Sequence
  Description of Artificial Sequence: Synthetic oligonucleotide
  Target: LAMA2; (+) strand; PAM type: YTN; PAM sequence: CTC
cttcggcctcccaaagtgct

SEQ ID NO: 382523 - DNA, 20 bp, Artificial Sequence
  Description of Artificial Sequence: Synthetic oligonucleotide
  Target: LAMA2; (+) strand; PAM type: YTN; PAM sequence: CTT
cggcctcccaaagtgctggg

SEQ ID NO: 382524 - DNA, 20 bp, Artificial Sequence
  Description of Artificial Sequence: Synthetic oligonucleotide
  Target: LAMA2; (+) strand; PAM type: YTN; PAM sequence: TTC
ggcctcccaaagtgctggga

SEQ ID NO: 382525 - DNA, 20 bp, Artificial Sequence
  Description of Artificial Sequence: Synthetic oligonucleotide
  Target: LAMA2; (+) strand; PAM type: YTN; PAM sequence: CTC
ccaaagtgctgggactacag

SEQ ID NO: 382526 - DNA, 20 bp, Artificial Sequence
  Description of Artificial Sequence: Synthetic oligonucleotide
  Target: LAMA2; (+) strand; PAM type: YTN; PAM sequence: CTG
ggactacaggcgtaagccac

SEQ ID NO: 382527 - DNA, 20 bp, Artificial Sequence
  Description of Artificial Sequence: Synthetic oligonucleotide
  Target: LAMA2; (+) strand; PAM type: YTN; PAM sequence: CTA
caggcgtaagccactgcgcc

SEQ ID NO: 382528 - DNA, 20 bp, Artificial Sequence
  Description of Artificial Sequence: Synthetic oligonucleotide
  Target: LAMA2; (+) strand; PAM type: YTN; PAM sequence: CTG
cgcccggccacctgcacctt

SEQ ID NO: 382529 - DNA, 20 bp, Artificial Sequence
  Description of Artificial Sequence: Synthetic oligonucleotide
  Target: LAMA2; (+) strand; PAM type: YTN; PAM sequence: CTG
caccttctaagctgaacgtg

SEQ ID NO: 382530 - DNA, 20 bp, Artificial Sequence
  Description of Artificial Sequence: Synthetic oligonucleotide
  Target: LAMA2; (+) strand; PAM type: YTN; PAM sequence: CTT
ctaagctgaacgtggctgta

SEQ ID NO: 382531 - DNA, 20 bp, Artificial Sequence
  Description of Artificial Sequence: Synthetic oligonucleotide
  Target: LAMA2; (+) strand; PAM type: YTN; PAM sequence: TTC
taagctgaacgtggctgtag

SEQ ID NO: 382532 - DNA, 20 bp, Artificial Sequence
  Description of Artificial Sequence: Synthetic oligonucleotide
  Target: LAMA2; (+) strand; PAM type: YTN; PAM sequence: CTA
agctgaacgtggctgtagaa

SEQ ID NO: 382533 - DNA, 20 bp, Artificial Sequence
  Description of Artificial Sequence: Synthetic oligonucleotide
  Target: LAMA2; (+) strand; PAM type: YTN; PAM sequence: CTG
aacgtggctgtagaaaaaga

SEQ ID NO: 382534 - DNA, 20 bp, Artificial Sequence
  Description of Artificial Sequence: Synthetic oligonucleotide
  Target: LAMA2; (+) strand; PAM type: YTN; PAM sequence: CTG
tagaaaaagacaattgtgcc

SEQ ID NO: 382535 - DNA, 20 bp, Artificial Sequence
  Description of Artificial Sequence: Synthetic oligonucleotide
  Target: LAMA2; (+) strand; PAM type: YTN; PAM sequence: TTG
tgccatctaatctcacctta

SEQ ID NO: 382536 - DNA, 20 bp, Artificial Sequence
  Description of Artificial Sequence: Synthetic oligonucleotide
  Target: LAMA2; (+) strand; PAM type: YTN; PAM sequence: CTA
atctcaccttaaattcatga

SEQ ID NO: 382537 - DNA, 20 bp, Artificial Sequence
  Description of Artificial Sequence: Synthetic oligonucleotide
  Target: LAMA2; (+) strand; PAM type: YTN; PAM sequence: CTC
accttaaattcatgatccct

SEQ ID NO: 382538 - DNA, 20 bp, Artificial Sequence
  Description of Artificial Sequence: Synthetic oligonucleotide
  Target: LAMA2; (+) strand; PAM type: YTN; PAM sequence: CTT
aaattcatgatccctctctt

SEQ ID NO: 382539 - DNA, 20 bp, Artificial Sequence
  Description of Artificial Sequence: Synthetic oligonucleotide
  Target: LAMA2; (+) strand; PAM type: YTN; PAM sequence: TTA
aattcatgatccctctcttc

SEQ ID NO: 382540 - DNA, 20 bp, Artificial Sequence
  Description of Artificial Sequence: Synthetic oligonucleotide
  Target: LAMA2; (+) strand; PAM type: YTN; PAM sequence: TTC
atgatccctctcttcaaatg

SEQ ID NO: 382541 - DNA, 20 bp, Artificial Sequence
  Description of Artificial Sequence: Synthetic oligonucleotide
  Target: LAMA2; (+) strand; PAM type: YTN; PAM sequence: CTC
tcttcaaatggaccctttgt

SEQ ID NO: 382542 - DNA, 20 bp, Artificial Sequence
  Description of Artificial Sequence: Synthetic oligonucleotide
  Target: LAMA2; (+) strand; PAM type: YTN; PAM sequence: CTC
ttcaaatggaccctttgtgc

SEQ ID NO: 382543 - DNA, 20 bp, Artificial Sequence
  Description of Artificial Sequence: Synthetic oligonucleotide
  Target: LAMA2; (+) strand; PAM type: YTN; PAM sequence: CTT
caaatggaccctttgtgctg

SEQ ID NO: 382544 - DNA, 20 bp, Artificial Sequence
  Description of Artificial Sequence: Synthetic oligonucleotide
  Target: LAMA2; (+) strand; PAM type: YTN; PAM sequence: TTC
aaatggaccctttgtgctgc

SEQ ID NO: 382545 - DNA, 20 bp, Artificial Sequence
  Description of Artificial Sequence: Synthetic oligonucleotide
  Target: LAMA2; (+) strand; PAM type: YTN; PAM sequence: CTT
tgtgctgctctgcaatcatg

SEQ ID NO: 382546 - DNA, 20 bp, Artificial Sequence
  Description of Artificial Sequence: Synthetic oligonucleotide
  Target: LAMA2; (+) strand; PAM type: YTN; PAM sequence: TTT
gtgctgctctgcaatcatgc

SEQ ID NO: 382547 - DNA, 20 bp, Artificial Sequence
  Description of Artificial Sequence: Synthetic oligonucleotide
  Target: LAMA2; (+) strand; PAM type: YTN; PAM sequence: TTG
tgctgctctgcaatcatgcc

SEQ ID NO: 382548 - DNA, 20 bp, Artificial Sequence
  Description of Artificial Sequence: Synthetic oligonucleotide
  Target: LAMA2; (+) strand; PAM type: YTN; PAM sequence: CTG
ctctgcaatcatgccacttt

SEQ ID NO: 382549 - DNA, 20 bp, Artificial Sequence
  Description of Artificial Sequence: Synthetic oligonucleotide
  Target: LAMA2; (+) strand; PAM type: YTN; PAM sequence: CTC
tgcaatcatgccacttttct

SEQ ID NO: 382550 - DNA, 20 bp, Artificial Sequence
  Description of Artificial Sequence: Synthetic oligonucleotide
  Target: LAMA2; (+) strand; PAM type: YTN; PAM sequence: CTG
caatcatgccacttttctct

SEQ ID NO: 382551 - DNA, 20 bp, Artificial Sequence
  Description of Artificial Sequence: Synthetic oligonucleotide
  Target: LAMA2; (+) strand; PAM type: YTN; PAM sequence: CTT
ttctctcatcctttttcttt

SEQ ID NO: 382552 - DNA, 20 bp, Artificial Sequence
  Description of Artificial Sequence: Synthetic oligonucleotide
  Target: LAMA2; (+) strand; PAM type: YTN; PAM sequence: TTT
tctctcatcctttttctttt

SEQ ID NO: 382553 - DNA, 20 bp, Artificial Sequence
  Description of Artificial Sequence: Synthetic oligonucleotide
  Target: LAMA2; (+) strand; PAM type: YTN; PAM sequence: TTT
ctctcatcctttttcttttc

SEQ ID NO: 382554 - DNA, 20 bp, Artificial Sequence
  Description of Artificial Sequence: Synthetic oligonucleotide
  Target: LAMA2; (+) strand; PAM type: YTN; PAM sequence: TTC
tctcatcctttttcttttcc

SEQ ID NO: 382555 - DNA, 20 bp, Artificial Sequence
  Description of Artificial Sequence: Synthetic oligonucleotide
  Target: LAMA2; (+) strand; PAM type: YTN; PAM sequence: CTC
tcatcctttttcttttccac

SEQ ID NO: 382556 - DNA, 20 bp, Artificial Sequence
  Description of Artificial Sequence: Synthetic oligonucleotide
  Target: LAMA2; (+) strand; PAM type: YTN; PAM sequence: CTC
atcctttttcttttccacat

SEQ ID NO: 382557 - DNA, 20 bp, Artificial Sequence
  Description of Artificial Sequence: Synthetic oligonucleotide
  Target: LAMA2; (+) strand; PAM type: YTN; PAM sequence: CTT
tttcttttccacattcctag

SEQ ID NO: 382558 - DNA, 20 bp, Artificial Sequence
  Description of Artificial Sequence: Synthetic oligonucleotide
  Target: LAMA2; (+) strand; PAM type: YTN; PAM sequence: TTT
ttcttttccacattcctagg

SEQ ID NO: 382559 - DNA, 20 bp, Artificial Sequence
  Description of Artificial Sequence: Synthetic oligonucleotide
  Target: LAMA2; (+) strand; PAM type: YTN; PAM sequence: TTT
tcttttccacattcctaggt

SEQ ID NO: 382560 - DNA, 20 bp, Artificial Sequence
  Description of Artificial Sequence: Synthetic oligonucleotide
  Target: LAMA2; (+) strand; PAM type: YTN; PAM sequence: TTT
cttttccacattcctaggtg

SEQ ID NO: 382561 - DNA, 20 bp, Artificial Sequence
  Description of Artificial Sequence: Synthetic oligonucleotide
  Target: LAMA2; (+) strand; PAM type: YTN; PAM sequence: TTC
ttttccacattcctaggtga

SEQ ID NO: 382562 - DNA, 20 bp, Artificial Sequence
  Description of Artificial Sequence: Synthetic oligonucleotide
  Target: LAMA2; (+) strand; PAM type: YTN; PAM sequence: CTT
ttccacattcctaggtgatt

SEQ ID NO: 382563 - DNA, 20 bp, Artificial Sequence
  Description of Artificial Sequence: Synthetic oligonucleotide
  Target: LAMA2; (+) strand; PAM type: YTN; PAM sequence: TTT
tccacattcctaggtgatta

SEQ ID NO: 382564 - DNA, 20 bp, Artificial Sequence
  Description of Artificial Sequence: Synthetic oligonucleotide
  Target: LAMA2; (+) strand; PAM type: YTN; PAM sequence: TTT
ccacattcctaggtgattat

SEQ ID NO: 382565 - DNA, 20 bp, Artificial Sequence
  Description of Artificial Sequence: Synthetic oligonucleotide
  Target: LAMA2; (+) strand; PAM type: YTN; PAM sequence: TTC
cacattcctaggtgattatt

SEQ ID NO: 382566 - DNA, 20 bp, Artificial Sequence
  Description of Artificial Sequence: Synthetic oligonucleotide
  Target: LAMA2; (+) strand; PAM type: YTN; PAM sequence: TTC
ctaggtgattatttcatacc

SEQ ID NO: 382567 - DNA, 20 bp, Artificial Sequence
  Description of Artificial Sequence: Synthetic oligonucleotide
  Target: LAMA2; (+) strand; PAM type: YTN; PAM sequence: CTA
ggtgattatttcatacctcc

SEQ ID NO: 382568 - DNA, 20 bp, Artificial Sequence
  Description of Artificial Sequence: Synthetic oligonucleotide
  Target: LAMA2; (+) strand; PAM type: YTN; PAM sequence: TTA
tttcatacctccccctccat

SEQ ID NO: 382569 - DNA, 20 bp, Artificial Sequence
  Description of Artificial Sequence: Synthetic oligonucleotide
  Target: LAMA2; (+) strand; PAM type: YTN; PAM sequence: TTT
catacctccccctccatcct

SEQ ID NO: 382570 - DNA, 20 bp, Artificial Sequence
  Description of Artificial Sequence: Synthetic oligonucleotide
  Target: LAMA2; (+) strand; PAM type: YTN; PAM sequence: TTC
atacctccccctccatcctc

SEQ ID NO: 382571 - DNA, 20 bp, Artificial Sequence
  Description of Artificial Sequence: Synthetic oligonucleotide
  Target: LAMA2; (+) strand; PAM type: YTN; PAM sequence: CTC
cccctccatcctcaagccta

SEQ ID NO: 382572 - DNA, 20 bp, Artificial Sequence
  Description of Artificial Sequence: Synthetic oligonucleotide
  Target: LAMA2; (+) strand; PAM type: YTN; PAM sequence: CTC
catcctcaagcctaaacctc

SEQ ID NO: 382573 - DNA, 20 bp, Artificial Sequence
  Description of Artificial Sequence: Synthetic oligonucleotide
  Target: LAMA2; (+) strand; PAM type: YTN; PAM sequence: CTC
aagcctaaacctctcctctc

SEQ ID NO: 382574 - DNA, 20 bp, Artificial Sequence
  Description of Artificial Sequence: Synthetic oligonucleotide
  Target: LAMA2; (+) strand; PAM type: YTN; PAM sequence: CTA
aacctctcctctcaccccct

SEQ ID NO: 382575 - DNA, 20 bp, Artificial Sequence
  Description of Artificial Sequence: Synthetic oligonucleotide
  Target: LAMA2; (+) strand; PAM type: YTN; PAM sequence: CTC
tcctctcaccccctcccatc

SEQ ID NO: 382576 - DNA, 20 bp, Artificial Sequence
  Description of Artificial Sequence: Synthetic oligonucleotide
  Target: LAMA2; (+) strand; PAM type: YTN; PAM sequence: CTC
ctctcaccccctcccatcct

SEQ ID NO: 382577 - DNA, 20 bp, Artificial Sequence
  Description of Artificial Sequence: Synthetic oligonucleotide
  Target: LAMA2; (+) strand; PAM type: YTN; PAM sequence: CTC
tcaccccctcccatccttac

SEQ ID NO: 382578 - DNA, 20 bp, Artificial Sequence
  Description of Artificial Sequence: Synthetic oligonucleotide
  Target: LAMA2; (+) strand; PAM type: YTN; PAM sequence: CTC
accccctcccatccttaccc

SEQ ID NO: 382579 - DNA, 20 bp, Artificial Sequence
  Description of Artificial Sequence: Synthetic oligonucleotide
  Target: LAMA2; (+) strand; PAM type: YTN; PAM sequence: CTC
ccatccttaccctcagttga

SEQ ID NO: 382580 - DNA, 20 bp, Artificial Sequence
  Description of Artificial Sequence: Synthetic oligonucleotide
  Target: LAMA2; (+) strand; PAM type: YTN; PAM sequence: CTT
accctcagttgatggtgttg

SEQ ID NO: 382581 - DNA, 20 bp, Artificial Sequence
  Description of Artificial Sequence: Synthetic oligonucleotide
  Target: LAMA2; (+) strand; PAM type: YTN; PAM sequence: TTA
ccctcagttgatggtgttgc

SEQ ID NO: 382582 - DNA, 20 bp, Artificial Sequence
  Description of Artificial Sequence: Synthetic oligonucleotide
  Target: LAMA2; (+) strand; PAM type: YTN; PAM sequence: CTC
agttgatggtgttgcctctt

SEQ ID NO: 382583 - DNA, 20 bp, Artificial Sequence
  Description of Artificial Sequence: Synthetic oligonucleotide
  Target: LAMA2; (+) strand; PAM type: YTN; PAM sequence: TTG
atggtgttgcctcttatttc

SEQ ID NO: 382584 - DNA, 20 bp, Artificial Sequence
  Description of Artificial Sequence: Synthetic oligonucleotide
  Target: LAMA2; (+) strand; PAM type: YTN; PAM sequence: TTG
cctcttatttcattgagaat

SEQ ID NO: 382585 - DNA, 20 bp, Artificial Sequence
  Description of Artificial Sequence: Synthetic oligonucleotide
  Target: LAMA2; (+) strand; PAM type: YTN; PAM sequence: CTC
ttatttcattgagaatttag

SEQ ID NO: 382586 - DNA, 20 bp, Artificial Sequence
  Description of Artificial Sequence: Synthetic oligonucleotide
  Target: LAMA2; (+) strand; PAM type: YTN; PAM sequence: CTT
atttcattgagaatttagaa

SEQ ID NO: 382587 - DNA, 20 bp, Artificial Sequence
  Description of Artificial Sequence: Synthetic oligonucleotide
  Target: LAMA2; (+) strand; PAM type: YTN; PAM sequence: TTA
tttcattgagaatttagaag

SEQ ID NO: 382588 - DNA, 20 bp, Artificial Sequence
  Description of Artificial Sequence: Synthetic oligonucleotide
  Target: LAMA2; (+) strand; PAM type: YTN; PAM sequence: TTT
cattgagaatttagaagctg

SEQ ID NO: 382589 - DNA, 20 bp, Artificial Sequence
  Description of Artificial Sequence: Synthetic oligonucleotide
  Target: LAMA2; (+) strand; PAM type: YTN; PAM sequence: TTC
attgagaatttagaagctgt

SEQ ID NO: 382590 - DNA, 20 bp, Artificial Sequence
  Description of Artificial Sequence: Synthetic oligonucleotide
  Target: LAMA2; (+) strand; PAM type: YTN; PAM sequence: TTG
agaatttagaagctgtcaga

SEQ ID NO: 382591 - DNA, 20 bp, Artificial Sequence
  Description of Artificial Sequence: Synthetic oligonucleotide
  Target: LAMA2; (+) strand; PAM type: YTN; PAM sequence: TTT
agaagctgtcagaagagagg

SEQ ID NO: 382592 - DNA, 20 bp, Artificial Sequence
  Description of Artificial Sequence: Synthetic oligonucleotide
  Target: LAMA2; (+) strand; PAM type: YTN; PAM sequence: TTA
gaagctgtcagaagagaggt

SEQ ID NO: 382593 - DNA, 20 bp, Artificial Sequence
  Description of Artificial Sequence: Synthetic oligonucleotide
  Target: LAMA2; (+) strand; PAM type: YTN; PAM sequence: CTG
tcagaagagaggtaacaagc

SEQ ID NO: 382594 - DNA, 20 bp, Artificial Sequence
  Description of Artificial Sequence: Synthetic oligonucleotide
  Target: LAMA2; (+) strand; PAM type: YTN; PAM sequence: CTC
ccactactgcatgcacccac

SEQ ID NO: 382595 - DNA, 20 bp, Artificial Sequence
  Description of Artificial Sequence: Synthetic oligonucleotide
  Target: LAMA2; (+) strand; PAM type: YTN; PAM sequence: CTA
ctgcatgcacccacttttct

SEQ ID NO: 382596 - DNA, 20 bp, Artificial Sequence
  Description of Artificial Sequence: Synthetic oligonucleotide
  Target: LAMA2; (+) strand; PAM type: YTN; PAM sequence: CTG
catgcacccacttttctgca

SEQ ID NO: 382597 - DNA, 20 bp, Artificial Sequence
  Description of Artificial Sequence: Synthetic oligonucleotide
  Target: LAMA2; (+) strand; PAM type: YTN; PAM sequence: CTT
ttctgcatctgtgcccaatt

SEQ ID NO: 382598 - DNA, 20 bp, Artificial Sequence
  Description of Artificial Sequence: Synthetic oligonucleotide
  Target: LAMA2; (+) strand; PAM type: YTN; PAM sequence: TTT
tctgcatctgtgcccaatta

SEQ ID NO: 382599 - DNA, 20 bp, Artificial Sequence
  Description of Artificial Sequence: Synthetic oligonucleotide
  Target: LAMA2; (+) strand; PAM type: YTN; PAM sequence: TTT
ctgcatctgtgcccaattat

SEQ ID NO: 382600 - DNA, 20 bp, Artificial Sequence
  Description of Artificial Sequence: Synthetic oligonucleotide
  Target: LAMA2; (+) strand; PAM type: YTN; PAM sequence: TTC
tgcatctgtgcccaattatt

SEQ ID NO: 382601 - DNA, 20 bp, Artificial Sequence
  Description of Artificial Sequence: Synthetic oligonucleotide
  Target: LAMA2; (+) strand; PAM type: YTN; PAM sequence: CTG
catctgtgcccaattattat

SEQ ID NO: 382602 - DNA, 20 bp, Artificial Sequence
  Description of Artificial Sequence: Synthetic oligonucleotide
  Target: LAMA2; (+) strand; PAM type: YTN; PAM sequence: CTG
tgcccaattattatgactct

SEQ ID NO: 382603 - DNA, 20 bp, Artificial Sequence
  Description of Artificial Sequence: Synthetic oligonucleotide
  Target: LAMA2; (+) strand; PAM type: YTN; PAM sequence: TTA
ttatgactcttttctattac

SEQ ID NO: 382604 - DNA, 20 bp, Artificial Sequence
  Description of Artificial Sequence: Synthetic oligonucleotide
  Target: LAMA2; (+) strand; PAM type: YTN; PAM sequence: TTA
tgactcttttctattacttt

SEQ ID NO: 382605 - DNA, 20 bp, Artificial Sequence
  Description of Artificial Sequence: Synthetic oligonucleotide
  Target: LAMA2; (+) strand; PAM type: YTN; PAM sequence: CTC
ttttctattactttggatga

SEQ ID NO: 382606 - DNA, 20 bp, Artificial Sequence
  Description of Artificial Sequence: Synthetic oligonucleotide
  Target: LAMA2; (+) strand; PAM type: YTN; PAM sequence: CTT
ttctattactttggatgaat

SEQ ID NO: 382607 - DNA, 20 bp, Artificial Sequence
  Description of Artificial Sequence: Synthetic oligonucleotide
  Target: LAMA2; (+) strand; PAM type: YTN; PAM sequence: TTT
tctattactttggatgaatt

SEQ ID NO: 382608 - DNA, 20 bp, Artificial Sequence
  Description of Artificial Sequence: Synthetic oligonucleotide
  Target: LAMA2; (+) strand; PAM type: YTN; PAM sequence: TTT
ctattactttggatgaatta

SEQ ID NO: 382609 - DNA, 20 bp, Artificial Sequence
  Description of Artificial Sequence: Synthetic oligonucleotide
  Target: LAMA2; (+) strand; PAM type: YTN; PAM sequence: TTC
tattactttggatgaattat

SEQ ID NO: 382610 - DNA, 20 bp, Artificial Sequence
  Description of Artificial Sequence: Synthetic oligonucleotide
  Target: LAMA2; (+) strand; PAM type: YTN; PAM sequence: CTA
ttactttggatgaattattc

SEQ ID NO: 382611 - DNA, 20 bp, Artificial Sequence
  Description of Artificial Sequence: Synthetic oligonucleotide
  Target: LAMA2; (+) strand; PAM type: YTN; PAM sequence: TTA
ctttggatgaattattcttg

SEQ ID NO: 382612 - DNA, 20 bp, Artificial Sequence
  Description of Artificial Sequence: Synthetic oligonucleotide
  Target: LAMA2; (+) strand; PAM type: YTN; PAM sequence: CTT
tggatgaattattcttgttt

SEQ ID NO: 382613 - DNA, 20 bp, Artificial Sequence
  Description of Artificial Sequence: Synthetic oligonucleotide
  Target: LAMA2; (+) strand; PAM type: YTN; PAM sequence: TTT
ggatgaattattcttgtttc

SEQ ID NO: 382614 - DNA, 20 bp, Artificial Sequence
  Description of Artificial Sequence: Synthetic oligonucleotide
  Target: LAMA2; (+) strand; PAM type: YTN; PAM sequence: TTG
gatgaattattcttgtttcc

SEQ ID NO: 382615 - DNA, 20 bp, Artificial Sequence
  Description of Artificial Sequence: Synthetic oligonucleotide
  Target: LAMA2; (+) strand; PAM type: YTN; PAM sequence: TTA
ttcttgtttccagaaaagat

SEQ ID NO: 382616 - DNA, 20 bp, Artificial Sequence
  Description of Artificial Sequence: Synthetic oligonucleotide
  Target: LAMA2; (+) strand; PAM type: YTN; PAM sequence: TTC
ttgtttccagaaaagatcac

SEQ ID NO: 382617 - DNA, 20 bp, Artificial Sequence
  Description of Artificial Sequence: Synthetic oligonucleotide
  Target: LAMA2; (+) strand; PAM type: YTN; PAM sequence: CTT
gtttccagaaaagatcacat

SEQ ID NO: 382618 - DNA, 20 bp, Artificial Sequence
  Description of Artificial Sequence: Synthetic oligonucleotide
  Target: LAMA2; (+) strand; PAM type: YTN; PAM sequence: TTG
tttccagaaaagatcacatc

SEQ ID NO: 382619 - DNA, 20 bp, Artificial Sequence
  Description of Artificial Sequence: Synthetic oligonucleotide
  Target: LAMA2; (+) strand; PAM type: YTN; PAM sequence: TTT
ccagaaaagatcacatcttc

SEQ ID NO: 382620 - DNA, 20 bp, Artificial Sequence
  Description of Artificial Sequence: Synthetic oligonucleotide
  Target: LAMA2; (+) strand; PAM type: YTN; PAM sequence: TTC
cagaaaagatcacatcttcc

SEQ ID NO: 382621 - DNA, 20 bp, Artificial Sequence
  Description of Artificial Sequence: Synthetic oligonucleotide
  Target: LAMA2; (+) strand; PAM type: YTN; PAM sequence: CTT
ccccctatgttctcaattct

SEQ ID NO: 382622 - DNA, 20 bp, Artificial Sequence
  Description of Artificial Sequence: Synthetic oligonucleotide
  Target: LAMA2; (+) strand; PAM type: YTN; PAM sequence: TTC
cccctatgttctcaattcta

SEQ ID NO: 382623 - DNA, 20 bp, Artificial Sequence
  Description of Artificial Sequence: Synthetic oligonucleotide
  Target: LAMA2; (+) strand; PAM type: YTN; PAM sequence: CTA
tgttctcaattctacccctc

SEQ ID NO: 382624 - DNA, 20 bp, Artificial Sequence
  Description of Artificial Sequence: Synthetic oligonucleotide
  Target: LAMA2; (+) strand; PAM type: YTN; PAM sequence: TTC
tcaattctacccctctcccg

SEQ ID NO: 382625 - DNA, 20 bp, Artificial Sequence
  Description of Artificial Sequence: Synthetic oligonucleotide
  Target: LAMA2; (+) strand; PAM type: YTN; PAM sequence: CTC
aattctacccctctcccgct

SEQ ID NO: 382626 - DNA, 20 bp, Artificial Sequence
  Description of Artificial Sequence: Synthetic oligonucleotide
  Target: LAMA2; (+) strand; PAM type: YTN; PAM sequence: TTC
tacccctctcccgcttgatg

SEQ ID NO: 382627 - DNA, 20 bp, Artificial Sequence
  Description of Artificial Sequence: Synthetic oligonucleotide
  Target: LAMA2; (+) strand; PAM type: YTN; PAM sequence: CTA
cccctctcccgcttgatgac

SEQ ID NO: 382628 - DNA, 20 bp, Artificial Sequence
  Description of Artificial Sequence: Synthetic oligonucleotide
  Target: LAMA2; (+) strand; PAM type: YTN; PAM sequence: CTC
tcccgcttgatgacatcact

SEQ ID NO: 382629 - DNA, 20 bp, Artificial Sequence
  Description of Artificial Sequence: Synthetic oligonucleotide
  Target: LAMA2; (+) strand; PAM type: YTN; PAM sequence: CTC
ccgcttgatgacatcactct

SEQ ID NO: 382630 - DNA, 20 bp, Artificial Sequence
  Description of Artificial Sequence: Synthetic oligonucleotide
  Target: LAMA2; (+) strand; PAM type: YTN; PAM sequence: CTT
gatgacatcactctggctaa

SEQ ID NO: 382631 - DNA, 20 bp, Artificial Sequence
  Description of Artificial Sequence: Synthetic oligonucleotide
  Target: LAMA2; (+) strand; PAM type: YTN; PAM sequence: TTG
atgacatcactctggctaat

SEQ ID NO: 382632 - DNA, 20 bp, Artificial Sequence
  Description of Artificial Sequence: Synthetic oligonucleotide
  Target: LAMA2; (+) strand; PAM type: YTN; PAM sequence: CTC
tggctaatctctcctccttc

SEQ ID NO: 382633 - DNA, 20 bp, Artificial Sequence
  Description of Artificial Sequence: Synthetic oligonucleotide
  Target: LAMA2; (+) strand; PAM type: YTN; PAM sequence: CTG
gctaatctctcctccttctt

SEQ ID NO: 382634 - DNA, 20 bp, Artificial Sequence
  Description of Artificial Sequence: Synthetic oligonucleotide
  Target: LAMA2; (+) strand; PAM type: YTN; PAM sequence: CTA
atctctcctccttcttatat

SEQ ID NO: 382635 - DNA, 20 bp, Artificial Sequence
  Description of Artificial Sequence: Synthetic oligonucleotide
  Target: LAMA2; (+) strand; PAM type: YTN; PAM sequence: CTC
tcctccttcttatattgtca

SEQ ID NO: 382636 - DNA, 20 bp, Artificial Sequence
  Description of Artificial Sequence: Synthetic oligonucleotide
  Target: LAMA2; (+) strand; PAM type: YTN; PAM sequence: CTC
ctccttcttatattgtcact

SEQ ID NO: 382637 - DNA, 20 bp, Artificial Sequence
  Description of Artificial Sequence: Synthetic oligonucleotide
  Target: LAMA2; (+) strand; PAM type: YTN; PAM sequence: CTC
cttcttatattgtcactttt

SEQ ID NO: 382638 - DNA, 20 bp, Artificial Sequence
  Description of Artificial Sequence: Synthetic oligonucleotide
  Target: LAMA2; (+) strand; PAM type: YTN; PAM sequence: CTT
cttatattgtcacttttttt

SEQ ID NO: 382639 - DNA, 20 bp, Artificial Sequence
  Description of Artificial Sequence: Synthetic oligonucleotide
  Target: LAMA2; (+) strand; PAM type: YTN; PAM sequence: TTC
ttatattgtcactttttttt

SEQ ID NO: 382640 - DNA, 20 bp, Artificial Sequence
  Description of Artificial Sequence: Synthetic oligonucleotide
  Target: LAMA2; (+) strand; PAM type: YTN; PAM sequence: CTT
atattgtcactttttttttc

SEQ ID NO: 382641 - DNA, 20 bp, Artificial Sequence
  Description of Artificial Sequence: Synthetic oligonucleotide
  Target: LAMA2; (+) strand; PAM type: YTN; PAM sequence: TTA
tattgtcactttttttttcc

SEQ ID NO: 382642 - DNA, 20 bp, Artificial Sequence
  Description of Artificial Sequence: Synthetic oligonucleotide
  Target: LAMA2; (+) strand; PAM type: YTN; PAM sequence: TTG
tcactttttttttccatctt

SEQ ID NO: 382643 - DNA, 20 bp, Artificial Sequence
  Description of Artificial Sequence: Synthetic oligonucleotide
  Target: LAMA2; (+) strand; PAM type: YTN; PAM sequence: CTT
tttttttccatcttaaaagc

SEQ ID NO: 382644 - DNA, 20 bp, Artificial Sequence
  Description of Artificial Sequence: Synthetic oligonucleotide
  Target: LAMA2; (+) strand; PAM type: YTN; PAM sequence: TTT
ttttttccatcttaaaagca

SEQ ID NO: 382645 - DNA, 20 bp, Artificial Sequence
  Description of Artificial Sequence: Synthetic oligonucleotide
  Target: LAMA2; (+) strand; PAM type: YTN; PAM sequence: TTT
tttttccatcttaaaagcaa

SEQ ID NO: 382646 - DNA, 20 bp, Artificial Sequence
  Description of Artificial Sequence: Synthetic oligonucleotide
  Target: LAMA2; (+) strand; PAM type: YTN; PAM sequence: TTT
ttttccatcttaaaagcaaa

SEQ ID NO: 382647 - DNA, 20 bp, Artificial Sequence
  Description of Artificial Sequence: Synthetic oligonucleotide
  Target: LAMA2; (+) strand; PAM type: YTN; PAM sequence: TTT
tttccatcttaaaagcaaaa

SEQ ID NO: 382648 - DNA, 20 bp, Artificial Sequence
  Description of Artificial Sequence: Synthetic oligonucleotide
  Target: LAMA2; (+) strand; PAM type: YTN; PAM sequence: TTT
ttccatcttaaaagcaaaaa

SEQ ID NO: 382649 - DNA, 20 bp, Artificial Sequence
  Description of Artificial Sequence: Synthetic oligonucleotide
  Target: LAMA2; (+) strand; PAM type: YTN; PAM sequence: TTT
tccatcttaaaagcaaaaac

SEQ ID NO: 382650 - DNA, 20 bp, Artificial Sequence
  Description of Artificial Sequence: Synthetic oligonucleotide
  Target: LAMA2; (+) strand; PAM type: YTN; PAM sequence: TTT
ccatcttaaaagcaaaaaca

SEQ ID NO: 382651 - DNA, 20 bp, Artificial Sequence
  Description of Artificial Sequence: Synthetic oligonucleotide
  Target: LAMA2; (+) strand; PAM type: YTN; PAM sequence: TTC
catcttaaaagcaaaaacaa

SEQ ID NO: 382652 - DNA, 20 bp, Artificial Sequence
  Description of Artificial Sequence: Synthetic oligonucleotide
  Target: LAMA2; (+) strand; PAM type: YTN; PAM sequence: CTT
aaaagcaaaaacaaactctc

SEQ ID NO: 382653 - DNA, 20 bp, Artificial Sequence
  Description of Artificial Sequence: Synthetic oligonucleotide
  Target: LAMA2; (+) strand; PAM type: YTN; PAM sequence: TTA
aaagcaaaaacaaactctcc

SEQ ID NO: 382654 - DNA, 20 bp, Artificial Sequence
  Description of Artificial Sequence: Synthetic oligonucleotide
  Target: LAMA2; (+) strand; PAM type: YTN; PAM sequence: CTC
tcctgactcatttcctttct

SEQ ID NO: 382655 - DNA, 20 bp, Artificial Sequence
  Description of Artificial Sequence: Synthetic oligonucleotide
  Target: LAMA2; (+) strand; PAM type: YTN; PAM sequence: CTC
ctgactcatttcctttctaa

SEQ ID NO: 382656 - DNA, 20 bp, Artificial Sequence
  Description of Artificial Sequence: Synthetic oligonucleotide
  Target: LAMA2; (+) strand; PAM type: YTN; PAM sequence: CTG
actcatttcctttctaagta

SEQ ID NO: 382657 - DNA, 20 bp, Artificial Sequence
  Description of Artificial Sequence: Synthetic oligonucleotide
  Target: LAMA2; (+) strand; PAM type: YTN; PAM sequence: CTC
atttcctttctaagtaacca

SEQ ID NO: 382658 - DNA, 20 bp, Artificial Sequence
  Description of Artificial Sequence: Synthetic oligonucleotide
  Target: LAMA2; (+) strand; PAM type: YTN; PAM sequence: TTT
cctttctaagtaaccacttc

SEQ ID NO: 382659 - DNA, 20 bp, Artificial Sequence
  Description of Artificial Sequence: Synthetic oligonucleotide
  Target: LAMA2; (+) strand; PAM type: YTN; PAM sequence: TTC
ctttctaagtaaccacttca

SEQ ID NO: 382660 - DNA, 20 bp, Artificial Sequence
  Description of Artificial Sequence: Synthetic oligonucleotide
  Target: LAMA2; (+) strand; PAM type: YTN; PAM sequence: CTT
tctaagtaaccacttcattc

SEQ ID NO: 382661 - DNA, 20 bp, Artificial Sequence
  Description of Artificial Sequence: Synthetic oligonucleotide
  Target: LAMA2; (+) strand; PAM type: YTN; PAM sequence: TTT
ctaagtaaccacttcattct

SEQ ID NO: 382662 - DNA, 20 bp, Artificial Sequence
  Description of Artificial Sequence: Synthetic oligonucleotide
  Target: LAMA2; (+) strand; PAM type: YTN; PAM sequence: TTC
taagtaaccacttcattctt

SEQ ID NO: 382663 - DNA, 20 bp, Artificial Sequence
  Description of Artificial Sequence: Synthetic oligonucleotide
  Target: LAMA2; (+) strand; PAM type: YTN; PAM sequence: CTA
agtaaccacttcattcttct

SEQ ID NO: 382664 - DNA, 20 bp, Artificial Sequence
  Description of Artificial Sequence: Synthetic oligonucleotide
  Target: LAMA2; (+) strand; PAM type: YTN; PAM sequence: CTT
cattcttctccttccataca

SEQ ID NO: 382665 - DNA, 20 bp, Artificial Sequence
  Description of Artificial Sequence: Synthetic oligonucleotide
  Target: LAMA2; (+) strand; PAM type: YTN; PAM sequence: TTC
attcttctccttccatacaa

SEQ ID NO: 382666 - DNA, 20 bp, Artificial Sequence
  Description of Artificial Sequence: Synthetic oligonucleotide
  Target: LAMA2; (+) strand; PAM type: YTN; PAM sequence: TTC
ttctccttccatacaatgga

SEQ ID NO: 382667 - DNA, 20 bp, Artificial Sequence
  Description of Artificial Sequence: Synthetic oligonucleotide
  Target: LAMA2; (+) strand; PAM type: YTN; PAM sequence: CTT
ctccttccatacaatggaga

SEQ ID NO: 382668 - DNA, 20 bp, Artificial Sequence
  Description of Artificial Sequence: Synthetic oligonucleotide
  Target: LAMA2; (+) strand; PAM type: YTN; PAM sequence: TTC
tccttccatacaatggagag

SEQ ID NO: 382669 - DNA, 20 bp, Artificial Sequence
  Description of Artificial Sequence: Synthetic oligonucleotide
  Target: LAMA2; (+) strand; PAM type: YTN; PAM sequence: CTC
cttccatacaatggagagct

SEQ ID NO: 382670 - DNA, 20 bp, Artificial Sequence
  Description of Artificial Sequence: Synthetic oligonucleotide
  Target: LAMA2; (+) strand; PAM type: YTN; PAM sequence: CTT
ccatacaatggagagctgtc

SEQ ID NO: 382671 - DNA, 20 bp, Artificial Sequence
  Description of Artificial Sequence: Synthetic oligonucleotide
  Target: LAMA2; (+) strand; PAM type: YTN; PAM sequence: TTC
catacaatggagagctgtct

SEQ ID NO: 382672 - DNA, 20 bp, Artificial Sequence
  Description of Artificial Sequence: Synthetic oligonucleotide
  Target: LAMA2; (+) strand; PAM type: YTN; PAM sequence: CTG
tctatcccgtctataatttc

SEQ ID NO: 382673 - DNA, 20 bp, Artificial Sequence
  Description of Artificial Sequence: Synthetic oligonucleotide
  Target: LAMA2; (+) strand; PAM type: YTN; PAM sequence: CTA
tcccgtctataatttctctt

SEQ ID NO: 382674 - DNA, 20 bp, Artificial Sequence
  Description of Artificial Sequence: Synthetic oligonucleotide
  Target: LAMA2; (+) strand; PAM type: YTN; PAM sequence: CTA
taatttctcttcatccattc

SEQ ID NO: 382675 - DNA, 20 bp, Artificial Sequence
  Description of Artificial Sequence: Synthetic oligonucleotide
  Target: LAMA2; (+) strand; PAM type: YTN; PAM sequence: TTT
ctcttcatccattctccttt

SEQ ID NO: 382676 - DNA, 20 bp, Artificial Sequence
  Description of Artificial Sequence: Synthetic oligonucleotide
  Target: LAMA2; (+) strand; PAM type: YTN; PAM sequence: TTC
tcttcatccattctcctttg

SEQ ID NO: 382677 - DNA, 20 bp, Artificial Sequence
  Description of Artificial Sequence: Synthetic oligonucleotide
  Target: LAMA2; (+) strand; PAM type: YTN; PAM sequence: CTC
ttcatccattctcctttgaa

SEQ ID NO: 382678 - DNA, 20 bp, Artificial Sequence
  Description of Artificial Sequence: Synthetic oligonucleotide
  Target: LAMA2; (+) strand; PAM type: YTN; PAM sequence: CTT
catccattctcctttgaatt

SEQ ID NO: 382679 - DNA, 20 bp, Artificial Sequence
  Description of Artificial Sequence: Synthetic oligonucleotide
  Target: LAMA2; (+) strand; PAM type: YTN; PAM sequence: TTC
atccattctcctttgaatta

SEQ ID NO: 382680 - DNA, 20 bp, Artificial Sequence
  Description of Artificial Sequence: Synthetic oligonucleotide
  Target: LAMA2; (+) strand; PAM type: YTN; PAM sequence: TTC
tcctttgaattactaaaaac

SEQ ID NO: 382681 - DNA, 20 bp, Artificial Sequence
  Description of Artificial Sequence: Synthetic oligonucleotide
  Target: LAMA2; (+) strand; PAM type: YTN; PAM sequence: CTC
ctttgaattactaaaaacag

SEQ ID NO: 382682 - DNA, 20 bp, Artificial Sequence
  Description of Artificial Sequence: Synthetic oligonucleotide
  Target: LAMA2; (+) strand; PAM type: YTN; PAM sequence: CTT
tgaattactaaaaacaggct

SEQ ID NO: 382683 - DNA, 20 bp, Artificial Sequence
  Description of Artificial Sequence: Synthetic oligonucleotide
  Target: LAMA2; (+) strand; PAM type: YTN; PAM sequence: TTT
gaattactaaaaacaggcta

SEQ ID NO: 382684 - DNA, 20 bp, Artificial Sequence
  Description of Artificial Sequence: Synthetic oligonucleotide
  Target: LAMA2; (+) strand; PAM type: YTN; PAM sequence: TTG
aattactaaaaacaggctat

SEQ ID NO: 382685 - DNA, 20 bp, Artificial Sequence
  Description of Artificial Sequence: Synthetic oligonucleotide
  Target: LAMA2; (+) strand; PAM type: YTN; PAM sequence: TTA
ctaaaaacaggctatcacct

SEQ ID NO: 382686 - DNA, 20 bp, Artificial Sequence
  Description of Artificial Sequence: Synthetic oligonucleotide
  Target: LAMA2; (+) strand; PAM type: YTN; PAM sequence: CTA
aaaacaggctatcacctcct

SEQ ID NO: 382687 - DNA, 20 bp, Artificial Sequence
  Description of Artificial Sequence: Synthetic oligonucleotide
  Target: LAMA2; (+) strand; PAM type: YTN; PAM sequence: CTA
tcacctcctcttctatactg

SEQ ID NO: 382688 - DNA, 20 bp, Artificial Sequence
  Description of Artificial Sequence: Synthetic oligonucleotide
  Target: LAMA2; (+) strand; PAM type: YTN; PAM sequence: CTC
ctcttctatactggattcaa

SEQ ID NO: 382689 - DNA, 20 bp, Artificial Sequence
  Description of Artificial Sequence: Synthetic oligonucleotide
  Target: LAMA2; (+) strand; PAM type: YTN; PAM sequence: CTC
ttctatactggattcaatgg

SEQ ID NO: 382690 - DNA, 20 bp, Artificial Sequence
  Description of Artificial Sequence: Synthetic oligonucleotide
  Target: LAMA2; (+) strand; PAM type: YTN; PAM sequence: CTT
ctatactggattcaatggct

SEQ ID NO: 382691 - DNA, 20 bp, Artificial Sequence
  Description of Artificial Sequence: Synthetic oligonucleotide
  Target: LAMA2; (+) strand; PAM type: YTN; PAM sequence: TTC
tatactggattcaatggcta

SEQ ID NO: 382692 - DNA, 20 bp, Artificial Sequence
  Description of Artificial Sequence: Synthetic oligonucleotide
  Target: LAMA2; (+) strand; PAM type: YTN; PAM sequence: CTA
tactggattcaatggctaat

SEQ ID NO: 382693 - DNA, 20 bp, Artificial Sequence
  Description of Artificial Sequence: Synthetic oligonucleotide
  Target: LAMA2; (+) strand; PAM type: YTN; PAM sequence: CTG
gattcaatggctaatctaca

SEQ ID NO: 382694 - DNA, 20 bp, Artificial Sequence
  Description of Artificial Sequence: Synthetic oligonucleotide
  Target: LAMA2; (+) strand; PAM type: YTN; PAM sequence: TTC
aatggctaatctacagccac

SEQ ID NO: 382695 - DNA, 20 bp, Artificial Sequence
  Description of Artificial Sequence: Synthetic oligonucleotide
  Target: LAMA2; (+) strand; PAM type: YTN; PAM sequence: CTA
atctacagccaccagtgttc

SEQ ID NO: 382696 - DNA, 20 bp, Artificial Sequence
  Description of Artificial Sequence: Synthetic oligonucleotide
  Target: LAMA2; (+) strand; PAM type: YTN; PAM sequence: CTA
cagccaccagtgttcacctt

SEQ ID NO: 382697 - DNA, 20 bp, Artificial Sequence
  Description of Artificial Sequence: Synthetic oligonucleotide
  Target: LAMA2; (+) strand; PAM type: YTN; PAM sequence: TTC
accttactatatctaacagc

SEQ ID NO: 382698 - DNA, 20 bp, Artificial Sequence
  Description of Artificial Sequence: Synthetic oligonucleotide
  Target: LAMA2; (+) strand; PAM type: YTN; PAM sequence: CTT
actatatctaacagccatgt

SEQ ID NO: 382699 - DNA, 20 bp, Artificial Sequence
  Description of Artificial Sequence: Synthetic oligonucleotide
  Target: LAMA2; (+) strand; PAM type: YTN; PAM sequence: TTA
ctatatctaacagccatgtt

SEQ ID NO: 382700 - DNA, 20 bp, Artificial Sequence
  Description of Artificial Sequence: Synthetic oligonucleotide
  Target: LAMA2; (+) strand; PAM type: YTN; PAM sequence: CTA
tatctaacagccatgtttgc

SEQ ID NO: 382701 - DNA, 20 bp, Artificial Sequence
  Description of Artificial Sequence: Synthetic oligonucleotide
  Target: LAMA2; (+) strand; PAM type: YTN; PAM sequence: CTA
acagccatgtttgccactgt

SEQ ID NO: 382702 - DNA, 20 bp, Artificial Sequence
  Description of Artificial Sequence: Synthetic oligonucleotide
  Target: LAMA2; (+) strand; PAM type: YTN; PAM sequence: TTT
gccactgtgaatcaccccat

SEQ ID NO: 382703 - DNA, 20 bp, Artificial Sequence
  Description of Artificial Sequence: Synthetic oligonucleotide
  Target: LAMA2; (+) strand; PAM type: YTN; PAM sequence: TTG
ccactgtgaatcaccccatt

SEQ ID NO: 382704 - DNA, 20 bp, Artificial Sequence
  Description of Artificial Sequence: Synthetic oligonucleotide
  Target: LAMA2; (+) strand; PAM type: YTN; PAM sequence: CTG
tgaatcaccccattcttctt

SEQ ID NO: 382705 - DNA, 20 bp, Artificial Sequence
  Description of Artificial Sequence: Synthetic oligonucleotide
  Target: LAMA2; (+) strand; PAM type: YTN; PAM sequence: TTC
ttcttgaaaccctttgctca

SEQ ID NO: 382706 - DNA, 20 bp, Artificial Sequence
  Description of Artificial Sequence: Synthetic oligonucleotide
  Target: LAMA2; (+) strand; PAM type: YTN; PAM sequence: CTT
cttgaaaccctttgctcaat

SEQ ID NO: 382707 - DNA, 20 bp, Artificial Sequence
  Description of Artificial Sequence: Synthetic oligonucleotide
  Target: LAMA2; (+) strand; PAM type: YTN; PAM sequence: TTC
ttgaaaccctttgctcaatt

SEQ ID NO: 382708 - DNA, 20 bp, Artificial Sequence
  Description of Artificial Sequence: Synthetic oligonucleotide
  Target: LAMA2; (+) strand; PAM type: YTN; PAM sequence: CTT
gaaaccctttgctcaatttg

SEQ ID NO: 382709 - DNA, 20 bp, Artificial Sequence
  Description of Artificial Sequence: Synthetic oligonucleotide
  Target: LAMA2; (+) strand; PAM type: YTN; PAM sequence: TTG
aaaccctttgctcaatttgc

SEQ ID NO: 382710 - DNA, 20 bp, Artificial Sequence
  Description of Artificial Sequence: Synthetic oligonucleotide
  Target: LAMA2; (+) strand; PAM type: YTN; PAM sequence: CTT
tgctcaatttgctttccagc

SEQ ID NO: 382711 - DNA, 20 bp, Artificial Sequence
  Description of Artificial Sequence: Synthetic oligonucleotide
  Target: LAMA2; (+) strand; PAM type: YTN; PAM sequence: TTT
gctcaatttgctttccagcc

SEQ ID NO: 382712 - DNA, 20 bp, Artificial Sequence
  Description of Artificial Sequence: Synthetic oligonucleotide
  Target: LAMA2; (+) strand; PAM type: YTN; PAM sequence: TTG
ctcaatttgctttccagccc

SEQ ID NO: 382713 - DNA, 20 bp, Artificial Sequence
  Description of Artificial Sequence: Synthetic oligonucleotide
  Target: LAMA2; (+) strand; PAM type: YTN; PAM sequence: CTC
aatttgctttccagcccatg

SEQ ID NO: 382714 - DNA, 20 bp, Artificial Sequence
  Description of Artificial Sequence: Synthetic oligonucleotide
  Target: LAMA2; (+) strand; PAM type: YTN; PAM sequence: TTT
gctttccagcccatggcatt

SEQ ID NO: 382715 - DNA, 20 bp, Artificial Sequence
  Description of Artificial Sequence: Synthetic oligonucleotide
  Target: LAMA2; (+) strand; PAM type: YTN; PAM sequence: TTG
ctttccagcccatggcattc

SEQ ID NO: 382716 - DNA, 20 bp, Artificial Sequence
  Description of Artificial Sequence: Synthetic oligonucleotide
  Target: LAMA2; (+) strand; PAM type: YTN; PAM sequence: CTT
tccagcccatggcattctgg

SEQ ID NO: 382717 - DNA, 20 bp, Artificial Sequence
  Description of Artificial Sequence: Synthetic oligonucleotide
  Target: LAMA2; (+) strand; PAM type: YTN; PAM sequence: TTT
ccagcccatggcattctgga

SEQ ID NO: 382718 - DNA, 20 bp, Artificial Sequence
  Description of Artificial Sequence: Synthetic oligonucleotide
  Target: LAMA2; (+) strand; PAM type: YTN; PAM sequence: TTC
cagcccatggcattctggag

SEQ ID NO: 382719 - DNA, 20 bp, Artificial Sequence
  Description of Artificial Sequence: Synthetic oligonucleotide
  Target: LAMA2; (+) strand; PAM type: YTN; PAM sequence: TTC
tggagatgttcaaattccat

SEQ ID NO: 382720 - DNA, 20 bp, Artificial Sequence
  Description of Artificial Sequence: Synthetic oligonucleotide
  Target: LAMA2; (+) strand; PAM type: YTN; PAM sequence: CTG
gagatgttcaaattccatag

SEQ ID NO: 382721 - DNA, 20 bp, Artificial Sequence
  Description of Artificial Sequence: Synthetic oligonucleotide
  Target: LAMA2; (+) strand; PAM type: YTN; PAM sequence: TTC
aaattccatagtggctcctt

SEQ ID NO: 382722 - DNA, 20 bp, Artificial Sequence
  Description of Artificial Sequence: Synthetic oligonucleotide
  Target: LAMA2; (+) strand; PAM type: YTN; PAM sequence: TTC
catagtggctccttctcagc

SEQ ID NO: 382723 - DNA, 20 bp, Artificial Sequence
  Description of Artificial Sequence: Synthetic oligonucleotide
  Target: LAMA2; (+) strand; PAM type: YTN; PAM sequence: CTC
cttctcagctttcttcatta

SEQ ID NO: 382724 - DNA, 20 bp, Artificial Sequence
  Description of Artificial Sequence: Synthetic oligonucleotide
  Target: LAMA2; (+) strand; PAM type: YTN; PAM sequence: CTT
ctcagctttcttcattactc

SEQ ID NO: 382725 - DNA, 20 bp, Artificial Sequence
  Description of Artificial Sequence: Synthetic oligonucleotide
  Target: LAMA2; (+) strand; PAM type: YTN; PAM sequence: TTC
tcagctttcttcattactct

SEQ ID NO: 382726 - DNA, 20 bp, Artificial Sequence
  Description of Artificial Sequence: Synthetic oligonucleotide
  Target: LAMA2; (+) strand; PAM type: YTN; PAM sequence: CTC
agctttcttcattactctga

SEQ ID NO: 382727 - DNA, 20 bp, Artificial Sequence
  Description of Artificial Sequence: Synthetic oligonucleotide
  Target: LAMA2; (+) strand; PAM type: YTN; PAM sequence: CTT
tcttcattactctgaaatct

SEQ ID NO: 382728 - DNA, 20 bp, Artificial Sequence
  Description of Artificial Sequence: Synthetic oligonucleotide
  Target: LAMA2; (+) strand; PAM type: YTN; PAM sequence: TTT
cttcattactctgaaatcta

SEQ ID NO: 382729 - DNA, 20 bp, Artificial Sequence
  Description of Artificial Sequence: Synthetic oligonucleotide
  Target: LAMA2; (+) strand; PAM type: YTN; PAM sequence: TTC
ttcattactctgaaatctac

SEQ ID NO: 382730 - DNA, 20 bp, Artificial Sequence
  Description of Artificial Sequence: Synthetic oligonucleotide
  Target: LAMA2; (+) strand; PAM type: YTN; PAM sequence: CTT
cattactctgaaatctacat

SEQ ID NO: 382731 - DNA, 20 bp, Artificial Sequence
  Description of Artificial Sequence: Synthetic oligonucleotide
  Target: LAMA2; (+) strand; PAM type: YTN; PAM sequence: TTC
attactctgaaatctacata

SEQ ID NO: 382732 - DNA, 20 bp, Artificial Sequence
  Description of Artificial Sequence: Synthetic oligonucleotide
  Target: LAMA2; (+) strand; PAM type: YTN; PAM sequence: TTA
ctctgaaatctacatagtgg

SEQ ID NO: 382733 - DNA, 20 bp, Artificial Sequence
  Description of Artificial Sequence: Synthetic oligonucleotide
  Target: LAMA2; (+) strand; PAM type: YTN; PAM sequence: CTC
tgaaatctacatagtggtat

SEQ ID NO: 382734 - DNA, 20 bp, Artificial Sequence
  Description of Artificial Sequence: Synthetic oligonucleotide
  Target: LAMA2; (+) strand; PAM type: YTN; PAM sequence: CTG
aaatctacatagtggtattc

SEQ ID NO: 382735 - DNA, 20 bp, Artificial Sequence
  Description of Artificial Sequence: Synthetic oligonucleotide
  Target: LAMA2; (+) strand; PAM type: YTN; PAM sequence: CTA
catagtggtattcctgggac

SEQ ID NO: 382736 - DNA, 20 bp, Artificial Sequence
  Description of Artificial Sequence: Synthetic oligonucleotide
  Target: LAMA2; (+) strand; PAM type: YTN; PAM sequence: TTC
ctgggactcaatccttggag

SEQ ID NO: 382737 - DNA, 20 bp, Artificial Sequence
  Description of Artificial Sequence: Synthetic oligonucleotide
  Target: LAMA2; (+) strand; PAM type: YTN; PAM sequence: CTG
ggactcaatccttggagcaa

SEQ ID NO: 382738 - DNA, 20 bp, Artificial Sequence
  Description of Artificial Sequence: Synthetic oligonucleotide
  Target: LAMA2; (+) strand; PAM type: YTN; PAM sequence: CTC
aatccttggagcaatttgtt

SEQ ID NO: 382739 - DNA, 20 bp, Artificial Sequence
  Description of Artificial Sequence: Synthetic oligonucleotide
  Target: LAMA2; (+) strand; PAM type: YTN; PAM sequence: CTT
ggagcaatttgtttctctaa

SEQ ID NO: 382740 - DNA, 20 bp, Artificial Sequence
  Description of Artificial Sequence: Synthetic oligonucleotide
  Target: LAMA2; (+) strand; PAM type: YTN; PAM sequence: TTG
gagcaatttgtttctctaac

SEQ ID NO: 382741 - DNA, 20 bp, Artificial Sequence
  Description of Artificial Sequence: Synthetic oligonucleotide
  Target: LAMA2; (+) strand; PAM type: YTN; PAM sequence: TTT
gtttctctaactacattcat

SEQ ID NO: 382742 - DNA, 20 bp, Artificial Sequence
  Description of Artificial Sequence: Synthetic oligonucleotide
  Target: LAMA2; (+) strand; PAM type: YTN; PAM sequence: TTG
tttctctaactacattcatt

SEQ ID NO: 382743 - DNA, 20 bp, Artificial Sequence
  Description of Artificial Sequence: Synthetic oligonucleotide
  Target: LAMA2; (+) strand; PAM type: YTN; PAM sequence: TTT
ctctaactacattcattcag

SEQ ID NO: 382744 - DNA, 20 bp, Artificial Sequence
  Description of Artificial Sequence: Synthetic oligonucleotide
  Target: LAMA2; (+) strand; PAM type: YTN; PAM sequence: TTC
tctaactacattcattcaga

SEQ ID NO: 382745 - DNA, 20 bp, Artificial Sequence
  Description of Artificial Sequence: Synthetic oligonucleotide
  Target: LAMA2; (+) strand; PAM type: YTN; PAM sequence: CTC
taactacattcattcagatg

SEQ ID NO: 382746 - DNA, 20 bp, Artificial Sequence
  Description of Artificial Sequence: Synthetic oligonucleotide
  Target: LAMA2; (+) strand; PAM type: YTN; PAM sequence: CTA
actacattcattcagatggt

SEQ ID NO: 382747 - DNA, 20 bp, Artificial Sequence
  Description of Artificial Sequence: Synthetic oligonucleotide
  Target: LAMA2; (+) strand; PAM type: YTN; PAM sequence: CTA
cattcattcagatggtgatc

SEQ ID NO: 382748 - DNA, 20 bp, Artificial Sequence
  Description of Artificial Sequence: Synthetic oligonucleotide
  Target: LAMA2; (+) strand; PAM type: YTN; PAM sequence: TTC
attcagatggtgatcttacc

SEQ ID NO: 382749 - DNA, 20 bp, Artificial Sequence
  Description of Artificial Sequence: Synthetic oligonucleotide
  Target: LAMA2; (+) strand; PAM type: YTN; PAM sequence: TTC
agatggtgatcttacccagg

SEQ ID NO: 382750 - DNA, 20 bp, Artificial Sequence
  Description of Artificial Sequence: Synthetic oligonucleotide
  Target: LAMA2; (+) strand; PAM type: YTN; PAM sequence: CTT
acccaggcatgtggctttct

SEQ ID NO: 382751 - DNA, 20 bp, Artificial Sequence
  Description of Artificial Sequence: Synthetic oligonucleotide
  Target: LAMA2; (+) strand; PAM type: YTN; PAM sequence: TTA
cccaggcatgtggctttctg

SEQ ID NO: 382752 - DNA, 20 bp, Artificial Sequence
  Description of Artificial Sequence: Synthetic oligonucleotide
  Target: LAMA2; (+) strand; PAM type: YTN; PAM sequence: CTT
tctgtactgagatattttga

SEQ ID NO: 382753 - DNA, 20 bp, Artificial Sequence
  Description of Artificial Sequence: Synthetic oligonucleotide
  Target: LAMA2; (+) strand; PAM type: YTN; PAM sequence: TTT
ctgtactgagatattttgat

SEQ ID NO: 382754 - DNA, 20 bp, Artificial Sequence
  Description of Artificial Sequence: Synthetic oligonucleotide
  Target: LAMA2; (+) strand; PAM type: YTN; PAM sequence: TTC
tgtactgagatattttgata

SEQ ID NO: 382755 - DNA, 20 bp, Artificial Sequence
  Description of Artificial Sequence: Synthetic oligonucleotide
  Target: LAMA2; (+) strand; PAM type: YTN; PAM sequence: CTG
tactgagatattttgatatt

SEQ ID NO: 382756 - DNA, 20 bp, Artificial Sequence
  Description of Artificial Sequence: Synthetic oligonucleotide
  Target: LAMA2; (+) strand; PAM type: YTN; PAM sequence: CTG
agatattttgatattgacat

SEQ ID NO: 382757 - DNA, 20 bp, Artificial Sequence
  Description of Artificial Sequence: Synthetic oligonucleotide
  Target: LAMA2; (+) strand; PAM type: YTN; PAM sequence: TTT
tgatattgacatcccacagt

SEQ ID NO: 382758 - DNA, 20 bp, Artificial Sequence
  Description of Artificial Sequence: Synthetic oligonucleotide
  Target: LAMA2; (+) strand; PAM type: YTN; PAM sequence: TTT
gatattgacatcccacagta

SEQ ID NO: 382759 - DNA, 20 bp, Artificial Sequence
  Description of Artificial Sequence: Synthetic oligonucleotide
  Target: LAMA2; (+) strand; PAM type: YTN; PAM sequence: TTG
atattgacatcccacagtat

SEQ ID NO: 382760 - DNA, 20 bp, Artificial Sequence
  Description of Artificial Sequence: Synthetic oligonucleotide
  Target: LAMA2; (+) strand; PAM type: YTN; PAM sequence: TTG
acatcccacagtatttacta

SEQ ID NO: 382761 - DNA, 20 bp, Artificial Sequence
  Description of Artificial Sequence: Synthetic oligonucleotide
  Target: LAMA2; (+) strand; PAM type: YTN; PAM sequence: TTT
actattaagtttatgattta

SEQ ID NO: 382762 - DNA, 20 bp, Artificial Sequence
  Description of Artificial Sequence: Synthetic oligonucleotide
  Target: LAMA2; (+) strand; PAM type: YTN; PAM sequence: TTA
ctattaagtttatgatttaa

SEQ ID NO: 382763 - DNA, 20 bp, Artificial Sequence
  Description of Artificial Sequence: Synthetic oligonucleotide
  Target: LAMA2; (+) strand; PAM type: YTN; PAM sequence: CTA
ttaagtttatgatttaattt

SEQ ID NO: 382764 - DNA, 20 bp, Artificial Sequence
  Description of Artificial Sequence: Synthetic oligonucleotide
  Target: LAMA2; (+) strand; PAM type: YTN; PAM sequence: TTA
agtttatgatttaattttat

SEQ ID NO: 382765 - DNA, 20 bp, Artificial Sequence
  Description of Artificial Sequence: Synthetic oligonucleotide
  Target: LAMA2; (+) strand; PAM type: YTN; PAM sequence: TTT
atgatttaattttatatcca

SEQ ID NO: 382766 - DNA, 20 bp, Artificial Sequence
  Description of Artificial Sequence: Synthetic oligonucleotide
  Target: LAMA2; (+) strand; PAM type: YTN; PAM sequence: TTA
tgatttaattttatatccac

SEQ ID NO: 382767 - DNA, 20 bp, Artificial Sequence
  Description of Artificial Sequence: Synthetic oligonucleotide
  Target: LAMA2; (+) strand; PAM type: YTN; PAM sequence: TTT
aattttatatccactcatta

SEQ ID NO: 382768 - DNA, 20 bp, Artificial Sequence
  Description of Artificial Sequence: Synthetic oligonucleotide
  Target: LAMA2; (+) strand; PAM type: YTN; PAM sequence: TTA
attttatatccactcattac

SEQ ID NO: 382769 - DNA, 20 bp, Artificial Sequence
  Description of Artificial Sequence: Synthetic oligonucleotide
  Target: LAMA2; (+) strand; PAM type: YTN; PAM sequence: TTT
tatatccactcattactatg

SEQ ID NO: 382770 - DNA, 20 bp, Artificial Sequence
  Description of Artificial Sequence: Synthetic oligonucleotide
  Target: LAMA2; (+) strand; PAM type: YTN; PAM sequence: TTT
atatccactcattactatgg

SEQ ID NO: 382771 - DNA, 20 bp, Artificial Sequence
  Description of Artificial Sequence: Synthetic oligonucleotide
  Target: LAMA2; (+) strand; PAM type: YTN; PAM sequence: TTA
tatccactcattactatggt

SEQ ID NO: 382772 - DNA, 20 bp, Artificial Sequence
  Description of Artificial Sequence: Synthetic oligonucleotide
  Target: LAMA2; (+) strand; PAM type: YTN; PAM sequence: CTC
attactatggtgtggggagg

SEQ ID NO: 382773 - DNA, 20 bp, Artificial Sequence
  Description of Artificial Sequence: Synthetic oligonucleotide
  Target: LAMA2; (+) strand; PAM type: YTN; PAM sequence: TTA
ctatggtgtggggaggtaat

SEQ ID NO: 382774 - DNA, 20 bp, Artificial Sequence
  Description of Artificial Sequence: Synthetic oligonucleotide
  Target: LAMA2; (+) strand; PAM type: YTN; PAM sequence: CTA
tggtgtggggaggtaatttt

SEQ ID NO: 382775 - DNA, 20 bp, Artificial Sequence
  Description of Artificial Sequence: Synthetic oligonucleotide
  Target: LAMA2; (+) strand; PAM type: YTN; PAM sequence: TTT
ttctgcagatatgtattacc

SEQ ID NO: 382776 - DNA, 20 bp, Artificial Sequence
  Description of Artificial Sequence: Synthetic oligonucleotide
  Target: LAMA2; (+) strand; PAM type: YTN; PAM sequence: TTT
tctgcagatatgtattacca

SEQ ID NO: 382777 - DNA, 20 bp, Artificial Sequence
  Description of Artificial Sequence: Synthetic oligonucleotide
  Target: LAMA2; (+) strand; PAM type: YTN; PAM sequence: TTT
ctgcagatatgtattaccac

SEQ ID NO: 382778 - DNA, 20 bp, Artificial Sequence
  Description of Artificial Sequence: Synthetic oligonucleotide
  Target: LAMA2; (+) strand; PAM type: YTN; PAM sequence: TTC
tgcagatatgtattaccact

SEQ ID NO: 382779 - DNA, 20 bp, Artificial Sequence
  Description of Artificial Sequence: Synthetic oligonucleotide
  Target: LAMA2; (+) strand; PAM type: YTN; PAM sequence: CTG
cagatatgtattaccactgt

SEQ ID NO: 382780 - DNA, 20 bp, Artificial Sequence
  Description of Artificial Sequence: Synthetic oligonucleotide
  Target: LAMA2; (+) strand; PAM type: YTN; PAM sequence: TTA
ccactgtaaagaaacattta

SEQ ID NO: 382781 - DNA, 20 bp, Artificial Sequence
  Description of Artificial Sequence: Synthetic oligonucleotide
  Target: LAMA2; (+) strand; PAM type: YTN; PAM sequence: CTG
taaagaaacatttactgatt

SEQ ID NO: 382782 - DNA, 20 bp, Artificial Sequence
  Description of Artificial Sequence: Synthetic oligonucleotide
  Target: LAMA2; (+) strand; PAM type: YTN; PAM sequence: TTT
actgattaatatttcctttt

SEQ ID NO: 382783 - DNA, 20 bp, Artificial Sequence
  Description of Artificial Sequence: Synthetic oligonucleotide
  Target: LAMA2; (+) strand; PAM type: YTN; PAM sequence: TTA
ctgattaatatttccttttc

SEQ ID NO: 382784 - DNA, 20 bp, Artificial Sequence
  Description of Artificial Sequence: Synthetic oligonucleotide
  Target: LAMA2; (+) strand; PAM type: YTN; PAM sequence: CTG
attaatatttccttttcccc

SEQ ID NO: 382785 - DNA, 20 bp, Artificial Sequence
  Description of Artificial Sequence: Synthetic oligonucleotide
  Target: LAMA2; (+) strand; PAM type: YTN; PAM sequence: TTA
atatttccttttccccttga

SEQ ID NO: 382786 - DNA, 20 bp, Artificial Sequence
  Description of Artificial Sequence: Synthetic oligonucleotide
  Target: LAMA2; (+) strand; PAM type: YTN; PAM sequence: TTT
ccttttccccttgatacatt

SEQ ID NO: 382787 - DNA, 20 bp, Artificial Sequence
  Description of Artificial Sequence: Synthetic oligonucleotide
  Target: LAMA2; (+) strand; PAM type: YTN; PAM sequence: TTC
cttttccccttgatacatta

SEQ ID NO: 382788 - DNA, 20 bp, Artificial Sequence
  Description of Artificial Sequence: Synthetic oligonucleotide
  Target: LAMA2; (+) strand; PAM type: YTN; PAM sequence: CTT
ttccccttgatacattattg

SEQ ID NO: 382789 - DNA, 20 bp, Artificial Sequence
  Description of Artificial Sequence: Synthetic oligonucleotide
  Target: LAMA2; (+) strand; PAM type: YTN; PAM sequence: TTT
tccccttgatacattattgt

SEQ ID NO: 382790 - DNA, 20 bp, Artificial Sequence
  Description of Artificial Sequence: Synthetic oligonucleotide
  Target: LAMA2; (+) strand; PAM type: YTN; PAM sequence: TTT
ccccttgatacattattgta

SEQ ID NO: 382791 - DNA, 20 bp, Artificial Sequence
  Description of Artificial Sequence: Synthetic oligonucleotide
  Target: LAMA2; (+) strand; PAM type: YTN; PAM sequence: TTC
cccttgatacattattgtat

SEQ ID NO: 382792 - DNA, 20 bp, Artificial Sequence
  Description of Artificial Sequence: Synthetic oligonucleotide
  Target: LAMA2; (+) strand; PAM type: YTN; PAM sequence: CTT
gatacattattgtatctgaa

SEQ ID NO: 382793 - DNA, 20 bp, Artificial Sequence
  Description of Artificial Sequence: Synthetic oligonucleotide
  Target: LAMA2; (+) strand; PAM type: YTN; PAM sequence: TTG
atacattattgtatctgaac

SEQ ID NO: 382794 - DNA, 20 bp, Artificial Sequence
  Description of Artificial Sequence: Synthetic oligonucleotide
  Target: LAMA2; (+) strand; PAM type: YTN; PAM sequence: TTA
ttgtatctgaacatacacaa

SEQ ID NO: 382795 - DNA, 20 bp, Artificial Sequence
  Description of Artificial Sequence: Synthetic oligonucleotide
  Target: LAMA2; (+) strand; PAM type: YTN; PAM sequence: TTG
tatctgaacatacacaaatt

SEQ ID NO: 382796 - DNA, 20 bp, Artificial Sequence
  Description of Artificial Sequence: Synthetic oligonucleotide
  Target: LAMA2; (+) strand; PAM type: YTN; PAM sequence: CTG
aacatacacaaatttatttc

SEQ ID NO: 382797 - DNA, 20 bp, Artificial Sequence
  Description of Artificial Sequence: Synthetic oligonucleotide
  Target: LAMA2; (+) strand; PAM type: YTN; PAM sequence: TTT
atttcatccatattaagata

SEQ ID NO: 382798 - DNA, 20 bp, Artificial Sequence
  Description of Artificial Sequence: Synthetic oligonucleotide
  Target: LAMA2; (+) strand; PAM type: YTN; PAM sequence: TTA
tttcatccatattaagatat

SEQ ID NO: 382799 - DNA, 20 bp, Artificial Sequence
  Description of Artificial Sequence: Synthetic oligonucleotide
  Target: LAMA2; (+) strand; PAM type: YTN; PAM sequence: TTT
catccatattaagatatgtt

SEQ ID NO: 382800 - DNA, 20 bp, Artificial Sequence
  Description of Artificial Sequence: Synthetic oligonucleotide
  Target: LAMA2; (+) strand; PAM type: YTN; PAM sequence: TTC
atccatattaagatatgttt

SEQ ID NO: 382801 - DNA, 20 bp, Artificial Sequence
  Description of Artificial Sequence: Synthetic oligonucleotide
  Target: LAMA2; (+) strand; PAM type: YTN; PAM sequence: TTA
agatatgtttcagtataatc

SEQ ID NO: 382802 - DNA, 20 bp, Artificial Sequence
  Description of Artificial Sequence: Synthetic oligonucleotide
  Target: LAMA2; (+) strand; PAM type: YTN; PAM sequence: TTT
cagtataatccattttgttt

SEQ ID NO: 382803 - DNA, 20 bp, Artificial Sequence
  Description of Artificial Sequence: Synthetic oligonucleotide
  Target: LAMA2; (+) strand; PAM type: YTN; PAM sequence: TTC
agtataatccattttgtttt

SEQ ID NO: 382804 - DNA, 20 bp, Artificial Sequence
  Description of Artificial Sequence: Synthetic oligonucleotide
  Target: LAMA2; (+) strand; PAM type: YTN; PAM sequence: TTT
tgttttacttaccttttagc

SEQ ID NO: 382805 - DNA, 20 bp, Artificial Sequence
  Description of Artificial Sequence: Synthetic oligonucleotide
  Target: LAMA2; (+) strand; PAM type: YTN; PAM sequence: TTT
gttttacttaccttttagct

SEQ ID NO: 382806 - DNA, 20 bp, Artificial Sequence
  Description of Artificial Sequence: Synthetic oligonucleotide
  Target: LAMA2; (+) strand; PAM type: YTN; PAM sequence: TTG
ttttacttaccttttagctc

SEQ ID NO: 382807 - DNA, 20 bp, Artificial Sequence
  Description of Artificial Sequence: Synthetic oligonucleotide
  Target: LAMA2; (+) strand; PAM type: YTN; PAM sequence: TTT
tacttaccttttagctctta

SEQ ID NO: 382808 - DNA, 20 bp, Artificial Sequence
  Description of Artificial Sequence: Synthetic oligonucleotide
  Target: LAMA2; (+) strand; PAM type: YTN; PAM sequence: TTT
acttaccttttagctcttat

SEQ ID NO: 382809 - DNA, 20 bp, Artificial Sequence
  Description of Artificial Sequence: Synthetic oligonucleotide
  Target: LAMA2; (+) strand; PAM type: YTN; PAM sequence: TTA
cttaccttttagctcttatt

SEQ ID NO: 382810 - DNA, 20 bp, Artificial Sequence
  Description of Artificial Sequence: Synthetic oligonucleotide
  Target: LAMA2; (+) strand; PAM type: YTN; PAM sequence: CTT
accttttagctcttattaca

SEQ ID NO: 382811 - DNA, 20 bp, Artificial Sequence
  Description of Artificial Sequence: Synthetic oligonucleotide
  Target: LAMA2; (+) strand; PAM type: YTN; PAM sequence: TTA
ccttttagctcttattacaa

SEQ ID NO: 382812 - DNA, 20 bp, Artificial Sequence
  Description of Artificial Sequence: Synthetic oligonucleotide
  Target: LAMA2; (+) strand; PAM type: YTN; PAM sequence: CTT
ttagctcttattacaatgtt

SEQ ID NO: 382813 - DNA, 20 bp, Artificial Sequence
  Description of Artificial Sequence: Synthetic oligonucleotide
  Target: LAMA2; (+) strand; PAM type: YTN; PAM sequence: TTT
tagctcttattacaatgttc

SEQ ID NO: 382814 - DNA, 20 bp, Artificial Sequence
  Description of Artificial Sequence: Synthetic oligonucleotide
  Target: LAMA2; (+) strand; PAM type: YTN; PAM sequence: TTT
agctcttattacaatgttct

SEQ ID NO: 382815 - DNA, 20 bp, Artificial Sequence
  Description of Artificial Sequence: Synthetic oligonucleotide
  Target: LAMA2; (+) strand; PAM type: YTN; PAM sequence: TTA
gctcttattacaatgttctg

SEQ ID NO: 382816 - DNA, 20 bp, Artificial Sequence
  Description of Artificial Sequence: Synthetic oligonucleotide
  Target: LAMA2; (+) strand; PAM type: YTN; PAM sequence: CTC
ttattacaatgttctgctta

SEQ ID NO: 382817 - DNA, 20 bp, Artificial Sequence
  Description of Artificial Sequence: Synthetic oligonucleotide
  Target: LAMA2; (+) strand; PAM type: YTN; PAM sequence: CTT
attacaatgttctgcttacc

SEQ ID NO: 382818 - DNA, 20 bp, Artificial Sequence
  Description of Artificial Sequence: Synthetic oligonucleotide
  Target: LAMA2; (+) strand; PAM type: YTN; PAM sequence: TTA
ttacaatgttctgcttacct

SEQ ID NO: 382819 - DNA, 20 bp, Artificial Sequence
  Description of Artificial Sequence: Synthetic oligonucleotide
  Target: LAMA2; (+) strand; PAM type: YTN; PAM sequence: TTA
caatgttctgcttaccttca

SEQ ID NO: 382820 - DNA, 20 bp, Artificial Sequence
  Description of Artificial Sequence: Synthetic oligonucleotide
  Target: LAMA2; (+) strand; PAM type: YTN; PAM sequence: TTC
tgcttaccttcattttatgt

SEQ ID NO: 382821 - DNA, 20 bp, Artificial Sequence
  Description of Artificial Sequence: Synthetic oligonucleotide
  Target: LAMA2; (+) strand; PAM type: YTN; PAM sequence: CTG
cttaccttcattttatgtta

SEQ ID NO: 382822 - DNA, 20 bp, Artificial Sequence
  Description of Artificial Sequence: Synthetic oligonucleotide
  Target: LAMA2; (+) strand; PAM type: YTN; PAM sequence: CTT
accttcattttatgttaaca

SEQ ID NO: 382823 - DNA, 20 bp, Artificial Sequence
  Description of Artificial Sequence: Synthetic oligonucleotide
  Target: LAMA2; (+) strand; PAM type: YTN; PAM sequence: TTA
ccttcattttatgttaacat

SEQ ID NO: 382824 - DNA, 20 bp, Artificial Sequence
  Description of Artificial Sequence: Synthetic oligonucleotide
  Target: LAMA2; (+) strand; PAM type: YTN; PAM sequence: CTT
cattttatgttaacatatct

SEQ ID NO: 382825 - DNA, 20 bp, Artificial Sequence
  Description of Artificial Sequence: Synthetic oligonucleotide
  Target: LAMA2; (+) strand; PAM type: YTN; PAM sequence: TTC
attttatgttaacatatctg

SEQ ID NO: 382826 - DNA, 20 bp, Artificial Sequence
  Description of Artificial Sequence: Synthetic oligonucleotide
  Target: LAMA2; (+) strand; PAM type: YTN; PAM sequence: TTT
tatgttaacatatctgtaaa

SEQ ID NO: 382827 - DNA, 20 bp, Artificial Sequence
  Description of Artificial Sequence: Synthetic oligonucleotide
  Target: LAMA2; (+) strand; PAM type: YTN; PAM sequence: TTT
atgttaacatatctgtaaag

SEQ ID NO: 382828 - DNA, 20 bp, Artificial Sequence
  Description of Artificial Sequence: Synthetic oligonucleotide
  Target: LAMA2; (+) strand; PAM type: YTN; PAM sequence: TTA
tgttaacatatctgtaaagc

SEQ ID NO: 382829 - DNA, 20 bp, Artificial Sequence
  Description of Artificial Sequence: Synthetic oligonucleotide
  Target: LAMA2; (+) strand; PAM type: YTN; PAM sequence: TTA
acatatctgtaaagcaaggt

SEQ ID NO: 382830 - DNA, 20 bp, Artificial Sequence
  Description of Artificial Sequence: Synthetic oligonucleotide
  Target: LAMA2; (+) strand; PAM type: YTN; PAM sequence: CTG
taaagcaaggtcctttattt

SEQ ID NO: 382831 - DNA, 20 bp, Artificial Sequence
  Description of Artificial Sequence: Synthetic oligonucleotide
  Target: LAMA2; (+) strand; PAM type: YTN; PAM sequence: CTT
tatttctcttctcttctaat

SEQ ID NO: 382832 - DNA, 20 bp, Artificial Sequence
  Description of Artificial Sequence: Synthetic oligonucleotide
  Target: LAMA2; (+) strand; PAM type: YTN; PAM sequence: TTT
atttctcttctcttctaatt

SEQ ID NO: 382833 - DNA, 20 bp, Artificial Sequence
  Description of Artificial Sequence: Synthetic oligonucleotide
  Target: LAMA2; (+) strand; PAM type: YTN; PAM sequence: TTA
tttctcttctcttctaatta

SEQ ID NO: 382834 - DNA, 20 bp, Artificial Sequence
  Description of Artificial Sequence: Synthetic oligonucleotide
  Target: LAMA2; (+) strand; PAM type: YTN; PAM sequence: TTT
ctcttctcttctaattaact

SEQ ID NO: 382835 - DNA, 20 bp, Artificial Sequence
  Description of Artificial Sequence: Synthetic oligonucleotide
  Target: LAMA2; (+) strand; PAM type: YTN; PAM sequence: TTC
tcttctcttctaattaacta

SEQ ID NO: 382836 - DNA, 20 bp, Artificial Sequence
  Description of Artificial Sequence: Synthetic oligonucleotide
  Target: LAMA2; (+) strand; PAM type: YTN; PAM sequence: CTC
ttctcttctaattaactaga

SEQ ID NO: 382837 - DNA, 20 bp, Artificial Sequence
  Description of Artificial Sequence: Synthetic oligonucleotide
  Target: LAMA2; (+) strand; PAM type: YTN; PAM sequence: CTT
ctcttctaattaactagatg

SEQ ID NO: 382838 - DNA, 20 bp, Artificial Sequence
  Description of Artificial Sequence: Synthetic oligonucleotide
  Target: LAMA2; (+) strand; PAM type: YTN; PAM sequence: TTC
tcttctaattaactagatgc

SEQ ID NO: 382839 - DNA, 20 bp, Artificial Sequence
  Description of Artificial Sequence: Synthetic oligonucleotide
  Target: LAMA2; (+) strand; PAM type: YTN; PAM sequence: CTC
ttctaattaactagatgctc

SEQ ID NO: 382840 - DNA, 20 bp, Artificial Sequence
  Description of Artificial Sequence: Synthetic oligonucleotide
  Target: LAMA2; (+) strand; PAM type: YTN; PAM sequence: CTT
ctaattaactagatgctctt

SEQ ID NO: 382841 - DNA, 20 bp, Artificial Sequence
  Description of Artificial Sequence: Synthetic oligonucleotide
  Target: LAMA2; (+) strand; PAM type: YTN; PAM sequence: TTC
taattaactagatgctctta

SEQ ID NO: 382842 - DNA, 20 bp, Artificial Sequence
  Description of Artificial Sequence: Synthetic oligonucleotide
  Target: LAMA2; (+) strand; PAM type: YTN; PAM sequence: CTA
attaactagatgctcttaca

SEQ ID NO: 382843 - DNA, 20 bp, Artificial Sequence
  Description of Artificial Sequence: Synthetic oligonucleotide
  Target: LAMA2; (+) strand; PAM type: YTN; PAM sequence: TTA
actagatgctcttacatatt

SEQ ID NO: 382844 - DNA, 20 bp, Artificial Sequence
  Description of Artificial Sequence: Synthetic oligonucleotide
  Target: LAMA2; (+) strand; PAM type: YTN; PAM sequence: CTA
gatgctcttacatattcttc

SEQ ID NO: 382845 - DNA, 20 bp, Artificial Sequence
  Description of Artificial Sequence: Synthetic oligonucleotide
  Target: LAMA2; (+) strand; PAM type: YTN; PAM sequence: CTC
ttacatattcttccagctga

SEQ ID NO: 382846 - DNA, 20 bp, Artificial Sequence
  Description of Artificial Sequence: Synthetic oligonucleotide
  Target: LAMA2; (+) strand; PAM type: YTN; PAM sequence: CTT
acatattcttccagctgaca

SEQ ID NO: 382847 - DNA, 20 bp, Artificial Sequence
  Description of Artificial Sequence: Synthetic oligonucleotide
  Target: LAMA2; (+) strand; PAM type: YTN; PAM sequence: TTA
catattcttccagctgacac

SEQ ID NO: 382848 - DNA, 20 bp, Artificial Sequence
  Description of Artificial Sequence: Synthetic oligonucleotide
  Target: LAMA2; (+) strand; PAM type: YTN; PAM sequence: TTC
ttccagctgacacttttatg

SEQ ID NO: 382849 - DNA, 20 bp, Artificial Sequence
  Description of Artificial Sequence: Synthetic oligonucleotide
  Target: LAMA2; (+) strand; PAM type: YTN; PAM sequence: CTT
ccagctgacacttttatgca

SEQ ID NO: 382850 - DNA, 20 bp, Artificial Sequence
  Description of Artificial Sequence: Synthetic oligonucleotide
  Target: LAMA2; (+) strand; PAM type: YTN; PAM sequence: TTC
cagctgacacttttatgcac

SEQ ID NO: 382851 - DNA, 20 bp, Artificial Sequence
  Description of Artificial Sequence: Synthetic oligonucleotide
  Target: LAMA2; (+) strand; PAM type: YTN; PAM sequence: CTG
acacttttatgcactatttt

SEQ ID NO: 382852 - DNA, 20 bp, Artificial Sequence
  Description of Artificial Sequence: Synthetic oligonucleotide
  Target: LAMA2; (+) strand; PAM type: YTN; PAM sequence: CTT
ttatgcactattttaatctc

SEQ ID NO: 382853 - DNA, 20 bp, Artificial Sequence
  Description of Artificial Sequence: Synthetic oligonucleotide
  Target: LAMA2; (+) strand; PAM type: YTN; PAM sequence: TTT
tatgcactattttaatctct

SEQ ID NO: 382854 - DNA, 20 bp, Artificial Sequence
  Description of Artificial Sequence: Synthetic oligonucleotide
  Target: LAMA2; (+) strand; PAM type: YTN; PAM sequence: TTT
atgcactattttaatctctt

SEQ ID NO: 382855 - DNA, 20 bp, Artificial Sequence
  Description of Artificial Sequence: Synthetic oligonucleotide
  Target: LAMA2; (+) strand; PAM type: YTN; PAM sequence: TTA
tgcactattttaatctcttc

SEQ ID NO: 382856 - DNA, 20 bp, Artificial Sequence
  Description of Artificial Sequence: Synthetic oligonucleotide
  Target: LAMA2; (+) strand; PAM type: YTN; PAM sequence: CTA
ttttaatctcttccacaaat

SEQ ID NO: 382857 - DNA, 20 bp, Artificial Sequence
  Description of Artificial Sequence: Synthetic oligonucleotide
  Target: LAMA2; (+) strand; PAM type: YTN; PAM sequence: TTT
taatctcttccacaaatttt

SEQ ID NO: 382858 - DNA, 20 bp, Artificial Sequence
  Description of Artificial Sequence: Synthetic oligonucleotide
  Target: LAMA2; (+) strand; PAM type: YTN; PAM sequence: TTT
aatctcttccacaaatttta

SEQ ID NO: 382859 - DNA, 20 bp, Artificial Sequence
  Description of Artificial Sequence: Synthetic oligonucleotide
  Target: LAMA2; (+) strand; PAM type: YTN; PAM sequence: TTA
atctcttccacaaattttaa

SEQ ID NO: 382860 - DNA, 20 bp, Artificial Sequence
  Description of Artificial Sequence: Synthetic oligonucleotide
  Target: LAMA2; (+) strand; PAM type: YTN; PAM sequence: CTC
ttccacaaattttaattaca

SEQ ID NO: 382861 - DNA, 20 bp, Artificial Sequence
  Description of Artificial Sequence: Synthetic oligonucleotide
  Target: LAMA2; (+) strand; PAM type: YTN; PAM sequence: CTT
ccacaaattttaattacaat

SEQ ID NO: 382862 - DNA, 20 bp, Artificial Sequence
  Description of Artificial Sequence: Synthetic oligonucleotide
  Target: LAMA2; (+) strand; PAM type: YTN; PAM sequence: TTC
cacaaattttaattacaatc

SEQ ID NO: 382863 - DNA, 20 bp, Artificial Sequence
  Description of Artificial Sequence: Synthetic oligonucleotide
  Target: LAMA2; (+) strand; PAM type: YTN; PAM sequence: TTT
taattacaatcaaaattact

SEQ ID NO: 382864 - DNA, 20 bp, Artificial Sequence
  Description of Artificial Sequence: Synthetic oligonucleotide
  Target: LAMA2; (+) strand; PAM type: YTN; PAM sequence: TTT
aattacaatcaaaattactg

SEQ ID NO: 382865 - DNA, 20 bp, Artificial Sequence
  Description of Artificial Sequence: Synthetic oligonucleotide
  Target: LAMA2; (+) strand; PAM type: YTN; PAM sequence: TTA
attacaatcaaaattactgg

SEQ ID NO: 382866 - DNA, 20 bp, Artificial Sequence
  Description of Artificial Sequence: Synthetic oligonucleotide
  Target: LAMA2; (+) strand; PAM type: YTN; PAM sequence: TTA
caatcaaaattactggaatt

SEQ ID NO: 382867 - DNA, 20 bp, Artificial Sequence
  Description of Artificial Sequence: Synthetic oligonucleotide
  Target: LAMA2; (+) strand; PAM type: YTN; PAM sequence: TTA
ctggaattttgattgtaatt

SEQ ID NO: 382868 - DNA, 20 bp, Artificial Sequence
  Description of Artificial Sequence: Synthetic oligonucleotide
  Target: LAMA2; (+) strand; PAM type: YTN; PAM sequence: CTG
gaattttgattgtaattaaa

SEQ ID NO: 382869 - DNA, 20 bp, Artificial Sequence
  Description of Artificial Sequence: Synthetic oligonucleotide
  Target: LAMA2; (+) strand; PAM type: YTN; PAM sequence: TTT
tgattgtaattaaattagcc

SEQ ID NO: 382870 - DNA, 20 bp, Artificial Sequence
  Description of Artificial Sequence: Synthetic oligonucleotide
  Target: LAMA2; (+) strand; PAM type: YTN; PAM sequence: TTT
gattgtaattaaattagcct

SEQ ID NO: 382871 - DNA, 20 bp, Artificial Sequence
  Description of Artificial Sequence: Synthetic oligonucleotide
  Target: LAMA2; (+) strand; PAM type: YTN; PAM sequence: TTG
attgtaattaaattagccta

SEQ ID NO: 382872 - DNA, 20 bp, Artificial Sequence
  Description of Artificial Sequence: Synthetic oligonucleotide
  Target: LAMA2; (+) strand; PAM type: YTN; PAM sequence: TTG
taattaaattagcctatttg

SEQ ID NO: 382873 - DNA, 20 bp, Artificial Sequence
  Description of Artificial Sequence: Synthetic oligonucleotide
  Target: LAMA2; (+) strand; PAM type: YTN; PAM sequence: TTA
aattagcctatttgtaaaga

SEQ ID NO: 382874 - DNA, 20 bp, Artificial Sequence
  Description of Artificial Sequence: Synthetic oligonucleotide
  Target: LAMA2; (+) strand; PAM type: YTN; PAM sequence: TTA
gcctatttgtaaagaattgc

SEQ ID NO: 382875 - DNA, 20 bp, Artificial Sequence
  Description of Artificial Sequence: Synthetic oligonucleotide
  Target: LAMA2; (+) strand; PAM type: YTN; PAM sequence: CTA
tttgtaaagaattgctatat

SEQ ID NO: 382876 - DNA, 20 bp, Artificial Sequence
  Description of Artificial Sequence: Synthetic oligonucleotide
  Target: LAMA2; (+) strand; PAM type: YTN; PAM sequence: TTT
gtaaagaattgctatattta

SEQ ID NO: 382877 - DNA, 20 bp, Artificial Sequence
  Description of Artificial Sequence: Synthetic oligonucleotide
  Target: LAMA2; (+) strand; PAM type: YTN; PAM sequence: TTG
taaagaattgctatatttac

SEQ ID NO: 382878 - DNA, 20 bp, Artificial Sequence
  Description of Artificial Sequence: Synthetic oligonucleotide
  Target: LAMA2; (+) strand; PAM type: YTN; PAM sequence: TTG
ctatatttacactagtcact

SEQ ID NO: 382879 - DNA, 20 bp, Artificial Sequence
  Description of Artificial Sequence: Synthetic oligonucleotide
  Target: LAMA2; (+) strand; PAM type: YTN; PAM sequence: CTA
tatttacactagtcactctt

SEQ ID NO: 382880 - DNA, 20 bp, Artificial Sequence
  Description of Artificial Sequence: Synthetic oligonucleotide
  Target: LAMA2; (+) strand; PAM type: YTN; PAM sequence: TTT
acactagtcactcttctctc

SEQ ID NO: 382881 - DNA, 20 bp, Artificial Sequence
  Description of Artificial Sequence: Synthetic oligonucleotide
  Target: LAMA2; (+) strand; PAM type: YTN; PAM sequence: TTA
cactagtcactcttctctct

SEQ ID NO: 382882 - DNA, 20 bp, Artificial Sequence
  Description of Artificial Sequence: Synthetic oligonucleotide
  Target: LAMA2; (+) strand; PAM type: YTN; PAM sequence: CTA
gtcactcttctctcttcaga

SEQ ID NO: 382883 - DNA, 20 bp, Artificial Sequence
  Description of Artificial Sequence: Synthetic oligonucleotide
  Target: LAMA2; (+) strand; PAM type: YTN; PAM sequence: CTC
ttctctcttcagatatttta

SEQ ID NO: 382884 - DNA, 20 bp, Artificial Sequence
  Description of Artificial Sequence: Synthetic oligonucleotide
  Target: LAMA2; (+) strand; PAM type: YTN; PAM sequence: CTT
ctctcttcagatattttatg

SEQ ID NO: 382885 - DNA, 20 bp, Artificial Sequence
  Description of Artificial Sequence: Synthetic oligonucleotide
  Target: LAMA2; (+) strand; PAM type: YTN; PAM sequence: TTC
tctcttcagatattttatgt

SEQ ID NO: 382886 - DNA, 20 bp, Artificial Sequence
  Description of Artificial Sequence: Synthetic oligonucleotide
  Target: LAMA2; (+) strand; PAM type: YTN; PAM sequence: CTC
tcttcagatattttatgtct

SEQ ID NO: 382887 - DNA, 20 bp, Artificial Sequence
  Description of Artificial Sequence: Synthetic oligonucleotide
  Target: LAMA2; (+) strand; PAM type: YTN; PAM sequence: CTC
ttcagatattttatgtctta

SEQ ID NO: 382888 - DNA, 20 bp, Artificial Sequence
  Description of Artificial Sequence: Synthetic oligonucleotide
  Target: LAMA2; (+) strand; PAM type: YTN; PAM sequence: CTT
cagatattttatgtcttaca

SEQ ID NO: 382889 - DNA, 20 bp, Artificial Sequence
  Description of Artificial Sequence: Synthetic oligonucleotide
  Target: LAMA2; (+) strand; PAM type: YTN; PAM sequence: TTC
agatattttatgtcttacag

SEQ ID NO: 382890 - DNA, 20 bp, Artificial Sequence
  Description of Artificial Sequence: Synthetic oligonucleotide
  Target: LAMA2; (+) strand; PAM type: YTN; PAM sequence: TTT
tatgtcttacagtaaactgt

SEQ ID NO: 382891 - DNA, 20 bp, Artificial Sequence
  Description of Artificial Sequence: Synthetic oligonucleotide
  Target: LAMA2; (+) strand; PAM type: YTN; PAM sequence: TTT
atgtcttacagtaaactgtt

SEQ ID NO: 382892 - DNA, 20 bp, Artificial Sequence
  Description of Artificial Sequence: Synthetic oligonucleotide
  Target: LAMA2; (+) strand; PAM type: YTN; PAM sequence: TTA
tgtcttacagtaaactgttt

SEQ ID NO: 382893 - DNA, 20 bp, Artificial Sequence
  Description of Artificial Sequence: Synthetic oligonucleotide
  Target: LAMA2; (+) strand; PAM type: YTN; PAM sequence: CTT
acagtaaactgttttaaggt

SEQ ID NO: 382894 - DNA, 20 bp, Artificial Sequence
  Description of Artificial Sequence: Synthetic oligonucleotide
  Target: LAMA2; (+) strand; PAM type: YTN; PAM sequence: TTA
cagtaaactgttttaaggtt

SEQ ID NO: 382895 - DNA, 20 bp, Artificial Sequence
  Description of Artificial Sequence: Synthetic oligonucleotide
  Target: LAMA2; (+) strand; PAM type: YTN; PAM sequence: CTG
ttttaaggttgtctatatca

SEQ ID NO: 382896 - DNA, 20 bp, Artificial Sequence
  Description of Artificial Sequence: Synthetic oligonucleotide
  Target: LAMA2; (+) strand; PAM type: YTN; PAM sequence: TTT
taaggttgtctatatcaagc

SEQ ID NO: 382897 - DNA, 20 bp, Artificial Sequence
  Description of Artificial Sequence: Synthetic oligonucleotide
  Target: LAMA2; (+) strand; PAM type: YTN; PAM sequence: TTT
aaggttgtctatatcaagca

SEQ ID NO: 382898 - DNA, 20 bp, Artificial Sequence
  Description of Artificial Sequence: Synthetic oligonucleotide
  Target: LAMA2; (+) strand; PAM type: YTN; PAM sequence: TTA
aggttgtctatatcaagcac

SEQ ID NO: 382899 - DNA, 20 bp, Artificial Sequence
  Description of Artificial Sequence: Synthetic oligonucleotide
  Target: LAMA2; (+) strand; PAM type: YTN; PAM sequence: TTG
tctatatcaagcacgcattt

SEQ ID NO: 382900 - DNA, 20 bp, Artificial Sequence
  Description of Artificial Sequence: Synthetic oligonucleotide
  Target: LAMA2; (+) strand; PAM type: YTN; PAM sequence: CTA
tatcaagcacgcatttctca

SEQ ID NO: 382901 - DNA, 20 bp, Artificial Sequence
  Description of Artificial Sequence: Synthetic oligonucleotide
  Target: LAMA2; (+) strand; PAM type: YTN; PAM sequence: TTT
ctcatataaaaattctttct

SEQ ID NO: 382902 - DNA, 20 bp, Artificial Sequence
  Description of Artificial Sequence: Synthetic oligonucleotide
  Target: LAMA2; (+) strand; PAM type: YTN; PAM sequence: TTC
tcatataaaaattctttcta

SEQ ID NO: 382903 - DNA, 20 bp, Artificial Sequence
  Description of Artificial Sequence: Synthetic oligonucleotide
  Target: LAMA2; (+) strand; PAM type: YTN; PAM sequence: CTC
atataaaaattctttctatg

SEQ ID NO: 382904 - DNA, 20 bp, Artificial Sequence
  Description of Artificial Sequence: Synthetic oligonucleotide
  Target: LAMA2; (+) strand; PAM type: YTN; PAM sequence: TTC
tttctatgtatcttacattt

SEQ ID NO: 382905 - DNA, 20 bp, Artificial Sequence
  Description of Artificial Sequence: Synthetic oligonucleotide
  Target: LAMA2; (+) strand; PAM type: YTN; PAM sequence: CTT
tctatgtatcttacattttc

SEQ ID NO: 382906 - DNA, 20 bp, Artificial Sequence
  Description of Artificial Sequence: Synthetic oligonucleotide
  Target: LAMA2; (+) strand; PAM type: YTN; PAM sequence: TTT
ctatgtatcttacattttca

SEQ ID NO: 382907 - DNA, 20 bp, Artificial Sequence
  Description of Artificial Sequence: Synthetic oligonucleotide
  Target: LAMA2; (+) strand; PAM type: YTN; PAM sequence: TTC
tatgtatcttacattttcat

SEQ ID NO: 382908 - DNA, 20 bp, Artificial Sequence
  Description of Artificial Sequence: Synthetic oligonucleotide
  Target: LAMA2; (+) strand; PAM type: YTN; PAM sequence: CTA
tgtatcttacattttcattt

SEQ ID NO: 382909 - DNA, 20 bp, Artificial Sequence
  Description of Artificial Sequence: Synthetic oligonucleotide
  Target: LAMA2; (+) strand; PAM type: YTN; PAM sequence: CTT
acattttcattttaatggta

SEQ ID NO: 382910 - DNA, 20 bp, Artificial Sequence
  Description of Artificial Sequence: Synthetic oligonucleotide
  Target: LAMA2; (+) strand; PAM type: YTN; PAM sequence: TTA
cattttcattttaatggtag

SEQ ID NO: 382911 - DNA, 20 bp, Artificial Sequence
  Description of Artificial Sequence: Synthetic oligonucleotide
  Target: LAMA2; (+) strand; PAM type: YTN; PAM sequence: TTT
tcattttaatggtagtaaac

SEQ ID NO: 382912 - DNA, 20 bp, Artificial Sequence
  Description of Artificial Sequence: Synthetic oligonucleotide
  Target: LAMA2; (+) strand; PAM type: YTN; PAM sequence: TTT
cattttaatggtagtaaaca

SEQ ID NO: 382913 - DNA, 20 bp, Artificial Sequence
  Description of Artificial Sequence: Synthetic oligonucleotide
  Target: LAMA2; (+) strand; PAM type: YTN; PAM sequence: TTC
attttaatggtagtaaacat

SEQ ID NO: 382914 - DNA, 20 bp, Artificial Sequence
  Description of Artificial Sequence: Synthetic oligonucleotide
  Target: LAMA2; (+) strand; PAM type: YTN; PAM sequence: TTT
taatggtagtaaacattacc

SEQ ID NO: 382915 - DNA, 20 bp, Artificial Sequence
  Description of Artificial Sequence: Synthetic oligonucleotide
  Target: LAMA2; (+) strand; PAM type: YTN; PAM sequence: TTT
aatggtagtaaacattacct

SEQ ID NO: 382916 - DNA, 20 bp, Artificial Sequence
  Description of Artificial Sequence: Synthetic oligonucleotide
  Target: LAMA2; (+) strand; PAM type: YTN; PAM sequence: TTA
atggtagtaaacattacctg

SEQ ID NO: 382917 - DNA, 20 bp, Artificial Sequence
  Description of Artificial Sequence: Synthetic oligonucleotide
  Target: LAMA2; (+) strand; PAM type: YTN; PAM sequence: TTA
cctgttttgtttcaacatag

SEQ ID NO: 382918 - DNA, 20 bp, Artificial Sequence
  Description of Artificial Sequence: Synthetic oligonucleotide
  Target: LAMA2; (+) strand; PAM type: YTN; PAM sequence: CTG
ttttgtttcaacatagtaaa

SEQ ID NO: 382919 - DNA, 20 bp, Artificial Sequence
  Description of Artificial Sequence: Synthetic oligonucleotide
  Target: LAMA2; (+) strand; PAM type: YTN; PAM sequence: TTT
tgtttcaacatagtaaatgt

SEQ ID NO: 382920 - DNA, 20 bp, Artificial Sequence
  Description of Artificial Sequence: Synthetic oligonucleotide
  Target: LAMA2; (+) strand; PAM type: YTN; PAM sequence: TTT
gtttcaacatagtaaatgta

SEQ ID NO: 382921 - DNA, 20 bp, Artificial Sequence
  Description of Artificial Sequence: Synthetic oligonucleotide
  Target: LAMA2; (+) strand; PAM type: YTN; PAM sequence: TTG
tttcaacatagtaaatgtac

SEQ ID NO: 382922 - DNA, 20 bp, Artificial Sequence
  Description of Artificial Sequence: Synthetic oligonucleotide
  Target: LAMA2; (+) strand; PAM type: YTN; PAM sequence: TTT
caacatagtaaatgtactaa

SEQ ID NO: 382923 - DNA, 20 bp, Artificial Sequence
  Description of Artificial Sequence: Synthetic oligonucleotide
  Target: LAMA2; (+) strand; PAM type: YTN; PAM sequence: TTC
aacatagtaaatgtactaac

SEQ ID NO: 382924 - DNA, 20 bp, Artificial Sequence
  Description of Artificial Sequence: Synthetic oligonucleotide
  Target: LAMA2; (+) strand; PAM type: YTN; PAM sequence: CTA
actggtcattattggtaaac

SEQ ID NO: 382925 - DNA, 20 bp, Artificial Sequence
  Description of Artificial Sequence: Synthetic oligonucleotide
  Target: LAMA2; (+) strand; PAM type: YTN; PAM sequence: CTG
gtcattattggtaaacctta

SEQ ID NO: 382926 - DNA, 20 bp, Artificial Sequence
  Description of Artificial Sequence: Synthetic oligonucleotide
  Target: LAMA2; (+) strand; PAM type: YTN; PAM sequence: TTA
ttggtaaaccttaactatta

SEQ ID NO: 382927 - DNA, 20 bp, Artificial Sequence
  Description of Artificial Sequence: Synthetic oligonucleotide
  Target: LAMA2; (+) strand; PAM type: YTN; PAM sequence: TTG
gtaaaccttaactattagaa

SEQ ID NO: 382928 - DNA, 20 bp, Artificial Sequence
  Description of Artificial Sequence: Synthetic oligonucleotide
  Target: LAMA2; (+) strand; PAM type: YTN; PAM sequence: CTT
aactattagaataggtgttt

SEQ ID NO: 382929 - DNA, 20 bp, Artificial Sequence
  Description of Artificial Sequence: Synthetic oligonucleotide
  Target: LAMA2; (+) strand; PAM type: YTN; PAM sequence: TTA
actattagaataggtgtttt

SEQ ID NO: 382930 - DNA, 20 bp, Artificial Sequence
  Description of Artificial Sequence: Synthetic oligonucleotide
  Target: LAMA2; (+) strand; PAM type: YTN; PAM sequence: CTA
ttagaataggtgtttttaca

SEQ ID NO: 382931 - DNA, 20 bp, Artificial Sequence
  Description of Artificial Sequence: Synthetic oligonucleotide
  Target: LAMA2; (+) strand; PAM type: YTN; PAM sequence: TTA
gaataggtgtttttacatgt

SEQ ID NO: 382932 - DNA, 20 bp, Artificial Sequence
  Description of Artificial Sequence: Synthetic oligonucleotide
  Target: LAMA2; (+) strand; PAM type: YTN; PAM sequence: TTT
ttacatgtatttgatatcca

SEQ ID NO: 382933 - DNA, 20 bp, Artificial Sequence
  Description of Artificial Sequence: Synthetic oligonucleotide
  Target: LAMA2; (+) strand; PAM type: YTN; PAM sequence: TTT
tacatgtatttgatatccaa

SEQ ID NO: 382934 - DNA, 20 bp, Artificial Sequence
  Description of Artificial Sequence: Synthetic oligonucleotide
  Target: LAMA2; (+) strand; PAM type: YTN; PAM sequence: TTT
acatgtatttgatatccaat

SEQ ID NO: 382935 - DNA, 20 bp, Artificial Sequence
  Description of Artificial Sequence: Synthetic oligonucleotide
  Target: LAMA2; (+) strand; PAM type: YTN; PAM sequence: TTA
catgtatttgatatccaata

SEQ ID NO: 382936 - DNA, 20 bp, Artificial Sequence
  Description of Artificial Sequence: Synthetic oligonucleotide
  Target: LAMA2; (+) strand; PAM type: YTN; PAM sequence: TTT
gatatccaataacttttatt

SEQ ID NO: 382937 - DNA, 20 bp, Artificial Sequence
  Description of Artificial Sequence: Synthetic oligonucleotide
  Target: LAMA2; (+) strand; PAM type: YTN; PAM sequence: TTG
atatccaataacttttattt

SEQ ID NO: 382938 - DNA, 20 bp, Artificial Sequence
  Description of Artificial Sequence: Synthetic oligonucleotide
  Target: LAMA2; (+) strand; PAM type: YTN; PAM sequence: CTT
ttattttagttctagaagtt

SEQ ID NO: 382939 - DNA, 20 bp, Artificial Sequence
  Description of Artificial Sequence: Synthetic oligonucleotide
  Target: LAMA2; (+) strand; PAM type: YTN; PAM sequence: TTT
tattttagttctagaagttt

SEQ ID NO: 382940 - DNA, 20 bp, Artificial Sequence
  Description of Artificial Sequence: Synthetic oligonucleotide
  Target: LAMA2; (+) strand; PAM type: YTN; PAM sequence: TTT
attttagttctagaagttta

SEQ ID NO: 382941 - DNA, 20 bp, Artificial Sequence
  Description of Artificial Sequence: Synthetic oligonucleotide
  Target: LAMA2; (+) strand; PAM type: YTN; PAM sequence: TTA
ttttagttctagaagtttat

SEQ ID NO: 382942 - DNA, 20 bp, Artificial Sequence
  Description of Artificial Sequence: Synthetic oligonucleotide
  Target: LAMA2; (+) strand; PAM type: YTN; PAM sequence: TTT
tagttctagaagtttatcag

SEQ ID NO: 382943 - DNA, 20 bp, Artificial Sequence
  Description of Artificial Sequence: Synthetic oligonucleotide
  Target: LAMA2; (+) strand; PAM type: YTN; PAM sequence: TTT
agttctagaagtttatcagt

SEQ ID NO: 382944 - DNA, 20 bp, Artificial Sequence
  Description of Artificial Sequence: Synthetic oligonucleotide
  Target: LAMA2; (+) strand; PAM type: YTN; PAM sequence: TTA
gttctagaagtttatcagtt

SEQ ID NO: 382945 - DNA, 20 bp, Artificial Sequence
  Description of Artificial Sequence: Synthetic oligonucleotide
  Target: LAMA2; (+) strand; PAM type: YTN; PAM sequence: TTC
tagaagtttatcagttgatt

SEQ ID NO: 382946 - DNA, 20 bp, Artificial Sequence
  Description of Artificial Sequence: Synthetic oligonucleotide
  Target: LAMA2; (+) strand; PAM type: YTN; PAM sequence: CTA
gaagtttatcagttgattca

SEQ ID NO: 382947 - DNA, 20 bp, Artificial Sequence
  Description of Artificial Sequence: Synthetic oligonucleotide
  Target: LAMA2; (+) strand; PAM type: YTN; PAM sequence: TTT
atcagttgattcagttattg

SEQ ID NO: 382948 - DNA, 20 bp, Artificial Sequence
  Description of Artificial Sequence: Synthetic oligonucleotide
  Target: LAMA2; (+) strand; PAM type: YTN; PAM sequence: TTA
tcagttgattcagttattgt

SEQ ID NO: 382949 - DNA, 20 bp, Artificial Sequence
  Description of Artificial Sequence: Synthetic oligonucleotide
  Target: LAMA2; (+) strand; PAM type: YTN; PAM sequence: TTG
attcagttattgttaagttt

SEQ ID NO: 382950 - DNA, 20 bp, Artificial Sequence
  Description of Artificial Sequence: Synthetic oligonucleotide
  Target: LAMA2; (+) strand; PAM type: YTN; PAM sequence: TTC
agttattgttaagtttacca

SEQ ID NO: 382951 - DNA, 20 bp, Artificial Sequence
  Description of Artificial Sequence: Synthetic oligonucleotide
  Target: LAMA2; (+) strand; PAM type: YTN; PAM sequence: TTA
ttgttaagtttaccattttt

SEQ ID NO: 382952 - DNA, 20 bp, Artificial Sequence
  Description of Artificial Sequence: Synthetic oligonucleotide
  Target: LAMA2; (+) strand; PAM type: YTN; PAM sequence: TTG
ttaagtttaccatttttttt

SEQ ID NO: 382953 - DNA, 20 bp, Artificial Sequence
  Description of Artificial Sequence: Synthetic oligonucleotide
  Target: LAMA2; (+) strand; PAM type: YTN; PAM sequence: TTA
agtttaccattttttttttt

SEQ ID NO: 382954 - DNA, 20 bp, Artificial Sequence
  Description of Artificial Sequence: Synthetic oligonucleotide
  Target: LAMA2; (+) strand; PAM type: YTN; PAM sequence: TTT
accatttttttttttttttt

SEQ ID NO: 382955 - DNA, 20 bp, Artificial Sequence
  Description of Artificial Sequence: Synthetic oligonucleotide
  Target: LAMA2; (+) strand; PAM type: YTN; PAM sequence: TTA
ccattttttttttttttttt

SEQ ID NO: 382956 - DNA, 20 bp, Artificial Sequence
  Description of Artificial Sequence: Synthetic oligonucleotide
  Target: LAMA2; (+) strand; PAM type: YTN; PAM sequence: TTT
tttttttttttttttttttt

SEQ ID NO: 382957 - DNA, 20 bp, Artificial Sequence
  Description of Artificial Sequence: Synthetic oligonucleotide
  Target: LAMA2; (+) strand; PAM type: YTN; PAM sequence: TTT
tttttttttttttttttttt

SEQ ID NO: 382958 - DNA, 20 bp, Artificial Sequence
  Description of Artificial Sequence: Synthetic oligonucleotide
  Target: LAMA2; (+) strand; PAM type: YTN; PAM sequence: TTT
tttttttttttttttttttt

SEQ ID NO: 382959 - DNA, 20 bp, Artificial Sequence
  Description of Artificial Sequence: Synthetic oligonucleotide
  Target: LAMA2; (+) strand; PAM type: YTN; PAM sequence: TTT
tttttttttttttttttttt

SEQ ID NO: 382960 - DNA, 20 bp, Artificial Sequence
  Description of Artificial Sequence: Synthetic oligonucleotide
  Target: LAMA2; (+) strand; PAM type: YTN; PAM sequence: TTT
tttttttttttttttttttt

SEQ ID NO: 382961 - DNA, 20 bp, Artificial Sequence
  Description of Artificial Sequence: Synthetic oligonucleotide
  Target: LAMA2; (+) strand; PAM type: YTN; PAM sequence: TTT
tttttttttttttttttttg

SEQ ID NO: 382962 - DNA, 20 bp, Artificial Sequence
  Description of Artificial Sequence: Synthetic oligonucleotide
  Target: LAMA2; (+) strand; PAM type: YTN; PAM sequence: TTT
ttttttttttttttttttga

SEQ ID NO: 382963 - DNA, 20 bp, Artificial Sequence
  Description of Artificial Sequence: Synthetic oligonucleotide
  Target: LAMA2; (+) strand; PAM type: YTN; PAM sequence: TTT
tttttttttttttttttgag

SEQ ID NO: 382964 - DNA, 20 bp, Artificial Sequence
  Description of Artificial Sequence: Synthetic oligonucleotide
  Target: LAMA2; (+) strand; PAM type: YTN; PAM sequence: TTT
ttttttttttttttttgaga

SEQ ID NO: 382965 - DNA, 20 bp, Artificial Sequence
  Description of Artificial Sequence: Synthetic oligonucleotide
  Target: LAMA2; (+) strand; PAM type: YTN; PAM sequence: TTT
tttttttttttttttgagag

SEQ ID NO: 382966 - DNA, 20 bp, Artificial Sequence
  Description of Artificial Sequence: Synthetic oligonucleotide
  Target: LAMA2; (+) strand; PAM type: YTN; PAM sequence: TTT
ttttttttttttttgagagg

SEQ ID NO: 382967 - DNA, 20 bp, Artificial Sequence
  Description of Artificial Sequence: Synthetic oligonucleotide
  Target: LAMA2; (+) strand; PAM type: YTN; PAM sequence: TTT
tttttttttttttgagaggg

SEQ ID NO: 382968 - DNA, 20 bp, Artificial Sequence
  Description of Artificial Sequence: Synthetic oligonucleotide
  Target: LAMA2; (+) strand; PAM type: YTN; PAM sequence: TTT
ttttttttttttgagaggga

SEQ ID NO: 382969 - DNA, 20 bp, Artificial Sequence
  Description of Artificial Sequence: Synthetic oligonucleotide
  Target: LAMA2; (+) strand; PAM type: YTN; PAM sequence: TTT
tttttttttttgagagggag

SEQ ID NO: 382970 - DNA, 20 bp, Artificial Sequence
  Description of Artificial Sequence: Synthetic oligonucleotide
  Target: LAMA2; (+) strand; PAM type: YTN; PAM sequence: TTT
ttttttttttgagagggagt

SEQ ID NO: 382971 - DNA, 20 bp, Artificial Sequence
  Description of Artificial Sequence: Synthetic oligonucleotide
  Target: LAMA2; (+) strand; PAM type: YTN; PAM sequence: TTT
tttttttttgagagggagtc

SEQ ID NO: 382972 - DNA, 20 bp, Artificial Sequence
  Description of Artificial Sequence: Synthetic oligonucleotide
  Target: LAMA2; (+) strand; PAM type: YTN; PAM sequence: TTT
ttttttttgagagggagtct

SEQ ID NO: 382973 - DNA, 20 bp, Artificial Sequence
  Description of Artificial Sequence: Synthetic oligonucleotide
  Target: LAMA2; (+) strand; PAM type: YTN; PAM sequence: TTT
tttttttgagagggagtctt

SEQ ID NO: 382974 - DNA, 20 bp, Artificial Sequence
  Description of Artificial Sequence: Synthetic oligonucleotide
  Target: LAMA2; (+) strand; PAM type: YTN; PAM sequence: TTT
ttttttgagagggagtcttg

SEQ ID NO: 382975 - DNA, 20 bp, Artificial Sequence
  Description of Artificial Sequence: Synthetic oligonucleotide
  Target: LAMA2; (+) strand; PAM type: YTN; PAM sequence: TTT
tttttgagagggagtcttgc

SEQ ID NO: 382976 - DNA, 20 bp, Artificial Sequence
  Description of Artificial Sequence: Synthetic oligonucleotide
  Target: LAMA2; (+) strand; PAM type: YTN; PAM sequence: TTT
ttttgagagggagtcttgct

SEQ ID NO: 382977 - DNA, 20 bp, Artificial Sequence
  Description of Artificial Sequence: Synthetic oligonucleotide
  Target: LAMA2; (+) strand; PAM type: YTN; PAM sequence: TTT
tttgagagggagtcttgctc

SEQ ID NO: 382978 - DNA, 20 bp, Artificial Sequence
  Description of Artificial Sequence: Synthetic oligonucleotide
  Target: LAMA2; (+) strand; PAM type: YTN; PAM sequence: TTT
ttgagagggagtcttgctct

SEQ ID NO: 382979 - DNA, 20 bp, Artificial Sequence
  Description of Artificial Sequence: Synthetic oligonucleotide
  Target: LAMA2; (+) strand; PAM type: YTN; PAM sequence: TTT
tgagagggagtcttgctctg

SEQ ID NO: 382980 - DNA, 20 bp, Artificial Sequence
  Description of Artificial Sequence: Synthetic oligonucleotide
  Target: LAMA2; (+) strand; PAM type: YTN; PAM sequence: TTT
gagagggagtcttgctctgt

SEQ ID NO: 382981 - DNA, 20 bp, Artificial Sequence
  Description of Artificial Sequence: Synthetic oligonucleotide
  Target: LAMA2; (+) strand; PAM type: YTN; PAM sequence: TTG
agagggagtcttgctctgtc

SEQ ID NO: 382982 - DNA, 20 bp, Artificial Sequence
  Description of Artificial Sequence: Synthetic oligonucleotide
  Target: LAMA2; (+) strand; PAM type: YTN; PAM sequence: CTT
gctctgtcacccaggctaga

SEQ ID NO: 382983 - DNA, 20 bp, Artificial Sequence
  Description of Artificial Sequence: Synthetic oligonucleotide
  Target: LAMA2; (+) strand; PAM type: YTN; PAM sequence: TTG
ctctgtcacccaggctagag

SEQ ID NO: 382984 - DNA, 20 bp, Artificial Sequence
  Description of Artificial Sequence: Synthetic oligonucleotide
  Target: LAMA2; (+) strand; PAM type: YTN; PAM sequence: CTC
tgtcacccaggctagagggc

SEQ ID NO: 382985 - DNA, 20 bp, Artificial Sequence
  Description of Artificial Sequence: Synthetic oligonucleotide
  Target: LAMA2; (+) strand; PAM type: YTN; PAM sequence: CTG
tcacccaggctagagggcag

SEQ ID NO: 382986 - DNA, 20 bp, Artificial Sequence
  Description of Artificial Sequence: Synthetic oligonucleotide
  Target: LAMA2; (+) strand; PAM type: YTN; PAM sequence: CTA
gagggcagtggtgctatcat

SEQ ID NO: 382987 - DNA, 20 bp, Artificial Sequence
  Description of Artificial Sequence: Synthetic oligonucleotide
  Target: LAMA2; (+) strand; PAM type: YTN; PAM sequence: CTA
tcatggctcactgcaacctc

SEQ ID NO: 382988 - DNA, 20 bp, Artificial Sequence
  Description of Artificial Sequence: Synthetic oligonucleotide
  Target: LAMA2; (+) strand; PAM type: YTN; PAM sequence: CTC
actgcaacctccacctccca

SEQ ID NO: 382989 - DNA, 20 bp, Artificial Sequence
  Description of Artificial Sequence: Synthetic oligonucleotide
  Target: LAMA2; (+) strand; PAM type: YTN; PAM sequence: CTG
caacctccacctcccaggtt

SEQ ID NO: 382990 - DNA, 20 bp, Artificial Sequence
  Description of Artificial Sequence: Synthetic oligonucleotide
  Target: LAMA2; (+) strand; PAM type: YTN; PAM sequence: CTC
cacctcccaggttcaagcga

SEQ ID NO: 382991 - DNA, 20 bp, Artificial Sequence
  Description of Artificial Sequence: Synthetic oligonucleotide
  Target: LAMA2; (+) strand; PAM type: YTN; PAM sequence: CTC
ccaggttcaagcgattttcc

SEQ ID NO: 382992 - DNA, 20 bp, Artificial Sequence
  Description of Artificial Sequence: Synthetic oligonucleotide
  Target: LAMA2; (+) strand; PAM type: YTN; PAM sequence: TTC
aagcgattttcctgcctcag

SEQ ID NO: 382993 - DNA, 20 bp, Artificial Sequence
  Description of Artificial Sequence: Synthetic oligonucleotide
  Target: LAMA2; (+) strand; PAM type: YTN; PAM sequence: TTT
tcctgcctcagcctcctgag

SEQ ID NO: 382994 - DNA, 20 bp, Artificial Sequence
  Description of Artificial Sequence: Synthetic oligonucleotide
  Target: LAMA2; (+) strand; PAM type: YTN; PAM sequence: TTT
cctgcctcagcctcctgagt

SEQ ID NO: 382995 - DNA, 20 bp, Artificial Sequence
  Description of Artificial Sequence: Synthetic oligonucleotide
  Target: LAMA2; (+) strand; PAM type: YTN; PAM sequence: TTC
ctgcctcagcctcctgagta

SEQ ID NO: 382996 - DNA, 20 bp, Artificial Sequence
  Description of Artificial Sequence: Synthetic oligonucleotide
  Target: LAMA2; (+) strand; PAM type: YTN; PAM sequence: CTG
cctcagcctcctgagtagct

SEQ ID NO: 382997 - DNA, 20 bp, Artificial Sequence
  Description of Artificial Sequence: Synthetic oligonucleotide
  Target: LAMA2; (+) strand; PAM type: YTN; PAM sequence: CTC
agcctcctgagtagctggga

SEQ ID NO: 382998 - DNA, 20 bp, Artificial Sequence
  Description of Artificial Sequence: Synthetic oligonucleotide
  Target: LAMA2; (+) strand; PAM type: YTN; PAM sequence: CTC
ctgagtagctgggattacag

SEQ ID NO: 382999 - DNA, 20 bp, Artificial Sequence
  Description of Artificial Sequence: Synthetic oligonucleotide
  Target: LAMA2; (+) strand; PAM type: YTN; PAM sequence: CTG
agtagctgggattacaggca

SEQ ID NO: 383000 - DNA, 20 bp, Artificial Sequence
  Description of Artificial Sequence: Synthetic oligonucleotide
  Target: LAMA2; (+) strand; PAM type: YTN; PAM sequence: CTG
ggattacaggcacctgccac

SEQ ID NO: 383001 - DNA, 20 bp, Artificial Sequence
  Description of Artificial Sequence: Synthetic oligonucleotide
  Target: LAMA2; (+) strand; PAM type: YTN; PAM sequence: TTA
caggcacctgccaccataac

SEQ ID NO: 383002 - DNA, 20 bp, Artificial Sequence
  Description of Artificial Sequence: Synthetic oligonucleotide
  Target: LAMA2; (+) strand; PAM type: YTN; PAM sequence: CTG
ccaccataactggctaattt

SEQ ID NO: 383003 - DNA, 20 bp, Artificial Sequence
  Description of Artificial Sequence: Synthetic oligonucleotide
  Target: LAMA2; (+) strand; PAM type: YTN; PAM sequence: CTG
gctaatttttgcattttagt

SEQ ID NO: 383004 - DNA, 20 bp, Artificial Sequence
  Description of Artificial Sequence: Synthetic oligonucleotide
  Target: LAMA2; (+) strand; PAM type: YTN; PAM sequence: CTA
atttttgcattttagtagag

SEQ ID NO: 383005 - DNA, 20 bp, Artificial Sequence
  Description of Artificial Sequence: Synthetic oligonucleotide
  Target: LAMA2; (+) strand; PAM type: YTN; PAM sequence: TTT
ttgcattttagtagagatgg

SEQ ID NO: 383006 - DNA, 20 bp, Artificial Sequence
  Description of Artificial Sequence: Synthetic oligonucleotide
  Target: LAMA2; (+) strand; PAM type: YTN; PAM sequence: TTT
tgcattttagtagagatggg

SEQ ID NO: 383007 - DNA, 20 bp, Artificial Sequence
  Description of Artificial Sequence: Synthetic oligonucleotide
  Target: LAMA2; (+) strand; PAM type: YTN; PAM sequence: TTT
gcattttagtagagatgggg

SEQ ID NO: 383008 - DNA, 20 bp, Artificial Sequence
  Description of Artificial Sequence: Synthetic oligonucleotide
  Target: LAMA2; (+) strand; PAM type: YTN; PAM sequence: TTG
cattttagtagagatggggt

SEQ ID NO: 383009 - DNA, 20 bp, Artificial Sequence
  Description of Artificial Sequence: Synthetic oligonucleotide
  Target: LAMA2; (+) strand; PAM type: YTN; PAM sequence: TTT
tagtagagatggggtttcac

SEQ ID NO: 383010 - DNA, 20 bp, Artificial Sequence
  Description of Artificial Sequence: Synthetic oligonucleotide
  Target: LAMA2; (+) strand; PAM type: YTN; PAM sequence: TTT
agtagagatggggtttcacc

SEQ ID NO: 383011 - DNA, 20 bp, Artificial Sequence
  Description of Artificial Sequence: Synthetic oligonucleotide
  Target: LAMA2; (+) strand; PAM type: YTN; PAM sequence: TTA
gtagagatggggtttcacca

SEQ ID NO: 383012 - DNA, 20 bp, Artificial Sequence
  Description of Artificial Sequence: Synthetic oligonucleotide
  Target: LAMA2; (+) strand; PAM type: YTN; PAM sequence: TTT
caccattttagccaggctga

SEQ ID NO: 383013 - DNA, 20 bp, Artificial Sequence
  Description of Artificial Sequence: Synthetic oligonucleotide
  Target: LAMA2; (+) strand; PAM type: YTN; PAM sequence: TTC
accattttagccaggctgat

SEQ ID NO: 383014 - DNA, 20 bp, Artificial Sequence
  Description of Artificial Sequence: Synthetic oligonucleotide
  Target: LAMA2; (+) strand; PAM type: YTN; PAM sequence: TTT
tagccaggctgatttcaaac

SEQ ID NO: 383015 - DNA, 20 bp, Artificial Sequence
  Description of Artificial Sequence: Synthetic oligonucleotide
  Target: LAMA2; (+) strand; PAM type: YTN; PAM sequence: TTT
agccaggctgatttcaaact

SEQ ID NO: 383016 - DNA, 20 bp, Artificial Sequence
  Description of Artificial Sequence: Synthetic oligonucleotide
  Target: LAMA2; (+) strand; PAM type: YTN; PAM sequence: TTA
gccaggctgatttcaaactc

SEQ ID NO: 383017 - DNA, 20 bp, Artificial Sequence
  Description of Artificial Sequence: Synthetic oligonucleotide
  Target: LAMA2; (+) strand; PAM type: YTN; PAM sequence: CTG
atttcaaactcctgacctca

SEQ ID NO: 383018 - DNA, 20 bp, Artificial Sequence
  Description of Artificial Sequence: Synthetic oligonucleotide
  Target: LAMA2; (+) strand; PAM type: YTN; PAM sequence: TTT
caaactcctgacctcaagtg

SEQ ID NO: 383019 - DNA, 20 bp, Artificial Sequence
  Description of Artificial Sequence: Synthetic oligonucleotide
  Target: LAMA2; (+) strand; PAM type: YTN; PAM sequence: TTC
aaactcctgacctcaagtga

SEQ ID NO: 383020 - DNA, 20 bp, Artificial Sequence
  Description of Artificial Sequence: Synthetic oligonucleotide
  Target: LAMA2; (+) strand; PAM type: YTN; PAM sequence: CTC
ctgacctcaagtgatctgcc

SEQ ID NO: 383021 - DNA, 20 bp, Artificial Sequence
  Description of Artificial Sequence: Synthetic oligonucleotide
  Target: LAMA2; (+) strand; PAM type: YTN; PAM sequence: CTG
acctcaagtgatctgcctgc

SEQ ID NO: 383022 - DNA, 20 bp, Artificial Sequence
  Description of Artificial Sequence: Synthetic oligonucleotide
  Target: LAMA2; (+) strand; PAM type: YTN; PAM sequence: CTC
aagtgatctgcctgcctcgg

SEQ ID NO: 383023 - DNA, 20 bp, Artificial Sequence
  Description of Artificial Sequence: Synthetic oligonucleotide
  Target: LAMA2; (+) strand; PAM type: YTN; PAM sequence: CTG
cctgcctcggcctcccaaag

SEQ ID NO: 383024 - DNA, 20 bp, Artificial Sequence
  Description of Artificial Sequence: Synthetic oligonucleotide
  Target: LAMA2; (+) strand; PAM type: YTN; PAM sequence: CTG
cctcggcctcccaaagttca

SEQ ID NO: 383025 - DNA, 20 bp, Artificial Sequence
  Description of Artificial Sequence: Synthetic oligonucleotide
  Target: LAMA2; (+) strand; PAM type: YTN; PAM sequence: CTC
ggcctcccaaagttcaggga

SEQ ID NO: 383026 - DNA, 20 bp, Artificial Sequence
  Description of Artificial Sequence: Synthetic oligonucleotide
  Target: LAMA2; (+) strand; PAM type: YTN; PAM sequence: CTC
ccaaagttcagggattacag

SEQ ID NO: 383027 - DNA, 20 bp, Artificial Sequence
  Description of Artificial Sequence: Synthetic oligonucleotide
  Target: LAMA2; (+) strand; PAM type: YTN; PAM sequence: TTC
agggattacaggcatgaacc

SEQ ID NO: 383028 - DNA, 20 bp, Artificial Sequence
  Description of Artificial Sequence: Synthetic oligonucleotide
  Target: LAMA2; (+) strand; PAM type: YTN; PAM sequence: TTA
caggcatgaaccaccaaacc

SEQ ID NO: 383029 - DNA, 20 bp, Artificial Sequence
  Description of Artificial Sequence: Synthetic oligonucleotide
  Target: LAMA2; (+) strand; PAM type: YTN; PAM sequence: CTG
gcctataatactattatttg

SEQ ID NO: 383030 - DNA, 20 bp, Artificial Sequence
  Description of Artificial Sequence: Synthetic oligonucleotide
  Target: LAMA2; (+) strand; PAM type: YTN; PAM sequence: CTA
taatactattatttgcaaat

SEQ ID NO: 383031 - DNA, 20 bp, Artificial Sequence
  Description of Artificial Sequence: Synthetic oligonucleotide
  Target: LAMA2; (+) strand; PAM type: YTN; PAM sequence: CTA
ttatttgcaaatattataat

SEQ ID NO: 383032 - DNA, 20 bp, Artificial Sequence
  Description of Artificial Sequence: Synthetic oligonucleotide
  Target: LAMA2; (+) strand; PAM type: YTN; PAM sequence: TTA
tttgcaaatattataattgt

SEQ ID NO: 383033 - DNA, 20 bp, Artificial Sequence
  Description of Artificial Sequence: Synthetic oligonucleotide
  Target: LAMA2; (+) strand; PAM type: YTN; PAM sequence: TTT
gcaaatattataattgtgct

SEQ ID NO: 383034 - DNA, 20 bp, Artificial Sequence
  Description of Artificial Sequence: Synthetic oligonucleotide
  Target: LAMA2; (+) strand; PAM type: YTN; PAM sequence: TTG
caaatattataattgtgctt

SEQ ID NO: 383035 - DNA, 20 bp, Artificial Sequence
  Description of Artificial Sequence: Synthetic oligonucleotide
  Target: LAMA2; (+) strand; PAM type: YTN; PAM sequence: TTA
taattgtgctttcacttgtc

SEQ ID NO: 383036 - DNA, 20 bp, Artificial Sequence
  Description of Artificial Sequence: Synthetic oligonucleotide
  Target: LAMA2; (+) strand; PAM type: YTN; PAM sequence: TTG
tgctttcacttgtcaaaagc

SEQ ID NO: 383037 - DNA, 20 bp, Artificial Sequence
  Description of Artificial Sequence: Synthetic oligonucleotide
  Target: LAMA2; (+) strand; PAM type: YTN; PAM sequence: CTT
tcacttgtcaaaagctatat

SEQ ID NO: 383038 - DNA, 20 bp, Artificial Sequence
  Description of Artificial Sequence: Synthetic oligonucleotide
  Target: LAMA2; (+) strand; PAM type: YTN; PAM sequence: TTT
cacttgtcaaaagctatatc

SEQ ID NO: 383039 - DNA, 20 bp, Artificial Sequence
  Description of Artificial Sequence: Synthetic oligonucleotide
  Target: LAMA2; (+) strand; PAM type: YTN; PAM sequence: TTC
acttgtcaaaagctatatct

SEQ ID NO: 383040 - DNA, 20 bp, Artificial Sequence
  Description of Artificial Sequence: Synthetic oligonucleotide
  Target: LAMA2; (+) strand; PAM type: YTN; PAM sequence: CTT
gtcaaaagctatatctgtta

SEQ ID NO: 383041 - DNA, 20 bp, Artificial Sequence
  Description of Artificial Sequence: Synthetic oligonucleotide
  Target: LAMA2; (+) strand; PAM type: YTN; PAM sequence: TTG
tcaaaagctatatctgttat

SEQ ID NO: 383042 - DNA, 20 bp, Artificial Sequence
  Description of Artificial Sequence: Synthetic oligonucleotide
  Target: LAMA2; (+) strand; PAM type: YTN; PAM sequence: CTA
tatctgttataataataatt

SEQ ID NO: 383043 - DNA, 20 bp, Artificial Sequence
  Description of Artificial Sequence: Synthetic oligonucleotide
  Target: LAMA2; (+) strand; PAM type: YTN; PAM sequence: CTG
ttataataataatttcatgt

SEQ ID NO: 383044 - DNA, 20 bp, Artificial Sequence
  Description of Artificial Sequence: Synthetic oligonucleotide
  Target: LAMA2; (+) strand; PAM type: YTN; PAM sequence: TTA
taataataatttcatgtttt

SEQ ID NO: 383045 - DNA, 20 bp, Artificial Sequence
  Description of Artificial Sequence: Synthetic oligonucleotide
  Target: LAMA2; (+) strand; PAM type: YTN; PAM sequence: TTT
catgtttttaaattgtctcc

SEQ ID NO: 383046 - DNA, 20 bp, Artificial Sequence
  Description of Artificial Sequence: Synthetic oligonucleotide
  Target: LAMA2; (+) strand; PAM type: YTN; PAM sequence: TTC
atgtttttaaattgtctccc

SEQ ID NO: 383047 - DNA, 20 bp, Artificial Sequence
  Description of Artificial Sequence: Synthetic oligonucleotide
  Target: LAMA2; (+) strand; PAM type: YTN; PAM sequence: TTT
ttaaattgtctcccaaaata

SEQ ID NO: 383048 - DNA, 20 bp, Artificial Sequence
  Description of Artificial Sequence: Synthetic oligonucleotide
  Target: LAMA2; (+) strand; PAM type: YTN; PAM sequence: TTT
taaattgtctcccaaaataa

SEQ ID NO: 383049 - DNA, 20 bp, Artificial Sequence
  Description of Artificial Sequence: Synthetic oligonucleotide
  Target: LAMA2; (+) strand; PAM type: YTN; PAM sequence: TTT
aaattgtctcccaaaataat

SEQ ID NO: 383050 - DNA, 20 bp, Artificial Sequence
  Description of Artificial Sequence: Synthetic oligonucleotide
  Target: LAMA2; (+) strand; PAM type: YTN; PAM sequence: TTA
aattgtctcccaaaataata

SEQ ID NO: 383051 - DNA, 20 bp, Artificial Sequence
  Description of Artificial Sequence: Synthetic oligonucleotide
  Target: LAMA2; (+) strand; PAM type: YTN; PAM sequence: TTG
tctcccaaaataataagctt

SEQ ID NO: 383052 - DNA, 20 bp, Artificial Sequence
  Description of Artificial Sequence: Synthetic oligonucleotide
  Target: LAMA2; (+) strand; PAM type: YTN; PAM sequence: CTC
ccaaaataataagctttcta

SEQ ID NO: 383053 - DNA, 20 bp, Artificial Sequence
  Description of Artificial Sequence: Synthetic oligonucleotide
  Target: LAMA2; (+) strand; PAM type: YTN; PAM sequence: CTT
tctattttattactgatttt

SEQ ID NO: 383054 - DNA, 20 bp, Artificial Sequence
  Description of Artificial Sequence: Synthetic oligonucleotide
  Target: LAMA2; (+) strand; PAM type: YTN; PAM sequence: TTT
ctattttattactgatttta

SEQ ID NO: 383055 - DNA, 20 bp, Artificial Sequence
  Description of Artificial Sequence: Synthetic oligonucleotide
  Target: LAMA2; (+) strand; PAM type: YTN; PAM sequence: TTC
tattttattactgattttaa

SEQ ID NO: 383056 - DNA, 20 bp, Artificial Sequence
  Description of Artificial Sequence: Synthetic oligonucleotide
  Target: LAMA2; (+) strand; PAM type: YTN; PAM sequence: CTA
ttttattactgattttaata

SEQ ID NO: 383057 - DNA, 20 bp, Artificial Sequence
  Description of Artificial Sequence: Synthetic oligonucleotide
  Target: LAMA2; (+) strand; PAM type: YTN; PAM sequence: TTT
tattactgattttaatatga

SEQ ID NO: 383058 - DNA, 20 bp, Artificial Sequence
  Description of Artificial Sequence: Synthetic oligonucleotide
  Target: LAMA2; (+) strand; PAM type: YTN; PAM sequence: TTT
attactgattttaatatgat

SEQ ID NO: 383059 - DNA, 20 bp, Artificial Sequence
  Description of Artificial Sequence: Synthetic oligonucleotide
  Target: LAMA2; (+) strand; PAM type: YTN; PAM sequence: TTA
ttactgattttaatatgatt

SEQ ID NO: 383060 - DNA, 20 bp, Artificial Sequence
  Description of Artificial Sequence: Synthetic oligonucleotide
  Target: LAMA2; (+) strand; PAM type: YTN; PAM sequence: TTA
ctgattttaatatgattgcc

SEQ ID NO: 383061 - DNA, 20 bp, Artificial Sequence
  Description of Artificial Sequence: Synthetic oligonucleotide
  Target: LAMA2; (+) strand; PAM type: YTN; PAM sequence: CTG
attttaatatgattgcctta

SEQ ID NO: 383062 - DNA, 20 bp, Artificial Sequence
  Description of Artificial Sequence: Synthetic oligonucleotide
  Target: LAMA2; (+) strand; PAM type: YTN; PAM sequence: TTT
taatatgattgccttaagtc

SEQ ID NO: 383063 - DNA, 20 bp, Artificial Sequence
  Description of Artificial Sequence: Synthetic oligonucleotide
  Target: LAMA2; (+) strand; PAM type: YTN; PAM sequence: TTT
aatatgattgccttaagtct

SEQ ID NO: 383064 - DNA, 20 bp, Artificial Sequence
  Description of Artificial Sequence: Synthetic oligonucleotide
  Target: LAMA2; (+) strand; PAM type: YTN; PAM sequence: TTA
atatgattgccttaagtctt

SEQ ID NO: 383065 - DNA, 20 bp, Artificial Sequence
  Description of Artificial Sequence: Synthetic oligonucleotide
  Target: LAMA2; (+) strand; PAM type: YTN; PAM sequence: TTG
ccttaagtctttcaccatta

SEQ ID NO: 383066 - DNA, 20 bp, Artificial Sequence
  Description of Artificial Sequence: Synthetic oligonucleotide
  Target: LAMA2; (+) strand; PAM type: YTN; PAM sequence: CTT
aagtctttcaccattaagta

SEQ ID NO: 383067 - DNA, 20 bp, Artificial Sequence
  Description of Artificial Sequence: Synthetic oligonucleotide
  Target: LAMA2; (+) strand; PAM type: YTN; PAM sequence: TTA
agtctttcaccattaagtat

SEQ ID NO: 383068 - DNA, 20 bp, Artificial Sequence
  Description of Artificial Sequence: Synthetic oligonucleotide
  Target: LAMA2; (+) strand; PAM type: YTN; PAM sequence: CTT
tcaccattaagtatgatgct

SEQ ID NO: 383069 - DNA, 20 bp, Artificial Sequence
  Description of Artificial Sequence: Synthetic oligonucleotide
  Target: LAMA2; (+) strand; PAM type: YTN; PAM sequence: TTT
caccattaagtatgatgctg

SEQ ID NO: 383070 - DNA, 20 bp, Artificial Sequence
  Description of Artificial Sequence: Synthetic oligonucleotide
  Target: LAMA2; (+) strand; PAM type: YTN; PAM sequence: TTC
accattaagtatgatgctga

SEQ ID NO: 383071 - DNA, 20 bp, Artificial Sequence
  Description of Artificial Sequence: Synthetic oligonucleotide
  Target: LAMA2; (+) strand; PAM type: YTN; PAM sequence: TTA
agtatgatgctgatggttag

SEQ ID NO: 383072 - DNA, 20 bp, Artificial Sequence
  Description of Artificial Sequence: Synthetic oligonucleotide
  Target: LAMA2; (+) strand; PAM type: YTN; PAM sequence: CTG
atggttagtataagaaaaac

SEQ ID NO: 383073 - DNA, 20 bp, Artificial Sequence
  Description of Artificial Sequence: Synthetic oligonucleotide
  Target: LAMA2; (+) strand; PAM type: YTN; PAM sequence: TTA
gtataagaaaaacatttctt

SEQ ID NO: 383074 - DNA, 20 bp, Artificial Sequence
  Description of Artificial Sequence: Synthetic oligonucleotide
  Target: LAMA2; (+) strand; PAM type: YTN; PAM sequence: TTT
cttgtcatgttacgaaaact

SEQ ID NO: 383075 - DNA, 20 bp, Artificial Sequence
  Description of Artificial Sequence: Synthetic oligonucleotide
  Target: LAMA2; (+) strand; PAM type: YTN; PAM sequence: TTC
ttgtcatgttacgaaaactg

SEQ ID NO: 383076 - DNA, 20 bp, Artificial Sequence
  Description of Artificial Sequence: Synthetic oligonucleotide
  Target: LAMA2; (+) strand; PAM type: YTN; PAM sequence: CTT
gtcatgttacgaaaactgct

SEQ ID NO: 383077 - DNA, 20 bp, Artificial Sequence
  Description of Artificial Sequence: Synthetic oligonucleotide
  Target: LAMA2; (+) strand; PAM type: YTN; PAM sequence: TTG
tcatgttacgaaaactgctt

SEQ ID NO: 383078 - DNA, 20 bp, Artificial Sequence
  Description of Artificial Sequence: Synthetic oligonucleotide
  Target: LAMA2; (+) strand; PAM type: YTN; PAM sequence: TTA
cgaaaactgctttctattcc

SEQ ID NO: 383079 - DNA, 20 bp, Artificial Sequence
  Description of Artificial Sequence: Synthetic oligonucleotide
  Target: LAMA2; (+) strand; PAM type: YTN; PAM sequence: CTG
ctttctattcctagcttctt

SEQ ID NO: 383080 - DNA, 20 bp, Artificial Sequence
  Description of Artificial Sequence: Synthetic oligonucleotide
  Target: LAMA2; (+) strand; PAM type: YTN; PAM sequence: CTT
tctattcctagcttcttaaa

SEQ ID NO: 383081 - DNA, 20 bp, Artificial Sequence
  Description of Artificial Sequence: Synthetic oligonucleotide
  Target: LAMA2; (+) strand; PAM type: YTN; PAM sequence: TTT
ctattcctagcttcttaaag

SEQ ID NO: 383082 - DNA, 20 bp, Artificial Sequence
  Description of Artificial Sequence: Synthetic oligonucleotide
  Target: LAMA2; (+) strand; PAM type: YTN; PAM sequence: TTC
tattcctagcttcttaaaga

SEQ ID NO: 383083 - DNA, 20 bp, Artificial Sequence
  Description of Artificial Sequence: Synthetic oligonucleotide
  Target: LAMA2; (+) strand; PAM type: YTN; PAM sequence: CTA
ttcctagcttcttaaagata

SEQ ID NO: 383084 - DNA, 20 bp, Artificial Sequence
  Description of Artificial Sequence: Synthetic oligonucleotide
  Target: LAMA2; (+) strand; PAM type: YTN; PAM sequence: TTC
ctagcttcttaaagatatcc

SEQ ID NO: 383085 - DNA, 20 bp, Artificial Sequence
  Description of Artificial Sequence: Synthetic oligonucleotide
  Target: LAMA2; (+) strand; PAM type: YTN; PAM sequence: CTA
gcttcttaaagatatcctct

SEQ ID NO: 383086 - DNA, 20 bp, Artificial Sequence
  Description of Artificial Sequence: Synthetic oligonucleotide
  Target: LAMA2; (+) strand; PAM type: YTN; PAM sequence: CTT
cttaaagatatcctctttca

SEQ ID NO: 383087 - DNA, 20 bp, Artificial Sequence
  Description of Artificial Sequence: Synthetic oligonucleotide
  Target: LAMA2; (+) strand; PAM type: YTN; PAM sequence: TTC
ttaaagatatcctctttcaa

SEQ ID NO: 383088 - DNA, 20 bp, Artificial Sequence
  Description of Artificial Sequence: Synthetic oligonucleotide
  Target: LAMA2; (+) strand; PAM type: YTN; PAM sequence: CTT
aaagatatcctctttcaatc

SEQ ID NO: 383089 - DNA, 20 bp, Artificial Sequence
  Description of Artificial Sequence: Synthetic oligonucleotide
  Target: LAMA2; (+) strand; PAM type: YTN; PAM sequence: TTA
aagatatcctctttcaatca

SEQ ID NO: 383090 - DNA, 20 bp, Artificial Sequence
  Description of Artificial Sequence: Synthetic oligonucleotide
  Target: LAMA2; (+) strand; PAM type: YTN; PAM sequence: CTC
tttcaatcaggataagatat

SEQ ID NO: 383091 - DNA, 20 bp, Artificial Sequence
  Description of Artificial Sequence: Synthetic oligonucleotide
  Target: LAMA2; (+) strand; PAM type: YTN; PAM sequence: CTT
tcaatcaggataagatattt

SEQ ID NO: 383092 - DNA, 20 bp, Artificial Sequence
  Description of Artificial Sequence: Synthetic oligonucleotide
  Target: LAMA2; (+) strand; PAM type: YTN; PAM sequence: TTT
caatcaggataagatattta

SEQ ID NO: 383093 - DNA, 20 bp, Artificial Sequence
  Description of Artificial Sequence: Synthetic oligonucleotide
  Target: LAMA2; (+) strand; PAM type: YTN; PAM sequence: TTC
aatcaggataagatatttaa

SEQ ID NO: 383094 - DNA, 20 bp, Artificial Sequence
  Description of Artificial Sequence: Synthetic oligonucleotide
  Target: LAMA2; (+) strand; PAM type: YTN; PAM sequence: TTT
aaattactcatatgcttaat

SEQ ID NO: 383095 - DNA, 20 bp, Artificial Sequence
  Description of Artificial Sequence: Synthetic oligonucleotide
  Target: LAMA2; (+) strand; PAM type: YTN; PAM sequence: TTA
aattactcatatgcttaatt

SEQ ID NO: 383096 - DNA, 20 bp, Artificial Sequence
  Description of Artificial Sequence: Synthetic oligonucleotide
  Target: LAMA2; (+) strand; PAM type: YTN; PAM sequence: TTA
ctcatatgcttaattgtgga

SEQ ID NO: 383097 - DNA, 20 bp, Artificial Sequence
  Description of Artificial Sequence: Synthetic oligonucleotide
  Target: LAMA2; (+) strand; PAM type: YTN; PAM sequence: CTC
atatgcttaattgtggagag

SEQ ID NO: 383098 - DNA, 20 bp, Artificial Sequence
  Description of Artificial Sequence: Synthetic oligonucleotide
  Target: LAMA2; (+) strand; PAM type: YTN; PAM sequence: CTT
aattgtggagagtggagtgg

SEQ ID NO: 383099 - DNA, 20 bp, Artificial Sequence
  Description of Artificial Sequence: Synthetic oligonucleotide
  Target: LAMA2; (+) strand; PAM type: YTN; PAM sequence: TTA
attgtggagagtggagtggg

SEQ ID NO: 383100 - DNA, 20 bp, Artificial Sequence
  Description of Artificial Sequence: Synthetic oligonucleotide
  Target: LAMA2; (+) strand; PAM type: YTN; PAM sequence: TTG
tggagagtggagtgggaatg

SEQ ID NO: 383101 - DNA, 20 bp, Artificial Sequence
  Description of Artificial Sequence: Synthetic oligonucleotide
  Target: LAMA2; (+) strand; PAM type: YTN; PAM sequence: TTT
aagaggtgatcatatatagg

SEQ ID NO: 383102 - DNA, 20 bp, Artificial Sequence
  Description of Artificial Sequence: Synthetic oligonucleotide
  Target: LAMA2; (+) strand; PAM type: YTN; PAM sequence: TTA
agaggtgatcatatataggt

SEQ ID NO: 383103 - DNA, 20 bp, Artificial Sequence
  Description of Artificial Sequence: Synthetic oligonucleotide
  Target: LAMA2; (+) strand; PAM type: YTN; PAM sequence: TTT
ttcaccttaaacagaaccat

SEQ ID NO: 383104 - DNA, 20 bp, Artificial Sequence
  Description of Artificial Sequence: Synthetic oligonucleotide
  Target: LAMA2; (+) strand; PAM type: YTN; PAM sequence: TTT
tcaccttaaacagaaccata

SEQ ID NO: 383105 - DNA, 20 bp, Artificial Sequence
  Description of Artificial Sequence: Synthetic oligonucleotide
  Target: LAMA2; (+) strand; PAM type: YTN; PAM sequence: TTT
caccttaaacagaaccataa

SEQ ID NO: 383106 - DNA, 20 bp, Artificial Sequence
  Description of Artificial Sequence: Synthetic oligonucleotide
  Target: LAMA2; (+) strand; PAM type: YTN; PAM sequence: TTC
accttaaacagaaccataaa

SEQ ID NO: 383107 - DNA, 20 bp, Artificial Sequence
  Description of Artificial Sequence: Synthetic oligonucleotide
  Target: LAMA2; (+) strand; PAM type: YTN; PAM sequence: CTT
aaacagaaccataaatgata

SEQ ID NO: 383108 - DNA, 20 bp, Artificial Sequence
  Description of Artificial Sequence: Synthetic oligonucleotide
  Target: LAMA2; (+) strand; PAM type: YTN; PAM sequence: TTA
aacagaaccataaatgatat

SEQ ID NO: 383109 - DNA, 20 bp, Artificial Sequence
  Description of Artificial Sequence: Synthetic oligonucleotide
  Target: LAMA2; (+) strand; PAM type: YTN; PAM sequence: TTA
ttgactaaataaataactta

SEQ ID NO: 383110 - DNA, 20 bp, Artificial Sequence
  Description of Artificial Sequence: Synthetic oligonucleotide
  Target: LAMA2; (+) strand; PAM type: YTN; PAM sequence: TTG
actaaataaataacttaata

SEQ ID NO: 383111 - DNA, 20 bp, Artificial Sequence
  Description of Artificial Sequence: Synthetic oligonucleotide
  Target: LAMA2; (+) strand; PAM type: YTN; PAM sequence: CTA
aataaataacttaatattag

SEQ ID NO: 383112 - DNA, 20 bp, Artificial Sequence
  Description of Artificial Sequence: Synthetic oligonucleotide
  Target: LAMA2; (+) strand; PAM type: YTN; PAM sequence: CTT
aatattagccatccatgaat

SEQ ID NO: 383113 - DNA, 20 bp, Artificial Sequence
  Description of Artificial Sequence: Synthetic oligonucleotide
  Target: LAMA2; (+) strand; PAM type: YTN; PAM sequence: TTA
atattagccatccatgaatt

SEQ ID NO: 383114 - DNA, 20 bp, Artificial Sequence
  Description of Artificial Sequence: Synthetic oligonucleotide
  Target: LAMA2; (+) strand; PAM type: YTN; PAM sequence: TTA
gccatccatgaattccagaa

SEQ ID NO: 383115 - DNA, 20 bp, Artificial Sequence
  Description of Artificial Sequence: Synthetic oligonucleotide
  Target: LAMA2; (+) strand; PAM type: YTN; PAM sequence: TTC
cagaaataattactatcttg

SEQ ID NO: 383116 - DNA, 20 bp, Artificial Sequence
  Description of Artificial Sequence: Synthetic oligonucleotide
  Target: LAMA2; (+) strand; PAM type: YTN; PAM sequence: TTA
ctatcttgctttagtatgct

SEQ ID NO: 383117 - DNA, 20 bp, Artificial Sequence
  Description of Artificial Sequence: Synthetic oligonucleotide
  Target: LAMA2; (+) strand; PAM type: YTN; PAM sequence: CTA
tcttgctttagtatgctatt

SEQ ID NO: 383118 - DNA, 20 bp, Artificial Sequence
  Description of Artificial Sequence: Synthetic oligonucleotide
  Target: LAMA2; (+) strand; PAM type: YTN; PAM sequence: CTT
gctttagtatgctatttttt

SEQ ID NO: 383119 - DNA, 20 bp, Artificial Sequence
  Description of Artificial Sequence: Synthetic oligonucleotide
  Target: LAMA2; (+) strand; PAM type: YTN; PAM sequence: TTG
ctttagtatgctattttttc

SEQ ID NO: 383120 - DNA, 20 bp, Artificial Sequence
  Description of Artificial Sequence: Synthetic oligonucleotide
  Target: LAMA2; (+) strand; PAM type: YTN; PAM sequence: CTT
tagtatgctattttttcatc

SEQ ID NO: 383121 - DNA, 20 bp, Artificial Sequence
  Description of Artificial Sequence: Synthetic oligonucleotide
  Target: LAMA2; (+) strand; PAM type: YTN; PAM sequence: TTT
agtatgctattttttcatca

SEQ ID NO: 383122 - DNA, 20 bp, Artificial Sequence
  Description of Artificial Sequence: Synthetic oligonucleotide
  Target: LAMA2; (+) strand; PAM type: YTN; PAM sequence: TTA
gtatgctattttttcatcaa

SEQ ID NO: 383123 - DNA, 20 bp, Artificial Sequence
  Description of Artificial Sequence: Synthetic oligonucleotide
  Target: LAMA2; (+) strand; PAM type: YTN; PAM sequence: CTA
ttttttcatcaactgcttgc

SEQ ID NO: 383124 - DNA, 20 bp, Artificial Sequence
  Description of Artificial Sequence: Synthetic oligonucleotide
  Target: LAMA2; (+) strand; PAM type: YTN; PAM sequence: TTT
tttcatcaactgcttgcctg

SEQ ID NO: 383125 - DNA, 20 bp, Artificial Sequence
  Description of Artificial Sequence: Synthetic oligonucleotide
  Target: LAMA2; (+) strand; PAM type: YTN; PAM sequence: TTT
ttcatcaactgcttgcctga

SEQ ID NO: 383126 - DNA, 20 bp, Artificial Sequence
  Description of Artificial Sequence: Synthetic oligonucleotide
  Target: LAMA2; (+) strand; PAM type: YTN; PAM sequence: TTT
tcatcaactgcttgcctgac

SEQ ID NO: 383127 - DNA, 20 bp, Artificial Sequence
  Description of Artificial Sequence: Synthetic oligonucleotide
  Target: LAMA2; (+) strand; PAM type: YTN; PAM sequence: TTT
catcaactgcttgcctgaca

SEQ ID NO: 383128 - DNA, 20 bp, Artificial Sequence
  Description of Artificial Sequence: Synthetic oligonucleotide
  Target: LAMA2; (+) strand; PAM type: YTN; PAM sequence: TTC
atcaactgcttgcctgacaa

SEQ ID NO: 383129 - DNA, 20 bp, Artificial Sequence
  Description of Artificial Sequence: Synthetic oligonucleotide
  Target: LAMA2; (+) strand; PAM type: YTN; PAM sequence: CTG
cttgcctgacaaattcaata

SEQ ID NO: 383130 - DNA, 20 bp, Artificial Sequence
  Description of Artificial Sequence: Synthetic oligonucleotide
  Target: LAMA2; (+) strand; PAM type: YTN; PAM sequence: CTT
gcctgacaaattcaataggc

SEQ ID NO: 383131 - DNA, 20 bp, Artificial Sequence
  Description of Artificial Sequence: Synthetic oligonucleotide
  Target: LAMA2; (+) strand; PAM type: YTN; PAM sequence: TTG
cctgacaaattcaataggca

SEQ ID NO: 383132 - DNA, 20 bp, Artificial Sequence
  Description of Artificial Sequence: Synthetic oligonucleotide
  Target: LAMA2; (+) strand; PAM type: YTN; PAM sequence: CTG
acaaattcaataggcaattt

SEQ ID NO: 383133 - DNA, 20 bp, Artificial Sequence
  Description of Artificial Sequence: Synthetic oligonucleotide
  Target: LAMA2; (+) strand; PAM type: YTN; PAM sequence: TTC
aataggcaatttgagaggaa

SEQ ID NO: 383134 - DNA, 20 bp, Artificial Sequence
  Description of Artificial Sequence: Synthetic oligonucleotide
  Target: LAMA2; (+) strand; PAM type: YTN; PAM sequence: TTT
gagaggaaggggttaatcta

SEQ ID NO: 383135 - DNA, 20 bp, Artificial Sequence
  Description of Artificial Sequence: Synthetic oligonucleotide
  Target: LAMA2; (+) strand; PAM type: YTN; PAM sequence: TTG
agaggaaggggttaatctat

SEQ ID NO: 383136 - DNA, 20 bp, Artificial Sequence
  Description of Artificial Sequence: Synthetic oligonucleotide
  Target: LAMA2; (+) strand; PAM type: YTN; PAM sequence: TTA
atctatacacattcttaagc

SEQ ID NO: 383137 - DNA, 20 bp, Artificial Sequence
  Description of Artificial Sequence: Synthetic oligonucleotide
  Target: LAMA2; (+) strand; PAM type: YTN; PAM sequence: CTA
tacacattcttaagcaagaa

SEQ ID NO: 383138 - DNA, 20 bp, Artificial Sequence
  Description of Artificial Sequence: Synthetic oligonucleotide
  Target: LAMA2; (+) strand; PAM type: YTN; PAM sequence: TTC
ttaagcaagaattaaatgta

SEQ ID NO: 383139 - DNA, 20 bp, Artificial Sequence
  Description of Artificial Sequence: Synthetic oligonucleotide
  Target: LAMA2; (+) strand; PAM type: YTN; PAM sequence: CTT
aagcaagaattaaatgtata

SEQ ID NO: 383140 - DNA, 20 bp, Artificial Sequence
  Description of Artificial Sequence: Synthetic oligonucleotide
  Target: LAMA2; (+) strand; PAM type: YTN; PAM sequence: TTA
agcaagaattaaatgtatat

SEQ ID NO: 383141 - DNA, 20 bp, Artificial Sequence
  Description of Artificial Sequence: Synthetic oligonucleotide
  Target: LAMA2; (+) strand; PAM type: YTN; PAM sequence: TTA
aatgtatatgtcttatgcaa

SEQ ID NO: 383142 - DNA, 20 bp, Artificial Sequence
  Description of Artificial Sequence: Synthetic oligonucleotide
  Target: LAMA2; (+) strand; PAM type: YTN; PAM sequence: CTT
atgcaatcttcactggcatt

SEQ ID NO: 383143 - DNA, 20 bp, Artificial Sequence
  Description of Artificial Sequence: Synthetic oligonucleotide
  Target: LAMA2; (+) strand; PAM type: YTN; PAM sequence: TTA
tgcaatcttcactggcattt

SEQ ID NO: 383144 - DNA, 20 bp, Artificial Sequence
  Description of Artificial Sequence: Synthetic oligonucleotide
  Target: LAMA2; (+) strand; PAM type: YTN; PAM sequence: CTT
cactggcatttttagcacag

SEQ ID NO: 383145 - DNA, 20 bp, Artificial Sequence
  Description of Artificial Sequence: Synthetic oligonucleotide
  Target: LAMA2; (+) strand; PAM type: YTN; PAM sequence: TTC
actggcatttttagcacagt

SEQ ID NO: 383146 - DNA, 20 bp, Artificial Sequence
  Description of Artificial Sequence: Synthetic oligonucleotide
  Target: LAMA2; (+) strand; PAM type: YTN; PAM sequence: CTG
gcatttttagcacagttata

SEQ ID NO: 383147 - DNA, 20 bp, Artificial Sequence
  Description of Artificial Sequence: Synthetic oligonucleotide
  Target: LAMA2; (+) strand; PAM type: YTN; PAM sequence: TTT
ttagcacagttatatttgct

SEQ ID NO: 383148 - DNA, 20 bp, Artificial Sequence
  Description of Artificial Sequence: Synthetic oligonucleotide
  Target: LAMA2; (+) strand; PAM type: YTN; PAM sequence: TTT
tagcacagttatatttgctt

SEQ ID NO: 383149 - DNA, 20 bp, Artificial Sequence
  Description of Artificial Sequence: Synthetic oligonucleotide
  Target: LAMA2; (+) strand; PAM type: YTN; PAM sequence: TTT
agcacagttatatttgcttt

SEQ ID NO: 383150 - DNA, 20 bp, Artificial Sequence
  Description of Artificial Sequence: Synthetic oligonucleotide
  Target: LAMA2; (+) strand; PAM type: YTN; PAM sequence: TTA
gcacagttatatttgcttta

SEQ ID NO: 383151 - DNA, 20 bp, Artificial Sequence
  Description of Artificial Sequence: Synthetic oligonucleotide
  Target: LAMA2; (+) strand; PAM type: YTN; PAM sequence: TTA
tatttgctttatatgattaa

SEQ ID NO: 383152 - DNA, 20 bp, Artificial Sequence
  Description of Artificial Sequence: Synthetic oligonucleotide
  Target: LAMA2; (+) strand; PAM type: YTN; PAM sequence: TTT
gctttatatgattaatttag

SEQ ID NO: 383153 - DNA, 20 bp, Artificial Sequence
  Description of Artificial Sequence: Synthetic oligonucleotide
  Target: LAMA2; (+) strand; PAM type: YTN; PAM sequence: TTG
ctttatatgattaatttaga

SEQ ID NO: 383154 - DNA, 20 bp, Artificial Sequence
  Description of Artificial Sequence: Synthetic oligonucleotide
  Target: LAMA2; (+) strand; PAM type: YTN; PAM sequence: CTT
tatatgattaatttagaagc

SEQ ID NO: 383155 - DNA, 20 bp, Artificial Sequence
  Description of Artificial Sequence: Synthetic oligonucleotide
  Target: LAMA2; (+) strand; PAM type: YTN; PAM sequence: TTT
atatgattaatttagaagca

SEQ ID NO: 383156 - DNA, 20 bp, Artificial Sequence
  Description of Artificial Sequence: Synthetic oligonucleotide
  Target: LAMA2; (+) strand; PAM type: YTN; PAM sequence: TTA
tatgattaatttagaagcat

SEQ ID NO: 383157 - DNA, 20 bp, Artificial Sequence
  Description of Artificial Sequence: Synthetic oligonucleotide
  Target: LAMA2; (+) strand; PAM type: YTN; PAM sequence: TTA
atttagaagcatttataaat

SEQ ID NO: 383158 - DNA, 20 bp, Artificial Sequence
  Description of Artificial Sequence: Synthetic oligonucleotide
  Target: LAMA2; (+) strand; PAM type: YTN; PAM sequence: TTT
agaagcatttataaataatg

SEQ ID NO: 383159 - DNA, 20 bp, Artificial Sequence
  Description of Artificial Sequence: Synthetic oligonucleotide
  Target: LAMA2; (+) strand; PAM type: YTN; PAM sequence: TTA
gaagcatttataaataatgc

SEQ ID NO: 383160 - DNA, 20 bp, Artificial Sequence
  Description of Artificial Sequence: Synthetic oligonucleotide
  Target: LAMA2; (+) strand; PAM type: YTN; PAM sequence: TTT
ataaataatgcagtttaatt

SEQ ID NO: 383161 - DNA, 20 bp, Artificial Sequence
  Description of Artificial Sequence: Synthetic oligonucleotide
  Target: LAMA2; (+) strand; PAM type: YTN; PAM sequence: TTA
taaataatgcagtttaattt

SEQ ID NO: 383162 - DNA, 20 bp, Artificial Sequence
  Description of Artificial Sequence: Synthetic oligonucleotide
  Target: LAMA2; (+) strand; PAM type: YTN; PAM sequence: TTT
aatttcaattttgttaggat

SEQ ID NO: 383163 - DNA, 20 bp, Artificial Sequence
  Description of Artificial Sequence: Synthetic oligonucleotide
  Target: LAMA2; (+) strand; PAM type: YTN; PAM sequence: TTA
atttcaattttgttaggatt

SEQ ID NO: 383164 - DNA, 20 bp, Artificial Sequence
  Description of Artificial Sequence: Synthetic oligonucleotide
  Target: LAMA2; (+) strand; PAM type: YTN; PAM sequence: TTT
caattttgttaggattaaaa

SEQ ID NO: 383165 - DNA, 20 bp, Artificial Sequence
  Description of Artificial Sequence: Synthetic oligonucleotide
  Target: LAMA2; (+) strand; PAM type: YTN; PAM sequence: TTC
aattttgttaggattaaaat

SEQ ID NO: 383166 - DNA, 20 bp, Artificial Sequence
  Description of Artificial Sequence: Synthetic oligonucleotide
  Target: LAMA2; (+) strand; PAM type: YTN; PAM sequence: TTT
tgttaggattaaaattaccg

SEQ ID NO: 383167 - DNA, 20 bp, Artificial Sequence
  Description of Artificial Sequence: Synthetic oligonucleotide
  Target: LAMA2; (+) strand; PAM type: YTN; PAM sequence: TTT
gttaggattaaaattaccgt

SEQ ID NO: 383168 - DNA, 20 bp, Artificial Sequence
  Description of Artificial Sequence: Synthetic oligonucleotide
  Target: LAMA2; (+) strand; PAM type: YTN; PAM sequence: TTG
ttaggattaaaattaccgtc

SEQ ID NO: 383169 - DNA, 20 bp, Artificial Sequence
  Description of Artificial Sequence: Synthetic oligonucleotide
  Target: LAMA2; (+) strand; PAM type: YTN; PAM sequence: TTA
ggattaaaattaccgtcttt

SEQ ID NO: 383170 - DNA, 20 bp, Artificial Sequence
  Description of Artificial Sequence: Synthetic oligonucleotide
  Target: LAMA2; (+) strand; PAM type: YTN; PAM sequence: TTA
aaattaccgtctttatactg

SEQ ID NO: 383171 - DNA, 20 bp, Artificial Sequence
  Description of Artificial Sequence: Synthetic oligonucleotide
  Target: LAMA2; (+) strand; PAM type: YTN; PAM sequence: TTA
ccgtctttatactgtcctct

SEQ ID NO: 383172 - DNA, 20 bp, Artificial Sequence
  Description of Artificial Sequence: Synthetic oligonucleotide
  Target: LAMA2; (+) strand; PAM type: YTN; PAM sequence: CTT
tatactgtcctcttttgacc

SEQ ID NO: 383173 - DNA, 20 bp, Artificial Sequence
  Description of Artificial Sequence: Synthetic oligonucleotide
  Target: LAMA2; (+) strand; PAM type: YTN; PAM sequence: TTT
atactgtcctcttttgacca

SEQ ID NO: 383174 - DNA, 20 bp, Artificial Sequence
  Description of Artificial Sequence: Synthetic oligonucleotide
  Target: LAMA2; (+) strand; PAM type: YTN; PAM sequence: TTA
tactgtcctcttttgaccaa

SEQ ID NO: 383175 - DNA, 20 bp, Artificial Sequence
  Description of Artificial Sequence: Synthetic oligonucleotide
  Target: LAMA2; (+) strand; PAM type: YTN; PAM sequence: CTG
tcctcttttgaccaattgac

SEQ ID NO: 383176 - DNA, 20 bp, Artificial Sequence
  Description of Artificial Sequence: Synthetic oligonucleotide
  Target: LAMA2; (+) strand; PAM type: YTN; PAM sequence: CTC
ttttgaccaattgactatta

SEQ ID NO: 383177 - DNA, 20 bp, Artificial Sequence
  Description of Artificial Sequence: Synthetic oligonucleotide
  Target: LAMA2; (+) strand; PAM type: YTN; PAM sequence: CTT
ttgaccaattgactattatg

SEQ ID NO: 383178 - DNA, 20 bp, Artificial Sequence
  Description of Artificial Sequence: Synthetic oligonucleotide
  Target: LAMA2; (+) strand; PAM type: YTN; PAM sequence: TTT
tgaccaattgactattatga

SEQ ID NO: 383179 - DNA, 20 bp, Artificial Sequence
  Description of Artificial Sequence: Synthetic oligonucleotide
  Target: LAMA2; (+) strand; PAM type: YTN; PAM sequence: TTT
gaccaattgactattatgac

SEQ ID NO: 383180 - DNA, 20 bp, Artificial Sequence
  Description of Artificial Sequence: Synthetic oligonucleotide
  Target: LAMA2; (+) strand; PAM type: YTN; PAM sequence: TTG
accaattgactattatgact

SEQ ID NO: 383181 - DNA, 20 bp, Artificial Sequence
  Description of Artificial Sequence: Synthetic oligonucleotide
  Target: LAMA2; (+) strand; PAM type: YTN; PAM sequence: TTG
actattatgactatttttgt

SEQ ID NO: 383182 - DNA, 20 bp, Artificial Sequence
  Description of Artificial Sequence: Synthetic oligonucleotide
  Target: LAMA2; (+) strand; PAM type: YTN; PAM sequence: CTA
ttatgactatttttgttctc

SEQ ID NO: 383183 - DNA, 20 bp, Artificial Sequence
  Description of Artificial Sequence: Synthetic oligonucleotide
  Target: LAMA2; (+) strand; PAM type: YTN; PAM sequence: TTA
tgactatttttgttctctaa

SEQ ID NO: 383184 - DNA, 20 bp, Artificial Sequence
  Description of Artificial Sequence: Synthetic oligonucleotide
  Target: LAMA2; (+) strand; PAM type: YTN; PAM sequence: CTA
tttttgttctctaagaattc

SEQ ID NO: 383185 - DNA, 20 bp, Artificial Sequence
  Description of Artificial Sequence: Synthetic oligonucleotide
  Target: LAMA2; (+) strand; PAM type: YTN; PAM sequence: TTT
ttgttctctaagaattctaa

SEQ ID NO: 383186 - DNA, 20 bp, Artificial Sequence
  Description of Artificial Sequence: Synthetic oligonucleotide
  Target: LAMA2; (+) strand; PAM type: YTN; PAM sequence: TTT
tgttctctaagaattctaaa

SEQ ID NO: 383187 - DNA, 20 bp, Artificial Sequence
  Description of Artificial Sequence: Synthetic oligonucleotide
  Target: LAMA2; (+) strand; PAM type: YTN; PAM sequence: TTT
gttctctaagaattctaaaa

SEQ ID NO: 383188 - DNA, 20 bp, Artificial Sequence
  Description of Artificial Sequence: Synthetic oligonucleotide
  Target: LAMA2; (+) strand; PAM type: YTN; PAM sequence: TTG
ttctctaagaattctaaaag

SEQ ID NO: 383189 - DNA, 20 bp, Artificial Sequence
  Description of Artificial Sequence: Synthetic oligonucleotide
  Target: LAMA2; (+) strand; PAM type: YTN; PAM sequence: TTC
tctaagaattctaaaagcat

SEQ ID NO: 383190 - DNA, 20 bp, Artificial Sequence
  Description of Artificial Sequence: Synthetic oligonucleotide
  Target: LAMA2; (+) strand; PAM type: YTN; PAM sequence: CTC
taagaattctaaaagcatgt

SEQ ID NO: 383191 - DNA, 20 bp, Artificial Sequence
  Description of Artificial Sequence: Synthetic oligonucleotide
  Target: LAMA2; (+) strand; PAM type: YTN; PAM sequence: CTA
agaattctaaaagcatgtct

SEQ ID NO: 383192 - DNA, 20 bp, Artificial Sequence
  Description of Artificial Sequence: Synthetic oligonucleotide
  Target: LAMA2; (+) strand; PAM type: YTN; PAM sequence: TTC
taaaagcatgtctattttct

SEQ ID NO: 383193 - DNA, 20 bp, Artificial Sequence
  Description of Artificial Sequence: Synthetic oligonucleotide
  Target: LAMA2; (+) strand; PAM type: YTN; PAM sequence: CTA
aaagcatgtctattttctga

SEQ ID NO: 383194 - DNA, 20 bp, Artificial Sequence
  Description of Artificial Sequence: Synthetic oligonucleotide
  Target: LAMA2; (+) strand; PAM type: YTN; PAM sequence: CTA
ttttctgaggaatccctaga

SEQ ID NO: 383195 - DNA, 20 bp, Artificial Sequence
  Description of Artificial Sequence: Synthetic oligonucleotide
  Target: LAMA2; (+) strand; PAM type: YTN; PAM sequence: TTT
tctgaggaatccctagatga

SEQ ID NO: 383196 - DNA, 20 bp, Artificial Sequence
  Description of Artificial Sequence: Synthetic oligonucleotide
  Target: LAMA2; (+) strand; PAM type: YTN; PAM sequence: TTT
ctgaggaatccctagatgaa

SEQ ID NO: 383197 - DNA, 20 bp, Artificial Sequence
  Description of Artificial Sequence: Synthetic oligonucleotide
  Target: LAMA2; (+) strand; PAM type: YTN; PAM sequence: TTC
tgaggaatccctagatgaag

SEQ ID NO: 383198 - DNA, 20 bp, Artificial Sequence
  Description of Artificial Sequence: Synthetic oligonucleotide
  Target: LAMA2; (+) strand; PAM type: YTN; PAM sequence: CTG
aggaatccctagatgaagta

SEQ ID NO: 383199 - DNA, 20 bp, Artificial Sequence
  Description of Artificial Sequence: Synthetic oligonucleotide
  Target: LAMA2; (+) strand; PAM type: YTN; PAM sequence: CTA
gatgaagtaaaaaataaata

SEQ ID NO: 383200 - DNA, 20 bp, Artificial Sequence
  Description of Artificial Sequence: Synthetic oligonucleotide
  Target: LAMA2; (+) strand; PAM type: YTN; PAM sequence: CTT
ccattaaacaaacacagctg

SEQ ID NO: 383201 - DNA, 20 bp, Artificial Sequence
  Description of Artificial Sequence: Synthetic oligonucleotide
  Target: LAMA2; (+) strand; PAM type: YTN; PAM sequence: TTC
cattaaacaaacacagctgg

SEQ ID NO: 383202 - DNA, 20 bp, Artificial Sequence
  Description of Artificial Sequence: Synthetic oligonucleotide
  Target: LAMA2; (+) strand; PAM type: YTN; PAM sequence: TTA
aacaaacacagctggtataa

SEQ ID NO: 383203 - DNA, 20 bp, Artificial Sequence
  Description of Artificial Sequence: Synthetic oligonucleotide
  Target: LAMA2; (+) strand; PAM type: YTN; PAM sequence: CTG
gtataaaccgttatgctcca

SEQ ID NO: 383204 - DNA, 20 bp, Artificial Sequence
  Description of Artificial Sequence: Synthetic oligonucleotide
  Target: LAMA2; (+) strand; PAM type: YTN; PAM sequence: TTA
tgctccaaatttttatattt

SEQ ID NO: 383205 - DNA, 20 bp, Artificial Sequence
  Description of Artificial Sequence: Synthetic oligonucleotide
  Target: LAMA2; (+) strand; PAM type: YTN; PAM sequence: CTC
caaatttttatattttcttt

SEQ ID NO: 383206 - DNA, 20 bp, Artificial Sequence
  Description of Artificial Sequence: Synthetic oligonucleotide
  Target: LAMA2; (+) strand; PAM type: YTN; PAM sequence: TTT
ttatattttctttcatggaa

SEQ ID NO: 383207 - DNA, 20 bp, Artificial Sequence
  Description of Artificial Sequence: Synthetic oligonucleotide
  Target: LAMA2; (+) strand; PAM type: YTN; PAM sequence: TTT
tatattttctttcatggaac

SEQ ID NO: 383208 - DNA, 20 bp, Artificial Sequence
  Description of Artificial Sequence: Synthetic oligonucleotide
  Target: LAMA2; (+) strand; PAM type: YTN; PAM sequence: TTT
atattttctttcatggaact

SEQ ID NO: 383209 - DNA, 20 bp, Artificial Sequence
  Description of Artificial Sequence: Synthetic oligonucleotide
  Target: LAMA2; (+) strand; PAM type: YTN; PAM sequence: TTA
tattttctttcatggaactc

SEQ ID NO: 383210 - DNA, 20 bp, Artificial Sequence
  Description of Artificial Sequence: Synthetic oligonucleotide
  Target: LAMA2; (+) strand; PAM type: YTN; PAM sequence: TTT
tctttcatggaactcacaac

SEQ ID NO: 383211 - DNA, 20 bp, Artificial Sequence
  Description of Artificial Sequence: Synthetic oligonucleotide
  Target: LAMA2; (+) strand; PAM type: YTN; PAM sequence: TTT
ctttcatggaactcacaact

SEQ ID NO: 383212 - DNA, 20 bp, Artificial Sequence
  Description of Artificial Sequence: Synthetic oligonucleotide
  Target: LAMA2; (+) strand; PAM type: YTN; PAM sequence: TTC
tttcatggaactcacaactt

SEQ ID NO: 383213 - DNA, 20 bp, Artificial Sequence
  Description of Artificial Sequence: Synthetic oligonucleotide
  Target: LAMA2; (+) strand; PAM type: YTN; PAM sequence: CTT
tcatggaactcacaactttt

SEQ ID NO: 383214 - DNA, 20 bp, Artificial Sequence
  Description of Artificial Sequence: Synthetic oligonucleotide
  Target: LAMA2; (+) strand; PAM type: YTN; PAM sequence: TTT
catggaactcacaacttttg

SEQ ID NO: 383215 - DNA, 20 bp, Artificial Sequence
  Description of Artificial Sequence: Synthetic oligonucleotide
  Target: LAMA2; (+) strand; PAM type: YTN; PAM sequence: TTC
atggaactcacaacttttga

SEQ ID NO: 383216 - DNA, 20 bp, Artificial Sequence
  Description of Artificial Sequence: Synthetic oligonucleotide
  Target: LAMA2; (+) strand; PAM type: YTN; PAM sequence: CTC
acaacttttgaatttaggca

SEQ ID NO: 383217 - DNA, 20 bp, Artificial Sequence
  Description of Artificial Sequence: Synthetic oligonucleotide
  Target: LAMA2; (+) strand; PAM type: YTN; PAM sequence: CTT
ttgaatttaggcaactctgt

SEQ ID NO: 383218 - DNA, 20 bp, Artificial Sequence
  Description of Artificial Sequence: Synthetic oligonucleotide
  Target: LAMA2; (+) strand; PAM type: YTN; PAM sequence: TTT
tgaatttaggcaactctgtt

SEQ ID NO: 383219 - DNA, 20 bp, Artificial Sequence
  Description of Artificial Sequence: Synthetic oligonucleotide
  Target: LAMA2; (+) strand; PAM type: YTN; PAM sequence: TTT
gaatttaggcaactctgttc

SEQ ID NO: 383220 - DNA, 20 bp, Artificial Sequence
  Description of Artificial Sequence: Synthetic oligonucleotide
  Target: LAMA2; (+) strand; PAM type: YTN; PAM sequence: TTG
aatttaggcaactctgttca

SEQ ID NO: 383221 - DNA, 20 bp, Artificial Sequence
  Description of Artificial Sequence: Synthetic oligonucleotide
  Target: LAMA2; (+) strand; PAM type: YTN; PAM sequence: TTT
aggcaactctgttcatcttt

SEQ ID NO: 383222 - DNA, 20 bp, Artificial Sequence
  Description of Artificial Sequence: Synthetic oligonucleotide
  Target: LAMA2; (+) strand; PAM type: YTN; PAM sequence: TTA
ggcaactctgttcatctttg

SEQ ID NO: 383223 - DNA, 20 bp, Artificial Sequence
  Description of Artificial Sequence: Synthetic oligonucleotide
  Target: LAMA2; (+) strand; PAM type: YTN; PAM sequence: CTC
tgttcatctttgaaatggcc

SEQ ID NO: 383224 - DNA, 20 bp, Artificial Sequence
  Description of Artificial Sequence: Synthetic oligonucleotide
  Target: LAMA2; (+) strand; PAM type: YTN; PAM sequence: CTG
ttcatctttgaaatggcctc

SEQ ID NO: 383225 - DNA, 20 bp, Artificial Sequence
  Description of Artificial Sequence: Synthetic oligonucleotide
  Target: LAMA2; (+) strand; PAM type: YTN; PAM sequence: TTC
atctttgaaatggcctcatg

SEQ ID NO: 383226 - DNA, 20 bp, Artificial Sequence
  Description of Artificial Sequence: Synthetic oligonucleotide
  Target: LAMA2; (+) strand; PAM type: YTN; PAM sequence: CTT
tgaaatggcctcatgaggca

SEQ ID NO: 383227 - DNA, 20 bp, Artificial Sequence
  Description of Artificial Sequence: Synthetic oligonucleotide
  Target: LAMA2; (+) strand; PAM type: YTN; PAM sequence: TTT
gaaatggcctcatgaggcaa

SEQ ID NO: 383228 - DNA, 20 bp, Artificial Sequence
  Description of Artificial Sequence: Synthetic oligonucleotide
  Target: LAMA2; (+) strand; PAM type: YTN; PAM sequence: TTG
aaatggcctcatgaggcaaa

SEQ ID NO: 383229 - DNA, 20 bp, Artificial Sequence
  Description of Artificial Sequence: Synthetic oligonucleotide
  Target: LAMA2; (+) strand; PAM type: YTN; PAM sequence: CTC
atgaggcaaataagaaatag

SEQ ID NO: 383230 - DNA, 20 bp, Artificial Sequence
  Description of Artificial Sequence: Synthetic oligonucleotide
  Target: LAMA2; (+) strand; PAM type: YTN; PAM sequence: CTG
ttattactcccacacagtaa

SEQ ID NO: 383231 - DNA, 20 bp, Artificial Sequence
  Description of Artificial Sequence: Synthetic oligonucleotide
  Target: LAMA2; (+) strand; PAM type: YTN; PAM sequence: TTA
ttactcccacacagtaagtg

SEQ ID NO: 383232 - DNA, 20 bp, Artificial Sequence
  Description of Artificial Sequence: Synthetic oligonucleotide
  Target: LAMA2; (+) strand; PAM type: YTN; PAM sequence: TTA
ctcccacacagtaagtgagg

SEQ ID NO: 383233 - DNA, 20 bp, Artificial Sequence
  Description of Artificial Sequence: Synthetic oligonucleotide
  Target: LAMA2; (+) strand; PAM type: YTN; PAM sequence: CTC
ccacacagtaagtgaggaaa

SEQ ID NO: 383234 - DNA, 20 bp, Artificial Sequence
  Description of Artificial Sequence: Synthetic oligonucleotide
  Target: LAMA2; (+) strand; PAM type: YTN; PAM sequence: CTG
aagcatactgatttctcttt

SEQ ID NO: 383235 - DNA, 20 bp, Artificial Sequence
  Description of Artificial Sequence: Synthetic oligonucleotide
  Target: LAMA2; (+) strand; PAM type: YTN; PAM sequence: CTG
atttctcttttatgtgcaat

SEQ ID NO: 383236 - DNA, 20 bp, Artificial Sequence
  Description of Artificial Sequence: Synthetic oligonucleotide
  Target: LAMA2; (+) strand; PAM type: YTN; PAM sequence: TTT
ctcttttatgtgcaatatgg

SEQ ID NO: 383237 - DNA, 20 bp, Artificial Sequence
  Description of Artificial Sequence: Synthetic oligonucleotide
  Target: LAMA2; (+) strand; PAM type: YTN; PAM sequence: TTC
tcttttatgtgcaatatggc

SEQ ID NO: 383238 - DNA, 20 bp, Artificial Sequence
  Description of Artificial Sequence: Synthetic oligonucleotide
  Target: LAMA2; (+) strand; PAM type: YTN; PAM sequence: CTC
ttttatgtgcaatatggctc

SEQ ID NO: 383239 - DNA, 20 bp, Artificial Sequence
  Description of Artificial Sequence: Synthetic oligonucleotide
  Target: LAMA2; (+) strand; PAM type: YTN; PAM sequence: CTT
ttatgtgcaatatggctctc

SEQ ID NO: 383240 - DNA, 20 bp, Artificial Sequence
  Description of Artificial Sequence: Synthetic oligonucleotide
  Target: LAMA2; (+) strand; PAM type: YTN; PAM sequence: TTT
tatgtgcaatatggctctca

SEQ ID NO: 383241 - DNA, 20 bp, Artificial Sequence
  Description of Artificial Sequence: Synthetic oligonucleotide
  Target: LAMA2; (+) strand; PAM type: YTN; PAM sequence: TTT
atgtgcaatatggctctcag

SEQ ID NO: 383242 - DNA, 20 bp, Artificial Sequence
  Description of Artificial Sequence: Synthetic oligonucleotide
  Target: LAMA2; (+) strand; PAM type: YTN; PAM sequence: TTA
tgtgcaatatggctctcagt

SEQ ID NO: 383243 - DNA, 20 bp, Artificial Sequence
  Description of Artificial Sequence: Synthetic oligonucleotide
  Target: LAMA2; (+) strand; PAM type: YTN; PAM sequence: CTC
tcagtttcatatcatatcca

SEQ ID NO: 383244 - DNA, 20 bp, Artificial Sequence
  Description of Artificial Sequence: Synthetic oligonucleotide
  Target: LAMA2; (+) strand; PAM type: YTN; PAM sequence: CTC
agtttcatatcatatccatt

SEQ ID NO: 383245 - DNA, 20 bp, Artificial Sequence
  Description of Artificial Sequence: Synthetic oligonucleotide
  Target: LAMA2; (+) strand; PAM type: YTN; PAM sequence: TTT
catatcatatccattataca

SEQ ID NO: 383246 - DNA, 20 bp, Artificial Sequence
  Description of Artificial Sequence: Synthetic oligonucleotide
  Target: LAMA2; (+) strand; PAM type: YTN; PAM sequence: TTC
atatcatatccattatacag

SEQ ID NO: 383247 - DNA, 20 bp, Artificial Sequence
  Description of Artificial Sequence: Synthetic oligonucleotide
  Target: LAMA2; (+) strand; PAM type: YTN; PAM sequence: TTA
tacagtgcaatgccctctac

SEQ ID NO: 383248 - DNA, 20 bp, Artificial Sequence
  Description of Artificial Sequence: Synthetic oligonucleotide
  Target: LAMA2; (+) strand; PAM type: YTN; PAM sequence: CTC
taccttggtatagtggcaag

SEQ ID NO: 383249 - DNA, 20 bp, Artificial Sequence
  Description of Artificial Sequence: Synthetic oligonucleotide
  Target: LAMA2; (+) strand; PAM type: YTN; PAM sequence: CTA
ccttggtatagtggcaagca

SEQ ID NO: 383250 - DNA, 20 bp, Artificial Sequence
  Description of Artificial Sequence: Synthetic oligonucleotide
  Target: LAMA2; (+) strand; PAM type: YTN; PAM sequence: CTT
ggtatagtggcaagcatgaa

SEQ ID NO: 383251 - DNA, 20 bp, Artificial Sequence
  Description of Artificial Sequence: Synthetic oligonucleotide
  Target: LAMA2; (+) strand; PAM type: YTN; PAM sequence: TTG
gtatagtggcaagcatgaac

SEQ ID NO: 383252 - DNA, 20 bp, Artificial Sequence
  Description of Artificial Sequence: Synthetic oligonucleotide
  Target: LAMA2; (+) strand; PAM type: YTN; PAM sequence: CTC
tgcagtcagagtgccttgat

SEQ ID NO: 383253 - DNA, 20 bp, Artificial Sequence
  Description of Artificial Sequence: Synthetic oligonucleotide
  Target: LAMA2; (+) strand; PAM type: YTN; PAM sequence: CTG
cagtcagagtgccttgattc

SEQ ID NO: 383254 - DNA, 20 bp, Artificial Sequence
  Description of Artificial Sequence: Synthetic oligonucleotide
  Target: LAMA2; (+) strand; PAM type: YTN; PAM sequence: CTT
gattcaaatcctggcttcac

SEQ ID NO: 383255 - DNA, 20 bp, Artificial Sequence
  Description of Artificial Sequence: Synthetic oligonucleotide
  Target: LAMA2; (+) strand; PAM type: YTN; PAM sequence: TTG
attcaaatcctggcttcacc

SEQ ID NO: 383256 - DNA, 20 bp, Artificial Sequence
  Description of Artificial Sequence: Synthetic oligonucleotide
  Target: LAMA2; (+) strand; PAM type: YTN; PAM sequence: TTC
aaatcctggcttcacccctt

SEQ ID NO: 383257 - DNA, 20 bp, Artificial Sequence
  Description of Artificial Sequence: Synthetic oligonucleotide
  Target: LAMA2; (+) strand; PAM type: YTN; PAM sequence: CTG
gcttcaccccttactggtag

SEQ ID NO: 383258 - DNA, 20 bp, Artificial Sequence
  Description of Artificial Sequence: Synthetic oligonucleotide
  Target: LAMA2; (+) strand; PAM type: YTN; PAM sequence: CTT
caccccttactggtagtgtg

SEQ ID NO: 383259 - DNA, 20 bp, Artificial Sequence
  Description of Artificial Sequence: Synthetic oligonucleotide
  Target: LAMA2; (+) strand; PAM type: YTN; PAM sequence: TTC
accccttactggtagtgtga

SEQ ID NO: 383260 - DNA, 20 bp, Artificial Sequence
  Description of Artificial Sequence: Synthetic oligonucleotide
  Target: LAMA2; (+) strand; PAM type: YTN; PAM sequence: CTT
actggtagtgtgagcctact

SEQ ID NO: 383261 - DNA, 20 bp, Artificial Sequence
  Description of Artificial Sequence: Synthetic oligonucleotide
  Target: LAMA2; (+) strand; PAM type: YTN; PAM sequence: TTA
ctggtagtgtgagcctactc

SEQ ID NO: 383262 - DNA, 20 bp, Artificial Sequence
  Description of Artificial Sequence: Synthetic oligonucleotide
  Target: LAMA2; (+) strand; PAM type: YTN; PAM sequence: CTG
gtagtgtgagcctactcaat

SEQ ID NO: 383263 - DNA, 20 bp, Artificial Sequence
  Description of Artificial Sequence: Synthetic oligonucleotide
  Target: LAMA2; (+) strand; PAM type: YTN; PAM sequence: CTA
ctcaatttatttaacctgaa

SEQ ID NO: 383264 - DNA, 20 bp, Artificial Sequence
  Description of Artificial Sequence: Synthetic oligonucleotide
  Target: LAMA2; (+) strand; PAM type: YTN; PAM sequence: CTC
aatttatttaacctgaatga

SEQ ID NO: 383265 - DNA, 20 bp, Artificial Sequence
  Description of Artificial Sequence: Synthetic oligonucleotide
  Target: LAMA2; (+) strand; PAM type: YTN; PAM sequence: TTT
atttaacctgaatgaggtct

SEQ ID NO: 383266 - DNA, 20 bp, Artificial Sequence
  Description of Artificial Sequence: Synthetic oligonucleotide
  Target: LAMA2; (+) strand; PAM type: YTN; PAM sequence: TTA
tttaacctgaatgaggtctt

SEQ ID NO: 383267 - DNA, 20 bp, Artificial Sequence
  Description of Artificial Sequence: Synthetic oligonucleotide
  Target: LAMA2; (+) strand; PAM type: YTN; PAM sequence: TTT
aacctgaatgaggtcttagt

SEQ ID NO: 383268 - DNA, 20 bp, Artificial Sequence
  Description of Artificial Sequence: Synthetic oligonucleotide
  Target: LAMA2; (+) strand; PAM type: YTN; PAM sequence: TTA
acctgaatgaggtcttagtt

SEQ ID NO: 383269 - DNA, 20 bp, Artificial Sequence
  Description of Artificial Sequence: Synthetic oligonucleotide
  Target: LAMA2; (+) strand; PAM type: YTN; PAM sequence: CTG
aatgaggtcttagtttcttc

SEQ ID NO: 383270 - DNA, 20 bp, Artificial Sequence
  Description of Artificial Sequence: Synthetic oligonucleotide
  Target: LAMA2; (+) strand; PAM type: YTN; PAM sequence: CTT
agtttcttcatttatataat

SEQ ID NO: 383271 - DNA, 20 bp, Artificial Sequence
  Description of Artificial Sequence: Synthetic oligonucleotide
  Target: LAMA2; (+) strand; PAM type: YTN; PAM sequence: TTA
gtttcttcatttatataatg

SEQ ID NO: 383272 - DNA, 20 bp, Artificial Sequence
  Description of Artificial Sequence: Synthetic oligonucleotide
  Target: LAMA2; (+) strand; PAM type: YTN; PAM sequence: TTT
cttcatttatataatgaaaa

SEQ ID NO: 383273 - DNA, 20 bp, Artificial Sequence
  Description of Artificial Sequence: Synthetic oligonucleotide
  Target: LAMA2; (+) strand; PAM type: YTN; PAM sequence: TTC
ttcatttatataatgaaaac

SEQ ID NO: 383274 - DNA, 20 bp, Artificial Sequence
  Description of Artificial Sequence: Synthetic oligonucleotide
  Target: LAMA2; (+) strand; PAM type: YTN; PAM sequence: CTT
catttatataatgaaaacaa

SEQ ID NO: 383275 - DNA, 20 bp, Artificial Sequence
  Description of Artificial Sequence: Synthetic oligonucleotide
  Target: LAMA2; (+) strand; PAM type: YTN; PAM sequence: TTC
atttatataatgaaaacaat

SEQ ID NO: 383276 - DNA, 20 bp, Artificial Sequence
  Description of Artificial Sequence: Synthetic oligonucleotide
  Target: LAMA2; (+) strand; PAM type: YTN; PAM sequence: TTT
atataatgaaaacaataata

SEQ ID NO: 383277 - DNA, 20 bp, Artificial Sequence
  Description of Artificial Sequence: Synthetic oligonucleotide
  Target: LAMA2; (+) strand; PAM type: YTN; PAM sequence: TTA
tataatgaaaacaataatag

SEQ ID NO: 383278 - DNA, 20 bp, Artificial Sequence
  Description of Artificial Sequence: Synthetic oligonucleotide
  Target: LAMA2; (+) strand; PAM type: YTN; PAM sequence: CTA
ctcacagagtttttgtaagg

SEQ ID NO: 383279 - DNA, 20 bp, Artificial Sequence
  Description of Artificial Sequence: Synthetic oligonucleotide
  Target: LAMA2; (+) strand; PAM type: YTN; PAM sequence: CTC
acagagtttttgtaaggatt

SEQ ID NO: 383280 - DNA, 20 bp, Artificial Sequence
  Description of Artificial Sequence: Synthetic oligonucleotide
  Target: LAMA2; (+) strand; PAM type: YTN; PAM sequence: TTT
ttgtaaggatttgatgaaat

SEQ ID NO: 383281 - DNA, 20 bp, Artificial Sequence
  Description of Artificial Sequence: Synthetic oligonucleotide
  Target: LAMA2; (+) strand; PAM type: YTN; PAM sequence: TTT
tgtaaggatttgatgaaata

SEQ ID NO: 383282 - DNA, 20 bp, Artificial Sequence
  Description of Artificial Sequence: Synthetic oligonucleotide
  Target: LAMA2; (+) strand; PAM type: YTN; PAM sequence: TTT
gtaaggatttgatgaaatac

SEQ ID NO: 383283 - DNA, 20 bp, Artificial Sequence
  Description of Artificial Sequence: Synthetic oligonucleotide
  Target: LAMA2; (+) strand; PAM type: YTN; PAM sequence: TTG
taaggatttgatgaaatact

SEQ ID NO: 383284 - DNA, 20 bp, Artificial Sequence
  Description of Artificial Sequence: Synthetic oligonucleotide
  Target: LAMA2; (+) strand; PAM type: YTN; PAM sequence: TTT
gatgaaatactcaataaaag

SEQ ID NO: 383285 - DNA, 20 bp, Artificial Sequence
  Description of Artificial Sequence: Synthetic oligonucleotide
  Target: LAMA2; (+) strand; PAM type: YTN; PAM sequence: TTG
atgaaatactcaataaaagg

SEQ ID NO: 383286 - DNA, 20 bp, Artificial Sequence
  Description of Artificial Sequence: Synthetic oligonucleotide
  Target: LAMA2; (+) strand; PAM type: YTN; PAM sequence: CTC
aataaaaggcttagaacatt

SEQ ID NO: 383287 - DNA, 20 bp, Artificial Sequence
  Description of Artificial Sequence: Synthetic oligonucleotide
  Target: LAMA2; (+) strand; PAM type: YTN; PAM sequence: CTT
agaacattacttagtgcatg

SEQ ID NO: 383288 - DNA, 20 bp, Artificial Sequence
  Description of Artificial Sequence: Synthetic oligonucleotide
  Target: LAMA2; (+) strand; PAM type: YTN; PAM sequence: TTA
gaacattacttagtgcatgg

SEQ ID NO: 383289 - DNA, 20 bp, Artificial Sequence
  Description of Artificial Sequence: Synthetic oligonucleotide
  Target: LAMA2; (+) strand; PAM type: YTN; PAM sequence: TTA
cttagtgcatggtacgcttc

SEQ ID NO: 383290 - DNA, 20 bp, Artificial Sequence
  Description of Artificial Sequence: Synthetic oligonucleotide
  Target: LAMA2; (+) strand; PAM type: YTN; PAM sequence: CTT
agtgcatggtacgcttcata

SEQ ID NO: 383291 - DNA, 20 bp, Artificial Sequence
  Description of Artificial Sequence: Synthetic oligonucleotide
  Target: LAMA2; (+) strand; PAM type: YTN; PAM sequence: TTA
gtgcatggtacgcttcataa

SEQ ID NO: 383292 - DNA, 20 bp, Artificial Sequence
  Description of Artificial Sequence: Synthetic oligonucleotide
  Target: LAMA2; (+) strand; PAM type: YTN; PAM sequence: CTT
cataaaagcaattatgataa

SEQ ID NO: 383293 - DNA, 20 bp, Artificial Sequence
  Description of Artificial Sequence: Synthetic oligonucleotide
  Target: LAMA2; (+) strand; PAM type: YTN; PAM sequence: TTC
ataaaagcaattatgataat

SEQ ID NO: 383294 - DNA, 20 bp, Artificial Sequence
  Description of Artificial Sequence: Synthetic oligonucleotide
  Target: LAMA2; (+) strand; PAM type: YTN; PAM sequence: TTA
tgataatgatgatcataaag

SEQ ID NO: 383295 - DNA, 20 bp, Artificial Sequence
  Description of Artificial Sequence: Synthetic oligonucleotide
  Target: LAMA2; (+) strand; PAM type: YTN; PAM sequence: TTA
ccatacacattatctaccat

SEQ ID NO: 383296 - DNA, 20 bp, Artificial Sequence
  Description of Artificial Sequence: Synthetic oligonucleotide
  Target: LAMA2; (+) strand; PAM type: YTN; PAM sequence: TTA
tctaccatttatagtcgaag

SEQ ID NO: 383297 - DNA, 20 bp, Artificial Sequence
  Description of Artificial Sequence: Synthetic oligonucleotide
  Target: LAMA2; (+) strand; PAM type: YTN; PAM sequence: CTA
ccatttatagtcgaagaacc

SEQ ID NO: 383298 - DNA, 20 bp, Artificial Sequence
  Description of Artificial Sequence: Synthetic oligonucleotide
  Target: LAMA2; (+) strand; PAM type: YTN; PAM sequence: TTT
atagtcgaagaaccaatcag

SEQ ID NO: 383299 - DNA, 20 bp, Artificial Sequence
  Description of Artificial Sequence: Synthetic oligonucleotide
  Target: LAMA2; (+) strand; PAM type: YTN; PAM sequence: TTA
tagtcgaagaaccaatcagt

SEQ ID NO: 383300 - DNA, 20 bp, Artificial Sequence
  Description of Artificial Sequence: Synthetic oligonucleotide
  Target: LAMA2; (+) strand; PAM type: YTN; PAM sequence: TTG
ataattaatcaaaaaataag

SEQ ID NO: 383301 - DNA, 20 bp, Artificial Sequence
  Description of Artificial Sequence: Synthetic oligonucleotide
  Target: LAMA2; (+) strand; PAM type: YTN; PAM sequence: TTA
atcaaaaaataagtaaaaaa

SEQ ID NO: 383302 - DNA, 20 bp, Artificial Sequence
  Description of Artificial Sequence: Synthetic oligonucleotide
  Target: LAMA2; (+) strand; PAM type: YTN; PAM sequence: TTC
atgtctagcgctatgctaga

SEQ ID NO: 383303 - DNA, 20 bp, Artificial Sequence
  Description of Artificial Sequence: Synthetic oligonucleotide
  Target: LAMA2; (+) strand; PAM type: YTN; PAM sequence: CTA
gcgctatgctagattttctt

SEQ ID NO: 383304 - DNA, 20 bp, Artificial Sequence
  Description of Artificial Sequence: Synthetic oligonucleotide
  Target: LAMA2; (+) strand; PAM type: YTN; PAM sequence: CTA
tgctagattttcttactgtc

SEQ ID NO: 383305 - DNA, 20 bp, Artificial Sequence
  Description of Artificial Sequence: Synthetic oligonucleotide
  Target: LAMA2; (+) strand; PAM type: YTN; PAM sequence: CTA
gattttcttactgtctcagt

SEQ ID NO: 383306 - DNA, 20 bp, Artificial Sequence
  Description of Artificial Sequence: Synthetic oligonucleotide
  Target: LAMA2; (+) strand; PAM type: YTN; PAM sequence: TTT
tcttactgtctcagtccatt

SEQ ID NO: 383307 - DNA, 20 bp, Artificial Sequence
  Description of Artificial Sequence: Synthetic oligonucleotide
  Target: LAMA2; (+) strand; PAM type: YTN; PAM sequence: TTT
cttactgtctcagtccattt

SEQ ID NO: 383308 - DNA, 20 bp, Artificial Sequence
  Description of Artificial Sequence: Synthetic oligonucleotide
  Target: LAMA2; (+) strand; PAM type: YTN; PAM sequence: TTC
ttactgtctcagtccatttc

SEQ ID NO: 383309 - DNA, 20 bp, Artificial Sequence
  Description of Artificial Sequence: Synthetic oligonucleotide
  Target: LAMA2; (+) strand; PAM type: YTN; PAM sequence: CTT
actgtctcagtccatttcgg

SEQ ID NO: 383310 - DNA, 20 bp, Artificial Sequence
  Description of Artificial Sequence: Synthetic oligonucleotide
  Target: LAMA2; (+) strand; PAM type: YTN; PAM sequence: TTA
ctgtctcagtccatttcgga

SEQ ID NO: 383311 - DNA, 20 bp, Artificial Sequence
  Description of Artificial Sequence: Synthetic oligonucleotide
  Target: LAMA2; (+) strand; PAM type: YTN; PAM sequence: CTG
tctcagtccatttcggatgt

SEQ ID NO: 383312 - DNA, 20 bp, Artificial Sequence
  Description of Artificial Sequence: Synthetic oligonucleotide
  Target: LAMA2; (+) strand; PAM type: YTN; PAM sequence: CTC
agtccatttcggatgttgta

SEQ ID NO: 383313 - DNA, 20 bp, Artificial Sequence
  Description of Artificial Sequence: Synthetic oligonucleotide
  Target: LAMA2; (+) strand; PAM type: YTN; PAM sequence: TTT
cggatgttgtaacaaaatat

SEQ ID NO: 383314 - DNA, 20 bp, Artificial Sequence
  Description of Artificial Sequence: Synthetic oligonucleotide
  Target: LAMA2; (+) strand; PAM type: YTN; PAM sequence: TTC
ggatgttgtaacaaaatatc

SEQ ID NO: 383315 - DNA, 20 bp, Artificial Sequence
  Description of Artificial Sequence: Synthetic oligonucleotide
  Target: LAMA2; (+) strand; PAM type: YTN; PAM sequence: TTG
taacaaaatatcataaactg

SEQ ID NO: 383316 - DNA, 20 bp, Artificial Sequence
  Description of Artificial Sequence: Synthetic oligonucleotide
  Target: LAMA2; (+) strand; PAM type: YTN; PAM sequence: CTG
ggtagcttataaataacaga

SEQ ID NO: 383317 - DNA, 20 bp, Artificial Sequence
  Description of Artificial Sequence: Synthetic oligonucleotide
  Target: LAMA2; (+) strand; PAM type: YTN; PAM sequence: CTT
ataaataacagaaacttatt

SEQ ID NO: 383318 - DNA, 20 bp, Artificial Sequence
  Description of Artificial Sequence: Synthetic oligonucleotide
  Target: LAMA2; (+) strand; PAM type: YTN; PAM sequence: TTA
taaataacagaaacttattt

SEQ ID NO: 383319 - DNA, 20 bp, Artificial Sequence
  Description of Artificial Sequence: Synthetic oligonucleotide
  Target: LAMA2; (+) strand; PAM type: YTN; PAM sequence: CTT
atttcccacagttctgaagg

SEQ ID NO: 383320 - DNA, 20 bp, Artificial Sequence
  Description of Artificial Sequence: Synthetic oligonucleotide
  Target: LAMA2; (+) strand; PAM type: YTN; PAM sequence: TTA
tttcccacagttctgaaggc

SEQ ID NO: 383321 - DNA, 20 bp, Artificial Sequence
  Description of Artificial Sequence: Synthetic oligonucleotide
  Target: LAMA2; (+) strand; PAM type: YTN; PAM sequence: TTT
cccacagttctgaaggctgg

SEQ ID NO: 383322 - DNA, 20 bp, Artificial Sequence
  Description of Artificial Sequence: Synthetic oligonucleotide
  Target: LAMA2; (+) strand; PAM type: YTN; PAM sequence: TTC
ccacagttctgaaggctggg

SEQ ID NO: 383323 - DNA, 20 bp, Artificial Sequence
  Description of Artificial Sequence: Synthetic oligonucleotide
  Target: LAMA2; (+) strand; PAM type: YTN; PAM sequence: TTC
tgaaggctgggaagtccaag

SEQ ID NO: 383324 - DNA, 20 bp, Artificial Sequence
  Description of Artificial Sequence: Synthetic oligonucleotide
  Target: LAMA2; (+) strand; PAM type: YTN; PAM sequence: CTG
aaggctgggaagtccaagat

SEQ ID NO: 383325 - DNA, 20 bp, Artificial Sequence
  Description of Artificial Sequence: Synthetic oligonucleotide
  Target: LAMA2; (+) strand; PAM type: YTN; PAM sequence: CTG
ggaagtccaagatcaagtct

SEQ ID NO: 383326 - DNA, 20 bp, Artificial Sequence
  Description of Artificial Sequence: Synthetic oligonucleotide
  Target: LAMA2; (+) strand; PAM type: YTN; PAM sequence: CTC
cagcaaagtcagtgtctggg

SEQ ID NO: 383327 - DNA, 20 bp, Artificial Sequence
  Description of Artificial Sequence: Synthetic oligonucleotide
  Target: LAMA2; (+) strand; PAM type: YTN; PAM sequence: CTG
gggaaggcttctttcctggt

SEQ ID NO: 383328 - DNA, 20 bp, Artificial Sequence
  Description of Artificial Sequence: Synthetic oligonucleotide
  Target: LAMA2; (+) strand; PAM type: YTN; PAM sequence: CTT
ctttcctggtcatagctgac

SEQ ID NO: 383329 - DNA, 20 bp, Artificial Sequence
  Description of Artificial Sequence: Synthetic oligonucleotide
  Target: LAMA2; (+) strand; PAM type: YTN; PAM sequence: TTC
tttcctggtcatagctgacc

SEQ ID NO: 383330 - DNA, 20 bp, Artificial Sequence
  Description of Artificial Sequence: Synthetic oligonucleotide
  Target: LAMA2; (+) strand; PAM type: YTN; PAM sequence: CTT
tcctggtcatagctgacccc

SEQ ID NO: 383331 - DNA, 20 bp, Artificial Sequence
  Description of Artificial Sequence: Synthetic oligonucleotide
  Target: LAMA2; (+) strand; PAM type: YTN; PAM sequence: TTT
cctggtcatagctgacccct

SEQ ID NO: 383332 - DNA, 20 bp, Artificial Sequence
  Description of Artificial Sequence: Synthetic oligonucleotide
  Target: LAMA2; (+) strand; PAM type: YTN; PAM sequence: TTC
ctggtcatagctgacccctt

SEQ ID NO: 383333 - DNA, 20 bp, Artificial Sequence
  Description of Artificial Sequence: Synthetic oligonucleotide
  Target: LAMA2; (+) strand; PAM type: YTN; PAM sequence: CTG
gtcatagctgaccccttctt

SEQ ID NO: 383334 - DNA, 20 bp, Artificial Sequence
  Description of Artificial Sequence: Synthetic oligonucleotide
  Target: LAMA2; (+) strand; PAM type: YTN; PAM sequence: CTG
accccttctttctttgtctt

SEQ ID NO: 383335 - DNA, 20 bp, Artificial Sequence
  Description of Artificial Sequence: Synthetic oligonucleotide
  Target: LAMA2; (+) strand; PAM type: YTN; PAM sequence: CTT
ctttctttgtcttcacgtgt

SEQ ID NO: 383336 - DNA, 20 bp, Artificial Sequence
  Description of Artificial Sequence: Synthetic oligonucleotide
  Target: LAMA2; (+) strand; PAM type: YTN; PAM sequence: TTC
tttctttgtcttcacgtgtt

SEQ ID NO: 383337 - DNA, 20 bp, Artificial Sequence
  Description of Artificial Sequence: Synthetic oligonucleotide
  Target: LAMA2; (+) strand; PAM type: YTN; PAM sequence: CTT
tctttgtcttcacgtgttgg

SEQ ID NO: 383338 - DNA, 20 bp, Artificial Sequence
  Description of Artificial Sequence: Synthetic oligonucleotide
  Target: LAMA2; (+) strand; PAM type: YTN; PAM sequence: TTT
ctttgtcttcacgtgttgga

SEQ ID NO: 383339 - DNA, 20 bp, Artificial Sequence
  Description of Artificial Sequence: Synthetic oligonucleotide
  Target: LAMA2; (+) strand; PAM type: YTN; PAM sequence: TTC
tttgtcttcacgtgttggaa

SEQ ID NO: 383340 - DNA, 20 bp, Artificial Sequence
  Description of Artificial Sequence: Synthetic oligonucleotide
  Target: LAMA2; (+) strand; PAM type: YTN; PAM sequence: CTT
tgtcttcacgtgttggaagg

SEQ ID NO: 383341 - DNA, 20 bp, Artificial Sequence
  Description of Artificial Sequence: Synthetic oligonucleotide
  Target: LAMA2; (+) strand; PAM type: YTN; PAM sequence: TTT
gtcttcacgtgttggaaggc

SEQ ID NO: 383342 - DNA, 20 bp, Artificial Sequence
  Description of Artificial Sequence: Synthetic oligonucleotide
  Target: LAMA2; (+) strand; PAM type: YTN; PAM sequence: TTG
tcttcacgtgttggaaggca

SEQ ID NO: 383343 - DNA, 20 bp, Artificial Sequence
  Description of Artificial Sequence: Synthetic oligonucleotide
  Target: LAMA2; (+) strand; PAM type: YTN; PAM sequence: CTT
cacgtgttggaaggcactag

SEQ ID NO: 383344 - DNA, 20 bp, Artificial Sequence
  Description of Artificial Sequence: Synthetic oligonucleotide
  Target: LAMA2; (+) strand; PAM type: YTN; PAM sequence: TTC
acgtgttggaaggcactaga

SEQ ID NO: 383345 - DNA, 20 bp, Artificial Sequence
  Description of Artificial Sequence: Synthetic oligonucleotide
  Target: LAMA2; (+) strand; PAM type: YTN; PAM sequence: TTG
gaaggcactagatagctctc

SEQ ID NO: 383346 - DNA, 20 bp, Artificial Sequence
  Description of Artificial Sequence: Synthetic oligonucleotide
  Target: LAMA2; (+) strand; PAM type: YTN; PAM sequence: CTA
gatagctctctggggtctct

SEQ ID NO: 383347 - DNA, 20 bp, Artificial Sequence
  Description of Artificial Sequence: Synthetic oligonucleotide
  Target: LAMA2; (+) strand; PAM type: YTN; PAM sequence: CTC
tctggggtctcttttgtaaa

SEQ ID NO: 383348 - DNA, 20 bp, Artificial Sequence
  Description of Artificial Sequence: Synthetic oligonucleotide
  Target: LAMA2; (+) strand; PAM type: YTN; PAM sequence: CTC
tggggtctcttttgtaaagg

SEQ ID NO: 383349 - DNA, 20 bp, Artificial Sequence
  Description of Artificial Sequence: Synthetic oligonucleotide
  Target: LAMA2; (+) strand; PAM type: YTN; PAM sequence: CTG
gggtctcttttgtaaaggcc

SEQ ID NO: 383350 - DNA, 20 bp, Artificial Sequence
  Description of Artificial Sequence: Synthetic oligonucleotide
  Target: LAMA2; (+) strand; PAM type: YTN; PAM sequence: CTC
ttttgtaaaggccctaatcc

SEQ ID NO: 383351 - DNA, 20 bp, Artificial Sequence
  Description of Artificial Sequence: Synthetic oligonucleotide
  Target: LAMA2; (+) strand; PAM type: YTN; PAM sequence: CTT
ttgtaaaggccctaatccca

SEQ ID NO: 383352 - DNA, 20 bp, Artificial Sequence
  Description of Artificial Sequence: Synthetic oligonucleotide
  Target: LAMA2; (+) strand; PAM type: YTN; PAM sequence: TTT
tgtaaaggccctaatcccac

SEQ ID NO: 383353 - DNA, 20 bp, Artificial Sequence
  Description of Artificial Sequence: Synthetic oligonucleotide
  Target: LAMA2; (+) strand; PAM type: YTN; PAM sequence: TTT
gtaaaggccctaatcccact

SEQ ID NO: 383354 - DNA, 20 bp, Artificial Sequence
  Description of Artificial Sequence: Synthetic oligonucleotide
  Target: LAMA2; (+) strand; PAM type: YTN; PAM sequence: TTG
taaaggccctaatcccactc

SEQ ID NO: 383355 - DNA, 20 bp, Artificial Sequence
  Description of Artificial Sequence: Synthetic oligonucleotide
  Target: LAMA2; (+) strand; PAM type: YTN; PAM sequence: CTA
atcccactcatgaggctcca

SEQ ID NO: 383356 - DNA, 20 bp, Artificial Sequence
  Description of Artificial Sequence: Synthetic oligonucleotide
  Target: LAMA2; (+) strand; PAM type: YTN; PAM sequence: CTC
atgaggctccagcctcatga

SEQ ID NO: 383357 - DNA, 20 bp, Artificial Sequence
  Description of Artificial Sequence: Synthetic oligonucleotide
  Target: LAMA2; (+) strand; PAM type: YTN; PAM sequence: CTC
cagcctcatgatgtaatcac

SEQ ID NO: 383358 - DNA, 20 bp, Artificial Sequence
  Description of Artificial Sequence: Synthetic oligonucleotide
  Target: LAMA2; (+) strand; PAM type: YTN; PAM sequence: CTC
atgatgtaatcacctcccaa

SEQ ID NO: 383359 - DNA, 20 bp, Artificial Sequence
  Description of Artificial Sequence: Synthetic oligonucleotide
  Target: LAMA2; (+) strand; PAM type: YTN; PAM sequence: CTC
ccaaaggccccatctcctat

SEQ ID NO: 383360 - DNA, 20 bp, Artificial Sequence
  Description of Artificial Sequence: Synthetic oligonucleotide
  Target: LAMA2; (+) strand; PAM type: YTN; PAM sequence: CTC
ctattactatcacactggga

SEQ ID NO: 383361 - DNA, 20 bp, Artificial Sequence
  Description of Artificial Sequence: Synthetic oligonucleotide
  Target: LAMA2; (+) strand; PAM type: YTN; PAM sequence: CTA
ttactatcacactgggagac

SEQ ID NO: 383362 - DNA, 20 bp, Artificial Sequence
  Description of Artificial Sequence: Synthetic oligonucleotide
  Target: LAMA2; (+) strand; PAM type: YTN; PAM sequence: TTA
ctatcacactgggagacagg

SEQ ID NO: 383363 - DNA, 20 bp, Artificial Sequence
  Description of Artificial Sequence: Synthetic oligonucleotide
  Target: LAMA2; (+) strand; PAM type: YTN; PAM sequence: CTA
tcacactgggagacaggatt

SEQ ID NO: 383364 - DNA, 20 bp, Artificial Sequence
  Description of Artificial Sequence: Synthetic oligonucleotide
  Target: LAMA2; (+) strand; PAM type: YTN; PAM sequence: CTG
ggagacaggatttcaacata

SEQ ID NO: 383365 - DNA, 20 bp, Artificial Sequence
  Description of Artificial Sequence: Synthetic oligonucleotide
  Target: LAMA2; (+) strand; PAM type: YTN; PAM sequence: TTT
caacatacaaatttttggag

SEQ ID NO: 383366 - DNA, 20 bp, Artificial Sequence
  Description of Artificial Sequence: Synthetic oligonucleotide
  Target: LAMA2; (+) strand; PAM type: YTN; PAM sequence: TTC
aacatacaaatttttggaga

SEQ ID NO: 383367 - DNA, 20 bp, Artificial Sequence
  Description of Artificial Sequence: Synthetic oligonucleotide
  Target: LAMA2; (+) strand; PAM type: YTN; PAM sequence: TTT
ttggagaacacagttgttca

SEQ ID NO: 383368 - DNA, 20 bp, Artificial Sequence
  Description of Artificial Sequence: Synthetic oligonucleotide
  Target: LAMA2; (+) strand; PAM type: YTN; PAM sequence: TTT
tggagaacacagttgttcag

SEQ ID NO: 383369 - DNA, 20 bp, Artificial Sequence
  Description of Artificial Sequence: Synthetic oligonucleotide
  Target: LAMA2; (+) strand; PAM type: YTN; PAM sequence: TTT
ggagaacacagttgttcagg

SEQ ID NO: 383370 - DNA, 20 bp, Artificial Sequence
  Description of Artificial Sequence: Synthetic oligonucleotide
  Target: LAMA2; (+) strand; PAM type: YTN; PAM sequence: TTG
gagaacacagttgttcaggc

SEQ ID NO: 383371 - DNA, 20 bp, Artificial Sequence
  Description of Artificial Sequence: Synthetic oligonucleotide
  Target: LAMA2; (+) strand; PAM type: YTN; PAM sequence: TTG
ttcaggccatagcaagcctt

SEQ ID NO: 383372 - DNA, 20 bp, Artificial Sequence
  Description of Artificial Sequence: Synthetic oligonucleotide
  Target: LAMA2; (+) strand; PAM type: YTN; PAM sequence: TTC
aggccatagcaagccttaac

SEQ ID NO: 383373 - DNA, 20 bp, Artificial Sequence
  Description of Artificial Sequence: Synthetic oligonucleotide
  Target: LAMA2; (+) strand; PAM type: YTN; PAM sequence: CTT
aacccccaacatgatgatat

SEQ ID NO: 383374 - DNA, 20 bp, Artificial Sequence
  Description of Artificial Sequence: Synthetic oligonucleotide
  Target: LAMA2; (+) strand; PAM type: YTN; PAM sequence: TTA
acccccaacatgatgatatt

SEQ ID NO: 383375 - DNA, 20 bp, Artificial Sequence
  Description of Artificial Sequence: Synthetic oligonucleotide
  Target: LAMA2; (+) strand; PAM type: YTN; PAM sequence: TTT
ggagatgggcactcacttat

SEQ ID NO: 383376 - DNA, 20 bp, Artificial Sequence
  Description of Artificial Sequence: Synthetic oligonucleotide
  Target: LAMA2; (+) strand; PAM type: YTN; PAM sequence: TTG
gagatgggcactcacttatc

SEQ ID NO: 383377 - DNA, 20 bp, Artificial Sequence
  Description of Artificial Sequence: Synthetic oligonucleotide
  Target: LAMA2; (+) strand; PAM type: YTN; PAM sequence: CTC
acttatcttgtttttcttta

SEQ ID NO: 383378 - DNA, 20 bp, Artificial Sequence
  Description of Artificial Sequence: Synthetic oligonucleotide
  Target: LAMA2; (+) strand; PAM type: YTN; PAM sequence: CTT
atcttgtttttctttatctt

SEQ ID NO: 383379 - DNA, 20 bp, Artificial Sequence
  Description of Artificial Sequence: Synthetic oligonucleotide
  Target: LAMA2; (+) strand; PAM type: YTN; PAM sequence: TTA
tcttgtttttctttatcttc

SEQ ID NO: 383380 - DNA, 20 bp, Artificial Sequence
  Description of Artificial Sequence: Synthetic oligonucleotide
  Target: LAMA2; (+) strand; PAM type: YTN; PAM sequence: CTT
gtttttctttatcttcacac

SEQ ID NO: 383381 - DNA, 20 bp, Artificial Sequence
  Description of Artificial Sequence: Synthetic oligonucleotide
  Target: LAMA2; (+) strand; PAM type: YTN; PAM sequence: TTG
tttttctttatcttcacacc

SEQ ID NO: 383382 - DNA, 20 bp, Artificial Sequence
  Description of Artificial Sequence: Synthetic oligonucleotide
  Target: LAMA2; (+) strand; PAM type: YTN; PAM sequence: TTT
ttctttatcttcacaccttt

SEQ ID NO: 383383 - DNA, 20 bp, Artificial Sequence
  Description of Artificial Sequence: Synthetic oligonucleotide
  Target: LAMA2; (+) strand; PAM type: YTN; PAM sequence: TTT
tctttatcttcacacctttc

SEQ ID NO: 383384 - DNA, 20 bp, Artificial Sequence
  Description of Artificial Sequence: Synthetic oligonucleotide
  Target: LAMA2; (+) strand; PAM type: YTN; PAM sequence: TTT
ctttatcttcacacctttcc

SEQ ID NO: 383385 - DNA, 20 bp, Artificial Sequence
  Description of Artificial Sequence: Synthetic oligonucleotide
  Target: LAMA2; (+) strand; PAM type: YTN; PAM sequence: TTC
tttatcttcacacctttccc

SEQ ID NO: 383386 - DNA, 20 bp, Artificial Sequence
  Description of Artificial Sequence: Synthetic oligonucleotide
  Target: LAMA2; (+) strand; PAM type: YTN; PAM sequence: CTT
tatcttcacacctttccctg

SEQ ID NO: 383387 - DNA, 20 bp, Artificial Sequence
  Description of Artificial Sequence: Synthetic oligonucleotide
  Target: LAMA2; (+) strand; PAM type: YTN; PAM sequence: TTT
atcttcacacctttccctga

SEQ ID NO: 383388 - DNA, 20 bp, Artificial Sequence
  Description of Artificial Sequence: Synthetic oligonucleotide
  Target: LAMA2; (+) strand; PAM type: YTN; PAM sequence: TTA
tcttcacacctttccctgaa

SEQ ID NO: 383389 - DNA, 20 bp, Artificial Sequence
  Description of Artificial Sequence: Synthetic oligonucleotide
  Target: LAMA2; (+) strand; PAM type: YTN; PAM sequence: CTT
cacacctttccctgaaaata

SEQ ID NO: 383390 - DNA, 20 bp, Artificial Sequence
  Description of Artificial Sequence: Synthetic oligonucleotide
  Target: LAMA2; (+) strand; PAM type: YTN; PAM sequence: TTC
acacctttccctgaaaatat

SEQ ID NO: 383391 - DNA, 20 bp, Artificial Sequence
  Description of Artificial Sequence: Synthetic oligonucleotide
  Target: LAMA2; (+) strand; PAM type: YTN; PAM sequence: CTT
tccctgaaaatataaagtgc

SEQ ID NO: 383392 - DNA, 20 bp, Artificial Sequence
  Description of Artificial Sequence: Synthetic oligonucleotide
  Target: LAMA2; (+) strand; PAM type: YTN; PAM sequence: TTT
ccctgaaaatataaagtgca

SEQ ID NO: 383393 - DNA, 20 bp, Artificial Sequence
  Description of Artificial Sequence: Synthetic oligonucleotide
  Target: LAMA2; (+) strand; PAM type: YTN; PAM sequence: TTC
cctgaaaatataaagtgcat

SEQ ID NO: 383394 - DNA, 20 bp, Artificial Sequence
  Description of Artificial Sequence: Synthetic oligonucleotide
  Target: LAMA2; (+) strand; PAM type: YTN; PAM sequence: CTG
aaaatataaagtgcatagga

SEQ ID NO: 383395 - DNA, 20 bp, Artificial Sequence
  Description of Artificial Sequence: Synthetic oligonucleotide
  Target: LAMA2; (+) strand; PAM type: YTN; PAM sequence: CTG
tagaaagctttatagactaa

SEQ ID NO: 383396 - DNA, 20 bp, Artificial Sequence
  Description of Artificial Sequence: Synthetic oligonucleotide
  Target: LAMA2; (+) strand; PAM type: YTN; PAM sequence: CTT
tatagactaaatattttaaa

SEQ ID NO: 383397 - DNA, 20 bp, Artificial Sequence
  Description of Artificial Sequence: Synthetic oligonucleotide
  Target: LAMA2; (+) strand; PAM type: YTN; PAM sequence: TTT
atagactaaatattttaaag

SEQ ID NO: 383398 - DNA, 20 bp, Artificial Sequence
  Description of Artificial Sequence: Synthetic oligonucleotide
  Target: LAMA2; (+) strand; PAM type: YTN; PAM sequence: TTA
tagactaaatattttaaaga

SEQ ID NO: 383399 - DNA, 20 bp, Artificial Sequence
  Description of Artificial Sequence: Synthetic oligonucleotide
  Target: LAMA2; (+) strand; PAM type: YTN; PAM sequence: CTA
aatattttaaagaaacccag

SEQ ID NO: 383400 - DNA, 20 bp, Artificial Sequence
  Description of Artificial Sequence: Synthetic oligonucleotide
  Target: LAMA2; (+) strand; PAM type: YTN; PAM sequence: TTT
taaagaaacccagatcacct

SEQ ID NO: 383401 - DNA, 20 bp, Artificial Sequence
  Description of Artificial Sequence: Synthetic oligonucleotide
  Target: LAMA2; (+) strand; PAM type: YTN; PAM sequence: TTT
aaagaaacccagatcacctt

SEQ ID NO: 383402 - DNA, 20 bp, Artificial Sequence
  Description of Artificial Sequence: Synthetic oligonucleotide
  Target: LAMA2; (+) strand; PAM type: YTN; PAM sequence: TTA
aagaaacccagatcaccttg

SEQ ID NO: 383403 - DNA, 20 bp, Artificial Sequence
  Description of Artificial Sequence: Synthetic oligonucleotide
  Target: LAMA2; (+) strand; PAM type: YTN; PAM sequence: CTT
gtaactatgctcttcatcat

SEQ ID NO: 383404 - DNA, 20 bp, Artificial Sequence
  Description of Artificial Sequence: Synthetic oligonucleotide
  Target: LAMA2; (+) strand; PAM type: YTN; PAM sequence: TTG
taactatgctcttcatcata

SEQ ID NO: 383405 - DNA, 20 bp, Artificial Sequence
  Description of Artificial Sequence: Synthetic oligonucleotide
  Target: LAMA2; (+) strand; PAM type: YTN; PAM sequence: CTA
tgctcttcatcatacctaat

SEQ ID NO: 383406 - DNA, 20 bp, Artificial Sequence
  Description of Artificial Sequence: Synthetic oligonucleotide
  Target: LAMA2; (+) strand; PAM type: YTN; PAM sequence: CTC
ttcatcatacctaatgatac

SEQ ID NO: 383407 - DNA, 20 bp, Artificial Sequence
  Description of Artificial Sequence: Synthetic oligonucleotide
  Target: LAMA2; (+) strand; PAM type: YTN; PAM sequence: CTT
catcatacctaatgatactt

SEQ ID NO: 383408 - DNA, 20 bp, Artificial Sequence
  Description of Artificial Sequence: Synthetic oligonucleotide
  Target: LAMA2; (+) strand; PAM type: YTN; PAM sequence: TTC
atcatacctaatgatacttg

SEQ ID NO: 383409 - DNA, 20 bp, Artificial Sequence
  Description of Artificial Sequence: Synthetic oligonucleotide
  Target: LAMA2; (+) strand; PAM type: YTN; PAM sequence: CTA
atgatacttgcaagataatt

SEQ ID NO: 383410 - DNA, 20 bp, Artificial Sequence
  Description of Artificial Sequence: Synthetic oligonucleotide
  Target: LAMA2; (+) strand; PAM type: YTN; PAM sequence: CTT
gcaagataattgttgcttca

SEQ ID NO: 383411 - DNA, 20 bp, Artificial Sequence
  Description of Artificial Sequence: Synthetic oligonucleotide
  Target: LAMA2; (+) strand; PAM type: YTN; PAM sequence: TTG
caagataattgttgcttcat

SEQ ID NO: 383412 - DNA, 20 bp, Artificial Sequence
  Description of Artificial Sequence: Synthetic oligonucleotide
  Target: LAMA2; (+) strand; PAM type: YTN; PAM sequence: TTG
ttgcttcatcctaggcatta

SEQ ID NO: 383413 - DNA, 20 bp, Artificial Sequence
  Description of Artificial Sequence: Synthetic oligonucleotide
  Target: LAMA2; (+) strand; PAM type: YTN; PAM sequence: TTG
cttcatcctaggcattaata

SEQ ID NO: 383414 - DNA, 20 bp, Artificial Sequence
  Description of Artificial Sequence: Synthetic oligonucleotide
  Target: LAMA2; (+) strand; PAM type: YTN; PAM sequence: CTT
catcctaggcattaataaat

SEQ ID NO: 383415 - DNA, 20 bp, Artificial Sequence
  Description of Artificial Sequence: Synthetic oligonucleotide
  Target: LAMA2; (+) strand; PAM type: YTN; PAM sequence: TTC
atcctaggcattaataaatc

SEQ ID NO: 383416 - DNA, 20 bp, Artificial Sequence
  Description of Artificial Sequence: Synthetic oligonucleotide
  Target: LAMA2; (+) strand; PAM type: YTN; PAM sequence: CTA
ggcattaataaatcctgtac

SEQ ID NO: 383417 - DNA, 20 bp, Artificial Sequence
  Description of Artificial Sequence: Synthetic oligonucleotide
  Target: LAMA2; (+) strand; PAM type: YTN; PAM sequence: TTA
ataaatcctgtacataggca

SEQ ID NO: 383418 - DNA, 20 bp, Artificial Sequence
  Description of Artificial Sequence: Synthetic oligonucleotide
  Target: LAMA2; (+) strand; PAM type: YTN; PAM sequence: CTG
tacataggcatgttattatg

SEQ ID NO: 383419 - DNA, 20 bp, Artificial Sequence
  Description of Artificial Sequence: Synthetic oligonucleotide
  Target: LAMA2; (+) strand; PAM type: YTN; PAM sequence: TTA
ttatgaatagctcagtgaca

SEQ ID NO: 383420 - DNA, 20 bp, Artificial Sequence
  Description of Artificial Sequence: Synthetic oligonucleotide
  Target: LAMA2; (+) strand; PAM type: YTN; PAM sequence: TTA
tgaatagctcagtgacattg

SEQ ID NO: 383421 - DNA, 20 bp, Artificial Sequence
  Description of Artificial Sequence: Synthetic oligonucleotide
  Target: LAMA2; (+) strand; PAM type: YTN; PAM sequence: CTC
agtgacattgctccttaaga

SEQ ID NO: 383422 - DNA, 20 bp, Artificial Sequence
  Description of Artificial Sequence: Synthetic oligonucleotide
  Target: LAMA2; (+) strand; PAM type: YTN; PAM sequence: TTG
ctccttaagaaaaaaaattt

SEQ ID NO: 383423 - DNA, 20 bp, Artificial Sequence
  Description of Artificial Sequence: Synthetic oligonucleotide
  Target: LAMA2; (+) strand; PAM type: YTN; PAM sequence: CTC
cttaagaaaaaaaatttttt

SEQ ID NO: 383424 - DNA, 20 bp, Artificial Sequence
  Description of Artificial Sequence: Synthetic oligonucleotide
  Target: LAMA2; (+) strand; PAM type: YTN; PAM sequence: CTT
aagaaaaaaaatttttttga

SEQ ID NO: 383425 - DNA, 20 bp, Artificial Sequence
  Description of Artificial Sequence: Synthetic oligonucleotide
  Target: LAMA2; (+) strand; PAM type: YTN; PAM sequence: TTA
agaaaaaaaatttttttgaa

SEQ ID NO: 383426 - DNA, 20 bp, Artificial Sequence
  Description of Artificial Sequence: Synthetic oligonucleotide
  Target: LAMA2; (+) strand; PAM type: YTN; PAM sequence: TTT
ttttgaagactaaaacctat

SEQ ID NO: 383427 - DNA, 20 bp, Artificial Sequence
  Description of Artificial Sequence: Synthetic oligonucleotide
  Target: LAMA2; (+) strand; PAM type: YTN; PAM sequence: TTT
tttgaagactaaaacctatg

SEQ ID NO: 383428 - DNA, 20 bp, Artificial Sequence
  Description of Artificial Sequence: Synthetic oligonucleotide
  Target: LAMA2; (+) strand; PAM type: YTN; PAM sequence: TTT
ttgaagactaaaacctatgt

SEQ ID NO: 383429 - DNA, 20 bp, Artificial Sequence
  Description of Artificial Sequence: Synthetic oligonucleotide
  Target: LAMA2; (+) strand; PAM type: YTN; PAM sequence: TTT
tgaagactaaaacctatgta

SEQ ID NO: 383430 - DNA, 20 bp, Artificial Sequence
  Description of Artificial Sequence: Synthetic oligonucleotide
  Target: LAMA2; (+) strand; PAM type: YTN; PAM sequence: TTT
gaagactaaaacctatgtaa

SEQ ID NO: 383431 - DNA, 20 bp, Artificial Sequence
  Description of Artificial Sequence: Synthetic oligonucleotide
  Target: LAMA2; (+) strand; PAM type: YTN; PAM sequence: TTG
aagactaaaacctatgtaat

SEQ ID NO: 383432 - DNA, 20 bp, Artificial Sequence
  Description of Artificial Sequence: Synthetic oligonucleotide
  Target: LAMA2; (+) strand; PAM type: YTN; PAM sequence: CTA
aaacctatgtaatactgagt

SEQ ID NO: 383433 - DNA, 20 bp, Artificial Sequence
  Description of Artificial Sequence: Synthetic oligonucleotide
  Target: LAMA2; (+) strand; PAM type: YTN; PAM sequence: CTA
tgtaatactgagtccaaggg

SEQ ID NO: 383434 - DNA, 20 bp, Artificial Sequence
  Description of Artificial Sequence: Synthetic oligonucleotide
  Target: LAMA2; (+) strand; PAM type: YTN; PAM sequence: CTG
agtccaaggggatagcggga

SEQ ID NO: 383435 - DNA, 20 bp, Artificial Sequence
  Description of Artificial Sequence: Synthetic oligonucleotide
  Target: LAMA2; (+) strand; PAM type: YTN; PAM sequence: CTA
acagtaactagtacacacac

SEQ ID NO: 383436 - DNA, 20 bp, Artificial Sequence
  Description of Artificial Sequence: Synthetic oligonucleotide
  Target: LAMA2; (+) strand; PAM type: YTN; PAM sequence: CTA
gtacacacacataggtagta

SEQ ID NO: 383437 - DNA, 20 bp, Artificial Sequence
  Description of Artificial Sequence: Synthetic oligonucleotide
  Target: LAMA2; (+) strand; PAM type: YTN; PAM sequence: TTT
tcatttaatcattgctacac

SEQ ID NO: 383438 - DNA, 20 bp, Artificial Sequence
  Description of Artificial Sequence: Synthetic oligonucleotide
  Target: LAMA2; (+) strand; PAM type: YTN; PAM sequence: TTT
catttaatcattgctacacc

SEQ ID NO: 383439 - DNA, 20 bp, Artificial Sequence
  Description of Artificial Sequence: Synthetic oligonucleotide
  Target: LAMA2; (+) strand; PAM type: YTN; PAM sequence: TTC
atttaatcattgctacaccc

SEQ ID NO: 383440 - DNA, 20 bp, Artificial Sequence
  Description of Artificial Sequence: Synthetic oligonucleotide
  Target: LAMA2; (+) strand; PAM type: YTN; PAM sequence: TTT
aatcattgctacaccctgta

SEQ ID NO: 383441 - DNA, 20 bp, Artificial Sequence
  Description of Artificial Sequence: Synthetic oligonucleotide
  Target: LAMA2; (+) strand; PAM type: YTN; PAM sequence: TTA
atcattgctacaccctgtag

SEQ ID NO: 383442 - DNA, 20 bp, Artificial Sequence
  Description of Artificial Sequence: Synthetic oligonucleotide
  Target: LAMA2; (+) strand; PAM type: YTN; PAM sequence: TTG
ctacaccctgtagtcagatt

SEQ ID NO: 383443 - DNA, 20 bp, Artificial Sequence
  Description of Artificial Sequence: Synthetic oligonucleotide
  Target: LAMA2; (+) strand; PAM type: YTN; PAM sequence: CTA
caccctgtagtcagattatt

SEQ ID NO: 383444 - DNA, 20 bp, Artificial Sequence
  Description of Artificial Sequence: Synthetic oligonucleotide
  Target: LAMA2; (+) strand; PAM type: YTN; PAM sequence: CTG
tagtcagattatttctccta

SEQ ID NO: 383445 - DNA, 20 bp, Artificial Sequence
  Description of Artificial Sequence: Synthetic oligonucleotide
  Target: LAMA2; (+) strand; PAM type: YTN; PAM sequence: TTA
tttctcctattttttttttc

SEQ ID NO: 383446 - DNA, 20 bp, Artificial Sequence
  Description of Artificial Sequence: Synthetic oligonucleotide
  Target: LAMA2; (+) strand; PAM type: YTN; PAM sequence: TTT
ctcctattttttttttcaca

SEQ ID NO: 383447 - DNA, 20 bp, Artificial Sequence
  Description of Artificial Sequence: Synthetic oligonucleotide
  Target: LAMA2; (+) strand; PAM type: YTN; PAM sequence: TTC
tcctattttttttttcacat

SEQ ID NO: 383448 - DNA, 20 bp, Artificial Sequence
  Description of Artificial Sequence: Synthetic oligonucleotide
  Target: LAMA2; (+) strand; PAM type: YTN; PAM sequence: CTC
ctattttttttttcacatgg

SEQ ID NO: 383449 - DNA, 20 bp, Artificial Sequence
  Description of Artificial Sequence: Synthetic oligonucleotide
  Target: LAMA2; (+) strand; PAM type: YTN; PAM sequence: CTA
ttttttttttcacatgggaa

SEQ ID NO: 383450 - DNA, 20 bp, Artificial Sequence
  Description of Artificial Sequence: Synthetic oligonucleotide
  Target: LAMA2; (+) strand; PAM type: YTN; PAM sequence: TTT
tttttttcacatgggaatat

SEQ ID NO: 383451 - DNA, 20 bp, Artificial Sequence
  Description of Artificial Sequence: Synthetic oligonucleotide
  Target: LAMA2; (+) strand; PAM type: YTN; PAM sequence: TTT
ttttttcacatgggaatatt

SEQ ID NO: 383452 - DNA, 20 bp, Artificial Sequence
  Description of Artificial Sequence: Synthetic oligonucleotide
  Target: LAMA2; (+) strand; PAM type: YTN; PAM sequence: TTT
tttttcacatgggaatattg

SEQ ID NO: 383453 - DNA, 20 bp, Artificial Sequence
  Description of Artificial Sequence: Synthetic oligonucleotide
  Target: LAMA2; (+) strand; PAM type: YTN; PAM sequence: TTT
ttttcacatgggaatattga

SEQ ID NO: 383454 - DNA, 20 bp, Artificial Sequence
  Description of Artificial Sequence: Synthetic oligonucleotide
  Target: LAMA2; (+) strand; PAM type: YTN; PAM sequence: TTT
tttcacatgggaatattgaa

SEQ ID NO: 383455 - DNA, 20 bp, Artificial Sequence
  Description of Artificial Sequence: Synthetic oligonucleotide
  Target: LAMA2; (+) strand; PAM type: YTN; PAM sequence: TTT
ttcacatgggaatattgaag

SEQ ID NO: 383456 - DNA, 20 bp, Artificial Sequence
  Description of Artificial Sequence: Synthetic oligonucleotide
  Target: LAMA2; (+) strand; PAM type: YTN; PAM sequence: TTT
tcacatgggaatattgaaga

SEQ ID NO: 383457 - DNA, 20 bp, Artificial Sequence
  Description of Artificial Sequence: Synthetic oligonucleotide
  Target: LAMA2; (+) strand; PAM type: YTN; PAM sequence: TTT
cacatgggaatattgaagac

SEQ ID NO: 383458 - DNA, 20 bp, Artificial Sequence
  Description of Artificial Sequence: Synthetic oligonucleotide
  Target: LAMA2; (+) strand; PAM type: YTN; PAM sequence: TTC
acatgggaatattgaagact

SEQ ID NO: 383459 - DNA, 20 bp, Artificial Sequence
  Description of Artificial Sequence: Synthetic oligonucleotide
  Target: LAMA2; (+) strand; PAM type: YTN; PAM sequence: TTG
aagacttagctagctcaaac

SEQ ID NO: 383460 - DNA, 20 bp, Artificial Sequence
  Description of Artificial Sequence: Synthetic oligonucleotide
  Target: LAMA2; (+) strand; PAM type: YTN; PAM sequence: CTT
agctagctcaaacaactttt

SEQ ID NO: 383461 - DNA, 20 bp, Artificial Sequence
  Description of Artificial Sequence: Synthetic oligonucleotide
  Target: LAMA2; (+) strand; PAM type: YTN; PAM sequence: TTA
gctagctcaaacaacttttt

SEQ ID NO: 383462 - DNA, 20 bp, Artificial Sequence
  Description of Artificial Sequence: Synthetic oligonucleotide
  Target: LAMA2; (+) strand; PAM type: YTN; PAM sequence: CTA
gctcaaacaactttttaaag

SEQ ID NO: 383463 - DNA, 20 bp, Artificial Sequence
  Description of Artificial Sequence: Synthetic oligonucleotide
  Target: LAMA2; (+) strand; PAM type: YTN; PAM sequence: CTC
aaacaactttttaaagataa

SEQ ID NO: 383464 - DNA, 20 bp, Artificial Sequence
  Description of Artificial Sequence: Synthetic oligonucleotide
  Target: LAMA2; (+) strand; PAM type: YTN; PAM sequence: CTT
tttaaagataaaataatttg

SEQ ID NO: 383465 - DNA, 20 bp, Artificial Sequence
  Description of Artificial Sequence: Synthetic oligonucleotide
  Target: LAMA2; (+) strand; PAM type: YTN; PAM sequence: TTT
ttaaagataaaataatttgt

SEQ ID NO: 383466 - DNA, 20 bp, Artificial Sequence
  Description of Artificial Sequence: Synthetic oligonucleotide
  Target: LAMA2; (+) strand; PAM type: YTN; PAM sequence: TTT
taaagataaaataatttgtg

SEQ ID NO: 383467 - DNA, 20 bp, Artificial Sequence
  Description of Artificial Sequence: Synthetic oligonucleotide
  Target: LAMA2; (+) strand; PAM type: YTN; PAM sequence: TTT
aaagataaaataatttgtgg

SEQ ID NO: 383468 - DNA, 20 bp, Artificial Sequence
  Description of Artificial Sequence: Synthetic oligonucleotide
  Target: LAMA2; (+) strand; PAM type: YTN; PAM sequence: TTA
aagataaaataatttgtgga

SEQ ID NO: 383469 - DNA, 20 bp, Artificial Sequence
  Description of Artificial Sequence: Synthetic oligonucleotide
  Target: LAMA2; (+) strand; PAM type: YTN; PAM sequence: TTT
gtggaaatattattttcact

SEQ ID NO: 383470 - DNA, 20 bp, Artificial Sequence
  Description of Artificial Sequence: Synthetic oligonucleotide
  Target: LAMA2; (+) strand; PAM type: YTN; PAM sequence: TTG
tggaaatattattttcactc

SEQ ID NO: 383471 - DNA, 20 bp, Artificial Sequence
  Description of Artificial Sequence: Synthetic oligonucleotide
  Target: LAMA2; (+) strand; PAM type: YTN; PAM sequence: TTA
ttttcactctatcataattc

SEQ ID NO: 383472 - DNA, 20 bp, Artificial Sequence
  Description of Artificial Sequence: Synthetic oligonucleotide
  Target: LAMA2; (+) strand; PAM type: YTN; PAM sequence: TTT
tcactctatcataattctta

SEQ ID NO: 383473 - DNA, 20 bp, Artificial Sequence
  Description of Artificial Sequence: Synthetic oligonucleotide
  Target: LAMA2; (+) strand; PAM type: YTN; PAM sequence: TTT
cactctatcataattcttat

SEQ ID NO: 383474 - DNA, 20 bp, Artificial Sequence
  Description of Artificial Sequence: Synthetic oligonucleotide
  Target: LAMA2; (+) strand; PAM type: YTN; PAM sequence: TTC
actctatcataattcttatt

SEQ ID NO: 383475 - DNA, 20 bp, Artificial Sequence
  Description of Artificial Sequence: Synthetic oligonucleotide
  Target: LAMA2; (+) strand; PAM type: YTN; PAM sequence: CTC
tatcataattcttattttaa

SEQ ID NO: 383476 - DNA, 20 bp, Artificial Sequence
  Description of Artificial Sequence: Synthetic oligonucleotide
  Target: LAMA2; (+) strand; PAM type: YTN; PAM sequence: CTA
tcataattcttattttaaaa

SEQ ID NO: 383477 - DNA, 20 bp, Artificial Sequence
  Description of Artificial Sequence: Synthetic oligonucleotide
  Target: LAMA2; (+) strand; PAM type: YTN; PAM sequence: TTC
ttattttaaaaagaaaataa

SEQ ID NO: 383478 - DNA, 20 bp, Artificial Sequence
  Description of Artificial Sequence: Synthetic oligonucleotide
  Target: LAMA2; (+) strand; PAM type: YTN; PAM sequence: CTT
attttaaaaagaaaataata

SEQ ID NO: 383479 - DNA, 20 bp, Artificial Sequence
  Description of Artificial Sequence: Synthetic oligonucleotide
  Target: LAMA2; (+) strand; PAM type: YTN; PAM sequence: TTA
ttttaaaaagaaaataataa

SEQ ID NO: 383480 - DNA, 20 bp, Artificial Sequence
  Description of Artificial Sequence: Synthetic oligonucleotide
  Target: LAMA2; (+) strand; PAM type: YTN; PAM sequence: TTT
taaaaagaaaataataaaaa

SEQ ID NO: 383481 - DNA, 20 bp, Artificial Sequence
  Description of Artificial Sequence: Synthetic oligonucleotide
  Target: LAMA2; (+) strand; PAM type: YTN; PAM sequence: TTT
aaaaagaaaataataaaaat

SEQ ID NO: 383482 - DNA, 20 bp, Artificial Sequence
  Description of Artificial Sequence: Synthetic oligonucleotide
  Target: LAMA2; (+) strand; PAM type: YTN; PAM sequence: TTA
aaaagaaaataataaaaata

SEQ ID NO: 383483 - DNA, 20 bp, Artificial Sequence
  Description of Artificial Sequence: Synthetic oligonucleotide
  Target: LAMA2; (+) strand; PAM type: YTN; PAM sequence: CTC
tataactgatcattgctgtt

SEQ ID NO: 383484 - DNA, 20 bp, Artificial Sequence
  Description of Artificial Sequence: Synthetic oligonucleotide
  Target: LAMA2; (+) strand; PAM type: YTN; PAM sequence: CTA
taactgatcattgctgttgc

SEQ ID NO: 383485 - DNA, 20 bp, Artificial Sequence
  Description of Artificial Sequence: Synthetic oligonucleotide
  Target: LAMA2; (+) strand; PAM type: YTN; PAM sequence: CTG
atcattgctgttgcctgaaa

SEQ ID NO: 383486 - DNA, 20 bp, Artificial Sequence
  Description of Artificial Sequence: Synthetic oligonucleotide
  Target: LAMA2; (+) strand; PAM type: YTN; PAM sequence: TTG
ctgttgcctgaaacatttaa

SEQ ID NO: 383487 - DNA, 20 bp, Artificial Sequence
  Description of Artificial Sequence: Synthetic oligonucleotide
  Target: LAMA2; (+) strand; PAM type: YTN; PAM sequence: CTG
ttgcctgaaacatttaacca

SEQ ID NO: 383488 - DNA, 20 bp, Artificial Sequence
  Description of Artificial Sequence: Synthetic oligonucleotide
  Target: LAMA2; (+) strand; PAM type: YTN; PAM sequence: TTG
cctgaaacatttaaccaatt

SEQ ID NO: 383489 - DNA, 20 bp, Artificial Sequence
  Description of Artificial Sequence: Synthetic oligonucleotide
  Target: LAMA2; (+) strand; PAM type: YTN; PAM sequence: CTG
aaacatttaaccaattacct

SEQ ID NO: 383490 - DNA, 20 bp, Artificial Sequence
  Description of Artificial Sequence: Synthetic oligonucleotide
  Target: LAMA2; (+) strand; PAM type: YTN; PAM sequence: TTT
aaccaattacctctatcttc

SEQ ID NO: 383491 - DNA, 20 bp, Artificial Sequence
  Description of Artificial Sequence: Synthetic oligonucleotide
  Target: LAMA2; (+) strand; PAM type: YTN; PAM sequence: TTA
accaattacctctatcttca

SEQ ID NO: 383492 - DNA, 20 bp, Artificial Sequence
  Description of Artificial Sequence: Synthetic oligonucleotide
  Target: LAMA2; (+) strand; PAM type: YTN; PAM sequence: TTA
cctctatcttcagtaaatag

SEQ ID NO: 383493 - DNA, 20 bp, Artificial Sequence
  Description of Artificial Sequence: Synthetic oligonucleotide
  Target: LAMA2; (+) strand; PAM type: YTN; PAM sequence: CTC
tatcttcagtaaatagacag

SEQ ID NO: 383494 - DNA, 20 bp, Artificial Sequence
  Description of Artificial Sequence: Synthetic oligonucleotide
  Target: LAMA2; (+) strand; PAM type: YTN; PAM sequence: CTA
tcttcagtaaatagacagat

SEQ ID NO: 383495 - DNA, 20 bp, Artificial Sequence
  Description of Artificial Sequence: Synthetic oligonucleotide
  Target: LAMA2; (+) strand; PAM type: YTN; PAM sequence: CTT
cagtaaatagacagatttgt

SEQ ID NO: 383496 - DNA, 20 bp, Artificial Sequence
  Description of Artificial Sequence: Synthetic oligonucleotide
  Target: LAMA2; (+) strand; PAM type: YTN; PAM sequence: TTC
agtaaatagacagatttgta

SEQ ID NO: 383497 - DNA, 20 bp, Artificial Sequence
  Description of Artificial Sequence: Synthetic oligonucleotide
  Target: LAMA2; (+) strand; PAM type: YTN; PAM sequence: TTT
gtaactagaattcactattt

SEQ ID NO: 383498 - DNA, 20 bp, Artificial Sequence
  Description of Artificial Sequence: Synthetic oligonucleotide
  Target: LAMA2; (+) strand; PAM type: YTN; PAM sequence: TTG
taactagaattcactatttt

SEQ ID NO: 383499 - DNA, 20 bp, Artificial Sequence
  Description of Artificial Sequence: Synthetic oligonucleotide
  Target: LAMA2; (+) strand; PAM type: YTN; PAM sequence: CTA
gaattcactattttttgttt

SEQ ID NO: 383500 - DNA, 20 bp, Artificial Sequence
  Description of Artificial Sequence: Synthetic oligonucleotide
  Target: LAMA2; (+) strand; PAM type: YTN; PAM sequence: TTC
actattttttgttttgtaaa

SEQ ID NO: 383501 - DNA, 20 bp, Artificial Sequence
  Description of Artificial Sequence: Synthetic oligonucleotide
  Target: LAMA2; (+) strand; PAM type: YTN; PAM sequence: CTA
ttttttgttttgtaaacctt

SEQ ID NO: 383502 - DNA, 20 bp, Artificial Sequence
  Description of Artificial Sequence: Synthetic oligonucleotide
  Target: LAMA2; (+) strand; PAM type: YTN; PAM sequence: TTT
tttgttttgtaaaccttatt

SEQ ID NO: 383503 - DNA, 20 bp, Artificial Sequence
  Description of Artificial Sequence: Synthetic oligonucleotide
  Target: LAMA2; (+) strand; PAM type: YTN; PAM sequence: TTT
ttgttttgtaaaccttattt

SEQ ID NO: 383504 - DNA, 20 bp, Artificial Sequence
  Description of Artificial Sequence: Synthetic oligonucleotide
  Target: LAMA2; (+) strand; PAM type: YTN; PAM sequence: TTT
tgttttgtaaaccttattta

SEQ ID NO: 383505 - DNA, 20 bp, Artificial Sequence
  Description of Artificial Sequence: Synthetic oligonucleotide
  Target: LAMA2; (+) strand; PAM type: YTN; PAM sequence: TTT
gttttgtaaaccttatttaa

SEQ ID NO: 383506 - DNA, 20 bp, Artificial Sequence
  Description of Artificial Sequence: Synthetic oligonucleotide
  Target: LAMA2; (+) strand; PAM type: YTN; PAM sequence: TTG
ttttgtaaaccttatttaat

SEQ ID NO: 383507 - DNA, 20 bp, Artificial Sequence
  Description of Artificial Sequence: Synthetic oligonucleotide
  Target: LAMA2; (+) strand; PAM type: YTN; PAM sequence: TTT
tgtaaaccttatttaatcta

SEQ ID NO: 383508 - DNA, 20 bp, Artificial Sequence
  Description of Artificial Sequence: Synthetic oligonucleotide
  Target: LAMA2; (+) strand; PAM type: YTN; PAM sequence: TTT
gtaaaccttatttaatctac

SEQ ID NO: 383509 - DNA, 20 bp, Artificial Sequence
  Description of Artificial Sequence: Synthetic oligonucleotide
  Target: LAMA2; (+) strand; PAM type: YTN; PAM sequence: TTG
taaaccttatttaatctacc

SEQ ID NO: 383510 - DNA, 20 bp, Artificial Sequence
  Description of Artificial Sequence: Synthetic oligonucleotide
  Target: LAMA2; (+) strand; PAM type: YTN; PAM sequence: CTT
atttaatctacctaacaacc

SEQ ID NO: 383511 - DNA, 20 bp, Artificial Sequence
  Description of Artificial Sequence: Synthetic oligonucleotide
  Target: LAMA2; (+) strand; PAM type: YTN; PAM sequence: TTA
tttaatctacctaacaacct

SEQ ID NO: 383512 - DNA, 20 bp, Artificial Sequence
  Description of Artificial Sequence: Synthetic oligonucleotide
  Target: LAMA2; (+) strand; PAM type: YTN; PAM sequence: TTT
aatctacctaacaaccttgc

SEQ ID NO: 383513 - DNA, 20 bp, Artificial Sequence
  Description of Artificial Sequence: Synthetic oligonucleotide
  Target: LAMA2; (+) strand; PAM type: YTN; PAM sequence: TTA
atctacctaacaaccttgcc

SEQ ID NO: 383514 - DNA, 20 bp, Artificial Sequence
  Description of Artificial Sequence: Synthetic oligonucleotide
  Target: LAMA2; (+) strand; PAM type: YTN; PAM sequence: CTA
cctaacaaccttgccagaat

SEQ ID NO: 383515 - DNA, 20 bp, Artificial Sequence
  Description of Artificial Sequence: Synthetic oligonucleotide
  Target: LAMA2; (+) strand; PAM type: YTN; PAM sequence: CTA
acaaccttgccagaatagag

SEQ ID NO: 383516 - DNA, 20 bp, Artificial Sequence
  Description of Artificial Sequence: Synthetic oligonucleotide
  Target: LAMA2; (+) strand; PAM type: YTN; PAM sequence: CTT
gccagaatagagattgttag

SEQ ID NO: 383517 - DNA, 20 bp, Artificial Sequence
  Description of Artificial Sequence: Synthetic oligonucleotide
  Target: LAMA2; (+) strand; PAM type: YTN; PAM sequence: TTG
ccagaatagagattgttagc

SEQ ID NO: 383518 - DNA, 20 bp, Artificial Sequence
  Description of Artificial Sequence: Synthetic oligonucleotide
  Target: LAMA2; (+) strand; PAM type: YTN; PAM sequence: TTG
ttagcattatactaagttct

SEQ ID NO: 383519 - DNA, 20 bp, Artificial Sequence
  Description of Artificial Sequence: Synthetic oligonucleotide
  Target: LAMA2; (+) strand; PAM type: YTN; PAM sequence: TTA
gcattatactaagttctgga

SEQ ID NO: 383520 - DNA, 20 bp, Artificial Sequence
  Description of Artificial Sequence: Synthetic oligonucleotide
  Target: LAMA2; (+) strand; PAM type: YTN; PAM sequence: TTA
tactaagttctggaaattaa

SEQ ID NO: 383521 - DNA, 20 bp, Artificial Sequence
  Description of Artificial Sequence: Synthetic oligonucleotide
  Target: LAMA2; (+) strand; PAM type: YTN; PAM sequence: CTA
agttctggaaattaatgcta

SEQ ID NO: 383522 - DNA, 20 bp, Artificial Sequence
  Description of Artificial Sequence: Synthetic oligonucleotide
  Target: LAMA2; (+) strand; PAM type: YTN; PAM sequence: TTC
tggaaattaatgctaagaaa

SEQ ID NO: 383523 - DNA, 20 bp, Artificial Sequence
  Description of Artificial Sequence: Synthetic oligonucleotide
  Target: LAMA2; (+) strand; PAM type: YTN; PAM sequence: CTG
gaaattaatgctaagaaaat

SEQ ID NO: 383524 - DNA, 20 bp, Artificial Sequence
  Description of Artificial Sequence: Synthetic oligonucleotide
  Target: LAMA2; (+) strand; PAM type: YTN; PAM sequence: TTA
atgctaagaaaatgtaagca

SEQ ID NO: 383525 - DNA, 20 bp, Artificial Sequence
  Description of Artificial Sequence: Synthetic oligonucleotide
  Target: LAMA2; (+) strand; PAM type: YTN; PAM sequence: CTA
agaaaatgtaagcaacctat

SEQ ID NO: 383526 - DNA, 20 bp, Artificial Sequence
  Description of Artificial Sequence: Synthetic oligonucleotide
  Target: LAMA2; (+) strand; PAM type: YTN; PAM sequence: CTA
taaagccttgaacaaaaagt

SEQ ID NO: 383527 - DNA, 20 bp, Artificial Sequence
  Description of Artificial Sequence: Synthetic oligonucleotide
  Target: LAMA2; (+) strand; PAM type: YTN; PAM sequence: CTT
gaacaaaaagtattagaagc

SEQ ID NO: 383528 - DNA, 20 bp, Artificial Sequence
  Description of Artificial Sequence: Synthetic oligonucleotide
  Target: LAMA2; (+) strand; PAM type: YTN; PAM sequence: TTG
aacaaaaagtattagaagca

SEQ ID NO: 383529 - DNA, 20 bp, Artificial Sequence
  Description of Artificial Sequence: Synthetic oligonucleotide
  Target: LAMA2; (+) strand; PAM type: YTN; PAM sequence: TTA
gaagcaggtttcaaatccac

SEQ ID NO: 383530 - DNA, 20 bp, Artificial Sequence
  Description of Artificial Sequence: Synthetic oligonucleotide
  Target: LAMA2; (+) strand; PAM type: YTN; PAM sequence: TTT
caaatccaccacaaactgcg

SEQ ID NO: 383531 - DNA, 20 bp, Artificial Sequence
  Description of Artificial Sequence: Synthetic oligonucleotide
  Target: LAMA2; (+) strand; PAM type: YTN; PAM sequence: TTC
aaatccaccacaaactgcgt

SEQ ID NO: 383532 - DNA, 20 bp, Artificial Sequence
  Description of Artificial Sequence: Synthetic oligonucleotide
  Target: LAMA2; (+) strand; PAM type: YTN; PAM sequence: CTG
cgttctccagacggcaagag

SEQ ID NO: 383533 - DNA, 20 bp, Artificial Sequence
  Description of Artificial Sequence: Synthetic oligonucleotide
  Target: LAMA2; (+) strand; PAM type: YTN; PAM sequence: TTC
tccagacggcaagagagtgt

SEQ ID NO: 383534 - DNA, 20 bp, Artificial Sequence
  Description of Artificial Sequence: Synthetic oligonucleotide
  Target: LAMA2; (+) strand; PAM type: YTN; PAM sequence: CTC
cagacggcaagagagtgtaa

SEQ ID NO: 383535 - DNA, 20 bp, Artificial Sequence
  Description of Artificial Sequence: Synthetic oligonucleotide
  Target: LAMA2; (+) strand; PAM type: YTN; PAM sequence: CTC
tctgctgattaaatgagttt

SEQ ID NO: 383536 - DNA, 20 bp, Artificial Sequence
  Description of Artificial Sequence: Synthetic oligonucleotide
  Target: LAMA2; (+) strand; PAM type: YTN; PAM sequence: CTC
tgctgattaaatgagtttga

SEQ ID NO: 383537 - DNA, 20 bp, Artificial Sequence
  Description of Artificial Sequence: Synthetic oligonucleotide
  Target: LAMA2; (+) strand; PAM type: YTN; PAM sequence: CTG
ctgattaaatgagtttgatt

SEQ ID NO: 383538 - DNA, 20 bp, Artificial Sequence
  Description of Artificial Sequence: Synthetic oligonucleotide
  Target: LAMA2; (+) strand; PAM type: YTN; PAM sequence: CTG
attaaatgagtttgatttta

SEQ ID NO: 383539 - DNA, 20 bp, Artificial Sequence
  Description of Artificial Sequence: Synthetic oligonucleotide
  Target: LAMA2; (+) strand; PAM type: YTN; PAM sequence: TTA
aatgagtttgattttacaag

SEQ ID NO: 383540 - DNA, 20 bp, Artificial Sequence
  Description of Artificial Sequence: Synthetic oligonucleotide
  Target: LAMA2; (+) strand; PAM type: YTN; PAM sequence: TTT
gattttacaagctcaagtga

SEQ ID NO: 383541 - DNA, 20 bp, Artificial Sequence
  Description of Artificial Sequence: Synthetic oligonucleotide
  Target: LAMA2; (+) strand; PAM type: YTN; PAM sequence: TTG
attttacaagctcaagtgaa

SEQ ID NO: 383542 - DNA, 20 bp, Artificial Sequence
  Description of Artificial Sequence: Synthetic oligonucleotide
  Target: LAMA2; (+) strand; PAM type: YTN; PAM sequence: TTT
tacaagctcaagtgaattat

SEQ ID NO: 383543 - DNA, 20 bp, Artificial Sequence
  Description of Artificial Sequence: Synthetic oligonucleotide
  Target: LAMA2; (+) strand; PAM type: YTN; PAM sequence: TTT
acaagctcaagtgaattata

SEQ ID NO: 383544 - DNA, 20 bp, Artificial Sequence
  Description of Artificial Sequence: Synthetic oligonucleotide
  Target: LAMA2; (+) strand; PAM type: YTN; PAM sequence: TTA
caagctcaagtgaattatat

SEQ ID NO: 383545 - DNA, 20 bp, Artificial Sequence
  Description of Artificial Sequence: Synthetic oligonucleotide
  Target: LAMA2; (+) strand; PAM type: YTN; PAM sequence: CTC
aagtgaattatatcttagag

SEQ ID NO: 383546 - DNA, 20 bp, Artificial Sequence
  Description of Artificial Sequence: Synthetic oligonucleotide
  Target: LAMA2; (+) strand; PAM type: YTN; PAM sequence: TTA
tatcttagagtcgggacaga

SEQ ID NO: 383547 - DNA, 20 bp, Artificial Sequence
  Description of Artificial Sequence: Synthetic oligonucleotide
  Target: LAMA2; (+) strand; PAM type: YTN; PAM sequence: CTT
agagtcgggacagaatctgc

SEQ ID NO: 383548 - DNA, 20 bp, Artificial Sequence
  Description of Artificial Sequence: Synthetic oligonucleotide
  Target: LAMA2; (+) strand; PAM type: YTN; PAM sequence: TTA
gagtcgggacagaatctgca

SEQ ID NO: 383549 - DNA, 20 bp, Artificial Sequence
  Description of Artificial Sequence: Synthetic oligonucleotide
  Target: LAMA2; (+) strand; PAM type: YTN; PAM sequence: CTG
caaaagtgactaggggtcat

SEQ ID NO: 383550 - DNA, 20 bp, Artificial Sequence
  Description of Artificial Sequence: Synthetic oligonucleotide
  Target: LAMA2; (+) strand; PAM type: YTN; PAM sequence: CTA
ggggtcatgtatggaaaaca

SEQ ID NO: 383551 - DNA, 20 bp, Artificial Sequence
  Description of Artificial Sequence: Synthetic oligonucleotide
  Target: LAMA2; (+) strand; PAM type: YTN; PAM sequence: CTT
gagaaattgtgagaacataa

SEQ ID NO: 383552 - DNA, 20 bp, Artificial Sequence
  Description of Artificial Sequence: Synthetic oligonucleotide
  Target: LAMA2; (+) strand; PAM type: YTN; PAM sequence: TTG
agaaattgtgagaacataaa

SEQ ID NO: 383553 - DNA, 20 bp, Artificial Sequence
  Description of Artificial Sequence: Synthetic oligonucleotide
  Target: LAMA2; (+) strand; PAM type: YTN; PAM sequence: TTG
tgagaacataaaatttgtcg

SEQ ID NO: 383554 - DNA, 20 bp, Artificial Sequence
  Description of Artificial Sequence: Synthetic oligonucleotide
  Target: LAMA2; (+) strand; PAM type: YTN; PAM sequence: TTT
gtcgcaggatagtaagcaat

SEQ ID NO: 383555 - DNA, 20 bp, Artificial Sequence
  Description of Artificial Sequence: Synthetic oligonucleotide
  Target: LAMA2; (+) strand; PAM type: YTN; PAM sequence: TTG
tcgcaggatagtaagcaata

SEQ ID NO: 383556 - DNA, 20 bp, Artificial Sequence
  Description of Artificial Sequence: Synthetic oligonucleotide
  Target: LAMA2; (+) strand; PAM type: YTN; PAM sequence: CTT
tccaggttttataaaggaaa

SEQ ID NO: 383557 - DNA, 20 bp, Artificial Sequence
  Description of Artificial Sequence: Synthetic oligonucleotide
  Target: LAMA2; (+) strand; PAM type: YTN; PAM sequence: TTT
ccaggttttataaaggaaaa

SEQ ID NO: 383558 - DNA, 20 bp, Artificial Sequence
  Description of Artificial Sequence: Synthetic oligonucleotide
  Target: LAMA2; (+) strand; PAM type: YTN; PAM sequence: TTC
caggttttataaaggaaaat

SEQ ID NO: 383559 - DNA, 20 bp, Artificial Sequence
  Description of Artificial Sequence: Synthetic oligonucleotide
  Target: LAMA2; (+) strand; PAM type: YTN; PAM sequence: TTT
tataaaggaaaataaaatgt

SEQ ID NO: 383560 - DNA, 20 bp, Artificial Sequence
  Description of Artificial Sequence: Synthetic oligonucleotide
  Target: LAMA2; (+) strand; PAM type: YTN; PAM sequence: TTT
ataaaggaaaataaaatgta

SEQ ID NO: 383561 - DNA, 20 bp, Artificial Sequence
  Description of Artificial Sequence: Synthetic oligonucleotide
  Target: LAMA2; (+) strand; PAM type: YTN; PAM sequence: TTA
taaaggaaaataaaatgtag

SEQ ID NO: 383562 - DNA, 20 bp, Artificial Sequence
  Description of Artificial Sequence: Synthetic oligonucleotide
  Target: LAMA2; (+) strand; PAM type: YTN; PAM sequence: CTG
attgtcatctccagtgaaac

SEQ ID NO: 383563 - DNA, 20 bp, Artificial Sequence
  Description of Artificial Sequence: Synthetic oligonucleotide
  Target: LAMA2; (+) strand; PAM type: YTN; PAM sequence: TTG
tcatctccagtgaaacttaa

SEQ ID NO: 383564 - DNA, 20 bp, Artificial Sequence
  Description of Artificial Sequence: Synthetic oligonucleotide
  Target: LAMA2; (+) strand; PAM type: YTN; PAM sequence: CTC
cagtgaaacttaagtattgc

SEQ ID NO: 383565 - DNA, 20 bp, Artificial Sequence
  Description of Artificial Sequence: Synthetic oligonucleotide
  Target: LAMA2; (+) strand; PAM type: YTN; PAM sequence: CTT
aagtattgcttacttaacaa

SEQ ID NO: 383566 - DNA, 20 bp, Artificial Sequence
  Description of Artificial Sequence: Synthetic oligonucleotide
  Target: LAMA2; (+) strand; PAM type: YTN; PAM sequence: TTA
agtattgcttacttaacaaa

SEQ ID NO: 383567 - DNA, 20 bp, Artificial Sequence
  Description of Artificial Sequence: Synthetic oligonucleotide
  Target: LAMA2; (+) strand; PAM type: YTN; PAM sequence: TTG
cttacttaacaaatatctgt

SEQ ID NO: 383568 - DNA, 20 bp, Artificial Sequence
  Description of Artificial Sequence: Synthetic oligonucleotide
  Target: LAMA2; (+) strand; PAM type: YTN; PAM sequence: CTT
acttaacaaatatctgtcaa

SEQ ID NO: 383569 - DNA, 20 bp, Artificial Sequence
  Description of Artificial Sequence: Synthetic oligonucleotide
  Target: LAMA2; (+) strand; PAM type: YTN; PAM sequence: TTA
cttaacaaatatctgtcaac

SEQ ID NO: 383570 - DNA, 20 bp, Artificial Sequence
  Description of Artificial Sequence: Synthetic oligonucleotide
  Target: LAMA2; (+) strand; PAM type: YTN; PAM sequence: CTT
aacaaatatctgtcaactgt

SEQ ID NO: 383571 - DNA, 20 bp, Artificial Sequence
  Description of Artificial Sequence: Synthetic oligonucleotide
  Target: LAMA2; (+) strand; PAM type: YTN; PAM sequence: TTA
acaaatatctgtcaactgtg

SEQ ID NO: 383572 - DNA, 20 bp, Artificial Sequence
  Description of Artificial Sequence: Synthetic oligonucleotide
  Target: LAMA2; (+) strand; PAM type: YTN; PAM sequence: CTG
tcaactgtggaaaaaataaa

SEQ ID NO: 383573 - DNA, 20 bp, Artificial Sequence
  Description of Artificial Sequence: Synthetic oligonucleotide
  Target: LAMA2; (+) strand; PAM type: YTN; PAM sequence: CTG
tggaaaaaataaacagtgct

SEQ ID NO: 383574 - DNA, 20 bp, Artificial Sequence
  Description of Artificial Sequence: Synthetic oligonucleotide
  Target: LAMA2; (+) strand; PAM type: YTN; PAM sequence: CTC
attaggaatcagaataggtt

SEQ ID NO: 383575 - DNA, 20 bp, Artificial Sequence
  Description of Artificial Sequence: Synthetic oligonucleotide
  Target: LAMA2; (+) strand; PAM type: YTN; PAM sequence: TTA
ggaatcagaataggttcact

SEQ ID NO: 383576 - DNA, 20 bp, Artificial Sequence
  Description of Artificial Sequence: Synthetic oligonucleotide
  Target: LAMA2; (+) strand; PAM type: YTN; PAM sequence: TTC
actttgtcagaggcaatggc

SEQ ID NO: 383577 - DNA, 20 bp, Artificial Sequence
  Description of Artificial Sequence: Synthetic oligonucleotide
  Target: LAMA2; (+) strand; PAM type: YTN; PAM sequence: CTT
tgtcagaggcaatggctcat

SEQ ID NO: 383578 - DNA, 20 bp, Artificial Sequence
  Description of Artificial Sequence: Synthetic oligonucleotide
  Target: LAMA2; (+) strand; PAM type: YTN; PAM sequence: TTT
gtcagaggcaatggctcatg

SEQ ID NO: 383579 - DNA, 20 bp, Artificial Sequence
  Description of Artificial Sequence: Synthetic oligonucleotide
  Target: LAMA2; (+) strand; PAM type: YTN; PAM sequence: TTG
tcagaggcaatggctcatgc

SEQ ID NO: 383580 - DNA, 20 bp, Artificial Sequence
  Description of Artificial Sequence: Synthetic oligonucleotide
  Target: LAMA2; (+) strand; PAM type: YTN; PAM sequence: CTC
atgcctgtaatcctagcact

SEQ ID NO: 383581 - DNA, 20 bp, Artificial Sequence
  Description of Artificial Sequence: Synthetic oligonucleotide
  Target: LAMA2; (+) strand; PAM type: YTN; PAM sequence: CTG
taatcctagcacttttggag

SEQ ID NO: 383582 - DNA, 20 bp, Artificial Sequence
  Description of Artificial Sequence: Synthetic oligonucleotide
  Target: LAMA2; (+) strand; PAM type: YTN; PAM sequence: CTA
gcacttttggaggccaagag

SEQ ID NO: 383583 - DNA, 20 bp, Artificial Sequence
  Description of Artificial Sequence: Synthetic oligonucleotide
  Target: LAMA2; (+) strand; PAM type: YTN; PAM sequence: CTT
ttggaggccaagagcggagg

SEQ ID NO: 383584 - DNA, 20 bp, Artificial Sequence
  Description of Artificial Sequence: Synthetic oligonucleotide
  Target: LAMA2; (+) strand; PAM type: YTN; PAM sequence: TTT
tggaggccaagagcggagga

SEQ ID NO: 383585 - DNA, 20 bp, Artificial Sequence
  Description of Artificial Sequence: Synthetic oligonucleotide
  Target: LAMA2; (+) strand; PAM type: YTN; PAM sequence: TTT
ggaggccaagagcggaggat

SEQ ID NO: 383586 - DNA, 20 bp, Artificial Sequence
  Description of Artificial Sequence: Synthetic oligonucleotide
  Target: LAMA2; (+) strand; PAM type: YTN; PAM sequence: TTG
gaggccaagagcggaggatc

SEQ ID NO: 383587 - DNA, 20 bp, Artificial Sequence
  Description of Artificial Sequence: Synthetic oligonucleotide
  Target: LAMA2; (+) strand; PAM type: YTN; PAM sequence: TTC
gagaccagcatggtcaacaa

SEQ ID NO: 383588 - DNA, 20 bp, Artificial Sequence
  Description of Artificial Sequence: Synthetic oligonucleotide
  Target: LAMA2; (+) strand; PAM type: YTN; PAM sequence: CTG
tgtctacaaaaaattaaaaa

SEQ ID NO: 383589 - DNA, 20 bp, Artificial Sequence
  Description of Artificial Sequence: Synthetic oligonucleotide
  Target: LAMA2; (+) strand; PAM type: YTN; PAM sequence: CTA
caaaaaattaaaaattaaaa

SEQ ID NO: 383590 - DNA, 20 bp, Artificial Sequence
  Description of Artificial Sequence: Synthetic oligonucleotide
  Target: LAMA2; (+) strand; PAM type: YTN; PAM sequence: TTA
aaaattaaaaaaaagaatag

SEQ ID NO: 383591 - DNA, 20 bp, Artificial Sequence
  Description of Artificial Sequence: Synthetic oligonucleotide
  Target: LAMA2; (+) strand; PAM type: YTN; PAM sequence: TTA
aaaaaaagaataggttcatt

SEQ ID NO: 383592 - DNA, 20 bp, Artificial Sequence
  Description of Artificial Sequence: Synthetic oligonucleotide
  Target: LAMA2; (+) strand; PAM type: YTN; PAM sequence: TTC
attcaaaataacacatatca

SEQ ID NO: 383593 - DNA, 20 bp, Artificial Sequence
  Description of Artificial Sequence: Synthetic oligonucleotide
  Target: LAMA2; (+) strand; PAM type: YTN; PAM sequence: TTC
aaaataacacatatcaaact

SEQ ID NO: 383594 - DNA, 20 bp, Artificial Sequence
  Description of Artificial Sequence: Synthetic oligonucleotide
  Target: LAMA2; (+) strand; PAM type: YTN; PAM sequence: CTA
agtgctaggtttactgtata

SEQ ID NO: 383595 - DNA, 20 bp, Artificial Sequence
  Description of Artificial Sequence: Synthetic oligonucleotide
  Target: LAMA2; (+) strand; PAM type: YTN; PAM sequence: CTA
ggtttactgtatatataata

SEQ ID NO: 383596 - DNA, 20 bp, Artificial Sequence
  Description of Artificial Sequence: Synthetic oligonucleotide
  Target: LAMA2; (+) strand; PAM type: YTN; PAM sequence: TTT
actgtatatataatatctga

SEQ ID NO: 383597 - DNA, 20 bp, Artificial Sequence
  Description of Artificial Sequence: Synthetic oligonucleotide
  Target: LAMA2; (+) strand; PAM type: YTN; PAM sequence: TTA
ctgtatatataatatctgaa

SEQ ID NO: 383598 - DNA, 20 bp, Artificial Sequence
  Description of Artificial Sequence: Synthetic oligonucleotide
  Target: LAMA2; (+) strand; PAM type: YTN; PAM sequence: CTG
tatatataatatctgaaaac

SEQ ID NO: 383599 - DNA, 20 bp, Artificial Sequence
  Description of Artificial Sequence: Synthetic oligonucleotide
  Target: LAMA2; (+) strand; PAM type: YTN; PAM sequence: CTG
aaaacctagttttctaaatc

SEQ ID NO: 383600 - DNA, 20 bp, Artificial Sequence
  Description of Artificial Sequence: Synthetic oligonucleotide
  Target: LAMA2; (+) strand; PAM type: YTN; PAM sequence: CTA
gttttctaaatcccagtaaa

SEQ ID NO: 383601 - DNA, 20 bp, Artificial Sequence
  Description of Artificial Sequence: Synthetic oligonucleotide
  Target: LAMA2; (+) strand; PAM type: YTN; PAM sequence: TTT
tctaaatcccagtaaaatat

SEQ ID NO: 383602 - DNA, 20 bp, Artificial Sequence
  Description of Artificial Sequence: Synthetic oligonucleotide
  Target: LAMA2; (+) strand; PAM type: YTN; PAM sequence: TTT
ctaaatcccagtaaaatatc

SEQ ID NO: 383603 - DNA, 20 bp, Artificial Sequence
  Description of Artificial Sequence: Synthetic oligonucleotide
  Target: LAMA2; (+) strand; PAM type: YTN; PAM sequence: TTC
taaatcccagtaaaatatca

SEQ ID NO: 383604 - DNA, 20 bp, Artificial Sequence
  Description of Artificial Sequence: Synthetic oligonucleotide
  Target: LAMA2; (+) strand; PAM type: YTN; PAM sequence: CTA
aatcccagtaaaatatcaag

SEQ ID NO: 383605 - DNA, 20 bp, Artificial Sequence
  Description of Artificial Sequence: Synthetic oligonucleotide
  Target: LAMA2; (+) strand; PAM type: YTN; PAM sequence: TTT
atcagacaatgtgatacatc

SEQ ID NO: 383606 - DNA, 20 bp, Artificial Sequence
  Description of Artificial Sequence: Synthetic oligonucleotide
  Target: LAMA2; (+) strand; PAM type: YTN; PAM sequence: TTA
tcagacaatgtgatacatca

SEQ ID NO: 383607 - DNA, 20 bp, Artificial Sequence
  Description of Artificial Sequence: Synthetic oligonucleotide
  Target: LAMA2; (+) strand; PAM type: YTN; PAM sequence: CTC
aaattcagcaaaaaataata

SEQ ID NO: 383608 - DNA, 20 bp, Artificial Sequence
  Description of Artificial Sequence: Synthetic oligonucleotide
  Target: LAMA2; (+) strand; PAM type: YTN; PAM sequence: TTC
agcaaaaaataataactgct

SEQ ID NO: 383609 - DNA, 20 bp, Artificial Sequence
  Description of Artificial Sequence: Synthetic oligonucleotide
  Target: LAMA2; (+) strand; PAM type: YTN; PAM sequence: CTG
ctattatgtgtccaaaactg

SEQ ID NO: 383610 - DNA, 20 bp, Artificial Sequence
  Description of Artificial Sequence: Synthetic oligonucleotide
  Target: LAMA2; (+) strand; PAM type: YTN; PAM sequence: CTA
ttatgtgtccaaaactgtgt

SEQ ID NO: 383611 - DNA, 20 bp, Artificial Sequence
  Description of Artificial Sequence: Synthetic oligonucleotide
  Target: LAMA2; (+) strand; PAM type: YTN; PAM sequence: TTA
tgtgtccaaaactgtgtatg

SEQ ID NO: 383612 - DNA, 20 bp, Artificial Sequence
  Description of Artificial Sequence: Synthetic oligonucleotide
  Target: LAMA2; (+) strand; PAM type: YTN; PAM sequence: CTG
tgtatgtaccaggaccaaaa

SEQ ID NO: 383613 - DNA, 20 bp, Artificial Sequence
  Description of Artificial Sequence: Synthetic oligonucleotide
  Target: LAMA2; (+) strand; PAM type: YTN; PAM sequence: CTG
tacagagattttctcattta

SEQ ID NO: 383614 - DNA, 20 bp, Artificial Sequence
  Description of Artificial Sequence: Synthetic oligonucleotide
  Target: LAMA2; (+) strand; PAM type: YTN; PAM sequence: TTT
tctcatttattgttacaata

SEQ ID NO: 383615 - DNA, 20 bp, Artificial Sequence
  Description of Artificial Sequence: Synthetic oligonucleotide
  Target: LAMA2; (+) strand; PAM type: YTN; PAM sequence: TTT
ctcatttattgttacaataa

SEQ ID NO: 383616 - DNA, 20 bp, Artificial Sequence
  Description of Artificial Sequence: Synthetic oligonucleotide
  Target: LAMA2; (+) strand; PAM type: YTN; PAM sequence: TTC
tcatttattgttacaataaa

SEQ ID NO: 383617 - DNA, 20 bp, Artificial Sequence
  Description of Artificial Sequence: Synthetic oligonucleotide
  Target: LAMA2; (+) strand; PAM type: YTN; PAM sequence: CTC
atttattgttacaataaact

SEQ ID NO: 383618 - DNA, 20 bp, Artificial Sequence
  Description of Artificial Sequence: Synthetic oligonucleotide
  Target: LAMA2; (+) strand; PAM type: YTN; PAM sequence: TTT
attgttacaataaacttatg

SEQ ID NO: 383619 - DNA, 20 bp, Artificial Sequence
  Description of Artificial Sequence: Synthetic oligonucleotide
  Target: LAMA2; (+) strand; PAM type: YTN; PAM sequence: TTA
ttgttacaataaacttatga

SEQ ID NO: 383620 - DNA, 20 bp, Artificial Sequence
  Description of Artificial Sequence: Synthetic oligonucleotide
  Target: LAMA2; (+) strand; PAM type: YTN; PAM sequence: TTG
ttacaataaacttatgagat

SEQ ID NO: 383621 - DNA, 20 bp, Artificial Sequence
  Description of Artificial Sequence: Synthetic oligonucleotide
  Target: LAMA2; (+) strand; PAM type: YTN; PAM sequence: TTA
caataaacttatgagataga

SEQ ID NO: 383622 - DNA, 20 bp, Artificial Sequence
  Description of Artificial Sequence: Synthetic oligonucleotide
  Target: LAMA2; (+) strand; PAM type: YTN; PAM sequence: CTT
atgagatagacaagattatt

SEQ ID NO: 383623 - DNA, 20 bp, Artificial Sequence
  Description of Artificial Sequence: Synthetic oligonucleotide
  Target: LAMA2; (+) strand; PAM type: YTN; PAM sequence: TTA
tgagatagacaagattattt

SEQ ID NO: 383624 - DNA, 20 bp, Artificial Sequence
  Description of Artificial Sequence: Synthetic oligonucleotide
  Target: LAMA2; (+) strand; PAM type: YTN; PAM sequence: TTA
tttcttcttttattgttgat

SEQ ID NO: 383625 - DNA, 20 bp, Artificial Sequence
  Description of Artificial Sequence: Synthetic oligonucleotide
  Target: LAMA2; (+) strand; PAM type: YTN; PAM sequence: TTT
cttcttttattgttgatgaa

SEQ ID NO: 383626 - DNA, 20 bp, Artificial Sequence
  Description of Artificial Sequence: Synthetic oligonucleotide
  Target: LAMA2; (+) strand; PAM type: YTN; PAM sequence: TTC
ttcttttattgttgatgaac

SEQ ID NO: 383627 - DNA, 20 bp, Artificial Sequence
  Description of Artificial Sequence: Synthetic oligonucleotide
  Target: LAMA2; (+) strand; PAM type: YTN; PAM sequence: CTT
cttttattgttgatgaactg

SEQ ID NO: 383628 - DNA, 20 bp, Artificial Sequence
  Description of Artificial Sequence: Synthetic oligonucleotide
  Target: LAMA2; (+) strand; PAM type: YTN; PAM sequence: TTC
ttttattgttgatgaactga

SEQ ID NO: 383629 - DNA, 20 bp, Artificial Sequence
  Description of Artificial Sequence: Synthetic oligonucleotide
  Target: LAMA2; (+) strand; PAM type: YTN; PAM sequence: CTT
ttattgttgatgaactgatg

SEQ ID NO: 383630 - DNA, 20 bp, Artificial Sequence
  Description of Artificial Sequence: Synthetic oligonucleotide
  Target: LAMA2; (+) strand; PAM type: YTN; PAM sequence: TTT
tattgttgatgaactgatgc

SEQ ID NO: 383631 - DNA, 20 bp, Artificial Sequence
  Description of Artificial Sequence: Synthetic oligonucleotide
  Target: LAMA2; (+) strand; PAM type: YTN; PAM sequence: TTT
attgttgatgaactgatgct

SEQ ID NO: 383632 - DNA, 20 bp, Artificial Sequence
  Description of Artificial Sequence: Synthetic oligonucleotide
  Target: LAMA2; (+) strand; PAM type: YTN; PAM sequence: TTA
ttgttgatgaactgatgcta

SEQ ID NO: 383633 - DNA, 20 bp, Artificial Sequence
  Description of Artificial Sequence: Synthetic oligonucleotide
  Target: LAMA2; (+) strand; PAM type: YTN; PAM sequence: TTG
ttgatgaactgatgctagag

SEQ ID NO: 383634 - DNA, 20 bp, Artificial Sequence
  Description of Artificial Sequence: Synthetic oligonucleotide
  Target: LAMA2; (+) strand; PAM type: YTN; PAM sequence: TTG
atgaactgatgctagagaaa

SEQ ID NO: 383635 - DNA, 20 bp, Artificial Sequence
  Description of Artificial Sequence: Synthetic oligonucleotide
  Target: LAMA2; (+) strand; PAM type: YTN; PAM sequence: CTG
atgctagagaaattaaataa

SEQ ID NO: 383636 - DNA, 20 bp, Artificial Sequence
  Description of Artificial Sequence: Synthetic oligonucleotide
  Target: LAMA2; (+) strand; PAM type: YTN; PAM sequence: CTA
gagaaattaaataacttgct

SEQ ID NO: 383637 - DNA, 20 bp, Artificial Sequence
  Description of Artificial Sequence: Synthetic oligonucleotide
  Target: LAMA2; (+) strand; PAM type: YTN; PAM sequence: TTA
aataacttgcttaagtcata

SEQ ID NO: 383638 - DNA, 20 bp, Artificial Sequence
  Description of Artificial Sequence: Synthetic oligonucleotide
  Target: LAMA2; (+) strand; PAM type: YTN; PAM sequence: CTT
gcttaagtcataaaacagca

SEQ ID NO: 383639 - DNA, 20 bp, Artificial Sequence
  Description of Artificial Sequence: Synthetic oligonucleotide
  Target: LAMA2; (+) strand; PAM type: YTN; PAM sequence: TTG
cttaagtcataaaacagcag

SEQ ID NO: 383640 - DNA, 20 bp, Artificial Sequence
  Description of Artificial Sequence: Synthetic oligonucleotide
  Target: LAMA2; (+) strand; PAM type: YTN; PAM sequence: CTT
aagtcataaaacagcagagg

SEQ ID NO: 383641 - DNA, 20 bp, Artificial Sequence
  Description of Artificial Sequence: Synthetic oligonucleotide
  Target: LAMA2; (+) strand; PAM type: YTN; PAM sequence: TTA
agtcataaaacagcagaggc

SEQ ID NO: 383642 - DNA, 20 bp, Artificial Sequence
  Description of Artificial Sequence: Synthetic oligonucleotide
  Target: LAMA2; (+) strand; PAM type: YTN; PAM sequence: TTT
caaatgctggtttgtttaaa

SEQ ID NO: 383643 - DNA, 20 bp, Artificial Sequence
  Description of Artificial Sequence: Synthetic oligonucleotide
  Target: LAMA2; (+) strand; PAM type: YTN; PAM sequence: TTC
aaatgctggtttgtttaaat

SEQ ID NO: 383644 - DNA, 20 bp, Artificial Sequence
  Description of Artificial Sequence: Synthetic oligonucleotide
  Target: LAMA2; (+) strand; PAM type: YTN; PAM sequence: CTG
gtttgtttaaatagatgttt

SEQ ID NO: 383645 - DNA, 20 bp, Artificial Sequence
  Description of Artificial Sequence: Synthetic oligonucleotide
  Target: LAMA2; (+) strand; PAM type: YTN; PAM sequence: TTT
gtttaaatagatgtttgatg

SEQ ID NO: 383646 - DNA, 20 bp, Artificial Sequence
  Description of Artificial Sequence: Synthetic oligonucleotide
  Target: LAMA2; (+) strand; PAM type: YTN; PAM sequence: TTG
tttaaatagatgtttgatga

SEQ ID NO: 383647 - DNA, 20 bp, Artificial Sequence
  Description of Artificial Sequence: Synthetic oligonucleotide
  Target: LAMA2; (+) strand; PAM type: YTN; PAM sequence: TTT
aaatagatgtttgatgagct

SEQ ID NO: 383648 - DNA, 20 bp, Artificial Sequence
  Description of Artificial Sequence: Synthetic oligonucleotide
  Target: LAMA2; (+) strand; PAM type: YTN; PAM sequence: TTA
aatagatgtttgatgagcta

SEQ ID NO: 383649 - DNA, 20 bp, Artificial Sequence
  Description of Artificial Sequence: Synthetic oligonucleotide
  Target: LAMA2; (+) strand; PAM type: YTN; PAM sequence: TTT
gatgagctatttcatagtat

SEQ ID NO: 383650 - DNA, 20 bp, Artificial Sequence
  Description of Artificial Sequence: Synthetic oligonucleotide
  Target: LAMA2; (+) strand; PAM type: YTN; PAM sequence: TTG
atgagctatttcatagtatc

SEQ ID NO: 383651 - DNA, 20 bp, Artificial Sequence
  Description of Artificial Sequence: Synthetic oligonucleotide
  Target: LAMA2; (+) strand; PAM type: YTN; PAM sequence: CTA
tttcatagtatccttgtgca

SEQ ID NO: 383652 - DNA, 20 bp, Artificial Sequence
  Description of Artificial Sequence: Synthetic oligonucleotide
  Target: LAMA2; (+) strand; PAM type: YTN; PAM sequence: TTT
catagtatccttgtgcacaa

SEQ ID NO: 383653 - DNA, 20 bp, Artificial Sequence
  Description of Artificial Sequence: Synthetic oligonucleotide
  Target: LAMA2; (+) strand; PAM type: YTN; PAM sequence: TTC
atagtatccttgtgcacaag

SEQ ID NO: 383654 - DNA, 20 bp, Artificial Sequence
  Description of Artificial Sequence: Synthetic oligonucleotide
  Target: LAMA2; (+) strand; PAM type: YTN; PAM sequence: CTT
gtgcacaagattgaaaatat

SEQ ID NO: 383655 - DNA, 20 bp, Artificial Sequence
  Description of Artificial Sequence: Synthetic oligonucleotide
  Target: LAMA2; (+) strand; PAM type: YTN; PAM sequence: TTG
tgcacaagattgaaaatatg

SEQ ID NO: 383656 - DNA, 20 bp, Artificial Sequence
  Description of Artificial Sequence: Synthetic oligonucleotide
  Target: LAMA2; (+) strand; PAM type: YTN; PAM sequence: TTG
aaaatatgagccagatgtta

SEQ ID NO: 383657 - DNA, 20 bp, Artificial Sequence
  Description of Artificial Sequence: Synthetic oligonucleotide
  Target: LAMA2; (+) strand; PAM type: YTN; PAM sequence: TTA
gccagctgataggttgatgg

SEQ ID NO: 383658 - DNA, 20 bp, Artificial Sequence
  Description of Artificial Sequence: Synthetic oligonucleotide
  Target: LAMA2; (+) strand; PAM type: YTN; PAM sequence: CTG
ataggttgatgggcatatac

SEQ ID NO: 383659 - DNA, 20 bp, Artificial Sequence
  Description of Artificial Sequence: Synthetic oligonucleotide
  Target: LAMA2; (+) strand; PAM type: YTN; PAM sequence: TTG
atgggcatatacgttgctaa

SEQ ID NO: 383660 - DNA, 20 bp, Artificial Sequence
  Description of Artificial Sequence: Synthetic oligonucleotide
  Target: LAMA2; (+) strand; PAM type: YTN; PAM sequence: TTG
ctaaaaaaatgtgacccaga

SEQ ID NO: 383661 - DNA, 20 bp, Artificial Sequence
  Description of Artificial Sequence: Synthetic oligonucleotide
  Target: LAMA2; (+) strand; PAM type: YTN; PAM sequence: CTA
aaaaaatgtgacccagagta

SEQ ID NO: 383662 - DNA, 20 bp, Artificial Sequence
  Description of Artificial Sequence: Synthetic oligonucleotide
  Target: LAMA2; (+) strand; PAM type: YTN; PAM sequence: CTC
tagtgatatctccaatgatg

SEQ ID NO: 383663 - DNA, 20 bp, Artificial Sequence
  Description of Artificial Sequence: Synthetic oligonucleotide
  Target: LAMA2; (+) strand; PAM type: YTN; PAM sequence: CTA
gtgatatctccaatgatgag

SEQ ID NO: 383664 - DNA, 20 bp, Artificial Sequence
  Description of Artificial Sequence: Synthetic oligonucleotide
  Target: LAMA2; (+) strand; PAM type: YTN; PAM sequence: CTC
caatgatgaggcgtaagctt

SEQ ID NO: 383665 - DNA, 20 bp, Artificial Sequence
  Description of Artificial Sequence: Synthetic oligonucleotide
  Target: LAMA2; (+) strand; PAM type: YTN; PAM sequence: CTT
tgtatttgaccttgttgtgt

SEQ ID NO: 383666 - DNA, 20 bp, Artificial Sequence
  Description of Artificial Sequence: Synthetic oligonucleotide
  Target: LAMA2; (+) strand; PAM type: YTN; PAM sequence: TTT
gtatttgaccttgttgtgtt

SEQ ID NO: 383667 - DNA, 20 bp, Artificial Sequence
  Description of Artificial Sequence: Synthetic oligonucleotide
  Target: LAMA2; (+) strand; PAM type: YTN; PAM sequence: TTG
tatttgaccttgttgtgttc

SEQ ID NO: 383668 - DNA, 20 bp, Artificial Sequence
  Description of Artificial Sequence: Synthetic oligonucleotide
  Target: LAMA2; (+) strand; PAM type: YTN; PAM sequence: TTT
gaccttgttgtgttcaaaat

SEQ ID NO: 383669 - DNA, 20 bp, Artificial Sequence
  Description of Artificial Sequence: Synthetic oligonucleotide
  Target: LAMA2; (+) strand; PAM type: YTN; PAM sequence: TTG
accttgttgtgttcaaaata

SEQ ID NO: 383670 - DNA, 20 bp, Artificial Sequence
  Description of Artificial Sequence: Synthetic oligonucleotide
  Target: LAMA2; (+) strand; PAM type: YTN; PAM sequence: CTT
gttgtgttcaaaatatctgt

SEQ ID NO: 383671 - DNA, 20 bp, Artificial Sequence
  Description of Artificial Sequence: Synthetic oligonucleotide
  Target: LAMA2; (+) strand; PAM type: YTN; PAM sequence: TTG
ttgtgttcaaaatatctgta

SEQ ID NO: 383672 - DNA, 20 bp, Artificial Sequence
  Description of Artificial Sequence: Synthetic oligonucleotide
  Target: LAMA2; (+) strand; PAM type: YTN; PAM sequence: TTG
tgttcaaaatatctgtaaat

SEQ ID NO: 383673 - DNA, 20 bp, Artificial Sequence
  Description of Artificial Sequence: Synthetic oligonucleotide
  Target: LAMA2; (+) strand; PAM type: YTN; PAM sequence: TTC
aaaatatctgtaaatgcttt

SEQ ID NO: 383674 - DNA, 20 bp, Artificial Sequence
  Description of Artificial Sequence: Synthetic oligonucleotide
  Target: LAMA2; (+) strand; PAM type: YTN; PAM sequence: CTG
taaatgctttggatgatatc

SEQ ID NO: 383675 - DNA, 20 bp, Artificial Sequence
  Description of Artificial Sequence: Synthetic oligonucleotide
  Target: LAMA2; (+) strand; PAM type: YTN; PAM sequence: CTT
tggatgatatctatcaaata

SEQ ID NO: 383676 - DNA, 20 bp, Artificial Sequence
  Description of Artificial Sequence: Synthetic oligonucleotide
  Target: LAMA2; (+) strand; PAM type: YTN; PAM sequence: TTT
ggatgatatctatcaaatat

SEQ ID NO: 383677 - DNA, 20 bp, Artificial Sequence
  Description of Artificial Sequence: Synthetic oligonucleotide
  Target: LAMA2; (+) strand; PAM type: YTN; PAM sequence: TTG
gatgatatctatcaaatatt

SEQ ID NO: 383678 - DNA, 20 bp, Artificial Sequence
  Description of Artificial Sequence: Synthetic oligonucleotide
  Target: LAMA2; (+) strand; PAM type: YTN; PAM sequence: CTA
tcaaatattcagataatata

SEQ ID NO: 383679 - DNA, 20 bp, Artificial Sequence
  Description of Artificial Sequence: Synthetic oligonucleotide
  Target: LAMA2; (+) strand; PAM type: YTN; PAM sequence: TTC
agataatataaagctgaaag

SEQ ID NO: 383680 - DNA, 20 bp, Artificial Sequence
  Description of Artificial Sequence: Synthetic oligonucleotide
  Target: LAMA2; (+) strand; PAM type: YTN; PAM sequence: CTG
aaagtattatctaatgtgtt

SEQ ID NO: 383681 - DNA, 20 bp, Artificial Sequence
  Description of Artificial Sequence: Synthetic oligonucleotide
  Target: LAMA2; (+) strand; PAM type: YTN; PAM sequence: TTA
tctaatgtgttggatggtgg

SEQ ID NO: 383682 - DNA, 20 bp, Artificial Sequence
  Description of Artificial Sequence: Synthetic oligonucleotide
  Target: LAMA2; (+) strand; PAM type: YTN; PAM sequence: CTA
atgtgttggatggtgggaaa

SEQ ID NO: 383683 - DNA, 20 bp, Artificial Sequence
  Description of Artificial Sequence: Synthetic oligonucleotide
  Target: LAMA2; (+) strand; PAM type: YTN; PAM sequence: TTG
gatggtgggaaaatatcctg

SEQ ID NO: 383684 - DNA, 20 bp, Artificial Sequence
  Description of Artificial Sequence: Synthetic oligonucleotide
  Target: LAMA2; (+) strand; PAM type: YTN; PAM sequence: CTG
acagatgatactatgaatta

SEQ ID NO: 383685 - DNA, 20 bp, Artificial Sequence
  Description of Artificial Sequence: Synthetic oligonucleotide
  Target: LAMA2; (+) strand; PAM type: YTN; PAM sequence: CTA
tgaattacagttaacaagat

SEQ ID NO: 383686 - DNA, 20 bp, Artificial Sequence
  Description of Artificial Sequence: Synthetic oligonucleotide
  Target: LAMA2; (+) strand; PAM type: YTN; PAM sequence: TTA
cagttaacaagatgagatta

SEQ ID NO: 383687 - DNA, 20 bp, Artificial Sequence
  Description of Artificial Sequence: Synthetic oligonucleotide
  Target: LAMA2; (+) strand; PAM type: YTN; PAM sequence: TTA
acaagatgagattaatagaa

SEQ ID NO: 383688 - DNA, 20 bp, Artificial Sequence
  Description of Artificial Sequence: Synthetic oligonucleotide
  Target: LAMA2; (+) strand; PAM type: YTN; PAM sequence: TTA
atagaaaagatttgaactca

SEQ ID NO: 383689 - DNA, 20 bp, Artificial Sequence
  Description of Artificial Sequence: Synthetic oligonucleotide
  Target: LAMA2; (+) strand; PAM type: YTN; PAM sequence: TTT
gaactcaggtaagctcactt

SEQ ID NO: 383690 - DNA, 20 bp, Artificial Sequence
  Description of Artificial Sequence: Synthetic oligonucleotide
  Target: LAMA2; (+) strand; PAM type: YTN; PAM sequence: TTG
aactcaggtaagctcacttg

SEQ ID NO: 383691 - DNA, 20 bp, Artificial Sequence
  Description of Artificial Sequence: Synthetic oligonucleotide
  Target: LAMA2; (+) strand; PAM type: YTN; PAM sequence: CTC
aggtaagctcacttgtttgt

SEQ ID NO: 383692 - DNA, 20 bp, Artificial Sequence
  Description of Artificial Sequence: Synthetic oligonucleotide
  Target: LAMA2; (+) strand; PAM type: YTN; PAM sequence: CTC
acttgtttgttcattcctgt

SEQ ID NO: 383693 - DNA, 20 bp, Artificial Sequence
  Description of Artificial Sequence: Synthetic oligonucleotide
  Target: LAMA2; (+) strand; PAM type: YTN; PAM sequence: CTT
gtttgttcattcctgtggca

SEQ ID NO: 383694 - DNA, 20 bp, Artificial Sequence
  Description of Artificial Sequence: Synthetic oligonucleotide
  Target: LAMA2; (+) strand; PAM type: YTN; PAM sequence: TTG
tttgttcattcctgtggcat

SEQ ID NO: 383695 - DNA, 20 bp, Artificial Sequence
  Description of Artificial Sequence: Synthetic oligonucleotide
  Target: LAMA2; (+) strand; PAM type: YTN; PAM sequence: TTT
gttcattcctgtggcatctg

SEQ ID NO: 383696 - DNA, 20 bp, Artificial Sequence
  Description of Artificial Sequence: Synthetic oligonucleotide
  Target: LAMA2; (+) strand; PAM type: YTN; PAM sequence: TTG
ttcattcctgtggcatctgt

SEQ ID NO: 383697 - DNA, 20 bp, Artificial Sequence
  Description of Artificial Sequence: Synthetic oligonucleotide
  Target: LAMA2; (+) strand; PAM type: YTN; PAM sequence: TTC
attcctgtggcatctgttaa

SEQ ID NO: 383698 - DNA, 20 bp, Artificial Sequence
  Description of Artificial Sequence: Synthetic oligonucleotide
  Target: LAMA2; (+) strand; PAM type: YTN; PAM sequence: TTC
ctgtggcatctgttaattat

SEQ ID NO: 383699 - DNA, 20 bp, Artificial Sequence
  Description of Artificial Sequence: Synthetic oligonucleotide
  Target: LAMA2; (+) strand; PAM type: YTN; PAM sequence: CTG
tggcatctgttaattatgtt

SEQ ID NO: 383700 - DNA, 20 bp, Artificial Sequence
  Description of Artificial Sequence: Synthetic oligonucleotide
  Target: LAMA2; (+) strand; PAM type: YTN; PAM sequence: CTG
ttaattatgtttccaacatg

SEQ ID NO: 383701 - DNA, 20 bp, Artificial Sequence
  Description of Artificial Sequence: Synthetic oligonucleotide
  Target: LAMA2; (+) strand; PAM type: YTN; PAM sequence: TTA
attatgtttccaacatgcag

SEQ ID NO: 383702 - DNA, 20 bp, Artificial Sequence
  Description of Artificial Sequence: Synthetic oligonucleotide
  Target: LAMA2; (+) strand; PAM type: YTN; PAM sequence: TTA
tgtttccaacatgcaggtct

SEQ ID NO: 383703 - DNA, 20 bp, Artificial Sequence
  Description of Artificial Sequence: Synthetic oligonucleotide
  Target: LAMA2; (+) strand; PAM type: YTN; PAM sequence: TTT
ccaacatgcaggtctatggc

SEQ ID NO: 383704 - DNA, 20 bp, Artificial Sequence
  Description of Artificial Sequence: Synthetic oligonucleotide
  Target: LAMA2; (+) strand; PAM type: YTN; PAM sequence: TTC
caacatgcaggtctatggcc

SEQ ID NO: 383705 - DNA, 20 bp, Artificial Sequence
  Description of Artificial Sequence: Synthetic oligonucleotide
  Target: LAMA2; (+) strand; PAM type: YTN; PAM sequence: CTA
tggcctatggtagatagtaa

SEQ ID NO: 383706 - DNA, 20 bp, Artificial Sequence
  Description of Artificial Sequence: Synthetic oligonucleotide
  Target: LAMA2; (+) strand; PAM type: YTN; PAM sequence: CTA
tggtagatagtaagaatatg

SEQ ID NO: 383707 - DNA, 20 bp, Artificial Sequence
  Description of Artificial Sequence: Synthetic oligonucleotide
  Target: LAMA2; (+) strand; PAM type: YTN; PAM sequence: CTG
catgggtcttgccctctagg

SEQ ID NO: 383708 - DNA, 20 bp, Artificial Sequence
  Description of Artificial Sequence: Synthetic oligonucleotide
  Target: LAMA2; (+) strand; PAM type: YTN; PAM sequence: CTT
gccctctaggagcttattct

SEQ ID NO: 383709 - DNA, 20 bp, Artificial Sequence
  Description of Artificial Sequence: Synthetic oligonucleotide
  Target: LAMA2; (+) strand; PAM type: YTN; PAM sequence: TTG
ccctctaggagcttattctc

SEQ ID NO: 383710 - DNA, 20 bp, Artificial Sequence
  Description of Artificial Sequence: Synthetic oligonucleotide
  Target: LAMA2; (+) strand; PAM type: YTN; PAM sequence: CTC
taggagcttattctctagtt

SEQ ID NO: 383711 - DNA, 20 bp, Artificial Sequence
  Description of Artificial Sequence: Synthetic oligonucleotide
  Target: LAMA2; (+) strand; PAM type: YTN; PAM sequence: CTA
ggagcttattctctagttta

SEQ ID NO: 383712 - DNA, 20 bp, Artificial Sequence
  Description of Artificial Sequence: Synthetic oligonucleotide
  Target: LAMA2; (+) strand; PAM type: YTN; PAM sequence: CTT
attctctagtttaggggaaa

SEQ ID NO: 383713 - DNA, 20 bp, Artificial Sequence
  Description of Artificial Sequence: Synthetic oligonucleotide
  Target: LAMA2; (+) strand; PAM type: YTN; PAM sequence: TTA
ttctctagtttaggggaaag

SEQ ID NO: 383714 - DNA, 20 bp, Artificial Sequence
  Description of Artificial Sequence: Synthetic oligonucleotide
  Target: LAMA2; (+) strand; PAM type: YTN; PAM sequence: TTC
tctagtttaggggaaagaac

SEQ ID NO: 383715 - DNA, 20 bp, Artificial Sequence
  Description of Artificial Sequence: Synthetic oligonucleotide
  Target: LAMA2; (+) strand; PAM type: YTN; PAM sequence: CTC
tagtttaggggaaagaacag

SEQ ID NO: 383716 - DNA, 20 bp, Artificial Sequence
  Description of Artificial Sequence: Synthetic oligonucleotide
  Target: LAMA2; (+) strand; PAM type: YTN; PAM sequence: CTA
gtttaggggaaagaacagag

SEQ ID NO: 383717 - DNA, 20 bp, Artificial Sequence
  Description of Artificial Sequence: Synthetic oligonucleotide
  Target: LAMA2; (+) strand; PAM type: YTN; PAM sequence: TTT
aggggaaagaacagaggaaa

SEQ ID NO: 383718 - DNA, 20 bp, Artificial Sequence
  Description of Artificial Sequence: Synthetic oligonucleotide
  Target: LAMA2; (+) strand; PAM type: YTN; PAM sequence: TTA
ggggaaagaacagaggaaat

SEQ ID NO: 383719 - DNA, 20 bp, Artificial Sequence
  Description of Artificial Sequence: Synthetic oligonucleotide
  Target: LAMA2; (+) strand; PAM type: YTN; PAM sequence: TTA
gcaattcatgtgaagtaaga

SEQ ID NO: 383720 - DNA, 20 bp, Artificial Sequence
  Description of Artificial Sequence: Synthetic oligonucleotide
  Target: LAMA2; (+) strand; PAM type: YTN; PAM sequence: TTC
atgtgaagtaagagtcctta

SEQ ID NO: 383721 - DNA, 20 bp, Artificial Sequence
  Description of Artificial Sequence: Synthetic oligonucleotide
  Target: LAMA2; (+) strand; PAM type: YTN; PAM sequence: CTT
acttgattgcagattcacta

SEQ ID NO: 383722 - DNA, 20 bp, Artificial Sequence
  Description of Artificial Sequence: Synthetic oligonucleotide
  Target: LAMA2; (+) strand; PAM type: YTN; PAM sequence: TTA
cttgattgcagattcactag

SEQ ID NO: 383723 - DNA, 20 bp, Artificial Sequence
  Description of Artificial Sequence: Synthetic oligonucleotide
  Target: LAMA2; (+) strand; PAM type: YTN; PAM sequence: CTT
gattgcagattcactaggtg

SEQ ID NO: 383724 - DNA, 20 bp, Artificial Sequence
  Description of Artificial Sequence: Synthetic oligonucleotide
  Target: LAMA2; (+) strand; PAM type: YTN; PAM sequence: TTG
attgcagattcactaggtgc

SEQ ID NO: 383725 - DNA, 20 bp, Artificial Sequence
  Description of Artificial Sequence: Synthetic oligonucleotide
  Target: LAMA2; (+) strand; PAM type: YTN; PAM sequence: TTG
cagattcactaggtgccaac

SEQ ID NO: 383726 - DNA, 20 bp, Artificial Sequence
  Description of Artificial Sequence: Synthetic oligonucleotide
  Target: LAMA2; (+) strand; PAM type: YTN; PAM sequence: TTC
actaggtgccaacacagggc

SEQ ID NO: 383727 - DNA, 20 bp, Artificial Sequence
  Description of Artificial Sequence: Synthetic oligonucleotide
  Target: LAMA2; (+) strand; PAM type: YTN; PAM sequence: CTA
ggtgccaacacagggcattg

SEQ ID NO: 383728 - DNA, 20 bp, Artificial Sequence
  Description of Artificial Sequence: Synthetic oligonucleotide
  Target: LAMA2; (+) strand; PAM type: YTN; PAM sequence: TTG
ctatttgtataagatccaaa

SEQ ID NO: 383729 - DNA, 20 bp, Artificial Sequence
  Description of Artificial Sequence: Synthetic oligonucleotide
  Target: LAMA2; (+) strand; PAM type: YTN; PAM sequence: CTA
tttgtataagatccaaatca

SEQ ID NO: 383730 - DNA, 20 bp, Artificial Sequence
  Description of Artificial Sequence: Synthetic oligonucleotide
  Target: LAMA2; (+) strand; PAM type: YTN; PAM sequence: TTT
gtataagatccaaatcaagg

SEQ ID NO: 383731 - DNA, 20 bp, Artificial Sequence
  Description of Artificial Sequence: Synthetic oligonucleotide
  Target: LAMA2; (+) strand; PAM type: YTN; PAM sequence: TTG
tataagatccaaatcaaggg

SEQ ID NO: 383732 - DNA, 20 bp, Artificial Sequence
  Description of Artificial Sequence: Synthetic oligonucleotide
  Target: LAMA2; (+) strand; PAM type: YTN; PAM sequence: TTT
aatatatttgcaagtcacag

SEQ ID NO: 383733 - DNA, 20 bp, Artificial Sequence
  Description of Artificial Sequence: Synthetic oligonucleotide
  Target: LAMA2; (+) strand; PAM type: YTN; PAM sequence: TTA
atatatttgcaagtcacagc

SEQ ID NO: 383734 - DNA, 20 bp, Artificial Sequence
  Description of Artificial Sequence: Synthetic oligonucleotide
  Target: LAMA2; (+) strand; PAM type: YTN; PAM sequence: TTT
gcaagtcacagctagagact

SEQ ID NO: 383735 - DNA, 20 bp, Artificial Sequence
  Description of Artificial Sequence: Synthetic oligonucleotide
  Target: LAMA2; (+) strand; PAM type: YTN; PAM sequence: TTG
caagtcacagctagagactt

SEQ ID NO: 383736 - DNA, 20 bp, Artificial Sequence
  Description of Artificial Sequence: Synthetic oligonucleotide
  Target: LAMA2; (+) strand; PAM type: YTN; PAM sequence: CTA
gagacttataatctactata

SEQ ID NO: 383737 - DNA, 20 bp, Artificial Sequence
  Description of Artificial Sequence: Synthetic oligonucleotide
  Target: LAMA2; (+) strand; PAM type: YTN; PAM sequence: CTT
ataatctactatattttgaa

SEQ ID NO: 383738 - DNA, 20 bp, Artificial Sequence
  Description of Artificial Sequence: Synthetic oligonucleotide
  Target: LAMA2; (+) strand; PAM type: YTN; PAM sequence: TTA
taatctactatattttgaaa

SEQ ID NO: 383739 - DNA, 20 bp, Artificial Sequence
  Description of Artificial Sequence: Synthetic oligonucleotide
  Target: LAMA2; (+) strand; PAM type: YTN; PAM sequence: CTA
ctatattttgaaagaaaccc

SEQ ID NO: 383740 - DNA, 20 bp, Artificial Sequence
  Description of Artificial Sequence: Synthetic oligonucleotide
  Target: LAMA2; (+) strand; PAM type: YTN; PAM sequence: CTA
tattttgaaagaaaccctga

SEQ ID NO: 383741 - DNA, 20 bp, Artificial Sequence
  Description of Artificial Sequence: Synthetic oligonucleotide
  Target: LAMA2; (+) strand; PAM type: YTN; PAM sequence: TTT
tgaaagaaaccctgagtaag

SEQ ID NO: 383742 - DNA, 20 bp, Artificial Sequence
  Description of Artificial Sequence: Synthetic oligonucleotide
  Target: LAMA2; (+) strand; PAM type: YTN; PAM sequence: TTT
gaaagaaaccctgagtaaga

SEQ ID NO: 383743 - DNA, 20 bp, Artificial Sequence
  Description of Artificial Sequence: Synthetic oligonucleotide
  Target: LAMA2; (+) strand; PAM type: YTN; PAM sequence: TTG
aaagaaaccctgagtaagat

SEQ ID NO: 383744 - DNA, 20 bp, Artificial Sequence
  Description of Artificial Sequence: Synthetic oligonucleotide
  Target: LAMA2; (+) strand; PAM type: YTN; PAM sequence: CTG
agtaagattgctaaatgttt

SEQ ID NO: 383745 - DNA, 20 bp, Artificial Sequence
  Description of Artificial Sequence: Synthetic oligonucleotide
  Target: LAMA2; (+) strand; PAM type: YTN; PAM sequence: TTG
ctaaatgtttagcttgaaac

SEQ ID NO: 383746 - DNA, 20 bp, Artificial Sequence
  Description of Artificial Sequence: Synthetic oligonucleotide
  Target: LAMA2; (+) strand; PAM type: YTN; PAM sequence: CTA
aatgtttagcttgaaacaaa

SEQ ID NO: 383747 - DNA, 20 bp, Artificial Sequence
  Description of Artificial Sequence: Synthetic oligonucleotide
  Target: LAMA2; (+) strand; PAM type: YTN; PAM sequence: TTT
agcttgaaacaaagatttag

SEQ ID NO: 383748 - DNA, 20 bp, Artificial Sequence
  Description of Artificial Sequence: Synthetic oligonucleotide
  Target: LAMA2; (+) strand; PAM type: YTN; PAM sequence: TTA
gcttgaaacaaagatttagg

SEQ ID NO: 383749 - DNA, 20 bp, Artificial Sequence
  Description of Artificial Sequence: Synthetic oligonucleotide
  Target: LAMA2; (+) strand; PAM type: YTN; PAM sequence: CTT
gaaacaaagatttaggaagt

SEQ ID NO: 383750 - DNA, 20 bp, Artificial Sequence
  Description of Artificial Sequence: Synthetic oligonucleotide
  Target: LAMA2; (+) strand; PAM type: YTN; PAM sequence: TTG
aaacaaagatttaggaagta

SEQ ID NO: 383751 - DNA, 20 bp, Artificial Sequence
  Description of Artificial Sequence: Synthetic oligonucleotide
  Target: LAMA2; (+) strand; PAM type: YTN; PAM sequence: TTT
aggaagtaatagtattctta

SEQ ID NO: 383752 - DNA, 20 bp, Artificial Sequence
  Description of Artificial Sequence: Synthetic oligonucleotide
  Target: LAMA2; (+) strand; PAM type: YTN; PAM sequence: TTA
ggaagtaatagtattcttag

SEQ ID NO: 383753 - DNA, 20 bp, Artificial Sequence
  Description of Artificial Sequence: Synthetic oligonucleotide
  Target: LAMA2; (+) strand; PAM type: YTN; PAM sequence: TTC
ttagatatttgaggaccttc

SEQ ID NO: 383754 - DNA, 20 bp, Artificial Sequence
  Description of Artificial Sequence: Synthetic oligonucleotide
  Target: LAMA2; (+) strand; PAM type: YTN; PAM sequence: CTT
agatatttgaggaccttccc

SEQ ID NO: 383755 - DNA, 20 bp, Artificial Sequence
  Description of Artificial Sequence: Synthetic oligonucleotide
  Target: LAMA2; (+) strand; PAM type: YTN; PAM sequence: TTA
gatatttgaggaccttccct

SEQ ID NO: 383756 - DNA, 20 bp, Artificial Sequence
  Description of Artificial Sequence: Synthetic oligonucleotide
  Target: LAMA2; (+) strand; PAM type: YTN; PAM sequence: TTT
gaggaccttccctaggaaaa

SEQ ID NO: 383757 - DNA, 20 bp, Artificial Sequence
  Description of Artificial Sequence: Synthetic oligonucleotide
  Target: LAMA2; (+) strand; PAM type: YTN; PAM sequence: TTG
aggaccttccctaggaaaag

SEQ ID NO: 383758 - DNA, 20 bp, Artificial Sequence
  Description of Artificial Sequence: Synthetic oligonucleotide
  Target: LAMA2; (+) strand; PAM type: YTN; PAM sequence: CTT
ccctaggaaaagggaattag

SEQ ID NO: 383759 - DNA, 20 bp, Artificial Sequence
  Description of Artificial Sequence: Synthetic oligonucleotide
  Target: LAMA2; (+) strand; PAM type: YTN; PAM sequence: TTC
cctaggaaaagggaattaga

SEQ ID NO: 383760 - DNA, 20 bp, Artificial Sequence
  Description of Artificial Sequence: Synthetic oligonucleotide
  Target: LAMA2; (+) strand; PAM type: YTN; PAM sequence: CTA
ggaaaagggaattagactta

SEQ ID NO: 383761 - DNA, 20 bp, Artificial Sequence
  Description of Artificial Sequence: Synthetic oligonucleotide
  Target: LAMA2; (+) strand; PAM type: YTN; PAM sequence: TTA
gacttaattttcatagcttc

SEQ ID NO: 383762 - DNA, 20 bp, Artificial Sequence
  Description of Artificial Sequence: Synthetic oligonucleotide
  Target: LAMA2; (+) strand; PAM type: YTN; PAM sequence: CTT
aattttcatagcttcagaag

SEQ ID NO: 383763 - DNA, 20 bp, Artificial Sequence
  Description of Artificial Sequence: Synthetic oligonucleotide
  Target: LAMA2; (+) strand; PAM type: YTN; PAM sequence: TTA
attttcatagcttcagaagg

SEQ ID NO: 383764 - DNA, 20 bp, Artificial Sequence
  Description of Artificial Sequence: Synthetic oligonucleotide
  Target: LAMA2; (+) strand; PAM type: YTN; PAM sequence: TTT
tcatagcttcagaaggcaga

SEQ ID NO: 383765 - DNA, 20 bp, Artificial Sequence
  Description of Artificial Sequence: Synthetic oligonucleotide
  Target: LAMA2; (+) strand; PAM type: YTN; PAM sequence: TTT
catagcttcagaaggcagaa

SEQ ID NO: 383766 - DNA, 20 bp, Artificial Sequence
  Description of Artificial Sequence: Synthetic oligonucleotide
  Target: LAMA2; (+) strand; PAM type: YTN; PAM sequence: TTC
atagcttcagaaggcagaac

SEQ ID NO: 383767 - DNA, 20 bp, Artificial Sequence
  Description of Artificial Sequence: Synthetic oligonucleotide
  Target: LAMA2; (+) strand; PAM type: YTN; PAM sequence: CTT
cagaaggcagaacttggatc

SEQ ID NO: 383768 - DNA, 20 bp, Artificial Sequence
  Description of Artificial Sequence: Synthetic oligonucleotide
  Target: LAMA2; (+) strand; PAM type: YTN; PAM sequence: TTC
agaaggcagaacttggatca

SEQ ID NO: 383769 - DNA, 20 bp, Artificial Sequence
  Description of Artificial Sequence: Synthetic oligonucleotide
  Target: LAMA2; (+) strand; PAM type: YTN; PAM sequence: CTT
ggatcactcactgaaaatta

SEQ ID NO: 383770 - DNA, 20 bp, Artificial Sequence
  Description of Artificial Sequence: Synthetic oligonucleotide
  Target: LAMA2; (+) strand; PAM type: YTN; PAM sequence: TTG
gatcactcactgaaaattag

SEQ ID NO: 383771 - DNA, 20 bp, Artificial Sequence
  Description of Artificial Sequence: Synthetic oligonucleotide
  Target: LAMA2; (+) strand; PAM type: YTN; PAM sequence: CTC
actgaaaattagaatgcatc

SEQ ID NO: 383772 - DNA, 20 bp, Artificial Sequence
  Description of Artificial Sequence: Synthetic oligonucleotide
  Target: LAMA2; (+) strand; PAM type: YTN; PAM sequence: CTG
aaaattagaatgcatcaaat

SEQ ID NO: 383773 - DNA, 20 bp, Artificial Sequence
  Description of Artificial Sequence: Synthetic oligonucleotide
  Target: LAMA2; (+) strand; PAM type: YTN; PAM sequence: TTA
gaatgcatcaaatttttatt

SEQ ID NO: 383774 - DNA, 20 bp, Artificial Sequence
  Description of Artificial Sequence: Synthetic oligonucleotide
  Target: LAMA2; (+) strand; PAM type: YTN; PAM sequence: TTT
ttattcaccgtaaggaaaaa

SEQ ID NO: 383775 - DNA, 20 bp, Artificial Sequence
  Description of Artificial Sequence: Synthetic oligonucleotide
  Target: LAMA2; (+) strand; PAM type: YTN; PAM sequence: TTT
tattcaccgtaaggaaaaac

SEQ ID NO: 383776 - DNA, 20 bp, Artificial Sequence
  Description of Artificial Sequence: Synthetic oligonucleotide
  Target: LAMA2; (+) strand; PAM type: YTN; PAM sequence: TTT
attcaccgtaaggaaaaact

SEQ ID NO: 383777 - DNA, 20 bp, Artificial Sequence
  Description of Artificial Sequence: Synthetic oligonucleotide
  Target: LAMA2; (+) strand; PAM type: YTN; PAM sequence: TTA
ttcaccgtaaggaaaaactt

SEQ ID NO: 383778 - DNA, 20 bp, Artificial Sequence
  Description of Artificial Sequence: Synthetic oligonucleotide
  Target: LAMA2; (+) strand; PAM type: YTN; PAM sequence: TTC
accgtaaggaaaaacttcac

SEQ ID NO: 383779 - DNA, 20 bp, Artificial Sequence
  Description of Artificial Sequence: Synthetic oligonucleotide
  Target: LAMA2; (+) strand; PAM type: YTN; PAM sequence: CTT
cacagcttatgcaagacgaa

SEQ ID NO: 383780 - DNA, 20 bp, Artificial Sequence
  Description of Artificial Sequence: Synthetic oligonucleotide
  Target: LAMA2; (+) strand; PAM type: YTN; PAM sequence: TTC
acagcttatgcaagacgaaa

SEQ ID NO: 383781 - DNA, 20 bp, Artificial Sequence
  Description of Artificial Sequence: Synthetic oligonucleotide
  Target: LAMA2; (+) strand; PAM type: YTN; PAM sequence: CTT
atgcaagacgaaaaaagctg

SEQ ID NO: 383782 - DNA, 20 bp, Artificial Sequence
  Description of Artificial Sequence: Synthetic oligonucleotide
  Target: LAMA2; (+) strand; PAM type: YTN; PAM sequence: TTA
tgcaagacgaaaaaagctgt

SEQ ID NO: 383783 - DNA, 20 bp, Artificial Sequence
  Description of Artificial Sequence: Synthetic oligonucleotide
  Target: LAMA2; (+) strand; PAM type: YTN; PAM sequence: CTG
tcttataagaattcatgcat

SEQ ID NO: 383784 - DNA, 20 bp, Artificial Sequence
  Description of Artificial Sequence: Synthetic oligonucleotide
  Target: LAMA2; (+) strand; PAM type: YTN; PAM sequence: CTT
ataagaattcatgcatttaa

SEQ ID NO: 383785 - DNA, 20 bp, Artificial Sequence
  Description of Artificial Sequence: Synthetic oligonucleotide
  Target: LAMA2; (+) strand; PAM type: YTN; PAM sequence: TTA
taagaattcatgcatttaat

SEQ ID NO: 383786 - DNA, 20 bp, Artificial Sequence
  Description of Artificial Sequence: Synthetic oligonucleotide
  Target: LAMA2; (+) strand; PAM type: YTN; PAM sequence: TTC
atgcatttaatgatatctca

SEQ ID NO: 383787 - DNA, 20 bp, Artificial Sequence
  Description of Artificial Sequence: Synthetic oligonucleotide
  Target: LAMA2; (+) strand; PAM type: YTN; PAM sequence: TTT
aatgatatctcaaggaaagt

SEQ ID NO: 383788 - DNA, 20 bp, Artificial Sequence
  Description of Artificial Sequence: Synthetic oligonucleotide
  Target: LAMA2; (+) strand; PAM type: YTN; PAM sequence: TTA
atgatatctcaaggaaagta

SEQ ID NO: 383789 - DNA, 20 bp, Artificial Sequence
  Description of Artificial Sequence: Synthetic oligonucleotide
  Target: LAMA2; (+) strand; PAM type: YTN; PAM sequence: CTC
aaggaaagtatagaaggcat

SEQ ID NO: 383790 - DNA, 20 bp, Artificial Sequence
  Description of Artificial Sequence: Synthetic oligonucleotide
  Target: LAMA2; (+) strand; PAM type: YTN; PAM sequence: TTC
ctgtatggcaagaaggttag

SEQ ID NO: 383791 - DNA, 20 bp, Artificial Sequence
  Description of Artificial Sequence: Synthetic oligonucleotide
  Target: LAMA2; (+) strand; PAM type: YTN; PAM sequence: CTG
tatggcaagaaggttagatt

SEQ ID NO: 383792 - DNA, 20 bp, Artificial Sequence
  Description of Artificial Sequence: Synthetic oligonucleotide
  Target: LAMA2; (+) strand; PAM type: YTN; PAM sequence: TTA
gattaagtaatttctcacct

SEQ ID NO: 383793 - DNA, 20 bp, Artificial Sequence
  Description of Artificial Sequence: Synthetic oligonucleotide
  Target: LAMA2; (+) strand; PAM type: YTN; PAM sequence: TTA
agtaatttctcaccttaggc

SEQ ID NO: 383794 - DNA, 20 bp, Artificial Sequence
  Description of Artificial Sequence: Synthetic oligonucleotide
  Target: LAMA2; (+) strand; PAM type: YTN; PAM sequence: TTT
ctcaccttaggcctgagata

SEQ ID NO: 383795 - DNA, 20 bp, Artificial Sequence
  Description of Artificial Sequence: Synthetic oligonucleotide
  Target: LAMA2; (+) strand; PAM type: YTN; PAM sequence: TTC
tcaccttaggcctgagatac

SEQ ID NO: 383796 - DNA, 20 bp, Artificial Sequence
  Description of Artificial Sequence: Synthetic oligonucleotide
  Target: LAMA2; (+) strand; PAM type: YTN; PAM sequence: CTC
accttaggcctgagatacta

SEQ ID NO: 383797 - DNA, 20 bp, Artificial Sequence
  Description of Artificial Sequence: Synthetic oligonucleotide
  Target: LAMA2; (+) strand; PAM type: YTN; PAM sequence: CTT
aggcctgagatactataata

SEQ ID NO: 383798 - DNA, 20 bp, Artificial Sequence
  Description of Artificial Sequence: Synthetic oligonucleotide
  Target: LAMA2; (+) strand; PAM type: YTN; PAM sequence: TTA
ggcctgagatactataatat

SEQ ID NO: 383799 - DNA, 20 bp, Artificial Sequence
  Description of Artificial Sequence: Synthetic oligonucleotide
  Target: LAMA2; (+) strand; PAM type: YTN; PAM sequence: CTG
agatactataatattaatgt

SEQ ID NO: 383800 - DNA, 20 bp, Artificial Sequence
  Description of Artificial Sequence: Synthetic oligonucleotide
  Target: LAMA2; (+) strand; PAM type: YTN; PAM sequence: CTA
taatattaatgttatagtca

SEQ ID NO: 383801 - DNA, 20 bp, Artificial Sequence
  Description of Artificial Sequence: Synthetic oligonucleotide
  Target: LAMA2; (+) strand; PAM type: YTN; PAM sequence: TTA
atgttatagtcatttgattt

SEQ ID NO: 383802 - DNA, 20 bp, Artificial Sequence
  Description of Artificial Sequence: Synthetic oligonucleotide
  Target: LAMA2; (+) strand; PAM type: YTN; PAM sequence: TTA
tagtcatttgattttgtaga

SEQ ID NO: 383803 - DNA, 20 bp, Artificial Sequence
  Description of Artificial Sequence: Synthetic oligonucleotide
  Target: LAMA2; (+) strand; PAM type: YTN; PAM sequence: TTT
gattttgtagaaggaatata

SEQ ID NO: 383804 - DNA, 20 bp, Artificial Sequence
  Description of Artificial Sequence: Synthetic oligonucleotide
  Target: LAMA2; (+) strand; PAM type: YTN; PAM sequence: TTG
attttgtagaaggaatatat

SEQ ID NO: 383805 - DNA, 20 bp, Artificial Sequence
  Description of Artificial Sequence: Synthetic oligonucleotide
  Target: LAMA2; (+) strand; PAM type: YTN; PAM sequence: TTT
tgtagaaggaatatatacca

SEQ ID NO: 383806 - DNA, 20 bp, Artificial Sequence
  Description of Artificial Sequence: Synthetic oligonucleotide
  Target: LAMA2; (+) strand; PAM type: YTN; PAM sequence: TTT
gtagaaggaatatataccaa

SEQ ID NO: 383807 - DNA, 20 bp, Artificial Sequence
  Description of Artificial Sequence: Synthetic oligonucleotide
  Target: LAMA2; (+) strand; PAM type: YTN; PAM sequence: TTG
tagaaggaatatataccaac

SEQ ID NO: 383808 - DNA, 20 bp, Artificial Sequence
  Description of Artificial Sequence: Synthetic oligonucleotide
  Target: LAMA2; (+) strand; PAM type: YTN; PAM sequence: TTT
tccagtgtgcaaaaaaaaac

SEQ ID NO: 383809 - DNA, 20 bp, Artificial Sequence
  Description of Artificial Sequence: Synthetic oligonucleotide
  Target: LAMA2; (+) strand; PAM type: YTN; PAM sequence: TTT
ccagtgtgcaaaaaaaaact

SEQ ID NO: 383810 - DNA, 20 bp, Artificial Sequence
  Description of Artificial Sequence: Synthetic oligonucleotide
  Target: LAMA2; (+) strand; PAM type: YTN; PAM sequence: TTC
cagtgtgcaaaaaaaaactt

SEQ ID NO: 383811 - DNA, 20 bp, Artificial Sequence
  Description of Artificial Sequence: Synthetic oligonucleotide
  Target: LAMA2; (+) strand; PAM type: YTN; PAM sequence: CTT
aacaaatctaatatattctg

SEQ ID NO: 383812 - DNA, 20 bp, Artificial Sequence
  Description of Artificial Sequence: Synthetic oligonucleotide
  Target: LAMA2; (+) strand; PAM type: YTN; PAM sequence: TTA
acaaatctaatatattctga

SEQ ID NO: 383813 - DNA, 20 bp, Artificial Sequence
  Description of Artificial Sequence: Synthetic oligonucleotide
  Target: LAMA2; (+) strand; PAM type: YTN; PAM sequence: CTA
atatattctgatgtattatt

SEQ ID NO: 383814 - DNA, 20 bp, Artificial Sequence
  Description of Artificial Sequence: Synthetic oligonucleotide
  Target: LAMA2; (+) strand; PAM type: YTN; PAM sequence: TTC
tgatgtattattgaagagat

SEQ ID NO: 383815 - DNA, 20 bp, Artificial Sequence
  Description of Artificial Sequence: Synthetic oligonucleotide
  Target: LAMA2; (+) strand; PAM type: YTN; PAM sequence: CTG
atgtattattgaagagatac

SEQ ID NO: 383816 - DNA, 20 bp, Artificial Sequence
  Description of Artificial Sequence: Synthetic oligonucleotide
  Target: LAMA2; (+) strand; PAM type: YTN; PAM sequence: TTA
ttgaagagatactagcacat

SEQ ID NO: 383817 - DNA, 20 bp, Artificial Sequence
  Description of Artificial Sequence: Synthetic oligonucleotide
  Target: LAMA2; (+) strand; PAM type: YTN; PAM sequence: TTG
aagagatactagcacatacc

SEQ ID NO: 383818 - DNA, 20 bp, Artificial Sequence
  Description of Artificial Sequence: Synthetic oligonucleotide
  Target: LAMA2; (+) strand; PAM type: YTN; PAM sequence: CTA
gcacataccactcttgagaa

SEQ ID NO: 383819 - DNA, 20 bp, Artificial Sequence
  Description of Artificial Sequence: Synthetic oligonucleotide
  Target: LAMA2; (+) strand; PAM type: YTN; PAM sequence: CTC
ttgagaatataattaaactt

SEQ ID NO: 383820 - DNA, 20 bp, Artificial Sequence
  Description of Artificial Sequence: Synthetic oligonucleotide
  Target: LAMA2; (+) strand; PAM type: YTN; PAM sequence: CTT
gagaatataattaaacttct

SEQ ID NO: 383821 - DNA, 20 bp, Artificial Sequence
  Description of Artificial Sequence: Synthetic oligonucleotide
  Target: LAMA2; (+) strand; PAM type: YTN; PAM sequence: TTG
agaatataattaaacttctc

SEQ ID NO: 383822 - DNA, 20 bp, Artificial Sequence
  Description of Artificial Sequence: Synthetic oligonucleotide
  Target: LAMA2; (+) strand; PAM type: YTN; PAM sequence: TTA
aacttctcattaggcatcca

SEQ ID NO: 383823 - DNA, 20 bp, Artificial Sequence
  Description of Artificial Sequence: Synthetic oligonucleotide
  Target: LAMA2; (+) strand; PAM type: YTN; PAM sequence: CTT
ctcattaggcatccaaaata

SEQ ID NO: 383824 - DNA, 20 bp, Artificial Sequence
  Description of Artificial Sequence: Synthetic oligonucleotide
  Target: LAMA2; (+) strand; PAM type: YTN; PAM sequence: TTC
tcattaggcatccaaaatat

SEQ ID NO: 383825 - DNA, 20 bp, Artificial Sequence
  Description of Artificial Sequence: Synthetic oligonucleotide
  Target: LAMA2; (+) strand; PAM type: YTN; PAM sequence: CTC
attaggcatccaaaatatag

SEQ ID NO: 383826 - DNA, 20 bp, Artificial Sequence
  Description of Artificial Sequence: Synthetic oligonucleotide
  Target: LAMA2; (+) strand; PAM type: YTN; PAM sequence: TTA
ggcatccaaaatataggaat

SEQ ID NO: 383827 - DNA, 20 bp, Artificial Sequence
  Description of Artificial Sequence: Synthetic oligonucleotide
  Target: LAMA2; (+) strand; PAM type: YTN; PAM sequence: TTT
cccctaatggctaattttta

SEQ ID NO: 383828 - DNA, 20 bp, Artificial Sequence
  Description of Artificial Sequence: Synthetic oligonucleotide
  Target: LAMA2; (+) strand; PAM type: YTN; PAM sequence: TTC
ccctaatggctaatttttat

SEQ ID NO: 383829 - DNA, 20 bp, Artificial Sequence
  Description of Artificial Sequence: Synthetic oligonucleotide
  Target: LAMA2; (+) strand; PAM type: YTN; PAM sequence: CTA
atggctaatttttatataag

SEQ ID NO: 383830 - DNA, 20 bp, Artificial Sequence
  Description of Artificial Sequence: Synthetic oligonucleotide
  Target: LAMA2; (+) strand; PAM type: YTN; PAM sequence: CTA
atttttatataagaaaaaat

SEQ ID NO: 383831 - DNA, 20 bp, Artificial Sequence
  Description of Artificial Sequence: Synthetic oligonucleotide
  Target: LAMA2; (+) strand; PAM type: YTN; PAM sequence: TTT
ttatataagaaaaaatacta

SEQ ID NO: 383832 - DNA, 20 bp, Artificial Sequence
  Description of Artificial Sequence: Synthetic oligonucleotide
  Target: LAMA2; (+) strand; PAM type: YTN; PAM sequence: TTT
tatataagaaaaaatactat

SEQ ID NO: 383833 - DNA, 20 bp, Artificial Sequence
  Description of Artificial Sequence: Synthetic oligonucleotide
  Target: LAMA2; (+) strand; PAM type: YTN; PAM sequence: TTT
atataagaaaaaatactatg

SEQ ID NO: 383834 - DNA, 20 bp, Artificial Sequence
  Description of Artificial Sequence: Synthetic oligonucleotide
  Target: LAMA2; (+) strand; PAM type: YTN; PAM sequence: TTA
tataagaaaaaatactatgt

SEQ ID NO: 383835 - DNA, 20 bp, Artificial Sequence
  Description of Artificial Sequence: Synthetic oligonucleotide
  Target: LAMA2; (+) strand; PAM type: YTN; PAM sequence: CTA
tgtacactatttcaaagcag

SEQ ID NO: 383836 - DNA, 20 bp, Artificial Sequence
  Description of Artificial Sequence: Synthetic oligonucleotide
  Target: LAMA2; (+) strand; PAM type: YTN; PAM sequence: CTA
tttcaaagcagacagaaaag

SEQ ID NO: 383837 - DNA, 20 bp, Artificial Sequence
  Description of Artificial Sequence: Synthetic oligonucleotide
  Target: LAMA2; (+) strand; PAM type: YTN; PAM sequence: TTT
caaagcagacagaaaagtca

SEQ ID NO: 383838 - DNA, 20 bp, Artificial Sequence
  Description of Artificial Sequence: Synthetic oligonucleotide
  Target: LAMA2; (+) strand; PAM type: YTN; PAM sequence: TTC
aaagcagacagaaaagtcat

SEQ ID NO: 383839 - DNA, 20 bp, Artificial Sequence
  Description of Artificial Sequence: Synthetic oligonucleotide
  Target: LAMA2; (+) strand; PAM type: YTN; PAM sequence: TTT
caaaaagaggctcctgattt

SEQ ID NO: 383840 - DNA, 20 bp, Artificial Sequence
  Description of Artificial Sequence: Synthetic oligonucleotide
  Target: LAMA2; (+) strand; PAM type: YTN; PAM sequence: TTC
aaaaagaggctcctgattta

SEQ ID NO: 383841 - DNA, 20 bp, Artificial Sequence
  Description of Artificial Sequence: Synthetic oligonucleotide
  Target: LAMA2; (+) strand; PAM type: YTN; PAM sequence: CTC
ctgatttatgtgttgtgtgt

SEQ ID NO: 383842 - DNA, 20 bp, Artificial Sequence
  Description of Artificial Sequence: Synthetic oligonucleotide
  Target: LAMA2; (+) strand; PAM type: YTN; PAM sequence: CTG
atttatgtgttgtgtgtttg

SEQ ID NO: 383843 - DNA, 20 bp, Artificial Sequence
  Description of Artificial Sequence: Synthetic oligonucleotide
  Target: LAMA2; (+) strand; PAM type: YTN; PAM sequence: TTT
atgtgttgtgtgtttgtgga

SEQ ID NO: 383844 - DNA, 20 bp, Artificial Sequence
  Description of Artificial Sequence: Synthetic oligonucleotide
  Target: LAMA2; (+) strand; PAM type: YTN; PAM sequence: TTA
tgtgttgtgtgtttgtggac

SEQ ID NO: 383845 - DNA, 20 bp, Artificial Sequence
  Description of Artificial Sequence: Synthetic oligonucleotide
  Target: LAMA2; (+) strand; PAM type: YTN; PAM sequence: TTG
tgtgtttgtggacctaacca

SEQ ID NO: 383846 - DNA, 20 bp, Artificial Sequence
  Description of Artificial Sequence: Synthetic oligonucleotide
  Target: LAMA2; (+) strand; PAM type: YTN; PAM sequence: TTT
gtggacctaaccaggacatt

SEQ ID NO: 383847 - DNA, 20 bp, Artificial Sequence
  Description of Artificial Sequence: Synthetic oligonucleotide
  Target: LAMA2; (+) strand; PAM type: YTN; PAM sequence: TTG
tggacctaaccaggacattt

SEQ ID NO: 383848 - DNA, 20 bp, Artificial Sequence
  Description of Artificial Sequence: Synthetic oligonucleotide
  Target: LAMA2; (+) strand; PAM type: YTN; PAM sequence: CTA
accaggacatttgattcaat

SEQ ID NO: 383849 - DNA, 20 bp, Artificial Sequence
  Description of Artificial Sequence: Synthetic oligonucleotide
  Target: LAMA2; (+) strand; PAM type: YTN; PAM sequence: TTT
gattcaattaaccaagttta

SEQ ID NO: 383850 - DNA, 20 bp, Artificial Sequence
  Description of Artificial Sequence: Synthetic oligonucleotide
  Target: LAMA2; (+) strand; PAM type: YTN; PAM sequence: TTG
attcaattaaccaagtttag

SEQ ID NO: 383851 - DNA, 20 bp, Artificial Sequence
  Description of Artificial Sequence: Synthetic oligonucleotide
  Target: LAMA2; (+) strand; PAM type: YTN; PAM sequence: TTC
aattaaccaagtttagtatg

SEQ ID NO: 383852 - DNA, 20 bp, Artificial Sequence
  Description of Artificial Sequence: Synthetic oligonucleotide
  Target: LAMA2; (+) strand; PAM type: YTN; PAM sequence: TTA
accaagtttagtatgtcagc

SEQ ID NO: 383853 - DNA, 20 bp, Artificial Sequence
  Description of Artificial Sequence: Synthetic oligonucleotide
  Target: LAMA2; (+) strand; PAM type: YTN; PAM sequence: TTT
agtatgtcagcaaccctctg

SEQ ID NO: 383854 - DNA, 20 bp, Artificial Sequence
  Description of Artificial Sequence: Synthetic oligonucleotide
  Target: LAMA2; (+) strand; PAM type: YTN; PAM sequence: TTA
gtatgtcagcaaccctctga

SEQ ID NO: 383855 - DNA, 20 bp, Artificial Sequence
  Description of Artificial Sequence: Synthetic oligonucleotide
  Target: LAMA2; (+) strand; PAM type: YTN; PAM sequence: CTC
tgaaagattgagaagattga

SEQ ID NO: 383856 - DNA, 20 bp, Artificial Sequence
  Description of Artificial Sequence: Synthetic oligonucleotide
  Target: LAMA2; (+) strand; PAM type: YTN; PAM sequence: CTG
aaagattgagaagattgact

SEQ ID NO: 383857 - DNA, 20 bp, Artificial Sequence
  Description of Artificial Sequence: Synthetic oligonucleotide
  Target: LAMA2; (+) strand; PAM type: YTN; PAM sequence: TTG
agaagattgactgtccagag

SEQ ID NO: 383858 - DNA, 20 bp, Artificial Sequence
  Description of Artificial Sequence: Synthetic oligonucleotide
  Target: LAMA2; (+) strand; PAM type: YTN; PAM sequence: TTG
actgtccagagaatattaca

SEQ ID NO: 383859 - DNA, 20 bp, Artificial Sequence
  Description of Artificial Sequence: Synthetic oligonucleotide
  Target: LAMA2; (+) strand; PAM type: YTN; PAM sequence: CTG
tccagagaatattacaatat

SEQ ID NO: 383860 - DNA, 20 bp, Artificial Sequence
  Description of Artificial Sequence: Synthetic oligonucleotide
  Target: LAMA2; (+) strand; PAM type: YTN; PAM sequence: TTA
caatatttgctttctctgtt

SEQ ID NO: 383861 - DNA, 20 bp, Artificial Sequence
  Description of Artificial Sequence: Synthetic oligonucleotide
  Target: LAMA2; (+) strand; PAM type: YTN; PAM sequence: TTT
gctttctctgttgaagaaat

SEQ ID NO: 383862 - DNA, 20 bp, Artificial Sequence
  Description of Artificial Sequence: Synthetic oligonucleotide
  Target: LAMA2; (+) strand; PAM type: YTN; PAM sequence: TTG
ctttctctgttgaagaaatt

SEQ ID NO: 383863 - DNA, 20 bp, Artificial Sequence
  Description of Artificial Sequence: Synthetic oligonucleotide
  Target: LAMA2; (+) strand; PAM type: YTN; PAM sequence: CTT
tctctgttgaagaaattatg

SEQ ID NO: 383864 - DNA, 20 bp, Artificial Sequence
  Description of Artificial Sequence: Synthetic oligonucleotide
  Target: LAMA2; (+) strand; PAM type: YTN; PAM sequence: TTT
ctctgttgaagaaattatgt

SEQ ID NO: 383865 - DNA, 20 bp, Artificial Sequence
  Description of Artificial Sequence: Synthetic oligonucleotide
  Target: LAMA2; (+) strand; PAM type: YTN; PAM sequence: TTC
tctgttgaagaaattatgta

SEQ ID NO: 383866 - DNA, 20 bp, Artificial Sequence
  Description of Artificial Sequence: Synthetic oligonucleotide
  Target: LAMA2; (+) strand; PAM type: YTN; PAM sequence: CTC
tgttgaagaaattatgtaga

SEQ ID NO: 383867 - DNA, 20 bp, Artificial Sequence
  Description of Artificial Sequence: Synthetic oligonucleotide
  Target: LAMA2; (+) strand; PAM type: YTN; PAM sequence: CTG
ttgaagaaattatgtagact

SEQ ID NO: 383868 - DNA, 20 bp, Artificial Sequence
  Description of Artificial Sequence: Synthetic oligonucleotide
  Target: LAMA2; (+) strand; PAM type: YTN; PAM sequence: TTG
aagaaattatgtagacttac

SEQ ID NO: 383869 - DNA, 20 bp, Artificial Sequence
  Description of Artificial Sequence: Synthetic oligonucleotide
  Target: LAMA2; (+) strand; PAM type: YTN; PAM sequence: TTA
tgtagacttacaggtataag

SEQ ID NO: 383870 - DNA, 20 bp, Artificial Sequence
  Description of Artificial Sequence: Synthetic oligonucleotide
  Target: LAMA2; (+) strand; PAM type: YTN; PAM sequence: CTT
acaggtataagagaaacaaa

SEQ ID NO: 383871 - DNA, 20 bp, Artificial Sequence
  Description of Artificial Sequence: Synthetic oligonucleotide
  Target: LAMA2; (+) strand; PAM type: YTN; PAM sequence: TTA
caggtataagagaaacaaaa

SEQ ID NO: 383872 - DNA, 20 bp, Artificial Sequence
  Description of Artificial Sequence: Synthetic oligonucleotide
  Target: LAMA2; (+) strand; PAM type: YTN; PAM sequence: TTT
ttgaatctcttatttttagt

SEQ ID NO: 383873 - DNA, 20 bp, Artificial Sequence
  Description of Artificial Sequence: Synthetic oligonucleotide
  Target: LAMA2; (+) strand; PAM type: YTN; PAM sequence: TTT
tgaatctcttatttttagta

SEQ ID NO: 383874 - DNA, 20 bp, Artificial Sequence
  Description of Artificial Sequence: Synthetic oligonucleotide
  Target: LAMA2; (+) strand; PAM type: YTN; PAM sequence: TTT
gaatctcttatttttagtaa

SEQ ID NO: 383875 - DNA, 20 bp, Artificial Sequence
  Description of Artificial Sequence: Synthetic oligonucleotide
  Target: LAMA2; (+) strand; PAM type: YTN; PAM sequence: TTG
aatctcttatttttagtaat

SEQ ID NO: 383876 - DNA, 20 bp, Artificial Sequence
  Description of Artificial Sequence: Synthetic oligonucleotide
  Target: LAMA2; (+) strand; PAM type: YTN; PAM sequence: CTC
ttatttttagtaatgattat

SEQ ID NO: 383877 - DNA, 20 bp, Artificial Sequence
  Description of Artificial Sequence: Synthetic oligonucleotide
  Target: LAMA2; (+) strand; PAM type: YTN; PAM sequence: CTT
atttttagtaatgattattg

SEQ ID NO: 383878 - DNA, 20 bp, Artificial Sequence
  Description of Artificial Sequence: Synthetic oligonucleotide
  Target: LAMA2; (+) strand; PAM type: YTN; PAM sequence: TTA
tttttagtaatgattattgg

SEQ ID NO: 383879 - DNA, 20 bp, Artificial Sequence
  Description of Artificial Sequence: Synthetic oligonucleotide
  Target: LAMA2; (+) strand; PAM type: YTN; PAM sequence: TTT
ttagtaatgattattggctt

SEQ ID NO: 383880 - DNA, 20 bp, Artificial Sequence
  Description of Artificial Sequence: Synthetic oligonucleotide
  Target: LAMA2; (+) strand; PAM type: YTN; PAM sequence: TTT
tagtaatgattattggcttt

SEQ ID NO: 383881 - DNA, 20 bp, Artificial Sequence
  Description of Artificial Sequence: Synthetic oligonucleotide
  Target: LAMA2; (+) strand; PAM type: YTN; PAM sequence: TTT
agtaatgattattggcttta

SEQ ID NO: 383882 - DNA, 20 bp, Artificial Sequence
  Description of Artificial Sequence: Synthetic oligonucleotide
  Target: LAMA2; (+) strand; PAM type: YTN; PAM sequence: TTA
gtaatgattattggctttaa

SEQ ID NO: 383883 - DNA, 20 bp, Artificial Sequence
  Description of Artificial Sequence: Synthetic oligonucleotide
  Target: LAMA2; (+) strand; PAM type: YTN; PAM sequence: TTA
ttggctttaaggattttaat

SEQ ID NO: 383884 - DNA, 20 bp, Artificial Sequence
  Description of Artificial Sequence: Synthetic oligonucleotide
  Target: LAMA2; (+) strand; PAM type: YTN; PAM sequence: TTG
gctttaaggattttaattca

SEQ ID NO: 383885 - DNA, 20 bp, Artificial Sequence
  Description of Artificial Sequence: Synthetic oligonucleotide
  Target: LAMA2; (+) strand; PAM type: YTN; PAM sequence: CTT
taaggattttaattcagtta

SEQ ID NO: 383886 - DNA, 20 bp, Artificial Sequence
  Description of Artificial Sequence: Synthetic oligonucleotide
  Target: LAMA2; (+) strand; PAM type: YTN; PAM sequence: TTT
aaggattttaattcagttac

SEQ ID NO: 383887 - DNA, 20 bp, Artificial Sequence
  Description of Artificial Sequence: Synthetic oligonucleotide
  Target: LAMA2; (+) strand; PAM type: YTN; PAM sequence: TTA
aggattttaattcagttact

SEQ ID NO: 383888 - DNA, 20 bp, Artificial Sequence
  Description of Artificial Sequence: Synthetic oligonucleotide
  Target: LAMA2; (+) strand; PAM type: YTN; PAM sequence: TTT
taattcagttactaatgtta

SEQ ID NO: 383889 - DNA, 20 bp, Artificial Sequence
  Description of Artificial Sequence: Synthetic oligonucleotide
  Target: LAMA2; (+) strand; PAM type: YTN; PAM sequence: TTT
aattcagttactaatgttat

SEQ ID NO: 383890 - DNA, 20 bp, Artificial Sequence
  Description of Artificial Sequence: Synthetic oligonucleotide
  Target: LAMA2; (+) strand; PAM type: YTN; PAM sequence: TTA
attcagttactaatgttata

SEQ ID NO: 383891 - DNA, 20 bp, Artificial Sequence
  Description of Artificial Sequence: Synthetic oligonucleotide
  Target: LAMA2; (+) strand; PAM type: YTN; PAM sequence: TTC
agttactaatgttatattta

SEQ ID NO: 383892 - DNA, 20 bp, Artificial Sequence
  Description of Artificial Sequence: Synthetic oligonucleotide
  Target: LAMA2; (+) strand; PAM type: YTN; PAM sequence: TTA
ctaatgttatatttaggtta

SEQ ID NO: 383893 - DNA, 20 bp, Artificial Sequence
  Description of Artificial Sequence: Synthetic oligonucleotide
  Target: LAMA2; (+) strand; PAM type: YTN; PAM sequence: CTA
atgttatatttaggttacat

SEQ ID NO: 383894 - DNA, 20 bp, Artificial Sequence
  Description of Artificial Sequence: Synthetic oligonucleotide
  Target: LAMA2; (+) strand; PAM type: YTN; PAM sequence: TTA
tatttaggttacataaaata

SEQ ID NO: 383895 - DNA, 20 bp, Artificial Sequence
  Description of Artificial Sequence: Synthetic oligonucleotide
  Target: LAMA2; (+) strand; PAM type: YTN; PAM sequence: TTT
aggttacataaaataattca

SEQ ID NO: 383896 - DNA, 20 bp, Artificial Sequence
  Description of Artificial Sequence: Synthetic oligonucleotide
  Target: LAMA2; (+) strand; PAM type: YTN; PAM sequence: TTA
ggttacataaaataattcat

SEQ ID NO: 383897 - DNA, 20 bp, Artificial Sequence
  Description of Artificial Sequence: Synthetic oligonucleotide
  Target: LAMA2; (+) strand; PAM type: YTN; PAM sequence: TTA
cataaaataattcattatgc

SEQ ID NO: 383898 - DNA, 20 bp, Artificial Sequence
  Description of Artificial Sequence: Synthetic oligonucleotide
  Target: LAMA2; (+) strand; PAM type: YTN; PAM sequence: TTC
attatgcaattattttactg

SEQ ID NO: 383899 - DNA, 20 bp, Artificial Sequence
  Description of Artificial Sequence: Synthetic oligonucleotide
  Target: LAMA2; (+) strand; PAM type: YTN; PAM sequence: TTA
tgcaattattttactgcaaa

SEQ ID NO: 383900 - DNA, 20 bp, Artificial Sequence
  Description of Artificial Sequence: Synthetic oligonucleotide
  Target: LAMA2; (+) strand; PAM type: YTN; PAM sequence: TTA
ttttactgcaaaagcaaaag

SEQ ID NO: 383901 - DNA, 20 bp, Artificial Sequence
  Description of Artificial Sequence: Synthetic oligonucleotide
  Target: LAMA2; (+) strand; PAM type: YTN; PAM sequence: TTT
tactgcaaaagcaaaaggct

SEQ ID NO: 383902 - DNA, 20 bp, Artificial Sequence
  Description of Artificial Sequence: Synthetic oligonucleotide
  Target: LAMA2; (+) strand; PAM type: YTN; PAM sequence: TTT
actgcaaaagcaaaaggctg

SEQ ID NO: 383903 - DNA, 20 bp, Artificial Sequence
  Description of Artificial Sequence: Synthetic oligonucleotide
  Target: LAMA2; (+) strand; PAM type: YTN; PAM sequence: TTA
ctgcaaaagcaaaaggctga

SEQ ID NO: 383904 - DNA, 20 bp, Artificial Sequence
  Description of Artificial Sequence: Synthetic oligonucleotide
  Target: LAMA2; (+) strand; PAM type: YTN; PAM sequence: CTG
caaaagcaaaaggctgaaaa

SEQ ID NO: 383905 - DNA, 20 bp, Artificial Sequence
  Description of Artificial Sequence: Synthetic oligonucleotide
  Target: LAMA2; (+) strand; PAM type: YTN; PAM sequence: CTG
aaaattattgttgaagatcc

SEQ ID NO: 383906 - DNA, 20 bp, Artificial Sequence
  Description of Artificial Sequence: Synthetic oligonucleotide
  Target: LAMA2; (+) strand; PAM type: YTN; PAM sequence: TTA
ttgttgaagatcccatgtat

SEQ ID NO: 383907 - DNA, 20 bp, Artificial Sequence
  Description of Artificial Sequence: Synthetic oligonucleotide
  Target: LAMA2; (+) strand; PAM type: YTN; PAM sequence: TTG
ttgaagatcccatgtatttt

SEQ ID NO: 383908 - DNA, 20 bp, Artificial Sequence
  Description of Artificial Sequence: Synthetic oligonucleotide
  Target: LAMA2; (+) strand; PAM type: YTN; PAM sequence: TTG
aagatcccatgtatttttgg

SEQ ID NO: 383909 - DNA, 20 bp, Artificial Sequence
  Description of Artificial Sequence: Synthetic oligonucleotide
  Target: LAMA2; (+) strand; PAM type: YTN; PAM sequence: TTT
ttggcacattcatctctata

SEQ ID NO: 383910 - DNA, 20 bp, Artificial Sequence
  Description of Artificial Sequence: Synthetic oligonucleotide
  Target: LAMA2; (+) strand; PAM type: YTN; PAM sequence: TTT
tggcacattcatctctataa

SEQ ID NO: 383911 - DNA, 20 bp, Artificial Sequence
  Description of Artificial Sequence: Synthetic oligonucleotide
  Target: LAMA2; (+) strand; PAM type: YTN; PAM sequence: TTT
ggcacattcatctctataaa

SEQ ID NO: 383912 - DNA, 20 bp, Artificial Sequence
  Description of Artificial Sequence: Synthetic oligonucleotide
  Target: LAMA2; (+) strand; PAM type: YTN; PAM sequence: TTG
gcacattcatctctataaaa

SEQ ID NO: 383913 - DNA, 20 bp, Artificial Sequence
  Description of Artificial Sequence: Synthetic oligonucleotide
  Target: LAMA2; (+) strand; PAM type: YTN; PAM sequence: TTC
atctctataaaataagttct

SEQ ID NO: 383914 - DNA, 20 bp, Artificial Sequence
  Description of Artificial Sequence: Synthetic oligonucleotide
  Target: LAMA2; (+) strand; PAM type: YTN; PAM sequence: CTC
tataaaataagttcttaaaa

SEQ ID NO: 383915 - DNA, 20 bp, Artificial Sequence
  Description of Artificial Sequence: Synthetic oligonucleotide
  Target: LAMA2; (+) strand; PAM type: YTN; PAM sequence: CTA
taaaataagttcttaaaaca

SEQ ID NO: 383916 - DNA, 20 bp, Artificial Sequence
  Description of Artificial Sequence: Synthetic oligonucleotide
  Target: LAMA2; (+) strand; PAM type: YTN; PAM sequence: TTC
ttaaaacactccccagttaa

SEQ ID NO: 383917 - DNA, 20 bp, Artificial Sequence
  Description of Artificial Sequence: Synthetic oligonucleotide
  Target: LAMA2; (+) strand; PAM type: YTN; PAM sequence: CTT
aaaacactccccagttaaca

SEQ ID NO: 383918 - DNA, 20 bp, Artificial Sequence
  Description of Artificial Sequence: Synthetic oligonucleotide
  Target: LAMA2; (+) strand; PAM type: YTN; PAM sequence: TTA
aaacactccccagttaacac

SEQ ID NO: 383919 - DNA, 20 bp, Artificial Sequence
  Description of Artificial Sequence: Synthetic oligonucleotide
  Target: LAMA2; (+) strand; PAM type: YTN; PAM sequence: CTC
cccagttaacacttattcat

SEQ ID NO: 383920 - DNA, 20 bp, Artificial Sequence
  Description of Artificial Sequence: Synthetic oligonucleotide
  Target: LAMA2; (+) strand; PAM type: YTN; PAM sequence: TTA
acacttattcatcagcatga

SEQ ID NO: 383921 - DNA, 20 bp, Artificial Sequence
  Description of Artificial Sequence: Synthetic oligonucleotide
  Target: LAMA2; (+) strand; PAM type: YTN; PAM sequence: CTT
attcatcagcatgacacctt

SEQ ID NO: 383922 - DNA, 20 bp, Artificial Sequence
  Description of Artificial Sequence: Synthetic oligonucleotide
  Target: LAMA2; (+) strand; PAM type: YTN; PAM sequence: TTA
ttcatcagcatgacaccttg

SEQ ID NO: 383923 - DNA, 20 bp, Artificial Sequence
  Description of Artificial Sequence: Synthetic oligonucleotide
  Target: LAMA2; (+) strand; PAM type: YTN; PAM sequence: TTC
atcagcatgacaccttgctg

SEQ ID NO: 383924 - DNA, 20 bp, Artificial Sequence
  Description of Artificial Sequence: Synthetic oligonucleotide
  Target: LAMA2; (+) strand; PAM type: YTN; PAM sequence: CTT
gctgaatgacttgaaattat

SEQ ID NO: 383925 - DNA, 20 bp, Artificial Sequence
  Description of Artificial Sequence: Synthetic oligonucleotide
  Target: LAMA2; (+) strand; PAM type: YTN; PAM sequence: TTG
ctgaatgacttgaaattata

SEQ ID NO: 383926 - DNA, 20 bp, Artificial Sequence
  Description of Artificial Sequence: Synthetic oligonucleotide
  Target: LAMA2; (+) strand; PAM type: YTN; PAM sequence: CTG
aatgacttgaaattataatt

SEQ ID NO: 383927 - DNA, 20 bp, Artificial Sequence
  Description of Artificial Sequence: Synthetic oligonucleotide
  Target: LAMA2; (+) strand; PAM type: YTN; PAM sequence: CTT
gaaattataattcatagata

SEQ ID NO: 383928 - DNA, 20 bp, Artificial Sequence
  Description of Artificial Sequence: Synthetic oligonucleotide
  Target: LAMA2; (+) strand; PAM type: YTN; PAM sequence: TTG
aaattataattcatagataa

SEQ ID NO: 383929 - DNA, 20 bp, Artificial Sequence
  Description of Artificial Sequence: Synthetic oligonucleotide
  Target: LAMA2; (+) strand; PAM type: YTN; PAM sequence: TTA
taattcatagataattattt

SEQ ID NO: 383930 - DNA, 20 bp, Artificial Sequence
  Description of Artificial Sequence: Synthetic oligonucleotide
  Target: LAMA2; (+) strand; PAM type: YTN; PAM sequence: TTC
atagataattattttatctt

SEQ ID NO: 383931 - DNA, 20 bp, Artificial Sequence
  Description of Artificial Sequence: Synthetic oligonucleotide
  Target: LAMA2; (+) strand; PAM type: YTN; PAM sequence: TTA
ttttatcttggagccattat

SEQ ID NO: 383932 - DNA, 20 bp, Artificial Sequence
  Description of Artificial Sequence: Synthetic oligonucleotide
  Target: LAMA2; (+) strand; PAM type: YTN; PAM sequence: TTT
tatcttggagccattatctc

SEQ ID NO: 383933 - DNA, 20 bp, Artificial Sequence
  Description of Artificial Sequence: Synthetic oligonucleotide
  Target: LAMA2; (+) strand; PAM type: YTN; PAM sequence: TTT
atcttggagccattatctct

SEQ ID NO: 383934 - DNA, 20 bp, Artificial Sequence
  Description of Artificial Sequence: Synthetic oligonucleotide
  Target: LAMA2; (+) strand; PAM type: YTN; PAM sequence: TTA
tcttggagccattatctctc

SEQ ID NO: 383935 - DNA, 20 bp, Artificial Sequence
  Description of Artificial Sequence: Synthetic oligonucleotide
  Target: LAMA2; (+) strand; PAM type: YTN; PAM sequence: CTT
ggagccattatctctcataa

SEQ ID NO: 383936 - DNA, 20 bp, Artificial Sequence
  Description of Artificial Sequence: Synthetic oligonucleotide
  Target: LAMA2; (+) strand; PAM type: YTN; PAM sequence: TTG
gagccattatctctcataat

SEQ ID NO: 383937 - DNA, 20 bp, Artificial Sequence
  Description of Artificial Sequence: Synthetic oligonucleotide
  Target: LAMA2; (+) strand; PAM type: YTN; PAM sequence: TTA
tctctcataatgctactgtt

SEQ ID NO: 383938 - DNA, 20 bp, Artificial Sequence
  Description of Artificial Sequence: Synthetic oligonucleotide
  Target: LAMA2; (+) strand; PAM type: YTN; PAM sequence: CTC
tcataatgctactgttaaat

SEQ ID NO: 383939 - DNA, 20 bp, Artificial Sequence
  Description of Artificial Sequence: Synthetic oligonucleotide
  Target: LAMA2; (+) strand; PAM type: YTN; PAM sequence: CTC
ataatgctactgttaaatat

SEQ ID NO: 383940 - DNA, 20 bp, Artificial Sequence
  Description of Artificial Sequence: Synthetic oligonucleotide
  Target: LAMA2; (+) strand; PAM type: YTN; PAM sequence: CTA
ctgttaaatatggaatggct

SEQ ID NO: 383941 - DNA, 20 bp, Artificial Sequence
  Description of Artificial Sequence: Synthetic oligonucleotide
  Target: LAMA2; (+) strand; PAM type: YTN; PAM sequence: CTG
ttaaatatggaatggctctt

SEQ ID NO: 383942 - DNA, 20 bp, Artificial Sequence
  Description of Artificial Sequence: Synthetic oligonucleotide
  Target: LAMA2; (+) strand; PAM type: YTN; PAM sequence: TTA
aatatggaatggctctttta

SEQ ID NO: 383943 - DNA, 20 bp, Artificial Sequence
  Description of Artificial Sequence: Synthetic oligonucleotide
  Target: LAMA2; (+) strand; PAM type: YTN; PAM sequence: CTC
ttttattgcttaaaaatggt

SEQ ID NO: 383944 - DNA, 20 bp, Artificial Sequence
  Description of Artificial Sequence: Synthetic oligonucleotide
  Target: LAMA2; (+) strand; PAM type: YTN; PAM sequence: CTT
ttattgcttaaaaatggtgg

SEQ ID NO: 383945 - DNA, 20 bp, Artificial Sequence
  Description of Artificial Sequence: Synthetic oligonucleotide
  Target: LAMA2; (+) strand; PAM type: YTN; PAM sequence: TTT
tattgcttaaaaatggtggt

SEQ ID NO: 383946 - DNA, 20 bp, Artificial Sequence
  Description of Artificial Sequence: Synthetic oligonucleotide
  Target: LAMA2; (+) strand; PAM type: YTN; PAM sequence: TTT
attgcttaaaaatggtggtt

SEQ ID NO: 383947 - DNA, 20 bp, Artificial Sequence
  Description of Artificial Sequence: Synthetic oligonucleotide
  Target: LAMA2; (+) strand; PAM type: YTN; PAM sequence: TTA
ttgcttaaaaatggtggttc

SEQ ID NO: 383948 - DNA, 20 bp, Artificial Sequence
  Description of Artificial Sequence: Synthetic oligonucleotide
  Target: LAMA2; (+) strand; PAM type: YTN; PAM sequence: TTG
cttaaaaatggtggttcctt

SEQ ID NO: 383949 - DNA, 20 bp, Artificial Sequence
  Description of Artificial Sequence: Synthetic oligonucleotide
  Target: LAMA2; (+) strand; PAM type: YTN; PAM sequence: CTT
aaaaatggtggttcctttgg

SEQ ID NO: 383950 - DNA, 20 bp, Artificial Sequence
  Description of Artificial Sequence: Synthetic oligonucleotide
  Target: LAMA2; (+) strand; PAM type: YTN; PAM sequence: TTA
aaaatggtggttcctttgga

SEQ ID NO: 383951 - DNA, 20 bp, Artificial Sequence
  Description of Artificial Sequence: Synthetic oligonucleotide
  Target: LAMA2; (+) strand; PAM type: YTN; PAM sequence: TTC
ctttggatggttgaataaaa

SEQ ID NO: 383952 - DNA, 20 bp, Artificial Sequence
  Description of Artificial Sequence: Synthetic oligonucleotide
  Target: LAMA2; (+) strand; PAM type: YTN; PAM sequence: CTT
tggatggttgaataaaagag

SEQ ID NO: 383953 - DNA, 20 bp, Artificial Sequence
  Description of Artificial Sequence: Synthetic oligonucleotide
  Target: LAMA2; (+) strand; PAM type: YTN; PAM sequence: TTT
ggatggttgaataaaagagg

SEQ ID NO: 383954 - DNA, 20 bp, Artificial Sequence
  Description of Artificial Sequence: Synthetic oligonucleotide
  Target: LAMA2; (+) strand; PAM type: YTN; PAM sequence: TTG
gatggttgaataaaagagga

SEQ ID NO: 383955 - DNA, 20 bp, Artificial Sequence
  Description of Artificial Sequence: Synthetic oligonucleotide
  Target: LAMA2; (+) strand; PAM type: YTN; PAM sequence: TTG
aataaaagaggattatggca

SEQ ID NO: 383956 - DNA, 20 bp, Artificial Sequence
  Description of Artificial Sequence: Synthetic oligonucleotide
  Target: LAMA2; (+) strand; PAM type: YTN; PAM sequence: TTA
tggcacttaaatcaatggca

SEQ ID NO: 383957 - DNA, 20 bp, Artificial Sequence
  Description of Artificial Sequence: Synthetic oligonucleotide
  Target: LAMA2; (+) strand; PAM type: YTN; PAM sequence: CTT
aaatcaatggcaaaatatga

SEQ ID NO: 383958 - DNA, 20 bp, Artificial Sequence
  Description of Artificial Sequence: Synthetic oligonucleotide
  Target: LAMA2; (+) strand; PAM type: YTN; PAM sequence: TTA
aatcaatggcaaaatatgac

SEQ ID NO: 383959 - DNA, 20 bp, Artificial Sequence
  Description of Artificial Sequence: Synthetic oligonucleotide
  Target: LAMA2; (+) strand; PAM type: YTN; PAM sequence: TTT
tgccctgctaaccacttttc

SEQ ID NO: 383960 - DNA, 20 bp, Artificial Sequence
  Description of Artificial Sequence: Synthetic oligonucleotide
  Target: LAMA2; (+) strand; PAM type: YTN; PAM sequence: TTT
gccctgctaaccacttttct

SEQ ID NO: 383961 - DNA, 20 bp, Artificial Sequence
  Description of Artificial Sequence: Synthetic oligonucleotide
  Target: LAMA2; (+) strand; PAM type: YTN; PAM sequence: TTG
ccctgctaaccacttttctg

SEQ ID NO: 383962 - DNA, 20 bp, Artificial Sequence
  Description of Artificial Sequence: Synthetic oligonucleotide
  Target: LAMA2; (+) strand; PAM type: YTN; PAM sequence: CTG
ctaaccacttttctgcaatg

SEQ ID NO: 383963 - DNA, 20 bp, Artificial Sequence
  Description of Artificial Sequence: Synthetic oligonucleotide
  Target: LAMA2; (+) strand; PAM type: YTN; PAM sequence: CTA
accacttttctgcaatgaca

SEQ ID NO: 383964 - DNA, 20 bp, Artificial Sequence
  Description of Artificial Sequence: Synthetic oligonucleotide
  Target: LAMA2; (+) strand; PAM type: YTN; PAM sequence: CTT
ttctgcaatgacacttgaaa

SEQ ID NO: 383965 - DNA, 20 bp, Artificial Sequence
  Description of Artificial Sequence: Synthetic oligonucleotide
  Target: LAMA2; (+) strand; PAM type: YTN; PAM sequence: TTT
tctgcaatgacacttgaaat

SEQ ID NO: 383966 - DNA, 20 bp, Artificial Sequence
  Description of Artificial Sequence: Synthetic oligonucleotide
  Target: LAMA2; (+) strand; PAM type: YTN; PAM sequence: TTT
ctgcaatgacacttgaaatt

SEQ ID NO: 383967 - DNA, 20 bp, Artificial Sequence
  Description of Artificial Sequence: Synthetic oligonucleotide
  Target: LAMA2; (+) strand; PAM type: YTN; PAM sequence: TTC
tgcaatgacacttgaaattt

SEQ ID NO: 383968 - DNA, 20 bp, Artificial Sequence
  Description of Artificial Sequence: Synthetic oligonucleotide
  Target: LAMA2; (+) strand; PAM type: YTN; PAM sequence: CTG
caatgacacttgaaatttgg

SEQ ID NO: 383969 - DNA, 20 bp, Artificial Sequence
  Description of Artificial Sequence: Synthetic oligonucleotide
  Target: LAMA2; (+) strand; PAM type: YTN; PAM sequence: CTT
gaaatttgggctttttcatc

SEQ ID NO: 383970 - DNA, 20 bp, Artificial Sequence
  Description of Artificial Sequence: Synthetic oligonucleotide
  Target: LAMA2; (+) strand; PAM type: YTN; PAM sequence: TTG
aaatttgggctttttcatct

SEQ ID NO: 383971 - DNA, 20 bp, Artificial Sequence
  Description of Artificial Sequence: Synthetic oligonucleotide
  Target: LAMA2; (+) strand; PAM type: YTN; PAM sequence: TTT
gggctttttcatctgaaaaa

SEQ ID NO: 383972 - DNA, 20 bp, Artificial Sequence
  Description of Artificial Sequence: Synthetic oligonucleotide
  Target: LAMA2; (+) strand; PAM type: YTN; PAM sequence: TTG
ggctttttcatctgaaaaag

SEQ ID NO: 383973 - DNA, 20 bp, Artificial Sequence
  Description of Artificial Sequence: Synthetic oligonucleotide
  Target: LAMA2; (+) strand; PAM type: YTN; PAM sequence: CTT
tttcatctgaaaaagcctga

SEQ ID NO: 383974 - DNA, 20 bp, Artificial Sequence
  Description of Artificial Sequence: Synthetic oligonucleotide
  Target: LAMA2; (+) strand; PAM type: YTN; PAM sequence: TTT
ttcatctgaaaaagcctgac

SEQ ID NO: 383975 - DNA, 20 bp, Artificial Sequence
  Description of Artificial Sequence: Synthetic oligonucleotide
  Target: LAMA2; (+) strand; PAM type: YTN; PAM sequence: TTT
tcatctgaaaaagcctgacc

SEQ ID NO: 383976 - DNA, 20 bp, Artificial Sequence
  Description of Artificial Sequence: Synthetic oligonucleotide
  Target: LAMA2; (+) strand; PAM type: YTN; PAM sequence: TTT
catctgaaaaagcctgacca

SEQ ID NO: 383977 - DNA, 20 bp, Artificial Sequence
  Description of Artificial Sequence: Synthetic oligonucleotide
  Target: LAMA2; (+) strand; PAM type: YTN; PAM sequence: TTC
atctgaaaaagcctgaccag

SEQ ID NO: 383978 - DNA, 20 bp, Artificial Sequence
  Description of Artificial Sequence: Synthetic oligonucleotide
  Target: LAMA2; (+) strand; PAM type: YTN; PAM sequence: CTG
aaaaagcctgaccagtttca

SEQ ID NO: 383979 - DNA, 20 bp, Artificial Sequence
  Description of Artificial Sequence: Synthetic oligonucleotide
  Target: LAMA2; (+) strand; PAM type: YTN; PAM sequence: CTG
accagtttcatctatacttc

SEQ ID NO: 383980 - DNA, 20 bp, Artificial Sequence
  Description of Artificial Sequence: Synthetic oligonucleotide
  Target: LAMA2; (+) strand; PAM type: YTN; PAM sequence: TTT
catctatacttcctggaaca

SEQ ID NO: 383981 - DNA, 20 bp, Artificial Sequence
  Description of Artificial Sequence: Synthetic oligonucleotide
  Target: LAMA2; (+) strand; PAM type: YTN; PAM sequence: TTC
atctatacttcctggaacat

SEQ ID NO: 383982 - DNA, 20 bp, Artificial Sequence
  Description of Artificial Sequence: Synthetic oligonucleotide
  Target: LAMA2; (+) strand; PAM type: YTN; PAM sequence: CTA
tacttcctggaacatgcatt

SEQ ID NO: 383983 - DNA, 20 bp, Artificial Sequence
  Description of Artificial Sequence: Synthetic oligonucleotide
  Target: LAMA2; (+) strand; PAM type: YTN; PAM sequence: CTT
cctggaacatgcattcattc

SEQ ID NO: 383984 - DNA, 20 bp, Artificial Sequence
  Description of Artificial Sequence: Synthetic oligonucleotide
  Target: LAMA2; (+) strand; PAM type: YTN; PAM sequence: TTC
ctggaacatgcattcattca

SEQ ID NO: 383985 - DNA, 20 bp, Artificial Sequence
  Description of Artificial Sequence: Synthetic oligonucleotide
  Target: LAMA2; (+) strand; PAM type: YTN; PAM sequence: CTG
gaacatgcattcattcattc

SEQ ID NO: 383986 - DNA, 20 bp, Artificial Sequence
  Description of Artificial Sequence: Synthetic oligonucleotide
  Target: LAMA2; (+) strand; PAM type: YTN; PAM sequence: TTC
attcattcagtcattcaaaa

SEQ ID NO: 383987 - DNA, 20 bp, Artificial Sequence
  Description of Artificial Sequence: Synthetic oligonucleotide
  Target: LAMA2; (+) strand; PAM type: YTN; PAM sequence: TTC
attcagtcattcaaaatagt

SEQ ID NO: 383988 - DNA, 20 bp, Artificial Sequence
  Description of Artificial Sequence: Synthetic oligonucleotide
  Target: LAMA2; (+) strand; PAM type: YTN; PAM sequence: TTC
agtcattcaaaatagtcatc

SEQ ID NO: 383989 - DNA, 20 bp, Artificial Sequence
  Description of Artificial Sequence: Synthetic oligonucleotide
  Target: LAMA2; (+) strand; PAM type: YTN; PAM sequence: TTC
aaaatagtcatcgaatgcct

SEQ ID NO: 383990 - DNA, 20 bp, Artificial Sequence
  Description of Artificial Sequence: Synthetic oligonucleotide
  Target: LAMA2; (+) strand; PAM type: YTN; PAM sequence: CTC
ccatgtttgatgaactaaaa

SEQ ID NO: 383991 - DNA, 20 bp, Artificial Sequence
  Description of Artificial Sequence: Synthetic oligonucleotide
  Target: LAMA2; (+) strand; PAM type: YTN; PAM sequence: TTT
gatgaactaaaaggagcatt

SEQ ID NO: 383992 - DNA, 20 bp, Artificial Sequence
  Description of Artificial Sequence: Synthetic oligonucleotide
  Target: LAMA2; (+) strand; PAM type: YTN; PAM sequence: TTG
atgaactaaaaggagcattt

SEQ ID NO: 383993 - DNA, 20 bp, Artificial Sequence
  Description of Artificial Sequence: Synthetic oligonucleotide
  Target: LAMA2; (+) strand; PAM type: YTN; PAM sequence: CTA
aaaggagcatttaagccagt

SEQ ID NO: 383994 - DNA, 20 bp, Artificial Sequence
  Description of Artificial Sequence: Synthetic oligonucleotide
  Target: LAMA2; (+) strand; PAM type: YTN; PAM sequence: TTT
aagccagttttaggtcatcg

SEQ ID NO: 383995 - DNA, 20 bp, Artificial Sequence
  Description of Artificial Sequence: Synthetic oligonucleotide
  Target: LAMA2; (+) strand; PAM type: YTN; PAM sequence: TTA
agccagttttaggtcatcgg

SEQ ID NO: 383996 - DNA, 20 bp, Artificial Sequence
  Description of Artificial Sequence: Synthetic oligonucleotide
  Target: LAMA2; (+) strand; PAM type: YTN; PAM sequence: TTT
taggtcatcggggaatgttt

SEQ ID NO: 383997 - DNA, 20 bp, Artificial Sequence
  Description of Artificial Sequence: Synthetic oligonucleotide
  Target: LAMA2; (+) strand; PAM type: YTN; PAM sequence: TTT
aggtcatcggggaatgtttc

SEQ ID NO: 383998 - DNA, 20 bp, Artificial Sequence
  Description of Artificial Sequence: Synthetic oligonucleotide
  Target: LAMA2; (+) strand; PAM type: YTN; PAM sequence: TTA
ggtcatcggggaatgtttct

SEQ ID NO: 383999 - DNA, 20 bp, Artificial Sequence
  Description of Artificial Sequence: Synthetic oligonucleotide
  Target: LAMA2; (+) strand; PAM type: YTN; PAM sequence: TTT
ctcagagaaagtgacattta

SEQ ID NO: 384000 - DNA, 20 bp, Artificial Sequence
  Description of Artificial Sequence: Synthetic oligonucleotide
  Target: LAMA2; (+) strand; PAM type: YTN; PAM sequence: TTC
tcagagaaagtgacatttaa

SEQ ID NO: 384001 - DNA, 20 bp, Artificial Sequence
  Description of Artificial Sequence: Synthetic oligonucleotide
  Target: LAMA2; (+) strand; PAM type: YTN; PAM sequence: CTC
agagaaagtgacatttaaaa

SEQ ID NO: 384002 - DNA, 20 bp, Artificial Sequence
  Description of Artificial Sequence: Synthetic oligonucleotide
  Target: LAMA2; (+) strand; PAM type: YTN; PAM sequence: TTT
aaaatgagagctgaaatgaa

SEQ ID NO: 384003 - DNA, 20 bp, Artificial Sequence
  Description of Artificial Sequence: Synthetic oligonucleotide
  Target: LAMA2; (+) strand; PAM type: YTN; PAM sequence: TTA
aaatgagagctgaaatgaat

SEQ ID NO: 384004 - DNA, 20 bp, Artificial Sequence
  Description of Artificial Sequence: Synthetic oligonucleotide
  Target: LAMA2; (+) strand; PAM type: YTN; PAM sequence: CTG
aaatgaataagtgctagcct

SEQ ID NO: 384005 - DNA, 20 bp, Artificial Sequence
  Description of Artificial Sequence: Synthetic oligonucleotide
  Target: LAMA2; (+) strand; PAM type: YTN; PAM sequence: CTA
gcctgatatacactgtagag

SEQ ID NO: 384006 - DNA, 20 bp, Artificial Sequence
  Description of Artificial Sequence: Synthetic oligonucleotide
  Target: LAMA2; (+) strand; PAM type: YTN; PAM sequence: CTG
atatacactgtagagctaag

SEQ ID NO: 384007 - DNA, 20 bp, Artificial Sequence
  Description of Artificial Sequence: Synthetic oligonucleotide
  Target: LAMA2; (+) strand; PAM type: YTN; PAM sequence: CTG
tagagctaaggatttgcaaa

SEQ ID NO: 384008 - DNA, 20 bp, Artificial Sequence
  Description of Artificial Sequence: Synthetic oligonucleotide
  Target: LAMA2; (+) strand; PAM type: YTN; PAM sequence: CTA
aggatttgcaaatgaaaagt

SEQ ID NO: 384009 - DNA, 20 bp, Artificial Sequence
  Description of Artificial Sequence: Synthetic oligonucleotide
  Target: LAMA2; (+) strand; PAM type: YTN; PAM sequence: TTT
gcaaatgaaaagtcccagca

SEQ ID NO: 384010 - DNA, 20 bp, Artificial Sequence
  Description of Artificial Sequence: Synthetic oligonucleotide
  Target: LAMA2; (+) strand; PAM type: YTN; PAM sequence: TTG
caaatgaaaagtcccagcag

SEQ ID NO: 384011 - DNA, 20 bp, Artificial Sequence
  Description of Artificial Sequence: Synthetic oligonucleotide
  Target: LAMA2; (+) strand; PAM type: YTN; PAM sequence: TTT
gagaatttcagatggcccca

SEQ ID NO: 384012 - DNA, 20 bp, Artificial Sequence
  Description of Artificial Sequence: Synthetic oligonucleotide
  Target: LAMA2; (+) strand; PAM type: YTN; PAM sequence: TTG
agaatttcagatggccccat

SEQ ID NO: 384013 - DNA, 20 bp, Artificial Sequence
  Description of Artificial Sequence: Synthetic oligonucleotide
  Target: LAMA2; (+) strand; PAM type: YTN; PAM sequence: TTT
cagatggccccatgtggcta

SEQ ID NO: 384014 - DNA, 20 bp, Artificial Sequence
  Description of Artificial Sequence: Synthetic oligonucleotide
  Target: LAMA2; (+) strand; PAM type: YTN; PAM sequence: TTC
agatggccccatgtggctac

SEQ ID NO: 384015 - DNA, 20 bp, Artificial Sequence
  Description of Artificial Sequence: Synthetic oligonucleotide
  Target: LAMA2; (+) strand; PAM type: YTN; PAM sequence: CTA
cggcattatatgcaaagaaa

SEQ ID NO: 384016 - DNA, 20 bp, Artificial Sequence
  Description of Artificial Sequence: Synthetic oligonucleotide
  Target: LAMA2; (+) strand; PAM type: YTN; PAM sequence: TTA
tatgcaaagaaagcagtggc

SEQ ID NO: 384017 - DNA, 20 bp, Artificial Sequence
  Description of Artificial Sequence: Synthetic oligonucleotide
  Target: LAMA2; (+) strand; PAM type: YTN; PAM sequence: CTA
cagctacatatggaggggta

SEQ ID NO: 384018 - DNA, 20 bp, Artificial Sequence
  Description of Artificial Sequence: Synthetic oligonucleotide
  Target: LAMA2; (+) strand; PAM type: YTN; PAM sequence: CTA
catatggaggggtaagcaca

SEQ ID NO: 384019 - DNA, 20 bp, Artificial Sequence
  Description of Artificial Sequence: Synthetic oligonucleotide
  Target: LAMA2; (+) strand; PAM type: YTN; PAM sequence: CTC
ttccttgccatgctaatgat

SEQ ID NO: 384020 - DNA, 20 bp, Artificial Sequence
  Description of Artificial Sequence: Synthetic oligonucleotide
  Target: LAMA2; (+) strand; PAM type: YTN; PAM sequence: CTT
ccttgccatgctaatgattt

SEQ ID NO: 384021 - DNA, 20 bp, Artificial Sequence
  Description of Artificial Sequence: Synthetic oligonucleotide
  Target: LAMA2; (+) strand; PAM type: YTN; PAM sequence: TTC
cttgccatgctaatgatttg

SEQ ID NO: 384022 - DNA, 20 bp, Artificial Sequence
  Description of Artificial Sequence: Synthetic oligonucleotide
  Target: LAMA2; (+) strand; PAM type: YTN; PAM sequence: CTT
gccatgctaatgatttgtta

SEQ ID NO: 384023 - DNA, 20 bp, Artificial Sequence
  Description of Artificial Sequence: Synthetic oligonucleotide
  Target: LAMA2; (+) strand; PAM type: YTN; PAM sequence: TTG
ccatgctaatgatttgttat

SEQ ID NO: 384024 - DNA, 20 bp, Artificial Sequence
  Description of Artificial Sequence: Synthetic oligonucleotide
  Target: LAMA2; (+) strand; PAM type: YTN; PAM sequence: CTA
atgatttgttattcatcctg

SEQ ID NO: 384025 - DNA, 20 bp, Artificial Sequence
  Description of Artificial Sequence: Synthetic oligonucleotide
  Target: LAMA2; (+) strand; PAM type: YTN; PAM sequence: TTT
gttattcatcctgactgcat

SEQ ID NO: 384026 - DNA, 20 bp, Artificial Sequence
  Description of Artificial Sequence: Synthetic oligonucleotide
  Target: LAMA2; (+) strand; PAM type: YTN; PAM sequence: TTG
ttattcatcctgactgcatt

SEQ ID NO: 384027 - DNA, 20 bp, Artificial Sequence
  Description of Artificial Sequence: Synthetic oligonucleotide
  Target: LAMA2; (+) strand; PAM type: YTN; PAM sequence: TTA
ttcatcctgactgcatttgg

SEQ ID NO: 384028 - DNA, 20 bp, Artificial Sequence
  Description of Artificial Sequence: Synthetic oligonucleotide
  Target: LAMA2; (+) strand; PAM type: YTN; PAM sequence: TTC
atcctgactgcatttgggag

SEQ ID NO: 384029 - DNA, 20 bp, Artificial Sequence
  Description of Artificial Sequence: Synthetic oligonucleotide
  Target: LAMA2; (+) strand; PAM type: YTN; PAM sequence: CTG
actgcatttgggagctagtg

SEQ ID NO: 384030 - DNA, 20 bp, Artificial Sequence
  Description of Artificial Sequence: Synthetic oligonucleotide
  Target: LAMA2; (+) strand; PAM type: YTN; PAM sequence: CTG
catttgggagctagtgtagg

SEQ ID NO: 384031 - DNA, 20 bp, Artificial Sequence
  Description of Artificial Sequence: Synthetic oligonucleotide
  Target: LAMA2; (+) strand; PAM type: YTN; PAM sequence: TTT
gggagctagtgtaggctttc

SEQ ID NO: 384032 - DNA, 20 bp, Artificial Sequence
  Description of Artificial Sequence: Synthetic oligonucleotide
  Target: LAMA2; (+) strand; PAM type: YTN; PAM sequence: TTG
ggagctagtgtaggctttca

SEQ ID NO: 384033 - DNA, 20 bp, Artificial Sequence
  Description of Artificial Sequence: Synthetic oligonucleotide
  Target: LAMA2; (+) strand; PAM type: YTN; PAM sequence: CTA
gtgtaggctttcaagcaaga

SEQ ID NO: 384034 - DNA, 20 bp, Artificial Sequence
  Description of Artificial Sequence: Synthetic oligonucleotide
  Target: LAMA2; (+) strand; PAM type: YTN; PAM sequence: CTT
tcaagcaagagaaggtcatg

SEQ ID NO: 384035 - DNA, 20 bp, Artificial Sequence
  Description of Artificial Sequence: Synthetic oligonucleotide
  Target: LAMA2; (+) strand; PAM type: YTN; PAM sequence: TTT
caagcaagagaaggtcatgg

SEQ ID NO: 384036 - DNA, 20 bp, Artificial Sequence
  Description of Artificial Sequence: Synthetic oligonucleotide
  Target: LAMA2; (+) strand; PAM type: YTN; PAM sequence: TTC
aagcaagagaaggtcatggt

SEQ ID NO: 384037 - DNA, 20 bp, Artificial Sequence
  Description of Artificial Sequence: Synthetic oligonucleotide
  Target: LAMA2; (+) strand; PAM type: YTN; PAM sequence: TTT
gatatgttcataggatgatc

SEQ ID NO: 384038 - DNA, 20 bp, Artificial Sequence
  Description of Artificial Sequence: Synthetic oligonucleotide
  Target: LAMA2; (+) strand; PAM type: YTN; PAM sequence: TTG
atatgttcataggatgatca

SEQ ID NO: 384039 - DNA, 20 bp, Artificial Sequence
  Description of Artificial Sequence: Synthetic oligonucleotide
  Target: LAMA2; (+) strand; PAM type: YTN; PAM sequence: TTC
ataggatgatcactctgcag

SEQ ID NO: 384040 - DNA, 20 bp, Artificial Sequence
  Description of Artificial Sequence: Synthetic oligonucleotide
  Target: LAMA2; (+) strand; PAM type: YTN; PAM sequence: CTC
tgcagtgtggagaaatcacc

SEQ ID NO: 384041 - DNA, 20 bp, Artificial Sequence
  Description of Artificial Sequence: Synthetic oligonucleotide
  Target: LAMA2; (+) strand; PAM type: YTN; PAM sequence: CTG
cagtgtggagaaatcaccag

SEQ ID NO: 384042 - DNA, 20 bp, Artificial Sequence
  Description of Artificial Sequence: Synthetic oligonucleotide
  Target: LAMA2; (+) strand; PAM type: YTN; PAM sequence: CTT
tagctaaaaggctattctaa

SEQ ID NO: 384043 - DNA, 20 bp, Artificial Sequence
  Description of Artificial Sequence: Synthetic oligonucleotide
  Target: LAMA2; (+) strand; PAM type: YTN; PAM sequence: TTT
agctaaaaggctattctaat

SEQ ID NO: 384044 - DNA, 20 bp, Artificial Sequence
  Description of Artificial Sequence: Synthetic oligonucleotide
  Target: LAMA2; (+) strand; PAM type: YTN; PAM sequence: TTA
gctaaaaggctattctaata

SEQ ID NO: 384045 - DNA, 20 bp, Artificial Sequence
  Description of Artificial Sequence: Synthetic oligonucleotide
  Target: LAMA2; (+) strand; PAM type: YTN; PAM sequence: CTA
aaaggctattctaataatcc

SEQ ID NO: 384046 - DNA, 20 bp, Artificial Sequence
  Description of Artificial Sequence: Synthetic oligonucleotide
  Target: LAMA2; (+) strand; PAM type: YTN; PAM sequence: CTA
ttctaataatccaaataaaa

SEQ ID NO: 384047 - DNA, 20 bp, Artificial Sequence
  Description of Artificial Sequence: Synthetic oligonucleotide
  Target: LAMA2; (+) strand; PAM type: YTN; PAM sequence: TTC
taataatccaaataaaatat

SEQ ID NO: 384048 - DNA, 20 bp, Artificial Sequence
  Description of Artificial Sequence: Synthetic oligonucleotide
  Target: LAMA2; (+) strand; PAM type: YTN; PAM sequence: CTA
ataatccaaataaaatatga

SEQ ID NO: 384049 - DNA, 20 bp, Artificial Sequence
  Description of Artificial Sequence: Synthetic oligonucleotide
  Target: LAMA2; (+) strand; PAM type: YTN; PAM sequence: CTC
atggaactgatgatctaatg

SEQ ID NO: 384050 - DNA, 20 bp, Artificial Sequence
  Description of Artificial Sequence: Synthetic oligonucleotide
  Target: LAMA2; (+) strand; PAM type: YTN; PAM sequence: CTG
atgatctaatggatacctcg

SEQ ID NO: 384051 - DNA, 20 bp, Artificial Sequence
  Description of Artificial Sequence: Synthetic oligonucleotide
  Target: LAMA2; (+) strand; PAM type: YTN; PAM sequence: CTA
atggatacctcggataagag

SEQ ID NO: 384052 - DNA, 20 bp, Artificial Sequence
  Description of Artificial Sequence: Synthetic oligonucleotide
  Target: LAMA2; (+) strand; PAM type: YTN; PAM sequence: CTC
ggataagagaggcctctagg

SEQ ID NO: 384053 - DNA, 20 bp, Artificial Sequence
  Description of Artificial Sequence: Synthetic oligonucleotide
  Target: LAMA2; (+) strand; PAM type: YTN; PAM sequence: CTC
taggttgctgaccttggcaa

SEQ ID NO: 384054 - DNA, 20 bp, Artificial Sequence
  Description of Artificial Sequence: Synthetic oligonucleotide
  Target: LAMA2; (+) strand; PAM type: YTN; PAM sequence: CTA
ggttgctgaccttggcaatt

SEQ ID NO: 384055 - DNA, 20 bp, Artificial Sequence
  Description of Artificial Sequence: Synthetic oligonucleotide
  Target: LAMA2; (+) strand; PAM type: YTN; PAM sequence: TTG
ctgaccttggcaattgagtg

SEQ ID NO: 384056 - DNA, 20 bp, Artificial Sequence
  Description of Artificial Sequence: Synthetic oligonucleotide
  Target: LAMA2; (+) strand; PAM type: YTN; PAM sequence: CTG
accttggcaattgagtgaat

SEQ ID NO: 384057 - DNA, 20 bp, Artificial Sequence
  Description of Artificial Sequence: Synthetic oligonucleotide
  Target: LAMA2; (+) strand; PAM type: YTN; PAM sequence: CTT
ggcaattgagtgaatgacag

SEQ ID NO: 384058 - DNA, 20 bp, Artificial Sequence
  Description of Artificial Sequence: Synthetic oligonucleotide
  Target: LAMA2; (+) strand; PAM type: YTN; PAM sequence: TTG
gcaattgagtgaatgacagt

SEQ ID NO: 384059 - DNA, 20 bp, Artificial Sequence
  Description of Artificial Sequence: Synthetic oligonucleotide
  Target: LAMA2; (+) strand; PAM type: YTN; PAM sequence: TTG
agtgaatgacagtgacctca

SEQ ID NO: 384060 - DNA, 20 bp, Artificial Sequence
  Description of Artificial Sequence: Synthetic oligonucleotide
  Target: LAMA2; (+) strand; PAM type: YTN; PAM sequence: CTC
agatgaaacgagaaatacag

SEQ ID NO: 384061 - DNA, 20 bp, Artificial Sequence
  Description of Artificial Sequence: Synthetic oligonucleotide
  Target: LAMA2; (+) strand; PAM type: YTN; PAM sequence: TTA
caaggtttagcaagagatga

SEQ ID NO: 384062 - DNA, 20 bp, Artificial Sequence
  Description of Artificial Sequence: Synthetic oligonucleotide
  Target: LAMA2; (+) strand; PAM type: YTN; PAM sequence: TTT
agcaagagatgaacttcatt

SEQ ID NO: 384063 - DNA, 20 bp, Artificial Sequence
  Description of Artificial Sequence: Synthetic oligonucleotide
  Target: LAMA2; (+) strand; PAM type: YTN; PAM sequence: TTA
gcaagagatgaacttcattg

SEQ ID NO: 384064 - DNA, 20 bp, Artificial Sequence
  Description of Artificial Sequence: Synthetic oligonucleotide
  Target: LAMA2; (+) strand; PAM type: YTN; PAM sequence: CTT
cattgttgtcatttcaaatt

SEQ ID NO: 384065 - DNA, 20 bp, Artificial Sequence
  Description of Artificial Sequence: Synthetic oligonucleotide
  Target: LAMA2; (+) strand; PAM type: YTN; PAM sequence: TTC
attgttgtcatttcaaattt

SEQ ID NO: 384066 - DNA, 20 bp, Artificial Sequence
  Description of Artificial Sequence: Synthetic oligonucleotide
  Target: LAMA2; (+) strand; PAM type: YTN; PAM sequence: TTG
ttgtcatttcaaatttaaga

SEQ ID NO: 384067 - DNA, 20 bp, Artificial Sequence
  Description of Artificial Sequence: Synthetic oligonucleotide
  Target: LAMA2; (+) strand; PAM type: YTN; PAM sequence: TTG
tcatttcaaatttaagacgc

SEQ ID NO: 384068 - DNA, 20 bp, Artificial Sequence
  Description of Artificial Sequence: Synthetic oligonucleotide
  Target: LAMA2; (+) strand; PAM type: YTN; PAM sequence: TTT
caaatttaagacgcttctgt

SEQ ID NO: 384069 - DNA, 20 bp, Artificial Sequence
  Description of Artificial Sequence: Synthetic oligonucleotide
  Target: LAMA2; (+) strand; PAM type: YTN; PAM sequence: TTC
aaatttaagacgcttctgtg

SEQ ID NO: 384070 - DNA, 20 bp, Artificial Sequence
  Description of Artificial Sequence: Synthetic oligonucleotide
  Target: LAMA2; (+) strand; PAM type: YTN; PAM sequence: TTT
aagacgcttctgtgttatac

SEQ ID NO: 384071 - DNA, 20 bp, Artificial Sequence
  Description of Artificial Sequence: Synthetic oligonucleotide
  Target: LAMA2; (+) strand; PAM type: YTN; PAM sequence: TTA
agacgcttctgtgttataca

SEQ ID NO: 384072 - DNA, 20 bp, Artificial Sequence
  Description of Artificial Sequence: Synthetic oligonucleotide
  Target: LAMA2; (+) strand; PAM type: YTN; PAM sequence: CTT
ctgtgttatacaatatttat

SEQ ID NO: 384073 - DNA, 20 bp, Artificial Sequence
  Description of Artificial Sequence: Synthetic oligonucleotide
  Target: LAMA2; (+) strand; PAM type: YTN; PAM sequence: TTC
tgtgttatacaatatttatt

SEQ ID NO: 384074 - DNA, 20 bp, Artificial Sequence
  Description of Artificial Sequence: Synthetic oligonucleotide
  Target: LAMA2; (+) strand; PAM type: YTN; PAM sequence: CTG
tgttatacaatatttattca

SEQ ID NO: 384075 - DNA, 20 bp, Artificial Sequence
  Description of Artificial Sequence: Synthetic oligonucleotide
  Target: LAMA2; (+) strand; PAM type: YTN; PAM sequence: TTA
tacaatatttattcaagaag

SEQ ID NO: 384076 - DNA, 20 bp, Artificial Sequence
  Description of Artificial Sequence: Synthetic oligonucleotide
  Target: LAMA2; (+) strand; PAM type: YTN; PAM sequence: TTT
attcaagaagcaattagaag

SEQ ID NO: 384077 - DNA, 20 bp, Artificial Sequence
  Description of Artificial Sequence: Synthetic oligonucleotide
  Target: LAMA2; (+) strand; PAM type: YTN; PAM sequence: TTA
ttcaagaagcaattagaagc

SEQ ID NO: 384078 - DNA, 20 bp, Artificial Sequence
  Description of Artificial Sequence: Synthetic oligonucleotide
  Target: LAMA2; (+) strand; PAM type: YTN; PAM sequence: TTC
aagaagcaattagaagcaga

SEQ ID NO: 384079 - DNA, 20 bp, Artificial Sequence
  Description of Artificial Sequence: Synthetic oligonucleotide
  Target: LAMA2; (+) strand; PAM type: YTN; PAM sequence: TTA
gaagcagaagtctggaaccc

SEQ ID NO: 384080 - DNA, 20 bp, Artificial Sequence
  Description of Artificial Sequence: Synthetic oligonucleotide
  Target: LAMA2; (+) strand; PAM type: YTN; PAM sequence: CTG
gaacccattagagatatcca

SEQ ID NO: 384081 - DNA, 20 bp, Artificial Sequence
  Description of Artificial Sequence: Synthetic oligonucleotide
  Target: LAMA2; (+) strand; PAM type: YTN; PAM sequence: TTA
gagatatccaggctgaatac

SEQ ID NO: 384082 - DNA, 20 bp, Artificial Sequence
  Description of Artificial Sequence: Synthetic oligonucleotide
  Target: LAMA2; (+) strand; PAM type: YTN; PAM sequence: CTG
aatacataaaatacagagtt

SEQ ID NO: 384083 - DNA, 20 bp, Artificial Sequence
  Description of Artificial Sequence: Synthetic oligonucleotide
  Target: LAMA2; (+) strand; PAM type: YTN; PAM sequence: TTT
tgggcacaccattaactgaa

SEQ ID NO: 384084 - DNA, 20 bp, Artificial Sequence
  Description of Artificial Sequence: Synthetic oligonucleotide
  Target: LAMA2; (+) strand; PAM type: YTN; PAM sequence: TTT
gggcacaccattaactgaag

SEQ ID NO: 384085 - DNA, 20 bp, Artificial Sequence
  Description of Artificial Sequence: Synthetic oligonucleotide
  Target: LAMA2; (+) strand; PAM type: YTN; PAM sequence: TTG
ggcacaccattaactgaagt

SEQ ID NO: 384086 - DNA, 20 bp, Artificial Sequence
  Description of Artificial Sequence: Synthetic oligonucleotide
  Target: LAMA2; (+) strand; PAM type: YTN; PAM sequence: TTA
actgaagtcatagtaatgga

SEQ ID NO: 384087 - DNA, 20 bp, Artificial Sequence
  Description of Artificial Sequence: Synthetic oligonucleotide
  Target: LAMA2; (+) strand; PAM type: YTN; PAM sequence: CTG
aagtcatagtaatggatgaa

SEQ ID NO: 384088 - DNA, 20 bp, Artificial Sequence
  Description of Artificial Sequence: Synthetic oligonucleotide
  Target: LAMA2; (+) strand; PAM type: YTN; PAM sequence: TTA
gaattaagggcgtcaattat

SEQ ID NO: 384089 - DNA, 20 bp, Artificial Sequence
  Description of Artificial Sequence: Synthetic oligonucleotide
  Target: LAMA2; (+) strand; PAM type: YTN; PAM sequence: TTA
agggcgtcaattatattgaa

SEQ ID NO: 384090 - DNA, 20 bp, Artificial Sequence
  Description of Artificial Sequence: Synthetic oligonucleotide
  Target: LAMA2; (+) strand; PAM type: YTN; PAM sequence: TTA
tattgaacagaaagggaagg

SEQ ID NO: 384091 - DNA, 20 bp, Artificial Sequence
  Description of Artificial Sequence: Synthetic oligonucleotide
  Target: LAMA2; (+) strand; PAM type: YTN; PAM sequence: TTG
aacagaaagggaaggaagag

SEQ ID NO: 384092 - DNA, 20 bp, Artificial Sequence
  Description of Artificial Sequence: Synthetic oligonucleotide
  Target: LAMA2; (+) strand; PAM type: YTN; PAM sequence: TTC
gagtagccgcagaagtagga

SEQ ID NO: 384093 - DNA, 20 bp, Artificial Sequence
  Description of Artificial Sequence: Synthetic oligonucleotide
  Target: LAMA2; (+) strand; PAM type: YTN; PAM sequence: CTG
gcttactcttaaagaagcca

SEQ ID NO: 384094 - DNA, 20 bp, Artificial Sequence
  Description of Artificial Sequence: Synthetic oligonucleotide
  Target: LAMA2; (+) strand; PAM type: YTN; PAM sequence: CTT
actcttaaagaagccatggg

SEQ ID NO: 384095 - DNA, 20 bp, Artificial Sequence
  Description of Artificial Sequence: Synthetic oligonucleotide
  Target: LAMA2; (+) strand; PAM type: YTN; PAM sequence: TTA
ctcttaaagaagccatgggg

SEQ ID NO: 384096 - DNA, 20 bp, Artificial Sequence
  Description of Artificial Sequence: Synthetic oligonucleotide
  Target: LAMA2; (+) strand; PAM type: YTN; PAM sequence: CTC
ttaaagaagccatgggggct

SEQ ID NO: 384097 - DNA, 20 bp, Artificial Sequence
  Description of Artificial Sequence: Synthetic oligonucleotide
  Target: LAMA2; (+) strand; PAM type: YTN; PAM sequence: CTT
aaagaagccatgggggctgg

SEQ ID NO: 384098 - DNA, 20 bp, Artificial Sequence
  Description of Artificial Sequence: Synthetic oligonucleotide
  Target: LAMA2; (+) strand; PAM type: YTN; PAM sequence: TTA
aagaagccatgggggctggg

SEQ ID NO: 384099 - DNA, 20 bp, Artificial Sequence
  Description of Artificial Sequence: Synthetic oligonucleotide
  Target: LAMA2; (+) strand; PAM type: YTN; PAM sequence: CTG
ggcacggcagctcccgcctg

SEQ ID NO: 384100 - DNA, 20 bp, Artificial Sequence
  Description of Artificial Sequence: Synthetic oligonucleotide
  Target: LAMA2; (+) strand; PAM type: YTN; PAM sequence: CTC
ccgcctgtaatcccaacact

SEQ ID NO: 384101 - DNA, 20 bp, Artificial Sequence
  Description of Artificial Sequence: Synthetic oligonucleotide
  Target: LAMA2; (+) strand; PAM type: YTN; PAM sequence: CTG
taatcccaacactttgggag

SEQ ID NO: 384102 - DNA, 20 bp, Artificial Sequence
  Description of Artificial Sequence: Synthetic oligonucleotide
  Target: LAMA2; (+) strand; PAM type: YTN; PAM sequence: CTT
tgggaggccagggcaggcag

SEQ ID NO: 384103 - DNA, 20 bp, Artificial Sequence
  Description of Artificial Sequence: Synthetic oligonucleotide
  Target: LAMA2; (+) strand; PAM type: YTN; PAM sequence: TTT
gggaggccagggcaggcaga

SEQ ID NO: 384104 - DNA, 20 bp, Artificial Sequence
  Description of Artificial Sequence: Synthetic oligonucleotide
  Target: LAMA2; (+) strand; PAM type: YTN; PAM sequence: TTG
ggaggccagggcaggcagat

SEQ ID NO: 384105 - DNA, 20 bp, Artificial Sequence
  Description of Artificial Sequence: Synthetic oligonucleotide
  Target: LAMA2; (+) strand; PAM type: YTN; PAM sequence: CTG
gccagcatggtgaaaccccg

SEQ ID NO: 384106 - DNA, 20 bp, Artificial Sequence
  Description of Artificial Sequence: Synthetic oligonucleotide
  Target: LAMA2; (+) strand; PAM type: YTN; PAM sequence: CTT
tactgaaaatacgaaaatta

SEQ ID NO: 384107 - DNA, 20 bp, Artificial Sequence
  Description of Artificial Sequence: Synthetic oligonucleotide
  Target: LAMA2; (+) strand; PAM type: YTN; PAM sequence: TTT
actgaaaatacgaaaattaa

SEQ ID NO: 384108 - DNA, 20 bp, Artificial Sequence
  Description of Artificial Sequence: Synthetic oligonucleotide
  Target: LAMA2; (+) strand; PAM type: YTN; PAM sequence: TTA
ctgaaaatacgaaaattaac

SEQ ID NO: 384109 - DNA, 20 bp, Artificial Sequence
  Description of Artificial Sequence: Synthetic oligonucleotide
  Target: LAMA2; (+) strand; PAM type: YTN; PAM sequence: CTG
aaaatacgaaaattaactgg

SEQ ID NO: 384110 - DNA, 20 bp, Artificial Sequence
  Description of Artificial Sequence: Synthetic oligonucleotide
  Target: LAMA2; (+) strand; PAM type: YTN; PAM sequence: TTA
actgggcatggttacgcatg

SEQ ID NO: 384111 - DNA, 20 bp, Artificial Sequence
  Description of Artificial Sequence: Synthetic oligonucleotide
  Target: LAMA2; (+) strand; PAM type: YTN; PAM sequence: CTG
ggcatggttacgcatgcctg

SEQ ID NO: 384112 - DNA, 20 bp, Artificial Sequence
  Description of Artificial Sequence: Synthetic oligonucleotide
  Target: LAMA2; (+) strand; PAM type: YTN; PAM sequence: TTA
cgcatgcctgtaatctcagc

SEQ ID NO: 384113 - DNA, 20 bp, Artificial Sequence
  Description of Artificial Sequence: Synthetic oligonucleotide
  Target: LAMA2; (+) strand; PAM type: YTN; PAM sequence: CTG
taatctcagctactcaggag

SEQ ID NO: 384114 - DNA, 20 bp, Artificial Sequence
  Description of Artificial Sequence: Synthetic oligonucleotide
  Target: LAMA2; (+) strand; PAM type: YTN; PAM sequence: CTC
agctactcaggaggctgagg

SEQ ID NO: 384115 - DNA, 20 bp, Artificial Sequence
  Description of Artificial Sequence: Synthetic oligonucleotide
  Target: LAMA2; (+) strand; PAM type: YTN; PAM sequence: CTA
ctcaggaggctgaggcagga

SEQ ID NO: 384116 - DNA, 20 bp, Artificial Sequence
  Description of Artificial Sequence: Synthetic oligonucleotide
  Target: LAMA2; (+) strand; PAM type: YTN; PAM sequence: CTC
aggaggctgaggcaggagaa

SEQ ID NO: 384117 - DNA, 20 bp, Artificial Sequence
  Description of Artificial Sequence: Synthetic oligonucleotide
  Target: LAMA2; (+) strand; PAM type: YTN; PAM sequence: CTG
aggcaggagaatcgcttgaa

SEQ ID NO: 384118 - DNA, 20 bp, Artificial Sequence
  Description of Artificial Sequence: Synthetic oligonucleotide
  Target: LAMA2; (+) strand; PAM type: YTN; PAM sequence: CTT
gaacctgggaggcagaggtt

SEQ ID NO: 384119 - DNA, 20 bp, Artificial Sequence
  Description of Artificial Sequence: Synthetic oligonucleotide
  Target: LAMA2; (+) strand; PAM type: YTN; PAM sequence: TTG
aacctgggaggcagaggttg

SEQ ID NO: 384120 - DNA, 20 bp, Artificial Sequence
  Description of Artificial Sequence: Synthetic oligonucleotide
  Target: LAMA2; (+) strand; PAM type: YTN; PAM sequence: CTG
ggaggcagaggttgcagtga

SEQ ID NO: 384121 - DNA, 20 bp, Artificial Sequence
  Description of Artificial Sequence: Synthetic oligonucleotide
  Target: LAMA2; (+) strand; PAM type: YTN; PAM sequence: TTG
cagtgagctgagatggtgcc

SEQ ID NO: 384122 - DNA, 20 bp, Artificial Sequence
  Description of Artificial Sequence: Synthetic oligonucleotide
  Target: LAMA2; (+) strand; PAM type: YTN; PAM sequence: CTG
agatggtgccactgcactcc

SEQ ID NO: 384123 - DNA, 20 bp, Artificial Sequence
  Description of Artificial Sequence: Synthetic oligonucleotide
  Target: LAMA2; (+) strand; PAM type: YTN; PAM sequence: CTG
cactccagcctgactacaga

SEQ ID NO: 384124 - DNA, 20 bp, Artificial Sequence
  Description of Artificial Sequence: Synthetic oligonucleotide
  Target: LAMA2; (+) strand; PAM type: YTN; PAM sequence: CTC
cagcctgactacagagcgag

SEQ ID NO: 384125 - DNA, 20 bp, Artificial Sequence
  Description of Artificial Sequence: Synthetic oligonucleotide
  Target: LAMA2; (+) strand; PAM type: YTN; PAM sequence: CTG
actacagagcgagactgtct

SEQ ID NO: 384126 - DNA, 20 bp, Artificial Sequence
  Description of Artificial Sequence: Synthetic oligonucleotide
  Target: LAMA2; (+) strand; PAM type: YTN; PAM sequence: CTA
cagagcgagactgtctcaaa

SEQ ID NO: 384127 - DNA, 20 bp, Artificial Sequence
  Description of Artificial Sequence: Synthetic oligonucleotide
  Target: LAMA2; (+) strand; PAM type: YTN; PAM sequence: CTG
tctcaaaaaaaaaaaaaaga

SEQ ID NO: 384128 - DNA, 20 bp, Artificial Sequence
  Description of Artificial Sequence: Synthetic oligonucleotide
  Target: LAMA2; (+) strand; PAM type: YTN; PAM sequence: CTC
aaaaaaaaaaaaaagaaaga

SEQ ID NO: 384129 - DNA, 20 bp, Artificial Sequence
  Description of Artificial Sequence: Synthetic oligonucleotide
  Target: LAMA2; (+) strand; PAM type: YTN; PAM sequence: CTA
tcaatggctacagaaaacct

SEQ ID NO: 384130 - DNA, 20 bp, Artificial Sequence
  Description of Artificial Sequence: Synthetic oligonucleotide
  Target: LAMA2; (+) strand; PAM type: YTN; PAM sequence: CTA
cagaaaacctacatatgagg

SEQ ID NO: 384131 - DNA, 20 bp, Artificial Sequence
  Description of Artificial Sequence: Synthetic oligonucleotide
  Target: LAMA2; (+) strand; PAM type: YTN; PAM sequence: CTA
catatgaggcctgatgattg

SEQ ID NO: 384132 - DNA, 20 bp, Artificial Sequence
  Description of Artificial Sequence: Synthetic oligonucleotide
  Target: LAMA2; (+) strand; PAM type: YTN; PAM sequence: CTG
atgattgtaagttttgcttt

SEQ ID NO: 384133 - DNA, 20 bp, Artificial Sequence
  Description of Artificial Sequence: Synthetic oligonucleotide
  Target: LAMA2; (+) strand; PAM type: YTN; PAM sequence: TTG
taagttttgctttagcaaca

SEQ ID NO: 384134 - DNA, 20 bp, Artificial Sequence
  Description of Artificial Sequence: Synthetic oligonucleotide
  Target: LAMA2; (+) strand; PAM type: YTN; PAM sequence: TTT
tgctttagcaacaaagatct

SEQ ID NO: 384135 - DNA, 20 bp, Artificial Sequence
  Description of Artificial Sequence: Synthetic oligonucleotide
  Target: LAMA2; (+) strand; PAM type: YTN; PAM sequence: TTT
gctttagcaacaaagatctt

SEQ ID NO: 384136 - DNA, 20 bp, Artificial Sequence
  Description of Artificial Sequence: Synthetic oligonucleotide
  Target: LAMA2; (+) strand; PAM type: YTN; PAM sequence: TTG
ctttagcaacaaagatctta

SEQ ID NO: 384137 - DNA, 20 bp, Artificial Sequence
  Description of Artificial Sequence: Synthetic oligonucleotide
  Target: LAMA2; (+) strand; PAM type: YTN; PAM sequence: CTT
tagcaacaaagatcttatgg

SEQ ID NO: 384138 - DNA, 20 bp, Artificial Sequence
  Description of Artificial Sequence: Synthetic oligonucleotide
  Target: LAMA2; (+) strand; PAM type: YTN; PAM sequence: TTT
agcaacaaagatcttatggg

SEQ ID NO: 384139 - DNA, 20 bp, Artificial Sequence
  Description of Artificial Sequence: Synthetic oligonucleotide
  Target: LAMA2; (+) strand; PAM type: YTN; PAM sequence: TTA
gcaacaaagatcttatgggt

SEQ ID NO: 384140 - DNA, 20 bp, Artificial Sequence
  Description of Artificial Sequence: Synthetic oligonucleotide
  Target: LAMA2; (+) strand; PAM type: YTN; PAM sequence: CTT
atgggtcatcctggtattat

SEQ ID NO: 384141 - DNA, 20 bp, Artificial Sequence
  Description of Artificial Sequence: Synthetic oligonucleotide
  Target: LAMA2; (+) strand; PAM type: YTN; PAM sequence: TTA
tgggtcatcctggtattatg

SEQ ID NO: 384142 - DNA, 20 bp, Artificial Sequence
  Description of Artificial Sequence: Synthetic oligonucleotide
  Target: LAMA2; (+) strand; PAM type: YTN; PAM sequence: CTG
gtattatgtttaatggtgaa

SEQ ID NO: 384143 - DNA, 20 bp, Artificial Sequence
  Description of Artificial Sequence: Synthetic oligonucleotide
  Target: LAMA2; (+) strand; PAM type: YTN; PAM sequence: TTA
tgtttaatggtgaaaccaga

SEQ ID NO: 384144 - DNA, 20 bp, Artificial Sequence
  Description of Artificial Sequence: Synthetic oligonucleotide
  Target: LAMA2; (+) strand; PAM type: YTN; PAM sequence: TTT
aatggtgaaaccagaagcct

SEQ ID NO: 384145 - DNA, 20 bp, Artificial Sequence
  Description of Artificial Sequence: Synthetic oligonucleotide
  Target: LAMA2; (+) strand; PAM type: YTN; PAM sequence: TTA
atggtgaaaccagaagcctg

SEQ ID NO: 384146 - DNA, 20 bp, Artificial Sequence
  Description of Artificial Sequence: Synthetic oligonucleotide
  Target: LAMA2; (+) strand; PAM type: YTN; PAM sequence: CTG
tttaaagggagaatgggaga

SEQ ID NO: 384147 - DNA, 20 bp, Artificial Sequence
  Description of Artificial Sequence: Synthetic oligonucleotide
  Target: LAMA2; (+) strand; PAM type: YTN; PAM sequence: TTT
aaagggagaatgggagatga

SEQ ID NO: 384148 - DNA, 20 bp, Artificial Sequence
  Description of Artificial Sequence: Synthetic oligonucleotide
  Target: LAMA2; (+) strand; PAM type: YTN; PAM sequence: TTA
aagggagaatgggagatgaa

SEQ ID NO: 384149 - DNA, 20 bp, Artificial Sequence
  Description of Artificial Sequence: Synthetic oligonucleotide
  Target: LAMA2; (+) strand; PAM type: YTN; PAM sequence: CTT
tttaaaagcttatcgaaaat

SEQ ID NO: 384150 - DNA, 20 bp, Artificial Sequence
  Description of Artificial Sequence: Synthetic oligonucleotide
  Target: LAMA2; (+) strand; PAM type: YTN; PAM sequence: TTT
ttaaaagcttatcgaaaata

SEQ ID NO: 384151 - DNA, 20 bp, Artificial Sequence
  Description of Artificial Sequence: Synthetic oligonucleotide
  Target: LAMA2; (+) strand; PAM type: YTN; PAM sequence: TTT
taaaagcttatcgaaaatag

SEQ ID NO: 384152 - DNA, 20 bp, Artificial Sequence
  Description of Artificial Sequence: Synthetic oligonucleotide
  Target: LAMA2; (+) strand; PAM type: YTN; PAM sequence: TTT
aaaagcttatcgaaaatagg

SEQ ID NO: 384153 - DNA, 20 bp, Artificial Sequence
  Description of Artificial Sequence: Synthetic oligonucleotide
  Target: LAMA2; (+) strand; PAM type: YTN; PAM sequence: TTA
aaagcttatcgaaaatagga

SEQ ID NO: 384154 - DNA, 20 bp, Artificial Sequence
  Description of Artificial Sequence: Synthetic oligonucleotide
  Target: LAMA2; (+) strand; PAM type: YTN; PAM sequence: CTT
atcgaaaataggatagaaat

SEQ ID NO: 384155 - DNA, 20 bp, Artificial Sequence
  Description of Artificial Sequence: Synthetic oligonucleotide
  Target: LAMA2; (+) strand; PAM type: YTN; PAM sequence: TTA
tcgaaaataggatagaaatt

SEQ ID NO: 384156 - DNA, 20 bp, Artificial Sequence
  Description of Artificial Sequence: Synthetic oligonucleotide
  Target: LAMA2; (+) strand; PAM type: YTN; PAM sequence: TTG
tcaagcaatttgagacctca

SEQ ID NO: 384157 - DNA, 20 bp, Artificial Sequence
  Description of Artificial Sequence: Synthetic oligonucleotide
  Target: LAMA2; (+) strand; PAM type: YTN; PAM sequence: TTT
gagacctcacagattttttt

SEQ ID NO: 384158 - DNA, 20 bp, Artificial Sequence
  Description of Artificial Sequence: Synthetic oligonucleotide
  Target: LAMA2; (+) strand; PAM type: YTN; PAM sequence: TTG
agacctcacagatttttttt

SEQ ID NO: 384159 - DNA, 20 bp, Artificial Sequence
  Description of Artificial Sequence: Synthetic oligonucleotide
  Target: LAMA2; (+) strand; PAM type: YTN; PAM sequence: CTC
acagattttttttttaagac

SEQ ID NO: 384160 - DNA, 20 bp, Artificial Sequence
  Description of Artificial Sequence: Synthetic oligonucleotide
  Target: LAMA2; (+) strand; PAM type: YTN; PAM sequence: TTT
tttttttaagacaggaaagg

SEQ ID NO: 384161 - DNA, 20 bp, Artificial Sequence
  Description of Artificial Sequence: Synthetic oligonucleotide
  Target: LAMA2; (+) strand; PAM type: YTN; PAM sequence: TTT
ttttttaagacaggaaaggc

SEQ ID NO: 384162 - DNA, 20 bp, Artificial Sequence
  Description of Artificial Sequence: Synthetic oligonucleotide
  Target: LAMA2; (+) strand; PAM type: YTN; PAM sequence: TTT
tttttaagacaggaaaggct

SEQ ID NO: 384163 - DNA, 20 bp, Artificial Sequence
  Description of Artificial Sequence: Synthetic oligonucleotide
  Target: LAMA2; (+) strand; PAM type: YTN; PAM sequence: TTT
ttttaagacaggaaaggctt

SEQ ID NO: 384164 - DNA, 20 bp, Artificial Sequence
  Description of Artificial Sequence: Synthetic oligonucleotide
  Target: LAMA2; (+) strand; PAM type: YTN; PAM sequence: TTT
tttaagacaggaaaggcttg

SEQ ID NO: 384165 - DNA, 20 bp, Artificial Sequence
  Description of Artificial Sequence: Synthetic oligonucleotide
  Target: LAMA2; (+) strand; PAM type: YTN; PAM sequence: TTT
ttaagacaggaaaggcttga

SEQ ID NO: 384166 - DNA, 20 bp, Artificial Sequence
  Description of Artificial Sequence: Synthetic oligonucleotide
  Target: LAMA2; (+) strand; PAM type: YTN; PAM sequence: TTT
taagacaggaaaggcttgac

SEQ ID NO: 384167 - DNA, 20 bp, Artificial Sequence
  Description of Artificial Sequence: Synthetic oligonucleotide
  Target: LAMA2; (+) strand; PAM type: YTN; PAM sequence: TTT
aagacaggaaaggcttgacc

SEQ ID NO: 384168 - DNA, 20 bp, Artificial Sequence
  Description of Artificial Sequence: Synthetic oligonucleotide
  Target: LAMA2; (+) strand; PAM type: YTN; PAM sequence: TTA
agacaggaaaggcttgacca

SEQ ID NO: 384169 - DNA, 20 bp, Artificial Sequence
  Description of Artificial Sequence: Synthetic oligonucleotide
  Target: LAMA2; (+) strand; PAM type: YTN; PAM sequence: CTT
gaccaatttcaaatattaat

SEQ ID NO: 384170 - DNA, 20 bp, Artificial Sequence
  Description of Artificial Sequence: Synthetic oligonucleotide
  Target: LAMA2; (+) strand; PAM type: YTN; PAM sequence: TTG
accaatttcaaatattaatg

SEQ ID NO: 384171 - DNA, 20 bp, Artificial Sequence
  Description of Artificial Sequence: Synthetic oligonucleotide
  Target: LAMA2; (+) strand; PAM type: YTN; PAM sequence: TTT
caaatattaatgagaatgag

SEQ ID NO: 384172 - DNA, 20 bp, Artificial Sequence
  Description of Artificial Sequence: Synthetic oligonucleotide
  Target: LAMA2; (+) strand; PAM type: YTN; PAM sequence: TTC
aaatattaatgagaatgagc

SEQ ID NO: 384173 - DNA, 20 bp, Artificial Sequence
  Description of Artificial Sequence: Synthetic oligonucleotide
  Target: LAMA2; (+) strand; PAM type: YTN; PAM sequence: TTA
atgagaatgagcctgcaaag

SEQ ID NO: 384174 - DNA, 20 bp, Artificial Sequence
  Description of Artificial Sequence: Synthetic oligonucleotide
  Target: LAMA2; (+) strand; PAM type: YTN; PAM sequence: CTG
caaaggagggaataaagatg

SEQ ID NO: 384175 - DNA, 20 bp, Artificial Sequence
  Description of Artificial Sequence: Synthetic oligonucleotide
  Target: LAMA2; (+) strand; PAM type: YTN; PAM sequence: TTT
aggagtggagtagcttcaga

SEQ ID NO: 384176 - DNA, 20 bp, Artificial Sequence
  Description of Artificial Sequence: Synthetic oligonucleotide
  Target: LAMA2; (+) strand; PAM type: YTN; PAM sequence: TTA
ggagtggagtagcttcagac

SEQ ID NO: 384177 - DNA, 20 bp, Artificial Sequence
  Description of Artificial Sequence: Synthetic oligonucleotide
  Target: LAMA2; (+) strand; PAM type: YTN; PAM sequence: CTT
cagacaaaggacggaaacaa

SEQ ID NO: 384178 - DNA, 20 bp, Artificial Sequence
  Description of Artificial Sequence: Synthetic oligonucleotide
  Target: LAMA2; (+) strand; PAM type: YTN; PAM sequence: TTC
agacaaaggacggaaacaaa

SEQ ID NO: 384179 - DNA, 20 bp, Artificial Sequence
  Description of Artificial Sequence: Synthetic oligonucleotide
  Target: LAMA2; (+) strand; PAM type: YTN; PAM sequence: CTG
aattgtttgccaggaaacca

SEQ ID NO: 384180 - DNA, 20 bp, Artificial Sequence
  Description of Artificial Sequence: Synthetic oligonucleotide
  Target: LAMA2; (+) strand; PAM type: YTN; PAM sequence: TTG
tttgccaggaaaccaaggga

SEQ ID NO: 384181 - DNA, 20 bp, Artificial Sequence
  Description of Artificial Sequence: Synthetic oligonucleotide
  Target: LAMA2; (+) strand; PAM type: YTN; PAM sequence: TTT
gccaggaaaccaagggagca

SEQ ID NO: 384182 - DNA, 20 bp, Artificial Sequence
  Description of Artificial Sequence: Synthetic oligonucleotide
  Target: LAMA2; (+) strand; PAM type: YTN; PAM sequence: TTG
ccaggaaaccaagggagcat

SEQ ID NO: 384183 - DNA, 20 bp, Artificial Sequence
  Description of Artificial Sequence: Synthetic oligonucleotide
  Target: LAMA2; (+) strand; PAM type: YTN; PAM sequence: TTA
gagctttcttatctcttaaa

SEQ ID NO: 384184 - DNA, 20 bp, Artificial Sequence
  Description of Artificial Sequence: Synthetic oligonucleotide
  Target: LAMA2; (+) strand; PAM type: YTN; PAM sequence: CTT
tcttatctcttaaagtaggg

SEQ ID NO: 384185 - DNA, 20 bp, Artificial Sequence
  Description of Artificial Sequence: Synthetic oligonucleotide
  Target: LAMA2; (+) strand; PAM type: YTN; PAM sequence: TTT
cttatctcttaaagtagggt

SEQ ID NO: 384186 - DNA, 20 bp, Artificial Sequence
  Description of Artificial Sequence: Synthetic oligonucleotide
  Target: LAMA2; (+) strand; PAM type: YTN; PAM sequence: TTC
ttatctcttaaagtagggta

SEQ ID NO: 384187 - DNA, 20 bp, Artificial Sequence
  Description of Artificial Sequence: Synthetic oligonucleotide
  Target: LAMA2; (+) strand; PAM type: YTN; PAM sequence: CTT
atctcttaaagtagggtaag

SEQ ID NO: 384188 - DNA, 20 bp, Artificial Sequence
  Description of Artificial Sequence: Synthetic oligonucleotide
  Target: LAMA2; (+) strand; PAM type: YTN; PAM sequence: TTA
tctcttaaagtagggtaagg

SEQ ID NO: 384189 - DNA, 20 bp, Artificial Sequence
  Description of Artificial Sequence: Synthetic oligonucleotide
  Target: LAMA2; (+) strand; PAM type: YTN; PAM sequence: CTC
ttaaagtagggtaaggtgta

SEQ ID NO: 384190 - DNA, 20 bp, Artificial Sequence
  Description of Artificial Sequence: Synthetic oligonucleotide
  Target: LAMA2; (+) strand; PAM type: YTN; PAM sequence: CTT
aaagtagggtaaggtgtaga

SEQ ID NO: 384191 - DNA, 20 bp, Artificial Sequence
  Description of Artificial Sequence: Synthetic oligonucleotide
  Target: LAMA2; (+) strand; PAM type: YTN; PAM sequence: TTA
aagtagggtaaggtgtagaa

SEQ ID NO: 384192 - DNA, 20 bp, Artificial Sequence
  Description of Artificial Sequence: Synthetic oligonucleotide
  Target: LAMA2; (+) strand; PAM type: YTN; PAM sequence: TTT
gagattggctgggcacgttg

SEQ ID NO: 384193 - DNA, 20 bp, Artificial Sequence
  Description of Artificial Sequence: Synthetic oligonucleotide
  Target: LAMA2; (+) strand; PAM type: YTN; PAM sequence: TTG
agattggctgggcacgttgg

SEQ ID NO: 384194 - DNA, 20 bp, Artificial Sequence
  Description of Artificial Sequence: Synthetic oligonucleotide
  Target: LAMA2; (+) strand; PAM type: YTN; PAM sequence: TTG
gctgggcacgttgggaggct

SEQ ID NO: 384195 - DNA, 20 bp, Artificial Sequence
  Description of Artificial Sequence: Synthetic oligonucleotide
  Target: LAMA2; (+) strand; PAM type: YTN; PAM sequence: CTG
ggcacgttgggaggctgagg

SEQ ID NO: 384196 - DNA, 20 bp, Artificial Sequence
  Description of Artificial Sequence: Synthetic oligonucleotide
  Target: LAMA2; (+) strand; PAM type: YTN; PAM sequence: TTG
ggaggctgaggtgggtggat

SEQ ID NO: 384197 - DNA, 20 bp, Artificial Sequence
  Description of Artificial Sequence: Synthetic oligonucleotide
  Target: LAMA2; (+) strand; PAM type: YTN; PAM sequence: CTG
aggtgggtggatcacctgag

SEQ ID NO: 384198 - DNA, 20 bp, Artificial Sequence
  Description of Artificial Sequence: Synthetic oligonucleotide
  Target: LAMA2; (+) strand; PAM type: YTN; PAM sequence: CTG
aggtcaggagttcaagacca

SEQ ID NO: 384199 - DNA, 20 bp, Artificial Sequence
  Description of Artificial Sequence: Synthetic oligonucleotide
  Target: LAMA2; (+) strand; PAM type: YTN; PAM sequence: TTC
aagaccagcctggccaacat

SEQ ID NO: 384200 - DNA, 20 bp, Artificial Sequence
  Description of Artificial Sequence: Synthetic oligonucleotide
  Target: LAMA2; (+) strand; PAM type: YTN; PAM sequence: CTG
gccaacatggtgaaacccca

SEQ ID NO: 384201 - DNA, 20 bp, Artificial Sequence
  Description of Artificial Sequence: Synthetic oligonucleotide
  Target: LAMA2; (+) strand; PAM type: YTN; PAM sequence: CTC
tactaaaaatacaaaaaatt

SEQ ID NO: 384202 - DNA, 20 bp, Artificial Sequence
  Description of Artificial Sequence: Synthetic oligonucleotide
  Target: LAMA2; (+) strand; PAM type: YTN; PAM sequence: CTA
ctaaaaatacaaaaaattag

SEQ ID NO: 384203 - DNA, 20 bp, Artificial Sequence
  Description of Artificial Sequence: Synthetic oligonucleotide
  Target: LAMA2; (+) strand; PAM type: YTN; PAM sequence: CTA
aaaatacaaaaaattagcct

SEQ ID NO: 384204 - DNA, 20 bp, Artificial Sequence
  Description of Artificial Sequence: Synthetic oligonucleotide
  Target: LAMA2; (+) strand; PAM type: YTN; PAM sequence: TTA
gcctggcgtggtggtatgtg

SEQ ID NO: 384205 - DNA, 20 bp, Artificial Sequence
  Description of Artificial Sequence: Synthetic oligonucleotide
  Target: LAMA2; (+) strand; PAM type: YTN; PAM sequence: CTG
gcgtggtggtatgtgcctgt

SEQ ID NO: 384206 - DNA, 20 bp, Artificial Sequence
  Description of Artificial Sequence: Synthetic oligonucleotide
  Target: LAMA2; (+) strand; PAM type: YTN; PAM sequence: CTG
tagtaccagctactcgggaa

SEQ ID NO: 384207 - DNA, 20 bp, Artificial Sequence
  Description of Artificial Sequence: Synthetic oligonucleotide
  Target: LAMA2; (+) strand; PAM type: YTN; PAM sequence: CTA
ctcgggaaggtgaggcagga

SEQ ID NO: 384208 - DNA, 20 bp, Artificial Sequence
  Description of Artificial Sequence: Synthetic oligonucleotide
  Target: LAMA2; (+) strand; PAM type: YTN; PAM sequence: CTC
gggaaggtgaggcaggagaa

SEQ ID NO: 384209 - DNA, 20 bp, Artificial Sequence
  Description of Artificial Sequence: Synthetic oligonucleotide
  Target: LAMA2; (+) strand; PAM type: YTN; PAM sequence: CTT
tattcaggaggcagaggttg

SEQ ID NO: 384210 - DNA, 20 bp, Artificial Sequence
  Description of Artificial Sequence: Synthetic oligonucleotide
  Target: LAMA2; (+) strand; PAM type: YTN; PAM sequence: TTT
attcaggaggcagaggttgc

SEQ ID NO: 384211 - DNA, 20 bp, Artificial Sequence
  Description of Artificial Sequence: Synthetic oligonucleotide
  Target: LAMA2; (+) strand; PAM type: YTN; PAM sequence: TTA
ttcaggaggcagaggttgca

SEQ ID NO: 384212 - DNA, 20 bp, Artificial Sequence
  Description of Artificial Sequence: Synthetic oligonucleotide
  Target: LAMA2; (+) strand; PAM type: YTN; PAM sequence: TTC
aggaggcagaggttgcagtg

SEQ ID NO: 384213 - DNA, 20 bp, Artificial Sequence
  Description of Artificial Sequence: Synthetic oligonucleotide
  Target: LAMA2; (+) strand; PAM type: YTN; PAM sequence: TTG
cagtgagccaagatggtgcc

SEQ ID NO: 384214 - DNA, 20 bp, Artificial Sequence
  Description of Artificial Sequence: Synthetic oligonucleotide
  Target: LAMA2; (+) strand; PAM type: YTN; PAM sequence: CTG
cactccagcctgggcgacag

SEQ ID NO: 384215 - DNA, 20 bp, Artificial Sequence
  Description of Artificial Sequence: Synthetic oligonucleotide
  Target: LAMA2; (+) strand; PAM type: YTN; PAM sequence: CTC
cagcctgggcgacagagctc

SEQ ID NO: 384216 - DNA, 20 bp, Artificial Sequence
  Description of Artificial Sequence: Synthetic oligonucleotide
  Target: LAMA2; (+) strand; PAM type: YTN; PAM sequence: CTG
ggcgacagagctctgtctca

SEQ ID NO: 384217 - DNA, 20 bp, Artificial Sequence
  Description of Artificial Sequence: Synthetic oligonucleotide
  Target: LAMA2; (+) strand; PAM type: YTN; PAM sequence: CTC
tgtctcaaaaaaaaaaaaaa

SEQ ID NO: 384218 - DNA, 20 bp, Artificial Sequence
  Description of Artificial Sequence: Synthetic oligonucleotide
  Target: LAMA2; (+) strand; PAM type: YTN; PAM sequence: CTG
tctcaaaaaaaaaaaaaaaa

SEQ ID NO: 384219 - DNA, 20 bp, Artificial Sequence
  Description of Artificial Sequence: Synthetic oligonucleotide
  Target: LAMA2; (+) strand; PAM type: YTN; PAM sequence: CTC
aaaaaaaaaaaaaaaaaaaa

SEQ ID NO: 384220 - DNA, 20 bp, Artificial Sequence
  Description of Artificial Sequence: Synthetic oligonucleotide
  Target: LAMA2; (+) strand; PAM type: YTN; PAM sequence: CTT
gtaccttgtcatattggaaa

SEQ ID NO: 384221 - DNA, 20 bp, Artificial Sequence
  Description of Artificial Sequence: Synthetic oligonucleotide
  Target: LAMA2; (+) strand; PAM type: YTN; PAM sequence: TTG
taccttgtcatattggaaaa

SEQ ID NO: 384222 - DNA, 20 bp, Artificial Sequence
  Description of Artificial Sequence: Synthetic oligonucleotide
  Target: LAMA2; (+) strand; PAM type: YTN; PAM sequence: CTT
gtcatattggaaaaccagat

SEQ ID NO: 384223 - DNA, 20 bp, Artificial Sequence
  Description of Artificial Sequence: Synthetic oligonucleotide
  Target: LAMA2; (+) strand; PAM type: YTN; PAM sequence: TTG
tcatattggaaaaccagatt

SEQ ID NO: 384224 - DNA, 20 bp, Artificial Sequence
  Description of Artificial Sequence: Synthetic oligonucleotide
  Target: LAMA2; (+) strand; PAM type: YTN; PAM sequence: TTG
gaaaaccagattcatttcac

SEQ ID NO: 384225 - DNA, 20 bp, Artificial Sequence
  Description of Artificial Sequence: Synthetic oligonucleotide
  Target: LAMA2; (+) strand; PAM type: YTN; PAM sequence: TTC
atttcacattgttataaaat

SEQ ID NO: 384226 - DNA, 20 bp, Artificial Sequence
  Description of Artificial Sequence: Synthetic oligonucleotide
  Target: LAMA2; (+) strand; PAM type: YTN; PAM sequence: TTT
cacattgttataaaatctgt

SEQ ID NO: 384227 - DNA, 20 bp, Artificial Sequence
  Description of Artificial Sequence: Synthetic oligonucleotide
  Target: LAMA2; (+) strand; PAM type: YTN; PAM sequence: TTC
acattgttataaaatctgta

SEQ ID NO: 384228 - DNA, 20 bp, Artificial Sequence
  Description of Artificial Sequence: Synthetic oligonucleotide
  Target: LAMA2; (+) strand; PAM type: YTN; PAM sequence: TTG
ttataaaatctgtaaatgtc

SEQ ID NO: 384229 - DNA, 20 bp, Artificial Sequence
  Description of Artificial Sequence: Synthetic oligonucleotide
  Target: LAMA2; (+) strand; PAM type: YTN; PAM sequence: TTA
taaaatctgtaaatgtcaca

SEQ ID NO: 384230 - DNA, 20 bp, Artificial Sequence
  Description of Artificial Sequence: Synthetic oligonucleotide
  Target: LAMA2; (+) strand; PAM type: YTN; PAM sequence: CTG
taaatgtcacaatataattt

SEQ ID NO: 384231 - DNA, 20 bp, Artificial Sequence
  Description of Artificial Sequence: Synthetic oligonucleotide
  Target: LAMA2; (+) strand; PAM type: YTN; PAM sequence: TTT
caaatataacaccaaaaatg

SEQ ID NO: 384232 - DNA, 20 bp, Artificial Sequence
  Description of Artificial Sequence: Synthetic oligonucleotide
  Target: LAMA2; (+) strand; PAM type: YTN; PAM sequence: TTC
aaatataacaccaaaaatgt

SEQ ID NO: 384233 - DNA, 20 bp, Artificial Sequence
  Description of Artificial Sequence: Synthetic oligonucleotide
  Target: LAMA2; (+) strand; PAM type: YTN; PAM sequence: CTA
aaattcactgtggcaatgtc

SEQ ID NO: 384234 - DNA, 20 bp, Artificial Sequence
  Description of Artificial Sequence: Synthetic oligonucleotide
  Target: LAMA2; (+) strand; PAM type: YTN; PAM sequence: TTC
actgtggcaatgtcatagtt

SEQ ID NO: 384235 - DNA, 20 bp, Artificial Sequence
  Description of Artificial Sequence: Synthetic oligonucleotide
  Target: LAMA2; (+) strand; PAM type: YTN; PAM sequence: CTG
tggcaatgtcatagtttcac

SEQ ID NO: 384236 - DNA, 20 bp, Artificial Sequence
  Description of Artificial Sequence: Synthetic oligonucleotide
  Target: LAMA2; (+) strand; PAM type: YTN; PAM sequence: TTT
cactgcaagaaatagcataa

SEQ ID NO: 384237 - DNA, 20 bp, Artificial Sequence
  Description of Artificial Sequence: Synthetic oligonucleotide
  Target: LAMA2; (+) strand; PAM type: YTN; PAM sequence: TTC
actgcaagaaatagcataaa

SEQ ID NO: 384238 - DNA, 20 bp, Artificial Sequence
  Description of Artificial Sequence: Synthetic oligonucleotide
  Target: LAMA2; (+) strand; PAM type: YTN; PAM sequence: CTG
caagaaatagcataaactct

SEQ ID NO: 384239 - DNA, 20 bp, Artificial Sequence
  Description of Artificial Sequence: Synthetic oligonucleotide
  Target: LAMA2; (+) strand; PAM type: YTN; PAM sequence: CTC
tcaaaaagagttaatagaag

SEQ ID NO: 384240 - DNA, 20 bp, Artificial Sequence
  Description of Artificial Sequence: Synthetic oligonucleotide
  Target: LAMA2; (+) strand; PAM type: YTN; PAM sequence: CTC
aaaaagagttaatagaagtt

SEQ ID NO: 384241 - DNA, 20 bp, Artificial Sequence
  Description of Artificial Sequence: Synthetic oligonucleotide
  Target: LAMA2; (+) strand; PAM type: YTN; PAM sequence: TTA
atagaagttttaaacaaaca

SEQ ID NO: 384242 - DNA, 20 bp, Artificial Sequence
  Description of Artificial Sequence: Synthetic oligonucleotide
  Target: LAMA2; (+) strand; PAM type: YTN; PAM sequence: TTT
taaacaaacattaattccat

SEQ ID NO: 384243 - DNA, 20 bp, Artificial Sequence
  Description of Artificial Sequence: Synthetic oligonucleotide
  Target: LAMA2; (+) strand; PAM type: YTN; PAM sequence: TTT
aaacaaacattaattccatg

SEQ ID NO: 384244 - DNA, 20 bp, Artificial Sequence
  Description of Artificial Sequence: Synthetic oligonucleotide
  Target: LAMA2; (+) strand; PAM type: YTN; PAM sequence: TTA
aacaaacattaattccatgg

SEQ ID NO: 384245 - DNA, 20 bp, Artificial Sequence
  Description of Artificial Sequence: Synthetic oligonucleotide
  Target: LAMA2; (+) strand; PAM type: YTN; PAM sequence: TTA
attccatggcaatatctgtg

SEQ ID NO: 384246 - DNA, 20 bp, Artificial Sequence
  Description of Artificial Sequence: Synthetic oligonucleotide
  Target: LAMA2; (+) strand; PAM type: YTN; PAM sequence: TTC
catggcaatatctgtggtgg

SEQ ID NO: 384247 - DNA, 20 bp, Artificial Sequence
  Description of Artificial Sequence: Synthetic oligonucleotide
  Target: LAMA2; (+) strand; PAM type: YTN; PAM sequence: CTG
tggtggaaatgacgtcagct

SEQ ID NO: 384248 - DNA, 20 bp, Artificial Sequence
  Description of Artificial Sequence: Synthetic oligonucleotide
  Target: LAMA2; (+) strand; PAM type: YTN; PAM sequence: CTA
ttgtttgttgtgaattgcca

SEQ ID NO: 384249 - DNA, 20 bp, Artificial Sequence
  Description of Artificial Sequence: Synthetic oligonucleotide
  Target: LAMA2; (+) strand; PAM type: YTN; PAM sequence: TTG
tttgttgtgaattgccacac

SEQ ID NO: 384250 - DNA, 20 bp, Artificial Sequence
  Description of Artificial Sequence: Synthetic oligonucleotide
  Target: LAMA2; (+) strand; PAM type: YTN; PAM sequence: TTT
gttgtgaattgccacacatt

SEQ ID NO: 384251 - DNA, 20 bp, Artificial Sequence
  Description of Artificial Sequence: Synthetic oligonucleotide
  Target: LAMA2; (+) strand; PAM type: YTN; PAM sequence: TTG
ttgtgaattgccacacattc

SEQ ID NO: 384252 - DNA, 20 bp, Artificial Sequence
  Description of Artificial Sequence: Synthetic oligonucleotide
  Target: LAMA2; (+) strand; PAM type: YTN; PAM sequence: TTG
tgaattgccacacattccct

SEQ ID NO: 384253 - DNA, 20 bp, Artificial Sequence
  Description of Artificial Sequence: Synthetic oligonucleotide
  Target: LAMA2; (+) strand; PAM type: YTN; PAM sequence: TTG
ccacacattccctaccaaca

SEQ ID NO: 384254 - DNA, 20 bp, Artificial Sequence
  Description of Artificial Sequence: Synthetic oligonucleotide
  Target: LAMA2; (+) strand; PAM type: YTN; PAM sequence: TTC
cctaccaacaattgtctggc

SEQ ID NO: 384255 - DNA, 20 bp, Artificial Sequence
  Description of Artificial Sequence: Synthetic oligonucleotide
  Target: LAMA2; (+) strand; PAM type: YTN; PAM sequence: CTA
ccaacaattgtctggccatt

SEQ ID NO: 384256 - DNA, 20 bp, Artificial Sequence
  Description of Artificial Sequence: Synthetic oligonucleotide
  Target: LAMA2; (+) strand; PAM type: YTN; PAM sequence: TTG
tctggccattagaagacaca

SEQ ID NO: 384257 - DNA, 20 bp, Artificial Sequence
  Description of Artificial Sequence: Synthetic oligonucleotide
  Target: LAMA2; (+) strand; PAM type: YTN; PAM sequence: CTG
gccattagaagacacatgaa

SEQ ID NO: 384258 - DNA, 20 bp, Artificial Sequence
  Description of Artificial Sequence: Synthetic oligonucleotide
  Target: LAMA2; (+) strand; PAM type: YTN; PAM sequence: TTA
gaagacacatgaaacataaa

SEQ ID NO: 384259 - DNA, 20 bp, Artificial Sequence
  Description of Artificial Sequence: Synthetic oligonucleotide
  Target: LAMA2; (+) strand; PAM type: YTN; PAM sequence: TTC
ttcttgattgactaaatgaa

SEQ ID NO: 384260 - DNA, 20 bp, Artificial Sequence
  Description of Artificial Sequence: Synthetic oligonucleotide
  Target: LAMA2; (+) strand; PAM type: YTN; PAM sequence: CTT
cttgattgactaaatgaagc

SEQ ID NO: 384261 - DNA, 20 bp, Artificial Sequence
  Description of Artificial Sequence: Synthetic oligonucleotide
  Target: LAMA2; (+) strand; PAM type: YTN; PAM sequence: TTC
ttgattgactaaatgaagca

SEQ ID NO: 384262 - DNA, 20 bp, Artificial Sequence
  Description of Artificial Sequence: Synthetic oligonucleotide
  Target: LAMA2; (+) strand; PAM type: YTN; PAM sequence: CTT
gattgactaaatgaagcaga

SEQ ID NO: 384263 - DNA, 20 bp, Artificial Sequence
  Description of Artificial Sequence: Synthetic oligonucleotide
  Target: LAMA2; (+) strand; PAM type: YTN; PAM sequence: TTG
attgactaaatgaagcagag

SEQ ID NO: 384264 - DNA, 20 bp, Artificial Sequence
  Description of Artificial Sequence: Synthetic oligonucleotide
  Target: LAMA2; (+) strand; PAM type: YTN; PAM sequence: TTG
actaaatgaagcagagccca

SEQ ID NO: 384265 - DNA, 20 bp, Artificial Sequence
  Description of Artificial Sequence: Synthetic oligonucleotide
  Target: LAMA2; (+) strand; PAM type: YTN; PAM sequence: CTA
aatgaagcagagcccagtct

SEQ ID NO: 384266 - DNA, 20 bp, Artificial Sequence
  Description of Artificial Sequence: Synthetic oligonucleotide
  Target: LAMA2; (+) strand; PAM type: YTN; PAM sequence: CTA
tgggatatcatccaagttca

SEQ ID NO: 384267 - DNA, 20 bp, Artificial Sequence
  Description of Artificial Sequence: Synthetic oligonucleotide
  Target: LAMA2; (+) strand; PAM type: YTN; PAM sequence: TTC
aagctggcggcttcgtggct

SEQ ID NO: 384268 - DNA, 20 bp, Artificial Sequence
  Description of Artificial Sequence: Synthetic oligonucleotide
  Target: LAMA2; (+) strand; PAM type: YTN; PAM sequence: CTG
gcggcttcgtggctccagct

SEQ ID NO: 384269 - DNA, 20 bp, Artificial Sequence
  Description of Artificial Sequence: Synthetic oligonucleotide
  Target: LAMA2; (+) strand; PAM type: YTN; PAM sequence: CTT
cgtggctccagctgagatta

SEQ ID NO: 384270 - DNA, 20 bp, Artificial Sequence
  Description of Artificial Sequence: Synthetic oligonucleotide
  Target: LAMA2; (+) strand; PAM type: YTN; PAM sequence: TTC
gtggctccagctgagattat

SEQ ID NO: 384271 - DNA, 20 bp, Artificial Sequence
  Description of Artificial Sequence: Synthetic oligonucleotide
  Target: LAMA2; (+) strand; PAM type: YTN; PAM sequence: CTC
cagctgagattatcaggaag

SEQ ID NO: 384272 - DNA, 20 bp, Artificial Sequence
  Description of Artificial Sequence: Synthetic oligonucleotide
  Target: LAMA2; (+) strand; PAM type: YTN; PAM sequence: CTG
agattatcaggaagtcaatt

SEQ ID NO: 384273 - DNA, 20 bp, Artificial Sequence
  Description of Artificial Sequence: Synthetic oligonucleotide
  Target: LAMA2; (+) strand; PAM type: YTN; PAM sequence: TTA
tcaggaagtcaattcactaa

SEQ ID NO: 384274 - DNA, 20 bp, Artificial Sequence
  Description of Artificial Sequence: Synthetic oligonucleotide
  Target: LAMA2; (+) strand; PAM type: YTN; PAM sequence: TTC
actaacatgtccatctagtt

SEQ ID NO: 384275 - DNA, 20 bp, Artificial Sequence
  Description of Artificial Sequence: Synthetic oligonucleotide
  Target: LAMA2; (+) strand; PAM type: YTN; PAM sequence: CTA
acatgtccatctagtttgta

SEQ ID NO: 384276 - DNA, 20 bp, Artificial Sequence
  Description of Artificial Sequence: Synthetic oligonucleotide
  Target: LAMA2; (+) strand; PAM type: YTN; PAM sequence: CTA
gtttgtaactgacttttttg

SEQ ID NO: 384277 - DNA, 20 bp, Artificial Sequence
  Description of Artificial Sequence: Synthetic oligonucleotide
  Target: LAMA2; (+) strand; PAM type: YTN; PAM sequence: TTT
gtaactgacttttttgtttc

SEQ ID NO: 384278 - DNA, 20 bp, Artificial Sequence
  Description of Artificial Sequence: Synthetic oligonucleotide
  Target: LAMA2; (+) strand; PAM type: YTN; PAM sequence: TTG
taactgacttttttgtttct

SEQ ID NO: 384279 - DNA, 20 bp, Artificial Sequence
  Description of Artificial Sequence: Synthetic oligonucleotide
  Target: LAMA2; (+) strand; PAM type: YTN; PAM sequence: CTG
acttttttgtttctcaactt

SEQ ID NO: 384280 - DNA, 20 bp, Artificial Sequence
  Description of Artificial Sequence: Synthetic oligonucleotide
  Target: LAMA2; (+) strand; PAM type: YTN; PAM sequence: CTT
ttttgtttctcaacttttct

SEQ ID NO: 384281 - DNA, 20 bp, Artificial Sequence
  Description of Artificial Sequence: Synthetic oligonucleotide
  Target: LAMA2; (+) strand; PAM type: YTN; PAM sequence: TTT
tttgtttctcaacttttctt

SEQ ID NO: 384282 - DNA, 20 bp, Artificial Sequence
  Description of Artificial Sequence: Synthetic oligonucleotide
  Target: LAMA2; (+) strand; PAM type: YTN; PAM sequence: TTT
ttgtttctcaacttttcttt

SEQ ID NO: 384283 - DNA, 20 bp, Artificial Sequence
  Description of Artificial Sequence: Synthetic oligonucleotide
  Target: LAMA2; (+) strand; PAM type: YTN; PAM sequence: TTT
tgtttctcaacttttctttc

SEQ ID NO: 384284 - DNA, 20 bp, Artificial Sequence
  Description of Artificial Sequence: Synthetic oligonucleotide
  Target: LAMA2; (+) strand; PAM type: YTN; PAM sequence: TTT
gtttctcaacttttctttcg

SEQ ID NO: 384285 - DNA, 20 bp, Artificial Sequence
  Description of Artificial Sequence: Synthetic oligonucleotide
  Target: LAMA2; (+) strand; PAM type: YTN; PAM sequence: TTG
tttctcaacttttctttcga

SEQ ID NO: 384286 - DNA, 20 bp, Artificial Sequence
  Description of Artificial Sequence: Synthetic oligonucleotide
  Target: LAMA2; (+) strand; PAM type: YTN; PAM sequence: TTT
ctcaacttttctttcgatat

SEQ ID NO: 384287 - DNA, 20 bp, Artificial Sequence
  Description of Artificial Sequence: Synthetic oligonucleotide
  Target: LAMA2; (+) strand; PAM type: YTN; PAM sequence: TTC
tcaacttttctttcgatatt

SEQ ID NO: 384288 - DNA, 20 bp, Artificial Sequence
  Description of Artificial Sequence: Synthetic oligonucleotide
  Target: LAMA2; (+) strand; PAM type: YTN; PAM sequence: CTC
aacttttctttcgatattgt

SEQ ID NO: 384289 - DNA, 20 bp, Artificial Sequence
  Description of Artificial Sequence: Synthetic oligonucleotide
  Target: LAMA2; (+) strand; PAM type: YTN; PAM sequence: CTT
ttctttcgatattgtttata

SEQ ID NO: 384290 - DNA, 20 bp, Artificial Sequence
  Description of Artificial Sequence: Synthetic oligonucleotide
  Target: LAMA2; (+) strand; PAM type: YTN; PAM sequence: TTT
tctttcgatattgtttataa

SEQ ID NO: 384291 - DNA, 20 bp, Artificial Sequence
  Description of Artificial Sequence: Synthetic oligonucleotide
  Target: LAMA2; (+) strand; PAM type: YTN; PAM sequence: TTT
ctttcgatattgtttataag

SEQ ID NO: 384292 - DNA, 20 bp, Artificial Sequence
  Description of Artificial Sequence: Synthetic oligonucleotide
  Target: LAMA2; (+) strand; PAM type: YTN; PAM sequence: TTC
tttcgatattgtttataaga

SEQ ID NO: 384293 - DNA, 20 bp, Artificial Sequence
  Description of Artificial Sequence: Synthetic oligonucleotide
  Target: LAMA2; (+) strand; PAM type: YTN; PAM sequence: CTT
tcgatattgtttataagatg

SEQ ID NO: 384294 - DNA, 20 bp, Artificial Sequence
  Description of Artificial Sequence: Synthetic oligonucleotide
  Target: LAMA2; (+) strand; PAM type: YTN; PAM sequence: TTT
cgatattgtttataagatgt

SEQ ID NO: 384295 - DNA, 20 bp, Artificial Sequence
  Description of Artificial Sequence: Synthetic oligonucleotide
  Target: LAMA2; (+) strand; PAM type: YTN; PAM sequence: TTC
gatattgtttataagatgta

SEQ ID NO: 384296 - DNA, 20 bp, Artificial Sequence
  Description of Artificial Sequence: Synthetic oligonucleotide
  Target: LAMA2; (+) strand; PAM type: YTN; PAM sequence: TTG
tttataagatgtaagtcact

SEQ ID NO: 384297 - DNA, 20 bp, Artificial Sequence
  Description of Artificial Sequence: Synthetic oligonucleotide
  Target: LAMA2; (+) strand; PAM type: YTN; PAM sequence: TTT
ataagatgtaagtcactatt

SEQ ID NO: 384298 - DNA, 20 bp, Artificial Sequence
  Description of Artificial Sequence: Synthetic oligonucleotide
  Target: LAMA2; (+) strand; PAM type: YTN; PAM sequence: TTA
taagatgtaagtcactattt

SEQ ID NO: 384299 - DNA, 20 bp, Artificial Sequence
  Description of Artificial Sequence: Synthetic oligonucleotide
  Target: LAMA2; (+) strand; PAM type: YTN; PAM sequence: CTA
ttttgaccactccaaatcct

SEQ ID NO: 384300 - DNA, 20 bp, Artificial Sequence
  Description of Artificial Sequence: Synthetic oligonucleotide
  Target: LAMA2; (+) strand; PAM type: YTN; PAM sequence: TTT
tgaccactccaaatcctgtc

SEQ ID NO: 384301 - DNA, 20 bp, Artificial Sequence
  Description of Artificial Sequence: Synthetic oligonucleotide
  Target: LAMA2; (+) strand; PAM type: YTN; PAM sequence: TTT
gaccactccaaatcctgtct

SEQ ID NO: 384302 - DNA, 20 bp, Artificial Sequence
  Description of Artificial Sequence: Synthetic oligonucleotide
  Target: LAMA2; (+) strand; PAM type: YTN; PAM sequence: TTG
accactccaaatcctgtctt

SEQ ID NO: 384303 - DNA, 20 bp, Artificial Sequence
  Description of Artificial Sequence: Synthetic oligonucleotide
  Target: LAMA2; (+) strand; PAM type: YTN; PAM sequence: CTC
caaatcctgtcttataaaat

SEQ ID NO: 384304 - DNA, 20 bp, Artificial Sequence
  Description of Artificial Sequence: Synthetic oligonucleotide
  Target: LAMA2; (+) strand; PAM type: YTN; PAM sequence: CTG
tcttataaaatccagctaaa

SEQ ID NO: 384305 - DNA, 20 bp, Artificial Sequence
  Description of Artificial Sequence: Synthetic oligonucleotide
  Target: LAMA2; (+) strand; PAM type: YTN; PAM sequence: CTT
ataaaatccagctaaaattc

SEQ ID NO: 384306 - DNA, 20 bp, Artificial Sequence
  Description of Artificial Sequence: Synthetic oligonucleotide
  Target: LAMA2; (+) strand; PAM type: YTN; PAM sequence: TTA
taaaatccagctaaaattca

SEQ ID NO: 384307 - DNA, 20 bp, Artificial Sequence
  Description of Artificial Sequence: Synthetic oligonucleotide
  Target: LAMA2; (+) strand; PAM type: YTN; PAM sequence: CTA
aaattcaattccaaattccc

SEQ ID NO: 384308 - DNA, 20 bp, Artificial Sequence
  Description of Artificial Sequence: Synthetic oligonucleotide
  Target: LAMA2; (+) strand; PAM type: YTN; PAM sequence: TTC
aattccaaattcccttcttc

SEQ ID NO: 384309 - DNA, 20 bp, Artificial Sequence
  Description of Artificial Sequence: Synthetic oligonucleotide
  Target: LAMA2; (+) strand; PAM type: YTN; PAM sequence: TTC
caaattcccttcttcctttt

SEQ ID NO: 384310 - DNA, 20 bp, Artificial Sequence
  Description of Artificial Sequence: Synthetic oligonucleotide
  Target: LAMA2; (+) strand; PAM type: YTN; PAM sequence: TTC
ccttcttcctttttctcaac

SEQ ID NO: 384311 - DNA, 20 bp, Artificial Sequence
  Description of Artificial Sequence: Synthetic oligonucleotide
  Target: LAMA2; (+) strand; PAM type: YTN; PAM sequence: CTT
cttcctttttctcaactctc

SEQ ID NO: 384312 - DNA, 20 bp, Artificial Sequence
  Description of Artificial Sequence: Synthetic oligonucleotide
  Target: LAMA2; (+) strand; PAM type: YTN; PAM sequence: TTC
ttcctttttctcaactctca

SEQ ID NO: 384313 - DNA, 20 bp, Artificial Sequence
  Description of Artificial Sequence: Synthetic oligonucleotide
  Target: LAMA2; (+) strand; PAM type: YTN; PAM sequence: CTT
cctttttctcaactctcaaa

SEQ ID NO: 384314 - DNA, 20 bp, Artificial Sequence
  Description of Artificial Sequence: Synthetic oligonucleotide
  Target: LAMA2; (+) strand; PAM type: YTN; PAM sequence: TTC
ctttttctcaactctcaaat

SEQ ID NO: 384315 - DNA, 20 bp, Artificial Sequence
  Description of Artificial Sequence: Synthetic oligonucleotide
  Target: LAMA2; (+) strand; PAM type: YTN; PAM sequence: CTT
tttctcaactctcaaatgca

SEQ ID NO: 384316 - DNA, 20 bp, Artificial Sequence
  Description of Artificial Sequence: Synthetic oligonucleotide
  Target: LAMA2; (+) strand; PAM type: YTN; PAM sequence: TTT
ttctcaactctcaaatgcaa

SEQ ID NO: 384317 - DNA, 20 bp, Artificial Sequence
  Description of Artificial Sequence: Synthetic oligonucleotide
  Target: LAMA2; (+) strand; PAM type: YTN; PAM sequence: TTT
tctcaactctcaaatgcaag

SEQ ID NO: 384318 - DNA, 20 bp, Artificial Sequence
  Description of Artificial Sequence: Synthetic oligonucleotide
  Target: LAMA2; (+) strand; PAM type: YTN; PAM sequence: TTT
ctcaactctcaaatgcaagg

SEQ ID NO: 384319 - DNA, 20 bp, Artificial Sequence
  Description of Artificial Sequence: Synthetic oligonucleotide
  Target: LAMA2; (+) strand; PAM type: YTN; PAM sequence: TTC
tcaactctcaaatgcaagga

SEQ ID NO: 384320 - DNA, 20 bp, Artificial Sequence
  Description of Artificial Sequence: Synthetic oligonucleotide
  Target: LAMA2; (+) strand; PAM type: YTN; PAM sequence: CTC
aactctcaaatgcaaggatc

SEQ ID NO: 384321 - DNA, 20 bp, Artificial Sequence
  Description of Artificial Sequence: Synthetic oligonucleotide
  Target: LAMA2; (+) strand; PAM type: YTN; PAM sequence: CTC
tcaaatgcaaggatcgcatt

SEQ ID NO: 384322 - DNA, 20 bp, Artificial Sequence
  Description of Artificial Sequence: Synthetic oligonucleotide
  Target: LAMA2; (+) strand; PAM type: YTN; PAM sequence: CTC
aaatgcaaggatcgcattcc

SEQ ID NO: 384323 - DNA, 20 bp, Artificial Sequence
  Description of Artificial Sequence: Synthetic oligonucleotide
  Target: LAMA2; (+) strand; PAM type: YTN; PAM sequence: TTC
ccacaagataacattcaatg

SEQ ID NO: 384324 - DNA, 20 bp, Artificial Sequence
  Description of Artificial Sequence: Synthetic oligonucleotide
  Target: LAMA2; (+) strand; PAM type: YTN; PAM sequence: TTC
aatgttgcattcttgctgcc

SEQ ID NO: 384325 - DNA, 20 bp, Artificial Sequence
  Description of Artificial Sequence: Synthetic oligonucleotide
  Target: LAMA2; (+) strand; PAM type: YTN; PAM sequence: TTG
cattcttgctgccatgttta

SEQ ID NO: 384326 - DNA, 20 bp, Artificial Sequence
  Description of Artificial Sequence: Synthetic oligonucleotide
  Target: LAMA2; (+) strand; PAM type: YTN; PAM sequence: TTC
ttgctgccatgtttattttt

SEQ ID NO: 384327 - DNA, 20 bp, Artificial Sequence
  Description of Artificial Sequence: Synthetic oligonucleotide
  Target: LAMA2; (+) strand; PAM type: YTN; PAM sequence: CTT
gctgccatgtttattttttg

SEQ ID NO: 384328 - DNA, 20 bp, Artificial Sequence
  Description of Artificial Sequence: Synthetic oligonucleotide
  Target: LAMA2; (+) strand; PAM type: YTN; PAM sequence: TTG
ctgccatgtttattttttgt

SEQ ID NO: 384329 - DNA, 20 bp, Artificial Sequence
  Description of Artificial Sequence: Synthetic oligonucleotide
  Target: LAMA2; (+) strand; PAM type: YTN; PAM sequence: CTG
ccatgtttattttttgtcag

SEQ ID NO: 384330 - DNA, 20 bp, Artificial Sequence
  Description of Artificial Sequence: Synthetic oligonucleotide
  Target: LAMA2; (+) strand; PAM type: YTN; PAM sequence: TTT
attttttgtcaggtggtttt

SEQ ID NO: 384331 - DNA, 20 bp, Artificial Sequence
  Description of Artificial Sequence: Synthetic oligonucleotide
  Target: LAMA2; (+) strand; PAM type: YTN; PAM sequence: TTA
ttttttgtcaggtggttttt

SEQ ID NO: 384332 - DNA, 20 bp, Artificial Sequence
  Description of Artificial Sequence: Synthetic oligonucleotide
  Target: LAMA2; (+) strand; PAM type: YTN; PAM sequence: TTT
tttgtcaggtggttttttta

SEQ ID NO: 384333 - DNA, 20 bp, Artificial Sequence
  Description of Artificial Sequence: Synthetic oligonucleotide
  Target: LAMA2; (+) strand; PAM type: YTN; PAM sequence: TTT
ttgtcaggtggtttttttaa

SEQ ID NO: 384334 - DNA, 20 bp, Artificial Sequence
  Description of Artificial Sequence: Synthetic oligonucleotide
  Target: LAMA2; (+) strand; PAM type: YTN; PAM sequence: TTT
tgtcaggtggtttttttaaa

SEQ ID NO: 384335 - DNA, 20 bp, Artificial Sequence
  Description of Artificial Sequence: Synthetic oligonucleotide
  Target: LAMA2; (+) strand; PAM type: YTN; PAM sequence: TTT
gtcaggtggtttttttaaat

SEQ ID NO: 384336 - DNA, 20 bp, Artificial Sequence
  Description of Artificial Sequence: Synthetic oligonucleotide
  Target: LAMA2; (+) strand; PAM type: YTN; PAM sequence: TTG
tcaggtggtttttttaaatt

SEQ ID NO: 384337 - DNA, 20 bp, Artificial Sequence
  Description of Artificial Sequence: Synthetic oligonucleotide
  Target: LAMA2; (+) strand; PAM type: YTN; PAM sequence: TTT
ttttaaattattattttccc

SEQ ID NO: 384338 - DNA, 20 bp, Artificial Sequence
  Description of Artificial Sequence: Synthetic oligonucleotide
  Target: LAMA2; (+) strand; PAM type: YTN; PAM sequence: TTT
tttaaattattattttccca

SEQ ID NO: 384339 - DNA, 20 bp, Artificial Sequence
  Description of Artificial Sequence: Synthetic oligonucleotide
  Target: LAMA2; (+) strand; PAM type: YTN; PAM sequence: TTT
ttaaattattattttcccaa

SEQ ID NO: 384340 - DNA, 20 bp, Artificial Sequence
  Description of Artificial Sequence: Synthetic oligonucleotide
  Target: LAMA2; (+) strand; PAM type: YTN; PAM sequence: TTT
taaattattattttcccaaa

SEQ ID NO: 384341 - DNA, 20 bp, Artificial Sequence
  Description of Artificial Sequence: Synthetic oligonucleotide
  Target: LAMA2; (+) strand; PAM type: YTN; PAM sequence: TTT
aaattattattttcccaaag

SEQ ID NO: 384342 - DNA, 20 bp, Artificial Sequence
  Description of Artificial Sequence: Synthetic oligonucleotide
  Target: LAMA2; (+) strand; PAM type: YTN; PAM sequence: TTA
aattattattttcccaaagt

SEQ ID NO: 384343 - DNA, 20 bp, Artificial Sequence
  Description of Artificial Sequence: Synthetic oligonucleotide
  Target: LAMA2; (+) strand; PAM type: YTN; PAM sequence: TTA
ttattttcccaaagtctaag

SEQ ID NO: 384344 - DNA, 20 bp, Artificial Sequence
  Description of Artificial Sequence: Synthetic oligonucleotide
  Target: LAMA2; (+) strand; PAM type: YTN; PAM sequence: TTA
ttttcccaaagtctaagtaa

SEQ ID NO: 384345 - DNA, 20 bp, Artificial Sequence
  Description of Artificial Sequence: Synthetic oligonucleotide
  Target: LAMA2; (+) strand; PAM type: YTN; PAM sequence: TTT
tcccaaagtctaagtaaatt

SEQ ID NO: 384346 - DNA, 20 bp, Artificial Sequence
  Description of Artificial Sequence: Synthetic oligonucleotide
  Target: LAMA2; (+) strand; PAM type: YTN; PAM sequence: TTT
cccaaagtctaagtaaattt

SEQ ID NO: 384347 - DNA, 20 bp, Artificial Sequence
  Description of Artificial Sequence: Synthetic oligonucleotide
  Target: LAMA2; (+) strand; PAM type: YTN; PAM sequence: TTC
ccaaagtctaagtaaatttc

SEQ ID NO: 384348 - DNA, 20 bp, Artificial Sequence
  Description of Artificial Sequence: Synthetic oligonucleotide
  Target: LAMA2; (+) strand; PAM type: YTN; PAM sequence: CTA
agtaaatttctagaaggtag

SEQ ID NO: 384349 - DNA, 20 bp, Artificial Sequence
  Description of Artificial Sequence: Synthetic oligonucleotide
  Target: LAMA2; (+) strand; PAM type: YTN; PAM sequence: TTT
ctagaaggtaggatgttctt

SEQ ID NO: 384350 - DNA, 20 bp, Artificial Sequence
  Description of Artificial Sequence: Synthetic oligonucleotide
  Target: LAMA2; (+) strand; PAM type: YTN; PAM sequence: TTC
tagaaggtaggatgttcttt

SEQ ID NO: 384351 - DNA, 20 bp, Artificial Sequence
  Description of Artificial Sequence: Synthetic oligonucleotide
  Target: LAMA2; (+) strand; PAM type: YTN; PAM sequence: CTA
gaaggtaggatgttctttca

SEQ ID NO: 384352 - DNA, 20 bp, Artificial Sequence
  Description of Artificial Sequence: Synthetic oligonucleotide
  Target: LAMA2; (+) strand; PAM type: YTN; PAM sequence: TTC
tttcattgcctgtttcagtg

SEQ ID NO: 384353 - DNA, 20 bp, Artificial Sequence
  Description of Artificial Sequence: Synthetic oligonucleotide
  Target: LAMA2; (+) strand; PAM type: YTN; PAM sequence: CTT
tcattgcctgtttcagtgca

SEQ ID NO: 384354 - DNA, 20 bp, Artificial Sequence
  Description of Artificial Sequence: Synthetic oligonucleotide
  Target: LAMA2; (+) strand; PAM type: YTN; PAM sequence: TTT
cattgcctgtttcagtgcat

SEQ ID NO: 384355 - DNA, 20 bp, Artificial Sequence
  Description of Artificial Sequence: Synthetic oligonucleotide
  Target: LAMA2; (+) strand; PAM type: YTN; PAM sequence: TTC
attgcctgtttcagtgcatt

SEQ ID NO: 384356 - DNA, 20 bp, Artificial Sequence
  Description of Artificial Sequence: Synthetic oligonucleotide
  Target: LAMA2; (+) strand; PAM type: YTN; PAM sequence: TTG
cctgtttcagtgcattccat

SEQ ID NO: 384357 - DNA, 20 bp, Artificial Sequence
  Description of Artificial Sequence: Synthetic oligonucleotide
  Target: LAMA2; (+) strand; PAM type: YTN; PAM sequence: CTG
tttcagtgcattccatgtag

SEQ ID NO: 384358 - DNA, 20 bp, Artificial Sequence
  Description of Artificial Sequence: Synthetic oligonucleotide
  Target: LAMA2; (+) strand; PAM type: YTN; PAM sequence: TTT
cagtgcattccatgtagctc

SEQ ID NO: 384359 - DNA, 20 bp, Artificial Sequence
  Description of Artificial Sequence: Synthetic oligonucleotide
  Target: LAMA2; (+) strand; PAM type: YTN; PAM sequence: TTC
agtgcattccatgtagctct

SEQ ID NO: 384360 - DNA, 20 bp, Artificial Sequence
  Description of Artificial Sequence: Synthetic oligonucleotide
  Target: LAMA2; (+) strand; PAM type: YTN; PAM sequence: TTC
catgtagctcttcctaactc

SEQ ID NO: 384361 - DNA, 20 bp, Artificial Sequence
  Description of Artificial Sequence: Synthetic oligonucleotide
  Target: LAMA2; (+) strand; PAM type: YTN; PAM sequence: CTC
ttcctaactccttattgcat

SEQ ID NO: 384362 - DNA, 20 bp, Artificial Sequence
  Description of Artificial Sequence: Synthetic oligonucleotide
  Target: LAMA2; (+) strand; PAM type: YTN; PAM sequence: CTT
cctaactccttattgcataa

SEQ ID NO: 384363 - DNA, 20 bp, Artificial Sequence
  Description of Artificial Sequence: Synthetic oligonucleotide
  Target: LAMA2; (+) strand; PAM type: YTN; PAM sequence: TTC
ctaactccttattgcataat

SEQ ID NO: 384364 - DNA, 20 bp, Artificial Sequence
  Description of Artificial Sequence: Synthetic oligonucleotide
  Target: LAMA2; (+) strand; PAM type: YTN; PAM sequence: CTA
actccttattgcataattga

SEQ ID NO: 384365 - DNA, 20 bp, Artificial Sequence
  Description of Artificial Sequence: Synthetic oligonucleotide
  Target: LAMA2; (+) strand; PAM type: YTN; PAM sequence: CTC
cttattgcataattgattat

SEQ ID NO: 384366 - DNA, 20 bp, Artificial Sequence
  Description of Artificial Sequence: Synthetic oligonucleotide
  Target: LAMA2; (+) strand; PAM type: YTN; PAM sequence: CTT
attgcataattgattattgt

SEQ ID NO: 384367 - DNA, 20 bp, Artificial Sequence
  Description of Artificial Sequence: Synthetic oligonucleotide
  Target: LAMA2; (+) strand; PAM type: YTN; PAM sequence: TTA
ttgcataattgattattgtg

SEQ ID NO: 384368 - DNA, 20 bp, Artificial Sequence
  Description of Artificial Sequence: Synthetic oligonucleotide
  Target: LAMA2; (+) strand; PAM type: YTN; PAM sequence: TTG
cataattgattattgtgtta

SEQ ID NO: 384369 - DNA, 20 bp, Artificial Sequence
  Description of Artificial Sequence: Synthetic oligonucleotide
  Target: LAMA2; (+) strand; PAM type: YTN; PAM sequence: TTG
attattgtgttaaatataat

SEQ ID NO: 384370 - DNA, 20 bp, Artificial Sequence
  Description of Artificial Sequence: Synthetic oligonucleotide
  Target: LAMA2; (+) strand; PAM type: YTN; PAM sequence: TTA
ttgtgttaaatataattctg

SEQ ID NO: 384371 - DNA, 20 bp, Artificial Sequence
  Description of Artificial Sequence: Synthetic oligonucleotide
  Target: LAMA2; (+) strand; PAM type: YTN; PAM sequence: TTG
tgttaaatataattctgctt

SEQ ID NO: 384372 - DNA, 20 bp, Artificial Sequence
  Description of Artificial Sequence: Synthetic oligonucleotide
  Target: LAMA2; (+) strand; PAM type: YTN; PAM sequence: TTA
aatataattctgcttcatga

SEQ ID NO: 384373 - DNA, 20 bp, Artificial Sequence
  Description of Artificial Sequence: Synthetic oligonucleotide
  Target: LAMA2; (+) strand; PAM type: YTN; PAM sequence: TTC
tgcttcatgaaaattttaat

SEQ ID NO: 384374 - DNA, 20 bp, Artificial Sequence
  Description of Artificial Sequence: Synthetic oligonucleotide
  Target: LAMA2; (+) strand; PAM type: YTN; PAM sequence: CTG
cttcatgaaaattttaattt

SEQ ID NO: 384375 - DNA, 20 bp, Artificial Sequence
  Description of Artificial Sequence: Synthetic oligonucleotide
  Target: LAMA2; (+) strand; PAM type: YTN; PAM sequence: CTT
catgaaaattttaatttgaa

SEQ ID NO: 384376 - DNA, 20 bp, Artificial Sequence
  Description of Artificial Sequence: Synthetic oligonucleotide
  Target: LAMA2; (+) strand; PAM type: YTN; PAM sequence: TTC
atgaaaattttaatttgaag

SEQ ID NO: 384377 - DNA, 20 bp, Artificial Sequence
  Description of Artificial Sequence: Synthetic oligonucleotide
  Target: LAMA2; (+) strand; PAM type: YTN; PAM sequence: TTT
taatttgaagctatttgcac

SEQ ID NO: 384378 - DNA, 20 bp, Artificial Sequence
  Description of Artificial Sequence: Synthetic oligonucleotide
  Target: LAMA2; (+) strand; PAM type: YTN; PAM sequence: TTT
aatttgaagctatttgcaca

SEQ ID NO: 384379 - DNA, 20 bp, Artificial Sequence
  Description of Artificial Sequence: Synthetic oligonucleotide
  Target: LAMA2; (+) strand; PAM type: YTN; PAM sequence: TTA
atttgaagctatttgcacac

SEQ ID NO: 384380 - DNA, 20 bp, Artificial Sequence
  Description of Artificial Sequence: Synthetic oligonucleotide
  Target: LAMA2; (+) strand; PAM type: YTN; PAM sequence: TTT
gaagctatttgcacactatt

SEQ ID NO: 384381 - DNA, 20 bp, Artificial Sequence
  Description of Artificial Sequence: Synthetic oligonucleotide
  Target: LAMA2; (+) strand; PAM type: YTN; PAM sequence: TTG
aagctatttgcacactattc

SEQ ID NO: 384382 - DNA, 20 bp, Artificial Sequence
  Description of Artificial Sequence: Synthetic oligonucleotide
  Target: LAMA2; (+) strand; PAM type: YTN; PAM sequence: CTA
tttgcacactattctgaagc

SEQ ID NO: 384383 - DNA, 20 bp, Artificial Sequence
  Description of Artificial Sequence: Synthetic oligonucleotide
  Target: LAMA2; (+) strand; PAM type: YTN; PAM sequence: TTT
gcacactattctgaagctat

SEQ ID NO: 384384 - DNA, 20 bp, Artificial Sequence
  Description of Artificial Sequence: Synthetic oligonucleotide
  Target: LAMA2; (+) strand; PAM type: YTN; PAM sequence: TTG
cacactattctgaagctatt

SEQ ID NO: 384385 - DNA, 20 bp, Artificial Sequence
  Description of Artificial Sequence: Synthetic oligonucleotide
  Target: LAMA2; (+) strand; PAM type: YTN; PAM sequence: CTA
ttctgaagctattctcattt

SEQ ID NO: 384386 - DNA, 20 bp, Artificial Sequence
  Description of Artificial Sequence: Synthetic oligonucleotide
  Target: LAMA2; (+) strand; PAM type: YTN; PAM sequence: TTC
tgaagctattctcatttctt

SEQ ID NO: 384387 - DNA, 20 bp, Artificial Sequence
  Description of Artificial Sequence: Synthetic oligonucleotide
  Target: LAMA2; (+) strand; PAM type: YTN; PAM sequence: CTG
aagctattctcatttctttg

SEQ ID NO: 384388 - DNA, 20 bp, Artificial Sequence
  Description of Artificial Sequence: Synthetic oligonucleotide
  Target: LAMA2; (+) strand; PAM type: YTN; PAM sequence: CTA
ttctcatttctttgtggaaa

SEQ ID NO: 384389 - DNA, 20 bp, Artificial Sequence
  Description of Artificial Sequence: Synthetic oligonucleotide
  Target: LAMA2; (+) strand; PAM type: YTN; PAM sequence: TTC
tcatttctttgtggaaaggt

SEQ ID NO: 384390 - DNA, 20 bp, Artificial Sequence
  Description of Artificial Sequence: Synthetic oligonucleotide
  Target: LAMA2; (+) strand; PAM type: YTN; PAM sequence: CTC
atttctttgtggaaaggtgt

SEQ ID NO: 384391 - DNA, 20 bp, Artificial Sequence
  Description of Artificial Sequence: Synthetic oligonucleotide
  Target: LAMA2; (+) strand; PAM type: YTN; PAM sequence: TTT
ctttgtggaaaggtgttaaa

SEQ ID NO: 384392 - DNA, 20 bp, Artificial Sequence
  Description of Artificial Sequence: Synthetic oligonucleotide
  Target: LAMA2; (+) strand; PAM type: YTN; PAM sequence: TTC
tttgtggaaaggtgttaaag

SEQ ID NO: 384393 - DNA, 20 bp, Artificial Sequence
  Description of Artificial Sequence: Synthetic oligonucleotide
  Target: LAMA2; (+) strand; PAM type: YTN; PAM sequence: CTT
tgtggaaaggtgttaaaggg

SEQ ID NO: 384394 - DNA, 20 bp, Artificial Sequence
  Description of Artificial Sequence: Synthetic oligonucleotide
  Target: LAMA2; (+) strand; PAM type: YTN; PAM sequence: TTT
gtggaaaggtgttaaagggt

SEQ ID NO: 384395 - DNA, 20 bp, Artificial Sequence
  Description of Artificial Sequence: Synthetic oligonucleotide
  Target: LAMA2; (+) strand; PAM type: YTN; PAM sequence: TTG
tggaaaggtgttaaagggta

SEQ ID NO: 384396 - DNA, 20 bp, Artificial Sequence
  Description of Artificial Sequence: Synthetic oligonucleotide
  Target: LAMA2; (+) strand; PAM type: YTN; PAM sequence: TTA
aagggtatcaccccaatgtc

SEQ ID NO: 384397 - DNA, 20 bp, Artificial Sequence
  Description of Artificial Sequence: Synthetic oligonucleotide
  Target: LAMA2; (+) strand; PAM type: YTN; PAM sequence: CTC
ttattatgcaagcataagaa

SEQ ID NO: 384398 - DNA, 20 bp, Artificial Sequence
  Description of Artificial Sequence: Synthetic oligonucleotide
  Target: LAMA2; (+) strand; PAM type: YTN; PAM sequence: CTT
attatgcaagcataagaaag

SEQ ID NO: 384399 - DNA, 20 bp, Artificial Sequence
  Description of Artificial Sequence: Synthetic oligonucleotide
  Target: LAMA2; (+) strand; PAM type: YTN; PAM sequence: TTA
ttatgcaagcataagaaaga

SEQ ID NO: 384400 - DNA, 20 bp, Artificial Sequence
  Description of Artificial Sequence: Synthetic oligonucleotide
  Target: LAMA2; (+) strand; PAM type: YTN; PAM sequence: TTA
tgcaagcataagaaagaaga

SEQ ID NO: 384401 - DNA, 20 bp, Artificial Sequence
  Description of Artificial Sequence: Synthetic oligonucleotide
  Target: LAMA2; (+) strand; PAM type: YTN; PAM sequence: CTG
agattgctagttttagattg

SEQ ID NO: 384402 - DNA, 20 bp, Artificial Sequence
  Description of Artificial Sequence: Synthetic oligonucleotide
  Target: LAMA2; (+) strand; PAM type: YTN; PAM sequence: TTG
ctagttttagattgactcct

SEQ ID NO: 384403 - DNA, 20 bp, Artificial Sequence
  Description of Artificial Sequence: Synthetic oligonucleotide
  Target: LAMA2; (+) strand; PAM type: YTN; PAM sequence: CTA
gttttagattgactcctctg

SEQ ID NO: 384404 - DNA, 20 bp, Artificial Sequence
  Description of Artificial Sequence: Synthetic oligonucleotide
  Target: LAMA2; (+) strand; PAM type: YTN; PAM sequence: TTT
tagattgactcctctgtatt

SEQ ID NO: 384405 - DNA, 20 bp, Artificial Sequence
  Description of Artificial Sequence: Synthetic oligonucleotide
  Target: LAMA2; (+) strand; PAM type: YTN; PAM sequence: TTT
agattgactcctctgtattt

SEQ ID NO: 384406 - DNA, 20 bp, Artificial Sequence
  Description of Artificial Sequence: Synthetic oligonucleotide
  Target: LAMA2; (+) strand; PAM type: YTN; PAM sequence: TTA
gattgactcctctgtattta

SEQ ID NO: 384407 - DNA, 20 bp, Artificial Sequence
  Description of Artificial Sequence: Synthetic oligonucleotide
  Target: LAMA2; (+) strand; PAM type: YTN; PAM sequence: TTG
actcctctgtatttatgaag

SEQ ID NO: 384408 - DNA, 20 bp, Artificial Sequence
  Description of Artificial Sequence: Synthetic oligonucleotide
  Target: LAMA2; (+) strand; PAM type: YTN; PAM sequence: CTC
ctctgtatttatgaagaacc

SEQ ID NO: 384409 - DNA, 20 bp, Artificial Sequence
  Description of Artificial Sequence: Synthetic oligonucleotide
  Target: LAMA2; (+) strand; PAM type: YTN; PAM sequence: CTC
tgtatttatgaagaaccacc

SEQ ID NO: 384410 - DNA, 20 bp, Artificial Sequence
  Description of Artificial Sequence: Synthetic oligonucleotide
  Target: LAMA2; (+) strand; PAM type: YTN; PAM sequence: CTG
tatttatgaagaaccaccta

SEQ ID NO: 384411 - DNA, 20 bp, Artificial Sequence
  Description of Artificial Sequence: Synthetic oligonucleotide
  Target: LAMA2; (+) strand; PAM type: YTN; PAM sequence: TTT
atgaagaaccacctacatct

SEQ ID NO: 384412 - DNA, 20 bp, Artificial Sequence
  Description of Artificial Sequence: Synthetic oligonucleotide
  Target: LAMA2; (+) strand; PAM type: YTN; PAM sequence: TTA
tgaagaaccacctacatcta

SEQ ID NO: 384413 - DNA, 20 bp, Artificial Sequence
  Description of Artificial Sequence: Synthetic oligonucleotide
  Target: LAMA2; (+) strand; PAM type: YTN; PAM sequence: CTA
catctatgctttccaccttg

SEQ ID NO: 384414 - DNA, 20 bp, Artificial Sequence
  Description of Artificial Sequence: Synthetic oligonucleotide
  Target: LAMA2; (+) strand; PAM type: YTN; PAM sequence: CTA
tgctttccaccttgaggtgg

SEQ ID NO: 384415 - DNA, 20 bp, Artificial Sequence
  Description of Artificial Sequence: Synthetic oligonucleotide
  Target: LAMA2; (+) strand; PAM type: YTN; PAM sequence: CTT
tccaccttgaggtggtttca

SEQ ID NO: 384416 - DNA, 20 bp, Artificial Sequence
  Description of Artificial Sequence: Synthetic oligonucleotide
  Target: LAMA2; (+) strand; PAM type: YTN; PAM sequence: TTT
ccaccttgaggtggtttcag

SEQ ID NO: 384417 - DNA, 20 bp, Artificial Sequence
  Description of Artificial Sequence: Synthetic oligonucleotide
  Target: LAMA2; (+) strand; PAM type: YTN; PAM sequence: TTC
caccttgaggtggtttcaga

SEQ ID NO: 384418 - DNA, 20 bp, Artificial Sequence
  Description of Artificial Sequence: Synthetic oligonucleotide
  Target: LAMA2; (+) strand; PAM type: YTN; PAM sequence: CTT
gaggtggtttcagaaagccc

SEQ ID NO: 384419 - DNA, 20 bp, Artificial Sequence
  Description of Artificial Sequence: Synthetic oligonucleotide
  Target: LAMA2; (+) strand; PAM type: YTN; PAM sequence: TTG
aggtggtttcagaaagccca

SEQ ID NO: 384420 - DNA, 20 bp, Artificial Sequence
  Description of Artificial Sequence: Synthetic oligonucleotide
  Target: LAMA2; (+) strand; PAM type: YTN; PAM sequence: TTT
cagaaagcccactagtgggc

SEQ ID NO: 384421 - DNA, 20 bp, Artificial Sequence
  Description of Artificial Sequence: Synthetic oligonucleotide
  Target: LAMA2; (+) strand; PAM type: YTN; PAM sequence: TTC
agaaagcccactagtgggca

SEQ ID NO: 384422 - DNA, 20 bp, Artificial Sequence
  Description of Artificial Sequence: Synthetic oligonucleotide
  Target: LAMA2; (+) strand; PAM type: YTN; PAM sequence: CTA
gtgggcatgtgccaaggcca

SEQ ID NO: 384423 - DNA, 20 bp, Artificial Sequence
  Description of Artificial Sequence: Synthetic oligonucleotide
  Target: LAMA2; (+) strand; PAM type: YTN; PAM sequence: TTT
gtagcacctttttctaacat

SEQ ID NO: 384424 - DNA, 20 bp, Artificial Sequence
  Description of Artificial Sequence: Synthetic oligonucleotide
  Target: LAMA2; (+) strand; PAM type: YTN; PAM sequence: TTG
tagcacctttttctaacatc

SEQ ID NO: 384425 - DNA, 20 bp, Artificial Sequence
  Description of Artificial Sequence: Synthetic oligonucleotide
  Target: LAMA2; (+) strand; PAM type: YTN; PAM sequence: CTT
tttctaacatctcatagagc

SEQ ID NO: 384426 - DNA, 20 bp, Artificial Sequence
  Description of Artificial Sequence: Synthetic oligonucleotide
  Target: LAMA2; (+) strand; PAM type: YTN; PAM sequence: TTT
ttctaacatctcatagagct

SEQ ID NO: 384427 - DNA, 20 bp, Artificial Sequence
  Description of Artificial Sequence: Synthetic oligonucleotide
  Target: LAMA2; (+) strand; PAM type: YTN; PAM sequence: TTT
tctaacatctcatagagcta

SEQ ID NO: 384428 - DNA, 20 bp, Artificial Sequence
  Description of Artificial Sequence: Synthetic oligonucleotide
  Target: LAMA2; (+) strand; PAM type: YTN; PAM sequence: TTT
ctaacatctcatagagctaa

SEQ ID NO: 384429 - DNA, 20 bp, Artificial Sequence
  Description of Artificial Sequence: Synthetic oligonucleotide
  Target: LAMA2; (+) strand; PAM type: YTN; PAM sequence: TTC
taacatctcatagagctaaa

SEQ ID NO: 384430 - DNA, 20 bp, Artificial Sequence
  Description of Artificial Sequence: Synthetic oligonucleotide
  Target: LAMA2; (+) strand; PAM type: YTN; PAM sequence: CTA
acatctcatagagctaaaac

SEQ ID NO: 384431 - DNA, 20 bp, Artificial Sequence
  Description of Artificial Sequence: Synthetic oligonucleotide
  Target: LAMA2; (+) strand; PAM type: YTN; PAM sequence: CTC
atagagctaaaacctgggat

SEQ ID NO: 384432 - DNA, 20 bp, Artificial Sequence
  Description of Artificial Sequence: Synthetic oligonucleotide
  Target: LAMA2; (+) strand; PAM type: YTN; PAM sequence: CTA
aaacctgggatatgaagaaa

SEQ ID NO: 384433 - DNA, 20 bp, Artificial Sequence
  Description of Artificial Sequence: Synthetic oligonucleotide
  Target: LAMA2; (+) strand; PAM type: YTN; PAM sequence: CTG
ggatatgaagaaacataaat

SEQ ID NO: 384434 - DNA, 20 bp, Artificial Sequence
  Description of Artificial Sequence: Synthetic oligonucleotide
  Target: LAMA2; (+) strand; PAM type: YTN; PAM sequence: CTA
gaagaaataataaattttag

SEQ ID NO: 384435 - DNA, 20 bp, Artificial Sequence
  Description of Artificial Sequence: Synthetic oligonucleotide
  Target: LAMA2; (+) strand; PAM type: YTN; PAM sequence: TTT
tagagactcgaagtctattc

SEQ ID NO: 384436 - DNA, 20 bp, Artificial Sequence
  Description of Artificial Sequence: Synthetic oligonucleotide
  Target: LAMA2; (+) strand; PAM type: YTN; PAM sequence: TTT
agagactcgaagtctattcc

SEQ ID NO: 384437 - DNA, 20 bp, Artificial Sequence
  Description of Artificial Sequence: Synthetic oligonucleotide
  Target: LAMA2; (+) strand; PAM type: YTN; PAM sequence: TTA
gagactcgaagtctattccc

SEQ ID NO: 384438 - DNA, 20 bp, Artificial Sequence
  Description of Artificial Sequence: Synthetic oligonucleotide
  Target: LAMA2; (+) strand; PAM type: YTN; PAM sequence: CTC
gaagtctattccccaattta

SEQ ID NO: 384439 - DNA, 20 bp, Artificial Sequence
  Description of Artificial Sequence: Synthetic oligonucleotide
  Target: LAMA2; (+) strand; PAM type: YTN; PAM sequence: CTA
ttccccaatttagagtagga

SEQ ID NO: 384440 - DNA, 20 bp, Artificial Sequence
  Description of Artificial Sequence: Synthetic oligonucleotide
  Target: LAMA2; (+) strand; PAM type: YTN; PAM sequence: TTC
cccaatttagagtaggagaa

SEQ ID NO: 384441 - DNA, 20 bp, Artificial Sequence
  Description of Artificial Sequence: Synthetic oligonucleotide
  Target: LAMA2; (+) strand; PAM type: YTN; PAM sequence: TTT
agagtaggagaaaaatttac

SEQ ID NO: 384442 - DNA, 20 bp, Artificial Sequence
  Description of Artificial Sequence: Synthetic oligonucleotide
  Target: LAMA2; (+) strand; PAM type: YTN; PAM sequence: TTA
gagtaggagaaaaatttaca

SEQ ID NO: 384443 - DNA, 20 bp, Artificial Sequence
  Description of Artificial Sequence: Synthetic oligonucleotide
  Target: LAMA2; (+) strand; PAM type: YTN; PAM sequence: TTT
acatagagattgattcaggg

SEQ ID NO: 384444 - DNA, 20 bp, Artificial Sequence
  Description of Artificial Sequence: Synthetic oligonucleotide
  Target: LAMA2; (+) strand; PAM type: YTN; PAM sequence: TTA
catagagattgattcaggga

SEQ ID NO: 384445 - DNA, 20 bp, Artificial Sequence
  Description of Artificial Sequence: Synthetic oligonucleotide
  Target: LAMA2; (+) strand; PAM type: YTN; PAM sequence: TTG
attcagggaaaagagaatag

SEQ ID NO: 384446 - DNA, 20 bp, Artificial Sequence
  Description of Artificial Sequence: Synthetic oligonucleotide
  Target: LAMA2; (+) strand; PAM type: YTN; PAM sequence: TTC
agggaaaagagaatagcaac

SEQ ID NO: 384447 - DNA, 20 bp, Artificial Sequence
  Description of Artificial Sequence: Synthetic oligonucleotide
  Target: LAMA2; (+) strand; PAM type: YTN; PAM sequence: CTC
ttattgtcagtgtagctacg

SEQ ID NO: 384448 - DNA, 20 bp, Artificial Sequence
  Description of Artificial Sequence: Synthetic oligonucleotide
  Target: LAMA2; (+) strand; PAM type: YTN; PAM sequence: CTT
attgtcagtgtagctacgat

SEQ ID NO: 384449 - DNA, 20 bp, Artificial Sequence
  Description of Artificial Sequence: Synthetic oligonucleotide
  Target: LAMA2; (+) strand; PAM type: YTN; PAM sequence: TTA
ttgtcagtgtagctacgata

SEQ ID NO: 384450 - DNA, 20 bp, Artificial Sequence
  Description of Artificial Sequence: Synthetic oligonucleotide
  Target: LAMA2; (+) strand; PAM type: YTN; PAM sequence: TTG
tcagtgtagctacgatagca

SEQ ID NO: 384451 - DNA, 20 bp, Artificial Sequence
  Description of Artificial Sequence: Synthetic oligonucleotide
  Target: LAMA2; (+) strand; PAM type: YTN; PAM sequence: CTA
cgatagcacagtattagttt

SEQ ID NO: 384452 - DNA, 20 bp, Artificial Sequence
  Description of Artificial Sequence: Synthetic oligonucleotide
  Target: LAMA2; (+) strand; PAM type: YTN; PAM sequence: TTA
gtttctcaaatcaaagagtt

SEQ ID NO: 384453 - DNA, 20 bp, Artificial Sequence
  Description of Artificial Sequence: Synthetic oligonucleotide
  Target: LAMA2; (+) strand; PAM type: YTN; PAM sequence: TTT
ctcaaatcaaagagttcctt

SEQ ID NO: 384454 - DNA, 20 bp, Artificial Sequence
  Description of Artificial Sequence: Synthetic oligonucleotide
  Target: LAMA2; (+) strand; PAM type: YTN; PAM sequence: TTC
tcaaatcaaagagttccttt

SEQ ID NO: 384455 - DNA, 20 bp, Artificial Sequence
  Description of Artificial Sequence: Synthetic oligonucleotide
  Target: LAMA2; (+) strand; PAM type: YTN; PAM sequence: CTC
aaatcaaagagttcctttaa

SEQ ID NO: 384456 - DNA, 20 bp, Artificial Sequence
  Description of Artificial Sequence: Synthetic oligonucleotide
  Target: LAMA2; (+) strand; PAM type: YTN; PAM sequence: TTC
ctttaaaaatatttatatca

SEQ ID NO: 384457 - DNA, 20 bp, Artificial Sequence
  Description of Artificial Sequence: Synthetic oligonucleotide
  Target: LAMA2; (+) strand; PAM type: YTN; PAM sequence: CTT
taaaaatatttatatcaaag

SEQ ID NO: 384458 - DNA, 20 bp, Artificial Sequence
  Description of Artificial Sequence: Synthetic oligonucleotide
  Target: LAMA2; (+) strand; PAM type: YTN; PAM sequence: TTT
aaaaatatttatatcaaaga

SEQ ID NO: 384459 - DNA, 20 bp, Artificial Sequence
  Description of Artificial Sequence: Synthetic oligonucleotide
  Target: LAMA2; (+) strand; PAM type: YTN; PAM sequence: TTA
aaaatatttatatcaaagac

SEQ ID NO: 384460 - DNA, 20 bp, Artificial Sequence
  Description of Artificial Sequence: Synthetic oligonucleotide
  Target: LAMA2; (+) strand; PAM type: YTN; PAM sequence: TTT
atatcaaagactgagttctc

SEQ ID NO: 384461 - DNA, 20 bp, Artificial Sequence
  Description of Artificial Sequence: Synthetic oligonucleotide
  Target: LAMA2; (+) strand; PAM type: YTN; PAM sequence: TTA
tatcaaagactgagttctct

SEQ ID NO: 384462 - DNA, 20 bp, Artificial Sequence
  Description of Artificial Sequence: Synthetic oligonucleotide
  Target: LAMA2; (+) strand; PAM type: YTN; PAM sequence: CTG
agttctctgtcagtgataaa

SEQ ID NO: 384463 - DNA, 20 bp, Artificial Sequence
  Description of Artificial Sequence: Synthetic oligonucleotide
  Target: LAMA2; (+) strand; PAM type: YTN; PAM sequence: TTC
tctgtcagtgataaagtgtg

SEQ ID NO: 384464 - DNA, 20 bp, Artificial Sequence
  Description of Artificial Sequence: Synthetic oligonucleotide
  Target: LAMA2; (+) strand; PAM type: YTN; PAM sequence: CTC
tgtcagtgataaagtgtgtg

SEQ ID NO: 384465 - DNA, 20 bp, Artificial Sequence
  Description of Artificial Sequence: Synthetic oligonucleotide
  Target: LAMA2; (+) strand; PAM type: YTN; PAM sequence: CTG
tcagtgataaagtgtgtgtg

SEQ ID NO: 384466 - DNA, 20 bp, Artificial Sequence
  Description of Artificial Sequence: Synthetic oligonucleotide
  Target: LAMA2; (+) strand; PAM type: YTN; PAM sequence: TTC
atagacacacattcatagct

SEQ ID NO: 384467 - DNA, 20 bp, Artificial Sequence
  Description of Artificial Sequence: Synthetic oligonucleotide
  Target: LAMA2; (+) strand; PAM type: YTN; PAM sequence: TTC
atagctagggactgtatgat

SEQ ID NO: 384468 - DNA, 20 bp, Artificial Sequence
  Description of Artificial Sequence: Synthetic oligonucleotide
  Target: LAMA2; (+) strand; PAM type: YTN; PAM sequence: CTA
gggactgtatgataaattac

SEQ ID NO: 384469 - DNA, 20 bp, Artificial Sequence
  Description of Artificial Sequence: Synthetic oligonucleotide
  Target: LAMA2; (+) strand; PAM type: YTN; PAM sequence: CTG
tatgataaattacattctaa

SEQ ID NO: 384470 - DNA, 20 bp, Artificial Sequence
  Description of Artificial Sequence: Synthetic oligonucleotide
  Target: LAMA2; (+) strand; PAM type: YTN; PAM sequence: TTA
cattctaactatcactaaat

SEQ ID NO: 384471 - DNA, 20 bp, Artificial Sequence
  Description of Artificial Sequence: Synthetic oligonucleotide
  Target: LAMA2; (+) strand; PAM type: YTN; PAM sequence: TTC
taactatcactaaattaaaa

SEQ ID NO: 384472 - DNA, 20 bp, Artificial Sequence
  Description of Artificial Sequence: Synthetic oligonucleotide
  Target: LAMA2; (+) strand; PAM type: YTN; PAM sequence: CTA
actatcactaaattaaaaac

SEQ ID NO: 384473 - DNA, 20 bp, Artificial Sequence
  Description of Artificial Sequence: Synthetic oligonucleotide
  Target: LAMA2; (+) strand; PAM type: YTN; PAM sequence: CTA
tcactaaattaaaaacaaac

SEQ ID NO: 384474 - DNA, 20 bp, Artificial Sequence
  Description of Artificial Sequence: Synthetic oligonucleotide
  Target: LAMA2; (+) strand; PAM type: YTN; PAM sequence: CTA
aattaaaaacaaacttcttc

SEQ ID NO: 384475 - DNA, 20 bp, Artificial Sequence
  Description of Artificial Sequence: Synthetic oligonucleotide
  Target: LAMA2; (+) strand; PAM type: YTN; PAM sequence: TTA
aaaacaaacttcttctccct

SEQ ID NO: 384476 - DNA, 20 bp, Artificial Sequence
  Description of Artificial Sequence: Synthetic oligonucleotide
  Target: LAMA2; (+) strand; PAM type: YTN; PAM sequence: CTT
cttctcccttttcctttaca

SEQ ID NO: 384477 - DNA, 20 bp, Artificial Sequence
  Description of Artificial Sequence: Synthetic oligonucleotide
  Target: LAMA2; (+) strand; PAM type: YTN; PAM sequence: TTC
ttctcccttttcctttacag

SEQ ID NO: 384478 - DNA, 20 bp, Artificial Sequence
  Description of Artificial Sequence: Synthetic oligonucleotide
  Target: LAMA2; (+) strand; PAM type: YTN; PAM sequence: CTT
ctcccttttcctttacagaa

SEQ ID NO: 384479 - DNA, 20 bp, Artificial Sequence
  Description of Artificial Sequence: Synthetic oligonucleotide
  Target: LAMA2; (+) strand; PAM type: YTN; PAM sequence: TTC
tcccttttcctttacagaat

SEQ ID NO: 384480 - DNA, 20 bp, Artificial Sequence
  Description of Artificial Sequence: Synthetic oligonucleotide
  Target: LAMA2; (+) strand; PAM type: YTN; PAM sequence: CTC
ccttttcctttacagaattg

SEQ ID NO: 384481 - DNA, 20 bp, Artificial Sequence
  Description of Artificial Sequence: Synthetic oligonucleotide
  Target: LAMA2; (+) strand; PAM type: YTN; PAM sequence: CTT
ttcctttacagaattgtcaa

SEQ ID NO: 384482 - DNA, 20 bp, Artificial Sequence
  Description of Artificial Sequence: Synthetic oligonucleotide
  Target: LAMA2; (+) strand; PAM type: YTN; PAM sequence: TTT
tcctttacagaattgtcaac

SEQ ID NO: 384483 - DNA, 20 bp, Artificial Sequence
  Description of Artificial Sequence: Synthetic oligonucleotide
  Target: LAMA2; (+) strand; PAM type: YTN; PAM sequence: TTT
cctttacagaattgtcaaca

SEQ ID NO: 384484 - DNA, 20 bp, Artificial Sequence
  Description of Artificial Sequence: Synthetic oligonucleotide
  Target: LAMA2; (+) strand; PAM type: YTN; PAM sequence: TTC
ctttacagaattgtcaacat

SEQ ID NO: 384485 - DNA, 20 bp, Artificial Sequence
  Description of Artificial Sequence: Synthetic oligonucleotide
  Target: LAMA2; (+) strand; PAM type: YTN; PAM sequence: CTT
tacagaattgtcaacatcac

SEQ ID NO: 384486 - DNA, 20 bp, Artificial Sequence
  Description of Artificial Sequence: Synthetic oligonucleotide
  Target: LAMA2; (+) strand; PAM type: YTN; PAM sequence: TTT
acagaattgtcaacatcaca

SEQ ID NO: 384487 - DNA, 20 bp, Artificial Sequence
  Description of Artificial Sequence: Synthetic oligonucleotide
  Target: LAMA2; (+) strand; PAM type: YTN; PAM sequence: TTA
cagaattgtcaacatcacac

SEQ ID NO: 384488 - DNA, 20 bp, Artificial Sequence
  Description of Artificial Sequence: Synthetic oligonucleotide
  Target: LAMA2; (+) strand; PAM type: YTN; PAM sequence: TTG
tcaacatcacactgctggtg

SEQ ID NO: 384489 - DNA, 20 bp, Artificial Sequence
  Description of Artificial Sequence: Synthetic oligonucleotide
  Target: LAMA2; (+) strand; PAM type: YTN; PAM sequence: CTG
ctggtgacttctgtgaacga

SEQ ID NO: 384490 - DNA, 20 bp, Artificial Sequence
  Description of Artificial Sequence: Synthetic oligonucleotide
  Target: LAMA2; (+) strand; PAM type: YTN; PAM sequence: CTG
gtgacttctgtgaacgatgt

SEQ ID NO: 384491 - DNA, 20 bp, Artificial Sequence
  Description of Artificial Sequence: Synthetic oligonucleotide
  Target: LAMA2; (+) strand; PAM type: YTN; PAM sequence: CTT
ctgtgaacgatgtgctcttg

SEQ ID NO: 384492 - DNA, 20 bp, Artificial Sequence
  Description of Artificial Sequence: Synthetic oligonucleotide
  Target: LAMA2; (+) strand; PAM type: YTN; PAM sequence: TTC
tgtgaacgatgtgctcttgg

SEQ ID NO: 384493 - DNA, 20 bp, Artificial Sequence
  Description of Artificial Sequence: Synthetic oligonucleotide
  Target: LAMA2; (+) strand; PAM type: YTN; PAM sequence: CTG
tgaacgatgtgctcttggat

SEQ ID NO: 384494 - DNA, 20 bp, Artificial Sequence
  Description of Artificial Sequence: Synthetic oligonucleotide
  Target: LAMA2; (+) strand; PAM type: YTN; PAM sequence: CTC
ttggatactatggaattgtc

SEQ ID NO: 384495 - DNA, 20 bp, Artificial Sequence
  Description of Artificial Sequence: Synthetic oligonucleotide
  Target: LAMA2; (+) strand; PAM type: YTN; PAM sequence: CTT
ggatactatggaattgtcaa

SEQ ID NO: 384496 - DNA, 20 bp, Artificial Sequence
  Description of Artificial Sequence: Synthetic oligonucleotide
  Target: LAMA2; (+) strand; PAM type: YTN; PAM sequence: TTG
gatactatggaattgtcaag

SEQ ID NO: 384497 - DNA, 20 bp, Artificial Sequence
  Description of Artificial Sequence: Synthetic oligonucleotide
  Target: LAMA2; (+) strand; PAM type: YTN; PAM sequence: CTA
tggaattgtcaagggattgc

SEQ ID NO: 384498 - DNA, 20 bp, Artificial Sequence
  Description of Artificial Sequence: Synthetic oligonucleotide
  Target: LAMA2; (+) strand; PAM type: YTN; PAM sequence: TTG
tcaagggattgccaaatgac

SEQ ID NO: 384499 - DNA, 20 bp, Artificial Sequence
  Description of Artificial Sequence: Synthetic oligonucleotide
  Target: LAMA2; (+) strand; PAM type: YTN; PAM sequence: TTG
ccaaatgactgtcagcaatg

SEQ ID NO: 384500 - DNA, 20 bp, Artificial Sequence
  Description of Artificial Sequence: Synthetic oligonucleotide
  Target: LAMA2; (+) strand; PAM type: YTN; PAM sequence: CTG
tcagcaatgtgcctgccctc

SEQ ID NO: 384501 - DNA, 20 bp, Artificial Sequence
  Description of Artificial Sequence: Synthetic oligonucleotide
  Target: LAMA2; (+) strand; PAM type: YTN; PAM sequence: CTG
ccctctgatttcttccagta

SEQ ID NO: 384502 - DNA, 20 bp, Artificial Sequence
  Description of Artificial Sequence: Synthetic oligonucleotide
  Target: LAMA2; (+) strand; PAM type: YTN; PAM sequence: CTC
tgatttcttccagtaacaag

SEQ ID NO: 384503 - DNA, 20 bp, Artificial Sequence
  Description of Artificial Sequence: Synthetic oligonucleotide
  Target: LAMA2; (+) strand; PAM type: YTN; PAM sequence: CTG
atttcttccagtaacaagta

SEQ ID NO: 384504 - DNA, 20 bp, Artificial Sequence
  Description of Artificial Sequence: Synthetic oligonucleotide
  Target: LAMA2; (+) strand; PAM type: YTN; PAM sequence: TTT
cttccagtaacaagtaagat

SEQ ID NO: 384505 - DNA, 20 bp, Artificial Sequence
  Description of Artificial Sequence: Synthetic oligonucleotide
  Target: LAMA2; (+) strand; PAM type: YTN; PAM sequence: TTC
ttccagtaacaagtaagatt

SEQ ID NO: 384506 - DNA, 20 bp, Artificial Sequence
  Description of Artificial Sequence: Synthetic oligonucleotide
  Target: LAMA2; (+) strand; PAM type: YTN; PAM sequence: CTT
ccagtaacaagtaagattga

SEQ ID NO: 384507 - DNA, 20 bp, Artificial Sequence
  Description of Artificial Sequence: Synthetic oligonucleotide
  Target: LAMA2; (+) strand; PAM type: YTN; PAM sequence: TTC
cagtaacaagtaagattgag

SEQ ID NO: 384508 - DNA, 20 bp, Artificial Sequence
  Description of Artificial Sequence: Synthetic oligonucleotide
  Target: LAMA2; (+) strand; PAM type: YTN; PAM sequence: TTG
agaaatataaccatatttcc

SEQ ID NO: 384509 - DNA, 20 bp, Artificial Sequence
  Description of Artificial Sequence: Synthetic oligonucleotide
  Target: LAMA2; (+) strand; PAM type: YTN; PAM sequence: TTT
cccaatcagaaacgccatct

SEQ ID NO: 384510 - DNA, 20 bp, Artificial Sequence
  Description of Artificial Sequence: Synthetic oligonucleotide
  Target: LAMA2; (+) strand; PAM type: YTN; PAM sequence: TTC
ccaatcagaaacgccatctg

SEQ ID NO: 384511 - DNA, 20 bp, Artificial Sequence
  Description of Artificial Sequence: Synthetic oligonucleotide
  Target: LAMA2; (+) strand; PAM type: YTN; PAM sequence: CTG
tctagcacatgggctgtcta

SEQ ID NO: 384512 - DNA, 20 bp, Artificial Sequence
  Description of Artificial Sequence: Synthetic oligonucleotide
  Target: LAMA2; (+) strand; PAM type: YTN; PAM sequence: CTA
gcacatgggctgtctatgat

SEQ ID NO: 384513 - DNA, 20 bp, Artificial Sequence
  Description of Artificial Sequence: Synthetic oligonucleotide
  Target: LAMA2; (+) strand; PAM type: YTN; PAM sequence: CTG
tctatgatttggctattttt

SEQ ID NO: 384514 - DNA, 20 bp, Artificial Sequence
  Description of Artificial Sequence: Synthetic oligonucleotide
  Target: LAMA2; (+) strand; PAM type: YTN; PAM sequence: CTA
tgatttggctattttttcca

SEQ ID NO: 384515 - DNA, 20 bp, Artificial Sequence
  Description of Artificial Sequence: Synthetic oligonucleotide
  Target: LAMA2; (+) strand; PAM type: YTN; PAM sequence: TTT
ggctattttttccatgtaga

SEQ ID NO: 384516 - DNA, 20 bp, Artificial Sequence
  Description of Artificial Sequence: Synthetic oligonucleotide
  Target: LAMA2; (+) strand; PAM type: YTN; PAM sequence: TTG
gctattttttccatgtagac

SEQ ID NO: 384517 - DNA, 20 bp, Artificial Sequence
  Description of Artificial Sequence: Synthetic oligonucleotide
  Target: LAMA2; (+) strand; PAM type: YTN; PAM sequence: CTA
ttttttccatgtagacaaaa

SEQ ID NO: 384518 - DNA, 20 bp, Artificial Sequence
  Description of Artificial Sequence: Synthetic oligonucleotide
  Target: LAMA2; (+) strand; PAM type: YTN; PAM sequence: TTT
tttccatgtagacaaaaatc

SEQ ID NO: 384519 - DNA, 20 bp, Artificial Sequence
  Description of Artificial Sequence: Synthetic oligonucleotide
  Target: LAMA2; (+) strand; PAM type: YTN; PAM sequence: TTT
ttccatgtagacaaaaatct

SEQ ID NO: 384520 - DNA, 20 bp, Artificial Sequence
  Description of Artificial Sequence: Synthetic oligonucleotide
  Target: LAMA2; (+) strand; PAM type: YTN; PAM sequence: TTT
tccatgtagacaaaaatctc

SEQ ID NO: 384521 - DNA, 20 bp, Artificial Sequence
  Description of Artificial Sequence: Synthetic oligonucleotide
  Target: LAMA2; (+) strand; PAM type: YTN; PAM sequence: TTT
ccatgtagacaaaaatctca

SEQ ID NO: 384522 - DNA, 20 bp, Artificial Sequence
  Description of Artificial Sequence: Synthetic oligonucleotide
  Target: LAMA2; (+) strand; PAM type: YTN; PAM sequence: TTC
catgtagacaaaaatctcaa

SEQ ID NO: 384523 - DNA, 20 bp, Artificial Sequence
  Description of Artificial Sequence: Synthetic oligonucleotide
  Target: LAMA2; (+) strand; PAM type: YTN; PAM sequence: CTC
aatttaagatagagatattt

SEQ ID NO: 384524 - DNA, 20 bp, Artificial Sequence
  Description of Artificial Sequence: Synthetic oligonucleotide
  Target: LAMA2; (+) strand; PAM type: YTN; PAM sequence: TTT
aagatagagatatttttaat

SEQ ID NO: 384525 - DNA, 20 bp, Artificial Sequence
  Description of Artificial Sequence: Synthetic oligonucleotide
  Target: LAMA2; (+) strand; PAM type: YTN; PAM sequence: TTA
agatagagatatttttaata

SEQ ID NO: 384526 - DNA, 20 bp, Artificial Sequence
  Description of Artificial Sequence: Synthetic oligonucleotide
  Target: LAMA2; (+) strand; PAM type: YTN; PAM sequence: TTT
ttaataatatagaaacatga

SEQ ID NO: 384527 - DNA, 20 bp, Artificial Sequence
  Description of Artificial Sequence: Synthetic oligonucleotide
  Target: LAMA2; (+) strand; PAM type: YTN; PAM sequence: TTT
taataatatagaaacatgac

SEQ ID NO: 384528 - DNA, 20 bp, Artificial Sequence
  Description of Artificial Sequence: Synthetic oligonucleotide
  Target: LAMA2; (+) strand; PAM type: YTN; PAM sequence: TTT
aataatatagaaacatgaca

SEQ ID NO: 384529 - DNA, 20 bp, Artificial Sequence
  Description of Artificial Sequence: Synthetic oligonucleotide
  Target: LAMA2; (+) strand; PAM type: YTN; PAM sequence: TTA
ataatatagaaacatgacaa

SEQ ID NO: 384530 - DNA, 20 bp, Artificial Sequence
  Description of Artificial Sequence: Synthetic oligonucleotide
  Target: LAMA2; (+) strand; PAM type: YTN; PAM sequence: CTC
tatggttcatttttcctttg

SEQ ID NO: 384531 - DNA, 20 bp, Artificial Sequence
  Description of Artificial Sequence: Synthetic oligonucleotide
  Target: LAMA2; (+) strand; PAM type: YTN; PAM sequence: CTA
tggttcatttttcctttgaa

SEQ ID NO: 384532 - DNA, 20 bp, Artificial Sequence
  Description of Artificial Sequence: Synthetic oligonucleotide
  Target: LAMA2; (+) strand; PAM type: YTN; PAM sequence: TTC
atttttcctttgaaactctg

SEQ ID NO: 384533 - DNA, 20 bp, Artificial Sequence
  Description of Artificial Sequence: Synthetic oligonucleotide
  Target: LAMA2; (+) strand; PAM type: YTN; PAM sequence: TTT
ttcctttgaaactctgtccc

SEQ ID NO: 384534 - DNA, 20 bp, Artificial Sequence
  Description of Artificial Sequence: Synthetic oligonucleotide
  Target: LAMA2; (+) strand; PAM type: YTN; PAM sequence: TTT
tcctttgaaactctgtccca

SEQ ID NO: 384535 - DNA, 20 bp, Artificial Sequence
  Description of Artificial Sequence: Synthetic oligonucleotide
  Target: LAMA2; (+) strand; PAM type: YTN; PAM sequence: TTT
cctttgaaactctgtcccaa

SEQ ID NO: 384536 - DNA, 20 bp, Artificial Sequence
  Description of Artificial Sequence: Synthetic oligonucleotide
  Target: LAMA2; (+) strand; PAM type: YTN; PAM sequence: TTC
ctttgaaactctgtcccaag

SEQ ID NO: 384537 - DNA, 20 bp, Artificial Sequence
  Description of Artificial Sequence: Synthetic oligonucleotide
  Target: LAMA2; (+) strand; PAM type: YTN; PAM sequence: CTT
tgaaactctgtcccaagtaa

SEQ ID NO: 384538 - DNA, 20 bp, Artificial Sequence
  Description of Artificial Sequence: Synthetic oligonucleotide
  Target: LAMA2; (+) strand; PAM type: YTN; PAM sequence: TTT
gaaactctgtcccaagtaaa

SEQ ID NO: 384539 - DNA, 20 bp, Artificial Sequence
  Description of Artificial Sequence: Synthetic oligonucleotide
  Target: LAMA2; (+) strand; PAM type: YTN; PAM sequence: TTG
aaactctgtcccaagtaaat

SEQ ID NO: 384540 - DNA, 20 bp, Artificial Sequence
  Description of Artificial Sequence: Synthetic oligonucleotide
  Target: LAMA2; (+) strand; PAM type: YTN; PAM sequence: CTC
tgtcccaagtaaataatact

SEQ ID NO: 384541 - DNA, 20 bp, Artificial Sequence
  Description of Artificial Sequence: Synthetic oligonucleotide
  Target: LAMA2; (+) strand; PAM type: YTN; PAM sequence: CTG
tcccaagtaaataatactta

SEQ ID NO: 384542 - DNA, 20 bp, Artificial Sequence
  Description of Artificial Sequence: Synthetic oligonucleotide
  Target: LAMA2; (+) strand; PAM type: YTN; PAM sequence: CTT
attaattaaaattgaagtac

SEQ ID NO: 384543 - DNA, 20 bp, Artificial Sequence
  Description of Artificial Sequence: Synthetic oligonucleotide
  Target: LAMA2; (+) strand; PAM type: YTN; PAM sequence: TTA
ttaattaaaattgaagtacc

SEQ ID NO: 384544 - DNA, 20 bp, Artificial Sequence
  Description of Artificial Sequence: Synthetic oligonucleotide
  Target: LAMA2; (+) strand; PAM type: YTN; PAM sequence: TTA
attaaaattgaagtaccaat

SEQ ID NO: 384545 - DNA, 20 bp, Artificial Sequence
  Description of Artificial Sequence: Synthetic oligonucleotide
  Target: LAMA2; (+) strand; PAM type: YTN; PAM sequence: TTA
aaattgaagtaccaatatta

SEQ ID NO: 384546 - DNA, 20 bp, Artificial Sequence
  Description of Artificial Sequence: Synthetic oligonucleotide
  Target: LAMA2; (+) strand; PAM type: YTN; PAM sequence: TTG
aagtaccaatattaatgtaa

SEQ ID NO: 384547 - DNA, 20 bp, Artificial Sequence
  Description of Artificial Sequence: Synthetic oligonucleotide
  Target: LAMA2; (+) strand; PAM type: YTN; PAM sequence: TTA
atgtaagacatatttataaa

SEQ ID NO: 384548 - DNA, 20 bp, Artificial Sequence
  Description of Artificial Sequence: Synthetic oligonucleotide
  Target: LAMA2; (+) strand; PAM type: YTN; PAM sequence: TTT
ataaaacaaatgatatatat

SEQ ID NO: 384549 - DNA, 20 bp, Artificial Sequence
  Description of Artificial Sequence: Synthetic oligonucleotide
  Target: LAMA2; (+) strand; PAM type: YTN; PAM sequence: TTA
taaaacaaatgatatatata

SEQ ID NO: 384550 - DNA, 20 bp, Artificial Sequence
  Description of Artificial Sequence: Synthetic oligonucleotide
  Target: LAMA2; (+) strand; PAM type: YTN; PAM sequence: TTT
cataaatataccagtctaat

SEQ ID NO: 384551 - DNA, 20 bp, Artificial Sequence
  Description of Artificial Sequence: Synthetic oligonucleotide
  Target: LAMA2; (+) strand; PAM type: YTN; PAM sequence: TTC
ataaatataccagtctaatg

SEQ ID NO: 384552 - DNA, 20 bp, Artificial Sequence
  Description of Artificial Sequence: Synthetic oligonucleotide
  Target: LAMA2; (+) strand; PAM type: YTN; PAM sequence: CTA
atgcttgcatatagctctgc

SEQ ID NO: 384553 - DNA, 20 bp, Artificial Sequence
  Description of Artificial Sequence: Synthetic oligonucleotide
  Target: LAMA2; (+) strand; PAM type: YTN; PAM sequence: CTT
gcatatagctctgcccataa

SEQ ID NO: 384554 - DNA, 20 bp, Artificial Sequence
  Description of Artificial Sequence: Synthetic oligonucleotide
  Target: LAMA2; (+) strand; PAM type: YTN; PAM sequence: TTG
catatagctctgcccataat

SEQ ID NO: 384555 - DNA, 20 bp, Artificial Sequence
  Description of Artificial Sequence: Synthetic oligonucleotide
  Target: LAMA2; (+) strand; PAM type: YTN; PAM sequence: CTC
tgcccataatatcatctatg

SEQ ID NO: 384556 - DNA, 20 bp, Artificial Sequence
  Description of Artificial Sequence: Synthetic oligonucleotide
  Target: LAMA2; (+) strand; PAM type: YTN; PAM sequence: CTG
cccataatatcatctatgaa

SEQ ID NO: 384557 - DNA, 20 bp, Artificial Sequence
  Description of Artificial Sequence: Synthetic oligonucleotide
  Target: LAMA2; (+) strand; PAM type: YTN; PAM sequence: CTA
tgaaggattgttcgggtgca

SEQ ID NO: 384558 - DNA, 20 bp, Artificial Sequence
  Description of Artificial Sequence: Synthetic oligonucleotide
  Target: LAMA2; (+) strand; PAM type: YTN; PAM sequence: TTG
ttcgggtgcatattatataa

SEQ ID NO: 384559 - DNA, 20 bp, Artificial Sequence
  Description of Artificial Sequence: Synthetic oligonucleotide
  Target: LAMA2; (+) strand; PAM type: YTN; PAM sequence: TTC
gggtgcatattatataattt

SEQ ID NO: 384560 - DNA, 20 bp, Artificial Sequence
  Description of Artificial Sequence: Synthetic oligonucleotide
  Target: LAMA2; (+) strand; PAM type: YTN; PAM sequence: TTA
tataatttttgtggctgttt

SEQ ID NO: 384561 - DNA, 20 bp, Artificial Sequence
  Description of Artificial Sequence: Synthetic oligonucleotide
  Target: LAMA2; (+) strand; PAM type: YTN; PAM sequence: TTT
ttgtggctgtttccatttat

SEQ ID NO: 384562 - DNA, 20 bp, Artificial Sequence
  Description of Artificial Sequence: Synthetic oligonucleotide
  Target: LAMA2; (+) strand; PAM type: YTN; PAM sequence: TTT
tgtggctgtttccatttatt

SEQ ID NO: 384563 - DNA, 20 bp, Artificial Sequence
  Description of Artificial Sequence: Synthetic oligonucleotide
  Target: LAMA2; (+) strand; PAM type: YTN; PAM sequence: TTT
gtggctgtttccatttattt

SEQ ID NO: 384564 - DNA, 20 bp, Artificial Sequence
  Description of Artificial Sequence: Synthetic oligonucleotide
  Target: LAMA2; (+) strand; PAM type: YTN; PAM sequence: TTG
tggctgtttccatttatttt

SEQ ID NO: 384565 - DNA, 20 bp, Artificial Sequence
  Description of Artificial Sequence: Synthetic oligonucleotide
  Target: LAMA2; (+) strand; PAM type: YTN; PAM sequence: CTG
tttccatttattttatgtgt

SEQ ID NO: 384566 - DNA, 20 bp, Artificial Sequence
  Description of Artificial Sequence: Synthetic oligonucleotide
  Target: LAMA2; (+) strand; PAM type: YTN; PAM sequence: TTT
ccatttattttatgtgttta

SEQ ID NO: 384567 - DNA, 20 bp, Artificial Sequence
  Description of Artificial Sequence: Synthetic oligonucleotide
  Target: LAMA2; (+) strand; PAM type: YTN; PAM sequence: TTC
catttattttatgtgtttaa

SEQ ID NO: 384568 - DNA, 20 bp, Artificial Sequence
  Description of Artificial Sequence: Synthetic oligonucleotide
  Target: LAMA2; (+) strand; PAM type: YTN; PAM sequence: TTT
attttatgtgtttaattcaa

SEQ ID NO: 384569 - DNA, 20 bp, Artificial Sequence
  Description of Artificial Sequence: Synthetic oligonucleotide
  Target: LAMA2; (+) strand; PAM type: YTN; PAM sequence: TTA
ttttatgtgtttaattcaag

SEQ ID NO: 384570 - DNA, 20 bp, Artificial Sequence
  Description of Artificial Sequence: Synthetic oligonucleotide
  Target: LAMA2; (+) strand; PAM type: YTN; PAM sequence: TTT
tatgtgtttaattcaagatt

SEQ ID NO: 384571 - DNA, 20 bp, Artificial Sequence
  Description of Artificial Sequence: Synthetic oligonucleotide
  Target: LAMA2; (+) strand; PAM type: YTN; PAM sequence: TTT
atgtgtttaattcaagattg

SEQ ID NO: 384572 - DNA, 20 bp, Artificial Sequence
  Description of Artificial Sequence: Synthetic oligonucleotide
  Target: LAMA2; (+) strand; PAM type: YTN; PAM sequence: TTA
tgtgtttaattcaagattgg

SEQ ID NO: 384573 - DNA, 20 bp, Artificial Sequence
  Description of Artificial Sequence: Synthetic oligonucleotide
  Target: LAMA2; (+) strand; PAM type: YTN; PAM sequence: TTT
aattcaagattgggaaataa

SEQ ID NO: 384574 - DNA, 20 bp, Artificial Sequence
  Description of Artificial Sequence: Synthetic oligonucleotide
  Target: LAMA2; (+) strand; PAM type: YTN; PAM sequence: TTA
attcaagattgggaaataat

SEQ ID NO: 384575 - DNA, 20 bp, Artificial Sequence
  Description of Artificial Sequence: Synthetic oligonucleotide
  Target: LAMA2; (+) strand; PAM type: YTN; PAM sequence: TTC
aagattgggaaataattatc

SEQ ID NO: 384576 - DNA, 20 bp, Artificial Sequence
  Description of Artificial Sequence: Synthetic oligonucleotide
  Target: LAMA2; (+) strand; PAM type: YTN; PAM sequence: TTG
ggaaataattatcaagaaaa

SEQ ID NO: 384577 - DNA, 20 bp, Artificial Sequence
  Description of Artificial Sequence: Synthetic oligonucleotide
  Target: LAMA2; (+) strand; PAM type: YTN; PAM sequence: TTA
tcaagaaaacattgaaaaat

SEQ ID NO: 384578 - DNA, 20 bp, Artificial Sequence
  Description of Artificial Sequence: Synthetic oligonucleotide
  Target: LAMA2; (+) strand; PAM type: YTN; PAM sequence: TTG
aaaaattgtacaattaaagc

SEQ ID NO: 384579 - DNA, 20 bp, Artificial Sequence
  Description of Artificial Sequence: Synthetic oligonucleotide
  Target: LAMA2; (+) strand; PAM type: YTN; PAM sequence: TTG
tacaattaaagcaggtgact

SEQ ID NO: 384580 - DNA, 20 bp, Artificial Sequence
  Description of Artificial Sequence: Synthetic oligonucleotide
  Target: LAMA2; (+) strand; PAM type: YTN; PAM sequence: TTA
aagcaggtgacttattgtta

SEQ ID NO: 384581 - DNA, 20 bp, Artificial Sequence
  Description of Artificial Sequence: Synthetic oligonucleotide
  Target: LAMA2; (+) strand; PAM type: YTN; PAM sequence: CTT
attgttatgctccaaaaaat

SEQ ID NO: 384582 - DNA, 20 bp, Artificial Sequence
  Description of Artificial Sequence: Synthetic oligonucleotide
  Target: LAMA2; (+) strand; PAM type: YTN; PAM sequence: TTA
ttgttatgctccaaaaaatg

SEQ ID NO: 384583 - DNA, 20 bp, Artificial Sequence
  Description of Artificial Sequence: Synthetic oligonucleotide
  Target: LAMA2; (+) strand; PAM type: YTN; PAM sequence: TTG
ttatgctccaaaaaatgtca

SEQ ID NO: 384584 - DNA, 20 bp, Artificial Sequence
  Description of Artificial Sequence: Synthetic oligonucleotide
  Target: LAMA2; (+) strand; PAM type: YTN; PAM sequence: TTA
tgctccaaaaaatgtcatct

SEQ ID NO: 384585 - DNA, 20 bp, Artificial Sequence
  Description of Artificial Sequence: Synthetic oligonucleotide
  Target: LAMA2; (+) strand; PAM type: YTN; PAM sequence: CTC
caaaaaatgtcatctcccgg

SEQ ID NO: 384586 - DNA, 20 bp, Artificial Sequence
  Description of Artificial Sequence: Synthetic oligonucleotide
  Target: LAMA2; (+) strand; PAM type: YTN; PAM sequence: CTC
ccggaatcacagcctccttt

SEQ ID NO: 384587 - DNA, 20 bp, Artificial Sequence
  Description of Artificial Sequence: Synthetic oligonucleotide
  Target: LAMA2; (+) strand; PAM type: YTN; PAM sequence: CTC
ctttttcttaagatggtctg

SEQ ID NO: 384588 - DNA, 20 bp, Artificial Sequence
  Description of Artificial Sequence: Synthetic oligonucleotide
  Target: LAMA2; (+) strand; PAM type: YTN; PAM sequence: CTT
tttcttaagatggtctgagc

SEQ ID NO: 384589 - DNA, 20 bp, Artificial Sequence
  Description of Artificial Sequence: Synthetic oligonucleotide
  Target: LAMA2; (+) strand; PAM type: YTN; PAM sequence: TTT
ttcttaagatggtctgagct

SEQ ID NO: 384590 - DNA, 20 bp, Artificial Sequence
  Description of Artificial Sequence: Synthetic oligonucleotide
  Target: LAMA2; (+) strand; PAM type: YTN; PAM sequence: TTT
tcttaagatggtctgagctt

SEQ ID NO: 384591 - DNA, 20 bp, Artificial Sequence
  Description of Artificial Sequence: Synthetic oligonucleotide
  Target: LAMA2; (+) strand; PAM type: YTN; PAM sequence: TTT
cttaagatggtctgagcttg

SEQ ID NO: 384592 - DNA, 20 bp, Artificial Sequence
  Description of Artificial Sequence: Synthetic oligonucleotide
  Target: LAMA2; (+) strand; PAM type: YTN; PAM sequence: TTC
ttaagatggtctgagcttgg

SEQ ID NO: 384593 - DNA, 20 bp, Artificial Sequence
  Description of Artificial Sequence: Synthetic oligonucleotide
  Target: LAMA2; (+) strand; PAM type: YTN; PAM sequence: CTT
aagatggtctgagcttggta

SEQ ID NO: 384594 - DNA, 20 bp, Artificial Sequence
  Description of Artificial Sequence: Synthetic oligonucleotide
  Target: LAMA2; (+) strand; PAM type: YTN; PAM sequence: TTA
agatggtctgagcttggtac

SEQ ID NO: 384595 - DNA, 20 bp, Artificial Sequence
  Description of Artificial Sequence: Synthetic oligonucleotide
  Target: LAMA2; (+) strand; PAM type: YTN; PAM sequence: CTG
agcttggtaccatggaaaca

SEQ ID NO: 384596 - DNA, 20 bp, Artificial Sequence
  Description of Artificial Sequence: Synthetic oligonucleotide
  Target: LAMA2; (+) strand; PAM type: YTN; PAM sequence: CTT
ggtaccatggaaacacagcc

SEQ ID NO: 384597 - DNA, 20 bp, Artificial Sequence
  Description of Artificial Sequence: Synthetic oligonucleotide
  Target: LAMA2; (+) strand; PAM type: YTN; PAM sequence: TTG
gtaccatggaaacacagccc

SEQ ID NO: 384598 - DNA, 20 bp, Artificial Sequence
  Description of Artificial Sequence: Synthetic oligonucleotide
  Target: LAMA2; (+) strand; PAM type: YTN; PAM sequence: CTA
agaagaaacaaaagctggaa

SEQ ID NO: 384599 - DNA, 20 bp, Artificial Sequence
  Description of Artificial Sequence: Synthetic oligonucleotide
  Target: LAMA2; (+) strand; PAM type: YTN; PAM sequence: CTG
gaatatcttatttcagtgct

SEQ ID NO: 384600 - DNA, 20 bp, Artificial Sequence
  Description of Artificial Sequence: Synthetic oligonucleotide
  Target: LAMA2; (+) strand; PAM type: YTN; PAM sequence: CTT
atttcagtgctgtctgaaca

SEQ ID NO: 384601 - DNA, 20 bp, Artificial Sequence
  Description of Artificial Sequence: Synthetic oligonucleotide
  Target: LAMA2; (+) strand; PAM type: YTN; PAM sequence: TTA
tttcagtgctgtctgaacat

SEQ ID NO: 384602 - DNA, 20 bp, Artificial Sequence
  Description of Artificial Sequence: Synthetic oligonucleotide
  Target: LAMA2; (+) strand; PAM type: YTN; PAM sequence: TTT
cagtgctgtctgaacattct

SEQ ID NO: 384603 - DNA, 20 bp, Artificial Sequence
  Description of Artificial Sequence: Synthetic oligonucleotide
  Target: LAMA2; (+) strand; PAM type: YTN; PAM sequence: TTC
agtgctgtctgaacattctg

SEQ ID NO: 384604 - DNA, 20 bp, Artificial Sequence
  Description of Artificial Sequence: Synthetic oligonucleotide
  Target: LAMA2; (+) strand; PAM type: YTN; PAM sequence: CTG
tctgaacattctgcactggt

SEQ ID NO: 384605 - DNA, 20 bp, Artificial Sequence
  Description of Artificial Sequence: Synthetic oligonucleotide
  Target: LAMA2; (+) strand; PAM type: YTN; PAM sequence: CTG
aacattctgcactggtttat

SEQ ID NO: 384606 - DNA, 20 bp, Artificial Sequence
  Description of Artificial Sequence: Synthetic oligonucleotide
  Target: LAMA2; (+) strand; PAM type: YTN; PAM sequence: TTC
tgcactggtttatacattga

SEQ ID NO: 384607 - DNA, 20 bp, Artificial Sequence
  Description of Artificial Sequence: Synthetic oligonucleotide
  Target: LAMA2; (+) strand; PAM type: YTN; PAM sequence: CTG
cactggtttatacattgatg

SEQ ID NO: 384608 - DNA, 20 bp, Artificial Sequence
  Description of Artificial Sequence: Synthetic oligonucleotide
  Target: LAMA2; (+) strand; PAM type: YTN; PAM sequence: CTG
gtttatacattgatgaaaac

SEQ ID NO: 384609 - DNA, 20 bp, Artificial Sequence
  Description of Artificial Sequence: Synthetic oligonucleotide
  Target: LAMA2; (+) strand; PAM type: YTN; PAM sequence: TTT
atacattgatgaaaacccta

SEQ ID NO: 384610 - DNA, 20 bp, Artificial Sequence
  Description of Artificial Sequence: Synthetic oligonucleotide
  Target: LAMA2; (+) strand; PAM type: YTN; PAM sequence: TTA
tacattgatgaaaaccctag

SEQ ID NO: 384611 - DNA, 20 bp, Artificial Sequence
  Description of Artificial Sequence: Synthetic oligonucleotide
  Target: LAMA2; (+) strand; PAM type: YTN; PAM sequence: TTG
atgaaaaccctaggtgtttt

SEQ ID NO: 384612 - DNA, 20 bp, Artificial Sequence
  Description of Artificial Sequence: Synthetic oligonucleotide
  Target: LAMA2; (+) strand; PAM type: YTN; PAM sequence: CTA
ggtgttttcatttacctttt

SEQ ID NO: 384613 - DNA, 20 bp, Artificial Sequence
  Description of Artificial Sequence: Synthetic oligonucleotide
  Target: LAMA2; (+) strand; PAM type: YTN; PAM sequence: TTT
tcatttacctttttgcccac

SEQ ID NO: 384614 - DNA, 20 bp, Artificial Sequence
  Description of Artificial Sequence: Synthetic oligonucleotide
  Target: LAMA2; (+) strand; PAM type: YTN; PAM sequence: TTT
catttacctttttgcccaca

SEQ ID NO: 384615 - DNA, 20 bp, Artificial Sequence
  Description of Artificial Sequence: Synthetic oligonucleotide
  Target: LAMA2; (+) strand; PAM type: YTN; PAM sequence: TTC
atttacctttttgcccacac

SEQ ID NO: 384616 - DNA, 20 bp, Artificial Sequence
  Description of Artificial Sequence: Synthetic oligonucleotide
  Target: LAMA2; (+) strand; PAM type: YTN; PAM sequence: TTT
acctttttgcccacactacc

SEQ ID NO: 384617 - DNA, 20 bp, Artificial Sequence
  Description of Artificial Sequence: Synthetic oligonucleotide
  Target: LAMA2; (+) strand; PAM type: YTN; PAM sequence: TTA
cctttttgcccacactacct

SEQ ID NO: 384618 - DNA, 20 bp, Artificial Sequence
  Description of Artificial Sequence: Synthetic oligonucleotide
  Target: LAMA2; (+) strand; PAM type: YTN; PAM sequence: CTT
tttgcccacactacctgcac

SEQ ID NO: 384619 - DNA, 20 bp, Artificial Sequence
  Description of Artificial Sequence: Synthetic oligonucleotide
  Target: LAMA2; (+) strand; PAM type: YTN; PAM sequence: TTT
ttgcccacactacctgcact

SEQ ID NO: 384620 - DNA, 20 bp, Artificial Sequence
  Description of Artificial Sequence: Synthetic oligonucleotide
  Target: LAMA2; (+) strand; PAM type: YTN; PAM sequence: TTT
tgcccacactacctgcactt

SEQ ID NO: 384621 - DNA, 20 bp, Artificial Sequence
  Description of Artificial Sequence: Synthetic oligonucleotide
  Target: LAMA2; (+) strand; PAM type: YTN; PAM sequence: TTT
gcccacactacctgcacttt

SEQ ID NO: 384622 - DNA, 20 bp, Artificial Sequence
  Description of Artificial Sequence: Synthetic oligonucleotide
  Target: LAMA2; (+) strand; PAM type: YTN; PAM sequence: TTG
cccacactacctgcactttc

SEQ ID NO: 384623 - DNA, 20 bp, Artificial Sequence
  Description of Artificial Sequence: Synthetic oligonucleotide
  Target: LAMA2; (+) strand; PAM type: YTN; PAM sequence: CTA
cctgcactttctgttaagtg

SEQ ID NO: 384624 - DNA, 20 bp, Artificial Sequence
  Description of Artificial Sequence: Synthetic oligonucleotide
  Target: LAMA2; (+) strand; PAM type: YTN; PAM sequence: CTG
cactttctgttaagtgattt

SEQ ID NO: 384625 - DNA, 20 bp, Artificial Sequence
  Description of Artificial Sequence: Synthetic oligonucleotide
  Target: LAMA2; (+) strand; PAM type: YTN; PAM sequence: CTT
tctgttaagtgatttataga

SEQ ID NO: 384626 - DNA, 20 bp, Artificial Sequence
  Description of Artificial Sequence: Synthetic oligonucleotide
  Target: LAMA2; (+) strand; PAM type: YTN; PAM sequence: TTT
ctgttaagtgatttatagac

SEQ ID NO: 384627 - DNA, 20 bp, Artificial Sequence
  Description of Artificial Sequence: Synthetic oligonucleotide
  Target: LAMA2; (+) strand; PAM type: YTN; PAM sequence: TTC
tgttaagtgatttatagact

SEQ ID NO: 384628 - DNA, 20 bp, Artificial Sequence
  Description of Artificial Sequence: Synthetic oligonucleotide
  Target: LAMA2; (+) strand; PAM type: YTN; PAM sequence: CTG
ttaagtgatttatagacttc

SEQ ID NO: 384629 - DNA, 20 bp, Artificial Sequence
  Description of Artificial Sequence: Synthetic oligonucleotide
  Target: LAMA2; (+) strand; PAM type: YTN; PAM sequence: TTA
agtgatttatagacttcagt

SEQ ID NO: 384630 - DNA, 20 bp, Artificial Sequence
  Description of Artificial Sequence: Synthetic oligonucleotide
  Target: LAMA2; (+) strand; PAM type: YTN; PAM sequence: TTT
atagacttcagtaaggcagg

SEQ ID NO: 384631 - DNA, 20 bp, Artificial Sequence
  Description of Artificial Sequence: Synthetic oligonucleotide
  Target: LAMA2; (+) strand; PAM type: YTN; PAM sequence: TTA
tagacttcagtaaggcaggg

SEQ ID NO: 384632 - DNA, 20 bp, Artificial Sequence
  Description of Artificial Sequence: Synthetic oligonucleotide
  Target: LAMA2; (+) strand; PAM type: YTN; PAM sequence: CTT
cagtaaggcagggtagtttt

SEQ ID NO: 384633 - DNA, 20 bp, Artificial Sequence
  Description of Artificial Sequence: Synthetic oligonucleotide
  Target: LAMA2; (+) strand; PAM type: YTN; PAM sequence: TTC
agtaaggcagggtagtttta

SEQ ID NO: 384634 - DNA, 20 bp, Artificial Sequence
  Description of Artificial Sequence: Synthetic oligonucleotide
  Target: LAMA2; (+) strand; PAM type: YTN; PAM sequence: TTT
tactctaagaatttgctttt

SEQ ID NO: 384635 - DNA, 20 bp, Artificial Sequence
  Description of Artificial Sequence: Synthetic oligonucleotide
  Target: LAMA2; (+) strand; PAM type: YTN; PAM sequence: TTT
actctaagaatttgcttttg

SEQ ID NO: 384636 - DNA, 20 bp, Artificial Sequence
  Description of Artificial Sequence: Synthetic oligonucleotide
  Target: LAMA2; (+) strand; PAM type: YTN; PAM sequence: TTA
ctctaagaatttgcttttga

SEQ ID NO: 384637 - DNA, 20 bp, Artificial Sequence
  Description of Artificial Sequence: Synthetic oligonucleotide
  Target: LAMA2; (+) strand; PAM type: YTN; PAM sequence: CTC
taagaatttgcttttgaaaa

SEQ ID NO: 384638 - DNA, 20 bp, Artificial Sequence
  Description of Artificial Sequence: Synthetic oligonucleotide
  Target: LAMA2; (+) strand; PAM type: YTN; PAM sequence: CTA
agaatttgcttttgaaaata

SEQ ID NO: 384639 - DNA, 20 bp, Artificial Sequence
  Description of Artificial Sequence: Synthetic oligonucleotide
  Target: LAMA2; (+) strand; PAM type: YTN; PAM sequence: TTT
gcttttgaaaataatgtatg

SEQ ID NO: 384640 - DNA, 20 bp, Artificial Sequence
  Description of Artificial Sequence: Synthetic oligonucleotide
  Target: LAMA2; (+) strand; PAM type: YTN; PAM sequence: TTG
cttttgaaaataatgtatgg

SEQ ID NO: 384641 - DNA, 20 bp, Artificial Sequence
  Description of Artificial Sequence: Synthetic oligonucleotide
  Target: LAMA2; (+) strand; PAM type: YTN; PAM sequence: CTT
ttgaaaataatgtatggcag

SEQ ID NO: 384642 - DNA, 20 bp, Artificial Sequence
  Description of Artificial Sequence: Synthetic oligonucleotide
  Target: LAMA2; (+) strand; PAM type: YTN; PAM sequence: TTT
tgaaaataatgtatggcagt

SEQ ID NO: 384643 - DNA, 20 bp, Artificial Sequence
  Description of Artificial Sequence: Synthetic oligonucleotide
  Target: LAMA2; (+) strand; PAM type: YTN; PAM sequence: TTT
gaaaataatgtatggcagtt

SEQ ID NO: 384644 - DNA, 20 bp, Artificial Sequence
  Description of Artificial Sequence: Synthetic oligonucleotide
  Target: LAMA2; (+) strand; PAM type: YTN; PAM sequence: TTG
aaaataatgtatggcagttt

SEQ ID NO: 384645 - DNA, 20 bp, Artificial Sequence
  Description of Artificial Sequence: Synthetic oligonucleotide
  Target: LAMA2; (+) strand; PAM type: YTN; PAM sequence: TTT
gttcagaattagaattctgg

SEQ ID NO: 384646 - DNA, 20 bp, Artificial Sequence
  Description of Artificial Sequence: Synthetic oligonucleotide
  Target: LAMA2; (+) strand; PAM type: YTN; PAM sequence: TTG
ttcagaattagaattctgga

SEQ ID NO: 384647 - DNA, 20 bp, Artificial Sequence
  Description of Artificial Sequence: Synthetic oligonucleotide
  Target: LAMA2; (+) strand; PAM type: YTN; PAM sequence: TTC
agaattagaattctggacac

SEQ ID NO: 384648 - DNA, 20 bp, Artificial Sequence
  Description of Artificial Sequence: Synthetic oligonucleotide
  Target: LAMA2; (+) strand; PAM type: YTN; PAM sequence: TTA
gaattctggacactttatct

SEQ ID NO: 384649 - DNA, 20 bp, Artificial Sequence
  Description of Artificial Sequence: Synthetic oligonucleotide
  Target: LAMA2; (+) strand; PAM type: YTN; PAM sequence: TTC
tggacactttatcttgagtg

SEQ ID NO: 384650 - DNA, 20 bp, Artificial Sequence
  Description of Artificial Sequence: Synthetic oligonucleotide
  Target: LAMA2; (+) strand; PAM type: YTN; PAM sequence: CTG
gacactttatcttgagtgtt

SEQ ID NO: 384651 - DNA, 20 bp, Artificial Sequence
  Description of Artificial Sequence: Synthetic oligonucleotide
  Target: LAMA2; (+) strand; PAM type: YTN; PAM sequence: CTT
tatcttgagtgttaaacagc

SEQ ID NO: 384652 - DNA, 20 bp, Artificial Sequence
  Description of Artificial Sequence: Synthetic oligonucleotide
  Target: LAMA2; (+) strand; PAM type: YTN; PAM sequence: TTT
atcttgagtgttaaacagcc

SEQ ID NO: 384653 - DNA, 20 bp, Artificial Sequence
  Description of Artificial Sequence: Synthetic oligonucleotide
  Target: LAMA2; (+) strand; PAM type: YTN; PAM sequence: TTA
tcttgagtgttaaacagcca

SEQ ID NO: 384654 - DNA, 20 bp, Artificial Sequence
  Description of Artificial Sequence: Synthetic oligonucleotide
  Target: LAMA2; (+) strand; PAM type: YTN; PAM sequence: CTT
gagtgttaaacagccacaga

SEQ ID NO: 384655 - DNA, 20 bp, Artificial Sequence
  Description of Artificial Sequence: Synthetic oligonucleotide
  Target: LAMA2; (+) strand; PAM type: YTN; PAM sequence: TTG
agtgttaaacagccacagag

SEQ ID NO: 384656 - DNA, 20 bp, Artificial Sequence
  Description of Artificial Sequence: Synthetic oligonucleotide
  Target: LAMA2; (+) strand; PAM type: YTN; PAM sequence: TTA
aacagccacagagcaatttg

SEQ ID NO: 384657 - DNA, 20 bp, Artificial Sequence
  Description of Artificial Sequence: Synthetic oligonucleotide
  Target: LAMA2; (+) strand; PAM type: YTN; PAM sequence: TTT
ggacaatgtgatctttgcac

SEQ ID NO: 384658 - DNA, 20 bp, Artificial Sequence
  Description of Artificial Sequence: Synthetic oligonucleotide
  Target: LAMA2; (+) strand; PAM type: YTN; PAM sequence: TTG
gacaatgtgatctttgcacc

SEQ ID NO: 384659 - DNA, 20 bp, Artificial Sequence
  Description of Artificial Sequence: Synthetic oligonucleotide
  Target: LAMA2; (+) strand; PAM type: YTN; PAM sequence: CTT
tgcacctgtgcctactcact

SEQ ID NO: 384660 - DNA, 20 bp, Artificial Sequence
  Description of Artificial Sequence: Synthetic oligonucleotide
  Target: LAMA2; (+) strand; PAM type: YTN; PAM sequence: TTT
gcacctgtgcctactcactt

SEQ ID NO: 384661 - DNA, 20 bp, Artificial Sequence
  Description of Artificial Sequence: Synthetic oligonucleotide
  Target: LAMA2; (+) strand; PAM type: YTN; PAM sequence: TTG
cacctgtgcctactcacttt

SEQ ID NO: 384662 - DNA, 20 bp, Artificial Sequence
  Description of Artificial Sequence: Synthetic oligonucleotide
  Target: LAMA2; (+) strand; PAM type: YTN; PAM sequence: CTG
tgcctactcactttcttctt

SEQ ID NO: 384663 - DNA, 20 bp, Artificial Sequence
  Description of Artificial Sequence: Synthetic oligonucleotide
  Target: LAMA2; (+) strand; PAM type: YTN; PAM sequence: CTA
ctcactttcttcttaatctt

SEQ ID NO: 384664 - DNA, 20 bp, Artificial Sequence
  Description of Artificial Sequence: Synthetic oligonucleotide
  Target: LAMA2; (+) strand; PAM type: YTN; PAM sequence: CTC
actttcttcttaatcttcgg

SEQ ID NO: 384665 - DNA, 20 bp, Artificial Sequence
  Description of Artificial Sequence: Synthetic oligonucleotide
  Target: LAMA2; (+) strand; PAM type: YTN; PAM sequence: CTT
tcttcttaatcttcggcttt

SEQ ID NO: 384666 - DNA, 20 bp, Artificial Sequence
  Description of Artificial Sequence: Synthetic oligonucleotide
  Target: LAMA2; (+) strand; PAM type: YTN; PAM sequence: TTT
cttcttaatcttcggctttg

SEQ ID NO: 384667 - DNA, 20 bp, Artificial Sequence
  Description of Artificial Sequence: Synthetic oligonucleotide
  Target: LAMA2; (+) strand; PAM type: YTN; PAM sequence: TTC
ttcttaatcttcggctttgt

SEQ ID NO: 384668 - DNA, 20 bp, Artificial Sequence
  Description of Artificial Sequence: Synthetic oligonucleotide
  Target: LAMA2; (+) strand; PAM type: YTN; PAM sequence: CTT
cttaatcttcggctttgtgt

SEQ ID NO: 384669 - DNA, 20 bp, Artificial Sequence
  Description of Artificial Sequence: Synthetic oligonucleotide
  Target: LAMA2; (+) strand; PAM type: YTN; PAM sequence: TTC
ttaatcttcggctttgtgtg

SEQ ID NO: 384670 - DNA, 20 bp, Artificial Sequence
  Description of Artificial Sequence: Synthetic oligonucleotide
  Target: LAMA2; (+) strand; PAM type: YTN; PAM sequence: CTT
aatcttcggctttgtgtgca

SEQ ID NO: 384671 - DNA, 20 bp, Artificial Sequence
  Description of Artificial Sequence: Synthetic oligonucleotide
  Target: LAMA2; (+) strand; PAM type: YTN; PAM sequence: TTA
atcttcggctttgtgtgcat

SEQ ID NO: 384672 - DNA, 20 bp, Artificial Sequence
  Description of Artificial Sequence: Synthetic oligonucleotide
  Target: LAMA2; (+) strand; PAM type: YTN; PAM sequence: CTT
cggctttgtgtgcattctga

SEQ ID NO: 384673 - DNA, 20 bp, Artificial Sequence
  Description of Artificial Sequence: Synthetic oligonucleotide
  Target: LAMA2; (+) strand; PAM type: YTN; PAM sequence: TTC
ggctttgtgtgcattctgaa

SEQ ID NO: 384674 - DNA, 20 bp, Artificial Sequence
  Description of Artificial Sequence: Synthetic oligonucleotide
  Target: LAMA2; (+) strand; PAM type: YTN; PAM sequence: CTT
tgtgtgcattctgaaaacat

SEQ ID NO: 384675 - DNA, 20 bp, Artificial Sequence
  Description of Artificial Sequence: Synthetic oligonucleotide
  Target: LAMA2; (+) strand; PAM type: YTN; PAM sequence: TTT
gtgtgcattctgaaaacatt

SEQ ID NO: 384676 - DNA, 20 bp, Artificial Sequence
  Description of Artificial Sequence: Synthetic oligonucleotide
  Target: LAMA2; (+) strand; PAM type: YTN; PAM sequence: TTG
tgtgcattctgaaaacattt

SEQ ID NO: 384677 - DNA, 20 bp, Artificial Sequence
  Description of Artificial Sequence: Synthetic oligonucleotide
  Target: LAMA2; (+) strand; PAM type: YTN; PAM sequence: TTC
tgaaaacatttcctgtaaat

SEQ ID NO: 384678 - DNA, 20 bp, Artificial Sequence
  Description of Artificial Sequence: Synthetic oligonucleotide
  Target: LAMA2; (+) strand; PAM type: YTN; PAM sequence: CTG
aaaacatttcctgtaaatca

SEQ ID NO: 384679 - DNA, 20 bp, Artificial Sequence
  Description of Artificial Sequence: Synthetic oligonucleotide
  Target: LAMA2; (+) strand; PAM type: YTN; PAM sequence: TTT
cctgtaaatcatctcctttt

SEQ ID NO: 384680 - DNA, 20 bp, Artificial Sequence
  Description of Artificial Sequence: Synthetic oligonucleotide
  Target: LAMA2; (+) strand; PAM type: YTN; PAM sequence: TTC
ctgtaaatcatctccttttc

SEQ ID NO: 384681 - DNA, 20 bp, Artificial Sequence
  Description of Artificial Sequence: Synthetic oligonucleotide
  Target: LAMA2; (+) strand; PAM type: YTN; PAM sequence: CTG
taaatcatctccttttcctc

SEQ ID NO: 384682 - DNA, 20 bp, Artificial Sequence
  Description of Artificial Sequence: Synthetic oligonucleotide
  Target: LAMA2; (+) strand; PAM type: YTN; PAM sequence: CTC
cttttcctctgaaagctcct

SEQ ID NO: 384683 - DNA, 20 bp, Artificial Sequence
  Description of Artificial Sequence: Synthetic oligonucleotide
  Target: LAMA2; (+) strand; PAM type: YTN; PAM sequence: CTT
ttcctctgaaagctcctctt

SEQ ID NO: 384684 - DNA, 20 bp, Artificial Sequence
  Description of Artificial Sequence: Synthetic oligonucleotide
  Target: LAMA2; (+) strand; PAM type: YTN; PAM sequence: TTT
tcctctgaaagctcctcttt

SEQ ID NO: 384685 - DNA, 20 bp, Artificial Sequence
  Description of Artificial Sequence: Synthetic oligonucleotide
  Target: LAMA2; (+) strand; PAM type: YTN; PAM sequence: TTT
cctctgaaagctcctctttt

SEQ ID NO: 384686 - DNA, 20 bp, Artificial Sequence
  Description of Artificial Sequence: Synthetic oligonucleotide
  Target: LAMA2; (+) strand; PAM type: YTN; PAM sequence: TTC
ctctgaaagctcctcttttt

SEQ ID NO: 384687 - DNA, 20 bp, Artificial Sequence
  Description of Artificial Sequence: Synthetic oligonucleotide
  Target: LAMA2; (+) strand; PAM type: YTN; PAM sequence: CTC
tgaaagctcctcttttttgt

SEQ ID NO: 384688 - DNA, 20 bp, Artificial Sequence
  Description of Artificial Sequence: Synthetic oligonucleotide
  Target: LAMA2; (+) strand; PAM type: YTN; PAM sequence: CTG
aaagctcctcttttttgttg

SEQ ID NO: 384689 - DNA, 20 bp, Artificial Sequence
  Description of Artificial Sequence: Synthetic oligonucleotide
  Target: LAMA2; (+) strand; PAM type: YTN; PAM sequence: CTC
ctcttttttgttggctggaa

SEQ ID NO: 384690 - DNA, 20 bp, Artificial Sequence
  Description of Artificial Sequence: Synthetic oligonucleotide
  Target: LAMA2; (+) strand; PAM type: YTN; PAM sequence: CTC
ttttttgttggctggaatca

SEQ ID NO: 384691 - DNA, 20 bp, Artificial Sequence
  Description of Artificial Sequence: Synthetic oligonucleotide
  Target: LAMA2; (+) strand; PAM type: YTN; PAM sequence: CTT
ttttgttggctggaatcaca

SEQ ID NO: 384692 - DNA, 20 bp, Artificial Sequence
  Description of Artificial Sequence: Synthetic oligonucleotide
  Target: LAMA2; (+) strand; PAM type: YTN; PAM sequence: TTT
tttgttggctggaatcacaa

SEQ ID NO: 384693 - DNA, 20 bp, Artificial Sequence
  Description of Artificial Sequence: Synthetic oligonucleotide
  Target: LAMA2; (+) strand; PAM type: YTN; PAM sequence: TTT
ttgttggctggaatcacaag

SEQ ID NO: 384694 - DNA, 20 bp, Artificial Sequence
  Description of Artificial Sequence: Synthetic oligonucleotide
  Target: LAMA2; (+) strand; PAM type: YTN; PAM sequence: TTT
tgttggctggaatcacaagc

SEQ ID NO: 384695 - DNA, 20 bp, Artificial Sequence
  Description of Artificial Sequence: Synthetic oligonucleotide
  Target: LAMA2; (+) strand; PAM type: YTN; PAM sequence: TTT
gttggctggaatcacaagcc

SEQ ID NO: 384696 - DNA, 20 bp, Artificial Sequence
  Description of Artificial Sequence: Synthetic oligonucleotide
  Target: LAMA2; (+) strand; PAM type: YTN; PAM sequence: TTG
ttggctggaatcacaagcct

SEQ ID NO: 384697 - DNA, 20 bp, Artificial Sequence
  Description of Artificial Sequence: Synthetic oligonucleotide
  Target: LAMA2; (+) strand; PAM type: YTN; PAM sequence: TTG
gctggaatcacaagcctttt

SEQ ID NO: 384698 - DNA, 20 bp, Artificial Sequence
  Description of Artificial Sequence: Synthetic oligonucleotide
  Target: LAMA2; (+) strand; PAM type: YTN; PAM sequence: CTG
gaatcacaagccttttacag

SEQ ID NO: 384699 - DNA, 20 bp, Artificial Sequence
  Description of Artificial Sequence: Synthetic oligonucleotide
  Target: LAMA2; (+) strand; PAM type: YTN; PAM sequence: CTT
ttacagggtgtcaaatgtca

SEQ ID NO: 384700 - DNA, 20 bp, Artificial Sequence
  Description of Artificial Sequence: Synthetic oligonucleotide
  Target: LAMA2; (+) strand; PAM type: YTN; PAM sequence: TTT
tacagggtgtcaaatgtcaa

SEQ ID NO: 384701 - DNA, 20 bp, Artificial Sequence
  Description of Artificial Sequence: Synthetic oligonucleotide
  Target: LAMA2; (+) strand; PAM type: YTN; PAM sequence: TTT
acagggtgtcaaatgtcaat

SEQ ID NO: 384702 - DNA, 20 bp, Artificial Sequence
  Description of Artificial Sequence: Synthetic oligonucleotide
  Target: LAMA2; (+) strand; PAM type: YTN; PAM sequence: TTA
cagggtgtcaaatgtcaatt

SEQ ID NO: 384703 - DNA, 20 bp, Artificial Sequence
  Description of Artificial Sequence: Synthetic oligonucleotide
  Target: LAMA2; (+) strand; PAM type: YTN; PAM sequence: TTT
ttaggtaagctggatattga

SEQ ID NO: 384704 - DNA, 20 bp, Artificial Sequence
  Description of Artificial Sequence: Synthetic oligonucleotide
  Target: LAMA2; (+) strand; PAM type: YTN; PAM sequence: TTT
taggtaagctggatattgaa

SEQ ID NO: 384705 - DNA, 20 bp, Artificial Sequence
  Description of Artificial Sequence: Synthetic oligonucleotide
  Target: LAMA2; (+) strand; PAM type: YTN; PAM sequence: TTT
aggtaagctggatattgaag

SEQ ID NO: 384706 - DNA, 20 bp, Artificial Sequence
  Description of Artificial Sequence: Synthetic oligonucleotide
  Target: LAMA2; (+) strand; PAM type: YTN; PAM sequence: TTA
ggtaagctggatattgaaga

SEQ ID NO: 384707 - DNA, 20 bp, Artificial Sequence
  Description of Artificial Sequence: Synthetic oligonucleotide
  Target: LAMA2; (+) strand; PAM type: YTN; PAM sequence: CTG
gatattgaagaggataatat

SEQ ID NO: 384708 - DNA, 20 bp, Artificial Sequence
  Description of Artificial Sequence: Synthetic oligonucleotide
  Target: LAMA2; (+) strand; PAM type: YTN; PAM sequence: TTG
aagaggataatatacatggt

SEQ ID NO: 384709 - DNA, 20 bp, Artificial Sequence
  Description of Artificial Sequence: Synthetic oligonucleotide
  Target: LAMA2; (+) strand; PAM type: YTN; PAM sequence: CTT
attgttcatccagggaccaa

SEQ ID NO: 384710 - DNA, 20 bp, Artificial Sequence
  Description of Artificial Sequence: Synthetic oligonucleotide
  Target: LAMA2; (+) strand; PAM type: YTN; PAM sequence: TTA
ttgttcatccagggaccaag

SEQ ID NO: 384711 - DNA, 20 bp, Artificial Sequence
  Description of Artificial Sequence: Synthetic oligonucleotide
  Target: LAMA2; (+) strand; PAM type: YTN; PAM sequence: TTG
ttcatccagggaccaagtag

SEQ ID NO: 384712 - DNA, 20 bp, Artificial Sequence
  Description of Artificial Sequence: Synthetic oligonucleotide
  Target: LAMA2; (+) strand; PAM type: YTN; PAM sequence: TTC
atccagggaccaagtagtat

SEQ ID NO: 384713 - DNA, 20 bp, Artificial Sequence
  Description of Artificial Sequence: Synthetic oligonucleotide
  Target: LAMA2; (+) strand; PAM type: YTN; PAM sequence: TTA
tttttgtctctctttcccta

SEQ ID NO: 384714 - DNA, 20 bp, Artificial Sequence
  Description of Artificial Sequence: Synthetic oligonucleotide
  Target: LAMA2; (+) strand; PAM type: YTN; PAM sequence: TTT
ttgtctctctttccctaatt

SEQ ID NO: 384715 - DNA, 20 bp, Artificial Sequence
  Description of Artificial Sequence: Synthetic oligonucleotide
  Target: LAMA2; (+) strand; PAM type: YTN; PAM sequence: TTT
tgtctctctttccctaattt

SEQ ID NO: 384716 - DNA, 20 bp, Artificial Sequence
  Description of Artificial Sequence: Synthetic oligonucleotide
  Target: LAMA2; (+) strand; PAM type: YTN; PAM sequence: TTT
gtctctctttccctaatttc

SEQ ID NO: 384717 - DNA, 20 bp, Artificial Sequence
  Description of Artificial Sequence: Synthetic oligonucleotide
  Target: LAMA2; (+) strand; PAM type: YTN; PAM sequence: TTG
tctctctttccctaatttct

SEQ ID NO: 384718 - DNA, 20 bp, Artificial Sequence
  Description of Artificial Sequence: Synthetic oligonucleotide
  Target: LAMA2; (+) strand; PAM type: YTN; PAM sequence: CTC
tctttccctaatttctcctt

SEQ ID NO: 384719 - DNA, 20 bp, Artificial Sequence
  Description of Artificial Sequence: Synthetic oligonucleotide
  Target: LAMA2; (+) strand; PAM type: YTN; PAM sequence: CTC
tttccctaatttctccttga

SEQ ID NO: 384720 - DNA, 20 bp, Artificial Sequence
  Description of Artificial Sequence: Synthetic oligonucleotide
  Target: LAMA2; (+) strand; PAM type: YTN; PAM sequence: CTT
tccctaatttctccttgatg

SEQ ID NO: 384721 - DNA, 20 bp, Artificial Sequence
  Description of Artificial Sequence: Synthetic oligonucleotide
  Target: LAMA2; (+) strand; PAM type: YTN; PAM sequence: TTT
ccctaatttctccttgatgc

SEQ ID NO: 384722 - DNA, 20 bp, Artificial Sequence
  Description of Artificial Sequence: Synthetic oligonucleotide
  Target: LAMA2; (+) strand; PAM type: YTN; PAM sequence: TTC
cctaatttctccttgatgcc

SEQ ID NO: 384723 - DNA, 20 bp, Artificial Sequence
  Description of Artificial Sequence: Synthetic oligonucleotide
  Target: LAMA2; (+) strand; PAM type: YTN; PAM sequence: CTA
atttctccttgatgccccga

SEQ ID NO: 384724 - DNA, 20 bp, Artificial Sequence
  Description of Artificial Sequence: Synthetic oligonucleotide
  Target: LAMA2; (+) strand; PAM type: YTN; PAM sequence: TTT
ctccttgatgccccgattta

SEQ ID NO: 384725 - DNA, 20 bp, Artificial Sequence
  Description of Artificial Sequence: Synthetic oligonucleotide
  Target: LAMA2; (+) strand; PAM type: YTN; PAM sequence: TTC
tccttgatgccccgatttat

SEQ ID NO: 384726 - DNA, 20 bp, Artificial Sequence
  Description of Artificial Sequence: Synthetic oligonucleotide
  Target: LAMA2; (+) strand; PAM type: YTN; PAM sequence: CTC
cttgatgccccgatttattt

SEQ ID NO: 384727 - DNA, 20 bp, Artificial Sequence
  Description of Artificial Sequence: Synthetic oligonucleotide
  Target: LAMA2; (+) strand; PAM type: YTN; PAM sequence: CTT
gatgccccgatttatttaat

SEQ ID NO: 384728 - DNA, 20 bp, Artificial Sequence
  Description of Artificial Sequence: Synthetic oligonucleotide
  Target: LAMA2; (+) strand; PAM type: YTN; PAM sequence: TTG
atgccccgatttatttaatt

SEQ ID NO: 384729 - DNA, 20 bp, Artificial Sequence
  Description of Artificial Sequence: Synthetic oligonucleotide
  Target: LAMA2; (+) strand; PAM type: YTN; PAM sequence: TTT
atttaattgttttaaaaagt

SEQ ID NO: 384730 - DNA, 20 bp, Artificial Sequence
  Description of Artificial Sequence: Synthetic oligonucleotide
  Target: LAMA2; (+) strand; PAM type: YTN; PAM sequence: TTA
tttaattgttttaaaaagta

SEQ ID NO: 384731 - DNA, 20 bp, Artificial Sequence
  Description of Artificial Sequence: Synthetic oligonucleotide
  Target: LAMA2; (+) strand; PAM type: YTN; PAM sequence: TTT
aattgttttaaaaagtaagc

SEQ ID NO: 384732 - DNA, 20 bp, Artificial Sequence
  Description of Artificial Sequence: Synthetic oligonucleotide
  Target: LAMA2; (+) strand; PAM type: YTN; PAM sequence: TTA
attgttttaaaaagtaagcc

SEQ ID NO: 384733 - DNA, 20 bp, Artificial Sequence
  Description of Artificial Sequence: Synthetic oligonucleotide
  Target: LAMA2; (+) strand; PAM type: YTN; PAM sequence: TTG
ttttaaaaagtaagccattt

SEQ ID NO: 384734 - DNA, 20 bp, Artificial Sequence
  Description of Artificial Sequence: Synthetic oligonucleotide
  Target: LAMA2; (+) strand; PAM type: YTN; PAM sequence: TTT
taaaaagtaagccatttgga

SEQ ID NO: 384735 - DNA, 20 bp, Artificial Sequence
  Description of Artificial Sequence: Synthetic oligonucleotide
  Target: LAMA2; (+) strand; PAM type: YTN; PAM sequence: TTT
aaaaagtaagccatttggat

SEQ ID NO: 384736 - DNA, 20 bp, Artificial Sequence
  Description of Artificial Sequence: Synthetic oligonucleotide
  Target: LAMA2; (+) strand; PAM type: YTN; PAM sequence: TTA
aaaagtaagccatttggatt

SEQ ID NO: 384737 - DNA, 20 bp, Artificial Sequence
  Description of Artificial Sequence: Synthetic oligonucleotide
  Target: LAMA2; (+) strand; PAM type: YTN; PAM sequence: TTT
ggattagaaaaatttaataa

SEQ ID NO: 384738 - DNA, 20 bp, Artificial Sequence
  Description of Artificial Sequence: Synthetic oligonucleotide
  Target: LAMA2; (+) strand; PAM type: YTN; PAM sequence: TTG
gattagaaaaatttaataat

SEQ ID NO: 384739 - DNA, 20 bp, Artificial Sequence
  Description of Artificial Sequence: Synthetic oligonucleotide
  Target: LAMA2; (+) strand; PAM type: YTN; PAM sequence: TTA
gaaaaatttaataattaatt

SEQ ID NO: 384740 - DNA, 20 bp, Artificial Sequence
  Description of Artificial Sequence: Synthetic oligonucleotide
  Target: LAMA2; (+) strand; PAM type: YTN; PAM sequence: TTT
aataattaattgataattcc

SEQ ID NO: 384741 - DNA, 20 bp, Artificial Sequence
  Description of Artificial Sequence: Synthetic oligonucleotide
  Target: LAMA2; (+) strand; PAM type: YTN; PAM sequence: TTA
ataattaattgataattccc

SEQ ID NO: 384742 - DNA, 20 bp, Artificial Sequence
  Description of Artificial Sequence: Synthetic oligonucleotide
  Target: LAMA2; (+) strand; PAM type: YTN; PAM sequence: TTA
attgataattccctggtgag

SEQ ID NO: 384743 - DNA, 20 bp, Artificial Sequence
  Description of Artificial Sequence: Synthetic oligonucleotide
  Target: LAMA2; (+) strand; PAM type: YTN; PAM sequence: TTG
ataattccctggtgagtaca

SEQ ID NO: 384744 - DNA, 20 bp, Artificial Sequence
  Description of Artificial Sequence: Synthetic oligonucleotide
  Target: LAMA2; (+) strand; PAM type: YTN; PAM sequence: TTC
cctggtgagtacactataat

SEQ ID NO: 384745 - DNA, 20 bp, Artificial Sequence
  Description of Artificial Sequence: Synthetic oligonucleotide
  Target: LAMA2; (+) strand; PAM type: YTN; PAM sequence: CTG
gtgagtacactataataaaa

SEQ ID NO: 384746 - DNA, 20 bp, Artificial Sequence
  Description of Artificial Sequence: Synthetic oligonucleotide
  Target: LAMA2; (+) strand; PAM type: YTN; PAM sequence: CTA
taataaaagctacaggagat

SEQ ID NO: 384747 - DNA, 20 bp, Artificial Sequence
  Description of Artificial Sequence: Synthetic oligonucleotide
  Target: LAMA2; (+) strand; PAM type: YTN; PAM sequence: CTA
caggagatatacaagagaag

SEQ ID NO: 384748 - DNA, 20 bp, Artificial Sequence
  Description of Artificial Sequence: Synthetic oligonucleotide
  Target: LAMA2; (+) strand; PAM type: YTN; PAM sequence: TTT
tttggaggagctcactgtaa

SEQ ID NO: 384749 - DNA, 20 bp, Artificial Sequence
  Description of Artificial Sequence: Synthetic oligonucleotide
  Target: LAMA2; (+) strand; PAM type: YTN; PAM sequence: TTT
ttggaggagctcactgtaaa

SEQ ID NO: 384750 - DNA, 20 bp, Artificial Sequence
  Description of Artificial Sequence: Synthetic oligonucleotide
  Target: LAMA2; (+) strand; PAM type: YTN; PAM sequence: TTT
tggaggagctcactgtaaaa

SEQ ID NO: 384751 - DNA, 20 bp, Artificial Sequence
  Description of Artificial Sequence: Synthetic oligonucleotide
  Target: LAMA2; (+) strand; PAM type: YTN; PAM sequence: TTT
ggaggagctcactgtaaaac

SEQ ID NO: 384752 - DNA, 20 bp, Artificial Sequence
  Description of Artificial Sequence: Synthetic oligonucleotide
  Target: LAMA2; (+) strand; PAM type: YTN; PAM sequence: TTG
gaggagctcactgtaaaacc

SEQ ID NO: 384753 - DNA, 20 bp, Artificial Sequence
  Description of Artificial Sequence: Synthetic oligonucleotide
  Target: LAMA2; (+) strand; PAM type: YTN; PAM sequence: CTC
actgtaaaacctgtgtgtta

SEQ ID NO: 384754 - DNA, 20 bp, Artificial Sequence
  Description of Artificial Sequence: Synthetic oligonucleotide
  Target: LAMA2; (+) strand; PAM type: YTN; PAM sequence: CTG
taaaacctgtgtgttaaggg

SEQ ID NO: 384755 - DNA, 20 bp, Artificial Sequence
  Description of Artificial Sequence: Synthetic oligonucleotide
  Target: LAMA2; (+) strand; PAM type: YTN; PAM sequence: CTG
tgtgttaaggggtatcaact

SEQ ID NO: 384756 - DNA, 20 bp, Artificial Sequence
  Description of Artificial Sequence: Synthetic oligonucleotide
  Target: LAMA2; (+) strand; PAM type: YTN; PAM sequence: TTA
aggggtatcaacttaaatgt

SEQ ID NO: 384757 - DNA, 20 bp, Artificial Sequence
  Description of Artificial Sequence: Synthetic oligonucleotide
  Target: LAMA2; (+) strand; PAM type: YTN; PAM sequence: CTT
aaatgtaaagaaaattcaaa

SEQ ID NO: 384758 - DNA, 20 bp, Artificial Sequence
  Description of Artificial Sequence: Synthetic oligonucleotide
  Target: LAMA2; (+) strand; PAM type: YTN; PAM sequence: TTA
aatgtaaagaaaattcaaag

SEQ ID NO: 384759 - DNA, 20 bp, Artificial Sequence
  Description of Artificial Sequence: Synthetic oligonucleotide
  Target: LAMA2; (+) strand; PAM type: YTN; PAM sequence: TTC
aaaggcacaaaacaccacac

SEQ ID NO: 384760 - DNA, 20 bp, Artificial Sequence
  Description of Artificial Sequence: Synthetic oligonucleotide
  Target: LAMA2; (+) strand; PAM type: YTN; PAM sequence: CTT
aatactggaagcttcaagaa

SEQ ID NO: 384761 - DNA, 20 bp, Artificial Sequence
  Description of Artificial Sequence: Synthetic oligonucleotide
  Target: LAMA2; (+) strand; PAM type: YTN; PAM sequence: TTA
atactggaagcttcaagaac

SEQ ID NO: 384762 - DNA, 20 bp, Artificial Sequence
  Description of Artificial Sequence: Synthetic oligonucleotide
  Target: LAMA2; (+) strand; PAM type: YTN; PAM sequence: CTG
gaagcttcaagaacatatga

SEQ ID NO: 384763 - DNA, 20 bp, Artificial Sequence
  Description of Artificial Sequence: Synthetic oligonucleotide
  Target: LAMA2; (+) strand; PAM type: YTN; PAM sequence: CTT
caagaacatatgaaaagaaa

SEQ ID NO: 384764 - DNA, 20 bp, Artificial Sequence
  Description of Artificial Sequence: Synthetic oligonucleotide
  Target: LAMA2; (+) strand; PAM type: YTN; PAM sequence: TTC
aagaacatatgaaaagaaat

SEQ ID NO: 384765 - DNA, 20 bp, Artificial Sequence
  Description of Artificial Sequence: Synthetic oligonucleotide
  Target: LAMA2; (+) strand; PAM type: YTN; PAM sequence: CTT
aaacaattaatttcaggatt

SEQ ID NO: 384766 - DNA, 20 bp, Artificial Sequence
  Description of Artificial Sequence: Synthetic oligonucleotide
  Target: LAMA2; (+) strand; PAM type: YTN; PAM sequence: TTA
aacaattaatttcaggattt

SEQ ID NO: 384767 - DNA, 20 bp, Artificial Sequence
  Description of Artificial Sequence: Synthetic oligonucleotide
  Target: LAMA2; (+) strand; PAM type: YTN; PAM sequence: TTA
atttcaggattttcactggt

SEQ ID NO: 384768 - DNA, 20 bp, Artificial Sequence
  Description of Artificial Sequence: Synthetic oligonucleotide
  Target: LAMA2; (+) strand; PAM type: YTN; PAM sequence: TTT
caggattttcactggtggga

SEQ ID NO: 384769 - DNA, 20 bp, Artificial Sequence
  Description of Artificial Sequence: Synthetic oligonucleotide
  Target: LAMA2; (+) strand; PAM type: YTN; PAM sequence: TTC
aggattttcactggtgggaa

SEQ ID NO: 384770 - DNA, 20 bp, Artificial Sequence
  Description of Artificial Sequence: Synthetic oligonucleotide
  Target: LAMA2; (+) strand; PAM type: YTN; PAM sequence: TTT
tcactggtgggaatagtagg

SEQ ID NO: 384771 - DNA, 20 bp, Artificial Sequence
  Description of Artificial Sequence: Synthetic oligonucleotide
  Target: LAMA2; (+) strand; PAM type: YTN; PAM sequence: TTT
cactggtgggaatagtagga

SEQ ID NO: 384772 - DNA, 20 bp, Artificial Sequence
  Description of Artificial Sequence: Synthetic oligonucleotide
  Target: LAMA2; (+) strand; PAM type: YTN; PAM sequence: TTC
actggtgggaatagtaggaa

SEQ ID NO: 384773 - DNA, 20 bp, Artificial Sequence
  Description of Artificial Sequence: Synthetic oligonucleotide
  Target: LAMA2; (+) strand; PAM type: YTN; PAM sequence: CTG
gtgggaatagtaggaaatta

SEQ ID NO: 384774 - DNA, 20 bp, Artificial Sequence
  Description of Artificial Sequence: Synthetic oligonucleotide
  Target: LAMA2; (+) strand; PAM type: YTN; PAM sequence: TTA
tatgggcaaatgcttacaaa

SEQ ID NO: 384775 - DNA, 20 bp, Artificial Sequence
  Description of Artificial Sequence: Synthetic oligonucleotide
  Target: LAMA2; (+) strand; PAM type: YTN; PAM sequence: CTT
acaaaatacaaggcatgtgc

SEQ ID NO: 384776 - DNA, 20 bp, Artificial Sequence
  Description of Artificial Sequence: Synthetic oligonucleotide
  Target: LAMA2; (+) strand; PAM type: YTN; PAM sequence: TTA
caaaatacaaggcatgtgca

SEQ ID NO: 384777 - DNA, 20 bp, Artificial Sequence
  Description of Artificial Sequence: Synthetic oligonucleotide
  Target: LAMA2; (+) strand; PAM type: YTN; PAM sequence: CTA
ataagtaacagaatttggaa

SEQ ID NO: 384778 - DNA, 20 bp, Artificial Sequence
  Description of Artificial Sequence: Synthetic oligonucleotide
  Target: LAMA2; (+) strand; PAM type: YTN; PAM sequence: TTT
ggaacatggcgttcagacac

SEQ ID NO: 384779 - DNA, 20 bp, Artificial Sequence
  Description of Artificial Sequence: Synthetic oligonucleotide
  Target: LAMA2; (+) strand; PAM type: YTN; PAM sequence: TTG
gaacatggcgttcagacaca

SEQ ID NO: 384780 - DNA, 20 bp, Artificial Sequence
  Description of Artificial Sequence: Synthetic oligonucleotide
  Target: LAMA2; (+) strand; PAM type: YTN; PAM sequence: TTC
agacacaatttcatgatcac

SEQ ID NO: 384781 - DNA, 20 bp, Artificial Sequence
  Description of Artificial Sequence: Synthetic oligonucleotide
  Target: LAMA2; (+) strand; PAM type: YTN; PAM sequence: TTT
catgatcacagatgaaaatg

SEQ ID NO: 384782 - DNA, 20 bp, Artificial Sequence
  Description of Artificial Sequence: Synthetic oligonucleotide
  Target: LAMA2; (+) strand; PAM type: YTN; PAM sequence: TTC
atgatcacagatgaaaatga

SEQ ID NO: 384783 - DNA, 20 bp, Artificial Sequence
  Description of Artificial Sequence: Synthetic oligonucleotide
  Target: LAMA2; (+) strand; PAM type: YTN; PAM sequence: TTG
tagaaatccttaaataccag

SEQ ID NO: 384784 - DNA, 20 bp, Artificial Sequence
  Description of Artificial Sequence: Synthetic oligonucleotide
  Target: LAMA2; (+) strand; PAM type: YTN; PAM sequence: CTT
aaataccagtctaagaaata

SEQ ID NO: 384785 - DNA, 20 bp, Artificial Sequence
  Description of Artificial Sequence: Synthetic oligonucleotide
  Target: LAMA2; (+) strand; PAM type: YTN; PAM sequence: TTA
aataccagtctaagaaatag

SEQ ID NO: 384786 - DNA, 20 bp, Artificial Sequence
  Description of Artificial Sequence: Synthetic oligonucleotide
  Target: LAMA2; (+) strand; PAM type: YTN; PAM sequence: CTA
agaaatagttatttaatttt

SEQ ID NO: 384787 - DNA, 20 bp, Artificial Sequence
  Description of Artificial Sequence: Synthetic oligonucleotide
  Target: LAMA2; (+) strand; PAM type: YTN; PAM sequence: TTA
tttaattttctatgtaataa

SEQ ID NO: 384788 - DNA, 20 bp, Artificial Sequence
  Description of Artificial Sequence: Synthetic oligonucleotide
  Target: LAMA2; (+) strand; PAM type: YTN; PAM sequence: TTT
aattttctatgtaataagga

SEQ ID NO: 384789 - DNA, 20 bp, Artificial Sequence
  Description of Artificial Sequence: Synthetic oligonucleotide
  Target: LAMA2; (+) strand; PAM type: YTN; PAM sequence: TTA
attttctatgtaataaggaa

SEQ ID NO: 384790 - DNA, 20 bp, Artificial Sequence
  Description of Artificial Sequence: Synthetic oligonucleotide
  Target: LAMA2; (+) strand; PAM type: YTN; PAM sequence: TTT
tctatgtaataaggaaacac

SEQ ID NO: 384791 - DNA, 20 bp, Artificial Sequence
  Description of Artificial Sequence: Synthetic oligonucleotide
  Target: LAMA2; (+) strand; PAM type: YTN; PAM sequence: TTT
ctatgtaataaggaaacact

SEQ ID NO: 384792 - DNA, 20 bp, Artificial Sequence
  Description of Artificial Sequence: Synthetic oligonucleotide
  Target: LAMA2; (+) strand; PAM type: YTN; PAM sequence: TTC
tatgtaataaggaaacacta

SEQ ID NO: 384793 - DNA, 20 bp, Artificial Sequence
  Description of Artificial Sequence: Synthetic oligonucleotide
  Target: LAMA2; (+) strand; PAM type: YTN; PAM sequence: CTA
tgtaataaggaaacactaca

SEQ ID NO: 384794 - DNA, 20 bp, Artificial Sequence
  Description of Artificial Sequence: Synthetic oligonucleotide
  Target: LAMA2; (+) strand; PAM type: YTN; PAM sequence: CTA
caagtttttattttgaaaaa

SEQ ID NO: 384795 - DNA, 20 bp, Artificial Sequence
  Description of Artificial Sequence: Synthetic oligonucleotide
  Target: LAMA2; (+) strand; PAM type: YTN; PAM sequence: TTT
ttattttgaaaaaaaggtta

SEQ ID NO: 384796 - DNA, 20 bp, Artificial Sequence
  Description of Artificial Sequence: Synthetic oligonucleotide
  Target: LAMA2; (+) strand; PAM type: YTN; PAM sequence: TTT
tattttgaaaaaaaggttaa

SEQ ID NO: 384797 - DNA, 20 bp, Artificial Sequence
  Description of Artificial Sequence: Synthetic oligonucleotide
  Target: LAMA2; (+) strand; PAM type: YTN; PAM sequence: TTT
attttgaaaaaaaggttaat

SEQ ID NO: 384798 - DNA, 20 bp, Artificial Sequence
  Description of Artificial Sequence: Synthetic oligonucleotide
  Target: LAMA2; (+) strand; PAM type: YTN; PAM sequence: TTA
ttttgaaaaaaaggttaata

SEQ ID NO: 384799 - DNA, 20 bp, Artificial Sequence
  Description of Artificial Sequence: Synthetic oligonucleotide
  Target: LAMA2; (+) strand; PAM type: YTN; PAM sequence: TTT
tgaaaaaaaggttaatatga

SEQ ID NO: 384800 - DNA, 20 bp, Artificial Sequence
  Description of Artificial Sequence: Synthetic oligonucleotide
  Target: LAMA2; (+) strand; PAM type: YTN; PAM sequence: TTT
gaaaaaaaggttaatatgat

SEQ ID NO: 384801 - DNA, 20 bp, Artificial Sequence
  Description of Artificial Sequence: Synthetic oligonucleotide
  Target: LAMA2; (+) strand; PAM type: YTN; PAM sequence: TTG
aaaaaaaggttaatatgatt

SEQ ID NO: 384802 - DNA, 20 bp, Artificial Sequence
  Description of Artificial Sequence: Synthetic oligonucleotide
  Target: LAMA2; (+) strand; PAM type: YTN; PAM sequence: TTA
atatgattatggccacattt

SEQ ID NO: 384803 - DNA, 20 bp, Artificial Sequence
  Description of Artificial Sequence: Synthetic oligonucleotide
  Target: LAMA2; (+) strand; PAM type: YTN; PAM sequence: TTA
tggccacattttaggaaaac

SEQ ID NO: 384804 - DNA, 20 bp, Artificial Sequence
  Description of Artificial Sequence: Synthetic oligonucleotide
  Target: LAMA2; (+) strand; PAM type: YTN; PAM sequence: TTT
taggaaaactattatcatag

SEQ ID NO: 384805 - DNA, 20 bp, Artificial Sequence
  Description of Artificial Sequence: Synthetic oligonucleotide
  Target: LAMA2; (+) strand; PAM type: YTN; PAM sequence: TTT
aggaaaactattatcataga

SEQ ID NO: 384806 - DNA, 20 bp, Artificial Sequence
  Description of Artificial Sequence: Synthetic oligonucleotide
  Target: LAMA2; (+) strand; PAM type: YTN; PAM sequence: TTA
ggaaaactattatcatagaa

SEQ ID NO: 384807 - DNA, 20 bp, Artificial Sequence
  Description of Artificial Sequence: Synthetic oligonucleotide
  Target: LAMA2; (+) strand; PAM type: YTN; PAM sequence: CTA
ttatcatagaattgagtata

SEQ ID NO: 384808 - DNA, 20 bp, Artificial Sequence
  Description of Artificial Sequence: Synthetic oligonucleotide
  Target: LAMA2; (+) strand; PAM type: YTN; PAM sequence: TTA
tcatagaattgagtataatg

SEQ ID NO: 384809 - DNA, 20 bp, Artificial Sequence
  Description of Artificial Sequence: Synthetic oligonucleotide
  Target: LAMA2; (+) strand; PAM type: YTN; PAM sequence: TTG
agtataatgaattgaaacag

SEQ ID NO: 384810 - DNA, 20 bp, Artificial Sequence
  Description of Artificial Sequence: Synthetic oligonucleotide
  Target: LAMA2; (+) strand; PAM type: YTN; PAM sequence: TTG
aaacaggcaaatgagaaaag

SEQ ID NO: 384811 - DNA, 20 bp, Artificial Sequence
  Description of Artificial Sequence: Synthetic oligonucleotide
  Target: LAMA2; (+) strand; PAM type: YTN; PAM sequence: TTA
aaaggctagtatactagcat

SEQ ID NO: 384812 - DNA, 20 bp, Artificial Sequence
  Description of Artificial Sequence: Synthetic oligonucleotide
  Target: LAMA2; (+) strand; PAM type: YTN; PAM sequence: CTA
gtatactagcatgggcaaaa

SEQ ID NO: 384813 - DNA, 20 bp, Artificial Sequence
  Description of Artificial Sequence: Synthetic oligonucleotide
  Target: LAMA2; (+) strand; PAM type: YTN; PAM sequence: CTA
gcatgggcaaaagataatta

SEQ ID NO: 384814 - DNA, 20 bp, Artificial Sequence
  Description of Artificial Sequence: Synthetic oligonucleotide
  Target: LAMA2; (+) strand; PAM type: YTN; PAM sequence: TTA
gaaccagaagtaggtaatag

SEQ ID NO: 384815 - DNA, 20 bp, Artificial Sequence
  Description of Artificial Sequence: Synthetic oligonucleotide
  Target: LAMA2; (+) strand; PAM type: YTN; PAM sequence: TTT
aatacagctttacagattcg

SEQ ID NO: 384816 - DNA, 20 bp, Artificial Sequence
  Description of Artificial Sequence: Synthetic oligonucleotide
  Target: LAMA2; (+) strand; PAM type: YTN; PAM sequence: TTA
atacagctttacagattcgg

SEQ ID NO: 384817 - DNA, 20 bp, Artificial Sequence
  Description of Artificial Sequence: Synthetic oligonucleotide
  Target: LAMA2; (+) strand; PAM type: YTN; PAM sequence: CTT
tacagattcggaaactaatt

SEQ ID NO: 384818 - DNA, 20 bp, Artificial Sequence
  Description of Artificial Sequence: Synthetic oligonucleotide
  Target: LAMA2; (+) strand; PAM type: YTN; PAM sequence: TTT
acagattcggaaactaatta

SEQ ID NO: 384819 - DNA, 20 bp, Artificial Sequence
  Description of Artificial Sequence: Synthetic oligonucleotide
  Target: LAMA2; (+) strand; PAM type: YTN; PAM sequence: TTA
cagattcggaaactaattag

SEQ ID NO: 384820 - DNA, 20 bp, Artificial Sequence
  Description of Artificial Sequence: Synthetic oligonucleotide
  Target: LAMA2; (+) strand; PAM type: YTN; PAM sequence: TTC
ggaaactaattagatgtgag

SEQ ID NO: 384821 - DNA, 20 bp, Artificial Sequence
  Description of Artificial Sequence: Synthetic oligonucleotide
  Target: LAMA2; (+) strand; PAM type: YTN; PAM sequence: CTA
attagatgtgaggggtgagg

SEQ ID NO: 384822 - DNA, 20 bp, Artificial Sequence
  Description of Artificial Sequence: Synthetic oligonucleotide
  Target: LAMA2; (+) strand; PAM type: YTN; PAM sequence: TTA
gatgtgaggggtgagggtcc

SEQ ID NO: 384823 - DNA, 20 bp, Artificial Sequence
  Description of Artificial Sequence: Synthetic oligonucleotide
  Target: LAMA2; (+) strand; PAM type: YTN; PAM sequence: TTG
aagacaggtttttaggcagg

SEQ ID NO: 384824 - DNA, 20 bp, Artificial Sequence
  Description of Artificial Sequence: Synthetic oligonucleotide
  Target: LAMA2; (+) strand; PAM type: YTN; PAM sequence: TTT
ttaggcaggttacccccaaa

SEQ ID NO: 384825 - DNA, 20 bp, Artificial Sequence
  Description of Artificial Sequence: Synthetic oligonucleotide
  Target: LAMA2; (+) strand; PAM type: YTN; PAM sequence: TTT
taggcaggttacccccaaaa

SEQ ID NO: 384826 - DNA, 20 bp, Artificial Sequence
  Description of Artificial Sequence: Synthetic oligonucleotide
  Target: LAMA2; (+) strand; PAM type: YTN; PAM sequence: TTT
aggcaggttacccccaaaaa

SEQ ID NO: 384827 - DNA, 20 bp, Artificial Sequence
  Description of Artificial Sequence: Synthetic oligonucleotide
  Target: LAMA2; (+) strand; PAM type: YTN; PAM sequence: TTA
ggcaggttacccccaaaaat

SEQ ID NO: 384828 - DNA, 20 bp, Artificial Sequence
  Description of Artificial Sequence: Synthetic oligonucleotide
  Target: LAMA2; (+) strand; PAM type: YTN; PAM sequence: TTA
cccccaaaaatggtggtgct

SEQ ID NO: 384829 - DNA, 20 bp, Artificial Sequence
  Description of Artificial Sequence: Synthetic oligonucleotide
  Target: LAMA2; (+) strand; PAM type: YTN; PAM sequence: CTA
ttaactgaaatggagaaacc

SEQ ID NO: 384830 - DNA, 20 bp, Artificial Sequence
  Description of Artificial Sequence: Synthetic oligonucleotide
  Target: LAMA2; (+) strand; PAM type: YTN; PAM sequence: TTA
actgaaatggagaaaccagg

SEQ ID NO: 384831 - DNA, 20 bp, Artificial Sequence
  Description of Artificial Sequence: Synthetic oligonucleotide
  Target: LAMA2; (+) strand; PAM type: YTN; PAM sequence: CTG
aaatggagaaaccaggagag

SEQ ID NO: 384832 - DNA, 20 bp, Artificial Sequence
  Description of Artificial Sequence: Synthetic oligonucleotide
  Target: LAMA2; (+) strand; PAM type: YTN; PAM sequence: TTA
gagaagaaagataatttatg

SEQ ID NO: 384833 - DNA, 20 bp, Artificial Sequence
  Description of Artificial Sequence: Synthetic oligonucleotide
  Target: LAMA2; (+) strand; PAM type: YTN; PAM sequence: TTT
atgtttcaaataggttcaga

SEQ ID NO: 384834 - DNA, 20 bp, Artificial Sequence
  Description of Artificial Sequence: Synthetic oligonucleotide
  Target: LAMA2; (+) strand; PAM type: YTN; PAM sequence: TTA
tgtttcaaataggttcagat

SEQ ID NO: 384835 - DNA, 20 bp, Artificial Sequence
  Description of Artificial Sequence: Synthetic oligonucleotide
  Target: LAMA2; (+) strand; PAM type: YTN; PAM sequence: TTT
caaataggttcagattgata

SEQ ID NO: 384836 - DNA, 20 bp, Artificial Sequence
  Description of Artificial Sequence: Synthetic oligonucleotide
  Target: LAMA2; (+) strand; PAM type: YTN; PAM sequence: TTC
aaataggttcagattgatag

SEQ ID NO: 384837 - DNA, 20 bp, Artificial Sequence
  Description of Artificial Sequence: Synthetic oligonucleotide
  Target: LAMA2; (+) strand; PAM type: YTN; PAM sequence: TTC
agattgatagaacatatctg

SEQ ID NO: 384838 - DNA, 20 bp, Artificial Sequence
  Description of Artificial Sequence: Synthetic oligonucleotide
  Target: LAMA2; (+) strand; PAM type: YTN; PAM sequence: TTG
atagaacatatctgtctgaa

SEQ ID NO: 384839 - DNA, 20 bp, Artificial Sequence
  Description of Artificial Sequence: Synthetic oligonucleotide
  Target: LAMA2; (+) strand; PAM type: YTN; PAM sequence: CTG
tctgaatggaaatatgcaaa

SEQ ID NO: 384840 - DNA, 20 bp, Artificial Sequence
  Description of Artificial Sequence: Synthetic oligonucleotide
  Target: LAMA2; (+) strand; PAM type: YTN; PAM sequence: CTG
aatggaaatatgcaaatagc

SEQ ID NO: 384841 - DNA, 20 bp, Artificial Sequence
  Description of Artificial Sequence: Synthetic oligonucleotide
  Target: LAMA2; (+) strand; PAM type: YTN; PAM sequence: CTG
caggaaatggaaatctgaaa

SEQ ID NO: 384842 - DNA, 20 bp, Artificial Sequence
  Description of Artificial Sequence: Synthetic oligonucleotide
  Target: LAMA2; (+) strand; PAM type: YTN; PAM sequence: CTG
aaaattgcaggagcagatga

SEQ ID NO: 384843 - DNA, 20 bp, Artificial Sequence
  Description of Artificial Sequence: Synthetic oligonucleotide
  Target: LAMA2; (+) strand; PAM type: YTN; PAM sequence: TTG
caggagcagatgaaggaaga

SEQ ID NO: 384844 - DNA, 20 bp, Artificial Sequence
  Description of Artificial Sequence: Synthetic oligonucleotide
  Target: LAMA2; (+) strand; PAM type: YTN; PAM sequence: TTA
ataagtgaattaaagttgga

SEQ ID NO: 384845 - DNA, 20 bp, Artificial Sequence
  Description of Artificial Sequence: Synthetic oligonucleotide
  Target: LAMA2; (+) strand; PAM type: YTN; PAM sequence: TTA
aagttggataagatttccca

SEQ ID NO: 384846 - DNA, 20 bp, Artificial Sequence
  Description of Artificial Sequence: Synthetic oligonucleotide
  Target: LAMA2; (+) strand; PAM type: YTN; PAM sequence: TTG
gataagatttcccaggctaa

SEQ ID NO: 384847 - DNA, 20 bp, Artificial Sequence
  Description of Artificial Sequence: Synthetic oligonucleotide
  Target: LAMA2; (+) strand; PAM type: YTN; PAM sequence: TTT
cccaggctaatgttatccaa

SEQ ID NO: 384848 - DNA, 20 bp, Artificial Sequence
  Description of Artificial Sequence: Synthetic oligonucleotide
  Target: LAMA2; (+) strand; PAM type: YTN; PAM sequence: TTC
ccaggctaatgttatccaag

SEQ ID NO: 384849 - DNA, 20 bp, Artificial Sequence
  Description of Artificial Sequence: Synthetic oligonucleotide
  Target: LAMA2; (+) strand; PAM type: YTN; PAM sequence: CTA
atgttatccaaggcgagtat

SEQ ID NO: 384850 - DNA, 20 bp, Artificial Sequence
  Description of Artificial Sequence: Synthetic oligonucleotide
  Target: LAMA2; (+) strand; PAM type: YTN; PAM sequence: TTA
tccaaggcgagtatatagaa

SEQ ID NO: 384851 - DNA, 20 bp, Artificial Sequence
  Description of Artificial Sequence: Synthetic oligonucleotide
  Target: LAMA2; (+) strand; PAM type: YTN; PAM sequence: CTT
tatgttgggaaaggagaaaa

SEQ ID NO: 384852 - DNA, 20 bp, Artificial Sequence
  Description of Artificial Sequence: Synthetic oligonucleotide
  Target: LAMA2; (+) strand; PAM type: YTN; PAM sequence: TTT
atgttgggaaaggagaaaaa

SEQ ID NO: 384853 - DNA, 20 bp, Artificial Sequence
  Description of Artificial Sequence: Synthetic oligonucleotide
  Target: LAMA2; (+) strand; PAM type: YTN; PAM sequence: TTA
tgttgggaaaggagaaaaag

SEQ ID NO: 384854 - DNA, 20 bp, Artificial Sequence
  Description of Artificial Sequence: Synthetic oligonucleotide
  Target: LAMA2; (+) strand; PAM type: YTN; PAM sequence: TTG
ggaaaggagaaaaagaagag

SEQ ID NO: 384855 - DNA, 20 bp, Artificial Sequence
  Description of Artificial Sequence: Synthetic oligonucleotide
  Target: LAMA2; (+) strand; PAM type: YTN; PAM sequence: CTG
ccattgacaccaagggagag

SEQ ID NO: 384856 - DNA, 20 bp, Artificial Sequence
  Description of Artificial Sequence: Synthetic oligonucleotide
  Target: LAMA2; (+) strand; PAM type: YTN; PAM sequence: TTG
acaccaagggagagaagagc

SEQ ID NO: 384857 - DNA, 20 bp, Artificial Sequence
  Description of Artificial Sequence: Synthetic oligonucleotide
  Target: LAMA2; (+) strand; PAM type: YTN; PAM sequence: TTG
ctgctctcacaagggagacc

SEQ ID NO: 384858 - DNA, 20 bp, Artificial Sequence
  Description of Artificial Sequence: Synthetic oligonucleotide
  Target: LAMA2; (+) strand; PAM type: YTN; PAM sequence: CTG
ctctcacaagggagacccaa

SEQ ID NO: 384859 - DNA, 20 bp, Artificial Sequence
  Description of Artificial Sequence: Synthetic oligonucleotide
  Target: LAMA2; (+) strand; PAM type: YTN; PAM sequence: CTC
tcacaagggagacccaatga

SEQ ID NO: 384860 - DNA, 20 bp, Artificial Sequence
  Description of Artificial Sequence: Synthetic oligonucleotide
  Target: LAMA2; (+) strand; PAM type: YTN; PAM sequence: CTC
acaagggagacccaatgaat

SEQ ID NO: 384861 - DNA, 20 bp, Artificial Sequence
  Description of Artificial Sequence: Synthetic oligonucleotide
  Target: LAMA2; (+) strand; PAM type: YTN; PAM sequence: TTG
actattgtaattgagcaaat

SEQ ID NO: 384862 - DNA, 20 bp, Artificial Sequence
  Description of Artificial Sequence: Synthetic oligonucleotide
  Target: LAMA2; (+) strand; PAM type: YTN; PAM sequence: CTA
ttgtaattgagcaaataaat

SEQ ID NO: 384863 - DNA, 20 bp, Artificial Sequence
  Description of Artificial Sequence: Synthetic oligonucleotide
  Target: LAMA2; (+) strand; PAM type: YTN; PAM sequence: TTG
taattgagcaaataaatggg

SEQ ID NO: 384864 - DNA, 20 bp, Artificial Sequence
  Description of Artificial Sequence: Synthetic oligonucleotide
  Target: LAMA2; (+) strand; PAM type: YTN; PAM sequence: TTG
agcaaataaatgggcttgcc

SEQ ID NO: 384865 - DNA, 20 bp, Artificial Sequence
  Description of Artificial Sequence: Synthetic oligonucleotide
  Target: LAMA2; (+) strand; PAM type: YTN; PAM sequence: CTT
gccgcctgaagcacatagaa

SEQ ID NO: 384866 - DNA, 20 bp, Artificial Sequence
  Description of Artificial Sequence: Synthetic oligonucleotide
  Target: LAMA2; (+) strand; PAM type: YTN; PAM sequence: TTG
ccgcctgaagcacatagaag

SEQ ID NO: 384867 - DNA, 20 bp, Artificial Sequence
  Description of Artificial Sequence: Synthetic oligonucleotide
  Target: LAMA2; (+) strand; PAM type: YTN; PAM sequence: CTG
aagcacatagaagccaataa

SEQ ID NO: 384868 - DNA, 20 bp, Artificial Sequence
  Description of Artificial Sequence: Synthetic oligonucleotide
  Target: LAMA2; (+) strand; PAM type: YTN; PAM sequence: TTG
gcactggcttcggagaaaag

SEQ ID NO: 384869 - DNA, 20 bp, Artificial Sequence
  Description of Artificial Sequence: Synthetic oligonucleotide
  Target: LAMA2; (+) strand; PAM type: YTN; PAM sequence: CTG
gcttcggagaaaagaaaggc

SEQ ID NO: 384870 - DNA, 20 bp, Artificial Sequence
  Description of Artificial Sequence: Synthetic oligonucleotide
  Target: LAMA2; (+) strand; PAM type: YTN; PAM sequence: CTT
cggagaaaagaaaggcttta

SEQ ID NO: 384871 - DNA, 20 bp, Artificial Sequence
  Description of Artificial Sequence: Synthetic oligonucleotide
  Target: LAMA2; (+) strand; PAM type: YTN; PAM sequence: TTC
ggagaaaagaaaggctttac

SEQ ID NO: 384872 - DNA, 20 bp, Artificial Sequence
  Description of Artificial Sequence: Synthetic oligonucleotide
  Target: LAMA2; (+) strand; PAM type: YTN; PAM sequence: CTT
tactgcaaaattgttcagca

SEQ ID NO: 384873 - DNA, 20 bp, Artificial Sequence
  Description of Artificial Sequence: Synthetic oligonucleotide
  Target: LAMA2; (+) strand; PAM type: YTN; PAM sequence: TTT
actgcaaaattgttcagcaa

SEQ ID NO: 384874 - DNA, 20 bp, Artificial Sequence
  Description of Artificial Sequence: Synthetic oligonucleotide
  Target: LAMA2; (+) strand; PAM type: YTN; PAM sequence: TTA
ctgcaaaattgttcagcaag

SEQ ID NO: 384875 - DNA, 20 bp, Artificial Sequence
  Description of Artificial Sequence: Synthetic oligonucleotide
  Target: LAMA2; (+) strand; PAM type: YTN; PAM sequence: CTG
caaaattgttcagcaaggag

SEQ ID NO: 384876 - DNA, 20 bp, Artificial Sequence
  Description of Artificial Sequence: Synthetic oligonucleotide
  Target: LAMA2; (+) strand; PAM type: YTN; PAM sequence: TTG
ttcagcaaggagacaagagt

SEQ ID NO: 384877 - DNA, 20 bp, Artificial Sequence
  Description of Artificial Sequence: Synthetic oligonucleotide
  Target: LAMA2; (+) strand; PAM type: YTN; PAM sequence: TTC
agcaaggagacaagagtcag

SEQ ID NO: 384878 - DNA, 20 bp, Artificial Sequence
  Description of Artificial Sequence: Synthetic oligonucleotide
  Target: LAMA2; (+) strand; PAM type: YTN; PAM sequence: TTC
aaatctgtctccctaatttg

SEQ ID NO: 384879 - DNA, 20 bp, Artificial Sequence
  Description of Artificial Sequence: Synthetic oligonucleotide
  Target: LAMA2; (+) strand; PAM type: YTN; PAM sequence: CTG
tctccctaatttgggatatg

SEQ ID NO: 384880 - DNA, 20 bp, Artificial Sequence
  Description of Artificial Sequence: Synthetic oligonucleotide
  Target: LAMA2; (+) strand; PAM type: YTN; PAM sequence: CTC
cctaatttgggatatgggga

SEQ ID NO: 384881 - DNA, 20 bp, Artificial Sequence
  Description of Artificial Sequence: Synthetic oligonucleotide
  Target: LAMA2; (+) strand; PAM type: YTN; PAM sequence: CTA
atttgggatatggggaaggt

SEQ ID NO: 384882 - DNA, 20 bp, Artificial Sequence
  Description of Artificial Sequence: Synthetic oligonucleotide
  Target: LAMA2; (+) strand; PAM type: YTN; PAM sequence: TTT
gggatatggggaaggttgca

SEQ ID NO: 384883 - DNA, 20 bp, Artificial Sequence
  Description of Artificial Sequence: Synthetic oligonucleotide
  Target: LAMA2; (+) strand; PAM type: YTN; PAM sequence: TTG
ggatatggggaaggttgcaa

SEQ ID NO: 384884 - DNA, 20 bp, Artificial Sequence
  Description of Artificial Sequence: Synthetic oligonucleotide
  Target: LAMA2; (+) strand; PAM type: YTN; PAM sequence: TTG
caaggggtcagaaggcaagg

SEQ ID NO: 384885 - DNA, 20 bp, Artificial Sequence
  Description of Artificial Sequence: Synthetic oligonucleotide
  Target: LAMA2; (+) strand; PAM type: YTN; PAM sequence: TTT
agaaatgctggcttggcaga

SEQ ID NO: 384886 - DNA, 20 bp, Artificial Sequence
  Description of Artificial Sequence: Synthetic oligonucleotide
  Target: LAMA2; (+) strand; PAM type: YTN; PAM sequence: TTA
gaaatgctggcttggcagag

SEQ ID NO: 384887 - DNA, 20 bp, Artificial Sequence
  Description of Artificial Sequence: Synthetic oligonucleotide
  Target: LAMA2; (+) strand; PAM type: YTN; PAM sequence: CTG
gcttggcagagtctgattgg

SEQ ID NO: 384888 - DNA, 20 bp, Artificial Sequence
  Description of Artificial Sequence: Synthetic oligonucleotide
  Target: LAMA2; (+) strand; PAM type: YTN; PAM sequence: CTT
ggcagagtctgattggaggg

SEQ ID NO: 384889 - DNA, 20 bp, Artificial Sequence
  Description of Artificial Sequence: Synthetic oligonucleotide
  Target: LAMA2; (+) strand; PAM type: YTN; PAM sequence: TTG
gcagagtctgattggagggc

SEQ ID NO: 384890 - DNA, 20 bp, Artificial Sequence
  Description of Artificial Sequence: Synthetic oligonucleotide
  Target: LAMA2; (+) strand; PAM type: YTN; PAM sequence: CTG
attggagggcttcaaatttg

SEQ ID NO: 384891 - DNA, 20 bp, Artificial Sequence
  Description of Artificial Sequence: Synthetic oligonucleotide
  Target: LAMA2; (+) strand; PAM type: YTN; PAM sequence: TTG
gagggcttcaaatttgatca

SEQ ID NO: 384892 - DNA, 20 bp, Artificial Sequence
  Description of Artificial Sequence: Synthetic oligonucleotide
  Target: LAMA2; (+) strand; PAM type: YTN; PAM sequence: CTT
caaatttgatcacttacagt

SEQ ID NO: 384893 - DNA, 20 bp, Artificial Sequence
  Description of Artificial Sequence: Synthetic oligonucleotide
  Target: LAMA2; (+) strand; PAM type: YTN; PAM sequence: TTC
aaatttgatcacttacagta

SEQ ID NO: 384894 - DNA, 20 bp, Artificial Sequence
  Description of Artificial Sequence: Synthetic oligonucleotide
  Target: LAMA2; (+) strand; PAM type: YTN; PAM sequence: TTT
gatcacttacagtaaggtat

SEQ ID NO: 384895 - DNA, 20 bp, Artificial Sequence
  Description of Artificial Sequence: Synthetic oligonucleotide
  Target: LAMA2; (+) strand; PAM type: YTN; PAM sequence: TTG
atcacttacagtaaggtata

SEQ ID NO: 384896 - DNA, 20 bp, Artificial Sequence
  Description of Artificial Sequence: Synthetic oligonucleotide
  Target: LAMA2; (+) strand; PAM type: YTN; PAM sequence: CTT
acagtaaggtatattgaggc

SEQ ID NO: 384897 - DNA, 20 bp, Artificial Sequence
  Description of Artificial Sequence: Synthetic oligonucleotide
  Target: LAMA2; (+) strand; PAM type: YTN; PAM sequence: TTA
cagtaaggtatattgaggca

SEQ ID NO: 384898 - DNA, 20 bp, Artificial Sequence
  Description of Artificial Sequence: Synthetic oligonucleotide
  Target: LAMA2; (+) strand; PAM type: YTN; PAM sequence: TTG
aggcagattttagccctgga

SEQ ID NO: 384899 - DNA, 20 bp, Artificial Sequence
  Description of Artificial Sequence: Synthetic oligonucleotide
  Target: LAMA2; (+) strand; PAM type: YTN; PAM sequence: TTT
tagccctggatcttctgggc

SEQ ID NO: 384900 - DNA, 20 bp, Artificial Sequence
  Description of Artificial Sequence: Synthetic oligonucleotide
  Target: LAMA2; (+) strand; PAM type: YTN; PAM sequence: TTT
agccctggatcttctgggcc

SEQ ID NO: 384901 - DNA, 20 bp, Artificial Sequence
  Description of Artificial Sequence: Synthetic oligonucleotide
  Target: LAMA2; (+) strand; PAM type: YTN; PAM sequence: TTA
gccctggatcttctgggcca

SEQ ID NO: 384902 - DNA, 20 bp, Artificial Sequence
  Description of Artificial Sequence: Synthetic oligonucleotide
  Target: LAMA2; (+) strand; PAM type: YTN; PAM sequence: CTG
gatcttctgggccaatggac

SEQ ID NO: 384903 - DNA, 20 bp, Artificial Sequence
  Description of Artificial Sequence: Synthetic oligonucleotide
  Target: LAMA2; (+) strand; PAM type: YTN; PAM sequence: CTT
ctgggccaatggacccctca

SEQ ID NO: 384904 - DNA, 20 bp, Artificial Sequence
  Description of Artificial Sequence: Synthetic oligonucleotide
  Target: LAMA2; (+) strand; PAM type: YTN; PAM sequence: TTC
tgggccaatggacccctcat

SEQ ID NO: 384905 - DNA, 20 bp, Artificial Sequence
  Description of Artificial Sequence: Synthetic oligonucleotide
  Target: LAMA2; (+) strand; PAM type: YTN; PAM sequence: CTG
ggccaatggacccctcattt

SEQ ID NO: 384906 - DNA, 20 bp, Artificial Sequence
  Description of Artificial Sequence: Synthetic oligonucleotide
  Target: LAMA2; (+) strand; PAM type: YTN; PAM sequence: CTC
atttctgaaggagttccaat

SEQ ID NO: 384907 - DNA, 20 bp, Artificial Sequence
  Description of Artificial Sequence: Synthetic oligonucleotide
  Target: LAMA2; (+) strand; PAM type: YTN; PAM sequence: TTT
ctgaaggagttccaatgtcc

SEQ ID NO: 384908 - DNA, 20 bp, Artificial Sequence
  Description of Artificial Sequence: Synthetic oligonucleotide
  Target: LAMA2; (+) strand; PAM type: YTN; PAM sequence: TTC
tgaaggagttccaatgtcca

SEQ ID NO: 384909 - DNA, 20 bp, Artificial Sequence
  Description of Artificial Sequence: Synthetic oligonucleotide
  Target: LAMA2; (+) strand; PAM type: YTN; PAM sequence: CTG
aaggagttccaatgtccagg

SEQ ID NO: 384910 - DNA, 20 bp, Artificial Sequence
  Description of Artificial Sequence: Synthetic oligonucleotide
  Target: LAMA2; (+) strand; PAM type: YTN; PAM sequence: TTC
caatgtccaggttttgattt

SEQ ID NO: 384911 - DNA, 20 bp, Artificial Sequence
  Description of Artificial Sequence: Synthetic oligonucleotide
  Target: LAMA2; (+) strand; PAM type: YTN; PAM sequence: TTT
tgattttgtccctgtcttgt

SEQ ID NO: 384912 - DNA, 20 bp, Artificial Sequence
  Description of Artificial Sequence: Synthetic oligonucleotide
  Target: LAMA2; (+) strand; PAM type: YTN; PAM sequence: TTT
gattttgtccctgtcttgtt

SEQ ID NO: 384913 - DNA, 20 bp, Artificial Sequence
  Description of Artificial Sequence: Synthetic oligonucleotide
  Target: LAMA2; (+) strand; PAM type: YTN; PAM sequence: TTG
attttgtccctgtcttgttg

SEQ ID NO: 384914 - DNA, 20 bp, Artificial Sequence
  Description of Artificial Sequence: Synthetic oligonucleotide
  Target: LAMA2; (+) strand; PAM type: YTN; PAM sequence: TTT
tgtccctgtcttgttggttc

SEQ ID NO: 384915 - DNA, 20 bp, Artificial Sequence
  Description of Artificial Sequence: Synthetic oligonucleotide
  Target: LAMA2; (+) strand; PAM type: YTN; PAM sequence: TTT
gtccctgtcttgttggttca

SEQ ID NO: 384916 - DNA, 20 bp, Artificial Sequence
  Description of Artificial Sequence: Synthetic oligonucleotide
  Target: LAMA2; (+) strand; PAM type: YTN; PAM sequence: TTG
tccctgtcttgttggttcaa

SEQ ID NO: 384917 - DNA, 20 bp, Artificial Sequence
  Description of Artificial Sequence: Synthetic oligonucleotide
  Target: LAMA2; (+) strand; PAM type: YTN; PAM sequence: CTG
tcttgttggttcaaggggag

SEQ ID NO: 384918 - DNA, 20 bp, Artificial Sequence
  Description of Artificial Sequence: Synthetic oligonucleotide
  Target: LAMA2; (+) strand; PAM type: YTN; PAM sequence: CTT
gttggttcaaggggaggaat

SEQ ID NO: 384919 - DNA, 20 bp, Artificial Sequence
  Description of Artificial Sequence: Synthetic oligonucleotide
  Target: LAMA2; (+) strand; PAM type: YTN; PAM sequence: TTG
ttggttcaaggggaggaata

SEQ ID NO: 384920 - DNA, 20 bp, Artificial Sequence
  Description of Artificial Sequence: Synthetic oligonucleotide
  Target: LAMA2; (+) strand; PAM type: YTN; PAM sequence: TTG
gttcaaggggaggaatagtt

SEQ ID NO: 384921 - DNA, 20 bp, Artificial Sequence
  Description of Artificial Sequence: Synthetic oligonucleotide
  Target: LAMA2; (+) strand; PAM type: YTN; PAM sequence: TTC
aaggggaggaatagttggtt

SEQ ID NO: 384922 - DNA, 20 bp, Artificial Sequence
  Description of Artificial Sequence: Synthetic oligonucleotide
  Target: LAMA2; (+) strand; PAM type: YTN; PAM sequence: TTG
gttcctggtgttgttagagg

SEQ ID NO: 384923 - DNA, 20 bp, Artificial Sequence
  Description of Artificial Sequence: Synthetic oligonucleotide
  Target: LAMA2; (+) strand; PAM type: YTN; PAM sequence: TTC
ctggtgttgttagaggtcaa

SEQ ID NO: 384924 - DNA, 20 bp, Artificial Sequence
  Description of Artificial Sequence: Synthetic oligonucleotide
  Target: LAMA2; (+) strand; PAM type: YTN; PAM sequence: CTG
gtgttgttagaggtcaaaat

SEQ ID NO: 384925 - DNA, 20 bp, Artificial Sequence
  Description of Artificial Sequence: Synthetic oligonucleotide
  Target: LAMA2; (+) strand; PAM type: YTN; PAM sequence: TTG
ttagaggtcaaaatttttct

SEQ ID NO: 384926 - DNA, 20 bp, Artificial Sequence
  Description of Artificial Sequence: Synthetic oligonucleotide
  Target: LAMA2; (+) strand; PAM type: YTN; PAM sequence: TTA
gaggtcaaaatttttctatt

SEQ ID NO: 384927 - DNA, 20 bp, Artificial Sequence
  Description of Artificial Sequence: Synthetic oligonucleotide
  Target: LAMA2; (+) strand; PAM type: YTN; PAM sequence: TTT
ttctattgaacatgcctggg

SEQ ID NO: 384928 - DNA, 20 bp, Artificial Sequence
  Description of Artificial Sequence: Synthetic oligonucleotide
  Target: LAMA2; (+) strand; PAM type: YTN; PAM sequence: TTT
tctattgaacatgcctgggc

SEQ ID NO: 384929 - DNA, 20 bp, Artificial Sequence
  Description of Artificial Sequence: Synthetic oligonucleotide
  Target: LAMA2; (+) strand; PAM type: YTN; PAM sequence: TTT
ctattgaacatgcctgggct

SEQ ID NO: 384930 - DNA, 20 bp, Artificial Sequence
  Description of Artificial Sequence: Synthetic oligonucleotide
  Target: LAMA2; (+) strand; PAM type: YTN; PAM sequence: TTC
tattgaacatgcctgggcta

SEQ ID NO: 384931 - DNA, 20 bp, Artificial Sequence
  Description of Artificial Sequence: Synthetic oligonucleotide
  Target: LAMA2; (+) strand; PAM type: YTN; PAM sequence: CTA
ttgaacatgcctgggctaca

SEQ ID NO: 384932 - DNA, 20 bp, Artificial Sequence
  Description of Artificial Sequence: Synthetic oligonucleotide
  Target: LAMA2; (+) strand; PAM type: YTN; PAM sequence: TTG
aacatgcctgggctacatga

SEQ ID NO: 384933 - DNA, 20 bp, Artificial Sequence
  Description of Artificial Sequence: Synthetic oligonucleotide
  Target: LAMA2; (+) strand; PAM type: YTN; PAM sequence: CTG
ggctacatgacttgcagctt

SEQ ID NO: 384934 - DNA, 20 bp, Artificial Sequence
  Description of Artificial Sequence: Synthetic oligonucleotide
  Target: LAMA2; (+) strand; PAM type: YTN; PAM sequence: CTA
catgacttgcagcttttggc

SEQ ID NO: 384935 - DNA, 20 bp, Artificial Sequence
  Description of Artificial Sequence: Synthetic oligonucleotide
  Target: LAMA2; (+) strand; PAM type: YTN; PAM sequence: CTT
gcagcttttggctctgttat

SEQ ID NO: 384936 - DNA, 20 bp, Artificial Sequence
  Description of Artificial Sequence: Synthetic oligonucleotide
  Target: LAMA2; (+) strand; PAM type: YTN; PAM sequence: TTG
cagcttttggctctgttata

SEQ ID NO: 384937 - DNA, 20 bp, Artificial Sequence
  Description of Artificial Sequence: Synthetic oligonucleotide
  Target: LAMA2; (+) strand; PAM type: YTN; PAM sequence: CTT
ttggctctgttatacctaaa

SEQ ID NO: 384938 - DNA, 20 bp, Artificial Sequence
  Description of Artificial Sequence: Synthetic oligonucleotide
  Target: LAMA2; (+) strand; PAM type: YTN; PAM sequence: TTT
tggctctgttatacctaaaa

SEQ ID NO: 384939 - DNA, 20 bp, Artificial Sequence
  Description of Artificial Sequence: Synthetic oligonucleotide
  Target: LAMA2; (+) strand; PAM type: YTN; PAM sequence: TTT
ggctctgttatacctaaaag

SEQ ID NO: 384940 - DNA, 20 bp, Artificial Sequence
  Description of Artificial Sequence: Synthetic oligonucleotide
  Target: LAMA2; (+) strand; PAM type: YTN; PAM sequence: TTG
gctctgttatacctaaaagg

SEQ ID NO: 384941 - DNA, 20 bp, Artificial Sequence
  Description of Artificial Sequence: Synthetic oligonucleotide
  Target: LAMA2; (+) strand; PAM type: YTN; PAM sequence: CTC
tgttatacctaaaaggtaac

SEQ ID NO: 384942 - DNA, 20 bp, Artificial Sequence
  Description of Artificial Sequence: Synthetic oligonucleotide
  Target: LAMA2; (+) strand; PAM type: YTN; PAM sequence: CTG
ttatacctaaaaggtaactt

SEQ ID NO: 384943 - DNA, 20 bp, Artificial Sequence
  Description of Artificial Sequence: Synthetic oligonucleotide
  Target: LAMA2; (+) strand; PAM type: YTN; PAM sequence: TTA
tacctaaaaggtaacttgac

SEQ ID NO: 384944 - DNA, 20 bp, Artificial Sequence
  Description of Artificial Sequence: Synthetic oligonucleotide
  Target: LAMA2; (+) strand; PAM type: YTN; PAM sequence: CTA
aaaggtaacttgacattttg

SEQ ID NO: 384945 - DNA, 20 bp, Artificial Sequence
  Description of Artificial Sequence: Synthetic oligonucleotide
  Target: LAMA2; (+) strand; PAM type: YTN; PAM sequence: CTT
gacattttgttatcaacagg

SEQ ID NO: 384946 - DNA, 20 bp, Artificial Sequence
  Description of Artificial Sequence: Synthetic oligonucleotide
  Target: LAMA2; (+) strand; PAM type: YTN; PAM sequence: TTG
acattttgttatcaacaggg

SEQ ID NO: 384947 - DNA, 20 bp, Artificial Sequence
  Description of Artificial Sequence: Synthetic oligonucleotide
  Target: LAMA2; (+) strand; PAM type: YTN; PAM sequence: TTT
tgttatcaacagggtaggcc

SEQ ID NO: 384948 - DNA, 20 bp, Artificial Sequence
  Description of Artificial Sequence: Synthetic oligonucleotide
  Target: LAMA2; (+) strand; PAM type: YTN; PAM sequence: TTT
gttatcaacagggtaggccc

SEQ ID NO: 384949 - DNA, 20 bp, Artificial Sequence
  Description of Artificial Sequence: Synthetic oligonucleotide
  Target: LAMA2; (+) strand; PAM type: YTN; PAM sequence: TTG
ttatcaacagggtaggcccg

SEQ ID NO: 384950 - DNA, 20 bp, Artificial Sequence
  Description of Artificial Sequence: Synthetic oligonucleotide
  Target: LAMA2; (+) strand; PAM type: YTN; PAM sequence: TTA
tcaacagggtaggcccggtt

SEQ ID NO: 384951 - DNA, 20 bp, Artificial Sequence
  Description of Artificial Sequence: Synthetic oligonucleotide
  Target: LAMA2; (+) strand; PAM type: YTN; PAM sequence: TTT
tggttggtcctgtagttaca

SEQ ID NO: 384952 - DNA, 20 bp, Artificial Sequence
  Description of Artificial Sequence: Synthetic oligonucleotide
  Target: LAMA2; (+) strand; PAM type: YTN; PAM sequence: TTT
ggttggtcctgtagttacac

SEQ ID NO: 384953 - DNA, 20 bp, Artificial Sequence
  Description of Artificial Sequence: Synthetic oligonucleotide
  Target: LAMA2; (+) strand; PAM type: YTN; PAM sequence: TTG
gttggtcctgtagttacact

SEQ ID NO: 384954 - DNA, 20 bp, Artificial Sequence
  Description of Artificial Sequence: Synthetic oligonucleotide
  Target: LAMA2; (+) strand; PAM type: YTN; PAM sequence: TTG
gtcctgtagttacactctca

SEQ ID NO: 384955 - DNA, 20 bp, Artificial Sequence
  Description of Artificial Sequence: Synthetic oligonucleotide
  Target: LAMA2; (+) strand; PAM type: YTN; PAM sequence: CTG
tagttacactctcagagtca

SEQ ID NO: 384956 - DNA, 20 bp, Artificial Sequence
  Description of Artificial Sequence: Synthetic oligonucleotide
  Target: LAMA2; (+) strand; PAM type: YTN; PAM sequence: TTA
cactctcagagtcattgatg

SEQ ID NO: 384957 - DNA, 20 bp, Artificial Sequence
  Description of Artificial Sequence: Synthetic oligonucleotide
  Target: LAMA2; (+) strand; PAM type: YTN; PAM sequence: CTC
tcagagtcattgatgaattt

SEQ ID NO: 384958 - DNA, 20 bp, Artificial Sequence
  Description of Artificial Sequence: Synthetic oligonucleotide
  Target: LAMA2; (+) strand; PAM type: YTN; PAM sequence: CTC
agagtcattgatgaattttg

SEQ ID NO: 384959 - DNA, 20 bp, Artificial Sequence
  Description of Artificial Sequence: Synthetic oligonucleotide
  Target: LAMA2; (+) strand; PAM type: YTN; PAM sequence: TTG
atgaattttgaccatcaata

SEQ ID NO: 384960 - DNA, 20 bp, Artificial Sequence
  Description of Artificial Sequence: Synthetic oligonucleotide
  Target: LAMA2; (+) strand; PAM type: YTN; PAM sequence: TTT
tgaccatcaataatgaaagc

SEQ ID NO: 384961 - DNA, 20 bp, Artificial Sequence
  Description of Artificial Sequence: Synthetic oligonucleotide
  Target: LAMA2; (+) strand; PAM type: YTN; PAM sequence: TTT
gaccatcaataatgaaagca

SEQ ID NO: 384962 - DNA, 20 bp, Artificial Sequence
  Description of Artificial Sequence: Synthetic oligonucleotide
  Target: LAMA2; (+) strand; PAM type: YTN; PAM sequence: TTG
accatcaataatgaaagcag

SEQ ID NO: 384963 - DNA, 20 bp, Artificial Sequence
  Description of Artificial Sequence: Synthetic oligonucleotide
  Target: LAMA2; (+) strand; PAM type: YTN; PAM sequence: TTT
gaatttacagttttaagaaa

SEQ ID NO: 384964 - DNA, 20 bp, Artificial Sequence
  Description of Artificial Sequence: Synthetic oligonucleotide
  Target: LAMA2; (+) strand; PAM type: YTN; PAM sequence: TTG
aatttacagttttaagaaat

SEQ ID NO: 384965 - DNA, 20 bp, Artificial Sequence
  Description of Artificial Sequence: Synthetic oligonucleotide
  Target: LAMA2; (+) strand; PAM type: YTN; PAM sequence: TTT
acagttttaagaaatttcaa

SEQ ID NO: 384966 - DNA, 20 bp, Artificial Sequence
  Description of Artificial Sequence: Synthetic oligonucleotide
  Target: LAMA2; (+) strand; PAM type: YTN; PAM sequence: TTA
cagttttaagaaatttcaag

SEQ ID NO: 384967 - DNA, 20 bp, Artificial Sequence
  Description of Artificial Sequence: Synthetic oligonucleotide
  Target: LAMA2; (+) strand; PAM type: YTN; PAM sequence: TTT
taagaaatttcaagaataaa

SEQ ID NO: 384968 - DNA, 20 bp, Artificial Sequence
  Description of Artificial Sequence: Synthetic oligonucleotide
  Target: LAMA2; (+) strand; PAM type: YTN; PAM sequence: TTT
aagaaatttcaagaataaaa

SEQ ID NO: 384969 - DNA, 20 bp, Artificial Sequence
  Description of Artificial Sequence: Synthetic oligonucleotide
  Target: LAMA2; (+) strand; PAM type: YTN; PAM sequence: TTA
agaaatttcaagaataaaat

SEQ ID NO: 384970 - DNA, 20 bp, Artificial Sequence
  Description of Artificial Sequence: Synthetic oligonucleotide
  Target: LAMA2; (+) strand; PAM type: YTN; PAM sequence: TTT
caagaataaaatgatagaat

SEQ ID NO: 384971 - DNA, 20 bp, Artificial Sequence
  Description of Artificial Sequence: Synthetic oligonucleotide
  Target: LAMA2; (+) strand; PAM type: YTN; PAM sequence: TTC
aagaataaaatgatagaata

SEQ ID NO: 384972 - DNA, 20 bp, Artificial Sequence
  Description of Artificial Sequence: Synthetic oligonucleotide
  Target: LAMA2; (+) strand; PAM type: YTN; PAM sequence: CTA
ccctgattggttagcaggat

SEQ ID NO: 384973 - DNA, 20 bp, Artificial Sequence
  Description of Artificial Sequence: Synthetic oligonucleotide
  Target: LAMA2; (+) strand; PAM type: YTN; PAM sequence: CTG
attggttagcaggatcaata

SEQ ID NO: 384974 - DNA, 20 bp, Artificial Sequence
  Description of Artificial Sequence: Synthetic oligonucleotide
  Target: LAMA2; (+) strand; PAM type: YTN; PAM sequence: TTG
gttagcaggatcaataacag

SEQ ID NO: 384975 - DNA, 20 bp, Artificial Sequence
  Description of Artificial Sequence: Synthetic oligonucleotide
  Target: LAMA2; (+) strand; PAM type: YTN; PAM sequence: TTA
gcaggatcaataacagggtg

SEQ ID NO: 384976 - DNA, 20 bp, Artificial Sequence
  Description of Artificial Sequence: Synthetic oligonucleotide
  Target: LAMA2; (+) strand; PAM type: YTN; PAM sequence: TTT
tcatttttgtttcattgttg

SEQ ID NO: 384977 - DNA, 20 bp, Artificial Sequence
  Description of Artificial Sequence: Synthetic oligonucleotide
  Target: LAMA2; (+) strand; PAM type: YTN; PAM sequence: TTT
catttttgtttcattgttgt

SEQ ID NO: 384978 - DNA, 20 bp, Artificial Sequence
  Description of Artificial Sequence: Synthetic oligonucleotide
  Target: LAMA2; (+) strand; PAM type: YTN; PAM sequence: TTC
atttttgtttcattgttgtt

SEQ ID NO: 384979 - DNA, 20 bp, Artificial Sequence
  Description of Artificial Sequence: Synthetic oligonucleotide
  Target: LAMA2; (+) strand; PAM type: YTN; PAM sequence: TTT
ttgtttcattgttgttttat

SEQ ID NO: 384980 - DNA, 20 bp, Artificial Sequence
  Description of Artificial Sequence: Synthetic oligonucleotide
  Target: LAMA2; (+) strand; PAM type: YTN; PAM sequence: TTT
tgtttcattgttgttttata

SEQ ID NO: 384981 - DNA, 20 bp, Artificial Sequence
  Description of Artificial Sequence: Synthetic oligonucleotide
  Target: LAMA2; (+) strand; PAM type: YTN; PAM sequence: TTT
gtttcattgttgttttatat

SEQ ID NO: 384982 - DNA, 20 bp, Artificial Sequence
  Description of Artificial Sequence: Synthetic oligonucleotide
  Target: LAMA2; (+) strand; PAM type: YTN; PAM sequence: TTG
tttcattgttgttttatatg

SEQ ID NO: 384983 - DNA, 20 bp, Artificial Sequence
  Description of Artificial Sequence: Synthetic oligonucleotide
  Target: LAMA2; (+) strand; PAM type: YTN; PAM sequence: TTT
cattgttgttttatatgatt

SEQ ID NO: 384984 - DNA, 20 bp, Artificial Sequence
  Description of Artificial Sequence: Synthetic oligonucleotide
  Target: LAMA2; (+) strand; PAM type: YTN; PAM sequence: TTC
attgttgttttatatgattt

SEQ ID NO: 384985 - DNA, 20 bp, Artificial Sequence
  Description of Artificial Sequence: Synthetic oligonucleotide
  Target: LAMA2; (+) strand; PAM type: YTN; PAM sequence: TTG
ttgttttatatgatttgtat

SEQ ID NO: 384986 - DNA, 20 bp, Artificial Sequence
  Description of Artificial Sequence: Synthetic oligonucleotide
  Target: LAMA2; (+) strand; PAM type: YTN; PAM sequence: TTG
ttttatatgatttgtataat

SEQ ID NO: 384987 - DNA, 20 bp, Artificial Sequence
  Description of Artificial Sequence: Synthetic oligonucleotide
  Target: LAMA2; (+) strand; PAM type: YTN; PAM sequence: TTT
tatatgatttgtataatttg

SEQ ID NO: 384988 - DNA, 20 bp, Artificial Sequence
  Description of Artificial Sequence: Synthetic oligonucleotide
  Target: LAMA2; (+) strand; PAM type: YTN; PAM sequence: TTT
atatgatttgtataatttga

SEQ ID NO: 384989 - DNA, 20 bp, Artificial Sequence
  Description of Artificial Sequence: Synthetic oligonucleotide
  Target: LAMA2; (+) strand; PAM type: YTN; PAM sequence: TTA
tatgatttgtataatttgag

SEQ ID NO: 384990 - DNA, 20 bp, Artificial Sequence
  Description of Artificial Sequence: Synthetic oligonucleotide
  Target: LAMA2; (+) strand; PAM type: YTN; PAM sequence: TTT
gtataatttgagtaaatttt

SEQ ID NO: 384991 - DNA, 20 bp, Artificial Sequence
  Description of Artificial Sequence: Synthetic oligonucleotide
  Target: LAMA2; (+) strand; PAM type: YTN; PAM sequence: TTG
tataatttgagtaaattttt

SEQ ID NO: 384992 - DNA, 20 bp, Artificial Sequence
  Description of Artificial Sequence: Synthetic oligonucleotide
  Target: LAMA2; (+) strand; PAM type: YTN; PAM sequence: TTT
gagtaaatttttatgcaaaa

SEQ ID NO: 384993 - DNA, 20 bp, Artificial Sequence
  Description of Artificial Sequence: Synthetic oligonucleotide
  Target: LAMA2; (+) strand; PAM type: YTN; PAM sequence: TTG
agtaaatttttatgcaaaag

SEQ ID NO: 384994 - DNA, 20 bp, Artificial Sequence
  Description of Artificial Sequence: Synthetic oligonucleotide
  Target: LAMA2; (+) strand; PAM type: YTN; PAM sequence: TTT
ttatgcaaaagaccctgaaa

SEQ ID NO: 384995 - DNA, 20 bp, Artificial Sequence
  Description of Artificial Sequence: Synthetic oligonucleotide
  Target: LAMA2; (+) strand; PAM type: YTN; PAM sequence: TTT
tatgcaaaagaccctgaaag

SEQ ID NO: 384996 - DNA, 20 bp, Artificial Sequence
  Description of Artificial Sequence: Synthetic oligonucleotide
  Target: LAMA2; (+) strand; PAM type: YTN; PAM sequence: TTT
atgcaaaagaccctgaaaga

SEQ ID NO: 384997 - DNA, 20 bp, Artificial Sequence
  Description of Artificial Sequence: Synthetic oligonucleotide
  Target: LAMA2; (+) strand; PAM type: YTN; PAM sequence: TTA
tgcaaaagaccctgaaagaa

SEQ ID NO: 384998 - DNA, 20 bp, Artificial Sequence
  Description of Artificial Sequence: Synthetic oligonucleotide
  Target: LAMA2; (+) strand; PAM type: YTN; PAM sequence: CTG
aaagaatcaaaatatcaaat

SEQ ID NO: 384999 - DNA, 20 bp, Artificial Sequence
  Description of Artificial Sequence: Synthetic oligonucleotide
  Target: LAMA2; (+) strand; PAM type: YTN; PAM sequence: TTA
aaatggcaagttcagtggct

SEQ ID NO: 385000 - DNA, 20 bp, Artificial Sequence
  Description of Artificial Sequence: Synthetic oligonucleotide
  Target: LAMA2; (+) strand; PAM type: YTN; PAM sequence: TTC
agtggctttcaaactttatt

SEQ ID NO: 385001 - DNA, 20 bp, Artificial Sequence
  Description of Artificial Sequence: Synthetic oligonucleotide
  Target: LAMA2; (+) strand; PAM type: YTN; PAM sequence: CTT
tcaaactttattgattgcat

SEQ ID NO: 385002 - DNA, 20 bp, Artificial Sequence
  Description of Artificial Sequence: Synthetic oligonucleotide
  Target: LAMA2; (+) strand; PAM type: YTN; PAM sequence: TTT
caaactttattgattgcatc

SEQ ID NO: 385003 - DNA, 20 bp, Artificial Sequence
  Description of Artificial Sequence: Synthetic oligonucleotide
  Target: LAMA2; (+) strand; PAM type: YTN; PAM sequence: TTC
aaactttattgattgcatcc

SEQ ID NO: 385004 - DNA, 20 bp, Artificial Sequence
  Description of Artificial Sequence: Synthetic oligonucleotide
  Target: LAMA2; (+) strand; PAM type: YTN; PAM sequence: CTT
tattgattgcatccactgta

SEQ ID NO: 385005 - DNA, 20 bp, Artificial Sequence
  Description of Artificial Sequence: Synthetic oligonucleotide
  Target: LAMA2; (+) strand; PAM type: YTN; PAM sequence: TTT
attgattgcatccactgtaa

SEQ ID NO: 385006 - DNA, 20 bp, Artificial Sequence
  Description of Artificial Sequence: Synthetic oligonucleotide
  Target: LAMA2; (+) strand; PAM type: YTN; PAM sequence: TTA
ttgattgcatccactgtaag

SEQ ID NO: 385007 - DNA, 20 bp, Artificial Sequence
  Description of Artificial Sequence: Synthetic oligonucleotide
  Target: LAMA2; (+) strand; PAM type: YTN; PAM sequence: TTG
attgcatccactgtaagata

SEQ ID NO: 385008 - DNA, 20 bp, Artificial Sequence
  Description of Artificial Sequence: Synthetic oligonucleotide
  Target: LAMA2; (+) strand; PAM type: YTN; PAM sequence: TTG
catccactgtaagatacact

SEQ ID NO: 385009 - DNA, 20 bp, Artificial Sequence
  Description of Artificial Sequence: Synthetic oligonucleotide
  Target: LAMA2; (+) strand; PAM type: YTN; PAM sequence: CTG
taagatacacttttttatat

SEQ ID NO: 385010 - DNA, 20 bp, Artificial Sequence
  Description of Artificial Sequence: Synthetic oligonucleotide
  Target: LAMA2; (+) strand; PAM type: YTN; PAM sequence: CTT
ttttatatcataagccagaa

SEQ ID NO: 385011 - DNA, 20 bp, Artificial Sequence
  Description of Artificial Sequence: Synthetic oligonucleotide
  Target: LAMA2; (+) strand; PAM type: YTN; PAM sequence: TTT
tttatatcataagccagaaa

SEQ ID NO: 385012 - DNA, 20 bp, Artificial Sequence
  Description of Artificial Sequence: Synthetic oligonucleotide
  Target: LAMA2; (+) strand; PAM type: YTN; PAM sequence: TTT
ttatatcataagccagaaac

SEQ ID NO: 385013 - DNA, 20 bp, Artificial Sequence
  Description of Artificial Sequence: Synthetic oligonucleotide
  Target: LAMA2; (+) strand; PAM type: YTN; PAM sequence: TTT
tatatcataagccagaaaca

SEQ ID NO: 385014 - DNA, 20 bp, Artificial Sequence
  Description of Artificial Sequence: Synthetic oligonucleotide
  Target: LAMA2; (+) strand; PAM type: YTN; PAM sequence: TTT
atatcataagccagaaacac

SEQ ID NO: 385015 - DNA, 20 bp, Artificial Sequence
  Description of Artificial Sequence: Synthetic oligonucleotide
  Target: LAMA2; (+) strand; PAM type: YTN; PAM sequence: TTA
tatcataagccagaaacaca

SEQ ID NO: 385016 - DNA, 20 bp, Artificial Sequence
  Description of Artificial Sequence: Synthetic oligonucleotide
  Target: LAMA2; (+) strand; PAM type: YTN; PAM sequence: CTT
gtgtgtgtagatatctaaat

SEQ ID NO: 385017 - DNA, 20 bp, Artificial Sequence
  Description of Artificial Sequence: Synthetic oligonucleotide
  Target: LAMA2; (+) strand; PAM type: YTN; PAM sequence: TTG
tgtgtgtagatatctaaata

SEQ ID NO: 385018 - DNA, 20 bp, Artificial Sequence
  Description of Artificial Sequence: Synthetic oligonucleotide
  Target: LAMA2; (+) strand; PAM type: YTN; PAM sequence: CTA
aatatatgtattatacacca

SEQ ID NO: 385019 - DNA, 20 bp, Artificial Sequence
  Description of Artificial Sequence: Synthetic oligonucleotide
  Target: LAMA2; (+) strand; PAM type: YTN; PAM sequence: TTA
tacaccatgccatttattta

SEQ ID NO: 385020 - DNA, 20 bp, Artificial Sequence
  Description of Artificial Sequence: Synthetic oligonucleotide
  Target: LAMA2; (+) strand; PAM type: YTN; PAM sequence: TTT
atttaattttgttattttac

SEQ ID NO: 385021 - DNA, 20 bp, Artificial Sequence
  Description of Artificial Sequence: Synthetic oligonucleotide
  Target: LAMA2; (+) strand; PAM type: YTN; PAM sequence: TTA
tttaattttgttattttaca

SEQ ID NO: 385022 - DNA, 20 bp, Artificial Sequence
  Description of Artificial Sequence: Synthetic oligonucleotide
  Target: LAMA2; (+) strand; PAM type: YTN; PAM sequence: TTT
aattttgttattttacattt

SEQ ID NO: 385023 - DNA, 20 bp, Artificial Sequence
  Description of Artificial Sequence: Synthetic oligonucleotide
  Target: LAMA2; (+) strand; PAM type: YTN; PAM sequence: TTA
attttgttattttacatttt

SEQ ID NO: 385024 - DNA, 20 bp, Artificial Sequence
  Description of Artificial Sequence: Synthetic oligonucleotide
  Target: LAMA2; (+) strand; PAM type: YTN; PAM sequence: TTT
tgttattttacatttttaga

SEQ ID NO: 385025 - DNA, 20 bp, Artificial Sequence
  Description of Artificial Sequence: Synthetic oligonucleotide
  Target: LAMA2; (+) strand; PAM type: YTN; PAM sequence: TTT
gttattttacatttttagaa

SEQ ID NO: 385026 - DNA, 20 bp, Artificial Sequence
  Description of Artificial Sequence: Synthetic oligonucleotide
  Target: LAMA2; (+) strand; PAM type: YTN; PAM sequence: TTG
ttattttacatttttagaaa

SEQ ID NO: 385027 - DNA, 20 bp, Artificial Sequence
  Description of Artificial Sequence: Synthetic oligonucleotide
  Target: LAMA2; (+) strand; PAM type: YTN; PAM sequence: TTA
ttttacatttttagaaaaaa

SEQ ID NO: 385028 - DNA, 20 bp, Artificial Sequence
  Description of Artificial Sequence: Synthetic oligonucleotide
  Target: LAMA2; (+) strand; PAM type: YTN; PAM sequence: TTT
tacatttttagaaaaaaaat

SEQ ID NO: 385029 - DNA, 20 bp, Artificial Sequence
  Description of Artificial Sequence: Synthetic oligonucleotide
  Target: LAMA2; (+) strand; PAM type: YTN; PAM sequence: TTT
acatttttagaaaaaaaatt

SEQ ID NO: 385030 - DNA, 20 bp, Artificial Sequence
  Description of Artificial Sequence: Synthetic oligonucleotide
  Target: LAMA2; (+) strand; PAM type: YTN; PAM sequence: TTA
catttttagaaaaaaaattt

SEQ ID NO: 385031 - DNA, 20 bp, Artificial Sequence
  Description of Artificial Sequence: Synthetic oligonucleotide
  Target: LAMA2; (+) strand; PAM type: YTN; PAM sequence: TTT
ttagaaaaaaaattttagcc

SEQ ID NO: 385032 - DNA, 20 bp, Artificial Sequence
  Description of Artificial Sequence: Synthetic oligonucleotide
  Target: LAMA2; (+) strand; PAM type: YTN; PAM sequence: TTT
tagaaaaaaaattttagcca

SEQ ID NO: 385033 - DNA, 20 bp, Artificial Sequence
  Description of Artificial Sequence: Synthetic oligonucleotide
  Target: LAMA2; (+) strand; PAM type: YTN; PAM sequence: TTT
agaaaaaaaattttagccaa

SEQ ID NO: 385034 - DNA, 20 bp, Artificial Sequence
  Description of Artificial Sequence: Synthetic oligonucleotide
  Target: LAMA2; (+) strand; PAM type: YTN; PAM sequence: TTA
gaaaaaaaattttagccaaa

SEQ ID NO: 385035 - DNA, 20 bp, Artificial Sequence
  Description of Artificial Sequence: Synthetic oligonucleotide
  Target: LAMA2; (+) strand; PAM type: YTN; PAM sequence: TTT
tagccaaaacctactcaatg

SEQ ID NO: 385036 - DNA, 20 bp, Artificial Sequence
  Description of Artificial Sequence: Synthetic oligonucleotide
  Target: LAMA2; (+) strand; PAM type: YTN; PAM sequence: TTT
agccaaaacctactcaatgg

SEQ ID NO: 385037 - DNA, 20 bp, Artificial Sequence
  Description of Artificial Sequence: Synthetic oligonucleotide
  Target: LAMA2; (+) strand; PAM type: YTN; PAM sequence: TTA
gccaaaacctactcaatgga

SEQ ID NO: 385038 - DNA, 20 bp, Artificial Sequence
  Description of Artificial Sequence: Synthetic oligonucleotide
  Target: LAMA2; (+) strand; PAM type: YTN; PAM sequence: CTA
ctcaatggatttcatgagtc

SEQ ID NO: 385039 - DNA, 20 bp, Artificial Sequence
  Description of Artificial Sequence: Synthetic oligonucleotide
  Target: LAMA2; (+) strand; PAM type: YTN; PAM sequence: CTC
aatggatttcatgagtcact

SEQ ID NO: 385040 - DNA, 20 bp, Artificial Sequence
  Description of Artificial Sequence: Synthetic oligonucleotide
  Target: LAMA2; (+) strand; PAM type: YTN; PAM sequence: TTT
catgagtcacttatatcacc

SEQ ID NO: 385041 - DNA, 20 bp, Artificial Sequence
  Description of Artificial Sequence: Synthetic oligonucleotide
  Target: LAMA2; (+) strand; PAM type: YTN; PAM sequence: TTC
atgagtcacttatatcacca

SEQ ID NO: 385042 - DNA, 20 bp, Artificial Sequence
  Description of Artificial Sequence: Synthetic oligonucleotide
  Target: LAMA2; (+) strand; PAM type: YTN; PAM sequence: CTT
atatcaccatctaaagcttg

SEQ ID NO: 385043 - DNA, 20 bp, Artificial Sequence
  Description of Artificial Sequence: Synthetic oligonucleotide
  Target: LAMA2; (+) strand; PAM type: YTN; PAM sequence: TTA
tatcaccatctaaagcttgg

SEQ ID NO: 385044 - DNA, 20 bp, Artificial Sequence
  Description of Artificial Sequence: Synthetic oligonucleotide
  Target: LAMA2; (+) strand; PAM type: YTN; PAM sequence: CTA
aagcttgggacgtattaggc

SEQ ID NO: 385045 - DNA, 20 bp, Artificial Sequence
  Description of Artificial Sequence: Synthetic oligonucleotide
  Target: LAMA2; (+) strand; PAM type: YTN; PAM sequence: CTT
gggacgtattaggctaatta

SEQ ID NO: 385046 - DNA, 20 bp, Artificial Sequence
  Description of Artificial Sequence: Synthetic oligonucleotide
  Target: LAMA2; (+) strand; PAM type: YTN; PAM sequence: TTG
ggacgtattaggctaattaa

SEQ ID NO: 385047 - DNA, 20 bp, Artificial Sequence
  Description of Artificial Sequence: Synthetic oligonucleotide
  Target: LAMA2; (+) strand; PAM type: YTN; PAM sequence: TTA
ggctaattaacaaagtgaag

SEQ ID NO: 385048 - DNA, 20 bp, Artificial Sequence
  Description of Artificial Sequence: Synthetic oligonucleotide
  Target: LAMA2; (+) strand; PAM type: YTN; PAM sequence: CTA
attaacaaagtgaagaccta

SEQ ID NO: 385049 - DNA, 20 bp, Artificial Sequence
  Description of Artificial Sequence: Synthetic oligonucleotide
  Target: LAMA2; (+) strand; PAM type: YTN; PAM sequence: TTA
acaaagtgaagacctataaa

SEQ ID NO: 385050 - DNA, 20 bp, Artificial Sequence
  Description of Artificial Sequence: Synthetic oligonucleotide
  Target: LAMA2; (+) strand; PAM type: YTN; PAM sequence: CTA
taaattgtgagaagagaaga

SEQ ID NO: 385051 - DNA, 20 bp, Artificial Sequence
  Description of Artificial Sequence: Synthetic oligonucleotide
  Target: LAMA2; (+) strand; PAM type: YTN; PAM sequence: TTG
tgagaagagaagaattaaaa

SEQ ID NO: 385052 - DNA, 20 bp, Artificial Sequence
  Description of Artificial Sequence: Synthetic oligonucleotide
  Target: LAMA2; (+) strand; PAM type: YTN; PAM sequence: TTA
aaatgtgaagcaaagaaacc

SEQ ID NO: 385053 - DNA, 20 bp, Artificial Sequence
  Description of Artificial Sequence: Synthetic oligonucleotide
  Target: LAMA2; (+) strand; PAM type: YTN; PAM sequence: CTT
ctccccaagacataaaaaca

SEQ ID NO: 385054 - DNA, 20 bp, Artificial Sequence
  Description of Artificial Sequence: Synthetic oligonucleotide
  Target: LAMA2; (+) strand; PAM type: YTN; PAM sequence: TTC
tccccaagacataaaaacag

SEQ ID NO: 385055 - DNA, 20 bp, Artificial Sequence
  Description of Artificial Sequence: Synthetic oligonucleotide
  Target: LAMA2; (+) strand; PAM type: YTN; PAM sequence: CTC
cccaagacataaaaacagat

SEQ ID NO: 385056 - DNA, 20 bp, Artificial Sequence
  Description of Artificial Sequence: Synthetic oligonucleotide
  Target: LAMA2; (+) strand; PAM type: YTN; PAM sequence: TTC
tgaggaatagatggaggagg

SEQ ID NO: 385057 - DNA, 20 bp, Artificial Sequence
  Description of Artificial Sequence: Synthetic oligonucleotide
  Target: LAMA2; (+) strand; PAM type: YTN; PAM sequence: CTG
aggaatagatggaggaggct

SEQ ID NO: 385058 - DNA, 20 bp, Artificial Sequence
  Description of Artificial Sequence: Synthetic oligonucleotide
  Target: LAMA2; (+) strand; PAM type: YTN; PAM sequence: CTG
agatatctcaatttatgact

SEQ ID NO: 385059 - DNA, 20 bp, Artificial Sequence
  Description of Artificial Sequence: Synthetic oligonucleotide
  Target: LAMA2; (+) strand; PAM type: YTN; PAM sequence: CTC
aatttatgacttcaatctgt

SEQ ID NO: 385060 - DNA, 20 bp, Artificial Sequence
  Description of Artificial Sequence: Synthetic oligonucleotide
  Target: LAMA2; (+) strand; PAM type: YTN; PAM sequence: TTT
atgacttcaatctgtgcagt

SEQ ID NO: 385061 - DNA, 20 bp, Artificial Sequence
  Description of Artificial Sequence: Synthetic oligonucleotide
  Target: LAMA2; (+) strand; PAM type: YTN; PAM sequence: TTA
tgacttcaatctgtgcagtc

SEQ ID NO: 385062 - DNA, 20 bp, Artificial Sequence
  Description of Artificial Sequence: Synthetic oligonucleotide
  Target: LAMA2; (+) strand; PAM type: YTN; PAM sequence: CTT
caatctgtgcagtcagtgag

SEQ ID NO: 385063 - DNA, 20 bp, Artificial Sequence
  Description of Artificial Sequence: Synthetic oligonucleotide
  Target: LAMA2; (+) strand; PAM type: YTN; PAM sequence: TTC
aatctgtgcagtcagtgaga

SEQ ID NO: 385064 - DNA, 20 bp, Artificial Sequence
  Description of Artificial Sequence: Synthetic oligonucleotide
  Target: LAMA2; (+) strand; PAM type: YTN; PAM sequence: CTG
tgcagtcagtgagaaatatg

SEQ ID NO: 385065 - DNA, 20 bp, Artificial Sequence
  Description of Artificial Sequence: Synthetic oligonucleotide
  Target: LAMA2; (+) strand; PAM type: YTN; PAM sequence: TTA
ctgactcatttccacggcat

SEQ ID NO: 385066 - DNA, 20 bp, Artificial Sequence
  Description of Artificial Sequence: Synthetic oligonucleotide
  Target: LAMA2; (+) strand; PAM type: YTN; PAM sequence: CTG
actcatttccacggcattag

SEQ ID NO: 385067 - DNA, 20 bp, Artificial Sequence
  Description of Artificial Sequence: Synthetic oligonucleotide
  Target: LAMA2; (+) strand; PAM type: YTN; PAM sequence: CTC
atttccacggcattagttca

SEQ ID NO: 385068 - DNA, 20 bp, Artificial Sequence
  Description of Artificial Sequence: Synthetic oligonucleotide
  Target: LAMA2; (+) strand; PAM type: YTN; PAM sequence: TTT
ccacggcattagttcaagtc

SEQ ID NO: 385069 - DNA, 20 bp, Artificial Sequence
  Description of Artificial Sequence: Synthetic oligonucleotide
  Target: LAMA2; (+) strand; PAM type: YTN; PAM sequence: TTC
cacggcattagttcaagtcc

SEQ ID NO: 385070 - DNA, 20 bp, Artificial Sequence
  Description of Artificial Sequence: Synthetic oligonucleotide
  Target: LAMA2; (+) strand; PAM type: YTN; PAM sequence: TTA
gttcaagtcctcattatctc

SEQ ID NO: 385071 - DNA, 20 bp, Artificial Sequence
  Description of Artificial Sequence: Synthetic oligonucleotide
  Target: LAMA2; (+) strand; PAM type: YTN; PAM sequence: TTC
aagtcctcattatctcttac

SEQ ID NO: 385072 - DNA, 20 bp, Artificial Sequence
  Description of Artificial Sequence: Synthetic oligonucleotide
  Target: LAMA2; (+) strand; PAM type: YTN; PAM sequence: CTC
attatctcttaccaaaacaa

SEQ ID NO: 385073 - DNA, 20 bp, Artificial Sequence
  Description of Artificial Sequence: Synthetic oligonucleotide
  Target: LAMA2; (+) strand; PAM type: YTN; PAM sequence: TTA
tctcttaccaaaacaaatat

SEQ ID NO: 385074 - DNA, 20 bp, Artificial Sequence
  Description of Artificial Sequence: Synthetic oligonucleotide
  Target: LAMA2; (+) strand; PAM type: YTN; PAM sequence: CTC
ttaccaaaacaaatatggta

SEQ ID NO: 385075 - DNA, 20 bp, Artificial Sequence
  Description of Artificial Sequence: Synthetic oligonucleotide
  Target: LAMA2; (+) strand; PAM type: YTN; PAM sequence: CTT
accaaaacaaatatggtaga

SEQ ID NO: 385076 - DNA, 20 bp, Artificial Sequence
  Description of Artificial Sequence: Synthetic oligonucleotide
  Target: LAMA2; (+) strand; PAM type: YTN; PAM sequence: TTA
ccaaaacaaatatggtagaa
